United States Patent Application Publication US 2009/0104218 A1 - sequence listing, part 2

SEQ ID NO: 3420 - protein, 212 aa, Streptococcus agalactiae
MIKSKILLQLMQGKIVAVIRGNSQEEAFQAAQACIKGGISAIEIAYTNSKASQVIEQLVTQYTNQEQVVVGAGTVLDSETARMAILAGAKFIVSPAFNLQTAKLCNRYAIPYLPGCMTLSEVTTALEAGCEIIKIFPGGTLGTSFISSLKAPLPQVQIMVTGGVNLTNAKDWFLSGVTAIGIGGEFNKLAALGEFDKITEMAKQYKIQLNLN

SEQ ID NO: 3421 - protein, 333 aa, Streptococcus agalactiae
TTGATGAATAAAAAACATAAATTACTTAAAAATATAGAGGAATTTAAGACGATAACCCAAAAAAGGCTAACTGAGAGAGGAAAGTTCCCATATGATACCGTTCATTCTACGTTTGAAATTAAGGATGAAAACTTTATCATGGAAAGATTGAAATCATCAGGGTTATCTATGGGTAAACCAGTTGATTATATGGGCGTAAATGGTATCCCTATTTACACTAAAACATTATCTATAGTTAATAAGTTTGCCTTTGAAAATAATTCAAAAGATTCTTCATATTCTTCAAACATTAATATTAGTGAAGANNNNNCATTCCATTCATTAATTAATTAA

SEQ ID NO: 3422 - protein, 110 aa, Streptococcus agalactiae
  VARIANT 102, 103, 104: Xaa = Any Amino Acid
MMNKKHKLLKNIEEFKTITQKRLTERGKFPYDTVHSTFEIKDENFIMERLKSSGLSMGKPVDYMGVNGIPIYTKTLSIVNKFAFENNSKDSSYSSNINISEXXXFHSLIN

SEQ ID NO: 3423 - protein, 828 aa, Streptococcus agalactiae
ATGNNNNNTTGGAAAAATGGTAATTACAAAACAACGTATTCCGATTTTATTAAAGAATACTGTATAGATGGTTATGACGTTTATGATCCCGCAAAAACAAATAATAGATTTAAAGTTAAGTATATGGAATCAAATGAAGCGTTTGAAAATTGGATACATAATAATGGAAGCAAATCTATGTTATTTATTAATGAATCTGCAGCTCTAAAAGATAAAAAACCAAAAGATGATTTTGTACCAGTAACAGAAAAAGAAAAAAACGAGCTGATAGATAAGTATAAAAAATTATTGTCACAGATTCCTGAAAACACACAAAATCCAGGAGAAAAAAACATAAGAGATTATTTGAAAAATGAATATGAAGAAATATTAAAGAAAGATAATTTATTTGAGCATGAACATGCAGAATTTAAAGAAAGTCTAAATTTAAATGAATCATTCTACCTACAATTAAAGAAAGAAGAAATGAAACCGAGTGATAATCTCAAAAAAGAAGAAAAACCAAGAGAAAATTCAGTAAAAGAGAGGGAGACTCCAGCTGAAAACAATGATTTTGTTTCAGTAACAGAAAAAAACAACTTGATTGATAAATATAAAGAATTATTATCAAAAATCCCAGAGAATACACAAAATCCTGGGGAAAAGAATATACGAAATTATCTAGAGAAAGAATATGAAGAACTACTACAAAAAGATAAATTATTCAAGCATGAGTACACAGAGTTTACAAAAAGTCTAAATTTGAATGAAACATTCTATTCACAATTAAAAGAAGGAGAAATGAAACTAAGTGAAAATCCCGAAAAAGGAGAAACGAACACGAATTAA

SEQ ID NO: 3424 - protein, 275 aa, Streptococcus agalactiae
  VARIANT 2, 3: Xaa = Any Amino Acid
MXXWKNGNYKTTYSDFIKEYCIDGYDVYDPAKTNNRFKVKYMESNEAFENWIHNNGSKSMLFINESAALKDKKPKDDFVPVTEKEKNELIDKYKKLLSQIPENTQNPGEKNIRDYLKNEYEEILKKDNLFEHEHAEFKESLNLNESFYLQLKKEEMKPSDNLKKEEKPRENSVKERETPAENNDFVSVTEKNNLIDKYKELLSKIPENTQNPGEKNIRNYLEKEYEELLQKDKLFKHEYTEFTKSLNLNETFYSQLKEGEMKLSENPEKGETNTN

SEQ ID NO: 3425 - protein, 615 aa, Streptococcus agalactiae
ATGTCATTTTTGGAAGAATTAAAAAACCGTCGCTCTATTTACGCTCTTGGTCGCAATACAGAAGTTTCTGATGAGAAAATAGTAGAGATTATTAAAGAGGCAGTTCGCCAATCCCCATCTGCTTTTAATAGTCAAACTTCCCGTGTTGTCATTTTATTGAATGATGAAGTTACTAAGTTCTGGGATGAATTGGTTGCTAATGATTTGGTAGAAACAATGAAAGTACAAGGTGCTCCAGAGACAGCTATTGCTGGAACTAAGGAAAAATTAGCTAGTTTTGGAGCTTCAAAGGGAACAGTACTCTTCTTTGAAGATCAAGATGTTGTCAAATCTCTTCAAGAACAATTCGTTCTTTATGCGGATAACTTTCCAGTTTGGTCTGAGCAATCAACAGGTATTGCCTCAGTAAATACTTGGACAGCCCTTTCTGCAGAACTTGGACTTGGTGGTAATTTACAACATTACAATCCAGTTATTGATGCATCAGTACAAGCTGTTTATGGTGTTCCAGCTAGTTGGAAACTTCGTGGACAACTAAATTTTGGTTCAATCGAAGCTGAAACAGGAGAAAAAGAATTCATGAATGATGATGACCGCTTTAAAGTCATCGGATAA

SEQ ID NO: 3426 - protein, 204 aa, Streptococcus agalactiae
MSFLEELKNRRSIYALGRNTEVSDEKIVEIIKEAVRQSPSAFNSQTSRVVILLNDEVTKFWDELVANDLVETMKVQGAPETAIAGTKEKLASFGASKGTVLFFEDQDVVKSLQEQFVLYADNFPVWSEQSTGIASVNTWTALSAELGLGGNLQHYNPVIDASVQAVYGVPASWKLRGQLNFGSIEAETGEKEFMNDDDRFKVIG

SEQ ID NO: 3427 - protein, 426 aa, Streptococcus agalactiae
ATGGGAAACTTTAAAAATTCAGCGGTTAAATCTATGGTTGTCATGCGAAAAGCATTTAGAACAATAGACGGAAAAGTCTCAGAATCATTTAAAGAATTTGAATTAACACCAACTCAGTTTGCAGTTTTGGATGTTCTCTATGCTAAAGGCACAATGAAAATTGGAGAATTGATTGAAAATATGCTTGCTACATCAGGTAATATGACTGTTGTTATTAAAAATATGGAAAAAAAGGGATGGGTATTACGCCATTCTTGTCCGAATGATAAGAGAGCCTTTTTGGTGAGTTTAACAACTGAAGGAGAAGAAGTGATAAAAAAAGCTCTACCAGAGCATATTAAACGTGTAGAAGATGCTTTTTCAGTCTTAACAGAAACAGAGCAAGAAGACTTGATTAACCTTTTAAAAAAATTTAAAACCTTGTGA

SEQ ID NO: 3428 - protein, 141 aa, Streptococcus agalactiae
MGNFKNSAVKSMVVMRKAFRTIDGKVSESFKEFELTPTQFAVLDVLYAKGTMKIGELIENMLATSGNMTVVIKNMEKKGWVLRHSCPNDKRAFLVSLTTEGEEVIKKALPEHIKRVEDAFSVLTETEQEDLINLLKKFKTL

SEQ ID NO: 3429 - protein, 4407 aa, Streptococcus agalactiae
ATGTCAGAATTGTTCAAGAAACTTATGGATCAGATTGAAATGCCGCTTGAAATTAAGAATTCAAGTGTTTTTTCGTCTGCTGATATTATCGAGGTAAAGGTTCATTCTCTATCACGCTTATGGGAATTTCATTTTTCATTTCCAGAATTATTGCCAATTGAGGTGTATCGTGAATTACAAACTCGTTTAGTGAATAGTTTTGAAAAAGCAGATATAAAGGCTACTTTTGATATAAGAGCAGAAACTATTGATTTTTCTGATGATCTGCTACAGGATTATTATCAACAAGCTTTTTGTGAACCCTTGTGTAATAGTGCAAGTTTTAAGAGTTCTTTTTCACAATTAAAAGTTCATTACAATGGCAGTCAGATGATTATTTCAGCACCTCAATTTGTCAATAATAATCATTTTCGTCAGAATCATTTGCCGCGTTTGGAACAACAGTTTTCATTGTTTGGATTTGGTAAACTTGCTATTGATATGGTTTCTGATGAACAAATGACGCAAGACTTAAAATCATCATTTGAAACTAATCGCGAGCAATTGCTTGAAAAAGCTAACCAAGAAGCTATGCAAGCCTTGGAAGCACAAAAATCACTAGAAGATTCAGCGCCTCCATCAGAAGAAGTGACCCCAACTCAAAATTATGATTTCAAAGAGCGTATCAAACAACGTCAAGCTGGCTTTGAAAAAGCAGAGATTACACCCATGATTGAGGTGACAACAGAAGAAAATCGTATCGTTTTTGAAGGAATGGTTTTTAGTGTTGAACGAAAAACAACCCGCACTGGACGTCATATCATTAATTTTAAGATGACTGATTATACCTCAAGTTTTGCTATGCAAAAGTGGGCTAAAGATGATGAAGAATTGAAGAAGTACGATATGATTTCTAAAGGTTCGTGGTTGCGAGTCAGAGGGAATATTGAGAACAATAACTTTACTAAATCTTTGACAATGAATGTTCAAGATATCAAAGAGATTGTGCATCATGAACGTAAAGACTTAATGCCAGCAGATCAAAAACGTGTGGAATTTCATGCTCATACCAATATGTCAACGATGGATGCTTTACCAACTGTCGAGAGCCTCATTGATACTGCAGCTAAGTGGGGACACCCAGCTATTGCAATTACTGACCATGCCAATGTTCAAAGTTTTCCGCATGGCTACCACAGAGCAAAAAAAGCAGGTATAAAAGCAATTTTTGGATTAGAGGCAAATATTGTTGAAGATAAAGTGCCTATTTCCTACAACGAAGTTGATATGAATTTGCACGAAGCAACTTATGTTGTATTTGATGTGGAAACTACAGGTCTTTCTGCAGCTAATAATGACCTAATTCAGATTGCAGCATCAAAAATGTTCAAGGGTAATATTATTGAGCAATTTGATGAGTTTATTGACCCAGGTCATCCTCTTTCTGCCTTTACAACTGAATTGACAGGTATTACGGATAATCATGTCAGAGGTTCAAAACCTATTTTACAAGTCCTTCAGGAATTTCAGAATTTTTGTCAAGGTACGGTTTTAGTTGCGCATAATGCAACCTTTGACGTTGGTTTTATGAATGCGAATTATGAACGTCATAATCTGCCTTTGATCACACAGCCGGTCATTGATACCTTAGAATTTGCAAGAAATCTTTATCCTGAATATAAGCGTCATGGTTTGGGGCCTCTAACCAAACGTTTCCAAGTTGCTTTGGAACATCATCATATGGCCAACTACGATGCTGAAGCAACGGGTCGCTTACTCTTTATTTTCTTAAAAGAGGCGCGGGAAAATCGTGATGTGACTAATTTGATGGAGCTCAATACTAAATTGGTAGCTGAAGACTCTTACAAAAAGGCACGCATAAAGCATGCAACCATTTATGTCCAAAATCAGGTTGGACTTAAAAATATATTTAAGTTAGTTAGCCTTTCAAATGTTAAATATTTTGAAGGGGTGGCAAGAATTCCTAGGTCAGTTTTAGATGCTCACAGAGAAGGTCTCTTGCTAGGTACTGCCTGTTCTGATGGAGAAGTTTTTGATGCCTTGTTATCAAATGGAATTGATGCAGCAGTGACCCTAGCTAAATATTATGATTTTATTGAAGTCATGCCACCTGCTATTTATCGCCCCTTGGTAGTACGTGATTTAATTAAAGATGAGGTGGGGATTCAACAAATTATTAGAGACCTAATAGAGGTCGGTCGGCGTTTAGATAAGCCTGTTTTAGCTACGGGAAATGTTCATTATATTGAGCCTGAAGATGAGATTTACCGTGAGATTATTGTTCGTAGTCTTGGACAAGGTGCCATGATTAATAGGACTATAGGTCGTGGGGAGGATGCTCAGCCAGCGCCTTTGCCAAAAGCACATTTCCGCACAACAAATGAGATGTTAGATGAATTTGCCTTTCTTGGTAAAGATTTAGCCTATGAGATCGTTGTAACCAATACGAATACTTTTGCAGATCGATTTGAAGACGTTGAAGTTGTAAAAGGGGATCTCTATACTCCGTTTGTTGATCGTGCTGAAGAACGAGTTGCTGAATTAACTTATGCTAAAGCATTCGAAATATATGGTAATCCTCTTCCTGATATTATTGATTTACGTATCGAAAAAGAGTTAGCATCTATACTTGGTAATGGATTTGCCGTTATCTATCTTGCTTCGCAAATGTTGGTGCAACGTTCTAATGAACGTGGTTATCTAGTAGGATCACGTGGGTCTGTTGGGTCGAGTTTTGTAGCGACCATGATAGGAATTACTGAAGTTAATCCAATGCCACCTCATTATGTTTGCCCAAATTGTCAGCATTCTGAATTTATCACAGATGGTTCTTGTGGTTCAGGCTATGATTTACCAAATAAAAATTGTCCTAAATGTGGTACTTTGTACAAGAAAGATGGACAGGATATTCCGTTTGAAACTTTCTTAGGATTTGATGGAGATAAGGTTCCTGATATTGATCTGAATTTCTCTGGAGATGATCAACCTTCTGCTCACTTAGACGTTCGTGATATCTTTGGAGAAGAATATGCTTTTCGTGCAGGAACGGTAGGTACCGTAGCTGAAAAAACTGCCTTTGGTTTTGTCAAAGGTTACGAACGAGATTACAATAAATTTTATAACGATGCAGAGGTCGAACGGTTAGCGACTGGTGCTGCGGGAGTTAAACGTTCTACAGGTCAACACCCCGGTGGTATTGTTGTTATTCCTAACTATATGGATGTTTATGATTTTACTCCGGTTCAATATCCAGCAGATGATATGACAGCTGCTTGGCAGACAACTCACTTCAATTTCCATGATATTGATGAGAATGTCTTGAAGTTAGATATTCTAGGACATGATGATCCTACTATGATTCGTAAACTTCAGGATTTATCAGGAATTGATCCATCAAATATCCTTCCAGATGATCCAGACGTTATGAAGTTATTTTCTGGTACGGAAGTTTTAGGAGTGACAGAAGAGCAAATTGGAACTCCTACAGGAATGCTTGGTATTCCAGAGTTTGGTACGAACTTTGTTCGTGGTATGGTGAACGAAACCCATCCAACCACATTTGCAGAATTGTTGCAACTGTCAGGGCTATCACATGGTACGGATGTTTGGTTAGGTAATGCTCAAGACTTAATCAAGGAAGGTATTGCTACCTTATCAACTGTTATTGGTTGTCGTGATGACATCATGGTTTATTTAATGCACGCTGGCCTACAACCAAAGATGGCCTTTACAATCATGGAGCGCGTGCGTAAGGGGTTATGGTTGAAAATTTCAGAAGATGAGCGTAATGGTTATATCCAAGCAATGCGTGATAATAATGTCCCGGATTGGTATATTGAATCGTGTGGAAAAATCAAGTATATGTTCCCTAAAGCCCATGCAGCAGCCTATGTTTTAATGGCATTACGTGTGGCGTACTTTAAAGTACATTATCCAATATTTTATTATTGTGCTTATTTTTCTATTCGCGCCAAAGCTTTTGAATTACGCACAATGAGTGCTGGACTTGATGCCGTTAAGGCGCGCATGAAGGATATCACTGAGAAGCGTCAGCGTAATGAGGCGACGAATGTCGAAAATGATCTTTTTACGACATTAGAGTTGGTTAATGAAATGCTTGAGCGTGGCTTTAAATTTGGGAAATTAGATCTTTATCGTAGCCATGCGACTGACTTTATTATTGAAGAGGATACGCTAATCCCTCCATTTGTTGCTATGGAAGGCTTGGGAGAAAACGTTGCAAAACAGATAGTTCGGGCACGTGAAGATGGTGAATTTTTATCAAAAACAGAGCTTCGTAAACGAGGAGGAGTCTCAAGTACCTTAGTTGAAAAATTTGATGAGATGGGTATTTTGGGAAATTTACCAGAAGACAATCAGTTGAGTCTTTTTGATGATTTCTTCTAA

SEQ ID NO: 3430 - protein, 1468 aa, Streptococcus agalactiae
MSELFKKLMDQIEMPLEIKNSSVFSSADIIEVKVHSLSRLWEFHFSFPELLPIEVYRELQTRLVNSFEKADIKATFDIRAETIDFSDDLLQDYYQQAFCEPLCNSASFKSSFSQLKVHYNGSQMIISAPQFVNNNHFRQNHLPRLEQQFSLFGFGKLAIDMVSDEQMTQDLKSSFETNREQLLEKANQEAMQALEAQKSLEDSAPPSEEVTPTQNYDFKERIKQRQAGFEKAEITPMIEVTTEENRIVFEGMVFSVERKTTRTGRHIINFKMTDYTSSFAMQKWAKDDEELKKYDMISKGSWLRVRGNIENNNFTKSLTMNVQDIKEIVHHERKDLMPADQKRVEFHAHTNMSTMDALPTVESLIDTAAKWGHPAIAITDHANVQSFPHGYHRAKKAGIKAIFGLEANIVEDKVPISYNEVDMNLHEATYVVFDVETTGLSAANNDLIQIAASKMFKGNIIEQFDEFIDPGHPLSAFTTELTGITDNHVRGSKPILQVLQEFQNFCQGTVLVAHNATFDVGFMNANYERHNLPLITQPVIDTLEFARNLYPEYKRHGLGPLTKRFQVALEHHHMANYDAEATGRLLFIFLKEARENRDVTNLMELNTKLVAEDSYKKARIKHATIYVQNQVGLKNIFKLVSLSNVKYFEGVARIPRSVLDAHREGLLLGTACSDGEVFDALLSNGIDAAVTLAKYYDFIEVMPPAIYRPLVVRDLIKDEVGIQQIIRDLIEVGRRLDKPVLATGNVHYIEPEDEIYREIIVRSLGQGAMINRTIGRGEDAQPAPLPKAHFRTTNEMLDEFAFLGKDLAYEIVVTNTNTFADRFEDVEVVKGDLYTPFVDRAEERVAELTYAKAFEIYGNPLPDIIDLRIEKELASILGNGFAVIYLASQMLVQRSNERGYLVGSRGSVGSSFVATMIGITEVNPMPPHYVCPNCQHSEFITDGSCGSGYDLPNKNCPKCGTLYKKDGQDIPFETFLGFDGDKVPDIDLNFSGDDQPSAHLDVRDIFGEEYAFRAGTVGTVAEKTAFGFVKGYERDYNKFYNDAEVERLATGAAGVKRSTGQHPGGIVVIPNYMDVYDFTPVQYPADDMTAAWQTTHFNFHDIDENVLKLDILGHDDPTMIRKLQDLSGIDPSNILPDDPDVMKLFSGTEVLGVTEEQIGTPTGMLGIPEFGTNFVRGMVNETHPTTFAELLQLSGLSHGTDVWLGNAQDLIKEGIATLSTVIGCRDDIMVYLMHAGLQPKMAFTIMERVRKGLWLKISEDERNGYIQAMRDNNVPDWYIESCGKIKYMFPKAHAAAYVLMALRVAYFKVHYPIFYYCAYFSIRAKAFELRTMSAGLDAVKARMKDITEKRQRNEATNVENDLFTTLELVNEMLERGFKFGKLDLYRSHATDFIIEEDTLIPPFVAMEGLGENVAKQIVRAREDGEFLSKTELRKRGGVSSTLVEKFDEMGILGNLPEDNQLSLFDDFF

SEQ ID NO: 3431 - protein, 585 aa, Streptococcus agalactiae
ATGAAAAGTCGAAAAAAAGATAAATTGGTATTGAGGTTAACAACAACACTATTGGTTTTTGGTTTGGGTGGGGTTTGGTTTTATAATTATAAAAATGATAATGTCGAACCGACAGTCACTAGTGCATCGGATCAAACGACGACTTTTATTCAAACGATTTCTCCAACAGCTATTGAAATTTCTAAGACCTATGATTTGTATGCGTCAGTCTTATTAGCACAAGCTATTTTGGAATCATCCAGTGGACAATCAGATTTGTCTAAGGCTCCTAATTATAACCTCTTTGGCATCAAAGGAGAATATAAAGGTAAATCTGTCCAAATGCCTACTTTAGAAGATGATGGGAAAGGCAATATGACTCAAATCCAAGCTCCTTTTCGCGCCTATCCAAATTATTCTGCTTCACTATATGATTATGCTGAGTTAGTATCTAGTCAAAAGTATGCATCTGTTTGGAAATCAAATACCTCTTCTTATAAGGATGCTACTGCAGCTCTAACAGGTCTTTATGCGACAGATACTGCTTATGCTAGTAAATTAAACCAAATTATTGAAACCTACAGTCTAGATGCTTATGATAAATAG

SEQ ID NO: 3432 - protein, 194 aa, Streptococcus agalactiae
MKSRKKDKLVLRLTTTLLVFGLGGVWFYNYKNDNVEPTVTSASDQTTTFIQTISPTAIEISKTYDLYASVLLAQAILESSSGQSDLSKAPNYNLFGIKGEYKGKSVQMPTLEDDGKGNMTQIQAPFRAYPNYSASLYDYAELVSSQKYASVWKSNTSSYKDATAALTGLYATDTAYASKLNQIIETYSLDAYDK

SEQ ID NO: 3433 - protein, 1854 aa, Streptococcus agalactiae
ATGAAACAAAGTAAAATGCTTATTCCAACACTTCGCGAAATGCCAAGTGATGCTCAGGTTATCAGCCATGCTCTTATGGTTCGTGCAGGATATGTCCGCCAAGTTTCGGCTGGAATCTATGCTTATTTGCCTCTAGCTAACCGTACTATTGAAAAATTTAAAACAATTATGCGTCAAGAATTTGAGAAGATTGGTGCAGTTGAAATGTTAGCTCCAGCTCTTCTTACAGCAGATTTATGGCGTGAATCTGGGCGCTACGAAACATATGGTGAAGACCTTTATAAATTAAAGAATCGTGATCAATCGGATTTTATCTTAGGACCAACTCATGAAGAGACTTTCACAACTCTTGTTCGTGATGCAGTAAAATCTTATAAGCAATTACCACTAAACCTTTATCAAATTCAGTCTAAATATCGTGATGAGAAGCGTCCTCGTAATGGACTTCTTCGAACACGTGAATTTATCATGAAAGATGGATACAGCTTCCACAAAGATTATGAAGACCTTGATGTCACTTACGAAGATTACCGTAAAGCATATGAAGCCATCTTCACACGTGCTGGACTTGACTTTAAAGGCATTATAGGTGACGGAGGTGCTATGGGAGGTAAAGATAGCCAAGAATTTATGGCAGTAACTCCCAATCGTACAGATTTAAATCGTTGGTTAGTCCTTGATAAAACTATTCCTTCTATTGATGATATTCCAGAGGATGTTTTAGAAGAAATTAAGGTAGAACTCTCGGCTTGGCTAGTTTCTGGTGAGGACACTATTGCATACTCTACTGAATCAAGCTATGCTGCTAACCTTGAGATGGCAACGAATGAGTACAAACCATCTACTAAGGCTGCTACCTTTGAAGAAGTAACAAAAGTAGAAACTCCTAACTGCAAATCAATTGATGAGGTAGCTGGATTTTTATCAATTGATGAAAATCAAACTATCAAGACACTATTGTTTATTGCTGATGAACAGCCCGTGGTTGCTTTACTAGTTGGTAACGATCAAGTCAATGATGTGAAGTTAAAAAATTATTTAGCGGCTGATTTCTTAGAGCCTGCAAGTGAAGAGCAAGCAAAAGAGATTTTTGGTGCAGGTTTTGGTTCTCTTGGGCCAGTTAACCTACCTGACTCTGTTAAAATTATTGCTGATCGTAAAGTTCAAGACCTTGCTAATGCTGTGTCTGGTGCTAACCAAGATGGTTATCATTTTACTGGAGTTAATCCAGAACGTGATTTCACAGCTGAATACGTTGATATTCGTGAAGTAAAAGAAGGGGAGATTTCTCCAGACGGTAAAGGTACTCTGAAATTTGCTCGTGGTATTGAAATTGGACATATCTTTAAACTAGGTACCCGTTATTCAGATAGTATGGGAGCGAACATCCTTGATGAAAATGGCCGCTCAAATCCTATTGTTATGGGGTGTTATGGTATTGGTGTTAGTCGTATTCTCTCAGCTGTCATTGAACAACATGCCCGACTTTTTGTGAATAAGACACCAAAAGGAGCTTATCGCTTTGCTTGGGGGATTAATTTCCCAGAAGAATTAGCCCCATTTGATGTACATTTGATTACTGTCAATGTCAAAGATCAAGAGTCACAAGACCTTACTGAGAAAATTGAAGCTGATTTGATGCTTAAAGGTTATGAAGTCCTGACAGACGATCGTAATGAACGTGTTGGTTCTAAATTCTCAGACAGTGACTTAATTGGACTTCCAATTCGAGTAACTGTTGGGAAGAAAGCTTCTGAAGGTATCGTTGAAGTGAAAATTAAAGCAAGTGGTGATACGATTGAGGTTCACGCTGATAACTTAATTGAAACTTTAGAGATTCTAACAAAAAAATAA

SEQ ID NO: 3434 - protein, 617 aa, Streptococcus agalactiae
MKQSKMLIPTLREMPSDAQVISHALMVRAGYVRQVSAGIYAYLPLANRTIEKFKTIMRQEFEKIGAVEMLAPALLTADLWRESGRYETYGEDLYKLKNRDQSDFILGPTHEETFTTLVRDAVKSYKQLPLNLYQIQSKYRDEKRPRNGLLRTREFIMKDGYSFHKDYEDLDVTYEDYRKAYEAIFTRAGLDFKGIIGDGGAMGGKDSQEFMAVTPNRTDLNRWLVLDKTIPSIDDIPEDVLEEIKVELSAWLVSGEDTIAYSTESSYAANLEMATNEYKPSTKAATFEEVTKVETPNCKSIDEVAGFLSIDENQTIKTLLFIADEQPVVALLVGNDQVNDVKLKNYLAADFLEPASEEQAKEIFGAGFGSLGPVNLPDSVKIIADRKVQDLANAVSGANQDGYHFTGVNPERDFTAEYVDIREVKEGEISPDGKGTLKFARGIEIGHIFKLGTRYSDSMGANILDENGRSNPIVMGCYGIGVSRILSAVIEQHARLFVNKTPKGAYRFAWGINFPEELAPFDVHLITVNVKDQESQDLTEKIEADLMLKGYEVLTDDRNERVGSKFSDSDLIGLPIRVTVGKKASEGIVEVKIKASGDTIEVHADNLIETLEILTKK

SEQ ID NO: 3435 - protein, 1260 aa, Streptococcus agalactiae
ATGCTAGGAATTTTAACCTTTATTATTATTTTTGGTGTCATTGTAGTTGTTCACGAATTTGGGCATTTCTATTTTGCAAAGAAATCAGGAATTCTTGTTCGTGAATTTGCTATTGGTATGGGTCCAAAAATCTTTTCTCACATTGATAAAGAAGGAACAACCTATACTATTCGTATATTACCGCTAGGTGGTTATGTCCGTATGGCTGGTTGGGGTGATGATAAGACTGAAATTAAGACAGGGACGCCGGCTAGCCTTACTTTAAATAAAGAAGGCATTGTAACTCGTATTAATTTATCAGGAAAACAATTAGACAATACTTCTTTACCAATCAATGTAACAGCTTATGATTTAGAAGATAAACTAACTATCACAGGATTGGTCTTAAGTGAGACAAAAACCTATAGTGTTGATCACGATGCTACTATCATTGAGGAGGATGGTACTGAAATTCGTATTGCTCCCTTAGATATGCAGTATCAGAATGCTTCTGTATGGGGGCGCTTAATTACCAATTTTGCAGGTCCGATGAATAATTTTATTTTAGGTCTTGTAGTCTTTATTGCACTTGCTTTTATTCAAGGAGGTGTTCAAGACTTATCAACCAATCAGGTCCGTGTATCAGAAAATGGTCCTGCCGCTAGTGCAGGTTTAAAAAATAATGATCGTATTTTACAAATAGGGTCGCACAAAGTTTCTAACTGGGAACAGTTGACAGCAGCAGTAGAAAAGTCAACTAGGCATTTAGAAAAAAAACAAAAACTTGCCCTTAAGATTAAGAGCAAAGAGGTGGTGAAAACGATCAACGTTAAGCCACAGAAAGTTGATAAATCCTACATCATCGGCATTATGCCAGCTTTAAAGACAAGCTTTAAAGACAAACTTTTAGGTGGATTAAAACTAGCATGGGAAAGTTTCTTTAGAATTTTAAATGAATTAAAGAAACTTATTGCTCATTTTAGTATTAATAAATTGGGAGGTCCAGTAGCTCTCTATCAGGCTAGTAGCCAAGCTGCTAAAAATGGTTTCGTCACAGTTCTCAACTTAATGGGATTAATCTCTATCAACTTAGGTATTATGAATCTCATCCCTATACCAGCCCTTGACGGGGGTAAGATAGTGATGAATATTTTAGAAGCCATTCGTCGCAAACCACTTAAACAAGAAACAGAAACTTATATTACGCTCGCTGGGGTAGCAGTTATGTTAGTATTAATGATTGCTGTGACCTGGAACGATATCATGCGAGCTTTCTTCTAA

SEQ ID NO: 3436 - protein, 419 aa, Streptococcus agalactiae
MLGILTFIIIFGVIVVVHEFGHFYFAKKSGILVREFAIGMGPKIFSHIDKEGTTYTIRILPLGGYVRMAGWGDDKTEIKTGTPASLTLNKEGIVTRINLSGKQLDNTSLPINVTAYDLEDKLTITGLVLSETKTYSVDHDATIIEEDGTEIRIAPLDMQYQNASVWGRLITNFAGPMNNFILGLVVFIALAFIQGGVQDLSTNQVRVSENGPAASAGLKNNDRILQIGSHKVSNWEQLTAAVEKSTRHLEKKQKLALKIKSKEVVKTINVKPQKVDKSYIIGIMPALKTSFKDKLLGGLKLAWESFFRILNELKKLIAHFSINKLGGPVALYQASSQAAKNGFVTVLNLMGLISINLGIMNLIPIPALDGGKIVMNILEAIRRKPLKQETETYITLAGVAVMLVLMIAVTWNDIMRAFF

SEQ ID NO: 3437 - protein, 795 aa, Streptococcus agalactiae
ATGAAAGAACGTGTTATTTGGGGAGCTGTCGCGCTTGCCATATTTATCCCTTTTTTAGTAATGGGTGGTTTGCCTTTCCAATTTTTAGTTGGACTTTTAGCTATGATTGGTGTTTCTGAATTACTTCGTATGCGTCGTTTAGAAATATTTTCCTTTGAAGGTGCATTAGCTATGATAGGAGCCTTTGTTTTAACAGTTCCTTTAGATAGTTATTTGTCCTTTTTACCAGTTGACGCTAGTTTATCAGCATACGGTATTGTTATTTTTATGATTTTGGCAGGTACTGTTTTGAACAGTAATTCTTACAGTTTTGAAGATGCTGCCTTTCCAATTGCGTCTAGTTTTTATGTGGGTATTGGCTTTCAAAATCTAGTCAGTGCTCGTATGGCTGGAATAGATAAGGTGTTGTTAGCTTTATTTATTGTCTGGGCGACTGATATCGGTGCTTATATGATTGGTCGTCAATTTGGACAACGCAAACTACTACCCTCAGTGTCTCCAAATAAAACAATTGAAGGGAGTCTAGGAGGGATTGCTTCAGCCATTGTGGTAGCTTTCTTTTTTATGCTTTTTGATAAGACCGTCTATGCGCCTCATAGCTTCCTAGTCATGTTAGTTTTAGTGGCTATCTTTAGCATTTTTGGTCAATTTGGAGATTTAGTTGAAAGTAGTATTAAACGTCATTTTGGTGTTAAAGATTCGGGTAAATTGATTCCGGGTCATGGGGGGATTTTGGATCGCTTTGATAGTATGATTTTTGTTTTCCCAATCATGCACTTCTTTGGCTTATTCTAA

SEQ ID NO: 3438 - protein, 264 aa, Streptococcus agalactiae
MKERVIWGAVALAIFIPFLVMGGLPFQFLVGLLAMIGVSELLRMRRLEIFSFEGALAMIGAFVLTVPLDSYLSFLPVDASLSAYGIVIFMILAGTVLNSNSYSFEDAAFPIASSFYVGIGFQNLVSARMAGIDKVLLALFIVWATDIGAYMIGRQFGQRKLLPSVSPNKTIEGSLGGIASAIVVAFFFMLFDKTVYAPHSFLVMLVLVAIFSIFGQFGDLVESSIKRHFGVKDSGKLIPGHGGILDRFDSMIFVFPIMHFFGLF

SEQ ID NO: 3439 - protein, 681 aa, Streptococcus agalactiae
ATGGATGGTAACGGACGTTGGGCAAAAAAACGTTTAAAACCACGCGTTATGGGACATAAGGCGGGGATGGATGCTCTTCAAGAAGTTACAATAGCAGCTTCAGGATTAGGTGTTAAAGTACTAACTGTCTATGCCTTTTCTACAGAAAATTGGTCACGTCCAGATGATGAAGTTAAGTTTATTATGAACCTTCCGGTTGAATTTTTTGATAAATATGTACCAGAGTTAGATAAAAATAATGTACGTGTACAGGTCATCGGAGATACTCATAAATTACCTAAGGCAACATACGATGCAATGCAACGCGCTTGTTTGAGGACAAAACATAATTCGGGGCTCGTCTTGAATTTTGCGCTAAATTATGGCGGACGTTCAGAAATCACTAATGCCATTAAGGAAATTGCTCAGGATGTTTTGGAAGCTAAGTTGAATCCTGACGATATTACAGAGGATTTAGTAGCAAATCATTTAATGACAAATAGCTTACCCTATCTTTATAGAGACCCTGATTTGATTATCCGAACTAGTGGAGAGTTACGCTTGAGTAACTTTTTACCTTGGCAATCAGCTTATAGTGAATTTTACTTTACTCCCGTTTTATGGCCAGATTTTAAAAAAGACGAACTACATAAGGCCATTGTGGATTATAATCAACGCCATCGTCGATTTGGTAGTGTATAG

SEQ ID NO: 3440 - protein, 226 aa, Streptococcus agalactiae
MDGNGRWAKKRLKPRVMGHKAGMDALQEVTIAASGLGVKVLTVYAFSTENWSRPDDEVKFIMNLPVEFFDKYVPELDKNNVRVQVIGDTHKLPKATYDAMQRACLRTKHNSGLVLNFALNYGGRSEITNAIKEIAQDVLEAKLNPDDITEDLVANHLMTNSLPYLYRDPDLIIRTSGELRLSNFLPWQSAYSEFYFTPVLWPDFKKDELHKAIVDYNQRHRRFGSV

SEQ ID NO: 3441 - protein, 306 aa, Streptococcus agalactiae
ATGTATTCTTTTGAAGAACTTTTGGCAACCATGACTTTGATAACGGCTGCCGAAATTGAAGATAAAATTGATTCAAATCAAGATTTTGTACTGTTCATTGGTCGTATTTCTTGTCCATTTTGTCACCTCTTTGTTCCTAAAATTGTAGAAGTAGCTGATGAAGATGAATTTGAATTATTCCATTTAGATAGTGAAGATTTTGATCATTGGACTGCAAATAAAGAATTTCGAAATAAATATGACATTCCTACAGTGCCAGGTTTGATGGTTGTTAAAAACGGAANNNNNCATTCATTCATTAATTAA

SEQ ID NO: 3442 - protein, 101 aa, Streptococcus agalactiae
  VARIANT 95, 96: Xaa = Any Amino Acid
MYSFEELLATMTLITAAEIEDKIDSNQDFVLFIGRISCPFCHLFVPKIVEVADEDEFELFHLDSEDFDHWTANKEFRNKYDIPTVPGLMVVKNGXXHSFIN

SEQ ID NO: 3443 - protein, 1164 aa, Streptococcus agalactiae
ATGAGTGAAAATTTAGGTCAATTAGCTATCAACCAAGCTAGAGAAAATGGTGGAAAATTAGAAGTAATTTCAAAAGTTAAGGTGGAAGATAAGAGGGATCTTAGTATTGCCTATACCCCAGGGGTGGCGTCAGTATCATCAGCTATTGCAGAGGATGTGGAGCTTGCATATGAGTTGACGACTAAAAAAAATACAGTAGCCGTAGTGAGTGATGGTTCAGCTGTTCTTGGATTAGGAGATATTGGTCCTGAGGCAGCAATGCCAGTCATGGAAGGTAAAGCAGCACTCTTTAAACGTTTTGCAAATGTAGATGCTGTGCCAATTGTGTTGAAAACAAATGATACAGAGGAAATTATTTCTATAGTAAAAGCTATTTCGCCGACTTTTGGAGGGATTAATTTAGAGGATATTTCAGCACCACGTTGTTTCGAAATTGAACAACGCCTAATTGAAGAATGTGATATACCAGTTTTCCATGATGACCAACATGGTACAGCAATCGTAGTATTAGCGGCTTTGTTTAACAGTTTGAAGCTAGTTAAAAAAGACATTGAAGACATCAGAGTAGTTGTTAATGGTGGAGGTTCAGCGGGCTTATCTATAACAAGGAAGCTTCTATCAGCAGGAGCAAAACATGTAACGGTAGTTGATCGATTTGGCATTATTAACGATAAAGATCGGGAGTCATTAGCCCCTCATCACAAAGCGATTGCAAAATTGACTAATAGAGAATTCCAATCTGGATCCTTAGAAGATGCTTTGGAGAATGCCGATGTTTTTATAGGTGTTTCTGCTCCGGAAGCATTACATGCAGAATGGATTTCCAAGATGGCTGATAAACCTATTGTATTTGCAATGGCGAATCCTATTCCAGAAATTTATCCAGATCAAGCCTTAAAAGCCGGAGCTTACATAGTTGGAACTGGTCGTAGTGATTTTCCAAATCAAATTAATAATGTTTTAGCATTTCCGGGTATTTTCAGAGGAGCATTAGATGCTAGAGCAAAAACGATAACTGTTGAAATGCAAATTGCGGCAGCGAGAGGCATAGCTAGTTTAATACCGGAGGAAGAATTAAGCACAACTCACATCATTCCAAATGCTTTTCAAAATGATGTGGCCGATGTAGTTGCTAAAAGCGTCAGTAATGCTGTACAAAAATAA

SEQ ID NO: 3444 - protein, 387 aa, Streptococcus agalactiae
MSENLGQLAINQARENGGKLEVISKVKVEDKRDLSIAYTPGVASVSSAIAEDVELAYELTTKKNTVAVVSDGSAVLGLGDIGPEAAMPVMEGKAALFKRFANVDAVPIVLKTNDTEEIISIVKAISPTFGGINLEDISAPRCFEIEQRLIEECDIPVFHDDQHGTAIVVLAALFNSLKLVKKDIEDIRVVVNGGGSAGLSITRKLLSAGAKHVTVVDRFGIINDKDRESLAPHHKAIAKLTNREFQSGSLEDALENADVFIGVSAPEALHAEWISKMADKPIVFAMANPIPEIYPDQALKAGAYIVGTGRSDFPNQINNVLAFPGIFRGALDARAKTITVEMQIAAARGIASLIPEEELSTTHIIPNAFQNDVADVVAKSVSNAVQK

SEQ ID NO: 3445 - protein, 1338 aa, Streptococcus agalactiae
ATGGCAGACGTGAAGGTAGTGAATAATGAGGATTCTAGAGGTCAAAAGCAAGACTTAAAGGCTAAACTATTTCATATTAAGATAGGGTCAGTTCCCCTACCAGTATATGTTTGTTTAGCATTATTGATTCTTCTAGCAGGCTTTTTACAAAAATTGCCAGTCAATATGCTAGGAGGATTTGCAGTTATCTTAACAATGGGGTGGTTCTTAGGGACTATCGGAGCTAGCATTCCTGGTTTTAAAAACTTCGGTGGCCCAGCTATTTTATCTTTATTAGTACCATCTATTTTGGTGTTTTTCAACCTCATTAATAAAAATGTTTTAGAATCAACAAATATGTTGATGAAGCAAGCTAACTTTCTTTATTTTTATATTGCTTGTTTAGTGTCCGGTAGTATTTTAGGGATGAATCGGAAAATGTTGATTCAGGGATTGCTAAGAATGATTTTCCCCATGTTATTAGGAATGGTTTGTGCGATGATGGTAGGGACATTTGTCGGTGTTATTTTAGGCTTAGAGTGGCGACACACTTTGTTTTATATCGTAACACCCGTTTTAGCTGGTGGTATTGGTGAAGGTATTTTACCATTATCGTTAGGCTATAGTTCAATTACCGGTGTAGCTAGTGAACAACTAGTTGCTCAACTCATCCCAGCCACTATTATTGGTAATTTCTTTGCCATTTTATGTACTGCACTATTGAATCGTTTGGGAGAAAAGAAACCACACTTGTCTGGTCAAGGGCAATTAGTAAGGTTAAATAAAGGAGAGGACATGTCAGATATTATTGCTGATCATTCTGGCCCAATTGACGTTAAGAAAATGGGTGGAGGTGTTTTAACAGCATGTAGTCTCTTTATTTTTGGACATTTGTTGCAGCAATTAACTGGATTTCCTGGTCCCGTATTAATGATTGTTGCAGCAGCTATTTTGAAATATATTAATGTTATTCCTAGAGAAACACAAAATGGAGCTAAGCAACTTTATAAATTTATTTCTGGTAATTTTACATTTCCTCTAATGGCAGGTCTAGGATTGCTTTATATCCCGTTAAAAGATGTTGTGGCAACGCTTAGCATACAATATTTCATAGTTGTTATTAGTGTTGTATTTACAGTTATTTCTGTTGGATTCTTTGTATCGCGATTCCTTAATATGAATCCTGTTGAAGCAGGTATTATTTCAGCTTGTCAAAGTGGTATGGGAGGAACAGGAGATGTTGCCATTTTAAGTACAGCAGACCGAATGAACTTGATGCCATTTGCTCAAGTTGCTACGCGTTTAGGAGGAGCTATTACTGTTATCACAATGACAGCCATTTTACGCATGTTATTCTAA

SEQ ID NO: 3446 - protein, 445 aa, Streptococcus agalactiae
MADVKVVNNEDSRGQKQDLKAKLFHIKIGSVPLPVYVCLALLILLAGFLQKLPVNMLGGFAVILTMGWFLGTIGASIPGFKNFGGPAILSLLVPSILVFFNLINKNVLESTNMLMKQANFLYFYIACLVSGSILGMNRKMLIQGLLRMIFPMLLGMVCAMMVGTFVGVILGLEWRHTLFYIVTPVLAGGIGEGILPLSLGYSSITGVASEQLVAQLIPATIIGNFFAILCTALLNRLGEKKPHLSGQGQLVRLNKGEDMSDIIADHSGPIDVKKMGGGVLTACSLFIFGHLLQQLTGFPGPVLMIVAAAILKYINVIPRETQNGAKQLYKFISGNFTFPLMAGLGLLYIPLKDVVATLSIQYFIVVISVVFTVISVGFFVSRFLNMNPVEAGIISACQSGMGGTGDVAILSTADRMNLMPFAQVATRLGGAITVITMTAILRMLF

SEQ ID NO: 3447 - protein, 1527 aa, Streptococcus agalactiae
ATGAAAAAAAAACTATCTCTTTGGGCATTTCTATCATTGATTTTAGTCACTATGACCATTTGTATATTTTCTATTTTTTATTATGTCACTATACATCAGTCCTATCGTATGGTAAGGGTACAGGAAGAAAAAATCTTAAAAAATACTGGTTATGCTTTATCGAGAAATCCACAAGTTATACAAACACTCAAAGATAATCACTATGATCAAAGTCTCCAAAAACAAATGTTATTCCTTAGCAAAAAATCAAATTTAGACTATATTGTCCTTATAAATTTAAAAGGGATCCGTTTTACCCACCCTGACTCCACTAAGATTGGTAAACCATTTCAAGGGGGTGATGAACAAGCTGTTTTTAAGGGAAAAGCTATTATGTCTACTGCAGAAGGTTCTTTAGGAAAATCTTTACGATACTTAATTCCAGTATATGATCACCAAAAACAGGTTGGGGCAATTGCAGTTGGCTTAAAATTAACGACACTTGGAGACTTATCTCAAAGTAGCATAAAAGAGTTTAGTAAGCCTCTCTTGATTAGTATTTTGATTAGCTTAGTCGTCACAAGTATAATTTCTTATGGCTTAAAAAAACAACTTCACAACCTCCATCCAAGTGATATTTTTCAACATTTAGAAGAGCGCAATGCAACACTGGACCAAATTCAAGCCGCTGTATTTGTTATTGACCAGAGGCATATCATCAAAAGAAATAATCCTGCAGCTAGTTTATTATTCAAAAAAGAGGGGCAACGAGACCTATTTTCAGGTAAATTATTAGAATCTTTAATTCCTCAACTCAAGCAGGATCATTTTTCAAAAAAAACTGAACAAGTATTACATTTTCAAGGACAAGACTATTTACTATCTATCTCGCCAATTACGGTTAAAACACAAAATAGAGGCTATGTTGTCTTCTTAAGGAATGTTACTGAAACACTTTTCACTTTGGATCAATTAGCACACACTACAGCTTATGCTTCTGCGCTACAGGCCCAAACACATCAATTTATGAATCAACTTCATGTTATTTATGGACTTGCAGACATTGAATACTACGACGAGTTGAAAATTTATTTAAAAGAATTATTGGAGCCACAAAATGAATTTTTAGCACGCTTATCAATGTTAGTTAGAGAGCCTCGACTGGCTAGTTTCATTATTGGCGAAAGAGAAAAATTCGCAGAAAAACACATCAATCTATCCACAGAAATTTTAGTAGAAATCCCTACCAAGTCAACTGTTGAGGATGTTAATAACTATCTCTTGCTCCACAGATATATTAATACGAAGATACTCACGCTATTAAATTCAACGACTTTAGTTTCTTTACGTTTAAATTATCAAAATAACCTCATTGAAACAGATTATCAATGGGAGAATGAGAAGTGGTTACTCAATGACTACCATCAGTATTTCAACGACGCTTATTTTCAACAGTTACTTGTAGATTCAAGAGCTACTTATAAGATCTCTTTAAAACAAAATAAGGTTATTATAAGAACAAATATTATCTACTCAGAAGGGCCTTAG

SEQ ID NO: 3448 - protein, 508 aa, Streptococcus agalactiae
MKKKLSLWAFLSLILVTMTICIFSIFYYVTIHQSYRMVRVQEEKILKNTGYALSRNPQVIQTLKDNHYDQSLQKQMLFLSKKSNLDYIVLINLKGIRFTHPDSTKIGKPFQGGDEQAVFKGKAIMSTAEGSLGKSLRYLIPVYDHQKQVGAIAVGLKLTTLGDLSQSSIKEFSKPLLISILISLVVTSIISYGLKKQLHNLHPSDIFQHLEERNATLDQIQAAVFVIDQRHIIKRNNPAASLLFKKEGQRDLFSGKLLESLIPQLKQDHFSKKTEQVLHFQGQDYLLSISPITVKTQNRGYVVFLRNVTETLFTLDQLAHTTAYASALQAQTHQFMNQLHVIYGLADIEYYDELKIYLKELLEPQNEFLARLSMLVREPRLASFIIGEREKFAEKHINLSTEILVEIPTKSTVEDVNNYLLLHRYINTKILTLLNSTTLVSLRLNYQNNLIETDYQWENEKWLLNDYHQYFNDAYFQQLLVDSRATYKISLKQNKVIIRTNIIYSEGP

SEQ ID NO: 3449 - protein, 690 aa, Streptococcus agalactiae
ATGGACGTATTAATTATCGAAGATGATCCTATGGTGGAATTTATCCACCGCAATTACCTTGAAAAACTCAATTATTTTCAAAACATCTATTCAACTGCTAGTCAAACACAAGCTATTGCTTATCTTAATGACATTAAAATCCAACTTGTTCTTTTAGATATTCATATTAAAGAAGGCAATGGTCTAGAATTATTAAAGTTATTACGCAATCAACACCAAAATACCGAAGTCATTGTTATTTCAGCAGCCAACGAGGCGCACACTGTCAAAGAAGCATTTCATTTAGGTATTGTAGATTACCTGATAAAACCATTTACATTTGAACGCTTTGAGTCTAGTATTGAAAAATTCCTAAATCATTATCATACATTTGAAGCTGATAAAATCTATCAAGACAACATCGATCACTTTCAAAAAATAGATTCTGGATGGCTAGAGGGAGAGGTTAAACTTGATGAGAAAGGGCTCTCTGAAATTACCTATCAGCATATTCTTGATGCCATTCAAGAGTTAGAGCAGCCTTTCACTATCCAAGAGTTAGCAAAATGCAGTCAATTTTCTCATGTCTCTGTTAGGAAATATATTGCCTATATGGAAGAAAAAGGCCTTCTGACAAGTCAGCAAATTTATACTAAGGTCGGTCGTCCTTACAAAGTTTATAAGCTTATAAAAAAAAACTTAGGCCTGTAG

SEQ ID NO: 3450 - protein, 229 aa, Streptococcus agalactiae
MDVLIIEDDPMVEFIHRNYLEKLNYFQNIYSTASQTQAIAYLNDIKIQLVLLDIHIKEGNGLELLKLLRNQHQNTEVIVISAANEAHTVKEAFHLGIVDYLIKPFTFERFESSIEKFLNHYHTFEADKIYQDNIDHFQKIDSGWLEGEVKLDEKGLSEITYQHILDAIQELEQPFTIQELAKCSQFSHVSVRKYIAYMEEKGLLTSQQIYTKVGRPYKVYKLIKKNLGL

SEQ ID NO: 3451 - protein, 996 aa, Streptococcus agalactiae
ATGGCAGTTCTGATTTTAGGTGGCGCCGGCTACATTGGCTCGCATATGGTTGATCAGTTAATCACACAAGGAAAAGAGAAAGTTATTGTTGTTGATAACTTGGTAACAGGTCATCGTCAAGCGGTGCATTCAGATGCGATTTTTTATGAAGGAGATTTATCCGATAAAACGTTTATGCGTCAAGTTTTTAGGGAAAATCCTGATGTAGATGCTGTTATCCATTTTGCGGCATTTTCACTAGTTGCTGAGTCAATGGAAAATCCTTTAAAATATTTTGATAATAACACTGCTGGAATGATAAAACTTTTAGAAGTAATGAATGAATGTGATATCAAAAATATTGTCTTTTCATCAACAGCTGCAACATATGGTATTCCAGAACAAGTTCCTATTTTAGAAACAGCTCCTCAAAATCCTATTAATCCTTATGGCGAAAGTAAGCTTATGATGGAAACAATTATGAAATGGGCTGATCAAGCCTACGGTATTAAGTTTGTCGCTCTACGTTACTTCAACGTTGCTGGAGATAAACCGGATGGCTCAATTGGGGAAGATCATAAACCAGAAACACATTTGTTACCAATCATTCTTCAAGTTGCTCAAGGAGTACGTGACAAAATAATGATTTTTGGAGATGATTACAATACTCCAGATGGAACTAATGTTCGAGATTATGTGCATCCATTTGATTTGGCAGATGCTCATATATTAGCAGTTGATTACCTTCGCCAAGGGAATGAATCAAACGTGTTTAATCTCGGATCTTCGACAGGTTTTTCTAACCTTCAGATGTTAGAGGCAGCTCGTCGTATTACTGGGAAAGAAATTCCTGCTCAAAAGGCAGCTCGTCGTCCAGGAGATCCAGATACGCTTATTGCTTCCTCAGAGAAAGCTCGTCAAATCCTTGGGTGGGAGCCTAAATTTGATAATATTGATAAAATTATTTCATCGGCATGGGCATGGCATTCTAGTCATCCAAATGGCTACGAAGATTAA

SEQ ID NO: 3452 - protein, 331 aa, Streptococcus agalactiae
MAVLILGGAGYIGSHMVDQLITQGKEKVIVVDNLVTGHRQAVHSDAIFYEGDLSDKTFMRQVFRENPDVDAVIHFAAFSLVAESMENPLKYFDNNTAGMIKLLEVMNECDIKNIVFSSTAATYGIPEQVPILETAPQNPINPYGESKLMMETIMKWADQAYGIKFVALRYFNVAGDKPDGSIGEDHKPETHLLPIILQVAQGVRDKIMIFGDDYNTPDGTNVRDYVHPFDLADAHILAVDYLRQGNESNVFNLGSSTGFSNLQMLEAARRITGKEIPAQKAARRPGDPDTLIASSEKARQILGWEPKFDNIDKIISSAWAWHSSHPNGYED

SEQ ID NO: 3453 - protein, 318 aa, Streptococcus agalactiae
ATGGAATGNNNNNCAGCGTTAAATGATACGGAAAGTATTTTTTATACTTATCAAAAATTAGTTGCTTTACGTAAAGAACACGACTGGTTAGTTGATGCTGATTTTAAACTTTTGGAAACAGCAGATAAGGTATTTGCTTATGTTCGTCAAACAGATAAAGAACGTTATTTAATAGTTGCGAACTTATCCGATCAAAACCAATCTTTTGAATTTCCAGAAGCTGTTAAAGAAACTATTATTTCAAATACAGAGGTTCAAGAAGTACTATCAAGTAACACTCTCAAGCCGTGGGATGCCTTCTGCATAGAGCTATTCTAA

SEQ ID NO: 3454 - protein, 105 aa, Streptococcus agalactiae
  VARIANT 3, 4, 5: Xaa = Any Amino Acid
MEXXXALNDTESIFYTYQKLVALRKEHDWLVDADFKLLETADKVFAYVRQTDKERYLIVANLSDQNQSFEFPEAVKETIISNTEVQEVLSSNTLKPWDAFCIELF

SEQ ID NO: 3455 - protein, 141 aa, Streptococcus agalactiae
ATGGCAGTTCTGATTTTAGGTGGCGCCGGCTACATTGGCTCGCATATGGTTGATCAGTTAATCACACAAGGAAAAGAGAAAGTTATTGTTGTTGATAACTTGGTAACAGGTCATNNNNNCATTCATTCATTAATTAATTAA

SEQ ID NO: 3456 - protein, 46 aa, Streptococcus agalactiae
  VARIANT 39, 40: Xaa = Any Amino Acid
MAVLILGGAGYIGSHMVDQLITQGKEKVIVVDNLVTGHXXIHSLIN

SEQ ID NO: 3457 - protein, 1608 aa, Streptococcus agalactiae
ATGAAGAAACACTGGTGGCATAAAGCTACGATTTATCAAATTTACCCACGTTCATTTATGGATTCAGATGGTGATGGTGTGGGGGACATTAAAGGGATTACTAGCAAACTAGACTACCTTGAAAAATTAGGGATTACTGCTATCTGGTTATCACCTGTTTATCAAAGTCCAATGGATGACAATGGTTATGATATTTCAGATTATCAAGCCATTGCAGATATTTTTGGTGATATGAATGATATGGACCAACTGTTACAAGAGGCAAATCAACGCGGGATTAAAATCATCATGGATTTGGTAGTGAATCATACCTCTGATGAACATGCTTGGTTCGTAGAAGCGCGAGAAAACCCTAATAGTCCTGAACGTGATTTTTATATTTGGCGAGATGAACCTAACGATTTGACTTCTATTTTTAGTGGCTCAGCTTGGGAATATGATAAAGTATCAGGTCAATATTATTTGCACCTTTTTAGCAAACGTCAGCCAGATCTCAACTGGGAGAATGAAGCTTTACGTCATAAAATTTATGATATGATGAATTTCTGGATTGATAAGGGTATTGGTGGTTTCCGTATGGATGTCATTGATTTAATTGGGAAAATTCCAGATAAGGGCATTACTGGTAATGGACCAAAACTTCATGATTATCTTAAAGAAATGAACAGAGCTAGTTTTGGAAAGCATGACTTATTGACGGTGGGTGAAACTTGGGGAGCAACGCCAGACATTGCAAAACAATACTCAAATCCCGATAATGAAGAATTATCTATGGTCTTTCAATTTGAACATGTAGGTCTTCAACATAAACCTGACGCTCCTAAGTGGGATTACAGTGACGGATTAGATGTTCCAGCATTGAAAGATATTTTTACAAAATGGCAAACACAATTGGAGCTTGGCCAAGGTTGGAATTCTTTATTCTGGAATAATCATGACCTTCCTCGAGTGCTCTCGATCTGGGGAAATGATAGTGATAACAGAAAACAATCTGCCAAGGCTCTAGCAATCCTACTACATTTGATGCGTGGAACGCCTTATATCTATCAAGGTGAAGAAATTGGTATGACTAATTATCCATTTGAGTGTTTAGCAGATGTAGATGATATTGAATCCCTTAACTATGCTAAAGAAGCCATGGATAATGGGGTATCTGAAGCAACAATTTTAGATAGTATTCGTAAAGTCGGTCGTGATAATGCTCGTACTCCAATGCAGTGGAGTCAAGAACATCAAGCTGGTTTTACTAAAGGTACCCCATGGCTAGCAGTCAATCCCAATTATCAGGAAATTAATGTGGAGGCAGCGTTAAATGATACGGAAAGTATTTTTTATACTTATCAAAAATTAGTTGCTTTACGTAAAGAACACGACTGGTTAGTTGATGCTGATTTTAAACTTTTGGAAACAGCAGATAAGGTATTTGCTTATGTTCGTCAAACAGATAAAGAACGTTATTTAATAGTTGCGAACTTATCCGATCAAAACCAATCTTTTGAATTTCCAGAAGCTGTTAAAGAAACTATTATTTCAAATACAGAGGTTCAAGAAGTACTATCAAGTAACACTCTCAAGCCGTGGGATGCCTTCTGCATAGAGCTATTCTAA

SEQ ID NO: 3458 - protein, 535 aa, Streptococcus agalactiae
MKKHWWHKATIYQIYPRSFMDSDGDGVGDIKGITSKLDYLEKLGITAIWLSPVYQSPMDDNGYDISDYQAIADIFGDMNDMDQLLQEANQRGIKIIMDLVVNHTSDEHAWFVEARENPNSPERDFYIWRDEPNDLTSIFSGSAWEYDKVSGQYYLHLFSKRQPDLNWENEALRHKIYDMMNFWIDKGIGGFRMDVIDLIGKIPDKGITGNGPKLHDYLKEMNRASFGKHDLLTVGETWGATPDIAKQYSNPDNEELSMVFQFEHVGLQHKPDAPKWDYSDGLDVPALKDIFTKWQTQLELGQGWNSLFWNNHDLPRVLSIWGNDSDNRKQSAKALAILLHLMRGTPYIYQGEEIGMTNYPFECLADVDDIESLNYAKEAMDNGVSEATILDSIRKVGRDNARTPMQWSQEHQAGFTKGTPWLAVNPNYQEINVEAALNDTESIFYTYQKLVALRKEHDWLVDADFKLLETADKVFAYVRQTDKERYLIVANLSDQNQSFEFPEAVKETIISNTEVQEVLSSNTLKPWDAFCIELF

SEQ ID NO: 3459 - protein, 1134 aa, Streptococcus agalactiae
ATGGTAGAATTAAATTTAAATCATATTTACAAAAAATATCCAAGTGCATCGCATTATTCTGTTGAAGACTTTGACTTGGATATTAAAGACAAAGAATTTATTGTTTTTGTTGGACCATCAGGTTGTGGGAAATCAACAACACTTCGTATGATCGCAGGTCTTGAAGATATTAGTGAAGGTGAGCTCAAGATTGATGGCGAAGTTGTCAATGACAAATCACCTAAAGATCGTGATATTGCTATGGTTTTCCAAAACTATGCTCTTTATCCACATATGACTGTTTACGATAATATGGCTTTTGGGCTCAAATTGCGTAAATTCTCAAAACAAGAAATTGATAAGCGCGTTCGTGAAGCAGCAGCTAATATTGGCCTTACTGAATTCTTAGAGCGCAAACCTGCGGATTTGTCAGGTGGACAACGCCAACGTGTTGCTATGGGACGTGCTATTGTGCGTGATGCCAAAGTGTTCTTAATGGATGAGCCTTTATCTAACTTAGATGCTAAATTACGTGTTTCAATGCGTGCTGAAATTGCAAAAATTCATCAACGTATTGGTTCAACAACTATTTATGTTACCCACGACCAAACAGAAGCGATGACTTTGGCAGACCGTATTGTCATTATGTCAGCTACTAAGAACCCTGATGGTGATGGTACAATTGGTAAAATTGAGCAAGTTGGTTCACCACAAGAACTCTATAATCTTCCTGCCAATAAATTTGTTGCGGGATTCATTGGTAGCCCATCTATGAACTTCTTCAAAGTTAAAGTTGAAAATGGTATGATTATTAGTGAAGATGGTCTTCGAATCGCTATCCCTGAAGGTCAAGAAAAACTTTTAGAATCACGAGGCTATAAAGGAAAAGAATTGATTTTTGGTATTCGTCCAGAAGACATTTCAAGCAATCTTCTTGTCCAAGATACTTATCCAAATGCCAATGTTGAAGCAGAAGTTTTAGTTTCTGAATTACTCGGTAGCGAAACTATGCTTTATGTTAAGTTAGGTCAAACAGAATTTGCTTCTCGTGTTGAAGCGCGTGACTTCCATAATCCAGGAGAAAAAGTTAACCTAACGTTTAATGTTGCTAAGGGGCATTTCTTTGATGCAGATACTGAACAAGCTATTCGTTAA

SEQ ID NO: 3460 - protein, 377 aa, Streptococcus agalactiae
MVELNLNHIYKKYPSASHYSVEDFDLDIKDKEFIVFVGPSGCGKSTTLRMIAGLEDISEGELKIDGEVVNDKSPKDRDIAMVFQNYALYPHMTVYDNMAFGLKLRKFSKQEIDKRVREAAANIGLTEFLERKPADLSGGQRQRVAMGRAIVRDAKVFLMDEPLSNLDAKLRVSMRAEIAKIHQRIGSTTIYVTHDQTEAMTLADRIVIMSATKNPDGDGTIGKIEQVGSPQELYNLPANKFVAGFIGSPSMNFFKVKVENGMIISEDGLRIAIPEGQEKLLESRGYKGKELIFGIRPEDISSNLLVQDTYPNANVEAEVLVSELLGSETMLYVKLGQTEFASRVEARDFHNPGEKVNLTFNVAKGHFFDADTEQAIR

SEQ ID NO: 3461 - protein, 852 aa, Streptococcus agalactiae
ATGGATTTTAAGGAACTGTTTCCAGAAGTTATTACTAAACAGGAAGTTAAACAGAGTGAGGATTATATCATCGTTGAGCAAGATGGTCATGTCCTCCACTTTCCAAAATCTTCGCTAACTAAGCGTGAACTATACTTATTACAAATGACACCAAGCCTGGAAGATGCGAGTTCAGTGGATTCTCAGAATCCTTGGTACCGCTATCTAGTTGAAGGTCGTGGAAGGTTGCCCCAATCTCATTCGGCAGTCCAATTTATTTTTATTGAGCATCAATTTACCTTATCAGAAGAACTTAAGGATTTCTTGTCGCCTTTAGTAATAAACGTAGAAACAATTATGACAATTAATCAAACCCAAAGTGTCATGATTTTAAATCAGGATAATTTCTTTAATGCTACGGAATTACTAACAGATATTTTACCAACGATTGAAAATGACTTTAACACGCGTTTAAGGTGCTATTTTGGAAATAGTTGGACGCATCTACAAGCAGTGGACTGGAAAGAATTATATGAAGAAGAATATAAACTTTTTACGCTTTTTCTTAGTCACAAGGCCGAACAACATTACTGTCGATTTCCAAAGATGGCTTTATGGGCTTTGGCAAATCAATCGCCCATGCCTTCTATTAAAGCAAAATGTTTACAACATATCCTTGATACGAGTGATACTTCGGCTATAATAAAAGCCCTGTGGCAAGAGCAAGGAAATCTTGCTAAAACGGCTAAGGCACTTTTCATTCATCGGAATTCATTGCAATATAAATTAGATAAATTTACCCAATCTTCGGGACTTAATTTAAAAATATTAGATGATTTAGCCTATGCCTATTTGATTTCGATGGATACCTAA

SEQ ID NO: 3462 - protein, 283 aa, Streptococcus agalactiae
MDFKELFPEVITKQEVKQSEDYIIVEQDGHVLHFPKSSLTKRELYLLQMTPSLEDASSVDSQNPWYRYLVEGRGRLPQSHSAVQFIFIEHQFTLSEELKDFLSPLVINVETIMTINQTQSVMILNQDNFFNATELLTDILPTIENDFNTRLRCYFGNSWTHLQAVDWKELYEEEYKLFTLFLSHKAEQHYCRFPKMALWALANQSPMPSIKAKCLQHILDTSDTSAIIKALWQEQGNLAKTAKALFIHRNSLQYKLDKFTQSSGLNLKILDDLAYAYLISMDT

SEQ ID NO: 3463 - protein, 897 aa, Streptococcus agalactiae
ATGGCTATTACGATACAAAATCATGAGTTGCAAGTGACATTAAAAGCGTTAGGTGCAACAATGACTTCTATTACAGATAGTCAAGGCGTTGAGTACCTTTGGCAAGGGGACGCCACTTATTGGGGTGGGCAAGCTCCTATTTTATTTCCTATATGCGGAAGTGTTCGAAATGATTGCGTCATTTACAGACCAGCTCAAGCTCCACATTTTACGGGTATCATACCAAGGCATGGCTTTGTACGTCACAAAACATTCGACTATGATTACATATCGGATTCTTCTGTTCGTTTTACAATTAAAAGTAGTAAAGAAATGTTGATAAATTATCCTTATCGTTTTAGTTTAGAAATAACTTACACCTTAAGAAATAAAAGCATTGCCATTACATATATTGTCAAAAACTTAGAATCAGAAAAAAATATGCCATATGCTATCGGAGCTCACCCAGGCTTTAATTGCCCTTTGTTTGAAAAGGAAGTATTTAGTGATTACTATCTAGAGTTTGAACAGTTTGAAACTTGCACAATTCCTGAGTCGTTTCCGGATACAGGCTTGTTAGATTTACAAGCTAGACATCCTTTTTTAGAAAATCAAAAACAATTATCTCTTAATCATGCTTTATTTGAAAAAGATGCTATTACTTTAGACCAACTACGATCTAAGACGGTTTACTTAAAATCTAGAAATCATGCAAAAGGAATCCAACTTGACTTTGATGATTTTGAGAATCTTATTCTTTGGACAAGTAACAATGGTGGTCCTTTTTTGGCTTTGGAACCCTGGAGTTCTTTGTCAACTTCTATTGAAGAGTCTGATATTTTAGAAGATAAACAAAATATCGTACGGCTTAATCCAAAGCAGTCGAAACAGCATTCTATTCGGATCACTATTTTATAA

SEQ ID NO: 3464 - protein, 298 aa, Streptococcus agalactiae
MAITIQNHELQVTLKALGATMTSITDSQGVEYLWQGDATYWGGQAPILFPICGSVRNDCVIYRPAQAPHFTGIIPRHGFVRHKTFDYDYISDSSVRFTIKSSKEMLINYPYRFSLEITYTLRNKSIAITYIVKNLESEKNMPYAIGAHPGFNCPLFEKEVFSDYYLEFEQFETCTIPESFPDTGLLDLQARHPFLENQKQLSLNHALFEKDAITLDQLRSKTVYLKSRNHAKGIQLDFDDFENLILWTSNNGGPFLALEPWSSLSTSIEESDILEDKQNIVRLNPKQSKQHSIRITIL

SEQ ID NO: 3465 - protein, 978 aa, Streptococcus agalactiae
ATGGGATTAACAGAACAAAAACAAAAACATATGGAACAATTGAGTGATAAAAATGGTATTATTTCGGCCTTGGCTTTTGACCAACGTGGAGCATTGAAGCGATTAATGGCAAAATATCAATCTGAGGAGCCCACTGTTTCTCAAATAGAAGCACTTAAAGTTTTGGTAGCTGAAGAATTAACCCCTTACGCTTCATCAATGTTGTTAGATCCAGAATATGGGTTGCCAGCTACGAAAGTTTTAGATGACAATGCCGGTCTTTTACTTGCGTACGAAAAAACGGGTTATGATACCAGTAGTACCAAGCGACTCCCAGACTGTTTAGACATTTGGTCTGCGAAACGCATTAAAGAAGAGGGAGCAGACGCAGTTAAGTTCTTACTTTATTATGATGTTGATAGTTCGGATGAAGTAAACGAAGAAAAAGAAGCTTATATTGAACGGATTGGTTCTGAATGTGTTGCAGAAGACATTCCTTTTTTCCTTGAAATTTTGTCATATGATGAAAAGATTACGGATAGCTCAGGTATTGAGTATGCCAAAATTAAGCCACGTAAGGTTATTGAAGCTATGAAAGTTTTTTCAAATCCTCGATTTAATATTGATGTCTTGAAGGTGGAAGTGCCTGTCAATATGGACTATGTAGAAGGTTTTGCGCAAGGAGAGACTGCTTATAATAAAGCGACAGCTGCGGCATATTTTAGAGAACAAGATCAGGCGACACTACTCCCCTACATTTTTTTGAGTGCAGGAGTTCCTGCTCAGCTTTTTCAAGAGACTCTTGTGTTTGCTAAAGAAGCTGGTGCTAAATTTAACGGTGTCCTTTGTGGTAGAGCAACTTGGGCTGGAAGTGTTAAAGAGTATGTTGAAAAAGGAGAAGCTGGTGCACGTCAATGGTTACGTACAATAGGTTTTCAAAATATTGATGAACTAAATAAAATTTTGCAAAAAACAGCAACTTCTTGGAAGGAAAGATAA

SEQ ID NO: 3466 - protein, 325 aa, Streptococcus agalactiae
MGLTEQKQKHMEQLSDKNGIISALAFDQRGALKRLMAKYQSEEPTVSQIEALKVLVAEELTPYASSMLLDPEYGLPATKVLDDNAGLLLAYEKTGYDTSSTKRLPDCLDIWSAKRIKEEGADAVKFLLYYDVDSSDEVNEEKEAYIERIGSECVAEDIPFFLEILSYDEKITDSSGIEYAKIKPRKVIEAMKVFSNPRFNIDVLKVEVPVNMDYVEGFAQGETAYNKATAAAYFREQDQATLLPYIFLSAGVPAQLFQETLVFAKEAGAKFNGVLCGRATWAGSVKEYVEKGEAGARQWLRTIGFQNIDELNKILQKTATSWKER

SEQ ID NO: 3467 - protein, 356 aa, Streptococcus agalactiae
TTGGAAAACCAATTAGCTATAGTTTAGACGAATTAAAATCTACCTTACAGCAAGATCTTTTTAGAGGAATTGATTGGGTTATTGTTTCTTTAGGTGCTAGGGGAGCTTTTGCTAAACATGGGAATCACTACTATCAAGTGACGATTCCAAAAATAGAAGTTATTAATCCAGTTGGTTCAGGGGATGCAACGGTTGCAGGAATCGCGTCTGCTTTGGAACATCAACTAGATGATACAAATTTGCTTAAGAGAGCTAATGTCTTGGGTATGCTTAATGCACAAGAAACATTAACAGGGCATATCAATCTGACCTACTATCAAGAATTAATCAGTCAAATCCAAGTGAAAGAGGTATAG

SEQ ID NO: 3468 - protein, 118 aa, Streptococcus agalactiae
LGKPISYSLDELKSTLQQDLFRGIDWVIVSLGARGAFAKHGNHYYQVTIPKIEVINPVGSGDATVAGIASALEHQLDDTNLLKRANVLGMLNAQETLTGHINLTYYQELISQIQVKEV

SEQ ID NO: 3469 - protein, 178 aa, Streptococcus agalactiae
ATGNNNNNTTATGCTAGGTTAATCTCCCTAGCGAATCACTTTAATAAGAAAGTTGTTTTAGACTGTTCAGGAGAAGCATTACGTTCGGTTTTAAAATCTAGTGCTAAGCCGACCGTCATTAAACCTAACCTTGAAGAATTAACACAATTAATTGGAAAACCAATTAGCTATAGTTTAG

SEQ ID NO: 3470 - protein, 59 aa, Streptococcus agalactiae
  VARIANT 2, 3: Xaa = Any Amino Acid
MXXYARLISLANHFNKKVVLDCSGEALRSVLKSSAKPTVIKPNLGRINTINWENQLAIV

SEQ ID NO: 3471 - protein, 808 aa, Streptococcus agalactiae
ATGATTTTAACAGTAACTTTGAACCCTTCTATTGATATTTCGTACTGCTTAGAAAACTTTAACATGGATACTGTAAATCGAGTTACCGACGTCTCCAAAACACCTGGGGGTAAGGGGTTAAATGTGACTCGTGTTCTTTCTCAACTTGGCGATAATGTAGTGGCAACTGGTCTATTAGGGGGGGATTTTGGAGATTTCATCCGAAGTGGCTTAGATGCATTGGAAATCAGACACCAATTTTTAAGTATTGGTGGAGAAACACGTCATTGTATTGCAGTTTTACATGAGGGTCAGCAGACTGAAATTCTAGAAAAAGGTCCACATATTACTAAAGATGAAGCAGACGCCTTTTTGAATCATCTAAAACTTATCTTTGATGCTGCAACTATCATAACAGTATCAGGAAGTTTACCAAAGGGACTCCCCTCAGATTATTATGCTAGGTTAATCTCCCTAGCGAATCACTTTAATAAGAAAGTTGTTTTAGACTGTTCAGGAGAAGCATTACGTTCGGTTTTAAAATCTAGTGCTAAGCCGACCGTCATTAAACCTAACCTTGAAGAATTAACACAATTAATTGGAAAACCAATTAGCTATAGTTTAGACGAATTAAAATCTACCTTACAGCAAGATCTTTTTAGAGGAATTGATTGGGTTATTGTTTCTTTAGGTGCTAGGGGAGCTTTTGCTAAACATGGGAATCACTACTATCAAGTGACGATTCCAAAAATAGAAGTTATTAATCCAGTTGGTTCAGGGGATGCACGGTTGCAGGAATCGCGTCTGCTTTGGAACATCMACTAGATGA

SEQ ID NO: 3472 - protein, 269 aa, Streptococcus agalactiae
MILTVTLNPSIDISYCLENFNMDTVNRVTDVSKTPGGKGLNVTRVLSQLGDNVVATGLLGGDFGDFIRSGLDALEIRHQFLSIGGETRHCIAVLHEGQQTEILEKGPHITKDEADAFLNHLKLIFDAATIITVSGSLPKGLPSDYYARLISLANHFNKKVVLDCSGEALRSVLKSSAKPTVIKPNLEELTQLIGKPISYSLDELKSTLQQDLFRGIDWVIVSLGARGAFAKHGNHYYQVTIPKIEVINPVGSGGCNGCRNRVCFGTSTR

SEQ ID NO: 3473 - protein, 516 aa, Streptococcus agalactiae
ATGAAAATTGCGGTCGGTTGTGATCATATTGTAACTTATGACAAAATTGCAGTTGTGGATTATTTAAAAACAAAAGGGTATGAGGTTATTGATTGTGGAACTTATGATAATATCCGTACTCACTATCCTATTTATGGTAAGAAAGTAGGAGAAGCTGTCGCTAGTGGAAAAGCCGACTTAGGTGTATGTATTTGTGGAACTGGAGTTGGTATTAATAATGCTGTTAATAAAGTTCCAGGAATTCGCTCAGCTCTGGTACGTGATTTGACATCAGCTATCTATGCCAAAGAAGAATTAAATGCTAACGTTATCGGATTTGGTGGGAAAATTACTGGTGGGCTGTTAATGACAGATATCATCGAGGCGTTTATAAGAGCTAAATATAAACCAACAAAAGAAAACAAAGTATTAATTGAAAAGATAGCCGAGGTTGAGACTCATAATGCCCATCAAGAAGAGAATGACTTTTTCACAGAGTTCTTAGATAAATGGAATCGTGGTGAATATCACGACTAA

SEQ ID NO: 3474 - protein, 171 aa, Streptococcus agalactiae
MKIAVGCDHIVTYDKIAVVDYLKTKGYEVIDCGTYDNIRTHYPIYGKKVGEAVASGKADLGVCICGTGVGINNAVNKVPGIRSALVRDLTSAIYAKEELNANVIGFGGKITGGLLMTDIIEAFIRAKYKPTKENKVLIEKIAEVETHNAHQEENDFFTEFLDKWNRGEYHD

SEQ ID NO: 3475 - protein, 249 aa, Streptococcus agalactiae
ATGGTTGATGCTTACGGTGTTGGTCCTTTTATGGTAGCCACTAAGGTTAAGGGGATGATTGCAGCAGAAGTTTCAGATGAACGCTCAGCTTATATGACTAGAGCTCATAATAACGCTAGGATGATTACTTTAGGTTCAGAGATTGTTGGTCCAGGAGTTGCTAAACATATAGTAGAGGGTTTTGTTGATGGGACTTACGATGCAGGTCGTCATCAAATTCGGGTCGATATGTTGAATAAAATGTGCTAA

SEQ ID NO: 3476 - protein, 82 aa, Streptococcus agalactiae
MVDAYGVGPFMVATKVKGMIAAEVSDERSAYMTRAHNNARMITLGSEIVGPGVAKHIVEGFVDGTYDAGRHQIRVDMLNKMC

SEQ ID NO: 3477 - protein, 2451 aa, Streptococcus agalactiae
ATGACATTAACCTTTGGGAAACCTTCTATAACGATACGCCGTCTAGGAGTGATAACTAGTACATATATGATGCTAGGTTTTATCTTATTATGTGGATTTTTGCATCCTAGTACAATTTATAGTGAGGAAATAAAATCTGATATAAACTCTTTTATATCAATAGATGATGAAAAAACTACTGTTCCCATATTTGACTCTACTTTAGATAAGCTTACTAATTCAATAGAGGAGAGGCAGTTAGAATTAGATTCTGATACATCGGACAGTTTAATAGTAGATGATCAAAAAGATAAAGATATGGTAATAGTCTTAGGTGATTCTGACAGTCAAGAAAAATTGTCACCTCCTCTAAAATCGGAAATAGCGACAGAAGAAAATCGTAAACAGGCAAATTTAGCAGAACTAAATGCAACTCAACCTAATAATAGAACTACCTATATTATACCCGAAAGCAGTCATTCCATTGCAGAACAACAGAGATTCCTGATAGAATCAAAGGGTTATTCGGTTGCATTACTTAATAGCGATGAATTTAGAAAGACAGCGAGAGAGGATAGAGGTTTTGAAAGGGATAAGTTGAGGTCTTTGGATATCATTCCTAAGGGAGATTTATCGACAAGTAATGTCATAGGTAATACGGACATTGCTAGTCAGATATCGTTGGGCTTTAAAAAGAATGCGATACAGGAACACCATCTTACTAAAACATTCTCTCAAAAGGATGGAAAGTTATCGTCTGTTATAGAGGGGATGCTTGCTATTGGCAAAGAGAAAGTAGAGAAGGAAATAAAATATAGTGGTAATTTATGGCAAAAATTAAAAGCTAAGGCACACTGCCTTGTTTGCTGTGTTGATAATTTGAATTTTGAAGATATAAAATCTTATTTTCAATATTATTGTCATCTAAACCATCAGCTCAAATTACCTAAAGGTGCTATACTTTCTGCTAAAACAGAAGTATATAGGGGAGGAGATTTTGGGAGAAAAAATAAAGATAATGTGTTTGGTTACCGTATCCCCTCATTATTAAAAACGGAAAAAGGAACTTTACTTGTGGGAGCTGATGAAAGAATTGAGCAAGCTTGTGATTGGGGAAACATAGGAATGGTTATTCGCCGTAGTGAGGATGATGGTGTCACTTGGGGAAAAAGAGAAACTATTGTCAATCTCCGTAATAACCCTAGAGTTCCGCTAGTTACTAGTGGTGACTATAGTGGCTCACCTATTAATATGGATATGGCATTAGTTCAAGATACTAGCTCTAAGACGAAACGTATTTTTTCAATATATGATATGTTTCCAGAAGGAAGAGGCGTTATTAGTATTGCTAACACACCTGAAAAAGAATATACCCAAATCGGAGGACAGTCTTATCTTAATTTATATAATAATGGAAAGAAATCGAAGGTTTTTACTATCCGTGACAAAGGTATTGTATATAATTTTAAAGGGAAAAAGACTGATTATCATGTTATAACAGAAACTACTAAAAGTGACCATTCAAATCTAGGGGATATTTATAAGGGAAAACAGCTACTTGGAAATATATATTTTACAAAACATAAAACGTCACCATTTCGTTTAGCAAAATCAAGCTATGTGTGGATGTCATATAGCGATGATGATGGTAGGACATGGTCATCACCTAGAGATATAACAGCAAGTCTTCGTCAGAAAGGCATGAAATTTTTAGGAATAGGACCTGGAAAAGGTATAGTTTTAAAATGGGGGCCACACGCTGGTCGTATTATTATTCCTGCCTATTCTACGAATTGGAAATCTCATCTAAGAGGTTCACAATCTTCACGCCTAATTTATTCAGACGACCATGGAAAAACGTGGCATACTGGAAAAGCAGTCAATGATAACCGTATACTTTCTAATGGTGAAAAAATTCACTCCTTAACAATGGATAATAAAAAAGAACAAAATACAGAATCCGTACCCGTTCAATTGAAAAATGGGGACATTAAGTTATTTATGAGGAATCTAACTGGTAACCTAGAAGTAGCCACAAGTAAAGACGGCGGGGAGACTTGGCAAAACCATGTTAAACGATATAAGGAAGTTCATGATGCTTACGTCCAATTATCAGCTATTCGCTTTGAGCATGACAAAAAAGAGTATATTTTATTAGTGAATGCTAATGGGCCAGGTAAGAAGCGTCAAGATGGATATGCACGTCTAGCGCAAGTTAATCGAAATGGTAGTTTTAAGTGGTTATATCACCATCACATTCAAGATGGTTCGTTTGCTTACAACTCTGTTCAACAACTTAATAATGATAAATTTGGTGTCCTTTATGAACATAGAGAAAAACATCAAAATAGTTTTACTTTAAATTACAAAGTTTTTAATTGGAGTTTTCTTAGTCAAAATACAGAGAAGCAAGGCACTTTATGGGAGAAAATGGCAGCAAATTGGNNNNNCATTCATTCATTAATTAATTAA

SEQ ID NO: 3478 - protein, 816 aa, Streptococcus agalactiae
  VARIANT 809, 810: Xaa = Any Amino Acid
MTLTFGKPSITIRRLGVITSTYMMLGFILLCGFLHPSTIYSEEIKSDINSFISIDDEKTTVPIFDSTLDKLTNSIEERQLELDSDTSDSLIVDDQKDKDMVIVLGDSDSQEKLSPPLKSEIATEENRKQANLAELNATQPNNRTTYIIPESSHSIAEQQRFLIESKGYSVALLNSDEFRKTAREDRGFERDKLRSLDIIPKGDLSTSNVIGNTDIASQISLGFKKNAIQEHHLTKTFSQKDGKLSSVIEGMLAIGKEKVEKEIKYSGNLWQKLKAKAHCLVCCVDNLNFEDIKSYFQYYCHLNHQLKLPKGAILSAKTEVYRGGDFGRKNKDNVFGYRIPSLLKTEKGTLLVGADERIEQACDWGNIGMVIRRSEDDGVTWGKRETIVNLRNNPRVPLVTSGDYSGSPINMDMALVQDTSSKTKRIFSIYDMFPEGRGVISIANTPEKEYTQIGGQSYLNLYNNGKKSKVFTIRDKGIVYNFKGKKTDYHVITETTKSDHSNLGDIYKGKQLLGNIYFTKHKTSPFRLAKSSYVWMSYSDDDGRTWSSPRDITASLRQKGMKFLGIGPGKGIVLKWGPHAGRIIIPAYSTNWKSHLRGSQSSRLIYSDDHGKTWHTGKAVNDNRILSNGEKIHSLTMDNKKEQNTESVPVQLKNGDIKLFMRNLTGNLEVATSKDGGETWQNHVKRYKEVHDAYVQLSAIRFEHDKKEYILLVNANGPGKKRQDGYARLAQVNRNGSFKWLYHHHIQDGSFAYNSVQQLNNDKFGVLYEHREKHQNSFTLNYKVFNWSFLSQNTEKQGTLWEKMAANWXXIHSLIN

SEQ ID NO: 3479 - protein, 1449 aa, Streptococcus agalactiae
ATGCAGGTATTTTTAAATATTGTCAATAAATTCTTTGATCCAATTATCCATATGGGTTCGGGAGTTGTGATGCTAATTGTCATGACAGGTTTAGCCATGATATTTGGAGTGAAGTTTTCTAAAGCACTTGAAGGTGGTATTAAGTTAGCTATTGCTCTTACGGGTATTGGTGCTATTATTGGTATTTTAACTGGTGCTTTTTCTGAATCACTTCAAGCTTTTGTTAAAAATACAGGAATCAATCTAAGCATTATTGACGTTGGTTGGGCTCCATTAGCAACTATTACATGGGGATCACCATATACGCTTTACTTCTTATTAATCATGCTTATTGTCAATATTGTTATGATTGTTATGAAAAAAACGGATACCTTAGATGTTGATATTTTTGATATTTGGCATTTATCTATCACAGGTCTTTTAATTATGTGGTATGCTAAAAAAAATAATCTACCAACACTTTTATCTGTCATTATTGCAACTGTAGCTATTATCTTCGTTGGTGTTCTAAAAATTATCAATTCTGATTTGATGAAACCTACCTTTGATGATTTATTGGGGACAGGTCCAACTTCTCCCATGACTTCAACGCATATGAATTATATGATGAACCCCATTATTATGGTTTTGGATAAGCTTTTTGATAAAGTTTTTCCAGGGCTAGATAAATATGACTTTGACGCGGCTAAATTAAATAAAGCCATTGGATTCTGGGGCTCTAAGTTCTTTATTGGTATGATTTTAGGACTTGTCATAGGGATTATGGGCAACCCCGTGTTCTCATTTGCAGCATTAGGTGGCTGGTTTTCTCTCGGTTTTACAGCAGGTGCTTGTTTAGAGTTGTTCTCTTTGATTGGTTCTTGGTTCATTGCTGCAGTAGAACCACTTTCTCAAGGAATTACTAATTTTGCTAATGGTAAAATGCATGGTCGTCGTTTCAATATTGGTTTGGACTGGCCATTTATTGCCGGACGTGCAGAGATTTGGGCATGTGCTAACATTCTTGCACCGATTATGCTAGTAGAAGCTATTTTACTCTCTAAAGTTGGTAATGGTATTCTACCGCTTGCTGGTATTATCGCAATGGGCGTAACCCCTGCTTTACTGGTTGTTACACGTGGCCGTTTAATTCGTATGATTACCTTTGGAACATTGCTATTACCGCTATTTCTTTTATCAGGAACAATGATTGCCCCATTTGCAACTGAATTAGCTAAAAAGGTAGGCGCATTCCCAGCTGGGGCGCGAGCAGGTTCACTTATCACTCACTCTACACTAGAAGGCCCTATGGAGAAAATCTTTGGTTACGTTATTGGTAAAGCGACAACAGGTCAATTATCAGCGATTATAACATTAATTATTTTTGCGACAGCTTATCTTGGTTTGTTTATGTGGTATGCTAAACAAATGAAACGCCGTAATGCAGAATATGCAGCTAATCAAAAATAA

SEQ ID NO: 3480 - protein, 482 aa, Streptococcus agalactiae
MQVFLNIVNKFFDPIIHMGSGVVMLIVMTGLAMIFGVKFSKALEGGIKLAIALTGIGAIIGILTGAFSESLQAFVKNTGINLSIIDVGWAPLATITWGSPYTLYFLLIMLIVNIVMIVMKKTDTLDVDIFDIWHLSITGLLIMWYAKKNNLPTLLSVIIATVAIIFVGVLKIINSDLMKPTFDDLLGTGPTSPMTSTHMNYMMNPIIMVLDKLFDKVFPGLDKYDFDAAKLNKAIGFWGSKFFIGMILGLVIGIMGNPVFSFAALGGWFSLGFTAGACLELFSLIGSWFIAAVEPLSQGITNFANGKMHGRRFNIGLDWPFIAGRAEIWACANILAPIMLVEAILLSKVGNGILPLAGIIAMGVTPALLVVTRGRLIRMITFGTLLLPLFLLSGTMIAPFATELAKKVGAFPAGARAGSLITHSTLEGPMEKIFGYVIGKATTGQLSAIITLIIFATAYLGLFMWYAKQMKRRNAEYAANQK

SEQ ID NO: 3481 - protein, 306 aa, Streptococcus agalactiae
ATGATCAAAATATTAGCAGCTTGTGGTGCAGGCGTAAACTCAAGTCATCAAATTAAAGATGCTATCGAGACACAATTAGGAGATAGAGGTTACAATGTACATTGTGATGCTGTTATGGTTAAGGATATCACTGAGGAAATGGTCAACAAATATGATATCTTTACTCCTATTGCTAAAACTGATTTAGGTTTTAATGTACCAATTCCAGTTGTAGAAGCAGGACCTATTCTTTATCGCATACCAGTTATGAGCGAACCGGTCTTTACTGCTTTAGAACAAGTTATCAAAGAACACAATCTATCATAA

SEQ ID NO: 3482 - protein, 101 aa, Streptococcus agalactiae
MIKILAACGAGVNSSHQIKDAIETQLGDRGYNVHCDAVMVKDITEEMVNKYDIFTPIAKTDLGFNVPIPVVEAGPILYRIPVMSEPVFTALEQVIKEHNLS

SEQ ID NO: 3483 - protein, 465 aa, Streptococcus agalactiae
GTGACTCAAGATATTTTATTTATTGATGCCCATTCTCAGGAAGAATTATTTGACTTAGTATCAAAAGCATTGATAAAACAACACTATGTTAGTCCTAACTACCGACAGGCAGTAAAAGAAAGGGAGAGAGAGTTTCCAACGGGGTTAAAAATTGATTTAAAAGATGGGACTCCTATTCAATATGTTGCTATTCCACACACTGAAACGCAGTATTGTCTAGTAGATAGAATCTTTTATGTCAAAAATAGTCAGCCAATTACTTTCAAACATATGATTAATCCAGAAGAGGAGTGTAGGGTTCAGGATTTTTTCTTCATCATTAATAGTAGGAATAGTAACCAAAGTGATATTTTATCTAATTTGATTACCTTCTTTATTACAAAAGGAAACCTAGATCGGCTACATGAGCTTGGCGACAATAAAGAAAAAATTAATCATTATTTAATAGAAAAAGGAGTGTTTTAA

SEQ ID NO: 3484 - protein, 154 aa, Streptococcus agalactiae
MTQDILFIDAHSQEELFDLVSKALIKQHYVSPNYRQAVKEREREFPTGLKIDLKDGTPIQYVAIPHTETQYCLVDRIFYVKNSQPITFKHMINPEEECRVQDFFFIINSRNSNQSDILSNLITFFITKGNLDRLHELGDNKEKINHYLIEKGVF

SEQ ID NO: 3485 - protein, 1140 aa, Streptococcus agalactiae
ATGACACATGAGCATTGGGTACCAAAGAAAGATTTATCAGAGTCGGAATTAAAAGCAGCTCAAGAATTTCTTTCAGGAAAATCTGAAGCAAATCAAGACAAACCAAAAACAGGTAAAACAGCTCAAGAAATCTATGAGGCAATTGAACCAAAAGCAATTGTTAAACCTGAAGATTTATTATTTGGAATTGCACAAGCGACAGACTATAAGAATGGTACATTTGTAATTCCTCATAAAGATCATTACCATTATGTGGAATTAAAATGGTTTGATGAAGAAAAAGATCTTTTAGCTGATTCAGATAAGACATATTCTTTAGAAGACTATTTAGTTACGGCTAAATATTACATGATGCACCCAGAAAAACGTCCTAAAGTTGAAGGATGGGGTAAAGATGCTGAAATTTATAAGGAAAAGGACTCTAATAAAGCAGATAAACCAAGTCCTGCACCAACTGATAATAAATCAACATCAAATTCTAGTGACAAAAACTTAAGTGCTGCAGAAGTATTCAAACAAGCAAAACCAGAAAAAATTGTACCGCTTGATAAAATTGCTGCTCACATGGCATATGCAGTTGGATTTGAAGATGATCAATTGATTGTTCCTCATCATGATCATTATCATAATGTTCCTATGGCATGGTTTGACAAGGGTGGTTTATGGAAAGCACCAGAAGGCTATACATTACAACAACTCTTCTCAACAATTAAATACTACATGGAACATCCTAATGAATTACCAAAAGAAAAAGGTTGGGGACACGACAGTGATCATAACAAAGGCTCAAATAAAGACAATAAAGCCAAAAATTATGCTCCAGATGAAGAACCTGAAGATTCAGGGAAAGTAACTCACAACTATGGTTTTTATGATGTTAATAAAGGTTCAGACGAAGAAGAACCAGAAAAACAAGAAGATGAATCAGAGCTAGATGAATATGAACTAGGAATGGCACAAAACGCTAAGAAATATGGTATGGATAGACAATCTTTTGAAAAGCAACTCATCCAATTATCAAATAAATATAGTGTAAGTTTTGAAAGCTTTAATTATATTAATGGTAGTCAAGTTCAAGTTACTAAAAAAGATGGCTCTAAAGTGCTTGTTGATATTAAAACACTAACAGAAGTGAAATAA

SEQ ID NO: 3486 - protein, 379 aa, Streptococcus agalactiae
MTHEHWVPKKDLSESELKAAQEFLSGKSEANQDKPKTGKTAQEIYEAIEPKAIVKPEDLLFGIAQATDYKNGTFVIPHKDHYHYVELKWFDEEKDLLADSDKTYSLEDYLVTAKYYMMHPEKRPKVEGWGKDAEIYKEKDSNKADKPSPAPTDNKSTSNSSDKNLSAAEVFKQAKPEKIVPLDKIAAHMAYAVGFEDDQLIVPHHDHYHNVPMAWFDKGGLWKAPEGYTLQQLFSTIKYYMEHPNELPKEKGWGHDSDHNKGSNKDNKAKNYAPDEEPEDSGKVTHNYGFYDVNKGSDEEEPEKQEDESELDEYELGMAQNAKKYGMDRQSFEKQLIQLSNKYSVSFESFNYINGSQVQVTKKDGSKVLVDIKTLTEVK

SEQ ID NO: 3487 - protein, 111 aa, Streptococcus agalactiae
TTGAATACTTCTGCAGCACTTAAGTTTTTGTCACTAGAATTTGATGTTGATTTATTATCAGTTGGTGCAGGACTTGGTTTATCTGCTTTATTAGAGTCCTTTTCCTTATAA

SEQ ID NO: 3488 - protein, 36 aa, Streptococcus agalactiae
MNTSAALKFLSLEFDVDLLSVGAGLGLSALLESFSL

SEQ ID NO: 3489 - protein, 1446 aa, Streptococcus agalactiae
ATGAATCGTAAAAAAACAGTTATTATTAGTGCTTTATCAGTAGCTCTATTTGGTACTGGTGTAGGTGCTTACCAATTAGGTAGCTATAATGCCCAAAAATCAGACAATAGTGTTTCTTATGTGAAAACAGATAAATCTGATAGCAAAGCACAAGCAACAGCTGTAAATAAAACGCCCGACCAAATCAGTAAAGAAGAAGGCATATCTGCAGAACAAATCGTTGTTAAAATTACTGACGACGGTTATGTGACTTCTCATGGAGACCATTACCATTATTACAATGGGAAAGTGCCATATGATGCCATCATTAGTGAAGAATTGATTATGAAAGACCCTAGCTATGTCTTTAATAAAGCTGATGTCATTAATGAAGTCAAAGATGGTTATATTATCAAAGTTAACGGTAAGTATTACCTCTATCTTAAAGAAGGTAGCAAACGAACAAATGTTCGTACAAAGGAACAAATCCAAAAGCAACGCGAAGAATGGTCTAAGGGTGGTTCTAAGGGAGAATCAGGAAAGCATAGTAGTGCAAAAACTCAAGCTTTATCAGCCAGCGTACGTGAAGCGAAAGCTAGCGGTCGCTATACTACAGATGATGGTTATGTTTTTAGTCCAACAGATGTCATTGATGACATGGGAGATGCCTTTTTAGTACCACATGGCGATCATTTCCATTATATCCCGAAAGCTGATTTATCTCCATCAGAGTTATCAGCCGCACAGGCATATTGGAACCGCAAGACTGGCCGATCAGGTAATAGCTCAAAACCATCAAATTCAAGTTCATACATTCATGCAAGTGCACCAAGCGGTAATGTATCAACAGGAAGACATGCTAATGCCCCTATTTCTATTCCAAGAGTCACTCACGCAAATCACTGGTCAAAACCAGCTGGTAATCATGCTACGGCACCAAAACACCATGCACCTACAACCAAACCAATCAACAAAGATTCTGCTTTAGACAAAATGTTGAAACGTTTATATGCTCAACCGTTATATGCTCGTCACGTAGAAAGTGATGGTTTGGTTTATGACCCAGCACAAGTTAATGCTTTCACAGCAATCGGTGTTTCTATTCCGCACGGTAATCATTTCCACTTTATTCACTATAAGGATATGTCTCCATTAGAGTTAGAAGCAACAAGGATGGTGGCAGAGCATAGAGGACATCATATTGATGCATTAGGGAAAAAAGATTCTACAGAGAAACCAAAGCATATTTCTCATGAACCTAATAAGGAACCTCACACAGAGGAAGAACACCATGCAGTAACACCGAAAGACCAACGTAAAGGCAAACCAAATAGCCAGATTGTCTACAGTGCTCAAGAAATTGAAGAGGCAAAAAAGCTGGTAAATACACAACATCTGATGGTTACATTTTTGATGCCAAAGATATTAAAAAAGATACAGGTACAGGTTATGTCATTCCACATATGA

SEQ ID NO: 3490 - protein, 481 aa, Streptococcus agalactiae
MNRKKTVIISALSVALFGTGVGAYQLGSYNAQKSDNSVSYVKTDKSDSKAQATAVNKTPDQISKEEGISAEQIVVKITDDGYVTSHGDHYHYYNGKVPYDAIISEELIMKDPSYVFNKADVINEVKDGYIIKVNGKYYLYLKEGSKRTNVRTKEQIQKQREEWSKGGSKGESGKHSSAKTQALSASVREAKASGRYTTDDGYVFSPTDVIDDMGDAFLVPHGDHFHYIPKADLSPSELSAAQAYWNRKTGRSGNSSKPSNSSSYIHASAPSGNVSTGRHANAPISIPRVTHANHWSKPAGNHATAPKHHAPTTKPINKDSALDKMLKRLYAQPLYARHVESDGLVYDPAQVNAFTAIGVSIPHGNHFHFIHYKDMSPLELEATRMVAEHRGHHIDALGKKDSTEKPKHISHEPNKEPHTEEEHHAVTPKDQRKGKPNSQIVYSAQEIEEAKKLVNTQHLMVTFLMPKILKKIQVQVMSFHI

SEQ ID NO: 3491 - protein, 924 aa, Streptococcus agalactiae
ATGAAAAGGATACGGAAAAGCCTTATTTTTGTTCTCGGAGTAGTTACCCTAATTTGCTTATGTGCTTGTACTAAACAAAGCCAGCAAAAAAATGGCTTGTCAGTAGTGACTAGCTTTTATCCAGTATATTCCATTACAAAAGCAGTTTCTGGTGATTTGAATGATATTAAAATGATTCGATCACAGTCAGGTATTCATGGTTTTGAACCCTCATCAAGTGATGTTGCTGCCATTTATGATGCTGATCTATTTCTTTATCATTCGCACACACTAGAAGCTTGGGCGAGACGTTTGGAACCTAGTTTGCATCACTCTAAAGTATCTGTAATTGAAGCTTCAAAAGGTATGACTTTGGATAAAGTTCATGGCTTAGAAGATGTAGAGGCAGAAAAAGGAGTAGATGAGTCAACCTTGTATGACCCTCACACTTGGAATGACCCTGTAAAAGTATCTGAGGAAGCACAACTCATCGCTACACAATTAGCTAAAAAGGATCCTAAAAACGCTAAGGTTTATCAAAAAAATGCTGATCAATTTAGTGACAAGGCAATGGCTATTGCAGAGAAGTATAAGCCAAAATTTAAAGCTGCAAAGTCTAAATACTTTGTGACTTCACATACAGCATTCTCATACTTAGCTAAGCGATACGGATTGACTCAGTTAGGTATTGCAGGTGTCTCAACCGAGCAAGAACCTAGTGCTAAAAAATTAGCCGAAATTCAGGAGTTTGTGAAAACATATAAGGTTAAGACTATTTTTGTTGAAGAAGGAGTCTCACCTAAATTAGCTCAAGCAGTAGCTTCAGCTACTCGAGTTAAAATTGCAAGTTTAAGTCCTTTAGAAGCAGTTCCCAAAAACAATAAAGATTACTTAGAAAATTTGGAAACTAATCTTAAGGTACTTGTCAAATCGTTAAATCAATAG

SEQ ID NO: 3492 - protein, 307 aa, Streptococcus agalactiae
MKRIRKSLIFVLGVVTLICLCACTKQSQQKNGLSVVTSFYPVYSITKAVSGDLNDIKMIRSQSGIHGFEPSSSDVAAIYDADLFLYHSHTLEAWARRLEPSLHHSKVSVIEASKGMTLDKVHGLEDVEAEKGVDESTLYDPHTWNDPVKVSEEAQLIATQLAKKDPKNAKVYQKNADQFSDKAMAIAEKYKPKFKAAKSKYFVTSHTAFSYLAKRYGLTQLGIAGVSTEQEPSAKKLAEIQEFVKTYKVKTIFVEEGVSPKLAQAVASATRVKIASLSPLEAVPKNNKDYLENLETNLKVLVKSLNQ

SEQ ID NO: 3493 - protein, 444 aa, Streptococcus agalactiae
ATGAAAATCATTATTCAACGTGTTAATCAAGCAAGTGTTTCTATTGAAGATGATGTAGTCGGATCTATTGAGAAGGGTTTAGTACTTCTAGTTGGGATTGCTCCAGAAGATACAACAGAAGATATTGCTTATGCAGTTCGTAAAATTACTAGCATGCGTATTTTTTCTGATGATGAGGGGAAAATGAACCTTTCAATTCAAGACATTAAAGGAAGCGTCTTATCTATCTCACAATTTACACTCTTTGCAGATACCAAAAAAGGAAATCGTCCAGCTTTTACTGGGGCAGCTGATCCTGTTAAAGCGAATCAGTTTTATGATATCTTTAATCAAGAATTAGCAAATCATGTTTCGGTAGAAACAGGTCAATTTGGAGCTGATATGCAAGTCAGTCTGATTAATGATGGACCAGTAACTATCGTTTTAGATACTAAAAATAAATAA

SEQ ID NO: 3494 - protein, 147 aa, Streptococcus agalactiae
MKIIIQRVNQASVSIEDDVVGSIEKGLVLLVGIAPEDTTEDIAYAVRKITSMRIFSDDEGKMNLSIQDIKGSVLSISQFTLFADTKKGNRPAFTGAADPVKANQFYDIFNQELANHVSVETGQFGADMQVSLINDGPVTIVLDTKNK

SEQ ID NO: 3495 - protein, 414 aa, Streptococcus agalactiae
ATGCGTATTGCAAAATGTTGTAATCCCGTTCCTGGAGATCTCATTGAAGGCTATATAACTAAAGGTAGAGGCGTGGCTATCCATCGTTCAGATTGTCAAAATTTAAAGAGTCAGGAGAACTACGAACAACGTTTGATTGATGTTGAGTGGGATGATGATGGATCTAAAAAAGAGTACATGGCTGAAATCGATATTTATGGTTTGAATCGTAGTGGCCTCCTTAATGATGTTCTTCAAACCTTATCAAATGCAACAAAGCTAGTATCGACAGTAAATGCACAACCAACAAAAGATATGAAATTTGCTAATATTCATGTTAGCTTTGGAATTTCAAATTTAGCACAATTGACAACTGTGGTTGATAAAATCAAAATTATCCCAGATGTTTATTCTGTTAAACGTACGAATGGTTAG

SEQ ID NO: 3496 - protein, 137 aa, Streptococcus agalactiae
MRIAKCCNPVPGDLIEGYITKGRGVAIHRSDCQNLKSQENYEQRLIDVEWDDDGSKKEYMAEIDIYGLNRSGLLNDVLQTLSNATKLVSTVNAQPTKDMKFANIHVSFGISNLAQLTTVVDKIKIIPDVYSVKRTNG

SEQ ID NO: 3497 - protein, 1479 aa, Streptococcus agalactiae
ATGGTCAAAGAAATTAATTTAACAGGAGAAGAGGTTGTTGCAATCACATCCCAGTACATGAGTGAGACGGATGTTGCTTTTGTAAAATTTGCCTTAAATTACGCAACCGCAGCTCATTATTATCAAGCAAGAAAGTCGGGCGAGCCCTACATTATTCATCCAATTCAAGTAGCAGGTATTCTTGCAGATTTACACCTTGATGCCGTTACGGTAGCTTGTGGTTTTTTACATGATGTTGTAGAAGATACGGAAATTACCCTTGATGAGATTGAAACTGATTTTGGCAAGGATGTTCGCGATATTATTGACGGCGTAACAAAATTGGGTAAAGTGGAGTACAAATCTCATGAAGAACAGTTAGCAGAAAATCACCGTAAAATGTTAATGGCTATGTCTAAGGATATCCGTGTTATTTTGGTTAAGCTCGCTGACCGCTTACATAATATGAGAACCCTTAAACACCTCAGAAAAGATAAACAAGAGCGTATTTCACGTGAGACTATGGAAATATACGCTCCTTTAGCGCATCGTTTGGGGATTAGTCGTATCAAGTGGGAATTAGAAGATTTATCTTTTCGTTACTTGAATGAGACGGAATTTTATAAGATTTCTCATATGATGAGTGAAAAACGTCGTGAACGCGAAGAGTTGGTTGATATAATTGTCGATAAAATCAGATCCTATACTGAGGAACAGGGTTTATATGGTGATATTTATGGTAGACCAAAACACATTTATTCTATTTACAGAAAAATGCGTGATAAAAAGAAACGCTTTGATCAGATTTATGATTTAATTGCGATACGCTGTATCATGGAAACTGCTAGTGATGTTTATGCCATGGTGGGGTATATCCATGAGTTATGGCGTCCTATGCCAGGAAGGTTTAAAGATTATATTGCGGCACCAAAGGCCAATGGTTATCAATCTATTCACACGACGGTTTATGGACCTAAAGGGCCAATTGAAATTCAGATTCGAACTAAAGAAATGCATCAAGTTGCCGAGTTTGGTGTTGCAGCCCATTGGGCCTATAAAAAAGGAATCACCAGTAAGGTTAATCAAGCAGAGCAATCGGTTGGTATGGGATGGATTCAAGAATTAGTTGAGCTTCAAGATGAATCAAAAGACGCCAAGGATTTTGTTGACTCTGTTAAGGAAGATATCTTTACAGAACGCATCTATGTTTTTACCCCAAATGGTGCTGTTCAGGAATTGCCAAGGGAATCTGGACCAATTGATTTTGCTTATGCTATTCACACGCAAGTTGGAAAAAAAGCTACTGGCGCTAAAGTAAATGGACGTATGGTTCCATTGACTGCTAAGTTAAAAACAGGAGATGTTGTTGAGATTATCACAAACCCTAATTCATTTGGAACAAGTCGTGACTGGATTAAGATTGTTAACACCAATAAAGCTCGCAATAAAATTCGTCAGTTCTTCAAAACCAAGATAANNNNNCATTCATTCATTAATTAA

SEQ ID NO: 3498 - protein, 492 aa, Streptococcus agalactiae
  VARIANT 486, 487: Xaa = Any Amino Acid
MVKEINLTGEEVVAITSQYMSETDVAFVKFALNYATAAHYYQARKSGEPYIIHPIQVAGILADLHLDAVTVACGFLHDVVEDTEITLDEIETDFGKDVRDIIDGVTKLGKVEYKSHEEQLAENHRKMLMAMSKDIRVILVKLADRLHNMRTLKHLRKDKQERISRETMEIYAPLAHRLGISRIKWELEDLSFRYLNETEFYKISHMMSEKRREREELVDIIVDKIRSYTEEQGLYGDIYGRPKHIYSIYRKMRDKKKRFDQIYDLIAIRCIMETASDVYAMVGYIHELWRPMPGRFKDYIAAPKANGYQSIHTTVYGPKGPIEIQIRTKEMHQVAEFGVAAHWAYKKGITSKVNQAEQSVGMGWIQELVELQDESKDAKDFVDSVKEDIFTERIYVFTPNGAVQELPRESGPIDFAYAIHTQVGKKATGAKVNGRMVPLTAKLKTGDVVEIITNPNSFGTSRDWIKIVNTNKARNKIRQFFKTKIXXHSFIN

SEQ ID NO: 3499 - protein, 2403 aa, Streptococcus agalactiae
ATGTCAAAACATTATTTTTCAAAAAGCGTATTCGCTTTAACTGTCTTAACAGCTACAGCAACAAGTGGTTTAGCTGTTCAAGCAGAAGACATTGTTACAACACCAAGTTCAACCTCTACAAAGGTTGAATCAACTACCCCCACTAGCACAATTGCAGAGGAAAAGTCAAACGTTACTTCTACTCCAACTGCAATAACTGATGCTTCAACAGCCACAAGCACAAATACCACTACCAATAACCAAAATCCACAGCCTGTTGCCACAGAAGCCACAACTAGTGATCTCAAACCTATTGAAGGTGAAAAAGTTGACCTTCGCATCATGTCAACCACAGACCTACACACCAATTTAGTTAACTATGATTATTATCAAGATAAAGAATCTCAAAAAATAGGGTTAGCAAAAACTGCTGTCCTTATTGAAGAAGCAAAAAAAGAAAATCCTAATACCGTCTTAGTTGATAACGGAGATGTCATTCAAGGGACACCTTTAGGAACTTATAAAGCAATCGTTAAACCTGTCGCAGAAAATGAAGAACATCCTATGTACCAAGCCATGAATGCTCTTGGTTATGATGCATCAACACTAGGTAATCATGAGTTTAATTACGGTTTAGATTACCTCAAAAAAATCATTGCTACAGCCAACCTTCCAATCCTCAACGCAAATGTTTTGGATTTCAAAACACATCAACCAGTTTTTAAAACTTATGACATCATTACTAAAACCTTCAAAGATTCAACAGGAAGAGCTGTTGCACTAAATATTGGGATTACAGGAATTGTACCTCCTCAAATCTTAAACTGGGACAAGGCTAACCTAGAGGGAAAGGTTATTGTCAAAGATTCAGTTAAAGCAATCGAAGAAATCGTTCCTACTATGCGTGCTAAAGGAGCAGATGTCATTCTCGTTTTATCACACTCTGGCATTGGAGATGATCGATATGAAGAAGGTGAAGAAAACGTTGGCTATCAAATTGCCAGCATCAAGGGAGTGGATGCCGTTGTTACGGGACACTCACACGCTGAATTTCCATCAGGTAACGGTACTGGCTTCTATGAAAAATACACTGGAGTTGATGGTATCAATGGAAAAATAAATGGAACACCTGTTACAATGGCAGGCAAGTACGGGGATCATCTTGGTATTATTGATTTAGGACTTAGTTATACTAATGGAAAATGGCAAGTCTCCGAAAGTAGTGCTAAAATCCGTAAAATTGATATGAACTCAACAACTGCTGACGAGCGTATCATTGCATTGGCTAAGGAAGCACACGATGGCACTATCAACTATGTTCGCCAACAAGTAGGTACAACAACTGCGCCAATTACAAGTTACTTTGCACTAGTTAAAGATGACCCTTCAGTTCAAATTGTTAACAACGCTCAACGTTGGTACGTTGCAAATGAATTGAAAGGAACACCTGAGGCAAATTTACCACTTCTATCTGCTGCAGCACCATTTAAAGCTGGAACACGCGGCGATGCTACCGCATATACTGATATTCCAGCTGGACCTGTTGCAATTAAAAACGTAGCTGATCTTTACCTTTATGATAATGTTACTGCACTTTTAAAAGTGACCGGAGCAGACTTACGTGAATGGTTAGAAATGTCCGCTGGTCAATTTAACCAAATTGACCCTAACAATAAAGCACCACAAAATATTATCAATACCGAATATCGTACCTATAATTTTGACGTTATTGACGGCTTGACTTATAAATTTGATATTACACAACCTAATAAATACAATAAAGATGGAAAAGTTGTTAATAGTCAAGCTAGTCGAGTACGCGATTTAATGTACAATGGTAAGCCTGTTGCAGACAAACAAGAGTTTATGATTGTGACCAATAACTACCGTGCTAGTGGTACCTTCCCTGGGGCTAAAAATGCCACAATGAACCGTTTGCTGAACTTAGAAAATCGCCAAACTATTATCAACTATATTATTTCAGAGAAAACCATCAATCCTACAGCTGATAATAACTGGGGCTTCACAGAGTCTATTAAAGACCTTGATTTACGATTCCAAACAGCCGATAAAGCTAAAAATCTTGTTACTAATAGCAAGGATATTCAGTATATCGCTAGTTCTACCAAAGATGAAGGATTTGGTGATTATCGATTTGTCTATACTGAACAAGAAAAAGTAGACCTTACTGAGCCATCACATCAAGAAAAGTTAAGCCAAATAGAAAAACAAAAAATTCACCACATGGTTGCAACTGCTTATACAAAAGCAAAAGCTTCTCCAAATATTACAGGCACTGTCTATACACAACAGAAAGAAAAAACATTACCTAAAACTGGACAAGAAAAACAATCTTATCTGGCTTTCTTTGGTGTCGCAATACTTGGACTCGTGGGAAGTTTACTTAAAAAGAAACAAATATAG

SEQ ID NO: 3500 - protein, 800 aa, Streptococcus agalactiae
MSKHYFSKSVFALTVLTATATSGLAVQAEDIVTTPSSTSTKVESTTPTSTIAEEKSNVTSTPTAITDASTATSTNTTTNNQNPQPVATEATTSDLKPIEGEKVDLRIMSTTDLHTNLVNYDYYQDKESQKIGLAKTAVLIEEAKKENPNTVLVDNGDVIQGTPLGTYKAIVKPVAENEEHPMYQAMNALGYDASTLGNHEFNYGLDYLKKIIATANLPILNANVLDFKTHQPVFKTYDIITKTFKDSTGRAVALNIGITGIVPPQILNWDKANLEGKVIVKDSVKAIEEIVPTMRAKGADVILVLSHSGIGDDRYEEGEENVGYQIASIKGVDAVVTGHSHAEFPSGNGTGFYEKYTGVDGINGKINGTPVTMAGKYGDHLGIIDLGLSYTNGKWQVSESSAKIRKIDMNSTTADERIIALAKEAHDGTINYVRQQVGTTTAPITSYFALVKDDPSVQIVNNAQRWYVANELKGTPEANLPLLSAAAPFKAGTRGDATAYTDIPAGPVAIKNVADLYLYDNVTALLKVTGADLREWLEMSAGQFNQIDPNNKAPQNIINTEYRTYNFDVIDGLTYKFDITQPNKYNKDGKVVNSQASRVRDLMYNGKPVADKQEFMIVTNNYRASGTFPGAKNATMNRLLNLENRQTIINYIISEKTINPTADNNWGFTESIKDLDLRFQTADKAKNLVTNSKDIQYIASSTKDEGFGDYRFVYTEQEKVDLTEPSHQEKLSQIEKQKIHHMVATAYTKAKASPNITGTVYTQQKEKTLPKTGQEKQSYLAFFGVAILGLVGSLLKKKQI

SEQ ID NO: 3501 - protein, 456 aa, Streptococcus agalactiae
ATGCCTAAATTAACCCTAGTCTATATCAGTCTTAGCGGCAATACTCAAAGCTTTGTCAAACGTCTTAGTGAACAACTGTCAACTTGGCATAACTGTCAGGTTTCGACTATTAATATCAAGGAACAAAATCATCAAACCTTTCCTGTTGACCAACCTTTCGTAGCACTATTACCCACTTACCTTGAGGGAGGAAATGGCATTGACAATGGCGATCAAGAAATTCTTACCATTCCACTTGGTGATTTTATAGCTGCACACAATAATGTCAAAAATTGTATCGGAATTGTTGGCTCTGGAAATAGAAATTTTAACAATCAGTACTGTTTAACTGCAAAACAATACTCTGAACGGTTTGGATTTCCTATGTTAGGAGACTTTGAATTGCGAGGAACTTCTAGCGACGTTGAACGTATCGCAAATATTATCGTTGAAACATTATCGAACTTTAAAGCCTAA

SEQ ID NO: 3502 - protein, 151 aa, Streptococcus agalactiae
MPKLTLVYISLSGNTQSFVKRLSEQLSTWHNCQVSTINIKEQNHQTFPVDQPFVALLPTYLEGGNGIDNGDQEILTIPLGDFIAAHNNVKNCIGIVGSGNRNFNNQYCLTAKQYSERFGFPMLGDFELRGTSSDVERIANIIVETLSNFKA

SEQ ID NO: 3503 - protein, 1038 aa, Streptococcus agalactiae
ATGGAAACAACATTAAACTACATTAAAACCCTGACATCAATCCCTTCACCAACAGGGTTTACCCAAACAATCATGACCTATATCATCAAAGAATTGGAAGCGTTTGGCTACTCACCAATTCGCACAAACAAGGGAGGCGTCATGGTTTCTCTAAAAGGAAAAAATGATACTAAACATCGCATGATAACTGCTCACCTTGATACACTTGGTGCTATGGTTAGGGCCATCAAACCAGATGGTCGGTTAAAAATTGACCTTATTGGTGGATATACATACAATGCCATTGAAGGAGAAAACTGTACTATACACCTCTCAAAAAATGGTAAAGAAATTTCTGGAACTGCTCTTATTCATCAAACTAGTGTCCATGTTTACAAAGACGCTGGAACTGCTGAACGTAATCAAACAAATATGGAAATTCGTTTAGATGAGAAAGTAACAACTGCTGACGAAACACGTGCTTTAGGCATCCAGGTCGGTGATTTCATTTCATTTGATCCGCGTACAATCATAACAGACAGCGGCTTTATTAAATCACGTTACCTAGATGACAAGGTATCCGCTGGTATCCTAATGGAACTTCTTTCTGTTTACAAGAAAGAAGACATTCAACTTCCTTATACTACTCATTTCTACTTTAGTGCCTTTGAAGAGCTAGGACATGGAGCAAATTCAAGCATCCCAAATGAAACTGTAGAATATCTAGCAGTTGATATGGGAGCTATGGGAGACGATCAAGAAACTGACGAATATACTGTCTCTATCTGTGTTAAAGATGCTTCTGGTCCTTATCATTATGAATTACGTCAACATCTTGTTTCTCTAGCTGAAAACAATAATATTCCTTATAAACTTGATATTTATCCTTATTATGGTAGTGACGCCTCCGCTGCCATGCGTGCTGGTGCGGAAGTTAAACACGCGCTACTTGGTGCAGGTATTGAATCTAGTCATTCTTATGAACGTACCCATATCGATTCTATTCAAGCAACTGAACTCTTAGTGGATGCCTATCTCAAAAGCAATATGGTGGACTAA

SEQ ID NO: 3504 - protein, 345 aa, Streptococcus agalactiae
METTLNYIKTLTSIPSPTGFTQTIMTYIIKELEAFGYSPIRTNKGGVMVSLKGKNDTKHRMITAHLDTLGAMVRAIKPDGRLKIDLIGGYTYNAIEGENCTIHLSKNGKEISGTALIHQTSVHVYKDAGTAERNQTNMEIRLDEKVTTADETRALGIQVGDFISFDPRTIITDSGFIKSRYLDDKVSAGILMELLSVYKKEDIQLPYTTHFYFSAFEELGHGANSSIPNETVEYLAVDMGAMGDDQETDEYTVSICVKDASGPYHYELRQHLVSLAENNNIPYKLDIYPYYGSDASAAMRAGAEVKHALLGAGIESSHSYERTHIDSIQATELLVDAYLKSNMVD

SEQ ID NO: 3505 - protein, 498 aa, Streptococcus agalactiae
ATGGTAGCCACGCTCATTATTATCAGGGGAAATTCAGCTAGCGGAAAGTCTACAATAGCTAAGCAACTTCAAGCCGAATTAGGGGAAAATACCCTTCTCTTATCTCAGGATTACCTTCGTAGAGAGATGTTAGGAACTAAGGATGGTGAAAATACTACTACCATTCCCCTTTTGATCAATTTACTAAATTATGGTTACCATAACTGTTCCTACATCATCCTTGAAGGCATACTTCGTTCTGATTGGTATACGCCTGTTTGGAAACATATTTTAAAACATAACCCCAACAATACTTATGCTTATTACTATGATTTAAGCTTTCAAGAAACTGTTAAAAGACATTCAACTCGACTTAAATCTTTAGAATTTGGAGAAGATTCTCTTGCAAGATGGTGGCTTGAGAAAGATTTCTTAAAAGAGATACCTGAAAAAATATTAACAAAAGCTATGAGTTTAGAGGATGTCAAAAAACTTATAATGACCGACGTTTTACCTTAA

SEQ ID NO: 3506 - protein, 165 aa, Streptococcus agalactiae
MVATLIIIRGNSASGKSTIAKQLQAELGENTLLLSQDYLRREMLGTKDGENTTTIPLLINLLNYGYHNCSYIILEGILRSDWYTPVWKHILKHNPNNTYAYYYDLSFQETVKRHSTRLKSLEFGEDSLARWWLEKDFLKEIPEKILTKAMSLEDVKKLIMTDVLP

SEQ ID NO: 3507 - protein, 1038 aa, Streptococcus agalactiae
ATGAAAGAAAAACAGTCGAAAAGGCTTATTTATATACTACTGGTTGTTTCCATTATTTTTATAAGTGTTTTTACATACAGTATTAGCCAGCCTTCTAAACTACTTCCACCAAAAGAATTAGTTATTCTAAGTCCAAATAGTCAAGCCATTTTAACAGGAACGATTCCAGCTTTTGAGGAAAAATACGGTATAAAAGTTAAGCTTATTCAAGGTGGGACAGGGCAACTAATAGATAGATTAAGTAAGGAGGGTAAGCAGTTGAAGGCGGATATTTTCTTTGGAGGAAATTATACGCAATTTGAAAGTCATAAGGCATTGTTTGAGTCTTACGTATCAAAGAATGTTCATACTGTTATTCCAGACTATATCCATCCAAGTGATACGGCGACACCTTATACTATAAATGGGAGTGTCTTGATTGTAAATAACGAATTAGCTAAGGGACTTACCATCAAGAGTTATGAAGATTTATTACAGCCTTCCTTAAAAGGTAAAATTGCCTTTGCAGATCCGAATACTTCCTCTAGTGCTTTCTCACAACTCACTAATATACTCTTGGCCAAGGGTGGTTACACCAATCCAAAAGCGTGGAACTATGTTAAAAAGCTACAACATAATATTAATGCTATCAAATCTTCTAGCTCTTCAGAAGTTTATCAATCAGTTGCAGAAGGAAAAATGATTGTGGGGCTGACTTACGAAGACCCTAGTGTCAATTTGCAAAAAAGTGGTGCCAATGTTTCTATTGTATATCCGACAGAAGGGACAGTTTTTGTCCCATCTTCGGTTGCAATTATAAAGAATGCTCCTTCTATGAAAGAAGCAAAGTTATTTATTAATTTTATGCTTTCTTTAGATGTTCAAAATGCCTTTGGGCAGTCAACGAGTAACCGACCTATTCGTAAAGATGCCCAAACGAGTAATGGCATGAAAGCTTTAAAGGATATTGCTACTCTTAAAGAAGATTATCGCTATGTCACTAAGCATAAGGGCCAAATCCTTAAAACCTATAATCGTATTCGTAGAAATGCTGATTAA

SEQ ID NO: 3508 - protein, 345 aa, Streptococcus agalactiae
MKEKQSKRLIYILLVVSIIFISVFTYSISQPSKLLPPKELVILSPNSQAILTGTIPAFEEKYGIKVKLIQGGTGQLIDRLSKEGKQLKADIFFGGNYTQFESHKALFESYVSKNVHTVIPDYIHPSDTATPYTINGSVLIVNNELAKGLTIKSYEDLLQPSLKGKIAFADPNTSSSAFSQLTNILLAKGGYTNPKAWNYVKKLQHNINAIKSSSSSEVYQSVAEGKMIVGLTYEDPSVNLQKSGANVSIVYPTEGTVFVPSSVAIIKNAPSMKEAKLFINFMLSLDVQNAFGQSTSNRPIRKDAQTSNGMKALKDIATLKEDYRYVTKHKGQILKTYNRIRRNAD

SEQ ID NO: 3509 - protein, 774 aa, Streptococcus agalactiae
ATGTATAGATTACTTATCGTTGAGGATGAGCACCTTATTCGTAAGTGGTTACGCTATGCTATTGATTATCAATCATTGAATATTTTAGTGGTTGGTGAAGCAAAAGATGGTAAAGAAGGAGCTCAATTAATTCAGGAAGAGCAGCCAGACATTGTTTTAAGTGATATTAATATGCCAATTATGACAGCATTCGATATGTTTGAGGCAACCAAAGGACAATCTTATGCCAAAATTATTTTATCTGGCTATGCTGATTTTCCAAATGCGCAATCAGCTATTCACTATGGCGTTCTTGAATTTTTAACAAAACCACTAGAAAAGCAAGCTTTGATTGATTGTTTAAAAACAATTATGGCTAGAATTGAGGAACATAAGGAGAAGCACCTACAAGAGCATACAGAATTGTATTTACCTCTACCACAAGCTAATGACCAAGTTCCTGAAGTTATTAAAGATATGCTAGCATGGATTCATAGCCATTTTCATGGGAAAATTGTGATTAGCCAGTTAGCTCACGATTTAGGTTACAGTGAAAGTTATCTTTACACAGTCACTAAAAAGCACCTTCATATAACTTTGAGTGATTATATAAATCAATATCGTATTAATCAAGCCATTCAGTTGATGTTTAGAGAACCAGACCTAATGGTTTACCAAATTGCAGAAGCTGTTGGTATTTATGATTATCGTTATTTTGATAGGGTTTTTAAAAAGTACTTGGGTCAGACAGTAAAAGCGTTTAAGGAAGAACATATTTTTAAACAAATGGATTAG

SEQ ID NO: 3510 - protein, 257 aa, Streptococcus agalactiae
MYRLLIVEDEHLIRKWLRYAIDYQSLNILVVGEAKDGKEGAQLIQEEQPDIVLSDINMPIMTAFDMFEATKGQSYAKIILSGYADFPNAQSAIHYGVLEFLTKPLEKQALIDCLKTIMARIEEHKEKHLQEHTELYLPLPQANDQVPEVIKDMLAWIHSHFHGKIVISQLAHDLGYSESYLYTVTKKHLHITLSDYINQYRINQAIQLMFREPDLMVYQIAEAVGIYDYRYFDRVFKKYLGQTVKAFKEEHIFKQMD

SEQ ID NO: 3511 - DNA, 1650 bp, Streptococcus agalactiae
atgagaggatatagaatggaagaacgctttaagaaacgactacaagatgatatctctaaacatttttcccgccagtctttaattttatccttgttattgattgcacttttcgtccttttttctttagcgcctcaacagataggtctttataaagatgttaattcagtttcctatagttataagcaattgattcaaaaacatgataccttattagatgacttaggtaaaaatagtttgaaaccatttgtctcaggacacttaggaagtgctgatttgagtaagcaatattatcatttaaggaatcatttacaaagtcaaacagaacttttagtattctcacctaatcaagaacttttgtttgctagtaattcacatttaggtaatttttttagtaagtctatttacattagtgaagttttagataaggctaaaataaatcaaaggctactaaaaattattgtggatagtgagggagggcattaccttgcactcattaagccaattatagttaataaaaaagtttcaggttatgcctttttattgatgaatgggaaagactttttacttccaacgaaggctattaactcagacttgattattgccgatcagctaaataatagctttacttttactaatcgtgattttatctcctctagtttagataaggtagatagtcaattcttaactagatattttagttttcacgatcatcgagcttttgttgttaggaaagtagctctgcaagacaatatcctactttacatgtatcgtcccctgataccagtaactctggtcgtccttttttctctagtatcatcagttattatttttgtgattttacgacaaaaatctagagttctagccgatcgcatcgcagtaaaaaattctagcgccataaatcaaatggtgctagatatggatgccatttcccgccaagaaaaatctagtattgagcttgatagtcaagatgaatttcaatatctatctgtgcaaatcaatcagatggtttcacggttaaaagatttacatgagaaaactcttgatttggaaacacaaaagttgttgtttgaaaagaggatgttagaagctcagtttaatcctcacttcctttataatacccttgagacaattttaataaccagtcactatgattcacaattaacagaaagaatcgttatacaactaacaaaattattgcgctatagccttagtggtagcacagaagcagctgtgcttaaggatgatttagcaatcattgaatcctaccttttgattaatcaagtgagatttgaagaattaacttacactatttcagtatctcctgaacttgaacacatgcgtgtaccaaaacttttcttgttaccgctaattgagaatgctattaaatatggcttaaaagaacgtcatgatgtagcaataaacatagatatttggcaagatagtgatggaatttggtttactgtttcaaataatggatcaggtattagtttggctaggcaacaagccatacgtacaatgttaagatcaactcactcgcatcatgggcttattaattcttatagacgattacaatatcaattttcaacagtattgttagagtttacgaagacagatgatgcttttcgagttagctatatagtaaaggagtga

SEQ ID NO: 3512 - protein, 549 aa, Streptococcus agalactiae
MRGYRMEERFKKRLQDDISKHFSRQSLILSLLLIALFVLFSLAPQQIGLYKDVNSVSYSYKQLIQKHDTLLDDLGKNSLKPFVSGHLGSADLSKQYYHLRNHLQSQTELLVFSPNQELLFASNSHLGNFFSKSIYISEVLDKAKINQRLLKIIVDSEGGHYLALIKPIIVNKKVSGYAFLLMNGKDFLLPTKAINSDLIIADQLNNSFTFTNRDFISSSLDKVDSQFLTRYFSFHDHRAFVVRKVALQDNILLYMYRPLIPVTLVVLFSLVSSVIIFVILRQKSRVLADRIAVKNSSAINQMVLDMDAISRQEKSSIELDSQDEFQYLSVQINQMVSRLKDLHEKTLDLETQKLLFEKRMLEAQFNPHFLYNTLETILITSHYDSQLTERIVIQLTKLLRYSLSGSTEAAVLKDDLAIIESYLLINQVRFEELTYTISVSPELEHMRVPKLFLLPLIENAIKYGLKERHDVAINIDIWQDSDGIWFTVSNNGSGISLARQQAIRTMLRSTHSHHGLINSYRRLQYQFSTVLLEFTKTDDAFRVSYIVKE

SEQ ID NO: 3513 - DNA, 828 bp, Streptococcus agalactiae
atgaaatcacaggataatttgactaaagaagaccgtaaaatgcttcgctcagtcttctggcgctcatggacgatgaatgccagtcgtactggggcaacacaataccacgcagtaggagttatttatactttactaccagtcatcaatcgtttttataagactgataaggataaagcagaggcactggtccgtcatacaacatggtttaatgccaccatgcacattaataattttattatgggtcttgttgcatctatggaaaagaaaaacagtgaagatcctgattttgacgctagtgctatcaccgcagttaaggcttctttgatgggacctatatctggtgttggtgattcattcttttggggaattctaagggttattgcggcaggtatcggtatctccttagcaagtacaggctcagccatgggagctgttgtctttctactcttgtataacattccagcttttctgattcattattatagtctctatggaggttactctgtaggtgcagggtttatcaaaaaattgtatgaatcaggtggtattaaaattgttactaagacttcaagtatgcttggtttaatgatggtaggctcaatgactgcttcaaatgttaaattcaagacaatcttaacggtagcagctaaaggagctaaggaagcagcttccatacaaagttaccttgaccaattatttgttggcgtagtgccactgttggtaacgatattagccttctggcttctacgtaaaaaagtcaatatcaactggatcatgtttggtattatggtgttaggtattgtacttggtctcttaggtatttgctaa

SEQ ID NO: 3514 - protein, 275 aa, Streptococcus agalactiae
MKSQDNLTKEDRKMLRSVFWRSWTMNASRTGATQYHAVGVIYTLLPVINRFYKTDKDKAEALVRHTTWFNATMHINNFIMGLVASMEKKNSEDPDFDASAITAVKASLMGPISGVGDSFFWGILRVIAAGIGISLASTGSAMGAVVFLLLYNIPAFLIHYYSLYGGYSVGAGFIKKLYESGGIKIVTKTSSMLGLMMVGSMTASNVKFKTILTVAAKGAKEAASIQSYLDQLFVGVVPLLVTILAFWLLRKKVNINWIMFGIMVLGIVLGLLGIC

SEQ ID NO: 3515 - DNA, 810 bp, Streptococcus agalactiae
atgataatgccagcgacgatggcagctttagctgtattgatttgttttgggggaaattacttaacaggtcaaagtatgatggagagaccacttgtagttggtcttgtaacaggaatgctactaggtgatattaaggttggtatcctaatgggagcctccctagaagcgctatttttgggaaacgttaatattgggggtgttattgccgcagagccagtaacagcaacagcgatggcaacaacttttaccattatttcaaacattgatcaaaaagcagcaatgactctagctgttccgattggaatgttggcagcatttgttgttatgtttttgaaaaacgtcttcatgaatatctttgcaccgatggtggataaagctgcagccgcaaaccatcaaggtaaacttgtgatgcttcactatggtacatggattatttactatctcattatcgcttctatttctttcattggtattttagtaggtagtgggcctgttaatagttttgtccatcatattcctcaaaacctgatgaatggtttgagtgcggcgggaggcctccttccagctgttggttttgccatgctgatgaaattattatggacaaataaattagctgttttttacttgcttggttttgttttaacagcttatttaaaattaccagcggttgcagttgctgccctaggagcagttatttgcgtcattagttcacaacgtgatatagaattagacgcaattactagaggtgcgatcagtaaacagacaacctttgactctaaagaatcagaagaggaggacttcttcgcatga

SEQ ID NO: 3516 - protein, 269 aa, Streptococcus agalactiae
MIMPATMAALAVLICFGGNYLTGQSMMERPLVVGLVTGMLLGDIKVGILMGASLEALFLGNVNIGGVIAAEPVTATAMATTFTIISNIDQKAAMTLAVPIGMLAAFVVMFLKNVFMNIFAPMVDKAAAANHQGKLVMLHYGTWIIYYLIIASISFIGILVGSGPVNSFVHHIPQNLMNGLSAAGGLLPAVGFAMLMKLLWTNKLAVFYLLGFVLTAYLKLPAVAVAALGAVICVISSQRDIELDAITRGAISKQTTFDSKESEEEDFFA

SEQ ID NO: 3517 - DNA, 492 bp, Streptococcus agalactiae
atgattactcaaattcgtgttgacgaccgtttgattcacgggcaagtggcagttgtatggactaaagaattaaatgcaccacttttagtggtggctaatgatgaagctgcaaaaaatgaaatcacacagatgactcttaaaatggctgtgcctaatggcatgaaattattaatccgttcagttgaagaatcaatagctctatttaaagatccacgtgcaactgacaagcgcatttttgtgattgtcaattctgttaaagatgcctgtacaattgctaaaaatataaccgatttagaagcagtaaacgtcgctaatgtaggacgctttgataagtctgatccagctacaaaagtcaaactaacatcaagtctcttattaaatacagaagagttggaagccgcaaaagaattagccagcttaccagatttagacgtctttaaccaagtattgccttcaaatactaaggttaacttgagtcagttagtcaaataa

SEQ ID NO: 3518 - protein, 163 aa, Streptococcus agalactiae
MITQIRVDDRLIHGQVAVVWTKELNAPLLVVANDEAAKNEITQMTLKMAVPNGMKLLIRSVEESIALFKDPRATDKRIFVIVNSVKDACTIAKNITDLEAVNVANVGRFDKSDPATKVKLTSSLLLNTEELEAAKELASLPDLDVFNQVLPSNTKVNLSQLVK

SEQ ID NO: 3519 - DNA, 426 bp, Streptococcus agalactiae
atgaagcggaaattcctaatcggcagtcacggaaaacttgcgagtgggttgcagagttctattgatattctgacaggcaagggacaagagattcagacaatagatgcttacattgatgatagtgactatactaagtctattgtagaatttattgatgagattgcaccagatgaacaggggcttatttttacagatttgttaggtggcagcgttaatcagaaaatggcgactgctgtaatgaatagtgggaaaaataatatttttttaataacgaacagcaatttagcgaccttgttgtcattactatttttgaaacctgaagaggaattaactaaagaagaaattgtaaccgttatcaatgaatctcaagtgcagctggtagatcttagctttaaagcgggttcagaagatgactttttcgattaa

SEQ ID NO: 3520 - protein, 141 aa, Streptococcus agalactiae
MKRKFLIGSHGKLASGLQSSIDILTGKGQEIQTIDAYIDDSDYTKSIVEFIDEIAPDEQGLIFTDLLGGSVNQKMATAVMNSGKNNIFLITNSNLATLLSLLFLKPEEELTKEEIVTVINESQVQLVDLSFKAGSEDDFFD

SEQ ID NO: 3521 - protein, 1053 aa, Streptococcus agalactiae
ATGAAGAGAAGTCAGTGCGTGGATAATAAGCAGCATAATACATCAATGATTAGTTTGCTACAATACCTTTTTTCCATACTGGTCATTTTAGTTCATAGTGGGAGGTTATTTAGTCAGGATGTCATTCATTTTACCTTTAAAAGTTTCCTAGGTCGGATGGCTGTTCCTTATTTTTTGATTTGTACTGCTTTCTTTTTGAGAGGTCGTATACAGCAAGGTTTGTGTAATCACTCCTACTTTCGTAAACTGATTAAAAAGTATAGCATGTGGACTATCATTTATTTGCCTTATGGTTATTTCTTTTTTGAATCTCTAAATATAGCGAAGATCTATTTGTTGCCGGGGTTTATTGTGGCATTTTTGTATTTAGGTATGTCACATACCCTTTGGTACATCCCTGCTGTTATTCTAGGTTGGGTCATTATTCAAGGATTATTGAAGTATGTAGGAACTAGGGGGACATTTATCACAGTTGTTGTACTCTATTGTATTGGAGCAGTAGAGACCTATTCTGTCTTTATACAGTCAACAAAATTTTATCCCCTGATGTCCACTTATATGTCAATTTTTCAGACAACACGAAACGGATTATTTTACACTCCAGTTTATCTTCTAGCAGGATATTTACTCTATGATTATTTTAATACTGACCTATTTACCAAATCGCGTGGTCTTAAGTATATTCTCTTCCTTTTACTTCTAGCTTTAGAGAATGTTCTTATTTATTTTAATCAAGGGTTGGATAAAAATTTCTTCTTATTAGCTCCTTTATGTGCAGTATTCTTATTTAACTGGAGTATACGTACATCACTGTTTAAGGAATATCGTTTAAGTCCTTTAAAACAGTTGAGTGTCTATTATTTCTTCCTTCCCCCTCTTTTTATTGGCATAGTGTCTTACTGTTTAAAATCAACTTCCTTAGTTGCACACCATCAAGGAAAAGTGATTTTTGTGGTGACCTTGGCATTAACACATGCTTGTGCTCTACTCATAATAAAGGTTGTTAATAAGATACCCTATCAAAAAATTATTCCATTATCTCTTTCGAAATAG

SEQ ID NO: 3522 - protein, 350 aa, Streptococcus agalactiae
MKRSQCVDNKQHNTSMISLLQYLFSILVILVHSGRLFSQDVIHFTFKSFLGRMAVPYFLICTAFFLRGRIQQGLCNHSYFRKLIKKYSMWTIIYLPYGYFFFESLNIAKIYLLPGFIVAFLYLGMSHTLWYIPAVILGWVIIQGLLKYVGTRGTFITVVVLYCIGAVETYSVFIQSTKFYPLMSTYMSIFQTTRNGLFYTPVYLLAGYLLYDYFNTDLFTKSRGLKYILFLLLLALENVLIYFNQGLDKNFFLLAPLCAVFLFNWSIRTSLFKEYRLSPLKQLSVYYFFLPPLFIGIVSYCLKSTSLVAHHQGKVIFVVTLALTHACALLIIKVVNKIPYQKIIPLSLSK

SEQ ID NO: 3523 - protein, 1155 aa, Streptococcus agalactiae
ATGATATCAATTTTTCCTTTTGAATTAAAAAAACTTCTACAACGTAAGGCAGCATTTGGGGCTTTTATTATCTTCCTTCTTGCTATTTTTGGTCTATTTTACCAGCATTTTTTTGTTGGGCAAATTAGTGGCTATTCTGCAGATAAAATACATGGTCGAGAAGCGGTTGCCATTAATCGTAGAATAGCTGAAAAATATTCAGGGGATTTATCTGAAGAACGAGTAACAAATATTATTAAAAACTATGTTAATCCGCCAGCAGGACGCCCCCCTATATTTGATGTTTTTAGTTATTATGTGGCAGACACTTTTGATCGTGATTTTTTAATTTACTATAACCAATTGAAAGATGATAAAACAATTGATTTTAATAAAATAAATATTAAAGATCAAAAACAGTTGGGTTCTGCGCTACCACTAAAACAACTAAAGCTAGGTAACTTTGCTCCTTGGAATCAACTTTTCGAAGTAAGTAATAGTACTTATATTTTAATTGTCTTATTTACTCTATTCTTATCAGCTCCTCTTTTTTCAGGAGATAGGGCTAAGAAGATTAATCCTATACTACTGACGACTCGGTATGGACGTGGTCAGTTGACCTGGGCTAAGTTAGCTAGTACAATGACCATCGGTATTTCCACATTTATCCTAGCATATGCCCTCATTCTGACGGTATTTGCAGATTATTTTGGTTTTAGTGGTTGGGAGACAAGCGTTCAACTGAATTTATACTGGACATCACCTTTGGCTAATATTATGGGATTTCCTGTACCTATGACAATATCAACTGCTTTTGTTCATATTATTGTCTTACAATTTGTTGGACTCCTTTTTATAGCCAGTCTTAATTTCTTTATATCAAGTATCACAAATTCGCCATTAACATCTTTTGCTGTTTCAACGCTTGCCTTTTTTGCTCCTAGCTTTTTAATGGCTATGTTTAATAAAGGTGTGATAAACAAGTTATTAACTATTTTCTCAGTATCAACGACAGACACTTCAGCTTTACTTTTAAAATTATCACGTAATGGTAGTCATGGCTTTTTCTTTGATAGTTTTTCTGCTAATGAAATCTGTCTGATTAGTCTACGTATGTTAATTGCAGTGTTATTGATAGCCTATACCTATCGTTTAATGCGACGAAGAAGTTTATAG

SEQ ID NO: 3524 - protein, 384 aa, Streptococcus agalactiae
MISIFPFELKKLLQRKAAFGAFIIFLLAIFGLFYQHFFVGQISGYSADKIHGREAVAINRRIAEKYSGDLSEERVTNIIKNYVNPPAGRPPIFDVFSYYVADTFDRDFLIYYNQLKDDKTIDFNKINIKDQKQLGSALPLKQLKLGNFAPWNQLFEVSNSTYILIVLFTLFLSAPLFSGDRAKKINPILLTTRYGRGQLTWAKLASTMTIGISTFILAYALILTVFADYFGFSGWETSVQLNLYWTSPLANIMGFPVPMTISTAFVHIIVLQFVGLLFIASLNFFISSITNSPLTSFAVSTLAFFAPSFLMAMFNKGVINKLLTIFSVSTTDTSALLLKLSRNGSHGFFFDSFSANEICLISLRMLIAVLLIAYTYRLMRRRSL

SEQ ID NO: 3525 - protein, 849 aa, Streptococcus agalactiae
ATGTTATTACAGCTAGATAATATCACTAAAAGCTACGGAAAAAAAATAGTACTTAACCAGATTTCCTACCAGTTTACTCCTGGTTTGTATGGACTCTTAGGAGCAAATGGTACTGGCAAAACAACCTTATTAAATTTGATGAGCCACTTTACATTAGCAGATAGTGGGAATATTTATTGGAATGGACAGGAGCAGTCGGAAGAATTTTATCGTCACATTGGTTTTTTACCGCAACATTTTCGCTATTATGATCAATTTACTGGCATTGCTTTCTTAAATTATATCGCTACCTTAAAAGGTGTTGATAAAAAGAAAGCTAAACAAGAAATTCCTAGATTACTAGAGCTTGTTGGTTTAGGCGATGTAGGTAAAAAGAAGATTTCATCATACTCCGGTGGTATGAAGCAACGTTTAGGCATTGCTCAAGCACTTATCAATGATCCTGAAATACTCATTCTGGATGAACCAACTGTTGGACTTGATCCCAAGGAACGGGTTAAATTTCGCCATATTTTGAGTCAGTTATCCACCAATAAAATTATCATTTTATCAACGCATATTGTGTCGGATGTGGAAGCTGTTGCCAAAGAAATTATAGTATTAAAAAATGGTAAATTTATCGAACATGGCAACACCGCACAGCTGTTGAAAACTATTGAGGGAAAAGTGTGGGAAATAACGACTGAACCAGGTTTATCTCAGATACCCAATATTGCTATTGTTAATGAAAAAGTCTTTTCAGATAGTCGGGTATTTCGTGTAGTGAGTGATATTTGTCCGAGTGATTCGGCACAGTTGGTTGTTCCGACTCTAGAAGATTTCTACATCTATCATTTTAGAGGGGAGTAA

SEQ ID NO: 3526 - protein, 282 aa, Streptococcus agalactiae
MLLQLDNITKSYGKKIVLNQISYQFTPGLYGLLGANGTGKTTLLNLMSHFTLADSGNIYWNGQEQSEEFYRHIGFLPQHFRYYDQFTGIAFLNYIATLKGVDKKKAKQEIPRLLELVGLGDVGKKKISSYSGGMKQRLGIAQALINDPEILILDEPTVGLDPKERVKFRHILSQLSTNKIIILSTHIVSDVEAVAKEIIVLKNGKFIEHGNTAQLLKTIEGKVWEITTEPGLSQIPNIAIVNEKVFSDSRVFRVVSDICPSDSAQLVVPTLEDFYIYHFRGE

SEQ ID NO: 3527 - protein, 291 aa, Streptococcus agalactiae
ATGATAGATTATAGCCACCATATTGAAGTTTCTTTAGAGACAGATGAACCTAAGATAGCCATGTCTTATTTTACATTAAACCATAAGCAAATTTTTATCATAGAAAATTCGATAGTCGAGGAAAGAATAGATGCTTCACGTTTGTTTGGTTATGGAGCAAGTAGCAAGGGAGAAGATAGAGGGTTAGGCCTTTATAATGTCATGAAAGTTATTGACCGTTATCCCAATGCATCTATTAGTACAAATAGTGAACAACATACTTTCCGTCAGGGCTTAGAAATAATCTTTTAG

SEQ ID NO: 3528 - protein, 96 aa, Streptococcus agalactiae
MIDYSHHIEVSLETDEPKIAMSYFTLNHKQIFIIENSIVEERIDASRLFGYGASSKGEDRGLGLYNVMKVIDRYPNASISTNSEQHTFRQGLEIIF

SEQ ID NO: 3529 - protein, 753 aa, Streptococcus agalactiae
GTGAATATTTTTATACTTGAGGATGATTTTGTTCAACAAGCCCATTTTGAAAAAATCATTAAAGAGATTAGAGTACAGTACAATCTGCATTTCAAAACAGTAGAAACGTTTGCTAAACCAGTTCAATTATTGGAATCAATTTATGAAATAGGTTTACATAATTTATTTTTCTTAGATATTGAAATAAAAAATGATGAGCAGATGGGCTTAGAGGTAGCAAAACAAATTAGACAAGTTGATCCATATGCTCAGATTGTTTTTGTTACAACTCATTCAGAATTAATGCCTTTAACCTTTCGTTATCAGGTATCAGCTTTAGACTATATCGATAAAGGACTTTCACAGGAAGAGTTTAGCCAAAGGATTGAGGAAGTATTGTTGTACGTAGATGGCATTTGCAATAAGCCCTTAGTGGAAAATTCATTCTACTTTAAGTCGCGTTACAGCCAGGTACAATTACCTTTTAACGATCTTCTTTATATAGAAACATCCTCAAGATCACATAGAGTTGTCCTTTATACTGAAAAAGATAGAATGGAATTCACAGCCACTTTGGGGGATATTTTAAAACAAGAACCTAGGCTCTTTCAATGTCATCGCTCTTTTTTAGTAAATCCCTTAAATATTTTTAAAGTGGATAGGATAGATAGATTAGTTTACTTCCAAAATGGAACGACTTGTCTGGTTTCACGCAATAAAGTGAGAGATATAGTATCTATAGTGGATAAATATCAAAAGGATAGAAAAAGATGA

SEQ ID NO: 3530 - protein, 250 aa, Streptococcus agalactiae
MNIFILEDDFVQQAHFEKIIKEIRVQYNLHFKTVETFAKPVQLLESIYEIGLHNLFFLDIEIKNDEQMGLEVAKQIRQVDPYAQIVFVTTHSELMPLTFRYQVSALDYIDKGLSQEEFSQRIEEVLLYVDGICNKPLVENSFYFKSRYSQVQLPFNDLLYIETSSRSHRVVLYTEKDRMEFTATLGDILKQEPRLFQCHRSFLVNPLNIFKVDRIDRLVYFQNGTTCLVSRNKVRDIVSIVDKYQKDRKR

SEQ ID NO: 3531 - DNA, 831 bp, Streptococcus agalactiae
atgaaaggatactctatggcaaaatgcttaacgttaaatactcattcatggatggaagtaaatgctctaaagaaattatttgatttagcagagcatatcttccgtgaaaaatatgatatcatctgcctacaagaggtgaaccagagcatatcttcccctcttgctaagagtagtccaaattatcatccgattgaaggtacaccagctcttcatcaagataactttgccttgcaattagtgcattacctaaatcttcaaggtctacactatcattggacatgggcttataatcatattggttatagtaagtaccatgaaggggtagcgatactttctctgaaaccattaaagccagaggatattttagtttcagctgtagacgatgagactgattatcatactcgtcgtgctctggtagctgagaccactctgaatgacaaagtcgttacagtagttagcctccatttctcatggtttgagaaaggatttgcggaggagtggaaacgactagaaactaccctacttgaggtagaaactccacttttactcatgggtgactttaataatcctactggaaatcagggttatgaacttgttcttaatagtccattagcattaaaggatagccaccaaatagccaatcatgtatttggggaccatactattatggctgatattgatggttgggaagggaataaaaaggctcttaaagttgaccatatttttactagcgaagacctttcaatcagttcaagtcaagtagtttttgaaggtggtgaagcacctgtcgttagtgatcattacggcttggaaattaccatggatttctaa

SEQ ID NO: 3532 - protein, 276 aa, Streptococcus agalactiae
MKGYSMAKCLTLNTHSWMEVNALKKLFDLAEHIFREKYDIICLQEVNQSISSPLAKSSPNYHPIEGTPALHQDNFALQLVHYLNLQGLHYHWTWAYNHIGYSKYHEGVAILSLKPLKPEDILVSAVDDETDYHTRRALVAETTLNDKVVTVVSLHFSWFEKGFAEEWKRLETTLLEVETPLLLMGDFNNPTGNQGYELVLNSPLALKDSHQIANHVFGDHTIMADIDGWEGNKKALKVDHIFTSEDLSISSSQVVFEGGEAPVVSDHYGLEITMDF

SEQ ID NO: 3533 - DNA, 2184 bp, Streptococcus agalactiae
atgaaaaataatgtcaaacagctctttagttttgaattttggcagaagtttgggaaggctttgatggttgttattgctgttatgccagcagcaggattgatggttagtattggtaactccattagtctattggatccatcaaatgttttattagggcgcatagctaatgttattgctcaaattggttggggagttattggtaacttacacatcttatttgcattggctattggtggtagctgggctaaagaacgtgccggtggtgcttttgcggctggcttatcctttattcttattaaccttattacagggaacttttttggtgttaaaacagatatgttagcagacagtaaagcaactgttcaaacggtatttggtgcaaccatcagagtttcagattactttgttaacgttcttgggcaacctgctcttaatatgggtgtatttgtcggtattatttcaggtttcgttggtgcaactgcctttaataaatattataactatcgtaaattaccagatgctttaacttttttcaatggaaaacgttttgttccatttgttgttatttatcgttcagtcattgttgcattaattttatcagtattttggccggttgttcaatcaggtatcaatggctttggtaaatggattgcaagttcacaagacagtgctccaatattagcaccatttgtctacggtacgttagagcgtttattgctcccatttggtttacaccatatgttaactattccaatgaactacacgcaactaggtggcacatacactgtccttacaggtgcaactaaaggagcacaggtgttgggacaagatccactgtggttagcatgggttggtgatttaattaacttaaaaggctcaaattcaagtcaataccatcacttattgacaagtgtcactccagcacgttttaaagtggggcaaatgattggtgcttcaggtattttgatgggattatcttatgctatgtatcgtaacgttgataaagataaaaaattgaaatacaagtcaatgtttatttcagcagcagcggctactttcttgacaggtgttactgagccaattgagtacatgttcatgtttgcagcaatgccactctaccttgtatatgctgtcgttcaaggatgtgcgtttgctatggcagatattgttaacctccgcgttcattcatttggtaatatagaatttttaacacgtgttcctatgggcataaaagcgggccttggtggtgatattttcaactttgtttgggtgacacttctttttgcagtattgatgtactttattgcaaactttatgattaaaaaattcaatttagcaacagcaggacgtaatggtaattatgataacgaagaggttgataatgctccttcaacagcttctggttctgctgatgcaaattctcaagttgtacaagttattaatttacttggtggtcgtgataacattgaagatgtagatgcatgtatgactcgtcttcgtgtcacagttaaagatggaaatagcgtgggttctgaagcagcttggaaaaaagctggtgcaatgggattggtgttaaaaggtaatggcgttcaagctatttacggacctaaagcagatgtccttaaatcagacattcaagatttgctagattcaggtacagttattccaatagttgatttagaaacaggtcaacctgtagcagcagccccagttacaacttataaaggaataacagaagaaattgtttcggtggctaatggtcaagtagaagcattggatgttgttaaagaccctgtcttttctcaaaaaatgatgggtgatggctttgctgtggaaccaactgatggcaatatttatgttccagtttcaggtacagttactagtgtctttccaacaaaacatgcttttggtttattaacagaaagtggcctagaagttttagtacatatcggtctagatacagtagctcttgatggtcaaccatttgaggttaaaatttctagtggtcaaaaagtggtagcaggcgatcttgctgtagtagcagatttggaagctatcaaagcagctggtaaagagacaagtgtgattatcgtctttacaaatgtttcagatataaaaactgttaaacttgaaaaatcaggtccacaaatagctaaaacagttgtggcaaaagtcgaactgtaa

SEQ ID NO: 3534 - protein, 727 aa, Streptococcus agalactiae
MKNNVKQLFSFEFWQKFGKALMVVIAVMPAAGLMVSIGNSISLLDPSNVLLGRIANVIAQIGWGVIGNLHILFALAIGGSWAKERAGGAFAAGLSFILINLITGNFFGVKTDMLADSKATVQTVFGATIRVSDYFVNVLGQPALNMGVFVGIISGFVGATAFNKYYNYRKLPDALTFFNGKRFVPFVVIYRSVIVALILSVFWPVVQSGINGFGKWIASSQDSAPILAPFVYGTLERLLLPFGLHHMLTIPMNYTQLGGTYTVLTGATKGAQVLGQDPLWLAWVGDLINLKGSNSSQYHHLLTSVTPARFKVGQMIGASGILMGLSYAMYRNVDKDKKLKYKSMFISAAAATFLTGVTEPIEYMFMFAAMPLYLVYAVVQGCAFAMADIVNLRVHSFGNIEFLTRVPMGIKAGLGGDIFNFVWVTLLFAVLMYFIANFMIKKFNLATAGRNGNYDNEEVDNAPSTASGSADANSQVVQVINLLGGRDNIEDVDACMTRLRVTVKDGNSVGSEAAWKKAGAMGLVLKGNGVQAIYGPKADVLKSDIQDLLDSGTVIPIVDLETGQPVAAAPVTTYKGITEEIVSVANGQVEALDVVKDPVFSQKMMGDGFAVEPTDGNIYVPVSGTVTSVFPTKHAFGLLTESGLEVLVHIGLDTVALDGQPFEVKISSGQKVVAGDLAVVADLEAIKAAGKETSVIIVFTNVSDIKTVKLEKSGPQIAKTVVAKVEL

SEQ ID NO: 3535 - DNA, 1551 bp, Streptococcus agalactiae
atgactaaaaaaattttccgtacaactttatctgctagtttgggaattgttttagttacaattttgatgattatgggatttctctataattacttcaatcacattcagcgagaacagttgagaacacaaacggcactggcgtcacaaggaatttcctttgaaggtaaagattattttgaaaatcttaaaacttcaaatgtgcgtattacttgggtagataataagggacaagtgctttatgatacccaatcagatgcaaaacatatgaaaaatcacgccaatcgtcaagaaattaaagaagctatcaagagtggttatggtgagagcacgaggtggtcagcgacacttactgagaagtctatctatgctgcgcaacgtttaaataatggaacgatagttcgtttatcagttgcgcaacaaactattttttatcttctccttggtatgataagtcccttagcaattatcatcttacttgctattattttatctgtattaattgcacgatatatagcaaaaaaagtatcagagcctttaaacaatattgacttagatcatcctttatcaaatgatagttacgaggagataacaccattattaaggcgtcttgatagccatcaggctaagattcaacatcaaaaactgttattacaaaagcgtcaaaaagaatttgataccattatttctaaaattaaggaaggaatgattcttttagatgatcaagcaagaatcgttagtatcaacgcagaagctttaaagttattccaaattaatgatgattggcatgggcgctttatgatggaagttagccgagatttaactctcaaagacttaatcgatcaaggactaaaagggaaaaagaaagaggctaatattggcattgaaaataatcattaccgcgtcttggtaagaccaactacagataacaaccgagtaacaggattggttgttctactgtttgatgtgactgatcaactccaaatggaacaacttcmacgtgaatttactgccaatgtctctcatgaattgaaaaccccgcttcatgttatttctggttactcagaactgttagctaatcaaatggttccaaacgaagaagtcccacaatttgcagctaaaattcataaagaatctgaacgattagttaaattggttgaggatattatcaacctttctcaccttgatgaacaagaaaaattaccgcaagagacagtaaatctgtatgacttaacacaaaaagttttagaaggtttacaagctaaagcagataagaagcacatacaaatcaattttaatggagaagaagctattttgcgagggaatccagttttattgaattccttggtgtacaacttgtgtgacaatgctatcacctataaccatgagaaaggtcaagtaaatgtgactttgaaaaattcacctgatacaattaccttagaagttagtgatacgggactaggcattgcagagaaggacaaaaaacgtattttcgaacgtttctatcgcgtcgataaaagtcgctcaaaaatagttkggggggactgggtttag

SEQ ID NO: 3536 - protein, 516 aa, Streptococcus agalactiae
  VARIANT 332, 512: Xaa = Any Amino Acid
MTKKIFRTTLSASLGIVLVTILMIMGFLYNYFNHIQREQLRTQTALASQGISFEGKDYFENLKTSNVRITWVDNKGQVLYDTQSDAKHMKNHANRQEIKEAIKSGYGESTRWSATLTEKSIYAAQRLNNGTIVRLSVAQQTIFYLLLGMISPLAIIILLAIILSVLIARYIAKKVSEPLNNIDLDHPLSNDSYEEITPLLRRLDSHQAKIQHQKLLLQKRQKEFDTIISKIKEGMILLDDQARIVSINAEALKLFQINDDWHGRFMMEVSRDLTLKDLIDQGLKGKKKEANIGIENNHYRVLVRPTTDNNRVTGLVVLLFDVTDQLQMEQLXREFTANVSHELKTPLHVISGYSELLANQMVPNEEVPQFAAKIHKESERLVKLVEDIINLSHLDEQEKLPQETVNLYDLTQKVLEGLQAKADKKHIQINFNGEEAILRGNPVLLNSLVYNLCDNAITYNHEKGQVNVTLKNSPDTITLEVSDTGLGIAEKDKKRIFERFYRVDKSRSKIVXGDWV

SEQ ID NO: 3537 - DNA, 678 bp, Streptococcus agalactiae
atgatatattgtgttgaagatgatgctgatattcgcgaaatgatgctctatactttgcaaatggcaggttttaaagctcaaggattttcgagttcagagcttttttgggaagctattcaggagaaagttccagacttgattttgcttgatattatgttgccgggagatgatggtttgactattttagagcgtttaaggagaaaacatcaaacggaaatgataccagtaatcatgacaactgctaaaggtagtgagtatgataaagttaaagggttagatcttggagcagatgattatctcgtcaaaccttttgggatgatggaaatgatttcacgaataaaagcagtcttgagacgtagccgccaagtagattcaaaagctcatattatcattggaaatttagagattgatccgactaattattgggtcaaaaggggaacggaaaaaatccacttaaccctaaaggaatttgagttattagtattattcttccgtaatcccaatagagtctttacaaggcaagaacttctggataaggtttggggagaacaatttttaggagaaactagaactgtggatgttcacattgggacactgcgaacaaaacttggtgaggatggctatttgattgctacagtaaggggagttggataccgtttggaggaaagacatgactaa

SEQ ID NO: 3538 - protein, 225 aa, Streptococcus agalactiae
MIYCVEDDADIREMMLYTLQMAGFKAQGFSSSELFWEAIQEKVPDLILLDIMLPGDDGLTILERLRRKHQTEMIPVIMTTAKGSEYDKVKGLDLGADDYLVKPFGMMEMISRIKAVLRRSRQVDSKAHIIIGNLEIDPTNYWVKRGTEKIHLTLKEFELLVLFFRNPNRVFTRQELLDKVWGEQFLGETRTVDVHIGTLRTKLGEDGYLIATVRGVGYRLEERHD

SEQ ID NO: 3539 - DNA, 657 bp, Streptococcus agalactiae
atgattcgttcacgatttgcaagtcaacttaatgaccttaataaagaaattatttttatgggggcattgtgtgaggacatcattgggaagtccttaggtgctctaacaaatagtaatgacgtttaccttgacgatatttctgaaacttatcacaagattgaacaaatggaacgggatattgaggagagatgtttaaaacttttactccgtcagcaaccagttgccaaggatttacgccgtatttcttctgcattaaaaatggtttatgatatgaaacgtattggtgctcaagcttatgaaattgcggaaattgttagtttaggtcatattatccaaggtgcaggttctgaaagggatcaacttaacagcatgtctaataatgtcattagtatgctgactaagagtatagatgcttttatttatgacaatgaagaacaagcgcatcaagtaattgaacaagataggacagttaaccaggaatttgatacaataaagaaacagttagtgttatatttttcggtacaggatgttgatggtgaatatcccatagatgttttaatgatcgccaagtacctagagcgtattggtgatcatacagtaaatattgctaagtgggtgcttttctcaataacaggtaacctagatggagaagcgtaa

SEQ ID NO: 3540 - protein, 218 aa, Streptococcus agalactiae
MIRSRFASQLNDLNKEIIFMGALCEDIIGKSLGALTNSNDVYLDDISETYHKIEQMERDIEERCLKLLLRQQPVAKDLRRISSALKMVYDMKRIGAQAYEIAEIVSLGHIIQGAGSERDQLNSMSNNVISMLTKSIDAFIYDNEEQAHQVIEQDRTVNQEFDTIKKQLVLYFSVQDVDGEYPIDVLMIAKYLERIGDHTVNIAKWVLFSITGNLDGEA

SEQ ID NO: 3541 - protein, 750 aa, Streptococcus agalactiae
GTGAGTAAATTAGTAATTAATAATTTAGATTTGTATTATGGAGAATTTCACGCTCTGAAGGATGTTAATTTAGACATTGAAGAAAAAGAAATCACAGCCTTTATTGGACCTTCTGGGTGCGGAAAGTCTACTCTCTTGAAAAGTATTAACCGTATGAATGATTTGGTCAAAAATTGCAAAATCACAGGGGATATTACTTTAGAAGGCGAGGATGTCTATAGACAATTGGATATTAACCAATTGCGTAAAAAGGTTGGAATGGTGTTTCAAAAACCTAATCCGTTTCCAATGAGCATTTATGATAATGTTGCTTTTGGTCCAAGAACGCACGGTATTCATTCCAAAGCAGAGTTAGATGATATCGTTGAACGTTCCCTTAAACAGGCGGCTCTATGGGATGAGGTTAAAGATCGTCTTCACAAATCTGCTCTGGGTATGTCTGGCGGACAGCAGCAACGTTTGTGTATTGCGCGTGCTCTTGCTATTGAGCCTGATGTTTTACTTATGGATGAACCCACAAGTGCCTTGGATCCTATTTCAACAGCAAAAATTGAAGAATTGGTTATCCAACTGAAGAAGAACTACACTATTGTTATAGTGACACATAATATGCAACAAGCTGTTCGTATTTCTGATAAAACAGCATTCTTTCTGATGGGAGAAGTGGTTGAATATAACAAAACGAGCCAACTCTTTTCATTGCCACAAGATGAGCGTACAGAAAACTACATTACAGGGAGATTCGGATGA

SEQ ID NO: 3542 - protein, 249 aa, Streptococcus agalactiae
MSKLVINNLDLYYGEFHALKDVNLDIEEKEITAFIGPSGCGKSTLLKSINRMNDLVKNCKITGDITLEGEDVYRQLDINQLRKKVGMVFQKPNPFPMSIYDNVAFGPRTHGIHSKAELDDIVERSLKQAALWDEVKDRLHKSALGMSGGQQQRLCIARALAIEPDVLLMDEPTSALDPISTAKIEELVIQLKKNYTIVIVTHNMQQAVRISDKTAFFLMGEVVEYNKTSQLFSLPQDERTENYITGRFG

SEQ ID NO: 3543 - protein, 879 aa, Streptococcus agalactiae
ATGGAAAATATTAACCAAAGAACGTCAAAACAATATTTAGCATCTTTAAAAAAAGATCCCCTTTCCTTCTTTCTTTTTGCTATTGTCTATTTGGGAGCAATTCTAAGTTTTGCTACAATTGCATTTGTTGTTATTTATATTTTAGTTAAGGGGCTTCCTCATGTGAATACTGGCTTGTTTGCATGGACTTATAATACTCAGAACGTTTCACTATTACCAGCTTTCATTAACACTATCTTTATCATCGCCTTAACTTTATTATTTGCAGTTCCACTTGGTATTGGTGGATCAATTTATCTAACGGAATATGCTAGACGTGATAATCCTTATCTCAAAATTATCCGTGTTGCAACCGAGACATTGGCAGGGATACCTTCAATTATTTATGGTTTGTTTGGTGCATTATTTTTTGTAAAATACACACACTTAGGCTTATCTTTGATATCGGGTTCTCTGACTTTGAGCATCATGATTTTACCTTTGATTATGAGGACAACTGAAGAAGCTTTACTATCTGTTCCGGATTCTTATCGAGAAGGAGCCTTTGCGCTTGGTGCTGGTAAATTGAGAACCATATTTAAAATCGTATTACCTAGTGCTATGTCTGGTATTTTTGCTGGTATTATTTTAGCGGTAGGACGTATCATTGGTGAGTCAGCAGCACTTATTTTCACAGCTGGAACAGTTGCAAAAGTAGCACATTCGGTATTTAGTTCATCTCGTACTTTAGCAGTACATATGTATGCTATTTCGGGTGAGGGCTTATATGTTGACCAAACTTATGCGACTGCGGTCATCTTATTGCTTTTAGTTATTATTGTCAATTTTGTATCTGGACTAGTAGCCAAACGATTAGGAAGTGAGTCGAACAGTGAGTAA

SEQ ID NO: 3544 - protein, 292 aa, Streptococcus agalactiae
MENINQRTSKQYLASLKKDPLSFFLFAIVYLGAILSFATIAFVVIYILVKGLPHVNTGLFAWTYNTQNVSLLPAFINTIFIIALTLLFAVPLGIGGSIYLTEYARRDNPYLKIIRVATETLAGIPSIIYGLFGALFFVKYTHLGLSLISGSLTLSIMILPLIMRTTEEALLSVPDSYREGAFALGAGKLRTIFKIVLPSAMSGIFAGIILAVGRIIGESAALIFTAGTVAKVAHSVFSSSRTLAVHMYAISGEGLYVDQTYATAVILLLLVIIVNFVSGLVAKRLGSESNSE

SEQ ID NO: 3545 - protein, 846 aa, Streptococcus agalactiae
ATGAAACAAACAAAAGAAGGTCTTATGCAAGCTGTGTTTTTCATCACGGCTTGCGTCAGTGTTATATCAGCTATTTTAATTTGCCTCTTTCTCTTCTCTAGTGGTCTTCCAGCTATTACGAAAATCGGCTGGGGAAATTTTATATTTGGTAAAGTCTGGCATCCTAGTAATAATATTTTTGGCATCTTTCCAATGATTGTAGGTTCCTTATATGTTACAGCGGGAGCTTTACTTTTAGGAGGACCGATAGGTATCCTTACTGCTGTTTTTATGGCTTATTTCTGCCCAGAAAATATTTATAAGCCTTTAAAGTCAGCTATCAATTTAATGGCGGGAATCCCTTCAGTTGTTTATGGTTTCTTTGGACTCGTTGTTATTGTCCCTATGATAAGGCAATATATTGGTGGCTTTGGTATGGGAGTCTTAGCAGCTTCAATTTTGCTAGGAATTATGATTTTACCAACAATTGTTAGCATTTCAGAATCTTCTTTAAGAGCTGTTCCAGAGAGCTATTATGAAGGCGGTATTGCCCTTGGTGCCTCTCATGAACGAAGTGTCTTCTTTGCTGTTTTACCAGCTGCTAAACGTGGCATTTTAGCATCGGTTGTTTTGGGAATTGGACGTGCTATTGGTGAAACAATGGCTGTCATCATGGTAGCGGGTAATCAAGCTGTCTTGCCTCAATCGCTGACATCAGGCGTTAGAACTCTAACCACTAACATTGTTATGGAAATGGGCTATTCTTCTGGTTTGCATCGTCAAGCCTTAATTGGTACAGCTGTGGTACTCTTTATCTTTATATTAATGATTAATATCAGTTTTTCAGCATTACAGAAAGAGGAATAA

SEQ ID NO: 3546 - protein, 281 aa, Streptococcus agalactiae
MKQTKEGLMQAVFFITACVSVISAILICLFLFSSGLPAITKIGWGNFIFGKVWHPSNNIFGIFPMIVGSLYVTAGALLLGGPIGILTAVFMAYFCPENIYKPLKSAINLMAGIPSVVYGFFGLVVIVPMIRQYIGGFGMGVLAASILLGIMILPTIVSISESSLRAVPESYYEGGIALGASHERSVFFAVLPAAKRGILASVVLGIGRAIGETMAVIMVAGNQAVLPQSLTSGVRTLTTNIVMEMGYSSGLHRQALIGTAVVLFIFILMINISFSALQKEE

SEQ ID NO: 3547 - protein, 882 aa, Streptococcus agalactiae
ATGAAAAAACACAAAATGCTATCTCTTTTGGCGGTATCTGGTCTTATGGGAATTGGCATCCTAGCAGGATGCTCAAATGATTCATCATCTTCATCTAAAGGGACAATTAACATTGTTTCTAGAGAGGAAGGGTCTGGAACTCGTGGAGCTTTCATAGAGTTATTTGGGATCGAGTCAAAAAATAAAAAGGGCGAAAAAGTAGACCATACTTCTGATGCAGCAACTGTTACCAATTCAACTTCAGTTATGCTAACCACTGTCTCTAAAGACCCGTCAGCTATTGGTTATTCTTCACTAGGTTCATTAAATAGTAGCGTTAAAGTGCTTAAAATTGATGGCAAAAATGCGACTGTAAAAGATATTAAATCAGGAAGCTATAAGATTTCTCGTCCTTTCAATATTGTAACAAAAGAAGGTAAGGAAAAAGAAGCAACAAAAGATTTTATTGATTATATCTTAAGCAAAGATGGGCAAGCAGTCGTTGAGAAAAATGGCTATATTCCACTTGACAATGCTAAAGCATATCAAGCAAAAGTGTCATCTGGTAAAGTTGTTATAGCAGGTTCAAGTTCAGTAACGCCGGTTATGGAAAAGATTAAAGAAGCCTATCATAAAGTAAATGCAAAAGTAGATGTTGAAATTCAACAAAGTGATTCTTCAACTGGGATTACAAGCGCAATTGATGGATCAGCAGATATAGGTATGGCATCACGTGAATTGGATAAGACAGAGTCATCCAAAGGGGTCAAAGCTACTGTTATTGCAACAGATGGTATTGCAGTAGTTGTTAATAAGAAAAATAAAGTTAATGATCTATCAACAAAACAAGTAAAAGACATTTTTACTGGAAAGACAACGTCTTGGTCTGACTTATCAAAGTAA

SEQ ID NO: 3548 - protein, 293 aa, Streptococcus agalactiae
MKKHKMLSLLAVSGLMGIGILAGCSNDSSSSSKGTINIVSREEGSGTRGAFIELFGIESKNKKGEKVDHTSDAATVTNSTSVMLTTVSKDPSAIGYSSLGSLNSSVKVLKIDGKNATVKDIKSGSYKISRPFNIVTKEGKEKEATKDFIDYILSKDGQAVVEKNGYIPLDNAKAYQAKVSSGKVVIAGSSSVTPVMEKIKEAYHKVNAKVDVEIQQSDSSTGITSAIDGSADIGMASRELDKTESSKGVKATVIATDGIAVVVNKKNKVNDLSTKQVKDIFTGKTTSWSDLSK

SEQ ID NO: 3549 - protein, 588 aa, Streptococcus agalactiae
ATGATTATTGCTATTCAAGGTGGTATGGCTGTAGGGAAAACCACAGCTTTGAAAATCATTGAGAATGTTTACCCCAAAATCGCTATTAGTTTTGAGGATATTTCTCCAGTAGTTGATAAGATTAATAAACATCAGCTTGATAACAATAAATTAGACGATTATTGTGAAATTCAACAACTATTTATTCAGCATGAGCGAGATAGATACGAACTTGTTAGAGATAATGAAATAGTGTTAATGGATTATGGAGCTGAGGAAATTGCTTTTTATACACAATACTTTCCAAAGGTGGCGGGTTATAGTTGGACTTTACCTTCTAATTTGTTACTAGAGGTAAATAGGCTAAAGGAATGTTTTGCTGATTATATTATTTTTCTAGATGCAGATGAGACGGTCCTATACCAACGTCAAAAAAATGATTTTAATAGACAGCGTCATTTTTTCAAATGGTATACTCATCACCTGCTGCCTGCTAAAAAACATTATTTAGACACATTTTCCAATGTTATTCATATTAATACAAATCATTTAAATGCTGAGGAAGTGGCTGAAAAAATCATTGACATCATTCGTAAGTTAACTCTATAA

SEQ ID NO: 3550 - protein, 195 aa, Streptococcus agalactiae
MIIAIQGGMAVGKTTALKIIENVYPKIAISFEDISPVVDKINKHQLDNNKLDDYCEIQQLFIQHERDRYELVRDNEIVLMDYGAEEIAFYTQYFPKVAGYSWTLPSNLLLEVNRLKECFADYIIFLDADETVLYQRQKNDFNRQRHFFKWYTHHLLPAKKHYLDTFSNVIHINTNHLNAEEVAEKIIDIIRKLTL

SEQ ID NO: 3551 - DNA, 357 bp, Streptococcus agalactiae
ttgctctgggcgcagcggagcagagcaagcgtaatcgtcttcctcaggttcgttttatttgagaagaaggctgattttcaagcggagcttgcaggctttgataagatttttatcgcctatgaagagtctgccaaggagggtgaattgtcagcgctagcccagaacttgcagactgtaaaagcaggtgacaagctcctcttcatctttggaccagaagggggcatttctccaaaagaaatcgcagcttttgaagaggttggagctatcaaggtgggcttggggccacgcatcatgcgcacagaaacagcgccgctctatgctctaagtgttattagttactcagcggagttattatga

SEQ ID NO: 3552 - protein, 118 aa, Streptococcus agalactiae
MLWAQRSRASVIVFLRFVLFEKKADFQAELAGFDKIFIAYEESAKEGELSALAQNLQTVKAGDKLLFIFGPEGGISPKEIAAFEEVGAIKVGLGPRIMRTETAPLYALSVISYSAELL

SEQ ID NO: 3553 - DNA, 741 bp, Streptococcus agalactiae
atgcaacagtattttgtaaatggcgaagcaggtgcctatgtgaccatcgaggacaaggataccatcaagcacatgttcaatgtcatgcgattgacagaagatgaccaagtggtcttggtttttgatgatgccatcaagcgtctggcaaaggtggtggacagctctgctcatcgcttccaaattctagaagagctagacaacaatgttgaaatgccagttcaagtgaccattgcctcaggttttcccaagggagacaagttggattttgtgacgcaaaaggcaacagaattgggtgctgcggctatctggggattcccagctgactggtcagtcgtcaagtgggacggcaagaaactagctaaaaaagaagataagctggcaaaaattgctctgggcgcagcggagcagagcaagcgtaatcgtcttcctcaggttcgtttatttgagaagaaggctgattttcaagcggagcttgcaggctttgataagatttttatcgcctatgaagagtctgccaaggagggtgaattgtcagcgctagcccagaacttgcagactgtaaaagcaggtgacaagctcctcttcatctttggaccagaagggggcatttctccaaaagaaatcgcagcttttgaagaggttggagctatcaaggtgggcttggggccacgcatcatgcgcacagaaacagcgccgctctatgctctaagtgttattagttactcagcggagttattatga

SEQ ID NO: 3554 - protein, 246 aa, Streptococcus agalactiae
MQQYFVNGEAGAYVTIEDKDTIKHMFNVMRLTEDDQVVLVFDDAIKRLAKVVDSSAHRFQILEELDNNVEMPVQVTIASGFPKGDKLDFVTQKATELGAAAIWGFPADWSVVKWDGKKLAKKEDKLAKIALGAAEQSKRNRLPQVRLFEKKADFQAELAGFDKIFIAYEESAKEGELSALAQNLQTVKAGDKLLFIFGPEGGISPKEIAAFEEVGAIKVGLGPRIMRTETAPLYALSVISYSAELL

SEQ ID NO: 3555 - DNA, 954 bp, Streptococcus agalactiae
atgaacacatggaatgaactaacggttcacgtgaatcgtgaggcagaggaagctgtctcgaatttattgattgaaactggcagtcagggggttgccattagcgattcggctgactaccttggacaggaggatcgtttcggtgagctttatcctgaggtggagcagtctgatatgattgctattactgcttattatcctgatacgcttgatattgaggcggttaaggctgatttggctgatcgtttagctaattttgaaggctttggtcttgcgacgggtagcgtcaaccttgacagtcaggaattggtcgaagaggactgggctgataactggaagaagtactatgagccagctcgcattacccatgatttgaccatcgtgccgtcatggacggactacgaggctaaggctggtgagaagattatcaagatggatcctggtatggcttttgggactgggactcacccaacgactaagatgagtctttttgccttggagcaagtgcttcgtggtggtgagacggttatcgatgtggggactggttctggcgttttgtctattgctagctctctcttgggtgccaaggacatctatgcctatgatttggatgatgttgcagtgcgcgtggctcaggaaaatatcgatatgaaccctggcactgaaaatattcatgtggctgctggtgatctgctcaaaggtgtccagcaagaggtagatgttattgttgccaatattttggcggatattttgatccatctgacagacgacgcctaccgtttggtcaaggatgagggctatctcatcatgtctggtatcatttctgagaagtgggacatggtgcgtgagagtgctgaaaaagctggtttcttccttgagactcacatggttcaaggtgagtggaatgcctgcgttttcaaaaagacagatgatatttcaggagtgattggcggctaa

SEQ ID NO: 3556 - protein, 317 aa, Streptococcus agalactiae
MNTWNELTVHVNREAEEAVSNLLIETGSQGVAISDSADYLGQEDRFGELYPEVEQSDMIAITAYYPDTLDIEAVKADLADRLANFEGFGLATGSVNLDSQELVEEDWADNWKKYYEPARITHDLTIVPSWTDYEAKAGEKIIKMDPGMAFGTGTHPTTKMSLFALEQVLRGGETVIDVGTGSGVLSIASSLLGAKDIYAYDLDDVAVRVAQENIDMNPGTENIHVAAGDLLKGVQQEVDVIVANILADILIHLTDDAYRLVKDEGYLIMSGIISEKWDMVRESAEKAGFFLETHMVQGEWNACVFKKTDDISGVIGG

SEQ ID NO: 3557 - DNA, 366 bp, Streptococcus agalactiae
ttgaaaggcgatgaaaactataaaaggtgtcgtttagctcataagacagctagcaagatggggtattttacagtattttggcagaaagatggaaatggtaaaaatattcctttttatgaacaagatgaagtggaagatttgattattgtcattaaagatggtaggtggaaaggtttgttcatcattcccaaagaggttgcagtgagtaagggtattctttcatctgctaactctcaaggaaagatggctatgcgattttaccctccttggtgtagcgatttaaatagaacagctttggtgacacagcgatggcagttgaactattttattgatttaagtagaaataatgaaggagttactacatga

SEQ ID NO: 3558 - protein, 121 aa, Streptococcus agalactiae
MKGDENYKRCRLAHKTASKMGYFTVFWQKDGNGKNIPFYEQDEVEDLIIVIKDGRWKGLFIIPKEVAVSKGILSSANSQGKMAMRFYPPWCSDLNRTALVTQRWQLNYFIDLSRNNEGVTT

SEQ ID NO: 3559 - DNA, 249 bp, Streptococcus agalactiae
  misc_feature 231, 232, 233, 234, 235: n = A,T,C or G
atgaacacatggaatgaactaacggttcacgtgaatcgtgaggcagaggaagctgtctcgaatttattgattgaaactggcagtcagggggttgccattagcgattcggctgactaccttggacaggaggatcgtttcggtgagctttatcctgaggtggagcagtctgatatgattgctattactgcttattatcctgatacgcttgatattgaggcggttaaggctgannnnncattcattcattaa

SEQ ID NO: 3560 - protein, 82 aa, Streptococcus agalactiae
  VARIANT 77, 78, 79: Xaa = Any Amino Acid
MNTWNELTVHVNREAEEAVSNLLIETGSQGVAISDSADYLGQEDRFGELYPEVEQSDMIAITAYYPDTLDIEAVKAXXXFIH

SEQ ID NO: 3561 - protein, 309 aa, Streptococcus agalactiae
ATGGGGTATTTTACAGTATTTTGGCAGAAAGATGGAAATGGTAAAAATATTCCTTTTTATGAACAAGATGAAGTGGAAGATTTGATTATTGTCATTAAAGATGGTAGGTGGAAAGGTTTGTTCATCATTCCCAAAGAGGTTGCAGTGAGTAAGGGTATTCTTTCATCTGCTAACTCTCAAGGAAAGATGGCTATGCGATTTTACCCTCCTTGGTGTAGCGATTTAAATAGAACAGCTTTGGTGACACAGCGATGGCAGTTGAACTATTTTATTGATTTAAGTAGAAATAATGAAGGAGTTACTACATGA

SEQ ID NO: 3562 - protein, 102 aa, Streptococcus agalactiae
MGYFTVFWQKDGNGKNIPFYEQDEVEDLIIVIKDGRWKGLFIIPKEVAVSKGILSSANSQGKMAMRFYPPWCSDLNRTALVTQRWQLNYFIDLSRNNEGVTT

SEQ ID NO: 3563 - protein, 717 aa, Streptococcus agalactiae
ATGAAAACAGTTAAAGAAGTCAGTATCTTAAGCGGTGTAAGTGTGCGCACCTTGCATCACTATGATAAAATCGGTTTATTCCCACCTACCGCCCTATCCGAAGCAGGCTATCGACTTTATGACGATGAAGCATTGATTCGCCTGCAAGAAATTTTGCTATTTCGTGAGTTGGAATTCCCTCTCAAAGATATCAAATACCTGCTTGAGCAAGCAAAAGAGGAAAGGCAAGACTTATTAGCCCAACAAATCAAATTGCTTGAATGGAAAAGATCGCACCTTGAGCAGGTTATCACCCATGCGAAACGATTACAAGAAAAAGGAGATGATTATATGAATTTCGATGTTTATAATAAAACAGAATTAGAACAATTACAAGCTGAAGCAAAAGAAAAGTGGGGACAAACAGCAGCCTACAAAGAATTTGCTCAAAAACATGCTTCAGATGACTTTGCACAAATTAGCCAAGAAATGGCAAAAATAATGGTACAATTTGGGCAATTAAAGACACAAAATGTATCTGATGAATCTGTTCAAATGTGTGTGAAACGGCTACAAGACTATATCTCTCAGCATTTTTACACCTGTACCAATGAAATCCTTGCTGGACTAGGACAAATGTATCAATCAGATGACCGGTTTAGTCAATCAATTGACAAAGCTGGTGGAGCAGGAACAAGTGAATTTGTCAGCCAAGCTATTGCTTACTATTGCCAATAA

SEQ ID NO: 3564 - protein, 238 aa, Streptococcus agalactiae
MKTVKEVSILSGVSVRTLHHYDKIGLFPPTALSEAGYRLYDDEALIRLQEILLFRELEFPLKDIKYLLEQAKEERQDLLAQQIKLLEWKRSHLEQVITHAKRLQEKGDDYMNFDVYNKTELEQLQAEAKEKWGQTAAYKEFAQKHASDDFAQISQEMAKIMVQFGQLKTQNVSDESVQMCVKRLQDYISQHFYTCTNEILAGLGQMYQSDDRFSQSIDKAGGAGTSEFVSQAIAYYCQ

SEQ ID NO: 3565 - protein, 249 aa, Streptococcus agalactiae
ATGGCAAAAATAATGGTACAATTTGGGCAATTAAAGACACAAAATGTATCTGATGAATCTGTTCAAATGTGTGTGAAACGGCTACAAGACTATATCTCTCAGCATTTTTACACCTGTACCAATGAAATCCTTGCTGGACTAGGACAAATGTATCAATCAGATGACCGGTTTAGTCAATCAATTGACAAAGCTGGTGGAGCAGGAACAAGTGAATTTGTCAGCCAAGCTATTGCTTACTATTGCCAATAA

SEQ ID NO: 3566 - protein, 82 aa, Streptococcus agalactiae
MAKIMVQFGQLKTQNVSDESVQMCVKRLQDYISQHFYTCTNEILAGLGQMYQSDDRFSQSIDKAGGAGTSEFVSQAIAYYCQ

SEQ ID NO: 3567 - protein, 471 aa, Streptococcus agalactiae
ATGATTACTTTACAAAAGGCGGAAGCTAGTGATTTAGAGAAGATTATTGCCATTCAGAGAGCTAGCTTTAAGGCAGTCTATGAGAAATACCACGATCAATACGATCCCTATGTGGAAGAAGTTGAGCAGATTCGATGGAAACTAGTGGAGCGACCAGATTGTTTCTATCATTTTGTCCTTGTTGATGAGACAATTGTTGGTTTTCTTAGATTGGTTATCAAAGACGAGGAGAAGCGTGCTTGGCTTGGTACGGCGGCTATTCTTCCCCAATATCAAGGGCAGGGCTACGGCTCAGCAGCGATGGCTTTATTAGAGAAAACCTATCCTAAGCTTACAAAGTGGGATTTATGTACGATTGCGCAAGAAAAACTAATGGTCAGTTTTTATGAAAAATGTGGTTATCATTCAACCCATACCGAACCTGAGCAAGAAGGAATGGATATGGTCTATATGACAAAGAAGATAGAATAA

SEQ ID NO: 3568 - protein, 156 aa, Streptococcus agalactiae
MITLQKAEASDLEKIIAIQRASFKAVYEKYHDQYDPYVEEVEQIRWKLVERPDCFYHFVLVDETIVGFLRLVIKDEEKRAWLGTAAILPQYQGQGYGSAAMALLEKTYPKLTKWDLCTIAQEKLMVSFYEKCGYHSTHTEPEQEGMDMVYMTKKIE

SEQ ID NO: 3569 - protein, 459 aa, Streptococcus agalactiae
ATGGATATTTTTGATGAGTTATTTGATTTCTCAGGTGCAAAGATCGCTCTTTTCTGCGAGGGAAAGATTTTGACCAGCCTAAGAGATGATTTTCCAGATTTGCCCTATGCAGGCTTTTGGGACTTACCAGGCGGTGGTCGTGAGGACAATGAAACACCTTTGGAATGTCTTTTTCGTGAAGTTGATGAAGAATTAAGTCTGACCTTAACTCGAAACCATATTGATTGGGTCAAGACTTATAGGGGTATGTTGAAGCCTGATAAATTATCAGTTTTTATGGTTGGACATATCAGTCAGAAAGAGTACGATAGCATTGTTCTAGGCGATGAAGGACAAGACTACAAACTCATGTCCATTGACGAATTTTTAAGCCATAAAAAGGTCATTCCTCAGTTGCAGGAGAGGTTGAGAGATTATTTGGAGGTGGAAGATGATTACTTTACAAAAGGCGGAAGCTAG

SEQ ID NO: 3570 - protein, 152 aa, Streptococcus agalactiae
MDIFDELFDFSGAKIALFCEGKILTSLRDDFPDLPYAGFWDLPGGGREDNETPLECLFREVDEELSLTLTRNHIDWVKTYRGMLKPDKLSVFMVGHISQKEYDSIVLGDEGQDYKLMSIDEFLSHKKVIPQLQERLRDYLEVEDDYFTKGGS

SEQ ID NO: 3571 - DNA, 144 bp, Streptococcus agalactiae
atggatttgctaaaatgtggatatacattggatgatatagaaacagccagaccagaggatatggaacgttattatgcccctgaacaaatcagaaaatatggagctttaggaatagaattgaggttattgcatggatatttttga

SEQ ID NO: 3572 - protein, 47 aa, Streptococcus agalactiae
MDLLKCGYTLDDIETARPEDMERYYAPEQIRKYGALGIELRLLHGYF

SEQ ID NO: 3573 - DNA, 471 bp, Streptococcus agalactiae
atggctaaatttggatttttatcggtactagaagaagaattggataagcatttacagtatgactttgccatggattgggataagaaaaatcatactgtagaagtcacttttatattagaagcacaaaacagctctgctattgaaaccgtggacgaccagggggagacgagtagcgaggacatcgtttttgaggactatgtactcttttacaaccctgtcaagtctcgctttgatgctgaggactatctggtgactatcccctatgagcctaagaagggcttgtcgcgtgagtttctggcttattttgcggagactctcaacgaggttgccactgaagggttgagcgacctcatggacttcctcaccgatgacagtatcgaagagttcggtctttcttgggatacggatgcttttgaaaatggcagagcagaactgaaagagacagagttttacccttatccgagatattag

SEQ ID NO: 3574 - protein, 156 aa, Streptococcus agalactiae
MAKFGFLSVLEEELDKHLQYDFAMDWDKKNHTVEVTFILEAQNSSAIETVDDQGETSSEDIVFEDYVLFYNPVKSRFDAEDYLVTIPYEPKKGLSREFLAYFAETLNEVATEGLSDLMDFLTDDSIEEFGLSWDTDAFENGRAELKETEFYPYPRY

SEQ ID NO: 3575 - DNA, 117 bp, Streptococcus agalactiae
atggctaaatttggatttttatcggtactagaagaagaattggataagcatttacagtatgactttgccatggattgggataagaaaaatcatactgtagaagtcacttttatatag

SEQ ID NO: 3576 - protein, 38 aa, Streptococcus agalactiae
MAKFGFLSVLEEELDKHLQYDFAMDWDKKNHTVEVTFI

SEQ ID NO: 3577 - DNA, 456 bp, Streptococcus agalactiae
  misc_feature 433, 434, 435, 436, 437: n = A,T,C or G
atgattatcagacctatgcaggactgcgaccgtgaggcagttctgaccttacaaaatactggctggactgctcttacctctcctgtctatgaccgcaagtggactgagagtgatttggagaagaatctggcaaatggcatgtccttctttgtcgctgaggtcgatgataagatcgctggcgtcttggactttggtccctactatcctttcccagctggcaagcatgttgccactttcggcattctcatcgctgaaccctaccaaggtcagggactgggtaaagctctcttgaaagctctgctaactgaggctaaagctcarggttacatcaagattgccatgcatgtcatgggcaataacagcagagccatttccctctatcaaaatacsggtttaccgagagctcgaatcactaaagccttttcattgaaannnnncattccattcattaattaa

SEQ ID NO: 3578 - protein, 151 aa, Streptococcus agalactiae
  VARIANT 145, 146: Xaa = Any Amino Acid
MIIRPMQDCDREAVLTLQNTGWTALTSPVYDRKWTESDLEKNLANGMSFFVAEVDDKIAGVLDFGPYYPFPAGKHVATFGILIAEPYQGQGLGKALLKALLTEAKAQGYIKIAMHVMGNNSRAISLYQNTGLPRARITKAFSLKXXIPFIN

SEQ ID NO: 3579 - DNA, 492 bp, Streptococcus agalactiae
atgattatcagacctatgcaggactgcgaccgtgaggcagttctgaccttacaaaatactggctggactgctcttacctctcctgtctatgaccgcaagtggactgagagtgatttggagaagaatctggcaaatggcatgtccttctttgtcgctgaggtcgatgataagatcgctggcgtcttggactttggtccctactatcctttcccagctggcaagcatgttgccactttcggcattctcatcgctgaaccctaccaaggtcagggactgggtaaagctctcttgaaagctctgctaactgaggctaaagctcaaggttacatcaagattgccatgcatgtcatgggcaataacagcagagccatttccctctatcaaaaatacgggtttaccgaagaggctcgaatcactaaagcctttttcattgaaaatcattatgttgatgctttaattttcgcaaaagatttggagaataatcatggctga

SEQ ID NO: 3580 - protein, 163 aa, Streptococcus agalactiae
MIIRPMQDCDREAVLTLQNTGWTALTSPVYDRKWTESDLEKNLANGMSFFVAEVDDKIAGVLDFGPYYPFPAGKHVATFGILIAEPYQGQGLGKALLKALLTEAKAQGYIKIAMHVMGNNSRAISLYQKYGFTEEARITKAFFIENHYVDALIFAKDLENNHG

SEQ ID NO: 3581 - protein, 1269 aa, Streptococcus agalactiae
ATGGCTGACAATCTTGCTCTACGTATGCGTCCTCGCAATATTAATGAAGTTATCGGGCAGCAACATCTCGTTGGTAATGGCAAAATTATTGATCGAATGGTTGCAGCTAATATGTTATCTTCCATGATCCTATATGGCCCACCAGGTATTGGGAAGACTTCTATTGCTTCTGCTATTGCTGGTACTACTAAATATGCCTTTCGTACTTTTAATGCCACTGTTGATAGTAAAAAACGTCTTCAAGAAATTGCAGAAGAAGCTAAATTTTCTGGTGGCTTAGTTTTATTACTTGACGAGATTCATAGACTTGACAAGACAAAACAAGATTTTCTTTTACCTCTACTTGAGAATGGCAATATTATTATGATTGGAGCAACAACTGAAAATCCTTTCTTTTCAGTAACTCCTGCCATTAGAAGTAGGGTACAAATTTTTGAGTTAGAACCTCTTTCTAACGAGGATATTAAAAAAGCCATTCAGCTAGCAATTTCCGATAAAGAACGGGGATTTCCTTTTTTAGTGACAATTGATGATGAGGCGCTAGATTTTATTGTTACCGCCACAAATGGAGACCTACGATCTGCTTATAATTCCTTGGATCTAGCAGTCATGTCTACTTCTCCTAATGAAGATGGTAGCCGTCATATTAGTCTAGAGACAATGGAAAATAGTCTGCAGTGTAGTTATATTACAATGGATAAAAACGGAGATGGGCATTATGATATCCTATCAGCCTTACAAAAATCAATTAGAGGTTCTGATGTCAATGCCAGCCTGCACTATGCCGCTCGTTTAGTAGAAGCCGGAGATTTACCTAGTTTAGCAAGACGTTTGACCATTATTGCTTATGAAGATATCGGCTTAGCTAACCCCGAAGCACAAATACATACTGTGACTGCATTGGAAGCTGCCCAACGCATTGGTTTTCCAGAAGCTCGTATTCTTATTGCTAACATTGTTGTGGATTTAGCTCTATCACCTAAATCAAATTCAGCCTATTTGGCTATGGATGCAGCTTTAGCTGATTTACGTCGTTCAGGAAATTTACCTATTCCACGTCACCTAAGAGATGGACATTACAGCGGTAGTAAAACCTTGGGCAATGCAAGGGATTACAAGTACCCTCACGCCTATCCTGAAAAATGGGTTAAACAACAATACTTACCAGATAAACTAGTAGGACATAATTACTTTGAAGCCAATGAAACTGGTAAATACGAACGCGCACTTGGTTCAAATAAAGAGCGCATTGATAAGCTCTCAGACTGA

SEQ ID NO: 3582 - protein, 422 aa, Streptococcus agalactiae
MADNLALRMRPRNINEVIGQQHLVGNGKIIDRMVAANMLSSMILYGPPGIGKTSIASAIAGTTKYAFRTFNATVDSKKRLQEIAEEAKFSGGLVLLLDEIHRLDKTKQDFLLPLLENGNIIMIGATTENPFFSVTPAIRSRVQIFELEPLSNEDIKKAIQLAISDKERGFPFLVTIDDEALDFIVTATNGDLRSAYNSLDLAVMSTSPNEDGSRHISLETMENSLQCSYITMDKNGDGHYDILSALQKSIRGSDVNASLHYAARLVEAGDLPSLARRLTIIAYEDIGLANPEAQIHTVTALEAAQRIGFPEARILIANIVVDLALSPKSNSAYLAMDAALADLRRSGNLPIPRHLRDGHYSGSKTLGNARDYKYPHAYPEKWVKQQYLPDKLVGHNYFEANETGKYERALGSNKERIDKLSD

SEQ ID NO: 3583 - protein, 1122 aa, Streptococcus agalactiae
ATGGCAACATATAGACAAAGAGGTAAAAAGAAATTATGGGATTATAGAATATTCAATGAAAAAAGTGAGTTAGTTGCTTCTGGTTCAGGTTTTAAGACAAAGCGTGAAGCTATGAATGAAGCTATGAGGATAGAGCAACAAAAGTTATTAGTAAATTCTATATCTTCTGATATAACATTGTATGATTTGTGGTTTGAATGGTACAGTTTAATTATAAAGCCTAGCAATCTAGCAGAGACTACAAAGAACAAATATTTTACAAGAGGTTCTGTTATTCGTAAACTTTTTGGAAATCAGAAAGTAAATAAAATAAAGCATAGTGCGTATCAGAGGAAATTAAATACGTACGCTGAAAAATACACTAAAAACCATGTTAGAAGGTTAAATTCAGATATAAAAAAAGCTATCCAATTTGCTAAAAGAGATGGTGTCTTATTATCTGATTTTACTGATGGAGTTGTCATAGCTGGTAGGAAATTTGTTAAGGATGCAGATGATAAATATCTACATAGTATTTTTGATTACAAGAAAGTGATATCTTATTTAGAAAACAATTTGGATTATTCAAATAGTATCGTTTATTATTTATTACTGGTGCTATTTAAAACAGGTTTACGAGTGGGTGAAGCTTTAGCATTAACTTGGGATGATGTTAATTTTGAAGATCTAGAAATTAAGACGTATCGAAGATTTAGTGGCGATAAGGGAACTTTTAGTCCACCTAAAACAAAAACTTCTATCCGCACTATTCCTATTAGTCAATCTTTAGCATTAATCTTAAGAGATTTGAAGGATGATCAGCAAGTTATGTTGAAAAACTTAAAAATTGTAAACATGAATAATCAAATATTTTATGACTATAGATATGGTGTTTCGACAAATAGTGCGATAAATAAAAGTCTTAAAAATGTTTTAAAAATATTAAATATTAATTCAAAAATGACTGCAACAGGTGCAAGGCATACTTATGGAAGTTACTTATTAGCAAAAGGTGTAGATATTTGGGTAGTTGCAAGATTAATGGGTCATAAGGATATTACACAGTTACTTGAAACTTATGGTCACGTCTTGACAGAAGTAATAAATAAGGAATATGAAACGGTCAGAAGTTTAGTATCTTAA

SEQ ID NO: 3584 - protein, 373 aa, Streptococcus agalactiae
MATYRQRGKKKLWDYRIFNEKSELVASGSGFKTKREAMNEAMRIEQQKLLVNSISSDITLYDLWFEWYSLIIKPSNLAETTKNKYFTRGSVIRKLFGNQKVNKIKHSAYQRKLNTYAEKYTKNHVRRLNSDIKKAIQFAKRDGVLLSDFTDGVVIAGRKFVKDADDKYLHSIFDYKKVISYLENNLDYSNSIVYYLLLVLFKTGLRVGEALALTWDDVNFEDLEIKTYRRFSGDKGTFSPPKTKTSIRTIPISQSLALILRDLKDDQQVMLKNLKIVNMNNQIFYDYRYGVSTNSAINKSLKNVLKILNINSKMTATGARHTYGSYLLAKGVDIWVVARLMGHKDITQLLETYGHVLTEVINKEYETVRSLVS

SEQ ID NO: 3585 - protein, 327 aa, Streptococcus agalactiae
ATGCAACAGGTTTTTAATGTGAGTGTTCCTGTACCAGATGATGTTGTTATTATTTCAAAAGAAGAATATTTAAATTTATTAAGTGATAATGAACAAGGCAAGTGGTGGGATATTGATAACTTGCAAGAGTTATTGGGAATTGGAAGGTCAAAATTGATTAATGATATTTTGTTAAATCCAGATATAAAAAAAGAAGTAGATTTATCAATTAATCCAAATGGTTTTATTGTTTATCCGAAAGGTAAAGGTAGTCGATATAAAATATTAGCAACAAAAGCTAGAAAATATTTTGAAGATAATTTTGGTTCTATTTTATTAAATAGTTAA

SEQ ID NO: 3586 - protein, 108 aa, Streptococcus agalactiae
MQQVFNVSVPVPDDVVIISKEEYLNLLSDNEQGKWWDIDNLQELLGIGRSKLINDILLNPDIKKEVDLSINPNGFIVYPKGKGSRYKILATKARKYFEDNFGSILLNS

SEQ ID NO: 3587 - protein, 633 aa, Streptococcus agalactiae
ATGATAGGGGATTATTCAGTAATGGATTGGGCTACTTTAGGTGGTGTTGTAGGAATTATTTTTACAAATGTGGGAGTTTTGATTTCAAACTCTAGGGATAATAAAGCTATTCAACGAGAACTTGAGCTTTTAGAAGAAGGTCAAGAGAAATTGGTAGACGAATTTTCCAAAATTTCGACAAATCAATATGATAAATATGTTCTGATACAAAGCAATTTATCAAACAATATTGAAAAGAATAAACAAGAATTAGTTCAAAAAAACTCATATGTTAAAGAAGATACTAAATATATCCGTGATGAAATGCTTATTGAGAAAAAGTCAAAGGAAGAAGTTTATAATCATGTGAAAAATGGAGATAAACTTATTGAAAAAATGGCTTTTGCTAATGAATTAATTTTGAAGTTTGGTGAAGTAAGCAGAGAAAATCAAATGTTAGGCTTAAAAGTTAATTCTTTAGAGGAAAAAATAGTCGATTTATCAAATCAACCTAAAAATGATGAAATATCAAAATTACGTAAATCAATTTCAAGTTTTGAAAGGGAATTATCTAGGTTTGAGGATGTCGGTTATAGCGAAGCAGAAGAAATAAAAAGTACTTTAAGAAGAATATTAAATGATCTTGAAGGATAA

SEQ ID NO: 3588 - protein, 210 aa, Streptococcus agalactiae
MIGDYSVMDWATLGGVVGIIFTNVGVLISNSRDNKAIQRELELLEEGQEKLVDEFSKISTNQYDKYVLIQSNLSNNIEKNKQELVQKNSYVKEDTKYIRDEMLIEKKSKEEVYNHVKNGDKLIEKMAFANELILKFGEVSRENQMLGLKVNSLEEKIVDLSNQPKNDEISKLRKSISSFERELSRFEDVGYSEAEEIKSTLRRILNDLEG

SEQ ID NO: 3589 - protein, 792 aa, Streptococcus agalactiae
ATGTCAAAAGTAAAAGTTTTAAGTTTAATTACTGTTTCAGGACTATTTTTAATGGCTGGTAATTTATCAGCAAGTGCAGATGTTGTAACTAGTGGAGGTGATACTATAATGCTATCAGGGGTAGATGCAGGTGTATCTGATTCTATAATGCCACCACCATCAAGTATAAATCCAGTAACAGATACCACAGAACCAAGTGCGCCAACACCAAGTACAGATCCAATAACAGATACCACAGAACCAAGTGCGCCAACACCAAGTACAGATCCAATAACAGATACCACAGAACCAAGTGCACCAACACCAAGTACAGATCAAACAACAGGTACGACAGATTCAAGTACTCCATCATCAAGTACAACAAATCCAGTAGATGGAATTACTGATAATGGTACTAAACCAAATGCCGGTATTGACAAACCTTCTACGAATAAACCTAGTGATCATTCAGAATCATCTATAAAACCAGTAACAAAGCCAACTATTAATCAACCTATTACAACTGTAACAGGAGATCAAGTCATTGGTACTCAAGATGGTAAAGTTTTAGTACAGACACCATCAGGTACGCAATTAAAAGATGCTGCTGAAGTTGGTGGAAATGTTCAAAAAGACGGTACTGTAGCAATTAAAAAATCAGATGGAAAAATAGAAGTATTGCCAAAAACTGGTGAGGGTAAGACTATCTTTACAATAGTAGGTCTCTTGTTAATTGCTGGAGCAGTTTGGATTGGTTTTAAAGATAATATAAAAAAGTATTTAACCTTTTTCAAAAAGAAAAGTGAAAAATAA

SEQ ID NO: 3590 - protein, 263 aa, Streptococcus agalactiae
MSKVKVLSLITVSGLFLMAGNLSASADVVTSGGDTIMLSGVDAGVSDSIMPPPSSINPVTDTTEPSAPTPSTDPITDTTEPSAPTPSTDPITDTTEPSAPTPSTDQTTGTTDSSTPSSSTTNPVDGITDNGTKPNAGIDKPSTNKPSDHSESSIKPVTKPTINQPITTVTGDQVIGTQDGKVLVQTPSGTQLKDAAEVGGNVQKDGTVAIKKSDGKIEVLPKTGEGKTIFTIVGLLLIAGAVWIGFKDNIKKYLTFFKKKSEK

SEQ ID NO: 3591 - DNA, 198 bp, Streptococcus agalactiae
atgttgatggctggttatcattttgatttggaaagtttacaagtatatgagtcagatgcgagtaatgtttatcagtttactattaatttagtaacagataaaagagacaaattaagtttagctggtaattatgtattaggtacagaccaatttgagattgcgagtgtacatggtacacctgtaaatgtagtattttaa

SEQ ID NO: 3592 - protein, 65 aa, Streptococcus agalactiae
MLMAGYHFDLESLQVYESDASNVYQFTINLVTDKRDKLSLAGNYVLGTDQFEIASVHGTPVNVVF

SEQ ID NO: 3593 - DNA, 366 bp, Streptococcus agalactiae
  misc_feature 348, 349, 350, 351, 352: n = A,T,C or G
ttttatcgaacgtctagtggatggaatgcgatagcttctactggtggtcaatgtacagatctttcagcaagtttgatgtatggtttatggcttaaaggcggaatgcatccaacgcaaagaatgggaaatggtaatatggttgtttctaattgggtatctgcattcggtggacgctctgaaaatactccatcttctggagctgttttttcaagttcaggtacttctagtgatgggcatactggagtggttagtcatgtatttgaaaatggcgatatgttaatagtagagcaaaattattcaacttattctggagataatagaggatttggaccatattcatggaattannnnncattcattcattaa

SEQ ID NO: 3594 - protein, 121 aa, Streptococcus agalactiae
  VARIANT 116, 117, 118: Xaa = Any Amino Acid
FYRTSSGWNAIASTGGQCTDLSASLMYGLWLKGGMHPTQRMGNGNMVVSNWVSAFGGRSENTPSSGAVFSSSGTSSDGHTGVVSHVFENGDMLIVEQNYSTYSGDNRGFGPYSWNXXXFIH

SEQ ID NO: 3595 - DNA, 1269 bp, Streptococcus agalactiae
  misc_feature 1269: n = A,T,C or G
ttgggaatactgattgtatttccttttttattggttttattgttgactgcttcgtcaagttctcaacaagattgtcaaattacaccagatgtatcttcacaagttgaaacctcaagtgagaatgcttccaatagtgattggacaaaaaagggaacagttgcaaatcaaacagcagagaaggtattcaatgcttgggtaagtaaaggcttatctggtgcgagtgcatcagggattgttggttgggttaattcagaaggtggatttgctatgataggtcgagcagaagggcattatggtaatgatttaaaaacaaattcaattgcctttaatgtgagacctactgggttatcttactatacgactgaagctggaggtggtatttatcaaatcacacctttcacaaagtatgccccattaggcgatcccaaatgggaagatgcagatgccatgaatgcctttgttatgaaatccattaaatcaggagactggaataaagcaatggatttatcaggtggaaatcattcttttgaagagatggcacagatgactgatcccaagcaggccactttagtttggaatgcttacgaacgaggaaatactgcatatattaataaagctcaaaagactgcggatgggcaaaaagcctatgaaatatttaatggttcaaaatataaatttgatgcagaaaaattttctaaaagttttggtggtggttcaaaaacgtcctcgtctggtaagagcgatataatttctgattctacagttttatctctttgtgattcagctagtaatgcggtacagggcttatttggtaaagataagtcagggaaagttaaatacacttcttataatgcatggaaaccagatcaattaccaagtgatttgaaaaagtatgcaatagatcctaagtcagttggtttattttatcgaacgtctagtggatggaatgcgatagcttctactggtggtcaatgtacagatctttcagcaagtttgatgtatggtttatggcttaaaggcggaatgcatccaacgcaaagaatgggaaatggtaatatggttgtttctaattgggtatctgcattcggtggacgctctgaaaatactccatcttctggagctgttttttcaagttcaggtacttctagtgatgggcatactggagtggttagtcatgtatttgaaaatggcgatatgttaatagtagagcaaaattattcaacttattctggagataatagaggatttggaccatattcatggaattan

SEQ ID NO: 3596 - protein, 423 aa, Streptococcus agalactiae
  VARIANT 423: Xaa = Any Amino Acid
MGILIVFPFLLVLLLTASSSSQQDCQITPDVSSQVETSSENASNSDWTKKGTVANQTAEKVFNAWVSKGLSGASASGIVGWVNSEGGFAMIGRAEGHYGNDLKTNSIAFNVRPTGLSYYTTEAGGGIYQITPFTKYAPLGDPKWEDADAMNAFVMKSIKSGDWNKAMDLSGGNHSFEEMAQMTDPKQATLVWNAYERGNTAYINKAQKTADGQKAYEIFNGSKYKFDAEKFSKSFGGGSKTSSSGKSDIISDSTVLSLCDSASNAVQGLFGKDKSGKVKYTSYNAWKPDQLPSDLKKYAIDPKSVGLFYRTSSGWNAIASTGGQCTDLSASLMYGLWLKGGMHPTQRMGNGNMVVSNWVSAFGGRSENTPSSGAVFSSSGTSSDGHTGVVSHVFENGDMLIVEQNYSTYSGDNRGFGPYSWNX

SEQ ID NO: 3597 - DNA, 1074 bp, Streptococcus agalactiae
ttgattgttggtttattttctgttattctacgcttttttgaaaatttcagtttgtatgatacctataaacaaacagtttatcattcgtctcaaaaattatgggaaaatctatcaggtaatgggtcttatacaagctccttgctttatttattggttgcgatttcagctttttcaatatttatttcatatcttttttcaaaaggagatttttctaaacgtttgatccacttgttcgtggttatcattttaggtatgggttactttggtacgattcaatcaacatcaggtggtatttatattttagataccgttcatcaactagctggttcgttttcagatgcggtaactaatttatcactggataatccatcaggtggtaaaacaaagatcacacaaaaatcatcagtagctgataattatgtgatgaaaacttcttatacggcttatttgtttgtcaatactggtcagttaaatggtaagtttcacaataatcaaacaggtaaagaagaaaagtttgataacgaacaagttttaggtaagtacgataaatcaggtaaatttatcactccaaaacaaaaggatatattgaattatactgataatttgggagataaggcaaccgaaggggaggaaaaaaatagatggctttctgcagtaaatgattatctttggataaaatcaggctatgttatcttaaagatttttgaagcggttatactcgcagttccattaatactcattcagttaattgcttttatggcagatgttttagtgattatattaatgtttatttttccattagctttattagtttcatttttgcctagaatgcaagatatcattttcaatgttttgaaagtcatgtttggggctgtttcctttcctgccttagctggttttttaaccttgatagtcttctatactcaaactttaatagccacctttgttaagaaaaaatttacagatggttccctgcttagtggtagtaattttaaaggtcaggcaatactgtttatgttgctaataacagttttcgtccaagggtgtgtgttttgggggaatttggaaatataa

SEQ ID NO: 3598 - protein, 357 aa, Streptococcus agalactiae
MIVGLFSVILRFFENFSLYDTYKQTVYHSSQKLWENLSGNGSYTSSLLYLLVAISAFSIFISYLFSKGDFSKRLIHLFVVIILGMGYFGTIQSTSGGIYILDTVHQLAGSFSDAVTNLSLDNPSGGKTKITQKSSVADNYVMKTSYTAYLFVNTGQLNGKFHNNQTGKEEKFDNEQVLGKYDKSGKFITPKQKDILNYTDNLGDKATEGEEKNRWLSAVNDYLWIKSGYVILKIFEAVILAVPLILIQLIAFMADVLVIILMFIFPLALLVSFLPRMQDIIFNVLKVMFGAVSFPALAGFLTLIVFYTQTLIATFVKKKFTDGSLLSGSNFKGQAILFMLLITVFVQGCVFWGNLEI

SEQ ID NO: 3599 - DNA, 1422 bp, Streptococcus agalactiae
  misc_feature 1396, 1397, 1398, 1399, 1400: n = A,T,C or G
atgaaagtcaatgtttatgaagccagtcatgatacaccatatttatttcaagcgttactttatggtcaagatttacaaaaaacaactcgtaagtggaatcatttagtaactgctcgaggtttttcggagttgatgctttttacaaatacccaatcaggtaacaggattggttggtatattggacgagtagataatcgtttaactgcttgggattctattgacgaagctattatgggatctaaaaatcttgtcttatttaatgcgacagtcgcgaataaagaagatgttgctggtaaggttactaaaaatcctcacgtgattataactggggcgacaggtcaagggaaatcatacttagcacagatgatctttttacatactgctcaacaaaatgttcgtgtcctttatgttgaccctaaacgagaactacggcaacactatttaaaagttgtttctgatccagagtatgcacgtaagtttcctctacgtaagaagcaaattgaggaaacgaattttgtcactcttgatagttctgtcaaagaaaatcatggtgtattagatcctattgttattcttgataaggaaggtgcttcctcaacggctaaaaatatgttgctttatttgttaaaaaacgctacagagattaaattagatcaaacaacagctttaacagaagcaattagtcaagtcattgcaaaacgtgaagctggtgaagtcgttggttttaatcaggttattgaagttcttattgattctgaaagtgatgaagttcagtcagttggtcgttattttaaagctattattcagaattctattttagagttggcattttcagatggtgatgttgctggtctttcttacgaagaacgtgtgacagttttagaagttgcggatttatcattgcctaaggacggttcagatcatatatctgatcatgaaagtaattcgattgctttaatgtttgctttaggtgcgttttgtaagcattttggtgagcgtagtgatgatgaaacagttgaaatttttgatgaagcatgggtacttatgcaatcctcagaaggtaaggctgttatcaagtctatgcgtcgtgttggtcgctctaagtataatgtgttgatgctagtatctcaatcggttcatgatgcagaaaacgatgatgatacgaccggctttgggacaattttttcattttatgaaaaatcggaacgtgaagatattttaagtcatgttggtttagaagtaacacctaagaatctagaatggattgataatatgatttcaggtcaatgtctttattatgatgtttacggtaacttgaatatgatttcgatacataacattcatccagatattgatccattgttaaaacctatgaagaaaacagtatcaagtcacnnnnncattcattcattaattaattaa

SEQ ID NO: 3600 - protein, 473 aa, Streptococcus agalactiae
  VARIANT 466, 467: Xaa = Any Amino Acid
MKVNVYEASHDTPYLFQALLYGQDLQKTTRKWNHLVTARGFSELMLFTNTQSGNRIGWYIGRVDNRLTAWDSIDEAIMGSKNLVLFNATVANKEDVAGKVTKNPHVIITGATGQGKSYLAQMIFLHTAQQNVRVLYVDPKRELRQHYLKVVSDPEYARKFPLRKKQIEETNFVTLDSSVKENHGVLDPIVILDKEGASSTAKNMLLYLLKNATEIKLDQTTALTEAISQVIAKREAGEVVGFNQVIEVLIDSESDEVQSVGRYFKAIIQNSILELAFSDGDVAGLSYEERVTVLEVADLSLPKDGSDHISDHESNSIALMFALGAFCKHFGERSDDETVEIFDEAWVLMQSSEGKAVIKSMRRVGRSKYNVLMLVSQSVHDAENDDDTTGFGTIFSFYEKSEREDILSHVGLEVTPKNLEWIDNMISGQCLYYDVYGNLNMISIHNIHPDIDPLLKPMKKTVSSHXXIHSLIN

SEQ ID NO: 3601 - protein, 648 aa, Streptococcus agalactiae
ATGGTAAAAAAATTGGAATATCCGATTGATAGAATACATCAGAATTTAGCTTTACGAAAAGATAAAGTTGTTGTCGCATACTATCGTATTCCAAATACCCCAATCACTATTACAGATAGTGATAAGAAAGATAGTCACAAAACGAAAGTAGCACAGGTTATCAAAAAATTAGCTAAATATAAAAATTTTGATATTTCATTAATACCAAAAGATTATCTTCTTGGTGAAAAAATGTCGGATTTTGAAGCGGATCTAGCAGATGATGTTAAAGAATTAGGGTTAGAAACACTCGATTTTACAGTTGATACGTTAACACATGAAATGGAGATACCGTATCAGTTTGATTGGTTAATTGGAGTTGATCTTGGTAAAGGGCAATACAATGCTAATATAAAAGAATTTATTTATAATCAGTTTGAATCTATCGCATCAAACTTCGCTTCTTTAGCTGGTTATGAGGTAGAAGTAGATGAAGATTGGTATAAAGAACATTCAGAAGAAGAATTACTTGTCTATAGTTTATTGTCTACCCTGAAAGCCAAAAGATTAACGGATGTTGATTTATTTTATTATCAACGGATGCAATTTTTAAGATATGTTCCCCATACTAAAAGTGAGGTTATAGCTAANNNNNCATTCATTCATTAA

SEQ ID NO: 3602 - protein, 215 aa, Streptococcus agalactiae
  VARIANT 210, 211, 212: Xaa = Any Amino Acid
MVKKLEYPIDRIHQNLALRKDKVVVAYYRIPNTPITITDSDKKDSHKTKVAQVIKKLAKYKNFDISLIPKDYLLGEKMSDFEADLADDVKELGLETLDFTVDTLTHEMEIPYQFDWLIGVDLGKGQYNANIKEFIYNQFESIASNFASLAGYEVEVDEDWYKEHSEEELLVYSLLSTLKAKRLTDVDLFYYQRMQFLRYVPHTKSEVIAXXXFIH

SEQ ID NO: 3603 - protein, 411 aa, Streptococcus agalactiae
ATGGAAGAAGAAAAATATTTTGATTACAGCAGGGGCTTGAATGCTCCTTACTGGATTCAGGAAGTTAAAACGGCAAAAGGCAAAGTGATTTGGTATTTTTCTACACCTATGCAGTTATCATTTTTTATTGTTTTCTTTATCATCTTAATGTTGATGCTGACGGTATGTTCTCCATTAATGCAGGTGTTAAATGCTTTAACGCATTCCGTTTCAATGCTCTTGTATTGGTTTGTTCCAAGCAAGTTAGCGAAATTTTATGTAGAATATGAACCGCAAGGAAAAAAGATGCATATCTTTTTGTGGGATTATCTGGTTTATCTCAAAGATTTTGGGTTAAATAAAAAAGGTATCTATCAAGGAGAACGTGTTGATATTGAAGAAGAAATAGTTTTTGAGAAAACGAAAATATAA

SEQ ID NO: 3604 - protein, 136 aa, Streptococcus agalactiae
MEEEKYFDYSRGLNAPYWIQEVKTAKGKVIWYFSTPMQLSFFIVFFIILMLMLTVCSPLMQVLNALTHSVSMLLYWFVPSKLAKFYVEYEPQGKKMHIFLWDYLVYLKDFGLNKKGIYQGERVDIEEEIVFEKTKI

SEQ ID NO: 3605 - protein, 267 aa, Streptococcus agalactiae
ATGAATTTAGTAAAAGTGAATAGTGTTATTTTAGCAGGTGGTCCCAACGTTTCAGGACTAAAGCAATTTTTTCAAGGTGATGGGATTTACCTCATTAGTGTAATTGCTGTCTTTATAATTATTAAGAATTGGAAAGAAGCTAATTGGTTAAAAGTTTTCTCAACCTTAGCTATTTATGCGATTATTGTATCAATGCTTAAAGGTCAACAGATTCTATCTTTTTTGGGTGGAATGCTTCGCTGGTTTGGTGTTGAGACGGGGTTATAA

SEQ ID NO: 3606 - protein, 88 aa, Streptococcus agalactiae
MNLVKVNSVILAGGPNVSGLKQFFQGDGIYLISVIAVFIIIKNWKEANWLKVFSTLAIYAIIVSMLKGQQILSFLGGMLRWFGVETGL

SEQ ID NO: 3607 - protein, 921 aa, Streptococcus agalactiae
TTGAGATATACAAAGAAAGAAGAAGGAGGTAAACAGCCTAAGACAAAAGAAGTAAAGCAAAGGACAGCCAATTTTATTGTCTATGGTATCTTAGGTTTGTTATTTATTGTAGGATTTTTTGGATCATTGAGGGCAATTGGCTTATCTAATCAGGTACAACATTTAAAAGAAACAGTTATTGCTGTAGAAAAAAAGTCAAAACATAAGAAAACTGATGATTCATTAGATATATCTAGAATTCAGTATTACATGAATAATTTTGTCTACTACTATATCAACTATTCACAAGATACTGCAGATCAAAGAAAAACAGAATTAGAAAATTATTATTCTTTCTCAACTGCCAGTATGACAGATGATGTTAGAAAGTCTAGGACTTTGCAGACACAACGTTTAATAAGTGTTGAAAAAGAAAAAGATTACTATATAGCTTTGATGCGTATTGGTTATGAAGTTGATAAAAAATCATATCAGATGAACTTGGCTGTTCCTTTTCAGATGCAAAGAGGATTGCTTGCAATCGTTAGTCAACCTTATACTGTGGCAGAAGATTTGTATTTAGGTAAATCTAAAGCATTTGAGAAGAAAACATTAGATCAAGTCAAGGAACTATCGAAAGAACAAGTAAGTTCTATTCAAAAGTTTTTACCAGTTTTCTTTAATAAATATGCCTTAAGTAACAAGACAGACTTGAAACTGTTAATGAAAACTCCAGAACTGATGGGGAAAGGATTTAAAGTTAGTGAGCTAGATCTTAATAATGCGATTTATTATCAAGAAAAAAAGCATCAAGTCGTGCAATTATCAGTAACTTTTGAAGATCTTGTAACAGGTGGCACACGATCAGAAAACTTTACATTATATTTATTTAAAGCAGACAATGGTTGGTATGTTGAAGAGATGTATCATTATTTTAAATAG

SEQ ID NO: 3608 - protein, 306 aa, Streptococcus agalactiae
MRYTKKEEGGKQPKTKEVKQRTANFIVYGILGLLFIVGFFGSLRAIGLSNQVQHLKETVIAVEKKSKHKKTDDSLDISRIQYYMNNFVYYYINYSQDTADQRKTELENYYSFSTASMTDDVRKSRTLQTQRLISVEKEKDYYIALMRIGYEVDKKSYQMNLAVPFQMQRGLLAIVSQPYTVAEDLYLGKSKAFEKKTLDQVKELSKEQVSSIQKFLPVFFNKYALSNKTDLKLLMKTPELMGKGFKVSELDLNNAIYYQEKKHQVVQLSVTFEDLVTGGTRSENFTLYLFKADNGWYVEEMYHYFK

SEQ ID NO: 3609 - protein, 528 aa, Streptococcus agalactiae
ATGAGTTTTCGTAAATACACAAAAGCCATAGTAATTGTTCACGGTAAAAGTGAACTGGATTTTGTTAAACATATTAAATCAAAACTGAGGCTTCCTCTTGAAATATACTCGAGGTCAAATGGGAAAACATCTATACAAATATCTTCGATTAATGATATTTTAAAAAATAGAGATTTTAAAACTAAAAAATGTTTTAAAGAAAAATTTTTCAAGGTTGAGTGCGATAAAAAAGGAAATCCCAAAAACGTTAAAATCTTTATTATCATGGATATTGATGATACATCGCAGGAAAAGATAGATTCCTATAAGAGTTCTACATTATTTGTAAAAGATTGGAAAAAAGATTTTATTGTTCCTATATGGAATGATAGCAATTTCGAGGAGGTCCTTAATGATATTGGTTATTGGTATGCTAAGAATGATAAAGAAAAGAGACACTACAAAAAGCTGTTTCCTGTAGAACGAGGGGAGCAGGATGTGGAGACGATAAAAGAGCTAAGAGATAAGTTNNNNNCATTCATTCATTAA

SEQ ID NO: 3610 - protein, 175 aa, Streptococcus agalactiae
  VARIANT 170, 171, 172: Xaa = Any Amino Acid
MSFRKYTKAIVIVHGKSELDFVKHIKSKLRLPLEIYSRSNGKTSIQISSINDILKNRDFKTKKCFKEKFFKVECDKKGNPKNVKIFIIMDIDDTSQEKIDSYKSSTLFVKDWKKDFIVPIWNDSNFEEVLNDIGYWYAKNDKEKRHYKKLFPVERGEQDVETIKELRDKXXXFIH

SEQ ID NO: 3611 - protein, 1350 aa, Streptococcus agalactiae
ATGTTTAGTAAAATAGAATTTAAAAACTTTATGTCCTTTTCAAATTTGACTTTTGATTTGCTGAATAGAGGAAAATGTAAGGATATTATTGCAATCTATGGAGAAAACGGTTCAGGAAAAACAAATATTGTTGAAGCTTTTAAGTTACTAGTTTTGTCATTACAATCAATGGAATCCTTAAATGAAAATACACGATTACAATCATTATTAAAAGAACAAACAAATAAAGAAGAAAATCAAAAAACTAACTTTGGTGATATATCAGAAATCTTAGATAAAATCAGTTTCTTCACCACTTTTAAGGGCATAGCGAAAAATACTCATAGAATTGCATCTGAAGGTAATACGATTCTAAAATATTATTTTAATATCGAAAAAGATAATGGTTATTACCTTCTAGAATATAATGAAAATAATGAACTAGTAAAAGAGGAGCTAGTATTTAAGATAAAATCCAATAAGGGAGTTCATTTCAGTATTACTAACATAGATGGTTTATCTCAATCATTAAATAAGACAATTTTTAAGAATACTATTTTTAAAGATTTGACTGAACAAATAGAAAAATATTGGGGTAAACATACATTCCTATCAATATTTAATAATTATTGTCTAGAAGTAAATGAAGAGTTTATTAATGAACAAGTTTCTATAAATTTTCAAAAAGTAGTTGATGAATTTGATAAAATTTTTATTTGGAGTGGTAATTTTAGAGGTCCTTTTCATTCGACAGAATTATTATTGAAAGATATTTCAAAAGGTAAAATTGATAAGTCGGAAAAAGAAAAACTTTCCTATACTGAGGAAATTATTTATAAATATTTTAGTGCATTATATATTGATATAAAAGATGTTAAATATAAGCAGGATGCTCAAGGTCAAGAAATAAAATATGAACTCATGATCCGAAAAAATATTGGAGGTGATCTTGTAGATGTACCAATAAGTTTAGAATCTCAGGGAACAAAAAATCTTCTGGATCTTCTAAAAGTTTTTAACAATGTGTTGGATGGGAAAATATGTATCGTTGATGAAATTGACTCAGGTATTCATGATCTTTTAATGAATAGTATTCTGAATGACTTGAAAGGAAGTGTGAATGGTCAGTTAATATTTACAACGCATGATACAACGTTATTGAAGGAATTATCACCGAGCTCAGCTTATTTTTTAAATGTAGATATTAAAGGTAATAAAGTTATCATTTCTGGCAATGAGGCAGATAAAAAAATAGGAGTAAATAACAATTTAGAAAAATTATATTTGTCTGGTTTCTTTGGTGCTGTACCAGATCCATTAGATATTGATTTTTCAGATTTATTTCTTGATCATAATTTAAGCGAGGACTAA

SEQ ID NO: 3612 - protein, 449 aa, Streptococcus agalactiae
MFSKIEFKNFMSFSNLTFDLLNRGKCKDIIAIYGENGSGKTNIVEAFKLLVLSLQSMESLNENTRLQSLLKEQTNKEENQKTNFGDISEILDKISFFTTFKGIAKNTHRIASEGNTILKYYFNIEKDNGYYLLEYNENNELVKEELVFKIKSNKGVHFSITNIDGLSQSLNKTIFKNTIFKDLTEQIEKYWGKHTFLSIFNNYCLEVNEEFINEQVSINFQKVVDEFDKIFIWSGNFRGPFHSTELLLKDISKGKIDKSEKEKLSYTEEIIYKYFSALYIDIKDVKYKQDAQGQEIKYELMIRKNIGGDLVDVPISLESQGTKNLLDLLKVFNNVLDGKICIVDEIDSGIHDLLMNSILNDLKGSVNGQLIFTTHDTTLLKELSPSSAYFLNVDIKGNKVIISGNEADKKIGVNNNLEKLYLSGFFGAVPDPLDIDFSDLFLDHNLSED

SEQ ID NO: 3613 - protein, 300 aa, Streptococcus agalactiae
ATGAAGAAGTTGACTAATTTTCCACAAAAACTAAAAGAATTGCGTAAAGAAAAAAAACTAACTCAAACTGAGCTAGCGTCTAAATTAAATATAAGTCAAAAGTCATATAGTAATTGGGAAAGTGGTAAAGCTGAACCTACTTTAGATAATATAATAAAGTTAGCAAATATCCTAGATGTTACTGTAGATTATTTACTTGGTAGAAGTGATAATTTTAGTAATACTATTGTGCTTTCAAAAAACAATATGAAAAGTTTTTCTAAAAGACTGAAAGAGTTAAGGTTAGAAAAAGAATATTGA

SEQ ID NO: 3614 - protein, 99 aa, Streptococcus agalactiae
MKKLTNFPQKLKELRKEKKLTQTELASKLNISQKSYSNWESGKAEPTLDNIIKLANILDVTVDYLLGRSDNFSNTIVLSKNNMKSFSKRLKELRLEKEY

SEQ ID NO: 3615 - protein, 378 aa, Streptococcus agalactiae
TTGTATAGTAACCGAGAATTTGCTTATTGTGTTAATAGACGAAATAATTTAGATAAAATGATTGATTTACTAGTTTTTATGATTCCTGATCGTGAGTTTTATTATCCTGAGATTCAAACAGGTGAGCTTAGAGATTATCAGATAGACATTTATGATTTGATTAAGATTGGTTATGTTGGTGTTTATGAAATTCAAAAAGACTACGAAGATAAGTTAAGGGAACTTGCTGATTTTAAACGGAAACTTTTAAAGTTTGGTTTGCTTATGCAACCTTTAGAAAAGCAAAAAGAGATAGTTATTCGTTTAGCTGGTAAATATCGTTTGGAAAAAAGAATTCTGATGAGAAGGGAAATGTTTAGAGATGAAGAAGTTGACTAA

SEQ ID NO: 3616 - protein, 125 aa, Streptococcus agalactiae
MYSNREFAYCVNRRNNLDKMIDLLVFMIPDREFYYPEIQTGELRDYQIDIYDLIKIGYVGVYEIQKDYEDKLRELADFKRKLLKFGLLMQPLEKQKEIVIRLAGKYRLEKRILMRREMFRDEEVD

SEQ ID NO: 3617 - protein, 1233 aa, Streptococcus agalactiae
GTGGATGCTATCTATTTAAAAAAATTTCGAAAGAAAACAGGTCTAAAACAAAAGGAATTTGCTTTAAGTTCTGGTTTGACATTGAAATCACTTAGAAACTATGAGCAAGGAAAGCGGAAGTTGACACTTGAAAAGTATCAAGAGATAAAATCACATTTTGGATATCTAGTAGAAAATGATAGTTCACGATTACAAGTGATGATTGACTATGTCAGAATTACGTTAAAGGATGTTAGGGATCTTGAATTTTTCTGTCGTAACTTTTTGCACTGTGCATTTAAAGAATTTCAGCCTTTTGAATCGAAGTTGATGAATTACAATCATCTTTGGAAACGTGGAGATATTTGGATATTTGATTTTGCGGATAAACATGAGACAGGTAATTTTCAAATAACTGTTCAATTGTCTGGTCGTGGATGCCGACAATTGGAATTGTTGATGGAAACTGAAAAATTTACATGGCATGATTGGTTAAGTTATCTAAGAAATTCATATCGTGATGATATGAATGTGACACGTTTTGATATTGCTATTGATGAATTGTATCTGGGTAAGGATAGAGAAAATGAACAGTTTCATTTGTCAGATATGATTTCAAAATATTATCGTCATGAGTTAGATTTTGAAAGTTTGAGAACTTGGAATTATATAGGTGGCGGTTCTTTAAATTTTTCGGATATGGAAGAGATTGAGCAGAATAGACAAGGAATATCGCTTTATTTTGGTAGTCGTCAATCAGAAATGTATTTTAACTTTTATGAAAAACGTTATGAAATTGCAAAGCAGGAAGGAATTACTGTTGAAGAAGCTTTAGAAATTTTTGAATTGTGGAATCGTTATGAGATACGGTTATCTCAAAGTAAAGCTAATGCGGCAGTTGATGAATTTATTTCTGGAGTGCCGATTGGTGAAATATCCAGAGGGTTAATTGTTAGTAAGATTGACGTGTATGATGGGAAAAATGAATATGGGTCGTTTCAAGCAGATAGAAAGTGGCAATTAATGTTTGGAGGTGTTGAGCCTTTAAAATTTGTTACAAAGCCAGAGGCTTATAGTATTGAACGAACCTTACGTTGGTTAAGTGATTCTGTTTCTCCGTCTTTAGCTATGATAAGAGAGTATGACATGATTGTGGATGGTGACTATTTACAAACCATTCTTAATTCTGGGGAAGTCAATGAACGTGGGGAGAAGATACTTGACAGTATCAAAGCTAGCTTAGGTATTTTGTAG

SEQ ID NO: 3618 - protein, 410 aa, Streptococcus agalactiae
MDAIYLKKFRKKTGLKQKEFALSSGLTLKSLRNYEQGKRKLTLEKYQEIKSHFGYLVENDSSRLQVMIDYVRITLKDVRDLEFFCRNFLHCAFKEFQPFESKLMNYNHLWKRGDIWIFDFADKHETGNFQITVQLSGRGCRQLELLMETEKFTWHDWLSYLRNSYRDDMNVTRFDIAIDELYLGKDRENEQFHLSDMISKYYRHELDFESLRTWNYIGGGSLNFSDMEEIEQNRQGISLYFGSRQSEMYFNFYEKRYEIAKQEGITVEEALEIFELWNRYEIRLSQSKANAAVDEFISGVPIGEISRGLIVSKIDVYDGKNEYGSFQADRKWQLMFGGVEPLKFVTKPEAYSIERTLRWLSDSVSPSLAMIREYDMIVDGDYLQTILNSGEVNERGEKILDSIKASLGIL

SEQ ID NO: 3619 - protein, 1140 aa, Streptococcus agalactiae
ATGTCAAAAACTAGATATACCGGTGTTACGAAAGATGATAAGACTGGCAAATATACTTATTATTTTAAAGCTGGAGTTGACCTAGCTACTGGTAAACCTTATCAAGAACGTAGACGTGGTTTTCAAACCGCAAAAGAAGCCTTTGAAGCACGTACAAGAGCATTGAACAAGGTACAACAAAAAGGAGGAATTAAGCATACTCAATGGACTTTTAAGCAGTTTATGGAAGAAGTTTTTATGCCAAATTATTACGCTACAACAAGTCCGGATCTCGAACACAGACGTCAAGTTATATTCGATGAATTTATTCAATACTTTGGTAAGAAAAAACCTAGAGAAATTACTACTTATGATGTGATTAATTATAGAAACGGTTTATTAGAGAGATATTCAAATTCATATGCAAGAAACAAGATGACTTTGCTTAATCAAGTTTTGAAAACTGCAAAAAAATATGGATTGATTTTTCATGAAATTCCCACAAGTAATATCAGTCCAATTCCAATCATAAAAAAACATATAGATTTTTGGACAAAAGACGAGTTCCAAAAAGTAATACAATGTCTTGATAAAAAGAGTTATTTTGAGCACTTTGTTTATACGCTTTTTTGGCTTTATTATTTTACAGGAATGCGTGTAAATGAGGCGACTGCTCTTTATTGGGAAGATGTAGATTTTGAAAAGAAAACTCTAGCAATCAATCACAACTTACAGTATATAAACCGTGAAAATTGGGTTCGGCGTAACAAACTAAAAACTGAAAGCTCCAGACGAACCATTGGCCTTGATGATAATACTCTAAACGTACTTAAAGAATGGAAAGAACGACAAGCAAAAGTTGACAAGATACCATTCATTCTATCACTTGATGGAAATCCATATCGTAAACGTAGTATTAGAGACCAGATTCTAAAATATTCTAAACGAGCAGGAGTTAAATACATTCAACCAAAAGGTTTAAGACACTCCCATGCGTCATTACTTATTAATGAATATAATGTAAATGCTCTATATATTCAAAGACGATTAGGTCATTCTGATGTCAAAACTACACTTAGCATTTATAGTCATTTATACCCAAACGCTGATTCCGAATTAACAGATAAACTCAATCTGATATCAAGTGATTTTATCGACTAA

SEQ ID NO: 3620 - protein, 379 aa, Streptococcus agalactiae
MSKTRYTGVTKDDKTGKYTYYFKAGVDLATGKPYQERRRGFQTAKEAFEARTRALNKVQQKGGIKHTQWTFKQFMEEVFMPNYYATTSPDLEHRRQVIFDEFIQYFGKKKPREITTYDVINYRNGLLERYSNSYARNKMTLLNQVLKTAKKYGLIFHEIPTSNISPIPIIKKHIDFWTKDEFQKVIQCLDKKSYFEHFVYTLFWLYYFTGMRVNEATALYWEDVDFEKKTLAINHNLQYINRENWVRRNKLKTESSRRTIGLDDNTLNVLKEWKERQAKVDKIPFILSLDGNPYRKRSIRDQILKYSKRAGVKYIQPKGLRHSHASLLINEYNVNALYIQRRLGHSDVKTTLSIYSHLYPNADSELTDKLNLISSDFID

SEQ ID NO: 3621 - protein, 204 aa, Streptococcus agalactiae
ATGAACGATAAATTAACTATGACAGTACAAGAAATTATGGACTTAGGTTTTTCAAAATGGACTGCTTATAATATTTTACGGCAAGCAAAACATATTATGGTCGAGCGTGGTTTCGATTTCTATAACAATAAAGGACTTGGAACTGTTCCAGTATCAGTTGTAGCAGAGATACTTGGATTGGAGGAACTCCATGTCAAAAACTAG

SEQ ID NO: 3622 - protein, 67 aa, Streptococcus agalactiae
MNDKLTMTVQEIMDLGFSKWTAYNILRQAKHIMVERGFDFYNNKGLGTVPVSVVAEILGLEELHVKN

SEQ ID NO: 3623 - protein, 993 aa, Streptococcus agalactiae
TTGAAAAATACCATTCAATCTCTACGAGAATATCAAAGTCAAGTAGATTTATCAAAACTAGAAAAATCTATTTATATCAGCATTGACAGATTAACAGTAATCTTTGATAGTGAGAACCAATCACTTAGACGAATATTTCGTGAATTACGAAAATCACTCGATAATATAATTCAAGAATTTAGTATTCAAGAAAATCTAAGAGAAGACTATTTTACTCTTTATAAAATGATAAACGAAGATAGTATAAATCTAATTTTCTTTCAACTATCGGATTATGGTGGTTATCAAGTCATACGCCTAGACTTCAACCCAAACTCACTAAAAGAATTTGAGGGGTTACAAGTGTGGAGGCAGATTATGAATTACGCTCGATTAAATCGATTAGAAATTAGACTGTCACGATTAGATCTTGCTTTTGATATCTTTAATAGGCCAGAAATAGTTTTTTTACAACATATCAAAGGAGGGGTTAGTCATAAAATATTCTACGGTAGAGGGGGAAATATAGAAAGTAAATACTGGGGTGCAAGTGGTAGCAACGTTCAAGTACGTTTGTACGATAAGAATATAGAGGTATTAAGTCACAAAAGAGATGATAAATTAAAAATAGAAAGCAAGCCCTTTTGGTGGCGGTTAGAGTTCCAACTTCGGACAAAGGCTATAAACGAAGAAACCATTTCAGAGATTTCTAAACGATTGGAGAATTTTAGCTTTTTTAGTCTTTCAAGTGTTCCAGATGATAGCAAAGCATTTGCTTATATCTTTCTCCATGAACCTGCACTCTTACCCGAATTATTCCCCTATCTGAAACCTAACACTATTAGAGTTAAAAAGACTAGGCTTAGAAAACATTTAAAAGCATTTGATAGTAGCTCATTTTCTTTAGAGCTACAAGATGCACTTAAAGAACAAACCCCACGATTAAATAATGAACTCAAACAATTAATAGGAGAATTCCTAGAACTTACTAGTAAAGGAGAAATTGATTTATGA

SEQ ID NO: 3624 - protein, 330 aa, Streptococcus agalactiae
MKNTIQSLREYQSQVDLSKLEKSIYISIDRLTVIFDSENQSLRRIFRELRKSLDNIIQEFSIQENLREDYFTLYKMINEDSINLIFFQLSDYGGYQVIRLDFNPNSLKEFEGLQVWRQIMNYARLNRLEIRLSRLDLAFDIFNRPEIVFLQHIKGGVSHKIFYGRGGNIESKYWGASGSNVQVRLYDKNIEVLSHKRDDKLKIESKPFWWRLEFQLRTKAINEETISEISKRLENFSFFSLSSVPDDSKAFAYIFLHEPALLPELFPYLKPNTIRVKKTRLRKHLKAFDSSSFSLELQDALKEQTPRLNNELKQLIGEFLELTSKGEIDL

SEQ ID NO: 3625 - protein, 183 aa, Streptococcus agalactiae
ATGACATCAACACAATTGGCATTTCAAAACAACAAAATTAACAATACTCATTCTTTTTATTCGCCTAGTTTAGAAGAATATATTCAAGTAAATGATGATGTATTTAACGATATTCGAGACGAAGAAATTGAACTTCGAGCACTTGAACTGCTCTCGAGTTTTCTAGACAAGTATTTTGGGTAG

SEQ ID NO: 3626 - protein, 60 aa, Streptococcus agalactiae
MTSTQLAFQNNKINNTHSFYSPSLEEYIQVNDDVFNDIRDEEIELRALELLSSFLDKYFG

SEQ ID NO: 3627 - protein, 294 aa, Streptococcus agalactiae
ATGTTAAAAGACAATATAAAAAAAGCCCGACTAGATGCAGGACTTACTCAATTAGAAGTTGCTGAAAAGTTAGGTGTAGCTCAAGCTCAATATGCTAGGTGGGAAAATGGAGGGAGAAATCCGAAAGATGAAACAGTAGAAAAATTAGCTGAAATCTTTGGTACGTCTCTTGAGATTTTAAAAGGACGTGATGACGGACTAGAAGAAATTGTTAGTTTATTGAGAGAATATGAATTGACAGAAGCAGATAAAAACAAAATTATTAAAACTTTAAAGGATTTATTACATAAATAA

SEQ ID NO: 3628 - protein, 97 aa, Streptococcus agalactiae
MLKDNIKKARLDAGLTQLEVAEKLGVAQAQYARWENGGRNPKDETVEKLAEIFGTSLEILKGRDDGLEEIVSLLREYELTEADKNKIIKTLKDLLHK

SEQ ID NO: 3629 - protein, 1220 aa, Streptococcus agalactiae
ATGAATGAATGNNNNNGATCCATTTGTGGGATACACACTTCGGCTTCAATGTTGATTTAGCGCCATTAGTAAAACAAAAGAATGATTTAGTAACCGAGATGCGAAATGAAAAATATGTGAATTTAATTGATGATTATGGTTTTGAATTAATAAAAGGTGAAGCAAAATTCGTAAATGAAAATACAGTTGAAGTAAATGGCAATCAAATCACAGCCAAAAGATTTTTAATAGCTACAGGTGCTTCTTCAACTGCACCTAATATTCCCGGATTAGATGAAGTAGATTATTTAACAAGCACTAGCTTATTGGAATTAAAGAAGGTTCCAAATCGTCTTACCGTAATTGGTTCAGGATATATCGGCATGGAATTAGGACAACTATTTCATAACCTCGGGTCAGAAGTCACTTTGATTCAAAGAAGCGAGCGTCTATTAAAAGAATACGATCCTGAAATTTCAGAAGCCATTACTAAGGCCTTAACAGAACAGGGAATTAATTTAGTAACAGGTGCAACCTATGAACGAGTTGAGCAAGATGGAGACATTAAAAAAGTTCATGTTGAGATAAATGGTAAAAAGCGAATTATTGAAGCAGAACAATTGCTAATTGCCACTGGAAGAAAACCAAATACAGAATCATTAAACTTACATGCAGCAGGCGTTGAAGTTGGTTCCCGTGGTGAAATTGTCATTGATGATTATCTTAAAACGACCAATTCCCGAATTTATTCAGCTGGAGATGTCACTCTCGGTCCCCAATTTGTTTATGTAGCTGCTTATGAAGGTGGACTTGCTGCTCGTAATGCAATCGGAGGACTAAATCAAAAGGTCAATTTAGAAGTGGTTCCAGGCGTTACGTTTACTTCTCCATCGATTGCAACGGTTGGTTTAACGGAGCAACAGGCAAAAGAAAAAGGATATGAAGTGAAAACATCGGTATTGCCGTTGGATGCTGTTCCAAGAGCGCTCGTTAATCGGGAAACAACAGGTGTTTTCAAATTAGTGGCAGACGCGAAAACATTGAAAGTGTTAGGGGCGCATGTAGTGGCAGAAAACGCAGGAGACGTAATTTATGCAGCAACATTAGCTGTGAAATTCGGTTTAACTGTTGGAGATCTGAGAGAAACGATGTGTCCATATCTAACAATGGCAGAAGGATTGAAGCTGGCTGTCCTAACTTTTGATAAAGATGTTTCGAAATTATCTTGCTGTGCAGGCTAA

SEQ ID NO: 3630 - protein, 406 aa, Streptococcus agalactiae
  VARIANT 4, 5, 6: Xaa = Any Amino Acid
MNEXXXSICGIHTSASNVDLAPLVKQKNDLVTEMRNEKYVNLIDDYGFELIKGEAKFVNENTVEVNGNQITAKRFLIATGASSTAPNIPGLDEVDYLTSTSLLELKKVPNRLTVIGSGYIGMELGQLFHNLGSEVTLIQRSERLLKEYDPEISEAITKALTEQGINLVTGATYERVEQDGDIKKVHVEINGKKRIIEAEQLLIATGRKPNTESLNLHAAGVEVGSRGEIVIDDYLKTTNSRIYSAGDVTLGPQFVYVAAYEGGLAARNAIGGLNQKVNLEVVPGVTFTSPSIATVGLTEQQAKEKGYEVKTSVLPLDAVPRALVNRETTGVFKLVADAKTLKVLGAHVVAENAGDVIYAATLAVKFGLTVGDLRETMCPYLTMAEGLKLAVLTFDKDVSKLSCCAG

SEQ ID NO: 3631 - protein, 1662 aa, Streptococcus agalactiae
ATGAGTTATTACCTTTTTTCTTTTCTATTTATTTTGTTTTTGACACCTGTAGGCGTGTATAGTTATTACTATTTAGATTTGTTAAAAATGATGGATAAAATGTCTATGATCAGTGTAGGTACAGGTTTGTTTTTAGCATTTTTTGTTTCTTGGTATTTGACTTGGTTTTTGCAAGAAGCTAATCCATTATTTAATAAACTAGATCGATTAAAAAGAATGTCTAAGTTTTTATATGAGAATGGCTATGTTTATGAAAAACGTAAAAAATCAAATAAGAAAACGAAGACAAAATATCGTTTTCCAAAAGTTTATGTGAAACAAGGTAAGTATGATTTAAGTGTTTCATTTGAAATGGCTGGAGGAAAATTTCAAAAGAAATTTAAGGATATTGGTGGAGAATTAGAAGATACTTTTTTCATGGATTTTATGGAAAAAACTGATGATCCACGCTTTAAAATTTACAAATTAGCTTATTCGGCTTTCTTATCACGTATTACGGTTAAAGATGTGATATGGGATAAAGATAAGGGAATTAAGTTAATGGATGGCTATTATTGGGATTTCATCAATGATCCTCATTTATTAGTTGCTGGTGGTACTGGTGGAGGTAAAACAGTATTACTAAGGTCAATCCTTCGTTGTCTTGCGGAAATTGGAGTTTGTGATATATGTGACCCTAAAAGAGCCGATTTTGTTACTATGTCAGATTTATCAGCTTTTGAAGGTAGAATTGCCTTTGAAAAGGCTGATATTATTGAGAAGTTTGAAAATGCTGTTACGATAATGTTTGCACGTTATGATTTTGTTCGAAATGAAATGAAGCGTTTAGGTCATAAAGACATGAAAAAGTTTTATGATTATGGATTGGAACCTTATTTTTTTGTATGTGATGAATATAATGCTTTAATGAGTTCTTTGTCTTATCAGGAACGTGAGATTGTAGATAATGCATTTACTCAATATATATTGTTAGGACGTCAGGTTGGATGTAATGCGATTATAGCAATGCAAAAGCCGTCTGCAGATGATCTTCCCACTAAAATTAGATCTAATATGATGCACCATATCTCGGTTGGTCGTCTCGATGATGGTGGTTATGTGATGATGTTTGGTGATGAAAATAGAAATAAGGAATTTAGGTTTATTAAATATCTTGCAGGTCGTCGTGTTTATGGTCGAGGTTATTCAGCTGTTTTTGGTGAAGTAGCAAGAGAATTTTATTCTCCTTTATTACCTAAAAATTTCTCTTTTTATGATGCTTTTGAAAAAATAAATAGGCATGAGAATCCTTTTGATCCTACAGAAAATCAGGAAGTTTCTAAGGCGATTCTTAAAGACGAATCTTTGAGAGAGTTTGTGGAAAAAACGTCTGAAAATGAGTTACTTAAGGGTTCAGTAGGGTTTGATTTTGATGATGAAATGGAGGAAATGGAAAATATGAGTATTGGTGATTTAGCTAAGAAAACAGGTTTTTCATTTGGTAAGATTAAGAATTTAATAGATATGATTGAAAAAGATAATTATATGACTTTTAGTCGTGAAGATGAAAAGGTTGTATTAAATGATTCTGATGCAGTCGTCTTAGAAAGTTTACTGACACAAAAAGATGAATTTGAGGGTAGCTGGAAAGAGTTACTATTGAATTATTTTAAGGGTGAATAG

SEQ ID NO: 3632 - protein, 553 aa, Streptococcus agalactiae
MSYYLFSFLFILFLTPVGVYSYYYLDLLKMMDKMSMISVGTGLFLAFFVSWYLTWFLQEANPLFNKLDRLKRMSKFLYENGYVYEKRKKSNKKTKTKYRFPKVYVKQGKYDLSVSFEMAGGKFQKKFKDIGGELEDTFFMDFMEKTDDPRFKIYKLAYSAFLSRITVKDVIWDKDKGIKLMDGYYWDFINDPHLLVAGGTGGGKTVLLRSILRCLAEIGVCDICDPKRADFVTMSDLSAFEGRIAFEKADIIEKFENAVTIMFARYDFVRNEMKRLGHKDMKKFYDYGLEPYFFVCDEYNALMSSLSYQEREIVDNAFTQYILLGRQVGCNAIIAMQKPSADDLPTKIRSNMMHHISVGRLDDGGYVMMFGDENRNKEFRFIKYLAGRRVYGRGYSAVFGEVAREFYSPLLPKNFSFYDAFEKINRHENPFDPTENQEVSKAILKDESLREFVEKTSENELLKGSVGFDFDDEMEEMENMSIGDLAKKTGFSFGKIKNLIDMIEKDNYMTFSREDEKVVLNDSDAVVLESLLTQKDEFEGSWKELLLNYFKGE

SEQ ID NO: 3633 - protein, 258 aa, Streptococcus agalactiae
GTGAAGTGGAATGATATTGCAGTATTTAGTACTGCTCAAAATGAAACAATTTTTGTTTCAATTACTGATATGCCTTCTTATGCAATCGAGGATTTAGGTCTTAAATTGGGTGACCCTATTGAATTAAGTGATGTTGTTGTGACATGGTCTAACGTTTCAGGTGGTATGTTTAAAATTTTTGCATCATCACTTAAGAAAAAGGATGTTGCAAATAATGGAAACGCATCAAAAAATGAAGCATCTAAAGTTAATAAATAA

SEQ ID NO: 3634 - protein, 85 aa, Streptococcus agalactiae
MKWNDIAVFSTAQNETIFVSITDMPSYAIEDLGLKLGDPIELSDVVVTWSNVSGGMFKIFASSLKKKDVANNGNASKNEASKVNK

SEQ ID NO: 3635 - protein, 213 aa, Streptococcus agalactiae
ATGGCAAAAATTGGTTTAAACTTTGGAGAAAAATTACAAATTGCAGATAAGGAATATCGTACCTTTAATGATGGATTGGATGTAAATGTTTTGTTAGGAGATTTAACTTGGAGACGATATGAAGAACCAGTTCAATTTACGGAAGATGATACGACACAACCACCAGATCGATTTGGTCGTTATCCACAAAAACCAACAGGTGAAGTGGAATGA

SEQ ID NO: 3636 - protein, 70 aa, Streptococcus agalactiae
MAKIGLNFGEKLQIADKEYRTFNDGLDVNVLLGDLTWRRYEEPVQFTEDDTTQPPDRFGRYPQKPTGEVE

SEQ ID NO: 3637 - protein, 297 aa, Streptococcus agalactiae
ATGAAACAAGAAACATTAGTGTTACTTCCAAATTTTATTGGAGATGCAATTTATGAAGGATTTGAAGCTGGACCTGCTCAATTAAATGGTAAAAAAGGGTCTTATACAAGACACATTTTGTTTAATGAAAAACATGGTAAGTTTTATGTTTATACACCAGCATCTTCACGTGTGATTGGAAATGGAAAAATGGTAACTGTTGAAAAACCGTTATTGTTTATTGACAATACAATTAATGGTAGAAATATTGAACCTGCAAAAAATGTATGGGCTGAAAAGCTTATTGAAGTGAAATAA

SEQ ID NO: 3638 - protein, 98 aa, Streptococcus agalactiae
MKQETLVLLPNFIGDAIYEGFEAGPAQLNGKKGSYTRHILFNEKHGKFYVYTPASSRVIGNGKMVTVEKPLLFIDNTINGRNIEPAKNVWAEKLIEVK

SEQ ID NO: 3639 - protein, 2508 aa, Streptococcus agalactiae
ATGATCACGACATTACAGACTAGTCAAGTGTCTGCTGATCAAGTTACAACTCAAGCAACAACTCAAACAGTAACGCAAAATCAAGCAGAAACAGTAACATCAACTCAACTTGATAAAGCAGTAGCTACAGCTAAAAAAGCAGCTGTAGCTGTTACAACCACAGCTGCAGTTAATCATGCGACAACTACTGATGCACAAGCTGATTTAGCTAATCAAACACAAACAGTTAAAGATGTTACTGCAAAAGCACAAGCTAATACACAAGCTATTAAAGATGCTACTGCTGAAAATGCAAAAATTGACGCAGAAAACAAAGCAGAGTCTCAACGTGTAAGTCAGTTAAATGCACAAACTAAAGCAAAAATTGATGCTGAAAACAAAGATGCACAAGCTAAAGCAGATGCGACTAATGCACAATTACAAAAAGATTATCAAGCTAAATTAGCGAAAATCAAATCAGTTGAAGCTTATAATGCAGGTGTACGTCAACGTAATAAAGATGCACAAGCTAAAGCAGATGCGACTAACGCACAGTTACAAAAAGACTATCAAGCTAAATTAGCACTTTATAATCAAGCTCTAAAAGCTAAAGCAGAAGCAGATAAACAGTCTATTAATAATGTTGCTTTTGATATCAAAGCTCAAGCTAAAGGTGTTGATAACGCTGAATATGGAAACTCAATCATGACTGCAAAAACTAAACCTGACGGAAGTTTCGAGTTTAACCATGATATGATCGATGGTGTGAAGACAATCGGCTATGGGAAATTGACAGGTAAAGTTAATCATCATTATGTTGCTAACAAAGATGGCTCTGTGACAGCATTTGTTGACTCTATCACTCTTTACAAGTACGAGTATCGTAATGTTGCTCAAAATGCTGCTGTTAATCAAAATATTGCTTTCAGAGTCTTAACTAAAGACGGACAAATCATTTTTGAGAAGAAACATAATGGTAACAAAACTTTTGCAGAAACTTTAAACAAAACTTTACAACTCAATCTTAAATATGAGCTTAAACCACATGGTTCTAGTGGAAGCGTTGAAGTCTTTAAGATTCATGATGACTGGGTACATGACACACATGGGTCTGCTTTAGTGTCTTATGTTAATAATAATGATGTTGTTCCTAACGTTGTTATACCAAAACAGCCAACACCACCGTCAACAGAAAAAGTGACTCCTGAAGCAGAAAAACCAGTACCTGAAAAACCAGTTGAGCCTAAATTTGTAACACCTACATTAAAAACTTACACTCCAGCTCAACCAAAAGTGAAACCACATGTGTCTATTCCTGAAAAGATTAACTACTCAGTTAGTGTTCATCCTGTTTTAGTTCCAGCTGCTAATCCTTCAAAAGCTGTCATTGATGAAGCAGGTCAATCTGTTAATGGTAAAACCGTATTACCAAATGCTGAATTAAATTACGTTGCTAAACAAGACTTTAGCCAATATAAAGGAATGACTGCATCACAAGGTAAAATAGCTAAAAACTTTGTCTTTATTGATGATTATAAAGATGACGCACTAGATGGTAAGTCTATGAAAGTGAACTCAATCAAAGCATCTGATGGCACAGATGTGTCACAACTCTTAGAAATGCGACATGTGCTTTCTACGGATACTTTAGATGAGAAACTTCAAACGCTTATTAAAGAAGCAGGAATCAGTCCTGTTGGTGAGTTTTACATGTGGACTGCAAAAGATCCACAAGCTTTTTATAAAGCTTATGTTCAAAAAGGTCTAGATGTTACTTATAACTTATCATTTAAAGTTAAAAAAGAGTTTACTAAAGGTCAAATTCAAAATGGTGTTGCACAAATCGACTTTGGCAATGGATATACAGGTAATATTGTAGTCAATGATTTGACAACTCCAGAAATACATAAAGATGTGTTAGACAAAGAAGATGGCAAGTCTATCAACAATGGTACTGTCAAATTAGGTGATGAAGTTACTTACAAATTAGAGGGTTGGGTAGTTCCAACAGGTCGTTCTTATGATCTATTTGAATACAAATTTGTGGATCAATTACAACGCACACATGATCTTTACTTACGTGATAAAGTGGTCGCTAAAGTTGATGTGACATTAAAAGATGGTACAGTCATTAAAAAAGGGACTAATTTAGGAGAGTACACAGAAACAGTTTACAACAAAAAGACAGGTCTCTATGAATTAGTCTTCAAGAAAGACTTCCTTGAAAAAGTTGCACGTTCTAGTGAATTTGGGGCAGATGATTTTGTGGTGGTTAAACGTATCAAAGCAGGTGATGTTTACAATACCGCAGACTTTTTTATCAATGGGAATAAGGTTAAAACTGAAACTGTGGTAACACATACTCCTGAGAAACCAAAACCAGTTGAACCACAAAAAGCAACTCCAAAAGCTCCTGCTAAAGGATTACCTCAAACTGGTGAAGCAAGCGTTGCCCCTCTTACAGCACTTGGAGCAATCATCTTGTCAGCTATCGGTTTAGCAGGATTTAAAAAACGCAAAGAAAATTAA

SEQ ID NO: 3640 - protein, 835 aa, Streptococcus agalactiae
MITTLQTSQVSADQVTTQATTQTVTQNQAETVTSTQLDKAVATAKKAAVAVTTTAAVNHATTTDAQADLANQTQTVKDVTAKAQANTQAIKDATAENAKIDAENKAESQRVSQLNAQTKAKIDAENKDAQAKADATNAQLQKDYQAKLAKIKSVEAYNAGVRQRNKDAQAKADATNAQLQKDYQAKLALYNQALKAKAEADKQSINNVAFDIKAQAKGVDNAEYGNSIMTAKTKPDGSFEFNHDMIDGVKTIGYGKLTGKVNHHYVANKDGSVTAFVDSITLYKYEYRNVAQNAAVNQNIAFRVLTKDGQIIFEKKHNGNKTFAETLNKTLQLNLKYELKPHGSSGSVEVFKIHDDWVHDTHGSALVSYVNNNDVVPNVVIPKQPTPPSTEKVTPEAEKPVPEKPVEPKFVTPTLKTYTPAQPKVKPHVSIPEKINYSVSVHPVLVPAANPSKAVIDEAGQSVNGKTVLPNAELNYVAKQDFSQYKGMTASQGKIAKNFVFIDDYKDDALDGKSMKVNSIKASDGTDVSQLLEMRHVLSTDTLDEKLQTLIKEAGISPVGEFYMWTAKDPQAFYKAYVQKGLDVTYNLSFKVKKEFTKGQIQNGVAQIDFGNGYTGNIVVNDLTTPEIHKDVLDKEDGKSINNGTVKLGDEVTYKLEGWVVPTGRSYDLFEYKFVDQLQRTHDLYLRDKVVAKVDVTLKDGTVIKKGTNLGEYTETVYNKKTGLYELVFKKDFLEKVARSSEFGADDFVVVKRIKAGDVYNTADFFINGNKVKTETVVTHTPEKPKPVEPQKATPKAPAKGLPQTGEASVAPLTALGAIILSAIGLAGFKKRKEN

SEQ ID NO: 3641 - protein, 1254 aa, Streptococcus agalactiae
ATGTCAGACTTATTATCCCTACCAGACATTAAAACAATAGAACCGCCACAAGAAAATGAAACCGATATGATGTTTAAAGTTGAAGCAGTCGGACCACCTGAACGTTGTCCTGAATGTGGTTTTGACAAGTTGTACAAACACAGTTCAAGAAATCAACTAATTATGGATTTGCCCATTCGTTTAAAGCGAGTGGGCTTACATTTGAACCGTAGACGATACAAGTGTCGTGAATGCGGATCTACCATATCTGTAGATGAAAAGCGTAGTATGACCAAAAGGCTTTTAAAGTCCATTCAAGAGCAATCCATGTCTAAGACCTTTGTAGAAGTCGCAGAAAGCGTTGGTGTTGACGAGAAAACCATTAGGAACGTTTTTAAGGACTATGTGGCACTCAAAGAACGTGAATACCAGTTTGAAACTCCTAAGTGGCTTGGGATAGACGAGATACATATTATCCGTAGACCTCGGCTTGTATTGACTAATATTGAACGCAGGACTATTTATGACATCAAGCCTAACCGTAACAAGGAAACAGTCATCCAACGTCTTTCAGAAATCAGTGACAGGACTTACATTGAGTACGTCACAATGGATATGTGGAAGCCCTACAAAGACGCAGTGAACACTATCCTTCCACAAGCTAAAGTTGTCGTAGATAAGTTTCATGTAGTTAGAATGGCTAATCAAGCCTTAGATAACGTCAGAAAGTCTTTGAAAGCCCATATGAGCCAAAAAGAAAGACGTACCCTTATGCGTGAAAGGTTTATCCTTCTAAAGCGTAAACACGATCTAAATGAACGTGAATCATTCCTCTTAGATACTTGGTTAGGTAATCTTCCTGCTTTAAAAGAAGCCTATGAACTCAAAGAAGAGTTTTACTGGATATGGGATACTCCTGATCCAGATGAAGGTCATCTTCGTTATAGTCAATGGAGACACCGTTGTATGTCCAGCAACTCTAAAGACGCATATAAAGACCTCGTGAGAGCCGTAGACAACTGGCATGTTGAAATATTCAACTACTTTGATAAAAGGCTCACTAATGCTTATACGGAGTCAATTAACAGCATTATTAGGCAGGTAGAGCGAATGGGTAGAGGTTACTCGTTTGATGCCTTACGAGCCAAAATCCTTTTCAATGAGAAGCTCCATAAAAAGCGTAAGCCACGATTTAATTCAAGTGCTTTCAATAAAGCTATGTTATACGATACTTTCAATTGGTATGAAGTGAATGATCACGACATTACAGACTAG

SEQ ID NO: 3642 - protein, 417 aa, Streptococcus agalactiae
MSDLLSLPDIKTIEPPQENETDMMFKVEAVGPPERCPECGFDKLYKHSSRNQLIMDLPIRLKRVGLHLNRRRYKCRECGSTISVDEKRSMTKRLLKSIQEQSMSKTFVEVAESVGVDEKTIRNVFKDYVALKEREYQFETPKWLGIDEIHIIRRPRLVLTNIERRTIYDIKPNRNKETVIQRLSEISDRTYIEYVTMDMWKPYKDAVNTILPQAKVVVDKFHVVRMANQALDNVRKSLKAHMSQKERRTLMRERFILLKRKHDLNERESFLLDTWLGNLPALKEAYELKEEFYWIWDTPDPDEGHLRYSQWRHRCMSSNSKDAYKDLVRAVDNWHVEIFNYFDKRLTNAYTESINSIIRQVERMGRGYSFDALRAKILFNEKLHKKRKPRFNSSAFNKAMLYDTFNWYEVNDHDITD

SEQ ID NO: 3643 - protein, 1641 aa, Streptococcus agalactiae
ATGAATAAATTTAAGGTAAACATTTCAGGAATGACTTGTACGGGTTGTGAAAAACACGTAGAATCAGCACTTGAAAAGATAGGTGCTAAAAATATTGAGTCTAGTTATCGTCGTGGTGAAGCAGTATTTGAACTGCCCGATGATATTGAGGTTGAAAGTGCAATAAAGGCGATTGATGAAGCAAATTACCAAGCCGGAGAAATTGAAGAAGTATCATCACTAGAAAACGTGGCGTTAATTAATGAAGACAATTATGACCTTCTTATTATTGGTTCTGGTGCTGCTGCCTTTTCTTCGGCAATTAAAGCTATAGAATACGGTGCAAAAGTTGGAATGATTGAGCGTGGAACGGTTGGGGGAACCTGTGTGAATATTGGCTGTGTTCCGTCAAAAACTCTTCTTAGGGCAGGGGAAATCAATCATTTATCAAAAGACAATCCGTTTATAGGTTTACAAACATCCGCTGGAGAAGTGGATTTAGCTAGTTTAATCACGCAAAAGGATAAATTGGTGAGCGAACTTCGGAATCAAAAATATATGGATTTAATTGATGAATATAATTTTGATTTAATTAAAGGTGAAGCAAAATTCGTTGATGCTAGTACGGTTGAGGTCAATGGGACAAAGTTATCTGCAAAACGCTTTTTAATTGCAACAGGTGCATCGCCTTCGTTGCCCCAAATTTCAGGACTTGAAAAAATGGACTATTTAACTAGTACAACACTTCTTGAGTTAAAGAAAATACCAAAACGATTAACTGTAATTGGTTCAGGATACATTGGAATGGAGCTTGGACAACTATTTCATCATTTAGGTTCAGAAATAACGCTTATGCAAAGAAGTGAGCGACTTTTAAAGGAGTATGATCCTGAGATTTCAGAGTCAGTTGAAAAAGCGTTAATTGAACAGGGTATAAACCTTGTCAAAGGGGCAACTTTTGAGCGTGTTGAACAAAGTGGAGAGATAAAAAGGGTTTACGTAACAGTAAATGGCAGTAGAGAAGTCATTGAATCAGATCAGTTACTTGTTGCCACTGGAAGAAAACCAAATACGGATTCTTTAAATTTAAGTGCAGCAGGTGTTGAAACTGGAAAAAATAATGAAATCCTGATCAATGATTTTGGTCAAACAAGTAATGAAAAGATTTATGCAGCAGGAGATGTGACTTTAGGACCACAATTTGTATATGTAGCAGCCTATGAAGGTGGAATTATTACTGATAATGCTATTGGTGGATTAAACAAAAAAATAGATTTATCGGTAGTTCCTGCTGTTACGTTTACGAATCCGACGGTTGCAACGGTTGGTTTAACAGAAGAACAAGCAAAAGAGAAAGGGTATGATGTGAAGACATCTGTATTACCTTTAGGTGCTGTTCCAAGAGCAATTGTAAACCGTGAAACAACCGGTGTATTTAAACTAGTAGCAGATGCAGAAACACTAAAAGTATTAGGGGTTCATATTGTATCTGAAAATGCAGGAGATGTCATCTATGCAGCATCATTAGCTGTTAAATTTGGCTTAACGATAGAAGATTTAACAGAAACCCTAGCACCATATTTAACAATGGCTGAAGGGCTAAAATTAGTTGCACTTACGTTCGATAAAGATATTTCGAAATTATCTTGTTGTGCAGGCTAA

SEQ ID NO: 3644 - protein, 546 aa, Streptococcus agalactiae
MNKFKVNISGMTCTGCEKHVESALEKIGAKNIESSYRRGEAVFELPDDIEVESAIKAIDEANYQAGEIEEVSSLENVALINEDNYDLLIIGSGAAAFSSAIKAIEYGAKVGMIERGTVGGTCVNIGCVPSKTLLRAGEINHLSKDNPFIGLQTSAGEVDLASLITQKDKLVSELRNQKYMDLIDEYNFDLIKGEAKFVDASTVEVNGTKLSAKRFLIATGASPSLPQISGLEKMDYLTSTTLLELKKIPKRLTVIGSGYIGMELGQLFHHLGSEITLMQRSERLLKEYDPEISESVEKALIEQGINLVKGATFERVEQSGEIKRVYVTVNGSREVIESDQLLVATGRKPNTDSLNLSAAGVETGKNNEILINDFGQTSNEKIYAAGDVTLGPQFVYVAAYEGGIITDNAIGGLNKKIDLSVVPAVTFTNPTVATVGLTEEQAKEKGYDVKTSVLPLGAVPRAIVNRETTGVFKLVADAETLKVLGVHIVSENAGDVIYAASLAVKFGLTIEDLTETLAPYLTMAEGLKLVALTFDKDISKLSCCAG

SEQ ID NO: 3645 - protein, 393 aa, Streptococcus agalactiae
ATGATTTATCGCATTAGTGAGTTTGCAGATAAATGTGGAGTTAATAAAGAAACGATCAGATATTACGAGCGAAAAAATTTATTACAAGAACCTCACCGAACGGAAGCTGGTTATCGGATATATTCATATGATGACGTTAAGCGTGTTGGGTTTATTAAACGAATACAGGAACTTGGTTTCTCTTTAAGCGAGATTTATAAATTACTTGGTGTTGTAGATAAAGATGAAGTTCGTTGTCAAGATATGTTCGAATTTGTTTCTAAAAAACAAAAGGAAGTGCAAAAACAAATAGAGGATTTAAAACGAATTGAAACTATGTTAGACGACTTAAAACAACGATGTCCAGATGAAAAGAAATTACATTCGTGTCCAATAATAGAAACATTAACATGA

SEQ ID NO: 3646 - protein, 130 aa, Streptococcus agalactiae
MIYRISEFADKCGVNKETIRYYERKNLLQEPHRTEAGYRIYSYDDVKRVGFIKRIQELGFSLSEIYKLLGVVDKDEVRCQDMFEFVSKKQKEVQKQIEDLKRIETMLDDLKQRCPDEKKLHSCPIIETLT

SEQ ID NO: 3647 - protein, 273 aa, Streptococcus agalactiae
ATGAATCTACAAAAAAATGATAAAACAAATAGTTTTATCCATTATGCAAACGGTCCTTCCCTAGAAGAAATAAATGGGACAATTGAAGTTCCTAAAGATTTGAGCTTTTTTAAAACTTTACTAGCTTATTCTGGACCGGGTGCACTTGTTGCTGTTGGTTATATGGATCCTGGAAATTGGTCCACTTCCATAACTGGCGGTCAAAATTTTCAATATTTACTAATTTCAATTATCTTAATGTCTAGTTTANNNNNCATTCCATTCATTAATTAA

SEQ ID NO: 3648 - protein, 90 aa, Streptococcus agalactiae
  VARIANT 84, 85: Xaa = Any Amino Acid
MNLQKNDKTNSFIHYANGPSLEEINGTIEVPKDLSFFKTLLAYSGPGALVAVGYMDPGNWSTSITGGQNFQYLLISIILMSSLXXIPFIN

SEQ ID NO: 3649 - protein, 1569 aa, Streptococcus agalactiae
ATGAATCTACAAAAAAATGATAAAACAAATAGTTTTATCCATTATGCAAACGGTCCTTCCCTAGAAGAAATAAATGGGACAATTGAAGTTCCTAAAGATTTGAGCTTTTTTAAAACTTTACTAGCTTATTCTGGACCGGGTGCACTTGTTGCTGTTGGTTATATGGATCCTGGAAATTGGTCCACTTCCATAACTGGCGGTCAAAATTTTCAATATTTACTAATTTCAATTATCTTAATGTCTAGTTTAATTGCTATGCTACTTCAATACATGTCAGCTAAGCTAGGTATTGTTACTCAGATGGATCTTGCTCAAGCTATCCGAGCAAGGACCAGTAAACAGTTGGGAATTGTCTTATGGATTCTCACTGAGCTTGCTATAATGGCAACAGATATTGCTGAAGTTATTGGTGGGGCTATTGCACTTTATTTACTGTTTCATATTCCACTTGCGATTGCTGTTTTCATTACAGTATTTGATGTATTACTCTTATTATTGTTGACAAAAATAGGATTTCGAAAAATTGAAGCTCTAGTAGTTGCTTTAATATTGGTTATTTTCTTAGTTTTTGCATATCAAGTGGCTCTTTCTCATCCTATATGGACGGATATTTTTAAAGGTTTAGTACCTACATCTGAAGCTTTCTCAACCTCTCATACAGTAAATGGACAAACACCACTTTCAGGTGCCTTAGGCATTATTGGGGCAACTGTTATGCCACATAATCTTTATCTACATTCTTCAGTTGTTCAAAGTCGAAAACTAGATCATAATAACAAAAAAGATATCGCTAGAGCAATTAGGTTTTCAACTTTTGATTCAAATATTCAATTAACAGTAGCCTTTTTTGTTAATTCACTATTACTCATTATGGGCGTTGCTGTTTTCAAAACAGGAAGTGTTACTGATCCATCATTCTTTGGTCTATTTAAAGCACTATCTAATTCTACTATTATGAGTAATTCTATTTTAGCTCATATAGCAAGTTCAGGTATTTTATCACTTTTATTTGCAATAGCTTTATTAGCATCTGGACAGAATTCAACTATTACTGGAACATTAACAGGTCAAATTATTATGGAAGGATTTATTCATATGAAAGTTCCAATTTGGTTCCGTCGTATCATTACTCGCCTAATTTCTGTTATTCCTGTAATGATTTGTGTCTTAGTAACTAGTGGTAGAAGTACTGTTGAAGAACATATAGCTATTAATAACTTAATGAATAACTCTCAAGTCTTCTTAGCATTTGCATTACCATTCTCAATGTTACCTCTACTAATATTTACTAATAGTAAAGTTGAAATGGATGATGATTTTAAAAATACTTGGATAATTAAGATTCTTGGTTGGCTTTCAGTTATAGGATTAATTTATCTCAATATGAAGGGATTGCCAAATCAAATTGAAGGTTTTTGGGGAGATAACCCAACTCATCAACAAATTATTCTTGCGCATCAAATAGCTCATATCATCATTATTAGTGTAATACTAACTTTAATATGGACTATTGTTGAATTGTATAAAGGAAATAAAAAATACAGTACGATGCAACAAAGTGCAACTTAA

SEQ ID NO: 3650 - protein, 522 aa, Streptococcus agalactiae
MNLQKNDKTNSFIHYANGPSLEEINGTIEVPKDLSFFKTLLAYSGPGALVAVGYMDPGNWSTSITGGQNFQYLLISIILMSSLIAMLLQYMSAKLGIVTQMDLAQAIRARTSKQLGIVLWILTELAIMATDIAEVIGGAIALYLLFHIPLAIAVFITVFDVLLLLLLTKIGFRKIEALVVALILVIFLVFAYQVALSHPIWTDIFKGLVPTSEAFSTSHTVNGQTPLSGALGIIGATVMPHNLYLHSSVVQSRKLDHNNKKDIARAIRFSTFDSNIQLTVAFFVNSLLLIMGVAVFKTGSVTDPSFFGLFKALSNSTIMSNSILAHIASSGILSLLFAIALLASGQNSTITGTLTGQIIMEGFIHMKVPIWFRRIITRLISVIPVMICVLVTSGRSTVEEHIAINNLMNNSQVFLAFALPFSMLPLLIFTNSKVEMDDDFKNTWIIKILGWLSVIGLIYLNMKGLPNQIEGFWGDNPTHQQIILAHQIAHIIIISVILTLIWTIVELYKGNKKYSTMQQSAT

SEQ ID NO: 3651 - protein, 723 aa, Streptococcus agalactiae
ATGTTAGGATTGGAGTTTAGAAAGTCTATAAGAGGTAGAACATTATTTTATATTATATCTACTGTAGCTTTGACCTATGTATTAGGATATATTTTACCAGTAGGGATAGATAAAATAAGACATTTAACTTTGGGAGAATTTTACTTTAGTACCTACACAGTATTTACCCAATTTGGATTTTTAATATTCGGCTTTGTCATTGTATATTTCTTTAATAAAGATTACTCTGACAAATGTATTTTATATCACTATTTTTCAGGGTATCATCTAACTAAATACTTTTATACTAAACTGTTAGTATTATTTTCAGAATTTTTTATTGCTATAATAGTTTGCAATATATTAGCTTCATTGCTTTGGGGATATTCACTATTTTATTTTTTAACAACTACAATCTTATTTTCACTCGTTGTTCTACAGTATCTACTAGTCGTCTCAACTATTAGTATCCTGTTTTCTAATATGCTAGTTTCTATTGGAGTTACTATTTTTTATTGGATTACATCCATTATTTTAGTGGCAATTGGAGGAATTTTTAAAGTATCTGCTATTTTTGATGCTTCAAATTCTCTCTATAAAATAATAGGGAAACTTTTCTCACATCCGATGACTATTGATTTAACCGACTTTTTTATAATTGTTCCTTATATGATATGCCTTAGTGTAATTAGTTTTTTGATAGTGTGCTTATCAAATAGAAGATGGTTATTAAATGGAATGTAA

SEQ ID NO: 3652 - protein, 240 aa, Streptococcus agalactiae
MLGLEFRKSIRGRTLFYIISTVALTYVLGYILPVGIDKIRHLTLGEFYFSTYTVFTQFGFLIFGFVIVYFFNKDYSDKCILYHYFSGYHLTKYFYTKLLVLFSEFFIAIIVCNILASLLWGYSLFYFLTTTILFSLVVLQYLLVVSTISILFSNMLVSIGVTIFYWITSIILVAIGGIFKVSAIFDASNSLYKIIGKLFSHPMTIDLTDFFIIVPYMICLSVISFLIVCLSNRRWLLNGM

SEQ ID NO: 3653 - protein, 618 aa, Streptococcus agalactiae
ATGTTTATTAATAATTACACCTTAAAAATAGGAAATAGAATACTTTTAGAGAATACTAACTTAGACTTTGAAGAAGGGGAAATAAATCATCTTTTAGGTAGGAATGGATCAGGTAAATCTCAACTAGCTAAAGATTTTATCATAAATAGAGGGAATTATTTTTCAAATGATATTTATGAAGACACGCTGATTATTTCGAGTTATTCTAATCTTCCTAGTGATGTTACCATTAACGATTTAGAAAGGACAATTCCGTGGAAGCTTTCTAAAGAAATTTATCAGTTATTGAATATTAATCAAATAAGTAAAACGGTTAAGTTAAAGCAATTAAGTGATGGGCAGAAACAAAAGGTGAAATTATTAGTTTTGTTGTCTTTAGACAAGCATATTATTATACTTGATGAAATTACTAATGCTTTAGATAAAAAGTCTGTTGATGAGATAAACGTATTTTTGCAAAACTATATTCAGTATTATCCCGAAAAAATTATTATTAATATTTCACATGATATCAATAATATCAGGTCTTTAAAGGGAAACTATTTTCTAATTGATAATCAAAAAATTTGTAAAGTAGACACATTAGATGATGCTATTAGTTGGTATTTAGGAGAATAA

SEQ ID NO: 3654 - protein, 205 aa, Streptococcus agalactiae
MFINNYTLKIGNRILLENTNLDFEEGEINHLLGRNGSGKSQLAKDFIINRGNYFSNDIYEDTLIISSYSNLPSDVTINDLERTIPWKLSKEIYQLLNINQISKTVKLKQLSDGQKQKVKLLVLLSLDKHIIILDEITNALDKKSVDEINVFLQNYIQYYPEKIIINISHDINNIRSLKGNYFLIDNQKICKVDTLDDAISWYLGE

SEQ ID NO: 3655 - protein, 855 aa, Streptococcus agalactiae
ATGAGAGATGAGCAAGAAATATATAATTTGGTGTTAAACATAGCAAACCAAGATAAGAGAATCGAAGCTGTACTATTGAATGGATCTCGGGCTAACCCAAATGTACCGAAAGATGATTTTCAAGATTATGATATTGTTTTTGTTACTAATTTTATAGAAGATATTATTTCTGACACTAATTATCATAAAAAATTCGGTGATATTCTTATAATGCAGAAACCAAATGAGTTTAGAAATAAGACGGAATACAATTGCTTTGCTTACTTAATGCAGTTTCAAGATCTGACGAGGATTGATTTAAGACTTATTAAACCAGAATTCTTGGAGGATTATTTAGATGATGCTTTTTCAAAAGTACTTTTAGATAAAAAGAATAAATATCTTGATTATAATTTTGAAAGAAGTTCTCTGTACGAAACAAAGCAATTGTCAGAAGATGAAATCAACAAAATTCTTAATGAAATATATTGGGTTAGTACTTATGTAGTCAAGGGGATAGCAAGAAATGATATTATTTATTCAGAGTTTATGATATCTAATCCTATTAAAAATGCTTTTATTAAACTTCTAAAACAAAAAATATTAATAGAAAAAGAGCTTGATTCATTATCTTTTGGAAAGCTCGACAAGGATATCTTGCAATATATTACAGATAAAGATCAACTATTGAAAATTTTTTCAAATAAATCTTTAAAAGACATTGAGGCTAATTTGCGATTTTTATTGGATGAAACAAATCAAATGGCGAAATATATTTCTATTAATAGGAAACTTAATCTGAACCAAGGAGAATACCAATCAGCAATGAAATTTATGAATATCTTTTTGTCAAATTCATATCAAAATTTCAACTAA

SEQ ID NO: 3656 - protein, 284 aa, Streptococcus agalactiae
MRDEQEIYNLVLNIANQDKRIEAVLLNGSRANPNVPKDDFQDYDIVFVTNFIEDIISDTNYHKKFGDILIMQKPNEFRNKTEYNCFAYLMQFQDLTRIDLRLIKPEFLEDYLDDAFSKVLLDKKNKYLDYNFERSSLYETKQLSEDEINKILNEIYWVSTYVVKGIARNDIIYSEFMISNPIKNAFIKLLKQKILIEKELDSLSFGKLDKDILQYITDKDQLLKIFSNKSLKDIEANLRFLLDETNQMAKYISINRKLNLNQGEYQSAMKFMNIFLSNSYQNFN

SEQ ID NO: 3657 - protein, 609 aa, Streptococcus agalactiae
ATGATAAAGTTTAAATTATTTTTTAAATCCACAGAAAAAGAGGAAGAATGGATCGATAAGGTTCAAAAAAGTGGCTATGCTTTTACAGGCATTAACTCATTTCTTCCAGCCTTCTATTATTTTAAGAGAGATAAAGAAAAAGACAAGATGTCAATAAAAATGGATTTTAAAAAATACATGTCGAAAGATGACTATGCTAACTATATCACTTTATTTGAGGACAGTGGATGGAAGCATATTAGCGGTAGTCGTTGGGGAGGGCTGCATTATTTTCAAAAAATAAAGCCTGAAACCAGTTCAGAGATTTTTTCTGATCAAGAATCAAAATCAGCGATGGCTATGAGTTATTATAAATATACTTGTGAGCATGCGTTTTTCTCTTTATTTTATTTCTTTCTCTTGATAAGAACAACTTCTATCACCATATTTGATCCAAAAAGTTGGTATCTGACGCAAGGTCTATGGGAAATGCAAGGGAAAATATTTTGGTTAGCATTCTTATTTGAAACACCATTTGCCTTATTAAGAATATTACCTATGTTTTACTTTTTAATTTCTGGAATATACTATATTACACGAGCTGTAAAACCCAAGGAAATTATAAATTAA

SEQ ID NO: 3658 - protein, 202 aa, Streptococcus agalactiae
MIKFKLFFKSTEKEEEWIDKVQKSGYAFTGINSFLPAFYYFKRDKEKDKMSIKMDFKKYMSKDDYANYITLFEDSGWKHISGSRWGGLHYFQKIKPETSSEIFSDQESKSAMAMSYYKYTCEHAFFSLFYFFLLIRTTSITIFDPKSWYLTQGLWEMQGKIFWLAFLFETPFALLRILPMFYFLISGIYYITRAVKPKEIIN

SEQ ID NO: 3659 - protein, 336 aa, Streptococcus agalactiae
ATGAAAAGGAATAAACATTTACCGTTAACAGAAACTACCTATTATATCTTATTAGCTTTGTTTGAGGAAGCACATGGCTATGCTATTATGCAAAAAGTTGAAGAAATGAGTGGCGGTGATGTTAGAATAGCCGCAGGGACAATGTACGGTGCCATTGAAAATTTACTTAAACAAAAATGGATAAAGTCTATCCCAAGTGACGATAGAAGAAGAAAAGTTTATATTATTACTGAGACAGGAAAAGAAATAGTAGAACTTGAAACGAATCGATTAAGAAAGTTACTTAATACTGCTAATCAGTTGGGTTTTGGGGGAGATAGTTATGATAAAGTTTAA

SEQ ID NO: 3660 - protein, 111 aa, Streptococcus agalactiae
MKRNKHLPLTETTYYILLALFEEAHGYAIMQKVEEMSGGDVRIAAGTMYGAIENLLKQKWIKSIPSDDRRRKVYIITETGKEIVELETNRLRKLLNTANQLGFGGDSYDKV

SEQ ID NO: 3661 - protein, 552 aa, Streptococcus agalactiae
ATGATATCCTATGCATACCTCATTGCAGAAATATACTTTAAAGTCAAAATAAGGAAATATATTATGGAAATTAAAGAATACGAGAATAATCCGTACCATTTAGCACAGCTAGTAGATTTAATTAATTATTGTCAGAATATAGAAGCTAAACTTGATATAAAGATGGCTGAACAAGACGATATTTTTCAAATAGAAAATTATTATCAAAACAGAAAAGGTCAATTTTGGATTGCCTTAGAAAATGAAAAAGTAGTTGGTTCGATTGCGTTACTGCGTATTGATGATAAAACAGCTGTTCTAAAAAAATTTTTTACATATCCAAAATATAGAGGAAATCCTGTTCGACTTGGTCGAAAATTATTTGAAAGATTTATGCTTTTTGCTCGAGCTAGTAAATTCACAAGAATTGTCTTGGATACTCCAGAAAAAGAGAAAAGATCTCACTTCTTTTATGAAAATCAAGGATTTAAGCAAATAACAAGAGATGAACTAGATGTAGACTACATTTTTCCAGATAGAGATTCAAGGATATATGTAAAACTTCTTGATTAA

SEQ ID NO: 3662 - protein, 183 aa, Streptococcus agalactiae
MISYAYLIAEIYFKVKIRKYIMEIKEYENNPYHLAQLVDLINYCQNIEAKLDIKMAEQDDIFQIENYYQNRKGQFWIALENEKVVGSIALLRIDDKTAVLKKFFTYPKYRGNPVRLGRKLFERFMLFARASKFTRIVLDTPEKEKRSHFFYENQGFKQITRDELDVDYIFPDRDSRIYVKLLD

SEQ ID NO: 3663 - protein, 744 aa, Streptococcus agalactiae
ATGTTAAAAAAAGAATGGATGGAGAATGTTAGGACATACAAAGTTATATCTATTCTGATTACTTGTTCAATATTTGGTATATTAGGTCCCTTAACTGCACTTATGATGCCTGATATTATGGCAGGAATTTTACCTAAAAAACTACAGGGAGCGATACCAGAGCCTACCTATATTGATTCTTATATTCAGTATTTTAAAAATATGAATCAGCTTGGTTTAGTTATTTTAGTATTTTTATTTAGTAGTACACTGACGCAAGAATTTTCAAAAGGAACCTTAATTAATCTAGTTACGAAGGGATTAGCCAAAAAAGTTATAATCCTTGCTAAATTTATAGTAATTACCCTTCTATGGACAGTGTCATACTTATTAAGTGTTGTCATCCATTTTAGTTATACGTTATATTACTTTAGTAACGAAGGAAGTCATAAATTAATGGTTTACGGTGCAACATGGTTTATCGGTATTCTTTTCATAAGCTTAATACTCTTTTTTTCAGTTCTTTTTCGTAAAACTTTAGGGGGTTTGTTAGGTTGTCTTTTTATGGTGGTGTTATGTGTAGTATCTGGATTTTTTAAAATCAGTAAAAGCTATAATCCTATGCTTCTTATCCAAAAACAAGGAGAAATATTAAGTGGAAAGTTTAAAGTTCAAGACTTAATGGAACCGAGCATATTAGTGTTTTTGCTTATTATAATGACGTTATTACTTAGCATGTACATTTTTGAAAAAAGTGAAGTTTAA

SEQ ID NO: 3664 - protein, 247 aa, Streptococcus agalactiae
MLKKEWMENVRTYKVISILITCSIFGILGPLTALMMPDIMAGILPKKLQGAIPEPTYIDSYIQYFKNMNQLGLVILVFLFSSTLTQEFSKGTLINLVTKGLAKKVIILAKFIVITLLWTVSYLLSVVIHFSYTLYYFSNEGSHKLMVYGATWFIGILFISLILFFSVLFRKTLGGLLGCLFMVVLCVVSGFFKISKSYNPMLLIQKQGEILSGKFKVQDLMEPSILVFLLIIMTLLLSMYIFEKSEV

SEQ ID NO: 3665 - protein, 816 aa, Streptococcus agalactiae
ATGATTTATGGATTCGTAGGACCAAATGGAGCAGGTAAAACAACGACAATAAAAATGATTTTAGGATTGTTAAAATTTGATACGGGTTTCATAACAATTTTTGGTAAAAAAGTTAATTTTGGAAGAACAGATACCAATCAACTGATTGGCTATCTCCCAGATGTTCCCGAGTACTACGATTATATGACAGCTCTAGAATATCTTGATTTATGTTCTGGTTTAGCGAGATCAAAGCATAAGCTTTCTAACAAAGAACTACTTAGGTCAGTTGGACTTGACGATAATCACCAAAAGATTGCTACTTATTCTCGAGGAATGAAACAGCGTCTTGGATTAGCCCAAGCACTGGTTCATGATCCTAAAATTATTATTTGCGATGAACCAACCTCTGCATTAGACCCGAAAGGTCGCCAAGATATTTTAGATATTATTTCAAATCTTAGAGGAGAAAAAACTGTGATTTTTTCTACCCATATTCTCTCTGATGTCGAAAAAATATGTGATCATGTTCTGGTGTTAACTAAGTGTGGGATTTATTCTCTTGAAGAGTTAAAAGGAAAAAAATCAGAGGAAAATTATTCGGTTCGTATTTTAATAAAAGTGACAAAGTCTGAAGCTAAGGTACTATCTCATAACTATCAGATAGAAAAGAAAGATAATGAGTATGCACTGACTCTCAAAGGCTCTAAAATGGATAACAAAGCAGATTTACTAGCTGGTTTTTACCAAGATTTAGTTTCTTTAAAGATTAGCCCATCAGCTATTGAAGTCATTGACAATAGTTTAGAGGAGCTTTATTTGGAGGTTACCAAATGA

SEQ ID NO: 3666 - protein, 271 aa, Streptococcus agalactiae
MIYGFVGPNGAGKTTTIKMILGLLKFDTGFITIFGKKVNFGRTDTNQLIGYLPDVPEYYDYMTALEYLDLCSGLARSKHKLSNKELLRSVGLDDNHQKIATYSRGMKQRLGLAQALVHDPKIIICDEPTSALDPKGRQDILDIISNLRGEKTVIFSTHILSDVEKICDHVLVLTKCGIYSLEELKGKKSEENYSVRILIKVTKSEAKVLSHNYQIEKKDNEYALTLKGSKMDNKADLLAGFYQDLVSLKISPSAIEVIDNSLEELYLEVTK

SEQ ID NO: 3667 - protein, 1077 aa, Streptococcus agalactiae
ATGCTTGGAGAGAATATCTATTTACAACGTACTCAGATTGGTATGACGCAAGAGAATTTGAGTGATTATCTGCATTTAACAAAAACTACAATTTCAAAGTGGGAAAATAATCAAGCTAAACCGGATATTGACTATCTTATTTTGATGGCTAATCTTTTTGATATTAGCTTGGATGACTTAGTCGGTTATCAAAAAACATTGTCAGATGATCAAAGAAATCAGCTCATTAAGGATCTAAAAATAAAAGCAAATGTATTGTCTGAGAGAGATTTCTTTCAGGAAGTTAAGGAATTATCAAAACAGTTCCCTAACGATTTTAAGACTCTGTTGATAATGATTAATATGGTCTTGAGCAACCTAACCAACCTTAATGATTCAGAAATGAAAGAGTGGTCACTAAGTACACTAAATAAAATTATTAGTAAAACAGTAGTTGAGTCTGACCTCCAGACGGCGATAATGTTCAAAACGGTCGTTCTTTTTCACAACCTTGAATATGATGAAGTGATAAACCTTTACCAGAATAGTCCCTATAAATTAGGTGAAGAATTACTTTTAGCTAATAGCTTTTTTGCAAAAGTCGATGTTTACCGAGCTAAGCAAGTATTACAGGTTGAAATTTATCAGCAGATTCTACTTGTATGCGAGTATCTATTGAGTTTATCAACTTTTGAAGTTGAAGAAAACAAAGGCGATATTTTTGAAAGGCTTGAACATATGATAGAAGCGTTTCAATTAAACTCTTTGCATCCCAACACAGTCATCAAGTGTTATTATAGTTTAGCTTGTCATTATAGTAAAAGTGATGATGATAAGGCATTAGGATACTTAAAACAATGTTTTAAATCTTTAAAACAATTGCTCCAAAGATTTGAATTACACGGTGATACTTTCTTTTATACCATCGATGATTGGTTAGAGACAATACCTACTGGTATTGCACCACCGACGAGTCAATTACAGGTAATAGAACGAGTTGAGGACTTATTTCAAAATTCACAATTTAAAGAACTATCAGGGCATAAAGAATTTCAACAAATGATTCAAAAACTTAACGATTTAAAAAAGGATTACTAA

SEQ ID NO: 3668 - protein, 358 aa, Streptococcus agalactiae
MLGENIYLQRTQIGMTQENLSDYLHLTKTTISKWENNQAKPDIDYLILMANLFDISLDDLVGYQKTLSDDQRNQLIKDLKIKANVLSERDFFQEVKELSKQFPNDFKTLLIMINMVLSNLTNLNDSEMKEWSLSTLNKIISKTVVESDLQTAIMFKTVVLFHNLEYDEVINLYQNSPYKLGEELLLANSFFAKVDVYRAKQVLQVEIYQQILLVCEYLLSLSTFEVEENKGDIFERLEHMIEAFQLNSLHPNTVIKCYYSLACHYSKSDDDKALGYLKQCFKSLKQLLQRFELHGDTFFYTIDDWLETIPTGIAPPTSQLQVIERVEDLFQNSQFKELSGHKEFQQMIQKLNDLKKDY

SEQ ID NO: 3669 - protein, 615 aa, Streptococcus agalactiae
GTGAACAAGAAATCCTTTTTCCAGTGTGTTATACTACTTGTTTCTTTTTTAGTGTTAACATTAGCAGTTAAATCTCAAAGTGATATGATAAGTTATTTGGATAATATCACTTCAGCTTTTTTTCAAAGCATACGAAATCCCGATTTAACTAACTTAATGACGATAATATCAACAGTTGTCAGCCCTTTGACAACGTCATTAATAGCACTTGTTATCCTTGGGTATCAATATTTTTTAAACCAAAGAATAGCTGTGTGGCTATTTATGTTATTTTTTGGTACCAATGCTTTGGCATTGCTTTTAAAAGATATCATCGCACGTCATAGACCTATGAATCAACTTGTTTTTGATTCGGGTTATAGTTTTCCCAGTGGACATACGATATCAACGTTTTTATTAATGATTCTTGTTTTAGTGGTTGCGAGACAGAGATTGAGAAGAGTATTGTCACAAGTAGTTTTCGTAATATTTGCATTAGTGATCCTTGCATCAGTTATTTTTTCAAGACTCTATTTAGAAAATCATTTTTTAACGGATATTTTAGGGTCGTTGTTACTAGGAGCATCGTCATATTATGGTTTGTCTGCTATTGTATCTTTGAAAGAGTTACAATAA

SEQ ID NO: 3670 - protein, 204 aa, Streptococcus agalactiae
MNKKSFFQCVILLVSFLVLTLAVKSQSDMISYLDNITSAFFQSIRNPDLTNLMTIISTVVSPLTTSLIALVILGYQYFLNQRIAVWLFMLFFGTNALALLLKDIIARHRPMNQLVFDSGYSFPSGHTISTFLLMILVLVVARQRLRRVLSQVVFVIFALVILASVIFSRLYLENHFLTDILGSLLLGASSYYGLSAIVSLKELQ

SEQ ID NO: 3671 - protein, 297 aa, Streptococcus agalactiae
ATGGATATTACAGATTATCAAAAATGGGTGAGTGAATTCTATAAAAAAAGAAACTGGTATCAATACAATTCTTTTATTAGAAGTAACTTTCTTTCAGAAGAAGTCGGCGAATTGGCTCAAGCCATTCGCAAATATGAAATTGGACGTGACAGACCTGACGAAACCGAACAAACTGATTTGGAAAACTTAAATGATATAAAAGAAGAACTAGGAGATGTCTTAGATAATATCTTCATACTTGCTGATCAGTATAATATCTCACTAGAAGAGATTATCAGCGCACATCGCACTAATTAG

SEQ ID NO: 3672 - protein, 98 aa, Streptococcus agalactiae
MDITDYQKWVSEFYKKRNWYQYNSFIRSNFLSEEVGELAQAIRKYEIGRDRPDETEQTDLENLNDIKEELGDVLDNIFILADQYNISLEEIISAHRTN

SEQ ID NO: 3673 - protein, 561 aa, Streptococcus agalactiae
ATGAGAATAACTATTTTTTGTGGAGCAAGTACTGGGGAAAATCCTGTTTATAGTGAAAAAACAGTTGCCTTAGCACAATGGATGGCACAAAACAAACATTCTCTGGTGTATGGTGGAGGAAAAGTTGGCTTAATGGGAGTCATGGCTGATACTGTGATTGCAAATGGTGGCTACACTACTGGTGTTATTCCGACATTTTTAAGAGATCGTGAAATTGCACATGAAAATTTATCAGAGCTTATCATAGTAAATAATATGCCTGAACGTAAGGCAAAAATGATGCTACTTGGAGATGCCTTTATCGCTCTACCTGGTGGACCTGGTACCCTTGAAGAAATTTCCGAAGTTATCTCTTGGTCTCGCATCGGTCAAAATGATAATCCTTGCATTTTATATAATGTTAATGGCTACTTTAATGATTTAAAAAATATGTTTGATCATATGGTTGGTGAGGGTTTTCTTAGTCTGGAAGATAGAGAAAATGTCCTATTCTCAGATGATATTACTGAAATCGAAGATTTTATAACGAATTATAAAGTCCCTAGCACGCGCCAATACTAG

SEQ ID NO: 3674 - protein, 186 aa, Streptococcus agalactiae
MRITIFCGASTGENPVYSEKTVALAQWMAQNKHSLVYGGGKVGLMGVMADTVIANGGYTTGVIPTFLRDREIAHENLSELIIVNNMPERKAKMMLLGDAFIALPGGPGTLEEISEVISWSRIGQNDNPCILYNVNGYFNDLKNMFDHMVGEGFLSLEDRENVLFSDDITEIEDFITNYKVPSTRQY

SEQ ID NO: 3675 - protein, 771 aa, Streptococcus agalactiae
TTGAATCAAGAAAAAAAGAGACTTAACCTAATCGGGCTGATACTTTTAGCTCAGGCTATTGTTTTAAGTTTGGCGACTACACTATTTGCTGAAATCTTACAAAATGATGTCTGGATAGGTATAGCAAGTACTTTAATCGCCTTACTCATTCCTTGTTTTTTTATGGGTTTTAAAAATTTAAAAAAACATCTAACGGCAACCCATCATACAATCACTTTCACCACTATTTTATTCTTGTTAAGCATTATATATACTACTAATAATATAGTCTCCACAATATGGGATGTTGTGCTAAATCATCTCAATATTATGGAATCGGAAAGTCAAAATTATGATGCCACATTCAATATACTTATGATTAGTTATTCTGTTGTTGTAGGTCCTTTTTTTGAAGAAGTTTTATACCGAGGAATAGTATTGAATTTATTATCCAAGTATGGTAAATGGTTTGCCATTATCACTTCTGGCATCCTATTTGGTTTAATGCACCAAGACATTTCTCAGCTATTGACTACATCTATTGCGGGTATCATAATGGGTTTTATCGCTTACCATTATTCCTTTAAGGTAGCCCTACTCCTTCATATCTGCAATAACTTTATCGTAGAAATTTTCACCCAGCTATCAACAGTAAACGAGTTATACGGGACTTATTTTGAAAATATATTGCTAATTTTAGCAATCTTATTTATATTATATTACCTTTTTACTCATAGGAATACTGCTCGCCGTCGTATAAGTCTGCACTCTANNNNNCATTCCATTCATTAA

SEQ ID NO: 3676 - protein, 256 aa, Streptococcus agalactiae
  VARIANT 251, 252: Xaa = Any Amino Acid
MNQEKKRLNLIGLILLAQAIVLSLATTLFAEILQNDVWIGIASTLIALLIPCFFMGFKNLKKHLTATHHTITFTTILFLLSIIYTTNNIVSTIWDVVLNHLNIMESESQNYDATFNILMISYSVVVGPFFEEVLYRGIVLNLLSKYGKWFAIITSGILFGLMHQDISQLLTTSIAGIIMGFIAYHYSFKVALLLHICNNFIVEIFTQLSTVNELYGTYFENILLILAILFILYYLFTHRNTARRRISLHSXXHSIH

SEQ ID NO: 3677 - protein, 678 aa, Streptococcus agalactiae
ATGAATGAATGNNNNNATCATACAATCACTTTCACCACTATTTTATTCTTGTTAAGCATTATATATACTACTAATAATATAGTCTCCACAATATGGGATGTTGTGCTAAATCATCTCAATATTATGGAATCGGAAAGTCAAAATTATGATGCCACATTCAATATACTTATGATTAGTTATTCTGTTGTTGTAGGTCCTTTTTTTGAAGAAGTTTTATACCGAGGAATAGTATTGAATTTATTATCCAAGTATGGTAAATGGTTTGCCATTATCACTTCTGGCATCCTATTTGGTTTAATGCACCAAGACATTTCTCAGCTATTGACTACATCTATTGCGGGTATCATAATGGGTTTTATCGCTTACCATTATTCCTTTAAGGTAGCCCTACTCCTTCATATCTGCAATAACTTTATCGTAGAAATTTTCACCCAGCTATCAACAGTAAACGAGTTATACGGGACTTATTTTGAAAATATATTGCTAATTTTAGCAATCTTATTTATATTATATTACCTTTTTACTCATAGGAATACTGCTCGCCGTCGTATAAGTCTGCACTCTAACGTTCGAGAGGCTGACTCAATAAACTCTAAACAACATACAAAATTATTACTTACTAGTTGGCCTTTTATTCTCCTTGTCATTTACGACATTGTCCTAACAACTATTAATTAA

SEQ ID NO: 3678 - protein, 225 aa, Streptococcus agalactiae
  VARIANT 4, 5, 6: Xaa = Any Amino Acid
MNEXXXHTITFTTILFLLSIIYTTNNIVSTIWDVVLNHLNIMESESQNYDATFNILMISYSVVVGPFFEEVLYRGIVLNLLSKYGKWFAIITSGILFGLMHQDISQLLTTSIAGIIMGFIAYHYSFKVALLLHICNNFIVEIFTQLSTVNELYGTYFENILLILAILFILYYLFTHRNTARRRISLHSNVREADSINSKQHTKLLLTSWPFILLVIYDIVLTTIN

SEQ ID NO: 3679 - protein, 93 aa, Streptococcus agalactiae
ATGTCAATTTTTTTATTATCAAATATGGTAGACTACACAGGACATATTTACACTTCTAGATTTCCNNNNNCATTCCATTCATTAATTAATTAA

SEQ ID NO: 3680 - protein, 30 aa, Streptococcus agalactiae
  VARIANT 23, 24: Xaa = Any Amino Acid
MSIFLLSNMVDYTGHIYTSRFPXXFHSLIN

SEQ ID NO: 3681 - protein, 621 aa, Streptococcus agalactiae
ATGGCTCAAAAGCTTGATCAAGATAGCATTCAGTTGAGAAATATCAAAGATAATGTTCAGGGAACAGATTATGAAAAAACGGTTAATGAGGCTATTACTAGTGTTGAAAAATTAAAGACTTCATTGCGTGCCAACCCTGAGACAGTTTATGATTTGAATTCTATTGGTAGTCGTGTAGAAGCCTTAACAGATGTGATTGAAGCAATCACTTTTTCAACTCAACATTTAGCAAATAAGGTTAGTCAAGCAAATATTGATATGGGATTTGGGATAACTAAGCTGGTTATTCGCATTTTAGATCCATTTGCTTCAGTTGATTCAATTAAAGCTCAAGTTAACGATGTAAAGGCATTAGAACAAAAGGTTTTAACTTATCCTGATTTAAAACCAACTGATAGAGCTACCATCTATACAAAATCAAAACTTGATAAGGAAATCTGGAATACACGCTTTACTAGAGATAAAAAAGTACTTAACGTCAAAGAATTTAAAGTTTACAATACTTTAAATAAAGCAATCACACATGCTGTTGGAGTTCAGTTGAATCCAAATGTTACGGTACAACAAGTTGATCAAGAGATTGTAACATTACAAGCAGCACTTCAAACAGCATTAAAATAA

SEQ ID NO: 3682 - protein, 206 aa, Streptococcus agalactiae
MAQKLDQDSIQLRNIKDNVQGTDYEKTVNEAITSVEKLKTSLRANPETVYDLNSIGSRVEALTDVIEAITFSTQHLANKVSQANIDMGFGITKLVIRILDPFASVDSIKAQVNDVKALEQKVLTYPDLKPTDRATIYTKSKLDKEIWNTRFTRDKKVLNVKEFKVYNTLNKAITHAVGVQLNPNVTVQQVDQEIVTLQAALQTALK

SEQ ID NO: 3683 - protein, 129 aa, Streptococcus agalactiae
ATGCAACAGGGAGTTCTTTTAGGTATTGATCAAGATCGCGTTGGTGTTTTAGAATCTTTATTTTTTGAGGGTAGTCCTCAACAACTTGTTTATAGTTTGATTTTTGTTTGTCAGAGCGACCGTCTTTAA

SEQ ID NO: 3684 - protein, 42 aa, Streptococcus agalactiae
MQQGVLLGIDQDRVGVLESLFFEGSPQQLVYSLIFVCQSDRL

SEQ ID NO: 3685 - protein, 540 aa, Streptococcus agalactiae
ATGAAAATAGCAATAATCGGATATAGTGGGTCGGGTAAGTCCACTTTAGCAAGAAAATTGGGAAATTACTATAATTGCAATGTATTACATCTTGATAGTATTCACTTCGCCCCAAATTGGGAAGAGAGAAAATATGATGACATGATTGACGATGTCAGCAACATGTTAGAAAAAAGAACATGGATTATAGAAGGTAACTACAAAAAACTGCTATATCAAGAACGTCTAGCAGATGCAGATGAGATTATTTTTTTTGACTTTAATCGCTTCAACTGCTTGTGGAGAGCATTCAAACGTTACTGTAAGTTTCGTGGTAAGACTAGACCTGATATGGCCAATGGATGCCCGGAAAAATTAGATTTTGAATTTATCAGTTGGATTCTTAAAGACGGTCGCTCTGACAAACAAAAATCAAACTATAAACAAGTTGTTGAGGACTACCCTCAAAAAATAAAGATTCTAAAACACCAACGCGATCTTGATCAATACCTAAAAGAACTCCCTGTTGCATCCAATACAGACCCTCTCAAGAGCTTGTAA

SEQ ID NO: 3686 - protein, 179 aa, Streptococcus agalactiae
MKIAIIGYSGSGKSTLARKLGNYYNCNVLHLDSIHFAPNWEERKYDDMIDDVSNMLEKRTWIIEGNYKKLLYQERLADADEIIFFDFNRFNCLWRAFKRYCKFRGKTRPDMANGCPEKLDFEFISWILKDGRSDKQKSNYKQVVEDYPQKIKILKHQRDLDQYLKELPVASNTDPLKSL

SEQ ID NO: 3687 - protein, 1086 aa, Streptococcus agalactiae
ATGACAACAAATGTAATGGCAAATTATAGCTACGGAGAAGATTGCTTCAAAGAAATTCCTAGCGTTTTGGCAACTTACCGTATTCAAAGCATTGCTTTCGTCGGTGGCAAACGTGCCCTAGACAGCTCAGAAGCCGAGGTTCGCTCTATTTTAGAGGAAGCAAATATTAAAGTCACAGGAAGCTTTGTCTATGGAACGGATTCAACACAATCTAACATTGACAAGTTAGTAGCCAACCCACAAGTTCAAGCCGCTGATGCTATCTTAGGTTTTGGCGGTGGAAAAGCTTTAGACACAGCTAAAATGGTAGCAAAAGAGTTAGGTAAAAATAGCTTTACTATCCCAACTATTTGTTCTAATTGCTCCGCAGGTACTGCCATTGCAGTTGTATATAATGATGACCATTCTTTCTTAAGATACGGCTATCCCGAGTCTCCACTTCATATTTTTATCAATACACGGATTATTGCACAGGCACCAAGCAAATATTTTTGGGCTGGTATTGGGGACGGTATTTCAAAAGCCCCTGAAGTAGAACGTGCTACCTTAGAGGCTAAGACCAATAAACTACCACATACTGCAGTGTTAGGACAAGCAGTCGCTCTGTCTTCAAAGGAAGCTTTTTATCAATTTGGTGAACAAGGTCTAAAAGATGTTGAAGCTAATTTAGCTTCGCGTGCAGTTGAAGAAATTGCGCTTGATATCTTAATCTCAACTGGCTATGCTTCTAATTTAGTTAATCAACCTGATTTCTACTACAATTCTTGTCACGCGCATGCATTTTACTATGGTACAACCGCTATTCAAAGACAAGGTGAATTCTTACATGGCGTTGTAGTTGCGTTTGGTGTGTTAGTTTTACATGCTTATTTCAACGAACTAGAAGAACTTGAAAAAGTAGCTCGTTTTAATAAGTCACTAGGTTTGCCAACAACTCTAGCTGACGTCTCTTTATCAGAAAAAGATATTCCAAAAATTGTTGAAATTGCAATGACTACTAATGAATACAAAAATACCCCTTTCGATCCCAAAATGTTTGCTCAAGCTATTTTAGCAGCAGACGCTTTCGGACAGACACTAGCCTAA

SEQ ID NO: 3688 - protein, 361 aa, Streptococcus agalactiae
MTTNVMANYSYGEDCFKEIPSVLATYRIQSIAFVGGKRALDSSEAEVRSILEEANIKVTGSFVYGTDSTQSNIDKLVANPQVQAADAILGFGGGKALDTAKMVAKELGKNSFTIPTICSNCSAGTAIAVVYNDDHSFLRYGYPESPLHIFINTRIIAQAPSKYFWAGIGDGISKAPEVERATLEAKTNKLPHTAVLGQAVALSSKEAFYQFGEQGLKDVEANLASRAVEEIALDILISTGYASNLVNQPDFYYNSCHAHAFYYGTTAIQRQGEFLHGVVVAFGVLVLHAYFNELEELEKVARFNKSLGLPTTLADVSLSEKDIPKIVEIAMTTNEYKNTPFDPKMFAQAILAADAFGQTLA

SEQ ID NO: 3689 - protein, 708 aa, Streptococcus agalactiae
ATGGTATGTGTCGATTTTATTGATCAAAAAGTTTATAGTGAAGCAGAAGGCCTATTTGTTTCCGATTTAGACTTAGGCATTAAAGGTTTAATAAGAGCACGTTATCCTTTTGCTCTGGATAGTGACTTTATTTCGTATGGAAATTTAAGTCATTATTGTATGAATTATCTTGACGAAATTGTTCAGCGAGCGAATCAGAAAAATGAGAAGATAAAATATAATGTGACTACCTTGATGAAAGAAGAAGAGAAGCCCTTCAACGTTGAAGAGCGTTTGAACAAGCAAGCAACTATCGGTCAACGAATTGCTGATGATGTTGCACGTTTTGGCGGATCTTGGACTTTTATTATCGTTTTTGTATCCATTATGGCTATTTGGATGTTGGTTAATATCATGAAGCCTTTTGGTATTCAATTTGATCCTTACCCATTTATCCTGTTAAACTTAGCTTTATCAACGATTGCTGCAATCCAAGCACCACTTATTATGATGAGTCAAAATCGTGCTGCTGATTATGATCGTTTGCAAGCTCGAAATGACTTTAATGTCAATAAAACCTCTGAGTTAGAAATTAGATTATTGCACGAAAAGATTGATCATATGGTACAACAAGATCAGTTTGAATTGTTAGAGATTCAAAAGTTACAGACAGAAATGCTAGTATCATTGGGAAATCAGTTAGCACAATTGAAACAACTACAAAAATAA

SEQ ID NO: 3690 - protein, 235 aa, Streptococcus agalactiae
MVCVDFIDQKVYSEAEGLFVSDLDLGIKGLIRARYPFALDSDFISYGNLSHYCMNYLDEIVQRANQKNEKIKYNVTTLMKEEEKPFNVEERLNKQATIGQRIADDVARFGGSWTFIIVFVSIMAIWMLVNIMKPFGIQFDPYPFILLNLALSTIAAIQAPLIMMSQNRAADYDRLQARNDFNVNKTSELEIRLLHEKIDHMVQQDQFELLEIQKLQTEMLVSLGNQLAQLKQLQK

SEQ ID NO: 3691 - protein, 540 aa, Streptococcus agalactiae
GTGACTTCCTTTAAACTCCTTTCTCTGATTAAACAACTTAAYCAAGGTTTATCTTATAGTGGTGCTAGCTTGAGACGTCCAACAGATTTTACAGTTGCTGCTGCCTTTAATCCTAATGTGAAAAACCTTACTCGAACCGTAAAATTGATTGAGAAAAAAGTAGCTTCTGGTGCTGATTATTTTATGACACAACCAATATTTGATCACTCTGTGTTAAAGGAATTAGCTGATCTTACTAAAACAGTTGAACAACCCTTTTTTATCGGAATTATGCCAATAACAAGTTATAATAACGCTGTTTTTCTACACAATGAAGTTCCTGGTATTAAACTTTCTGAGTCATTTTTATCTGCTCTTGAAAAGGTAAAGGACGACAAAGAAGCTTGTTTAACTTTGGCCTTAAACGAGAGTAAGTCCTTGATTGATGAAGCCTTGAACTATTTTAATGGTATCTATTTGATTACTCCCTTTTTACGCTATGATCTGACTCTTGAGTTAATTGACTATATACAAAAAAAGCAAGTAAGAAAGTCCTCTTAA

SEQ ID NO: 3692 - protein, 179 aa, Streptococcus agalactiae
MTSFKLLSLIKQLNQGLSYSGASLRRPTDFTVAAAFNPNVKNLTRTVKLIEKKVASGADYFMTQPIFDHSVLKELADLTKTVEQPFFIGIMPITSYNNAVFLHNEVPGIKLSESFLSALEKVKDDKEACLTLALNESKSLIDEALNYFNGIYLITPFLRYDLTLELIDYIQKKQVRKSS

SEQ ID NO: 3693 - protein, 1046 aa, Streptococcus agalactiae
ATGTCCAAGTTTTTAGAGAAATTAAAAACAGATATTCTAGTAGCTGACGGTGCAATGGGAACTCTCCTTTATACTTATGGGCTAGATACTTGTCATGAATCCTACAATGTAACACATCCAGAAAAGGTTCTAGCCATTCATCAAGCTTATATTGAAGCGGGTGCAGATGTTATTCAGACGAATACCTATGGGGCTCAACGTCATCGATTAAAGAACTACGGTTTGGAAGATCAGGTTGTCTCTATCAATCAAGCAGCAGTTAATATAGCTCATCAAGCGACTTTGGGTAAAGAAACATTTATTTTAGGTACTGTTGGAGGTTTTCGTTCTCAAAGACAATGCGATTTAACATTGGATAATATTGTAGAAGAAACTTTGGAACAAGTTGAGGCTTTATTGGCGACAGGACAGCTAGACGGATTATTGTTTGAAACTTATTATGATATTGAGGAGATAACGACAGTTTTAAAAATTGTGAGGGAGATGACTGATCTACCAATTATTACTAATATTTCTCTTCATGAAGCAGGGGTAACATCAAATGGAAAGCCTATTGTAGAGGCGCTCAGCCAATTAGTTATGCTAGGTGCAGATGTGATTGGCTTAAATTGTCACCTTGGACCCTATCATATGATCCAATCATTGAAGCAAGTTCCTTTATTTGCCCAGTCTTATTTGTCAGTTTATCCTAATGCAAGTCAGTTATCTTTAGATGGTGAGAATAGTCAATACCAGTTTAGTCAGAATTCAGAGTATTTTGGAAAATCTGCAGAACTTCTCGTAGCAGAAGGAGTTAGGCTTATTGGTGGTTGTTGTGGGACAACTCCAGATCATATTAGAGCTGTGAAACGATCTATTAGAGGATTGAAACCTATTGAACGAAAGGTTGTTACTCCTATAATACCTGTAAAAGATTTTGTTAGGCGTATCAGACGAACAGATACTCTAGTGGATAAGGTAAAAAAAGAAGTAACAATTATCGCAGAATTAGATCCTCCAAAGCATTTAGATATCGTTCAGTTTCAAAAGGCTATACGAGCGATTGA

SEQ ID NO: 3694 - protein, 348 aa, Streptococcus agalactiae
MSKFLEKLKTDILVADGAMGTLLYTYGLDTCHESYNVTHPEKVLAIHQAYIEAGADVIQTNTYGAQRHRLKNYGLEDQVVSINQAAVNIAHQATLGKETFILGTVGGFRSQRQCDLTLDNIVEETLEQVEALLATGQLDGLLFETYYDIEEITTVLKIVREMTDLPIITNISLHEAGVTSNGKPIVEALSQLVMLGADVIGLNCHLGPYHMIQSLKQVPLFAQSYLSVYPNASQLSLDGENSQYQFSQNSEYFGKSAELLVAEGVRLIGGCCGTTPDHIRAVKRSIRGLKPIERKVVTPIIPVKDFVRRIRRTDTLVDKVKKEVTIIAELDPPKAFRYRSVSKGYTSD

SEQ ID NO: 3695 - protein, 2238 aa, Streptococcus agalactiae
ATGGTAAAAGTTTCAAATTTAGGGTATCCACGTCTTGGTGAACAGCGCGAATGGAAGCAAGCGATCGAAGCTTTCTGGGCAGGGAATCTTGAACAAAAAGATTTAGAAAAACAACTAAAACAATTACGTATCAATCATTTAAAGAAACAAAAAGAGGCAGGTATTGACCTTATTCCAGTGGGGGATTTTTCTTGTTATGATCATGTTTTGGATTTGTCATTTCAATTCAATGTAATCCCAAAGCGTTTCGATGAGTATGAGAGGAATTTAGACCTTTATTTTGCTATTGCAAGAGGTGATAAAGATAATGTCGCATCATCTATGAAAAAGTGGTTTAATACCAACTACCACTACATAGTCCCAGAATGGGAGGTTGAGACTAAACCTCACTTGCAGAATAATTACTTACTTGATCTTTATCTAGAAGCTAGGGAAGTAGTTGGTGATAAAGCAAAGCCGGTTATCACTGGTCCAATAACCTATGTTTCCTTATCATCAGGAATTGTCGACTTTGAAGCGACTGTTCAGCGGTTATTACCACTTTATAAGCAGGTCTTTCAAGATCTGATAGATGCAGGCGCCACCTATATTCAGATTGATGAGCCGATATTTGTAACTGATGAAGGTGAACTTTTAGTAGATATAGCTAAGTCTGTTTATGATTTTTTTGCAAGAGAAGTACCACAAGCCCACTTCATCTTTCAAACCTACTTTGAATCAGCAGTCTGTTTAGATAAACTCTCTAAGCTGCCAGTAACGGGATTTGGCCTTGATTTTATACATGGTAGGGCGGAAAATTTAGCTGCTGTTAAGCAAGGTCTATTCCGCGAAAAAGAATTATTTGCAGGAATTGTTAATGGTCGAAATATCTGGGCAGTAAATTTAGAAGAAACGTTGGCTTTATTGGAAGAGATAGGTCCCTTTGTTAAACGATTGACTCTTCAACCTTCTTCAAGTCTTTTACATGTACCGGTGACGACTAAATACGAAACACATTTAGACCCTGTGTTAAAGAATGGCTTATCATTTGCTGATGAAAAACTAAAGGAATTAGAACTATTAGCTAGTGCTTTTGATGGTAATAAAACAAAGGGATATCACGAAGCTTTATCTCGTTTTTCAGCTCTTCAAGCTGCTGATTTTCGTCATGTAGCATTGGAATCATTAGCAGAAGTAAAGCTTGAACGAAGTCCGTATAAATTACGCCAAGCTTTGCAAGCTGAAAAATTACAGTTACCGATTTTACCAACAACAACTATTGGATCCTTTCCTCAATCACCTGAAATTAGGAAGAAACGCCTTGCTTGGAAAAGAGGAAATCTATCTGACTCAGATTATAAAGATTTCATAAAAACTGAAATTAGAAGATGGATTGCTATTCAAGAAGATCTTGATCTTGATGTGTTAGTACATGGCGAATTTGAGCGTGTTGATATGGTTGAATTTTTTGGTCAAAAGTTAGCTGGTTTTACGACAACCAAATTAGGCTGGGTACAGTCTTATGGTTCAAGGGCGGTCAAACCACCTATCATTTATGGTGATGTCAAACATATTCAACCCTTAAGCCTTGAAGAAACGGTTTATGCCCAAAGTTTGACTAAGAAACCTGTTAAAGGCATGTTGACAGGTCCTATTACTATAACGAACTGGTCATTTGAGCGAGATGATATTAGCCGATCTGATCTTTTTAATCAAATTGCTTTGGCTATAAAAGATGAGATTCAACTTTTGGAACAATCAGGTATTGCTATTATACAAGTGGATGAAGCAGCCCTTCGAGAAGGTTTACCCTTACGCCAGCAAAAGCAACAGGCTTACTTAGATGATGCTGTTGCGGCCTTTAAAATTGCAACTTCATCTGTGAAAGATGAGACACAAATTCATACACATATGTGTTATTCAAAATTTGACGAAATTATTGATTCTATCCGTGCACTAGATGCAGATGTTATTTCTATTGAAACGAGTAGAAGTCATGGGGACATCATTGAAAGTTTTGAAACAGCAGTTTATCCTCTAGGAATTGGCCTGGGTGTTTATGATATTCATTCCCCTCGCATACCTACTAAGGAAGAAATTATTGTCAATATTCAACGATCACTAAAATGTCTATCAAAAGAGCAATTTTGGGTAAACCCTGATTGTGGCTTAAAAACACGCCGTGAAGCAGAAACAATTGCTGCCTTGGAGGTTCTTGTTTCAGCTACCAAAGAGGTTCGTCAGCAATTAGATAATTAA

SEQ ID NO: 3696 - protein, 745 aa, Streptococcus agalactiae
MVKVSNLGYPRLGEQREWKQAIEAFWAGNLEQKDLEKQLKQLRINHLKKQKEAGIDLIPVGDFSCYDHVLDLSFQFNVIPKRFDEYERNLDLYFAIARGDKDNVASSMKKWFNTNYHYIVPEWEVETKPHLQNNYLLDLYLEAREVVGDKAKPVITGPITYVSLSSGIVDFEATVQRLLPLYKQVFQDLIDAGATYIQIDEPIFVTDEGELLVDIAKSVYDFFAREVPQAHFIFQTYFESAVCLDKLSKLPVTGFGLDFIHGRAENLAAVKQGLFREKELFAGIVNGRNIWAVNLEETLALLEEIGPFVKRLTLQPSSSLLHVPVTTKYETHLDPVLKNGLSFADEKLKELELLASAFDGNKTKGYHEALSRFSALQAADFRHVALESLAEVKLERSPYKLRQALQAEKLQLPILPTTTIGSFPQSPEIRKKRLAWKRGNLSDSDYKDFIKTEIRRWIAIQEDLDLDVLVHGEFERVDMVEFFGQKLAGFTTTKLGWVQSYGSRAVKPPIIYGDVKHIQPLSLEETVYAQSLTKKPVKGMLTGPITITNWSFERDDISRSDLFNQIALAIKDEIQLLEQSGIAIIQVDEAALREGLPLRQQKQQAYLDDAVAAFKIATSSVKDETQIHTHMCYSKFDEIIDSIRALDADVISIETSRSHGDIIESFETAVYPLGIGLGVYDIHSPRIPTKEEIIVNIQRSLKCLSKEQFWVNPDCGLKTRREAETIAALEVLVSATKEVRQQLDN

SEQ ID NO: 3697 - protein, 324 aa, Streptococcus agalactiae
ATGATAAATAGTACCGTTTTTCTTGCTATTCTTTTAGGTTTTGTTGTTTCTTGGGTGCCAAGAGTCGCTCCATTCATATTTGTAAAATACAAAGGGCTACCAAATAGTCTTGTGAAATTTTTAAAATTTCTTCCTCTTTCTATTTTATTTGCCCTAACATTCTCTAGCTTTTTTTCAGTTAAATTAGGACAATTGCCAACACTAAAATGGTTAGATTTATTGGCTGGCATACCAACTCTAGTTGTCACTATTCGATATCGAAATTTATTTTACACTGTTCTTACTGGTATCGTTACTATGGCTTTATTGAGATTACTATTTTAA

SEQ ID NO: 3698 - protein, 107 aa, Streptococcus agalactiae
MINSTVFLAILLGFVVSWVPRVAPFIFVKYKGLPNSLVKFLKFLPLSILFALTFSSFFSVKLGQLPTLKWLDLLAGIPTLVVTIRYRNLFYTVLTGIVTMALLRLLF

SEQ ID NO: 3699 - protein, 693 aa, Streptococcus agalactiae
ATGGAAAAAGGATTTAAAGAGGGAGTGAAAGATGCCTTGCCCACAGCTTTAGGGTATATCTCAATAGGCTTGGCGTTTGGGATAGTTGCTTCAGCATCAGATTTATCTGCAATAGAAGTTGGTCTTATGAGTGCCTTGGTATATGGGGGATCTGCTCAGTTTGCTATGTGTGCGCTATTATTAGCAAAAGCAGACTTGATGACTATTACGATGACAGTATTTTTAGTTAATTTGAGAAATATGTTAATGAGTTTACACGCGACTACTATCTTCAAGTCTGCTCACCTAATGAATCAATTAGCCATAGGAACTCTAATAACAGATGAGAGCTACGGCGTTTTACTTGGAGAAGCATTACATCACAAAGTTGTATCGCCTAGTTGGATGCATGGTAATAATGTGATGAGTTATTTGACATGGGTAATCTCAACGATAATAGGAACTTTACTGGGGAGTACTATTCCTAATCCAGAAATGTTTGGTTTAGACTTTGCATTAGTCGCCATGTTTATAGGTCTCTTTGTATTTCAGTTGTTTGGGATGTTATCTGATGGAAAGCGACTTGTTGTATATGTTCTTGCTTCTGTAGGTTTAAGTTACTTCTTATTAGCTACTTTTTTGTCAGGAGCCTTATCAGTATTGCTTGCGACTGTTGTTGGATGTAGTGTGGGAGTTGTTTTAGATGATAAATAG

SEQ ID NO: 3700 - protein, 230 aa, Streptococcus agalactiae
MEKGFKEGVKDALPTALGYISIGLAFGIVASASDLSAIEVGLMSALVYGGSAQFAMCALLLAKADLMTITMTVFLVNLRNMLMSLHATTIFKSAHLMNQLAIGTLITDESYGVLLGEALHHKVVSPSWMHGNNVMSYLTWVISTIIGTLLGSTIPNPEMFGLDFALVAMFIGLFVFQLFGMLSDGKRLVVYVLASVGLSYFLLATFLSGALSVLLATVVGCSVGVVLDDK

SEQ ID NO: 3701 - protein, 4713 aa, Streptococcus agalactiae
ATGAACACAAAACAGCGTTTTTCAATCCGGAAATATAAGTTAGGTGCCGTATCTGTACTTTTGGGAACCCTATTTTTTTTAGGTGGTATCACAAATGTAGCTGCTGATTCTGTCATAAATAAGCCATCTGATATTGCAGTTGAACAGCAAGTAAAAGACAGTCCAACGAGCATAGCAAATGAGACACCTACTAACAACACGTCATCAGCCCTTGCGTCGACAGCTCAAGACAATCTTGTTACAAAGGCTAATAATAGTCCAACAGAAACACAACCAGTAGCTGAGTCTCACTCTCAAGCCACCGAGACATTTTCCCCAGTCGCAAATCAACCGGTTGAAAGCACTCAAGAAGTTTCTAAAACTCCTTTAACCAAACAAAATTTAGCAGTCAAATCTACACCAGCTATTTCTAAAGAAACCCCTCAAAACATTGATAGTAATAAAATTATCACTGTCCCCAAAGTATGGAACACAGGCTACAAAGGAGAGGGAACTGTTGTAGCAATTATTGACTCAGGACTAGATATCAATCACGATGCTCTCCAATTAAATGATTCGACAAAAGCAAAATACCAAAACGAACAGCAAATGAATGCTGCTAAAGCAAAAGCTGGTATAAACTATGGAAAATGGTATAACAACAAAGTAATCTTTGGTCACAACTATGTTGATGTCAATACAGAGCTAAAAGAGGTGAAAAGCACTTCTCATGGTATGCACGTAACCAGTATCGCAACAGCTAATCCTAGCAAGAAAGATACAAATGAATTAATCTATGGTGTTGCTCCTGAAGCACAAGTAATGTTTATGAGAGTCTTCTCTGATGAAAAAAGAGGAACTGGACCAGCCCTTTATGTTAAAGCTATTGAAGATGCCGTTAAACTCGGTGCTGACAGCATTAATTTAAGTTTAGGTGGAGCTAATGGGTCTTTAGTTAATGCCGATGACCGACTTATAAAAGCTTTAGAGATGGCTAGACTCGCTGGCGTTTCTGTTGTTATAGCAGCAGGTAACGACGGTACATTTGGGAGTGGAGCATCAAAGCCTTCTGCTCTTTATCCTGATTATGGTTTAGTTGGTAGTCCATCAACAGCTCGTGAGGCCATTTCTGTAGCATCATATAATAATACAACACTGGTTAATAAAGTCTTCAACATTATCGGATTAGAAAACAACAGAAATCTCAACAACGGATTAGCTGCTTATGCAGATCCTAAAGTTAGTGATAAGACCTTTGAAGTAGGGAAACAATATGATTATGTTTTCGTAGGAAAAGGAAACGACAATGATTATAAGGACAAAACTTTAAATGGTAAAATCGCCTTAATTGAACGTGGAGATATTACTTTTACAAAAAAAGTCGTCAATGCTATTAATCACGGTGCTGTGGGAGCTATTATCTTTAATAACAAAGCTGGGGAAGCTAATCTAACAATGAGTTTAGATCCTGAAGCAAGTGCTATTCCTGCTATTTTTACCCAAAAAGAGTTTGGAGATGTTTTAGCTAAAAACAACTATAAAATTGTATTTAACAATATCAAAAATAAACAAGCCAACCCTAATGCAGGTGTCCTATCTGACTTTTCAAGCTGGGGGTTAACAGCAGACGGACAATTAAAACCTGACTTATCTGCTCCTGGAGGCTCTATTTACGCCGCTATCAATGATAATGAATATGATATGATGAGTGGGACAAGTATGGCTTCTCCCCATGTCGCTGGTGCTACTGCTCTAGTTAAACAATACTTATTGAAAGAACATCCAGAACTTAAAAAAGGTGACATTGAAAGAACTGTCAAATACCTTCTTATGAGTACTGCTAAAGCACACCTAAACAAAGATACAGGCGCTTACACCTCACCACGCCAACAAGGAGCAGGTATTATCGATGTCGCAGCAGCAGTTCAGACAGGATTATACCTAACTGGTGGGGAAAACAACTATGGCAGCGTTACATTAGGAAATATTAAAGATAAAATTTCCTTTGATGTTACTGTTCATAATATCAATAAAGTTGCAAAAGATTTACACTATACAACCTATTTAAATACTGATCAAGTTAAAGATGGCTTTGTCACATTGGCTCCTCAACAACTTGGTACATTTACAGGGAAAACGATACGGATTGAACCAGGGCAAACCCAAACGATTACAATTGATATAGATGTTTCGAAATACCATGACATGTTAAAAAAAGTAATGCCAAACGGCTATTTCCTAGAAGGCTACGTACGTTTTACAGACCCTGTTGATGGTGGGGAAGTTCTTAGTATTCCTTATGTTGGATTTAAGGGAGAATTCCAAAACTTAGAAGTTTTAGAAAAATCCATTTATAAGCTTGTTGCTAACAAAGAAAAGGGATTTTATTTCCAACCAAAACAAACAAACGAAGTTCCTGGTTCAGAAGATTATACTGCCTTAATGACTACAAGTTCAGAGCCTATCTACTCAACAGACGGTACTAGTCCTATCCAATTGAAAGCCTTGGGAAGCTATAAGTCTATAGATGGAAAATGGATCTTACAACTAGATCAAAAAGGCCAGCCTCATCTAGCCATTTCACCTAATGATGACCAAAATCAAGATGCCGTTGCAGTGAAAGGTGTTTTCTTACGTAATTTCAATAATTTAAGAGCCAAAGTCTATCGTGCAGATGATGTTAATTTACAAAAACCACTATGGGTAAGTGCTCCCCAAGCAGGAGATAAAAATTACTACAGCGGAAATACTGAAAATCCAAAATCTACATTTTTATATGACACAGAATGGAAAGGAACCACTACTGATGGTATTCCTTTAGAAGATGGAAAATACAAATACGTTTTAACTTATTACTCTGATGTCCCTGGCTCTAAGCCACAACAAATGGTGTTTGATATCACTTTGGATAGACAAGCTCCTACACTAACAACAGCAACTTATGACAAAGATAGACGTATCTTCAAAGCTCGTCCTGCAGTAGAACACGGGGAATCTGGTATCTTTAGAGAACAAGTTTTTTACTTAAAAAAAGATAAAGATGGTCATTATAATAGCGTCTTACGTCAACAAGGAGAAGACGGTATCCTTGTTGAAGATAACAAAGTATTTATCAAACAAGAAAAGGATGGTAGCTTTATTCTACCTAAAGAGGTTAACGATTTCTCTCATGTCTACTATACTGTTGAAGATTATGCAGGCAATCTAGTATCAGCAAAACTCGAAGATTTGATCAATATTGGCAATAAAAATGGTTTAGTAAACGTCAAAGTGTTTAGCCCTGAGCTTAACAGTAATGTCGATATTGATTTCTCTTACTCTGTCAAAGATGACAAAGGTAATATCATCAAAAAGCAACATCACGGGAAAGACCTCAATTTATTGAAATTGCCTTTTGGTACCTATACGTTTGATCTATTCTTATACGATGAGGAACGAGCAAATCTAATCAGTCCCAAAAGTGTCACTGTAACTATTTCTGAAAAAGATAGCCTTAAAGACGTCTTATTTAAAGTTAACTTACTCAAGAAAGCAGCCTTACTCGTTGAATTTGACAAGCTTTTACCAAAAGGAGCAACAGTCCAGTTGGTTACTAAGACAAATACTGTTGTTGATCTACCAAAAGCAACTTATTCTCCTACTGACTATGGTAAAAACATACCTGTAGGAGACTATCGTTTAAACGTAACGCTGCCTAGTGGGTATAGCACTTTAGAGAACTTAGATGATTTACTTGTATCCGTAAAAGAAGATCAGGTAAACCTAACAAAATTGACGCTGATTAATAAAGCTCCTCTGATTAATGCCCTAGCAGAACAAACTGATATTATTACCCAGCCTGTGTTTTATAATGCTGGAACTCACTTAAAAAATAATTACCTAGCTAATCTTGAAAAGGCACAAACTTTAATTAAAAATAGAGTGGAACAAACAAGTATTGATAATGCTATTGCTGCTTTGAGAGAAAGTCGCCAAGCTCTTAACGGTAAAGAAACAGATACTTCTTTACTGGCAAAAGCTATTTTAGCTGAAACAGAAATCAAGGGAAACTATCAATTTGTTAATGCTAGTCCATTAAGCCAATCAACTTATATCAATCAAGTCCAATTGGCGAAAAACCTTCTACAAAAACCTAACGTCACTCAATCAGAAGTAGACAAAGCCTTAGAAAATCTTGATATTGCTAAAAATCAATTAAATGGTCATGAAACTGATTACTCTGGTTTACACCATATGATAATTAAAGCAAACGTTCTGAAACAAACATCATCTAAATATCAGAACGCCAGTCAATTTGCTAAAGAAAATTATAATAACCTTATCAAGAAAGCAGAATTGCTGCTTTCCAATAGACAAGCTACACAAGCTCAAGTTGAAGAGTTATTAAACCAAATAAAAGCAACCGAACAAGAGCTTGATGGCCGTGATAGAGTTTCTTCCGCAGAGAATTATAGTCAATCACTCAATGATAATGACTCTCTCAATACCACACCTATCAATCCGCCAAATCAGCCCCAGGCGTTGATATTCAAAAAAGGCATGACTAAAGAAAGTGAGGTTGCTCAGAAGCGTGTCTTAGGGGTGACTAGCCAAACCGATAATCAAAAGGTAAAGACAAACAAGCTTCCTAAAACAGGCGAAAGCACTCCTAAAATAACCTATACAATATTGCTATTTAGTCTCTCTATGCTAGGTCTGGCAACAATCAAACTAAAGTCTATCAAAAGAGAATAA

SEQ ID NO: 3702 - protein, 1570 aa, Streptococcus agalactiae
MNTKQRFSIRKYKLGAVSVLLGTLFFLGGITNVAADSVINKPSDIAVEQQVKDSPTSIANETPTNNTSSALASTAQDNLVTKANNSPTETQPVAESHSQATETFSPVANQPVESTQEVSKTPLTKQNLAVKSTPAISKETPQNIDSNKIITVPKVWNTGYKGEGTVVAIIDSGLDINHDALQLNDSTKAKYQNEQQMNAAKAKAGINYGKWYNNKVIFGHNYVDVNTELKEVKSTSHGMHVTSIATANPSKKDTNELIYGVAPEAQVMFMRVFSDEKRGTGPALYVKAIEDAVKLGADSINLSLGGANGSLVNADDRLIKALEMARLAGVSVVIAAGNDGTFGSGASKPSALYPDYGLVGSPSTAREAISVASYNNTTLVNKVFNIIGLENNRNLNNGLAAYADPKVSDKTFEVGKQYDYVFVGKGNDNDYKDKTLNGKIALIERGDITFTKKVVNAINHGAVGAIIFNNKAGEANLTMSLDPEASAIPAIFTQKEFGDVLAKNNYKIVFNNIKNKQANPNAGVLSDFSSWGLTADGQLKPDLSAPGGSIYAAINDNEYDMMSGTSMASPHVAGATALVKQYLLKEHPELKKGDIERTVKYLLMSTAKAHLNKDTGAYTSPRQQGAGIIDVAAAVQTGLYLTGGENNYGSVTLGNIKDKISFDVTVHNINKVAKDLHYTTYLNTDQVKDGFVTLAPQQLGTFTGKTIRIEPGQTQTITIDIDVSKYHDMLKKVMPNGYFLEGYVRFTDPVDGGEVLSIPYVGFKGEFQNLEVLEKSIYKLVANKEKGFYFQPKQTNEVPGSEDYTALMTTSSEPIYSTDGTSPIQLKALGSYKSIDGKWILQLDQKGQPHLAISPNDDQNQDAVAVKGVFLRNFNNLRAKVYRADDVNLQKPLWVSAPQAGDKNYYSGNTENPKSTFLYDTEWKGTTTDGIPLEDGKYKYVLTYYSDVPGSKPQQMVFDITLDRQAPTLTTATYDKDRRIFKARPAVEHGESGIFREQVFYLKKDKDGHYNSVLRQQGEDGILVEDNKVFIKQEKDGSFILPKEVNDFSHVYYTVEDYAGNLVSAKLEDLINIGNKNGLVNVKVFSPELNSNVDIDFSYSVKDDKGNIIKKQHHGKDLNLLKLPFGTYTFDLFLYDEERANLISPKSVTVTISEKDSLKDVLFKVNLLKKAALLVEFDKLLPKGATVQLVTKTNTVVDLPKATYSPTDYGKNIPVGDYRLNVTLPSGYSTLENLDDLLVSVKEDQVNLTKLTLINKAPLINALAEQTDIITQPVFYNAGTHLKNNYLANLEKAQTLIKNRVEQTSIDNAIAALRESRQALNGKETDTSLLAKAILAETEIKGNYQFVNASPLSQSTYINQVQLAKNLLQKPNVTQSEVDKALENLDIAKNQLNGHETDYSGLHHMIIKANVLKQTSSKYQNASQFAKENYNNLIKKAELLLSNRQATQAQVEELLNQIKATEQELDGRDRVSSAENYSQSLNDNDSLNTTPINPPNQPQALIFKKGMTKESEVAQKRVLGVTSQTDNQKVKTNKLPKTGESTPKITYTILLFSLSMLGLATIKLKSIKRE

SEQ ID NO: 3703 - protein, 687 aa, Streptococcus agalactiae
ATGACAAAAATAATTTATTTCGCTGATGATGAAAAGAATATTCGTGACTTGGTGGTTCCTTTTTTAGAACATGATGGTTTCACTGTTCGAGCATTTGAAACTGGAGACCTTCTCTTAGAAGCCTATAAAAACCAAAAACCCGATTTAGTTATATTAGACATAATGATGCCTGGAACTAATGGTTTAGATGTTATGAAAAGCATCCGCCAATATGATAATATTCCTATTATCATGTTAACAGCTAGAGATTCTGATGTTGATTTCATTACGGCTTTTAATTTAGGAACTGACGATTACTTCACCAAGCCTTTTTCACCTATAAAACTTAGTCTACATGTTAAAGCATTGTTCAAACGCCTTGATGAAAAAGCAATCAAAAATGACACTCAGTATCAGTTCCTAGATTTAACTCTGGATACCGAAAAGCGAATAGCCCTATTATCAAATGAAGAAATGCCCTTAACCAAGACAGAATTTGATTTTCTTTTAGTATTAATTGAAAAACCTGAAACTGCTTTTTCTAGGGAAACACTGCTTAATCGTATTTGGGGATTTGATGATATTGAAAGCAGAGCAGTTGATGACACTATTAAACGATTACGTAAAAAATTTAAGCAATACCACAGTCAGGTTAGTATCAAAACTGTCTGGGGTTACGGCTTCAAATTAATCAAAGAGGACAAATGA

SEQ ID NO: 3704 - protein, 228 aa, Streptococcus agalactiae
MTKIIYFADDEKNIRDLVVPFLEHDGFTVRAFETGDLLLEAYKNQKPDLVILDIMMPGTNGLDVMKSIRQYDNIPIIMLTARDSDVDFITAFNLGTDDYFTKPFSPIKLSLHVKALFKRLDEKAIKNDTQYQFLDLTLDTEKRIALLSNEEMPLTKTEFDFLLVLIEKPETAFSRETLLNRIWGFDDIESRAVDDTIKRLRKKFKQYHSQVSIKTVWGYGFKLIKEDK

SEQ ID NO: 3705 - protein, 1389 aa, Streptococcus agalactiae
ATGAAAAAGAAAAGTTTAATTAGCAATCTTATCCTTATTAATAGCATCACTCTATTTCTTGGTTTTTACCTCATCTATTTTTCTGTCAACTATGTCATTAAAGACTATGTCCATCAAATGACAAGGAATTCCATGCAGGCGAATTTCACCATTTTAGATAGTATCTATAACAACAAGAAAATACCAGATGAAAATATGGTTAACCAAGATAGCATCTTTGTTTGGTCTTACTATGCTATTTTTGACCAGCATTATCGTATGAAATATGGCACTGATAATCATAAAAAAGAGAGCCATGATATTATTCGCTATCTTACCCAAAAAAGATTGTGGCAAATTTCTAAGGAAAAAGATGGTATGTTTGTAACCATCAAGAAAAAAACCTATTATGTAATGACCAAAGACTACTCTGGTATCCTTGTTGATGGTAGCATAAAAAAAGTTCCTAAAGCACAGTCGCAACTTTTTCATGTGATTAACTTTTCAGACATTACTTACACCCAGCATCTAATTACTAAAATTAATCATTTTCTTATAGTTATCTTAGTACTAACCTATATTCCCATGCTATTTATTATGAGGAAGACTTTCACTGGAATTAGAGAATCTATTCAATCAGTACAAACTTATATTTCCAGCCTTTGGAAAAATCAAGGCAATCATCAATCTAGTCAAAAAGAAATTGTCTTTTCTGATTTCGATCCTCTTCTACTTGAGAGCCAAGAAATGGCAAATCGAATCTACCAAGCAGAAGAGAGCCAAAGAAACTTCTTTCAAAATGCCTCCCACGAGTTACGGACACCTTTAATGTCCATCCAAGGATATACTGAGGGAGTTCAAGAGGGTATTATTGATGCCGAGCTCGCACACTCTGTTATTCTGCAAGAGAGCAAAAAAATGAAACAGCTCGTAGACGATATTATCTTACTCTCTAAATTAGATAGTAACTTAAGTGATCAAAAAGATGAATTTTCTTTAAATGAATTACTTAATAGTATTATTGCTTATTTCAAACCCCTAGCTAATAAACAAAAGATTAGTATTACTTATAGACCAGACAAGCATGAAAAGTTACTAAAAGGTAACGAAGAGTTGATTCAACGAGCTATCAATAATATCCTTAGTAACGCACTACGCTATGCTGTTTCTCATATTGAAATCTCTTACACAAATCAAAAACTAACTATCTCAAACGACGGACCAGCCATTTCAAAAGAAGACTTGCCTTATATTTTCGATCGCTTCTATAAAGGACATGGCGGCCAAACAGGTATTGGACTTGCAATGACTAAAGAAATTATCAAGCAACATCATGGTAATATCATCGCTGAGAGTGATTCGACCTCAACAACTTTTACGATTTATTTCAATTGCCACAAAATTGCCTAA

SEQ ID NO: 3706 - protein, 462 aa, Streptococcus agalactiae
MKKKSLISNLILINSITLFLGFYLIYFSVNYVIKDYVHQMTRNSMQANFTILDSIYNNKKIPDENMVNQDSIFVWSYYAIFDQHYRMKYGTDNHKKESHDIIRYLTQKRLWQISKEKDGMFVTIKKKTYYVMTKDYSGILVDGSIKKVPKAQSQLFHVINFSDITYTQHLITKINHFLIVILVLTYIPMLFIMRKTFTGIRESIQSVQTYISSLWKNQGNHQSSQKEIVFSDFDPLLLESQEMANRIYQAEESQRNFFQNASHELRTPLMSIQGYTEGVQEGIIDAELAHSVILQESKKMKQLVDDIILLSKLDSNLSDQKDEFSLNELLNSIIAYFKPLANKQKISITYRPDKHEKLLKGNEELIQRAINNILSNALRYAVSHIEISYTNQKLTISNDGPAISKEDLPYIFDRFYKGHGGQTGIGLAMTKEIIKQHHGNIIAESDSTSTTFTIYFNCHKIA

SEQ ID NO: 3707 - protein, 609 aa, Streptococcus agalactiae
ATGTTACATTCTAAAAAAATACATTCCTTATCGCTTATTGCCGTTCTCTCTTTAGCAACATATACGAGTTTACAACCAAATCATGTAACGGCTGAACAATCACAAAAAACATCAACTGTTCATATGAGTCAAAAAACTATTGAACATAAGTTAAAAGTTGCAGATAAAGAAGCTGCTCCTCTCTACGCTAAAATCGACCATATCCAACGACATATTGAAGTCAAAAAAGCAAAAGATTTAAAAGTTATTGAATTGTATATTAACAAAGATATCAACCAACTAGAGAAGCAAAATAAACGTCTACTAACTAAATTCTATACTTCTATTGATAATCAAACATGGGATAGCACAAGTGAAGTCAAAAAATTGATTGATAAGACAAACCTATCCACTAACGAAAAAGATAGATTAAAATTATATTTTGAACAACGTGCTTACCTTGAGACAAGGTTGAACGACCGCTATCAAAAATTTGATAACTCTATTGAAAACCAAAATAAAGAACTAAAAATATTAACGTCAAAAATAGAAAAAATCTATCAAAAACATGGTATTACAAAAGAGGTATTAAAAACTTACTATGCTAAAAAAACAGTACGAGCTGACTGA

SEQ ID NO: 3708 - protein, 202 aa, Streptococcus agalactiae
MLHSKKIHSLSLIAVLSLATYTSLQPNHVTAEQSQKTSTVHMSQKTIEHKLKVADKEAAPLYAKIDHIQRHIEVKKAKDLKVIELYINKDINQLEKQNKRLLTKFYTSIDNQTWDSTSEVKKLIDKTNLSTNEKDRLKLYFEQRAYLETRLNDRYQKFDNSIENQNKELKILTSKIEKIYQKHGITKEVLKTYYAKKTVRAD

SEQ ID NO: 3709 - protein, 102 aa, Streptococcus agalactiae
ATGCTAAAAAAACAGTACGAGCTGACTGATTTAGCTAAAAATAGAAAAATCCCAAAAGTTAAACTTTTGGGATTTTATACGCGTAAATATCACTATTTCTAG

SEQ ID NO: 3710 - protein, 33 aa, Streptococcus agalactiae
MLKKQYELTDLAKNRKIPKVKLLGFYTRKYHYF

SEQ ID NO: 3711 - DNA, 2502 bp, Streptococcus agalactiae
atgacattctataatcacaaagaaatcgaacccaaatggcaagctttttgggcagataatcatacctttaaaacaggaacagacgcatcaaaacctaagttttatgccctagatatgttcccatacccatctggagctggtctccacgttggtcacccagaaggctatacagcaacggatattctcagccgtttcaaacgtgcccaaggtcacaatgtcctccacccaatgggttgggatgcttttggacttcctgctgagcagtacgctatggatactggtaatgacccagctgagtttacagctgaaaacatcgctaacttcaaacgccagattaatgctcttggtttctcatacgactgggatcgtgaagttaacacaactgaccctaactactacaagtggacacagtggatctttaccaagctttatgaaaaaggtctagcttacgaagctgaagttccagttaactgggttgaagaattgggaacagctatcgccaacgaagaggttcttccagatggtacatcagaacgtggtggctacccagttgtcagaaaaccaatgcgccaatggatgctcaaaatcactgcctatgcagagcgcttgctggaagacttggaagaagttgactggccagagtcaatcaaggacatgcaacgcaactggattggtaaatcaactggtgctaatgtaaccttcaaggttaaggatacagataaggacttcactgtctttacaacacgtcctgacaccctttttggtgcgacttacgcagttcttgctcctgagcatgccttggttgatgctattacaacagctgaccaagcagaagccgttgccgaatacaaacgtcaagcgagtctcaaatcagaccttgctcgtacagaccttgccaaagaaaaaactggtgtctggacaggtgcctatgccattaacccagttaatggtaaagaaattccagtttggattgcggactatgtccttgctagctacggtacaggtgctatcatggcagttccagctcacgatgaacgtgactgggaattcgcaaaacaattcaacctagacatcattccagttcttgaaggtgggaatgttgaagaggctgcctttacagaagacggtcttcacatcaactcagacttcctagatggtctcgacaaagcggcagctattgccaaaatggtcgagtggcttgaagcagaaggtgttggtaatgagaaagttacttaccgtcttcgtgactggctcttcagccgtcagcgttactggggtgagccaatcccaatcatccactgggaagatggaacatcaactgcggttcctgagagcgaattgccactagttcttccagttactaaggatatccgtccttcaggtactggtgagagcccacttgctaacttgacagactggttggaagtcactcgtgaagatggcgttaaaggtcgtcgtgagaccaacaccatgccacaatgggcaggttcaagctggtactatctccgctacatcgatccacacaacactgaaaaactagctgacgaggaactcctcaaacaatggttgccagttgatatctatgtcggtggtgcagagcatgccgtgcttcaccttctctatgctcgcttctggcacaaggttctttatgatctcggtgtcgtacctaccaaagagccattccaaaaactctttaaccaagggatgattttgggaacaagctaccgcgacagccgtggtgctcttgtggcaactgacaaggttgaaaaacgtgatggcagcttcttccatgtggaaactggtgaagagcttgaacaagcacctgctaagatgtctaaatcacttaagaacgttgtcaatccagatgatgttgttgagcagtacggtgctgacacccttcgtgtttacgagatgttcatgggaccactcgatgcttcaatcgcttggtctgaagaaggtcttgaaggctcacgtaagttcttggaccgtgtttaccgtttgatcacgactaaagagatcactgaggaaaatagcggagctcttgacaaggtttacaacgaaactgttaaggcagttactgagcaagttgaccaaatgaaattcaacacagctatcgctcaactcatggtctttgtcaatgcagccaacaaggaagacaaactctttagcgactatgccaaaggctttgttcaattgattgcaccattcgcaccgcacttaggtgaagaactctggcaagtcttgacagcctcaggacagtcaatctcttacgtgccatggccaagctatgacgaaagcaaattggttgaaaacgaaatcgaaatcgttgtccaaatcaaaggtaaggtcaaagctaaactcgtcgttgctaaagacctttcacgcgaagaattgcaagatcttgctcttgctaacgaaaaagtccaagccgaaatcgcaggcaaagacatcatcaaagtcatcgcagtaccaaacaaactcgttaatattgtggtgaaataa

SEQ ID NO: 3712 - protein, 833 aa, Streptococcus agalactiae
MTFYNHKEIEPKWQAFWADNHTFKTGTDASKPKFYALDMFPYPSGAGLHVGHPEGYTATDILSRFKRAQGHNVLHPMGWDAFGLPAEQYAMDTGNDPAEFTAENIANFKRQINALGFSYDWDREVNTTDPNYYKWTQWIFTKLYEKGLAYEAEVPVNWVEELGTAIANEEVLPDGTSERGGYPVVRKPMRQWMLKITAYAERLLEDLEEVDWPESIKDMQRNWIGKSTGANVTFKVKDTDKDFTVFTTRPDTLFGATYAVLAPEHALVDAITTADQAEAVAEYKRQASLKSDLARTDLAKEKTGVWTGAYAINPVNGKEIPVWIADYVLASYGTGAIMAVPAHDERDWEFAKQFNLDIIPVLEGGNVEEAAFTEDGLHINSDFLDGLDKAAAIAKMVEWLEAEGVGNEKVTYRLRDWLFSRQRYWGEPIPIIHWEDGTSTAVPESELPLVLPVTKDIRPSGTGESPLANLTDWLEVTREDGVKGRRETNTMPQWAGSSWYYLRYIDPHNTEKLADEELLKQWLPVDIYVGGAEHAVLHLLYARFWHKVLYDLGVVPTKEPFQKLFNQGMILGTSYRDSRGALVATDKVEKRDGSFFHVETGEELEQAPAKMSKSLKNVVNPDDVVEQYGADTLRVYEMFMGPLDASIAWSEEGLEGSRKFLDRVYRLITTKEITEENSGALDKVYNETVKAVTEQVDQMKFNTAIAQLMVFVNAANKEDKLFSDYAKGFVQLIAPFAPHLGEELWQVLTASGQSISYVPWPSYDESKLVENEIEIVVQIKGKVKAKLVVAKDLSREELQDLALANEKVQAEIAGKDIIKVIAVPNKLVNIVVK

SEQ ID NO: 3713 - DNA, 1248 bp, Streptococcus agalactiae
atgtcaccattaaatatcaataagaataattggcgcgccctaatcgctgccattgtcgcatccggaaccgatgatttaaatatcatgttccttgcattttctatgtcaactatcattactgatcttcatttatctgcggcacaggctggttggattgggacaattaccaacttgggaatgctcgtgggaggactaatctttggtttattagctgatcgctacaataaatttaaagttttcaaatggacgattctaatcttttcaatcgcaactggtttagttttcttcactactaatttatcatatctctatatcatgcgcttcattgcaggaattggcgttggtggcgaatatggtatcgctattgccattatggcaggaattgtcccaactaataaaatgggccggatttcttcactaaatggtatcgctggtcaagttggatctattagctcagcactcttagcaggatggctagctccagcactcggttggcggggactttttctctttggccttctccctatagttctcgtcctatggatgcaatttgctgttgatgataaagatatcttagatcaatataatacagacgcagatgatgaacctctagatatcagtataaaagctttatttgatactcctgtattagccacacagagcctagcactaatggttatgacaactgttcagattgccggatactttggcatgatgaactggttaccaactattatccaaaccaacttaaacgtttctgtcaagaattcatcattatggatgattgcaaccattcttggaatgtgccttggcatgctagtatttggtcaattgttagataaatttggaccgcgtttagtatacgggtgtttccttctatcatctgcaatttgtgtctatctctttcaattcgcaacaacaatgccttctatgattataggcggggcagttgtcggattctttgttaatggtatgtttgcaggctatggtgccatgattacacgtctctatccacatcatattcgttcaacagctaacaatcttatcttaaatgttggtcgtgcaataggtggcttttcatctgttatcatcggaatgattctagacgtttcaaatgtctctatggtcatgcttttcttagcaagtctctatatcgttagttttttatcaatgctaagcattaagcaattaaaacgtcaaaaatatcacactaatttaacacaattagatgtcaaaccaactgactga

SEQ ID NO: 3714 - protein, 415 aa, Streptococcus agalactiae
MSPLNINKNNWRALIAAIVASGTDDLNIMFLAFSMSTIITDLHLSAAQAGWIGTITNLGMLVGGLIFGLLADRYNKFKVFKWTILIFSIATGLVFFTTNLSYLYIMRFIAGIGVGGEYGIAIAIMAGIVPTNKMGRISSLNGIAGQVGSISSALLAGWLAPALGWRGLFLFGLLPIVLVLWMQFAVDDKDILDQYNTDADDEPLDISIKALFDTPVLATQSLALMVMTTVQIAGYFGMMNWLPTIIQTNLNVSVKNSSLWMIATILGMCLGMLVFGQLLDKFGPRLVYGCFLLSSAICVYLFQFATTMPSMIIGGAVVGFFVNGMFAGYGAMITRLYPHHIRSTANNLILNVGRAIGGFSSVIIGMILDVSNVSMVMLFLASLYIVSFLSMLSIKQLKRQKYHTNLTQLDVKPTD

SEQ ID NO: 3715 - DNA, 810 bp, Streptococcus agalactiae
atgagaggtctttatactgctggagttttagatgcttttctagatgcaggaataaaaatagatggtatcgtatctgtctctgctggtgcattgtttggtgttaattttgtatctagacaacgagagagggctttgcgatacaataaaaagtatttatcccaccctaaatatatgagtctaaggtcatggtttcgaacagggaattttgttaataaagatttcacctattatgaagttcctatgaaattggatgtatttgacgatgaagcatttaaaaaatcaagtattgatttttacgtagttgctacagagatgacatctggtaaacctgaatattttaaaattgatagtgtttttgaacaaatggaaattttacgtgctagttcagcattaccagtagtctcaaagatggttgattggcaggggaaaaagtacttagatggtggtttatctgatagtattcccgttgattttgcccgtggtttaggatttgacaagttgattgttgtgatgactaggccgctcaattatcagaaaaagccttcaagtggacgattgtataaaactctgtataggaaatatcctaattttgtaaagacagcctcgaatcggtaccaacagtataataatagtcttgaaaaggtcatgagccttgaaaaaacaggcgatctatttgcaattagaccgagtaagagcttggttattggccgcttagagaagaatccggataaacttgatagtatttatcagcttggtatgaaagatgctaaaagtgtgatgcctgagctgaatagttatctaatgaaataa

SEQ ID NO: 3716 - protein, 269 aa, Streptococcus agalactiae
MRGLYTAGVLDAFLDAGIKIDGIVSVSAGALFGVNFVSRQRERALRYNKKYLSHPKYMSLRSWFRTGNFVNKDFTYYEVPMKLDVFDDEAFKKSSIDFYVVATEMTSGKPEYFKIDSVFEQMEILRASSALPVVSKMVDWQGKKYLDGGLSDSIPVDFARGLGFDKLIVVMTRPLNYQKKPSSGRLYKTLYRKYPNFVKTASNRYQQYNNSLEKVMSLEKTGDLFAIRPSKSLVIGRLEKNPDKLDSIYQLGMKDAKSVMPELNSYLMK

SEQ ID NO: 3717 - DNA, 1197 bp, Streptococcus agalactiae
atgacttatcaaaaaacagttgttttggctggtgattattcctacattagacaaattgaaaccacattaaaatctctctgtgtctatcatgagaatctctcaatttttatttttaatcaagatattcctcaagaatggtttttagctatgaaagatagggttggacaaactggaaatcaaattcaggatgtaaagctcttccatgatcacttatccccaaaatgggaaaataaaaagcttaatcatattaattatatgacctatgctcgttatttcatacctcagtacatctcagctgatacagttttatatcttgactctgacttagttgttactactaatttagataacctctttcaaatttcactagacaatgcatatttagctgcagttccagctctttttgggcttggatatgggtttaatgctggagtaatggtaattaacaaccaacgttggcgacaagaaaatatgactattaaattaattgaaaaaaatcaaaaggaaattgagaatgccaacgaaggggatcaaacaattcttaatcgcatgtttgaaaatcaggtaatttatttagatgatacctacaattttcaaattggttttgatatgggagctgctatcgatgggcataaatttatttttgacatcccaattaccccactcccaaaaattattcactacatttcgggaatcaaaccttggcaaacattatcaaatatgagactccgtgaggtatggtggcactataatttacttgaatggtcaagtatcatatctagtaaaaaagtatttggtttagaccacccaattaaaacacaaaattatcgtctcaatttccttattgttacaacttctgattgtataccatctatctcagaattagtcactgcccttccagattgtctatttcacattgcagcaccaacagttatgtctgacattcttataagcctattagcttttgaaaatatccgccttcataaaacttacactccacctattattgataaattattagcagaagctgatatttatcttgatattaatgtttttggaaaaatggagggcattctacagaaaatgtcacaatctgaaaaaccaattcttactacaagagaatgcaatagccagcttgttccagaaacagtttttgcatctatcgatgatttaattaattatcttcagtctatataa

SEQ ID NO: 3718 - protein, 398 aa, Streptococcus agalactiae
MTYQKTVVLAGDYSYIRQIETTLKSLCVYHENLSIFIFNQDIPQEWFLAMKDRVGQTGNQIQDVKLFHDHLSPKWENKKLNHINYMTYARYFIPQYISADTVLYLDSDLVVTTNLDNLFQISLDNAYLAAVPALFGLGYGFNAGVMVINNQRWRQENMTIKLIEKNQKEIENANEGDQTILNRMFENQVIYLDDTYNFQIGFDMGAAIDGHKFIFDIPITPLPKIIHYISGIKPWQTLSNMRLREVWWHYNLLEWSSIISSKKVFGLDHPIKTQNYRLNFLIVTTSDCIPSISELVTALPDCLFHIAAPTVMSDILISLLAFENIRLHKTYTPPIIDKLLAEADIYLDINVFGKMEGILQKMSQSEKPILTTRECNSQLVPETVFASIDDLINYLQSI

SEQ ID NO: 3719 - DNA, 1206 bp, Streptococcus agalactiae
atggaaaaagcagttgcacttgcagttgattcaaactacttggataaagccttagtaacaataaagtctatttgtgtttataatagaaatataactttttatttattcaatcaagataccccagttgaatgggtacgtaatataaacaggaaactagagcctctaggatcaaaactgattaatgttaaaatatataactatgatattgctcatctaacgacttttctaactgttagtacatggtttagattatttttagcagattatatacctagttcacgtgtactttatttagattcagatattatcgttaacactaatcttgattacttatttgaactagattttaaaggttattacttagcagccgtcaaagatccccataaaaatgaagaaggagggtttaatgctggcatgcttttagctaatctagaactatggcgggaagatgggctcactaaaacattactaaaaacagctgaagaactccaccgagttgtcaaaacaggggatcaaagtatcttgaacattgtttgccataatcgttggttatctctgaacaaaacatggaactttcaaacttatgatgtcgttagccgctataatcatcgatcttatttatatctaaacatagaaaatagaactcctaatattatacattttttaactagtgacaaaccttggaatgaaaatagcgttgcaaggtttagagaactatggtggtattacttccaacttgatttttgccaattaaccggcaagcaaagaaaagtgatttcttacgaaaagtccatggaattgctttctgtttcagatattcatcttttcactcttacatcttccgataatttagaacacattgaatcgctaatttgtagatgtcctactgttcaattccatattggtgcctacacaacagtgtcaaataaacttagcaaactagaacaatatccaaatgtcctagtttaccctgaattaattgaggcaagaattgaaaaattaataacattagccactgcataccttgatattaatcatggtccagaagtaggtaatattttacaaagagttcatttgaaacaaaagccaatttattctttcaacaacacgtctcatcaagagaatataaccaaacatatcgttaatcataattctattgataatatggttgttttaattaacgaattaaacctaaatcaattataa

SEQ ID NO: 3720 - protein, 401 aa, Streptococcus agalactiae
MEKAVALAVDSNYLDKALVTIKSICVYNRNITFYLFNQDTPVEWVRNINRKLEPLGSKLINVKIYNYDIAHLTTFLTVSTWFRLFLADYIPSSRVLYLDSDIIVNTNLDYLFELDFKGYYLAAVKDPHKNEEGGFNAGMLLANLELWREDGLTKTLLKTAEELHRVVKTGDQSILNIVCHNRWLSLNKTWNFQTYDVVSRYNHRSYLYLNIENRTPNIIHFLTSDKPWNENSVARFRELWWYYFQLDFCQLTGKQRKVISYEKSMELLSVSDIHLFTLTSSDNLEHIESLICRCPTVQFHIGAYTTVSNKLSKLEQYPNVLVYPELIEARIEKLITLATAYLDINHGPEVGNILQRVHLKQKPIYSFNNTSHQENITKHIVNHNSIDNMVVLINELNLNQL

SEQ ID NO: 3721 - protein, 540 aa, Streptococcus agalactiae
ATGTTAGATTCTTTTGATAAGGGTTGGTTTGTACTCCAAACCTACTCAGGTTATGAAAATAAAGTAAAGGAAAATCTCTTGCAACGTGCGCAAACTTATAATATGTTAGACAACATTTTGCGTGTGGAAATCCCTACTCAAACTGTAAATGTTGAGAAAAATGGGAAAACAAAAGAAATTGAAGAAAATCGCTTCCCGGGTTATGTACTTGTGGAAATGGTAATGACTGATGAAGCCTGGTTTGTTGTTCGTAATACTCCAAACGTTACTGGATTTGTTGGATCACACGGCAATCGCTCTAAACCAACACCGTTGTTAGAAGAAGAGATTCGTTCAATACTCATCTCAATGGGACAAACCGTTGATGTCTTTGATACTAATATCAAGGAAGGTGATGTTGTTCAAATCATTGATGGTGCTTTCATCGGACAAGAAGGACGTGTAGTTGAGATTGAGAATAACAAAGTTAAATTAATGATCAACATGTTCGGCTCAGAAACACAAGCAGAACTTGAGTTGTACCAAGTTGCAGAATTATAA

SEQ ID NO: 3722 - protein, 179 aa, Streptococcus agalactiae
MLDSFDKGWFVLQTYSGYENKVKENLLQRAQTYNMLDNILRVEIPTQTVNVEKNGKTKEIEENRFPGYVLVEMVMTDEAWFVVRNTPNVTGFVGSHGNRSKPTPLLEEEIRSILISMGQTVDVFDTNIKEGDVVQIIDGAFIGQEGRVVEIENNKVKLMINMFGSETQAELELYQVAEL

SEQ ID NO: 3723 - protein, 1893 aa, Streptococcus agalactiae
ATGAATAATAACGAAAAAAAAGTAAAATACTTTTTAAGAAAAACAGCTTATGGTTTGGCCTCAATGTCAGCAGCGTTTGCTGTATGTAGTGGTATTGTACACGCGGATACTAGTTCAGGAATATCGGCTTCAATTCCTCATAAGAAACAAGTTAATTTAGGGGCGGTTACTCTGAAGAATTTGATTTCTAAATATCGTGGTAATGACAAAGCTATTGCTATACTTTTAAGTAGAGTAAATGATTTTAATAGAGCATCACAGGATACACTTCCACAATTAATTAATAGTACTGAAGCAGAAATTAGAAATATTTTATATCAAGGACAAATTGGTAAGCAAAATAAACCAAGTGTAACTACACATGCTAAAGTTAGTGATCAAGAACTAGGTAAGCAGTCAAGACGTTCTCAAGATATCATTAAGTCATTAGGTTTCCTTTCATCAGACCAAAAAGATATTTTAGTTAAATCTATTAGCTCTTCAAAAGATTCGCAACTTATTCTTAAATTTGTAACTCAAGCCACGCAACTGAATAATGCTGAATCAACAAAAGCTAAGCAAATGGCTCAAAATGACGTGGCCTTAATAAAAAATATAAGCCCCGAAGTCTTAGAAGAATATAAAGAAAAAATTCAAAGAGCTAGCACTAAGAGTCAAGTTGATGAGTTTGTAGCAGAAGCTAAAAAAGTTGTTAATTCCAATAAAGAAACGTTGGTAAATCAGGCCAATGGTAAAAAGCAAGAAATTGCTAAGTTAGAAAATTTATCTAACGATGAAATGTTGAGATATAATACTGCAATTGATAATGTAGTGAAACAGTATAATGAAGGTAAGCTCAATATTACTGCTGCAATGAATGCTTTAAATAGTATTAAGCAAGCAGCACAGGAAGTTGCCCAGAAAAACTTACAAAAGCAGTATGCTAAAAAAATTGAAAGAATAAGTTCAAAAGGATTAGCGTTATCTAAAAAGGCTAAAGAAATTTATGAAAAGCATAAAAGTATTTTGCCTACACCTGGATATTATGCAGACTCTGTGGGAACTTATTTGAATAGGTTTAGAGATAAACAAACTTTCGGAAATAGGAGTGTTTGGACTGGTCAAAGTGGACTTGATGAAGCAAAAAAAATGCTTGATGAAGTCAAAAAGCTTTTAAAAGAACTTCAAGACCTTACCAGAGGTACTAAAGAAGATAAAAAACCAGACGTTAAGCCAGAAGCCAAACCAGAGGCCAAACCAGACGTTAAGCCAGAGGCCAAACCAGACGTTAAGCCAGAAGCTAAGCCAGACGTTAAACCAGAAGCTAAGCCAGACGTTAAACCAGAAGCTAAGCCAGACGTTAAACCAGAAGCTAAGCCAGACGTTAAACCAAAGGCCAAACCAGACGTTAAGCCAGAAGCTAAGCCAGACGTTAAACCAGACGTTAAACCAGACGTTAAGCCAGAGGCCAAACCAGAGGATAAGCCAGACGTTAAACCAGACGTTAAGCCAGAAGCTAAACCAGACGTTAAGCCAGAGGCCAAACCAGAAGCTAAGCCAGAAGCTAAGCCAGAAGCTAAGCCAGAGGCCAAACCAGAAGCTAAGCCAGACGTTAAGCCAGAAGCTAAACCAGACGTTAAACCAGAGGCTAAGCCAGAAGCTAAACCAGAGGCTAAGTCAGAAGCTAAACCAGAGGCTAAGCTAGAAGCTAAACCAGAGGCCAAACCAGCAACCAAAAAATCGGTTAATACTAGCGGAAACTTGGCGGCTAAAAAAGCTATTGAAAACAAAAAGTATAGTAAAAAATTACCATCAACGGGTGAAGCCGCAAGTCCACTCTTAGCAATTGTATCACTAATTGTTATGTTAAGTGCAGGTCTTATTACGATAGTTTTAAAGCATAAAAAAAATTAA

SEQ ID NO: 3724 - protein, 630 aa, Streptococcus agalactiae
MNNNEKKVKYFLRKTAYGLASMSAAFAVCSGIVHADTSSGISASIPHKKQVNLGAVTLKNLISKYRGNDKAIAILLSRVNDFNRASQDTLPQLINSTEAEIRNILYQGQIGKQNKPSVTTHAKVSDQELGKQSRRSQDIIKSLGFLSSDQKDILVKSISSSKDSQLILKFVTQATQLNNAESTKAKQMAQNDVALIKNISPEVLEEYKEKIQRASTKSQVDEFVAEAKKVVNSNKETLVNQANGKKQEIAKLENLSNDEMLRYNTAIDNVVKQYNEGKLNITAAMNALNSIKQAAQEVAQKNLQKQYAKKIERISSKGLALSKKAKEIYEKHKSILPTPGYYADSVGTYLNRFRDKQTFGNRSVWTGQSGLDEAKKMLDEVKKLLKELQDLTRGTKEDKKPDVKPEAKPEAKPDVKPEAKPDVKPEAKPDVKPEAKPDVKPEAKPDVKPEAKPDVKPKAKPDVKPEAKPDVKPDVKPDVKPEAKPEDKPDVKPDVKPEAKPDVKPEAKPEAKPEAKPEAKPEAKPEAKPDVKPEAKPDVKPEAKPEAKPEAKSEAKPEAKLEAKPEAKPATKKSVNTSGNLAAKKAIENKKYSKKLPSTGEAASPLLAIVSLIVMLSAGLITIVLKHKKN

SEQ ID NO: 3725 - protein, 174 aa, Streptococcus agalactiae
ATGTTTGTCAAAGGGATTTTTCAAGTATTGCGTGACACTACTTGGCCAAATCGAAAACAACGTTGGAAAGATTTTATTTCCATCTTGGAATACACTGTATTTTTCACAATCGTTATCTACATCTTTGACAAACTGTTAGCCGCAGGAGTCATGGACTTGATTAATCGATTTTAA

SEQ ID NO: 3726 - protein, 57 aa, Streptococcus agalactiae
MFVKGIFQVLRDTTWPNRKQRWKDFISILEYTVFFTIVIYIFDKLLAAGVMDLINRF

SEQ ID NO: 3727 - protein, 147 aa, Streptococcus agalactiae
CAAAAGAAAGCAAGCCTAGCGTGTACAGAATGCGGAAGCCGAAATTACTCAATCGGAGTAAGTAGCACCCCCAAGCCAACACGACTAGAAGTAAATAAATTTTGTAAATATTGTAAGAAGTATACAATACACAAAGAAACGCGTTGA

SEQ ID NO: 3728 - protein, 48 aa, Streptococcus agalactiae
QKKASLACTECGSRNYSIGVSSTPKPTRLEVNKFCKYCKKYTIHKETR

SEQ ID NO: 3729 - protein, 2013 aa, Streptococcus agalactiae
ATGGCTTTTATTCTTATATTTGGTAGCTATCTTTTTTATCTTTCTAAAACTGCTACAGTTAGTGATTTACAGAGTGCTCTAAAAACAACCACCACCATTTATGATAAGAATAAAGAATATGCTGGAAAACTTTCGGGACAAAAGGGAACTTATGTAGAGTTAAATGCTATTTCTGATCATCTCAAAAATGCTGTTATAGCAACTGAAGATAGAACTTTTTATGAAAATAATGGTGTAAACTTTAAGCGATTTTTTTTGGCAGTAGCTACACTTGGGAAATTTGGCGGAGGCTCAACTATTACCCAGCAATTAGCAAAAAATGCTTACTTGTCACAGGACCAAACGATTAAACGCAAGGCGCGTGAATTCTTTTTAGCGCTAGAATTGACTAAGAAATATAGCAAGGCTGAGATTCTGACCATGTATCTTAATAACTCTTATTTTGGTAATGGTGTTTGGGGTGTGGAAGATGCTAGTAGGAAATATTTTGGAACCAGTGCTGCTAATTTGACAGTAGATGAGGCTGCTACACTTGCTGGAATGCTTAAAGGACCAGAAGTTTATAATCCTTATTATTCTGTTGAAAATGCAACTAACCGAAGAGATACTGTTTTGGCAGCGATGGTTGATGCAGGTAAACTAACCAAGTCTCAAGCTAAAGAAGCTGCTTCAATTGGTATGAAAAATAGATTAGCAGATACCTATGCTGGTAAAATTAATGATTACAGGTACCCATCCTATTTTGATGCTGTTGTCAATGAAGCCATTGATACTTATGGTATTTCAGAAAAAGATATTGTCAATAATGGCTATAAGATTTACACTGCATTAGATCAAAATTATCAATCAGGAATGCAAAAAACATTTGATGATACTAGCCTCTTCCCTGTATCTGACTATGATGGTCAATCTGCCCAAGGTGCTAGCGTAGCTTTAGATCCAAAAACTGGTGGTGTAAGAGGTTTAGTTGGACGTGTTCAAAGTACTAAAGATGCACAGTTTAGAAGTTTTAACTACGCGACTCAATCAAAGAGAAGTCCAGCCTCAACCATAAAACCTTTAGTTGTTTATTCACCAGCTATTGCTTCAGGATGGTCAATAGATAAAGAACTTCCTAATAAAGTTCAAGATTTTCATGGTTATAAACCAAGTAACTATGGTGGGATTGAGACTGAAAGTATCCCGATGTATCAAGCACTAGCTAATTCTTATAATATTCCTGCTGTTTATACTTTAGACAAACTAGGAATCAATAAAGCCTTTACTTATGGCAGGAAGTTTGGTCTAAATATGTCATCAGCAAACAAAGAGCTAGGAGTGGCGCTAGGTGGAAGTGTAACCACTAATCCTTTAGAAATGGCACAAGCTTACTCAACTTTTGCAAATGACGGTATAATGCATCGCGCTCATTTGATTACTCGAATTGAGACAGCTAATGGAAAATTAGTAAAGCAATTTACAGATAAGCCTAAGCGAGTTATTAGTCGCTCAGTGGCTAGTAAAATGACTAGTATGATGTTAGGAACATTCTCAAATGGTACAGCTATTAATGCCAATGTTTATGGTTATACAATGGCAGGTAAAACTGGAACAACCGAAACAGATTTTAACCCCAATTTATCTGGAGACCAGTGGGTAGTCGGCTATACGCCTGATGTCGTTATTAGTCAATGGGTTGGCTTTAAGAACACAGATAAACACCATTATTTGACAGATTCTAGTGCAGGTACAGCTTCAAATATATTTAGCACGCAAGCTTCATATATACTACCGTATACTAAGGGGTCTAGTTTTACTCATATTGAGAATGCTTATTTCCAAAACGGTATTGGTTCAGTTTATAATGCACAAGATGCTAGTAATACAACGAACCAAGAATCACGCTCAATTATTAATGATTTAAAAGATTCGGCAAGTAAGGCTGCACAAGATATTTCTAGAGCGGTGGAAGATTCAAATTTCCAAGAGAAGGTAAAAGATGCTTGGAATAGTCTAAAGGACTACTTTAGATAG

SEQ ID NO: 3730 - protein, 670 aa, Streptococcus agalactiae
MAFILIFGSYLFYLSKTATVSDLQSALKTTTTIYDKNKEYAGKLSGQKGTYVELNAISDHLKNAVIATEDRTFYENNGVNFKRFFLAVATLGKFGGGSTITQQLAKNAYLSQDQTIKRKAREFFLALELTKKYSKAEILTMYLNNSYFGNGVWGVEDASRKYFGTSAANLTVDEAATLAGMLKGPEVYNPYYSVENATNRRDTVLAAMVDAGKLTKSQAKEAASIGMKNRLADTYAGKINDYRYPSYFDAVVNEAIDTYGISEKDIVNNGYKIYTALDQNYQSGMQKTFDDTSLFPVSDYDGQSAQGASVALDPKTGGVRGLVGRVQSTKDAQFRSFNYATQSKRSPASTIKPLVVYSPAIASGWSIDKELPNKVQDFHGYKPSNYGGIETESIPMYQALANSYNIPAVYTLDKLGINKAFTYGRKFGLNMSSANKELGVALGGSVTTNPLEMAQAYSTFANDGIMHRAHLITRIETANGKLVKQFTDKPKRVISRSVASKMTSMMLGTFSNGTAINANVYGYTMAGKTGTTETDFNPNLSGDQWVVGYTPDVVISQWVGFKNTDKHHYLTDSSAGTASNIFSTQASYILPYTKGSSFTHIENAYFQNGIGSVYNAQDASNTTNQESRSIINDLKDSASKAAQDISRAVEDSNFQEKVKDAWNSLKDYFR

SEQ ID NO: 3731 - DNA, 489 bp, Streptococcus agalactiae
  misc_feature 9, 10, 11, 12, 13: n = A,T,C or G
aatgaatgnnnnnttttatttgctaaaaatccatttatacttccccttatcaatcaacgcttagaacgaaaagaaatttggcgtgaatattgggctttagttgaaggaaaattttcacctaagcatcaagttttgagagacaaaattggacggaaccgtcatgacagacgtaaacgaatcattgattctaaaaacggtcaacatgctatgacaatcattgacgttttgaagtatatccaaaatagtagtctcataaaatgccgactggaaaccggaagaacccatcaaattcgcgttcacttatctcatcatggacatcccttaataggagaccccctctacaacccttcttctaataatgaaaggttaatgctacacgctcaccgattgactctatctcatccattaacttgcgaaactattagcgtagaggccccttcatctactttcgagaagattttaaacaattataaaaaaggagttggataa

SEQ ID NO: 3732 - protein, 162 aa, Streptococcus agalactiae
  VARIANT 3, 4, 5: Xaa = Any Amino Acid
NEXXXLFAKNPFILPLINQRLERKEIWREYWALVEGKFSPKHQVLRDKIGRNRHDRRKRIIDSKNGQHAMTIIDVLKYIQNSSLIKCRLETGRTHQIRVHLSHHGHPLIGDPLYNPSSNNERLMLHAHRLTLSHPLTCETISVEAPSSTFEKILNNYKKGVG

SEQ ID NO: 3733 - DNA, 1641 bp, Streptococcus agalactiae
atgtttgatttttttaagaaaaaagttgttaaagtgtgcttagttatttttggtatagttttagtatcacttctgagtctaggattcttttatttttcaaagggacaagtacttagtcgttttgtagcagcacgttctcgtacgtcaggtcaagcgtttgataatattaaagaatacatggtttggtcagatacgggagaatctatcacaaatgatgaggccaattacgctaattttgagcccttgtctaaaagtgaggcgcgtaaattagggcaggaaataaaagaaggaaacaaaaatgattcaatgtatctaaagcgtgtaggtagtcgcttaggtatattccctgattatcgtattgctaataagcctatgtctttgaccttgaaaaccaatgttcctaaattggatgttttgttgaatcaaaaaaaggtcgcgacaagcaattcagatcatttttcagtaacggtggaacgtttacctagaacccattatactgctagccttgaagggactagtgacggaaaagagattaaactcaaaaaagattatgatggtaaaaaccaaactattgatttatcggtcgcttttaaatcttttacagtaacaagtaatcttatggatggtaatctttattttggtgataatcgtattgctaaattaaaagatggtagccattccgtagagaattatccagtgactgatggttcaaaagcttatatcaaaaaagtttttaatgatggtgagataacctctcataaacaaaaattaatctctatcgctgataatcagacaatcaaattagatgttgatggtttattaaatgaaaaagaagctggacagaaattgataactgctttcaatcaattgatactttatgtatcaactgggcaagaccctcagactttaggaacagtttttgaaaaaggtgccgaaaatgatttttacaaaggattgaaagaaagtattaaagcaaaatttgtaactgataatcgtaaagcgagccatttcactattcctaatattgtccttaataaaatgacacaggttgggaaagaaagttatcaagttaattttgctgccgattatgattttaattatgataaatcaacagatcctgataagaaaacatatggccacattattcagaatttaactggtaattttattatgaaaaaatcgggaaatagttaccttatttctaatgatggtaaaaaagatatcacagtagctaaggaaactaataaagttaaggctgatcccgtttccatttttccagagaaccttgtaggaagttggaaaggtgaagttgaggacggtacagtaacgatgacttttgataaggatggtaaagttactcagaaaaaagtttacaaggatagtaaatctaaggaaagtaaccattctgctaaagttacgaagttggaggataagggaaatgggctctacctttatcaatatgaatcaggtactgatactacaacttttgtaacaggaggtatcggtggtcttaaagttaaatacgcctatggaataaaaattgaagggaataagatcatcccagtgatctggcagacatctagtgatggagaatttgattaccataaaccactactcagtaagccattaactaagcaataa

SEQ ID NO: 3734 - protein, 546 aa, Streptococcus agalactiae
MFDFFKKKVVKVCLVIFGIVLVSLLSLGFFYFSKGQVLSRFVAARSRTSGQAFDNIKEYMVWSDTGESITNDEANYANFEPLSKSEARKLGQEIKEGNKNDSMYLKRVGSRLGIFPDYRIANKPMSLTLKTNVPKLDVLLNQKKVATSNSDHFSVTVERLPRTHYTASLEGTSDGKEIKLKKDYDGKNQTIDLSVAFKSFTVTSNLMDGNLYFGDNRIAKLKDGSHSVENYPVTDGSKAYIKKVFNDGEITSHKQKLISIADNQTIKLDVDGLLNEKEAGQKLITAFNQLILYVSTGQDPQTLGTVFEKGAENDFYKGLKESIKAKFVTDNRKASHFTIPNIVLNKMTQVGKESYQVNFAADYDFNYDKSTDPDKKTYGHIIQNLTGNFIMKKSGNSYLISNDGKKDITVAKETNKVKADPVSIFPENLVGSWKGEVEDGTVTMTFDKDGKVTQKKVYKDSKSKESNHSAKVTKLEDKGNGLYLYQYESGTDTTTFVTGGIGGLKVKYAYGIKIEGNKIIPVIWQTSSDGEFDYHKPLLSKPLTKQ

SEQ ID NO: 3735 - DNA, 1152 bp, Streptococcus agalactiae
  misc_feature 4, 5, 6, 7, 8: n = A,T,C or G
atgnnnnncaatgattttgtcaatgcaggagttcctgatggtgcttcagacacgcttggccacatttcaaaaacagttggacttgcggtgccaaacatggctaaaattggacttggtaatattcctcgtccccaagcgcttaagaccgtccctgcagaagaaaatccaagtggctacgcgacgaagttacaagaagtatcacttggtaaagatacaatgacagggcattgggagatcatgggcttaaatattacagagccatttgatactttctggaatggttttccagaagatattatcacaaagattgaggatttttcaggacgtaaagttattcgtgaagcgaataaaccttattcagggacagctgttattgatgactttggaccacgccaaatggaaactggtgagctcattatctatacctcagctgacccagtcctacaaattgcagctcatgaggatatcatccctctagaagaactctaccggatttgtgaatatgctcgtagtatcacaatggagcgtccagctctccttggtcgtattatcgctcgtccatatgtaggtgaaccaggtaactttacgcgtacagccaaccgtcacgactatgcagtatcaccatttgaagataccgtattaaataaactagatcaagctggcatcgatacttatgctgttggtaaaatcaatgatattttcaatggttcaggcattaatcatgatatgggacataacaaatcaaatagtcatggtattgatactttgataaaaacaatggggttatcagagtttgaaaaaggcttctcctttactaatttggttgactttgatgctctctatggtcaccgtcgtgatcctcatggttatcgtgattgtcttcatgagtttgatgagcgtcttccagagatcatttcagcaatgcgtgacaaagacttacttttgatcactgccgatcatggtaatgacccaacttatgcaggtacagaccatacaagagaatacattcctctcttagcctatagcccatccttcacaggaaacggacttatcccagtagggcatttcgcagatatttcagcaacagttgcggataactttggtgttgatactgcgatgattggagaaagcttcttgcaggacttagtataa

SEQ ID NO: 3736 - protein, 383 aa, Streptococcus agalactiae
  VARIANT 2, 3: Xaa = Any Amino Acid
MXXNDFVNAGVPDGASDTLGHISKTVGLAVPNMAKIGLGNIPRPQALKTVPAEENPSGYATKLQEVSLGKDTMTGHWEIMGLNITEPFDTFWNGFPEDIITKIEDFSGRKVIREANKPYSGTAVIDDFGPRQMETGELIIYTSADPVLQIAAHEDIIPLEELYRICEYARSITMERPALLGRIIARPYVGEPGNFTRTANRHDYAVSPFEDTVLNKLDQAGIDTYAVGKINDIFNGSGINHDMGHNKSNSHGIDTLIKTMGLSEFEKGFSFTNLVDFDALYGHRRDPHGYRDCLHEFDERLPEIISAMRDKDLLLITADHGNDPTYAGTDHTREYIPLLAYSPSFTGNGLIPVGHFADISATVADNFGVDTAMIGESFLQDLV

SEQ ID NO: 3737 - DNA, 747 bp, Streptococcus agalactiae
  misc_feature 725, 726, 727, 728, 729: n = A,T,C or G
atggaaactggtgagctcatyatctatacctcagctgayccagtcctacaaattgcagctcatgaggatatcatycctctagaagaactctaccgkatttgtgaatatgctcgtagtatcacaatggagcgtccagctctccttggtcgtattatcgctcgtccatatgtaggtgaaccaggyaactttacgcgtacagccaaccgtcacgactatgcagtrtcaccatttgaagataccgtattaaataaactagatcaagctggcatcgatacttatgctgttggtaaaatcaatgatattttcaatggttcaggcattaatcatgatatgggacataacaaatcaaatagtcatggtattgatactttgataaaaacaatggggttatcagagtttgaaaaaggcttctcctttactaatttggttgactttgatgctctctatggtcaccgtcgtgatcctcatggttatcgtgattgtcttcatgagtttgatgagcgtcttccagagatcatttcagcaatgcgtgacaaagacttacttttgatcactgccgatcatggtaatgacccaacttatgcaggyacagaccatacaagagaatacattcctctcttagcctatagcccatccttcacaggaaacggacttatcccagtagggcatttcgcagatatttcagcaacagttgcggataactttggtgttgatactgcgatgannnnncattcattcattaattaa

SEQ ID NO: 3738 - protein, 248 aa, Streptococcus agalactiae
  VARIANT 242, 243: Xaa = Any Amino Acid
METGELIIYTSADPVLQIAAHEDIIPLEELYRICEYARSITMERPALLGRIIARPYVGEPGNFTRTANRHDYAVSPFEDTVLNKLDQAGIDTYAVGKINDIFNGSGINHDMGHNKSNSHGIDTLIKTMGLSEFEKGFSFTNLVDFDALYGHRRDPHGYRDCLHEFDERLPEIISAMRDKDLLLITADHGNDPTYAGTDHTREYIPLLAYSPSFTGNGLIPVGHFADISATVADNFGVDTAMXXHSFIN

SEQ ID NO: 3739 - DNA, 273 bp, Streptococcus agalactiae
atgtcacaatttgatcgcattcacttagttgtcttagattcagtgggtattggagcggcaccagatgccaatgattttgtcaatgcaggagttcctgatggtgcttcagacacgcttggccacatttcaaaaacagttggacttgcggtgccaaacatggctaaaattggacttggtaatattcctcgtccccaagcgcttaagaccgtccctgcagaagaaaatycmaagtggctacgcgacgaagttwmcargaagtatcactttggttaa

SEQ ID NO: 3740 - protein, 90 aa, Streptococcus agalactiae
  VARIANT 76, 84, 85: Xaa = Any Amino Acid
MSQFDRIHLVVLDSVGIGAAPDANDFVNAGVPDGASDTLGHISKTVGLAVPNMAKIGLGNIPRPQALKTVPAEENXKWLRDEVXXKYHFG

SEQ ID NO: 3741 - protein, 672 aa, Streptococcus agalactiae
GTGGAAGTAAAAGATATTTTAAAAACGGTAGACCATACTTTGCTAGCAACAACAGCAACATGGCCAGAAATCCAAACAATTTTAGATGATGCAATGGCTTATGAAACAGCTTCAGCATGTATTCCAGCCTCTTACGTCAAAAAAGCAGCAGAGTACGTTTCAGGTAAATTAGCTATTTGTACTGTTATTGGGTTCCCAAATGGCTATAGTACAACTGCAGCGAAGGTTTTTGAATGTCAAGATGCTATTAAAAATGGTGCTGATGAAATTGACATGGTCATTAATTTGACAGATGTTAAAAATGGGGATTTTGATACTGTTGAAGAAGAAATTCGTCAAATCAAGGCTGCATGTCAAGACCATATCTTAAAAGTTATCGTTGAGACATGTCAATTAACTAAAGAAGAACTTATCGAACTTTGTGGGGTTGTCACACGTTCAGGTGCAGACTTTATTAAAACCTCTACTGGTTTTTCGACAGCAGGTGCTACATTTGAAGATGTTGAAGTGATGGCAAAATATGTCGGCGAAGGTGTTAAAATTAAGGCAGCAGGTGGAATCTCATCATTGGAAGATGCTGAAAAATTTATTGCTTTAGGAGCTTCACGCTTGGGTACTAGCCGTATCATCAAGATTGTTAAGAACCAAAAAGTTGAAGAAGGCACTTATTAA

SEQ ID NO: 3742 - protein, 223 aa, Streptococcus agalactiae
MEVKDILKTVDHTLLATTATWPEIQTILDDAMAYETASACIPASYVKKAAEYVSGKLAICTVIGFPNGYSTTAAKVFECQDAIKNGADEIDMVINLTDVKNGDFDTVEEEIRQIKAACQDHILKVIVETCQLTKEELIELCGVVTRSGADFIKTSTGFSTAGATFEDVEVMAKYVGEGVKIKAAGGISSLEDAEKFIALGASRLGTSRIIKIVKNQKVEEGTY

SEQ ID NO: 3743 - protein, 1203 aa, Streptococcus agalactiae
ATGCAATTTATTTATAGTATTATTGGTATTTTATTGGTATTAGGAATTGTGTATGCAATTTCTTTCAATCGTAAGAGTGTTTCTCTAAGTTTAATTGGAAAAGCTCTTATCGTTCAATTCATTATTGCGCTAATCTTAGTACGTATCCCACTAGGTCAACAAGTTGTTAGTGTTGTTTCAACTGGAGTTACTAAAGTAATCAACTGTGGTCAAGCTGGATTAAATTTTGTGTTTGGTTCATTAGCAGATAGTGGAGCAAAAACTGGTTTTATTTTCGCCATTCAAACGCTTGGCAATATTGTTTTCTTATCTGCCCTAGTTAGTCTACTTTATTATGTAGGAATCCTTGGATTTGTAGTAAAATGGATAGGTAAGGGCGTTGGTAAAATTATGAAATCCTCAGAGGTTGAGAGTTTTGTTGCCGTAGCTAATATGTTTCTTGGTCAAACAGACAGTCCAATTTTGGTTAGCAAATACCTAGGTCGTATGACTGATAGTGAGATAATGGTTGTGTTGGTATCAGGTATGGGAAGTATGTCAGTTTCTATTCTTGGTGGCTACATTGCATTAGGCATTCCAATGGAATATCTCTTGATTGCTTCAACAATGGTTCCTATTGGCAGTATTCTCATTGCTAAAATCTTATTGCCTCAAACAGAACCTGTTCAAAAAATTGATGACATTAAGATGGATAATAAAGGTAATAACGCCAATGTGATTGATGCAATCGCTGAGGGTGCAAGCACAGGTGCACAAATGGCTTTCTCAATTGGTGCTAGTTTGATTGCCTTTGTTGGTTTAGTTTCTTTGATTAATATGATGTTAAGTGGATTGGGAATCCGCTTAGAACAAATCTTCTCATATGTTTTTGCTCCATTTGGTTTTCTTATGGGATTTGACCACAAAAACATTCTTCTAGAAGGAAACCTTCTTGGAAGTAAGTTGATTTTAAATGAGTTTGTTTCGTTCCAACAATTGGGTGACCTAATCAAATCTTTAGATTATCGTACAGCATTGGTAGCAACTATTTCACTTTGTGGTTTTGCTAATTTATCAAGTTTAGGTATTTGTGTTTCAGGTATTGCTGTTCTTTGTCCAGAGAAACGTGGCACCCTAGCTCGACTTGTTTTCCGTGCAATGATTGGTGGTATTGCTGTAAGTATGCTTAGCGCCTTTATCGTCGGTATTGTAACTCTATTCTAA

SEQ ID NO: 3744 - protein, 400 aa, Streptococcus agalactiae
MQFIYSIIGILLVLGIVYAISFNRKSVSLSLIGKALIVQFIIALILVRIPLGQQVVSVVSTGVTKVINCGQAGLNFVFGSLADSGAKTGFIFAIQTLGNIVFLSALVSLLYYVGILGFVVKWIGKGVGKIMKSSEVESFVAVANMFLGQTDSPILVSKYLGRMTDSEIMVVLVSGMGSMSVSILGGYIALGIPMEYLLIASTMVPIGSILIAKILLPQTEPVQKIDDIKMDNKGNNANVIDAIAEGASTGAQMAFSIGASLIAFVGLVSLINMMLSGLGIRLEQIFSYVFAPFGFLMGFDHKNILLEGNLLGSKLILNEFVSFQQLGDLIKSLDYRTALVATISLCGFANLSSLGICVSGIAVLCPEKRGTLARLVFRAMIGGIAVSMLSAFIVGIVTLF

SEQ ID NO: 3745 - protein, 780 aa, Streptococcus agalactiae
ATGCAGAATTATTCAGGTGAAGTCGGATTGCAATATCACCTACAGATTCGTCCAGGTGATGTAGGTCGTTATGTTATCATGCCAGGTGATCCAAAACGTTGTGCAAAAATTGCAGAACATTTTGATAATGCAGTTCTTGTAGCAGACAGCCGTGAATATGTTACTTATACAGGTACATTAAACGGTGAAAAAGTCAGTGTTACTTCAACTGGTATTGGTGGTCCATCAGCGTCTATTGCGATGGAAGAATTGAAACTCTGTGGCGCTGATACCTTTATCCGTGTTGGAACATGTGGTGGTATTGACCTTGATGTTAAAGGCGGAGACATCGTTATTGCAACTGGAGCTATCCGTATGGAAGGTACAAGTAAAGAATATGCTCCGATTGAATTTCCTGCTGTAGCTGACTTGGAGGTAACGAATGCTCTAGTTAATGCAGCTAAAAAGCTTGGTTACACAAGTCACGCAGGAGTAGTTCAATGTAAAGATGCATTTTATGGACAACATGAGCCAGAACGTATGCCAGTTAGTTATGAATTATTAAATAAATGGGAAGCATGGAAACGTCTGGGAACAAAAGCGTCTGAAATGGAATCTGCAGCTCTTTTTGTAGCAGCAAGTCATCTAGGAGTTCGTTGTGGATCAGATTTCCTTGTTGTTGGTAATCAAGAACGCAACGCTTTGGGTATGGATAACCCAATGGCTCATGACACAGAAGCAGCTATTCAAGTTGCTGTTGAAGCACTCCGCACACTTATTGAAAATGATAAATCACAATAA

SEQ ID NO: 3746 - protein, 259 aa, Streptococcus agalactiae
MQNYSGEVGLQYHLQIRPGDVGRYVIMPGDPKRCAKIAEHFDNAVLVADSREYVTYTGTLNGEKVSVTSTGIGGPSASIAMEELKLCGADTFIRVGTCGGIDLDVKGGDIVIATGAIRMEGTSKEYAPIEFPAVADLEVTNALVNAAKKLGYTSHAGVVQCKDAFYGQHEPERMPVSYELLNKWEAWKRLGTKASEMESAALFVAASHLGVRCGSDFLVVGNQERNALGMDNPMAHDTEAAIQVAVEALRTLIENDKSQ

SEQ ID NO: 3747 - protein, 738 aa, Streptococcus agalactiae
ATGCCTAAAAATGAACTAAATAATAAACTAAATAAACTAAAGCATGTACAAGTCTACAATAAGATTTTTAACATGATTCAAGACGGTACTTATTCTCCTGGAATGCAATTACCTTCTGAACCCGAATTAGCAGGGCAACTTAATGTTAGTCGAGCTACTTTACGAAAGTCATTAGCACTATTACAAGAAGACCATTTGGTTAAAAATATCAGAGGAAAAGGTAATTTCATTAGAGAAAATTCTAGCAACTTGTCTGAAAACGGTTACGAAAATAGACAACACCCTATTAAAACTTGTCTAACTTCCAAAATTACAGAAGTAGAATTAGAATTTCGTGTAGAGGTTCCTGCAGAAGCTATCACAGCTTCACTTAAACAAGAAACCCCTGTAGTTGTTATTGCTGATCGTTGGTACCACACCGATGATGGACCATTAGCTTACACACTTTCTTTTATCCCTATCGAACTTATTTCAGATGCTGAGATTTCTTTACATGATACTAAACAGTTGTTAAACTTCATTGAAGAAGGTATCTATCAAGAAGGCATATCAAGCCACTCACAAAGCCATTTGGGATATGCGACATCTGGCAATTTTTCAGCAACTAAATATACCCTATCCGATCATGGACAATTCATATTAATACAAGAAACAATTTTTAAGCAAGAGAAAATACTAATGTGTAATAAGCATTACGTTCCCATTGAGCACTTTGAATTGTCCATTACCTCTCATTAA

SEQ ID NO: 3748 - protein, 245 aa, Streptococcus agalactiae
MPKNELNNKLNKLKHVQVYNKIFNMIQDGTYSPGMQLPSEPELAGQLNVSRATLRKSLALLQEDHLVKNIRGKGNFIRENSSNLSENGYENRQHPIKTCLTSKITEVELEFRVEVPAEAITASLKQETPVVVIADRWYHTDDGPLAYTLSFIPIELISDAEISLHDTKQLLNFIEEGIYQEGISSHSQSHLGYATSGNFSATKYTLSDHGQFILIQETIFKQEKILMCNKHYVPIEHFELSITSH

SEQ ID NO: 3749 - protein, 1622 aa, Streptococcus agalactiae
ATGGCAAAAGATATTAAATTTTCAGCAGATGCCCGCTCAGCAATGGTGCGTGGTGTTGATATTTTAGCTGATACAGTCAAAGTAACATTAGGTCCTAAAGGCCGTAATGTTGTTCTTGAAAAAGCATTTGGTTCTCCTTTAATTACAAATGATGGTGTGACAATTGCTAAAGAAATTGAGCTAGAAGATCACTTTGAAAATATGGGAGCTAAACTTGTGTCAGAAGTGGCTTCAAAAACTAATGATATTGCAGGGGATGGCACTACAACTGCTACTGTTTTGACCCAAGCTATTGTACGGGAAGGTCTTAAAAATGTAACTGCAGGGGCAAATCCGATTGGCATTCGTCGTGGTATTGAAACAGCTGTTTCAGCAGCAGTTGAAGAGCTAAAAGAGATTGCACAACCAGTTTCAGGCAAAGAAGCTATTGCTCAAGTTGCGGCTGTGTCTTCACGTTCTGAAAAAGTTGGGGAATACATTTCTGAAGCTATGGAGCGCGTGGGTAATGATGGTGTTATCACTATTGAAGAATCGCGAGGTATGGAAACAGAGCTTGAAGTTGTGGAAGGAATGCAGTTTGACCGTGGGTACTTGTCACAGTATATGGTAACTGATAACGAGAAAATGGTCTCTGAACTTGAGAATCCGTATATCCTTATTACAGATAAGAAAATTTCAAATATCCAAGAAATTTTACCATTATTAGAAGAGGTTCTTAAAACAAATCGTCCGTTGCTAATCATCGCTGATGATGTTGATGGAGAAGCTCTCCCAACGCTTGTTCTTAACAAAATTCGTGGAACTTTCAATGTCGTAGCTGTTAAAGCGCCTGGATTTGGTGATCGTCGTAAAGCCATGCTGGAAGATATTGCTATCCTAACAGGAGGAACTGTCGTTACTGAAGACCTTGGTTTAGACTTAAAAGATGCTACTATGCAGTTTTAGGACAGTCTGCTAAAGTAACAGTAGATAAAGATTCTACTGTTATTGTCGAAGGTGCCGGTGACTCATCAGCAATTGCTAATCGCGTAGCTATCATTAAGTCACAGATGGAGGCTACAACTTCTGATTTTGATCGTGAAAAATTACAAGAACGACTTGCTAAGTTAGCCGGTGGTGTAGCAGTAATTAAAGTTGGTGCAGCGACTGAAACAGAATTAAAAGAGATGAAACTTCGCATCGAAGATGCGTTAAATGCAACGCGTGCTGCAGTTGAAGAAGGTATTGTTTCAGGTGGAGGTACGGCTCTTGTGAACGTTATTGAAAAAGTAGCGGCACTGAAACTTAATGGTGATGAGGAGACTGGACGTAATATTGTTCTTCGTGCTCTCGAAGAGCCTGTTCGTCAAATTGCTTACAATGCTGGATATGAAGGTTCAGTTATTATTGAACGTTTAAAACAGTCTGAAATTGGTACAGGATTTAATGCGGCCRATGGAGAATGGGTAGATATGGTTACCACAGGTATCATTGACCCTGTCAAAGTAACACGTTCTGCACTTCAAAATGCGGCATCTGTAGCAAGTCTTATCTTGACTACAGAAGCAGTAGTAGCAAATAAACCTGAACCAGAAGCTCCTACAGCTCCTGCAATGGATCCATCTATGATGGGTGGCTTCTAA

SEQ ID NO: 3750 - protein, 540 aa, Streptococcus agalactiae
MAKDIKFSADARSAMVRGVDILADTVKVTLGPKGRNVVLEKAFGSPLITNDGVTIAKEIELEDHFENMGAKLVSEVASKTNDIAGDGTTTATVLTQAIVREGLKNVTAGANPIGIRRGIETAVSAAVEELKEIAQPVSGKEAIAQVAAVSSRSEKVGEYISEAMERVGNDGVITIEESRGMETELEVVEGMQFDRGYLSQYMVTDNEKMVSELENPYILITDKKISNIQEILPLLEEVLKTNRPLLIIADDVDGEALPTLVLNKIRGTFNVVAVKAPGFGDRRKAMLEDIAILTGGTVVTEDLGLDLKDATMQVLGQSAKVTVDKDSTVIVEGAGDSSAIANRVAIIKSQMEATTSDFDREKLQERLAKLAGGVAVIKVGAATETELKEMKLRIEDALNATRAAVEEGIVSGGGTALVNVIEKVAALKLNGDEETGRNIVLRALEEPVRQIAYNAGYEGSVIIERLKQSEIGTGFNAABGEWVDMVTTGIIDPVKVTRSALQNAASVASLILTTEAVVANKPEPEAPTAPAMDPSMMGGF

SEQ ID NO: 3751 - DNA, 285 bp, Streptococcus agalactiae
atgttaaaaccattaggtgatcgtgtgatcatttcgtttgttgaaactgaagagaaatctgtcggtggttttgttcttgcaggagcaagccatgatgcgacaaagacagccaaagttcttgctgtgggtgacggtattcgtaccttaacaggggaattagttgcaccgagcgttgcagagggtgatactgttttagtcgaaaatggtgctggtctggaagttaaagacggtaacgaaaaagtgacagttgttcgcgaaagtgacattgttgctgtcgttaaatag

SEQ ID NO: 3752 - protein, 94 aa, Streptococcus agalactiae
MLKPLGDRVIISFVETEEKSVGGFVLAGASHDATKTAKVLAVGDGIRTLTGELVAPSVAEGDTVLVENGAGLEVKDGNEKVTVVRESDIVAVVK

SEQ ID NO: 3753 - DNA, 804 bp, Streptococcus agalactiae
atgtcattacttgaattagtcaatctgcacaaaacttttgaaaaaggaactgtcaatgagaaccatgttttacgtggtttagatttaacgattgaagacggtgattttatttcagtaattggaggtaacggtgcgggaaaatcaaccctccttaactgtatcgctggtctgatccctattgatcagggggcaatcacattagacaaccaatcaattactaaagactctgtagaaaaacgatctaaggatattagtcgagtcttccaggatcctagaatgggaactgcaacaaatttgacgattgaagaaaatatggcaattgcacataaaagaggcaataagcgtcacatttttagacagtcagtgactgacgatgaccgtcaactatttaaaaagtctctatcacaattaggtctaggcttagaaaatcgaatgaagactgatgctgcatttttatctggcggtcagcgtcaagccctcacgttagctatggcaactcttgttcgtcccaaattattattactggatgaacatacagcggctctagatcccaaaactagcgatatggttatggaattaacacagaaagtgatagaagaacaacgattgacagccttaatgattacgcacaatatggagcatgccattgcttatggtaatcgtctcgtgatgctctaccacgggaaaattgttgttgatgttaaaggagaagcaaagagaaacttaacagttgcagaattaatggaacttttccataaaaactcaggtcaacagttgatagatgatgcccttgtcttaggttaa

SEQ ID NO: 3754 - protein, 267 aa, Streptococcus agalactiae
MSLLELVNLHKTFEKGTVNENHVLRGLDLTIEDGDFISVIGGNGAGKSTLLNCIAGLIPIDQGAITLDNQSITKDSVEKRSKDISRVFQDPRMGTATNLTIEENMAIAHKRGNKRHIFRQSVTDDDRQLFKKSLSQLGLGLENRMKTDAAFLSGGQRQALTLAMATLVRPKLLLLDEHTAALDPKTSDMVMELTQKVIEEQRLTALMITHNMEHAIAYGNRLVMLYHGKIVVDVKGEAKRNLTVAELMELFHKNSGQQLIDDALVLG

SEQ ID NO: 3755 - DNA, 897 bp, Streptococcus agalactiae
atgttagatattatcttatccggaatttcgcaaggattactttggtcaattatggcaattggcgtgtttatcacttttcgtatcttagacatagccgatctctctgcagagggtgctttccctatgggggctgcagtttgcgctttatgtatcgttaatgatattaatccaattgtggcaaccatagcgggcatgttaggtggtatgttggcaggactagtatcgggttttcttcatactaaaatgaaaataccagccctcctcacaggtattattacgttgacaggactttactctattaatttacttgttttaggaagatcaaacgtctcttttgctctcaaaaatactttggttacaatggtaacaagattaggtttaaataaactttcagcagttttattaattggaattgtttgtgtaggcttggttatcttaattttgtatctctttttaaatacccaactaggattagctttaagagcgacaggtgataatgaggctatgggacaagccaatagtattaaagtagatcggatgaaaatgctaggatatatgattgggaatggcctgattgctttatctggtgcacttttagcgcaaaataatggctatgcagatttgaatatgggagtgggtacaatcgttattggattagcttcaattatcttggcagaagtaatgataaaatacttacctcttggcaaaaggttatggtcaattgtattagggtctgttttataccgtatgattattgttttcatattaacaaccgatattgatgcacagatgataaagttggtttcagcaattttgttggctctcattttgtatgtcccagaattacgagctaaactaggagtaaaaacctctaaatcacttacaaaggaaggataa

SEQ ID NO: 3756 - protein, 298 aa, Streptococcus agalactiae
MLDIILSGISQGLLWSIMAIGVFITFRILDIADLSAEGAFPMGAAVCALCIVNDINPIVATIAGMLGGMLAGLVSGFLHTKMKIPALLTGIITLTGLYSINLLVLGRSNVSFALKNTLVTMVTRLGLNKLSAVLLIGIVCVGLVILILYLFLNTQLGLALRATGDNEAMGQANSIKVDRMKMLGYMIGNGLIALSGALLAQNNGYADLNMGVGTIVIGLASIILAEVMIKYLPLGKRLWSIVLGSVLYRMIIVFILTTDIDAQMIKLVSAILLALILYVPELRAKLGVKTSKSLTKEG

SEQ ID NO: 3757 - DNA, 963 bp, Streptococcus agalactiae
atgaaaaaaataacaaagatggtaattagcagcgttttagcaactgttctgatgacagcttgttcacaatcttctcaaaatggtcaatctgatgtaaaacatattggtattttacaatatgtagaacatccctctctaactgccactaggaaaggatttataaaagaattagctaaagaaggctataaagatggcaaaaatatcaaaattgagtataagaatgctcaaggggatcagtcaaatatccaatcaatttctgaaaaactcattaaagataataaattagtattgggaattgcgactccggcggctcaatcgttgacaacggtgtcaacagaaacacctattttatttacagcagtgacagatccggtatcagccgaattagtaaaatcaatgaaaaaacctgaaggtttagcgactggtacaagtgacatgtctccaattaaaaagcaagtatcccttttgagaaaagtaatgcctaaggttaaacgtgttggtattatgtataccactagcgagcgtaactcagaagttcaggtaaaacaagcaaaaaaaatcttccaagaggcggggattaaaacaagtgttaaaggtatttcttccactaatgatgtacaagatactgctaagagtttaatgtctaaaacagaggttatttttgtaccaacagataatattatagccagctcagtaacgctgttagggaatctatcgaaagaattaaaagtgcctgttgtgggaggttcagcagatatggtaccaagtggtttgctcttttcttatggggctgattatgaggctttaggtcgtcaaacggcaagacaagctgttaaaatcctcaaaggtaaagacgtcgctaaagttccttcagaatatcctcaaaatctaaaagtagtagttaatgaagatatggcaaaagagcttggaattgatgtttcaagtattaaaaataataaataa

SEQ ID NO: 3758 - protein, 320 aa, Streptococcus agalactiae
MKKITKMVISSVLATVLMTACSQSSQNGQSDVKHIGILQYVEHPSLTATRKGFIKELAKEGYKDGKNIKIEYKNAQGDQSNIQSISEKLIKDNKLVLGIATPAAQSLTTVSTETPILFTAVTDPVSAELVKSMKKPEGLATGTSDMSPIKKQVSLLRKVMPKVKRVGIMYTTSERNSEVQVKQAKKIFQEAGIKTSVKGISSTNDVQDTAKSLMSKTEVIFVPTDNIIASSVTLLGNLSKELKVPVVGGSADMVPSGLLFSYGADYEALGRQTARQAVKILKGKDVAKVPSEYPQNLKVVVNEDMAKELGIDVSSIKNNK

SEQ ID NO: 3759 - DNA, 798 bp, Streptococcus agalactiae
atggtaaggctaatatttagtgatattgatggtactttaattaacagtaattttaaagtaacacctaagacacggcagggaattaaacaaatagtagctcaaggggctactttcgttcccatatcagctaggatgcctgaggcaattactccgattatggaacaaattggaatagattcttatattatttcctataatggggctttaatacaagatatgcaacaaaaaacaattgcttcccacacaatggatggtcaagttgccttacaagtttgttcttatgtaagcaagcattattcgaaaattgcatggaatgtctatcgttatcatgaatggtattcctgtgataaagaaaatgagtgggtccaaaaagaggaggagattgttggtttacaatctaaagagatgagtttgatggagttagagaagcaagataggattcataaacttctcttgatgggagaaccatctctgatgggagaattggagaacactttgaaagctcaatatccacatttatcaatcgcacaatctgctccttactttattgaaataatggctccaggtattgaaaaaggaaaatctgctaaaactttagcagactatttagatatttctcttgcagactctattgcgtttggtgataactataatgatttaaatctgcttgaaattgtgggtaaaggttttgtcatggggaatgctcctaaagatttacaagagagaattggaaatgtaactcaggataatgataacgatggtatttattatgctttagtagagtatatggaaaattaa

SEQ ID NO: 3760 - protein, 265 aa, Streptococcus agalactiae
MVRLIFSDIDGTLINSNFKVTPKTRQGIKQIVAQGATFVPISARMPEAITPIMEQIGIDSYIISYNGALIQDMQQKTIASHTMDGQVALQVCSYVSKHYSKIAWNVYRYHEWYSCDKENEWVQKEEEIVGLQSKEMSLMELEKQDRIHKLLLMGEPSLMGELENTLKAQYPHLSIAQSAPYFIEIMAPGIEKGKSAKTLADYLDISLADSIAFGDNYNDLNLLEIVGKGFVMGNAPKDLQERIGNVTQDNDNDGIYYALVEYMEN

SEQ ID NO: 3761 - protein, 912 aa, Streptococcus agalactiae
ATGAGGAGAAAAATAGTGGTAGAAAACCTAGAAAAACCAATTGGAGTGAGCTATAAAAATAGCCCATCAATGAGTAAACGAACGGCTATCAGAATGAAGAAATCTAGTCGATTTTCAATTTTACTATATAGTGTTTTGTCAACTCTCTTAGCAATTGCAAATCCTTTATTGACTTATTTTGCAAATGGTTTGCAGACTCAGAATCTCTATACAGGTTTGATGATGACCAAAGGACAGATCCCTTATAGTGATGTTTTTGCTACAGGAGGATTTTTATACTATGTAACGATTGCTCTAAGTTACCTTTTAGGGTCTAGTATCTGGTTACTTATTGTACAGTTTATTGCTTACTATGTATCTGGAATTTATTTTTATAAATTAGTTTATTATGTGGCACAAAGTGAAATTGTCTCGATAGGCATGACGTTGATTTTCTATATAATGAATATTGTCTTAGGATTCGGTGGTATGTACCCAATACAGTGGGCATTACCTTTTATGCTCATTTCGCTATGGTTTTTAATTAAATTTTGTGTCGATAATATCGTTGATGAAGCATTTATATTTTATGGCATTTTAGCAGCATTCTCACTATTTATAGATCCCCAAACACTGATTTTTTGGCTTTGCTCTTTTGTTCTCTTAACAGCAACCAATATTAAGCAAAAGCAGTCACTACGAGGATTTTATCAGTTTTTATGCGTTGTTTTTGGTATGATTTTAATTGCTTATACTGTTGGTTACTTTATGTTTAATCTACAGATTATCTCTTCTTATATTGACAAAGCTATTTTTTACCCCTTTACGTATTTCGCTAGGACAAACCACTCATTCCTTCTTAGTTTAGCAATTCAAATTGTTGTCCTTCTAGGGTCAGGTTGTCTCNNNNNCATTCATTCATTAATTAATTAA

SEQ ID NO: 3762 - protein, 303 aa, Streptococcus agalactiae
  VARIANT 296, 297: Xaa = Any Amino Acid
MRRKIVVENLEKPIGVSYKNSPSMSKRTAIRMKKSSRFSILLYSVLSTLLAIANPLLTYFANGLQTQNLYTGLMMTKGQIPYSDVFATGGFLYYVTIALSYLLGSSIWLLIVQFIAYYVSGIYFYKLVYYVAQSEIVSIGMTLIFYIMNIVLGFGGMYPIQWALPFMLISLWFLIKFCVDNIVDEAFIFYGILAAFSLFIDPQTLIFWLCSFVLLTATNIKQKQSLRGFYQFLCVVFGMILIAYTVGYFMFNLQIISSYIDKAIFYPFTYFARTNHSFLLSLAIQIVVLLGSGCLXXIHSLIN

SEQ ID NO: 3763 - protein, 123 aa, Streptococcus agalactiae
ATGTCAGATACTCAGCTAACACTAGAAGAACAAGAATTTCTCAAACAATATATGTCTAGAAAATACCACTACTTTAGGGATATTATTCGTTACGGTCAAGTGTTGGCTAAATTGACTAAATAA

SEQ ID NO: 3764 - protein, 40 aa, Streptococcus agalactiae
MSDTQLTLEEQEFLKQYMSRKYHYFRDIIRYGQVLAKLTK

SEQ ID NO: 3765 - protein, 318 aa, Streptococcus agalactiae
ATGGCACATAATCATAACCACGATCATAACCATGAACATCAACATGAAGTAATCACTCTTGTAGATGAGAATGGGAACGAAACACTTTTTGAAATTCTATTAACTATTGATGGGCGTGAAGAGTTTGGCAAAAACTATGTTCTCCTCGTTCCTGCAGGTGCGGAAGAAGACGAACAAGGTGAAATTGAGATTCAAGCTTACTCATTTACAGAAAATGCCGATGGAACTGAAGGAGACCTTCAGCCTATACCAGAAGATTCAGATGCAGAATGGGACATGATTGAGGAAGTTTTCAACAGCTTTCTAGATGAAGAATAA

SEQ ID NO: 3766 - protein, 105 aa, Streptococcus agalactiae
MAHNHNHDHNHEHQHEVITLVDENGNETLFEILLTIDGREEFGKNYVLLVPAGAEEDEQGEIEIQAYSFTENADGTEGDLQPIPEDSDAEWDMIEEVFNSFLDEE

SEQ ID NO: 3767 - protein, 411 aa, Streptococcus agalactiae
ATGGGACTTGACGTCGGCTCGAAAACTGTCGGCGTTGCAATTAGTGATCCACTCGGTTTCACTGCACAAGGTCTTGAAATCATTAAGATCGATGAAGAATCTGGAAATTTTGGTTTTGACCGCTTAGCAGAGTTAGTAAAAGAGTACAAAGTTGATAAATTTGTAGTTGGTCTACCTAAAAATATGAATAATACAAGTGGTCCTCGTGTAGAGGCTAGTCAGGCATATGGCGATAAAATCACTGAATTATTCAATCTTCCAGTTGAATATCAAGATGAACGTTTAACGACTGTTCAAGCAGAGCGTATGCTAGTTGAGCAAGCTGATATTAGTCGTGGTAAGCGTAAGAAAGTTATCGATAAATTAGCAGCTCAACTAATCTTACAAAATTATTTAGACCGCATGTTTTAA

SEQ ID NO: 3768 - protein, 136 aa, Streptococcus agalactiae
MGLDVGSKTVGVAISDPLGFTAQGLEIIKIDEESGNFGFDRLAELVKEYKVDKFVVGLPKNMNNTSGPRVEASQAYGDKITELFNLPVEYQDERLTTVQAERMLVEQADISRGKRKKVIDKLAAQLILQNYLDRMF

SEQ ID NO: 3769 - protein, 267 aa, Streptococcus agalactiae
ATGGGATTTACAGATGAAACTGTTCGTTTTAGATTAGATGATAGTAACAAAGTAGAAATTAGTGAAACATTAACAGCTGTTTATCGTTCATTAGAAGAAAAAGGTTACAATCCCATCAATCAAATTGTTGGTTACGTATTGAGTGGGGACCCTGCTTATGTACCTCGTTACAATGATGCTCGCAATCAAATTCGTAAATATGAACGTGATGAGATTGTAGAAGAGCTCGTTCGTTATTATTTACAAGGAAATGGAATAGATTTGTAA

SEQ ID NO: 3770 - protein, 88 aa, Streptococcus agalactiae
MGFTDETVRFRLDDSNKVEISETLTAVYRSLEEKGYNPINQIVGYVLSGDPAYVPRYNDARNQIRKYERDEIVEELVRYYLQGNGIDL

SEQ ID NO: 3771 - DNA, 387 bp, Streptococcus agalactiae
  misc_feature 361, 362, 363, 364, 365: n = A,T,C or G
atgattaagatttatactatttcaagttgcacaagttgtaaaaaagcaaaaacttggctaaatgctcatcaacttccatataaagaacaaaacctaggtaaagaatcactaacacgtgatgaaattttagaaatattaacaaaaactgaaagtggtattgaaagtatcgtttcttctaaaaatcgttatgctaaggcgctcaattgtaatattgaggagttgagtgtaaatgaagttattgatcttattcaagaaaatccacgtattttaaagagtccaattctaattgatgacaaacgtcttcaagtaggttataaggaagatgatattcgtgcttttctacctcgctctattcgtaacnnnnncattcattcattaattaattaa

SEQ ID NO: 3772 - protein, 128 aa, Streptococcus agalactiae
  VARIANT 121, 122: Xaa = Any Amino Acid
MIKIYTISSCTSCKKAKTWLNAHQLPYKEQNLGKESLTRDEILEILTKTESGIESIVSSKNRYAKALNCNIEELSVNEVIDLIQENPRILKSPILIDDKRLQVGYKEDDIRAFLPRSIRNXXIHSLIN

SEQ ID NO: 3773 - DNA, 1140 bp, Streptococcus agalactiae
ttggctaaaaaaacgaaaaaagcagaagaaattactaagaaattcggtgatgaacgtcgaaaagccttagatgatgctttgaaaaatattgaaaaagattttggtaagggcgcagtgatgcgcttaggtgagcgagctgaacaaaaggttcaagtaatgagttcaggttctcttgctttagatatcgctttaggagcaggtggatatcctaaaggacgtatcgtcgaaatttatggaccagagtcatctggtaaaacaacggttgcccttcatgccgtagctcaagcccaaaaggaaggtgggattgctgcctttattgatgctgagcacgctcttgacccagcctatgctgcggctcttggagttaatattgatgagttacttttgtctcaacctgactcaggtgagcaaggtcttgaaattgcaggtaaattgattgattcaggcgcagttgatttagttgttgtcgattcagttgcagcccttgttcctcgtgctgagattgatggtgatattggtgacagccacgttggtttgcaagctcgtatgatgagtcaagcaatgcgtaaattgtcagcatccattaacaagacaaagacaatcgcaatttttatcaaccagttaagggaaaaagtaggcgttatgtttggtaaccctgaaacaacacctggtggtcgtgctttgaaattttattcatcggttcgtctagatgttcgtggtaatactcaaatcaagggaactggtgagcataaagatcataatgttggtaaagagacaaaaatcaaagttgttaaaaataaagttgctccaccattccgtgaagcttttgtcgaaattatgtatggtgaaggtatttctcgcacgggtgagttaattaaaattgctagtgatttggatattatccaaaaagcaggtgcatggtactcatataatggtgagaaaattggacaaggttctgaaaatgccaaaaaatatttagcagataatccagcaatttttgatgaaattgaccataaagtgcgcgtgcactttggaatgactgaagatgattcgccagttcagtctgagctcgttgaagaaaaaaatgaagctgatgatcttgttttagatttggacaatgctattgaaattgaggaataa

SEQ ID NO: 3774 - protein, 379 aa, Streptococcus agalactiae
MAKKTKKAEEITKKFGDERRKALDDALKNIEKDFGKGAVMRLGERAEQKVQVMSSGSLALDIALGAGGYPKGRIVEIYGPESSGKTTVALHAVAQAQKEGGIAAFIDAEHALDPAYAAALGVNIDELLLSQPDSGEQGLEIAGKLIDSGAVDLVVVDSVAALVPRAEIDGDIGDSHVGLQARMMSQAMRKLSASINKTKTIAIFINQLREKVGVMFGNPETTPGGRALKFYSSVRLDVRGNTQIKGTGEHKDHNVGKETKIKVVKNKVAPPFREAFVEIMYGEGISRTGELIKIASDLDIIQKAGAWYSYNGEKIGQGSENAKKYLADNPAIFDEIDHKVRVHFGMTEDDSPVQSELVEEKNEADDLVLDLDNAIEIEE

SEQ ID NO: 3775 - DNA, 819 bp, Streptococcus agalactiae
atggttttaccaggtccgcctagtgaattaaagccaatggttatggagcaggtagtacctattttgtcaaataatggcacaaaattatattcacgtgtattgagattctttggtatcggtgagagtcagttagtcacaatcttagaagacataattaagaatcagacagacccaactatagcaccatatgcaaaggttggtgaggtaactttaaggttatcaacgaaagctgaaaatcaggatgaggccgactttaaattagatagcttagaaaaagaaatacttgctcttaagacattagataaccgtaaattaaaagatttattatatggttatggtgataataatagtatggcacgtactgttttagaattattgaaagtacaaaataaaacgattactgccgcagagagcttaacagcagggttatttcaatctcagttagcagaattttctggtgcttcgcaagtttttaatggtggttttacgacctatagtatggaagcaaaatcacaacttctcggcatccctaagaaaaaattgcaagaatatggagttgtcagtcattttacagctgaggcaatggctcagcaagctcgccaacttttaaaagcagattttggtatcggtttaacgggagttgctggtcctgatgagttggaaggataccctgcaggtacagtttttattgggattgcaacccctgaaggcgtttcttctattaaagtatcgattggagggaagagtcgctcagatgtccgtcatatcagtactttacatgcttttgacttggtgcgtagggctttattaaagatataa

SEQ ID NO: 3776 - protein, 272 aa, Streptococcus agalactiae
MVLPGPPSELKPMVMEQVVPILSNNGTKLYSRVLRFFGIGESQLVTILEDIIKNQTDPTIAPYAKVGEVTLRLSTKAENQDEADFKLDSLEKEILALKTLDNRKLKDLLYGYGDNNSMARTVLELLKVQNKTITAAESLTAGLFQSQLAEFSGASQVFNGGFTTYSMEAKSQLLGIPKKKLQEYGVVSHFTAEAMAQQARQLLKADFGIGLTGVAGPDELEGYPAGTVFIGIATPEGVSSIKVSIGGKSRSDVRHISTLHAFDLVRRALLKI

SEQ ID NO: 3777 - DNA, 333 bp, Streptococcus agalactiae
gtgagggctgaaattatcgctgtaggaacagaaattttaacaggacagatcgttaatacaaacgcacaatttttgtcggagaaaatggcagaattgggaattgatatttatttccagacagctgtaggagacaatgaggaacgtttattatcgcttttagatatagctagtcagcgcagtcaattggttatcctatgtggtggacttggccctacagaggatgacttaacgaagcaaactttggctaaatttttaggtaaatcattaacagtagatttattagctagtcgaaaattggatcgttttttttgcaagtcgtcctcagtttgctag

SEQ ID NO: 3778 - protein, 110 aa, Streptococcus agalactiae
MRAEIIAVGTEILTGQIVNTNAQFLSEKMAELGIDIYFQTAVGDNEERLLSLLDIASQRSQLVILCGGLGPTEDDLTKQTLAKFLGKSLTVDLLASRKLDRFFCKSSSVC

SEQ ID NO: 3779 - DNA, 552 bp, Streptococcus agalactiae
atgaaacgatgttcttgggtgaatttagataatccattatatgtagcttaccatgataaagagtgggggagagctgttcatgacgatcatgtactctttgagttactatgtttagaaacttatcaatcgggtttatcttgggaaacagtattaaataaacgtcaggagttcagacaagtttttcatcactataatattgaaaaggtagctgcaatgtcagatgcggatttagagataatcttacaaaatcctagggttattcgtcatcgtctaaaacttttctcaacacgacaaaatgctaggtcaattatattaattcagaaagaattcggaagttttgatcgctacatttggtcttttgtagataataaagtacaggttaactcagttaacaactacaacgatgtgcctgcaagtactaccttatccgaacgcttatctaaggatttaaaaaaacgcggttttaaatttgttggtccaacttgcctctattcttttattcaggccgcgggtatggttaatgaccatgaaaatatatgtgatttcaagtaa

SEQ ID NO: 3780 - protein, 183 aa, Streptococcus agalactiae
MKRCSWVNLDNPLYVAYHDKEWGRAVHDDHVLFELLCLETYQSGLSWETVLNKRQEFRQVFHHYNIEKVAAMSDADLEIILQNPRVIRHRLKLFSTRQNARSIILIQKEFGSFDRYIWSFVDNKVQVNSVNNYNDVPASTTLSERLSKDLKKRGFKFVGPTCLYSFIQAAGMVNDHENICDFK

SEQ ID NO: 3781 - protein, 591 aa, Streptococcus agalactiae
ATGTACGATTATATTAAAGGAAAATTGAGTAAAATAACGGCTAAATTTATTGTTGTGGAAACAGCTGGATTGGGATACATGATATATGTGGCAAATCCCTACTCTTTTTCAGGTTACGTTAATCAAGAAGTTACCATCTACTTACATCAAGTCATTCGCGATGATGCACATCTTTTATTTGGCTTTCATACGGAAAATGAAAAAGAAATTTTTCTTAATTTAATTTCAGTATCAGGAATTGGTCCAACGACCGCTTTAGCAATTATTGCAGTCGATGACAATGAAGGTCTCGTAAGTGCCATTGATAATAGTGATATTAAGTATTTGACTAAATTTCCAAAGATAGGAAAAAAAACAGCACAACAGATGATCCTTGATTTGTCAGGGAAGTTTGTAGAAGCTTCTGGTGAGAGTGCGACTAGTCGTAAGGTTAGCTCTGAGCAGAATAGCAATCTTGAAGAAGCTATGGAAGCTTTGTTAGCGTTGGGGTATAAGGCGACTGAATTGAAAAAAGTAAAAGCCTTTTTTGAAGGTACGAACGAGACTGTGGAGCAATACATCAAATCTAGTTTGAAGATGTTGATGAAATAA

SEQ ID NO: 3782 - protein, 196 aa, Streptococcus agalactiae
MYDYIKGKLSKITAKFIVVETAGLGYMIYVANPYSFSGYVNQEVTIYLHQVIRDDAHLLFGFHTENEKEIFLNLISVSGIGPTTALAIIAVDDNEGLVSAIDNSDIKYLTKFPKIGKKTAQQMILDLSGKFVEASGESATSRKVSSEQNSNLEEAMEALLALGYKATELKKVKAFFEGTNETVEQYIKSSLKMLMK

SEQ ID NO: 3783 - protein, 105 aa, Streptococcus agalactiae
ATGGAATGNNNNNGTGTTCAAATAACATTGACCATTTTTATGTTAGCAGGTCTGGTTTTAATCTTATATGCTACCAAAATGAAAAATATTGAGATAGGAAAATAG

SEQ ID NO: 3784 - protein, 34 aa, Streptococcus agalactiae
  VARIANT 3, 4, 5: Xaa = Any Amino Acid
MEXXXVQITLTIFMLAGLVLILYATKMKNIEIGK

SEQ ID NO: 3785 - protein, 1155 aa, Streptococcus agalactiae
ATGACTAAAACTAGTGGGACTGGCGATTTGAGACAGGCGATTGCAGGTATTTATGGTTTAAATACTGCAAAAAAAATGATTGAGATTTCAAATGCAGATTTAGATTTTGAAATTTCGGGTTATGTAAGTTTGCCTGAATTGACACGAGCTAACCGAAACTATATTACCCTATTAATTAACGGTCGTTACATTAAAAATTTTCTTTTGAACCGCTCAATTCTAGATGGTTATGGTTCAAAGTTGATGGTTGGAAGATTTCCAATTGCTGTCATTGATATTCAGATAGATCCTTATCTAGCAGATGTCAACGTTCATCCGACTAAGCAAGAGGTGAGAATTTCTAAGGAACGAGAATTAATGAGTTTAATAAGCACAGCAATTTCTGAGAGTCTTAAACAATATGACTTGATTCCGGATGCTTTAGAGAATTTAGCTAAAACTAGTACCCGAAGTGTAGATAAGCCTATACAAACAAGCTTCTCACTAAAACAGCCTGGTTTGTATTACGATAGGGCTAAAAATGACTTTTTTATAGGTGCAGATACTGTATCTGAACCTATTGCTAACTTTACAAACCTTGACAAAAGTGACGGTTCAGTTGACAATGATGTAAAAAACTCTGTTAATCAAGGAGCAACGCAGTCTCCTAATATAAAGTATGCTAGTAGAGATCAAGCTGATAGTGAGAACTTCATTCATTCTCAGGATTACCTTAGTAGTAAACAGTCACTTAACAAACTTGTTGAAAAATTAGATTCGGAAGAAAGTTCGACTTTTCCAGAGCTCGAATTTTTTGGTCAAATGCATGGGACCTACTTATTTGCTCAAGGGAATGGTGGGTTGTATATTATTGATCAACATGCAGCTCAAGAGCGTGTAAAATACGAGTATTACCGTGAAAAGATAGGTGAGGTTGATAATAGTCTTCAACAATTGTTAGTACCATTTCTATTTGAATTTTCAAGTTCAGATTTTCTTCAATTACAAGAAAAAATGTCATTATTACAAGATGTTGGTATTTTCTTGGAACCGTATGGTAATAATACTTTCATTTTAAGGGAACATCCAATTTGGATGAAAGAAGAAGAGGTAGAGTCTGGCATTTATGAAATGTGTGATATGTTGTTGCTCANNNNNCATTCATTCATTAATTAA

SEQ ID NO: 3786 - protein, 384 aa, Streptococcus agalactiae
  VARIANT 378, 379: Xaa = Any Amino Acid
MTKTSGTGDLRQAIAGIYGLNTAKKMIEISNADLDFEISGYVSLPELTRANRNYITLLINGRYIKNFLLNRSILDGYGSKLMVGRFPIAVIDIQIDPYLADVNVHPTKQEVRISKERELMSLISTAISESLKQYDLIPDALENLAKTSTRSVDKPIQTSFSLKQPGLYYDRAKNDFFIGADTVSEPIANFTNLDKSDGSVDNDVKNSVNQGATQSPNIKYASRDQADSENFIHSQDYLSSKQSLNKLVEKLDSEESSTFPELEFFGQMHGTYLFAQGNGGLYIIDQHAAQERVKYEYYREKIGEVDNSLQQLLVPFLFEFSSSDFLQLQEKMSLLQDVGIFLEPYGNNTFILREHPIWMKEEEVESGIYEMCDMLLLXXHSFIN

SEQ ID NO: 3787 - protein, 171 aa, Streptococcus agalactiae
ATGNNNNNTTTTGGCTTTATTTCTAGCGAAACTGGAACAGACGTCTTCGCTCATTTTTCAGAGATTAAAGTTGATGGCTTCAAAACTCTTGAAGAAGGACAAAAAGTAACATTTGATATTCAAGATGGTCAACGTGGACCACAAGCAACAAATATCAATCTTGTTAAATAA

SEQ ID NO: 3788 - protein, 56 aa, Streptococcus agalactiae
  VARIANT 2, 3: Xaa = Any Amino Acid
MXXFGFISSETGTDVFAHFSEIKVDGFKTLEEGQKVTFDIQDGQRGPQATNINLVK

SEQ ID NO: 3789 - protein, 2577 aa, Streptococcus agalactiae
ATGGCCAAGCCAACGATATCACCGGGAATGCAACAGTATCTGGATATAAAAGAGAATTATCCAGATGCTTTTTTGCTTTTTAGAATGGGTGATTTTTATGAATTATTTTATGATGATGCGGTAAAAGCAGCACAAATCCTGGAAATTAGCTTGACTAGTCGAAATAAGAACGCAGAAAAGCCAATCCCAATGGCAGGAGTTCCCTATCACTCAGCTCAACAGTATATTGACGTTTTAGTTGAATTAGGTTACAAAGTAGCCATTGCTGAGCAGATGGAAGATCCTAAAAAAGCTGTGGGAGTGGTCAAGCGTGAGGTAGTGCAAGTTGTTACCCCAGGAACGGTTGTGGAGTCAACGAAGCCGGATAGTGCTAATAATTTCTTAGTAGCGATTGATTCGCAAGATCAACAAACATTTGGTCTAGCATATATGGATGTCTCAACTGGAGAGTTTCAGGCAACCCTTTTAACAGATTTTGAGTCCGTCCGTAGTGAAATACTAAATTTAAAAGCTCGTGAGATTGTAGTAGGATATCAATTGACGGACGAAAAAAATCACCTACTGACGAAGCAGATGAACTTGCTTTTATCATACGAAGACGAACGACTTAATGATATTCATTTGATTGATGAGCAGTTAACTGATTTGGAAATATCTGCTGCGGAAAAACTTTTACAATATGTGCATAGAACACAAAAGCGTGAACTTAGTCATTTACAGAAAGTAGTTCATTATGAAATAAAGGACTATTTACAAATGTCATATGCAACGAAAAATAGTCTAGATTTACTGGAGAATGCTAGAACAAGCAAGAAGCATGGAAGTCTTTACTGGTTGTTAGATGAGACTAAAACAGCGATGGGAACTCGAATGCTGAGAACTTGGATTGACAGGCCTTTGGTAAGTATGAATCGAATCAAGGAACGTCAAGATATTATTCAAGTGTTTCTTGATTATTTTTTTGAGAGAAACGATCTCACAGAAAGTTTAAAGGGTGTATATGATATTGAACGCCTAGCAAGTCGAGTATCTTTCGGAAAAGCCAACCCTAAAGATCTATTGCAACTCGGACAGACCTTATCACAAATTCCTCGGATTAAAATGATTTTACAGTCCTTCAATCAACCTGAGCTTGACATCATTGTCAACAAAATTGACACTATGCCTGAATTAGAAAGTTTAATTAATACGGCGATAGCCCCAGAAGCACAGGCTACTATCACTGAGGGAAACATTATCAAGTCTGGATTTGATAAGCAATTGGATAATTATCGAACAGTGATGCGTGAAGGTACAGGTTGGATTGCTGATATTGAAGCTAAGGAAAGAGCAGCAAGTGGTATCGGTACTCTTAAAATTGATTATAATAAAAAAGACGGTTATTACTTCCATGTTACCAATTCCAATTTATCACTAGTACCGGAGCATTTTTTCCGTAAAGCGACATTAAAAAATTCTGAACGCTATGGAACAGCAGAACTAGCCAAAATTGAAGGTGAAATGCTCGAAGCTCGCGAGCAATCTTCAAATTTAGAATATGATATTTTTATGCGTGTTCGTGCCCAAGTAGAATCTTATATTAAACGTCTTCAAGAGTTAGCAAAGACGATTGCAACCGTTGATGTTCTACAGAGTTTGGCAGTAGTTGCAGAAAATTATCACTATGTTCGTCCCAAATTTAATGATCAACATCAGATTAAGATTAAGAATGGGCGTCATGCAACTGTTGAAAAAGTGATGGGAGTGCAAGAATATATTCCCAATAGCATCTATTTTGATAGTCAGACAGATATCCAGTTGATTACAGGACCAAATATGAGTGGTAAGTCGACCTATATGCGCCAGTTAGCTTTGACAGTTATTATGGCACAAATGGGAGGTTTTGTATCGGCAGACGAAGTTGATTTGCCTGTATTTGATGCAATATTTACTAGGATTGGTGCTGCTGACGACTTAATTTCTGGGCAATCAACCTTTATGGTAGAAATGATGGAAGCGAATCAAGCTGTAAAACGAGCCAGTGATAAATCTTTGATTCTTTTTGATGAATTAGGTCGAGGGACAGCCACTTATGATGGTATGGCATTAGCTCAATCGATTATAGAATATATTCATGACCGTGTTAGGGCAAAAACAATGTTTGCGACTCATTACCATGAGTTGACAGATTTATCTGAACAGTTGACAAGGCTTGTCAATGTACACGTGGCTACTTTAGAGAGAGATGGAGAAGTTACCTTCTTACATAAAATTGAATCTGGACCTGCGGATAAGTCTTATGGGATACACGTCGCAAAAATAGCTGGTTTACCAATTGACTTATTGGATAGGGCAACTGATATTTTATCACAGTTGGAAGCTGATGCAGTACAGTTGATCGTATCGCCCTCCCAAGAAGCTGTTACTGCTGACTTAAATGAGGAACTAGATTCTGAGAAGCAACAAGGACAATTATCGCTTTTTGAAGAACCTTCAAATGCAGGTAGGGTTATTGAGGAGTTAGAAGCGATAGATATAATGAATCTAACTCCAATGCAAGCTATGAATGCTATATTTGACTTAAAGAAATTATTATAA

SEQ ID NO: 3790 - protein, 858 aa, Streptococcus agalactiae
MAKPTISPGMQQYLDIKENYPDAFLLFRMGDFYELFYDDAVKAAQILEISLTSRNKNAEKPIPMAGVPYHSAQQYIDVLVELGYKVAIAEQMEDPKKAVGVVKREVVQVVTPGTVVESTKPDSANNFLVAIDSQDQQTFGLAYMDVSTGEFQATLLTDFESVRSEILNLKAREIVVGYQLTDEKNHLLTKQMNLLLSYEDERLNDIHLIDEQLTDLEISAAEKLLQYVHRTQKRELSHLQKVVHYEIKDYLQMSYATKNSLDLLENARTSKKHGSLYWLLDETKTAMGTRMLRTWIDRPLVSMNRIKERQDIIQVFLDYFFERNDLTESLKGVYDIERLASRVSFGKANPKDLLQLGQTLSQIPRIKMILQSFNQPELDIIVNKIDTMPELESLINTAIAPEAQATITEGNIIKSGFDKQLDNYRTVMREGTGWIADIEAKERAASGIGTLKIDYNKKDGYYFHVTNSNLSLVPEHFFRKATLKNSERYGTAELAKIEGEMLEAREQSSNLEYDIFMRVRAQVESYIKRLQELAKTIATVDVLQSLAVVAENYHYVRPKFNDQHQIKIKNGRHATVEKVMGVQEYIPNSIYFDSQTDIQLITGPNMSGKSTYMRQLALTVIMAQMGGFVSADEVDLPVFDAIFTRIGAADDLISGQSTFMVEMMEANQAVKRASDKSLILFDELGRGTATYDGMALAQSIIEYIHDRVRAKTMFATHYHELTDLSEQLTRLVNVHVATLERDGEVTFLHKIESGPADKSYGIHVAKIAGLPIDLLDRATDILSQLEADAVQLIVSPSQEAVTADLNEELDSEKQQGQLSLFEEPSNAGRVIEELEAIDIMNLTPMQAMNAIFDLKKLL

SEQ ID NO: 3791 - DNA, 438 bp, Streptococcus agalactiae
atgaataaaatagaacgccaaaaacgtattaaacgtttgatccaatcagggcagattggcacacaagaagaaattaaattacatttaaaaaatgaaggaatcgatgtcacgcaagcgactctatcaagagacttgcgtgagattggtcttttaaaattacgtagcccagaaggtaagctatattatagtttatcaacagctacttcaaatcgatttagcccagccttacgctcatatattttgaaagtatcgcgagcaagttttatgttagttttaaatactaatttaggggaggctagcgttttagcaaactttattgatgagaaagggctgccagagattttaggaacaatggcaggagcagacaccttgttggtgatttgtcaaaatgaagatattgccaaagtttttgaaaaagaactatcagtaggtttataa

SEQ ID NO: 3792 - protein, 145 aa, Streptococcus agalactiae
MNKIERQKRIKRLIQSGQIGTQEEIKLHLKNEGIDVTQATLSRDLREIGLLKLRSPEGKLYYSLSTATSNRFSPALRSYILKVSRASFMLVLNTNLGEASVLANFIDEKGLPEILGTMAGADTLLVICQNEDIAKVFEKELSVGL

SEQ ID NO: 3793 - DNA, 1692 bp, Streptococcus agalactiae
atggatacaaaacatctaattgcgagtgaaattcaaaaagttgttccagatatggaacaatcgaccattctttctttattagaaaccccaaaaaattcgagcatgggagatttagctttcccagcattctctttggctaaaactctacgcaaagcacctcaaataattgctagtgacattgctgaacaaattaaaagcgaccaatttgaaaaggtggaagctgttggaccttacgttaactttttccttgataaagccgcaatctcaagtcaagttttaaaacaagtcttatctgatggttctgcctatgctactcaaaatattggtgaaggacgaaatgttgccattgacatgtctagtccaaatattgctaagccattctcaattggacaccttcgttcaacagttattggtgatagtttagctaatatttttgataaaattggctatcatcctgttaaaattaatcaccttggcgactggggtaaacaatttggaatgttaatcgttgcctataaaaaatggggcaatgaagaggctgtccgtgctcatcccatcgatgaacttttaaaactttatgtccgtattaatgctgaagccgagacagaccctagcgttgatgaagaggcacgtgagtggtttcgtaaacttgaagctaacgatcctgaagcaactgaattatggcaatggttccgtgacgagtcattattagaattcaaccgtctttacgatcaaatgaatgttacatttgatagctataacggcgaggcattctacaacgacaaaatggatgaagtgcttgaactgctagaatctaaaaacctcctagtcgaatctaaaggtgcacaagttgttaacctagaaaaatacggtattgaacatcctgccctcattaaaaaatccgatggagcaactctctacattacacgtgacttagctgctgcactttaccgtaaacgtacctacgattttgcaaaatcaatctacgttgtaggaaacgaacagtctgcacactttaagcaactaaaagctgtgcttaaagaaatggactacgattggtccgatgatatgactcatgttccttttggccttgtaacaaaaggaggagcaaaattatcaactcgtaaaggaaatgtaattctacttgaacctactgttgcagaagctattaatcgtgcggcatctcagattgaagctaaaaaccctaacctagcagataaagataaagttgctcaagcagttggtgtaggtgctattaaattttacgatttgaaaactgatcgtacaaatggttatgactttgacttagaagcaatggtatcatttgaaggtgaaactgggccatatgtacaatatgcacatgctcgtattcaatcaatcttacgtaaagctaactttagcccatctaatagcgataattacagtctcaacgatgttgaaagctgggaaatcatcaaactcatccaagattttcctcgtattattgtacgtgcggcagataattttgagccctctattattgcaaaattcgctattaatttagctcagtgcttcaataaatattacgcccacacacgtattttagatgaagacgctgaaatcagtagtcgtctagcactttgctatgcaactgctacagtattaaaagaatctcttcgcctcctaggagttgatgctccgaatgaaatgtaa

SEQ ID NO: 3794 - protein, 563 aa, Streptococcus agalactiae
MDTKHLIASEIQKVVPDMEQSTILSLLETPKNSSMGDLAFPAFSLAKTLRKAPQIIASDIAEQIKSDQFEKVEAVGPYVNFFLDKAAISSQVLKQVLSDGSAYATQNIGEGRNVAIDMSSPNIAKPFSIGHLRSTVIGDSLANIFDKIGYHPVKINHLGDWGKQFGMLIVAYKKWGNEEAVRAHPIDELLKLYVRINAEAETDPSVDEEAREWFRKLEANDPEATELWQWFRDESLLEFNRLYDQMNVTFDSYNGEAFYNDKMDEVLELLESKNLLVESKGAQVVNLEKYGIEHPALIKKSDGATLYITRDLAAALYRKRTYDFAKSIYVVGNEQSAHFKQLKAVLKEMDYDWSDDMTHVPFGLVTKGGAKLSTRKGNVILLEPTVAEAINRAASQIEAKNPNLADKDKVAQAVGVGAIKFYDLKTDRTNGYDFDLEAMVSFEGETGPYVQYAHARIQSILRKANFSPSNSDNYSLNDVESWEIIKLIQDFPRIIVRAADNFEPSIIAKFAINLAQCFNKYYAHTRILDEDAEISSRLALCYATATVLKESLRLLGVDAPNEM

SEQ ID NO: 3795 - DNA, 309 bp, Streptococcus agalactiae
atgccatcagaaaaagaaatattagatgctcttagtaaagtttatagcgaagaagtaatacaagcagatgattattttcgtcaagctattttcgagctcgctagtcaacttgaaaaagaggggatgaactcactcctagctacaaaaattgactcacttatcaatcaatacgtcttaacacatcaatttgatgctcctaaaagcatatttgatcttagtcgcttggtaaaaacaaaagctagccattacaagggaactgctatctcagctattatgcttggtagtttcttaagtggaggaccaaaataa

SEQ ID NO: 3796 - protein, 102 aa, Streptococcus agalactiae
MPSEKEILDALSKVYSEEVIQADDYFRQAIFELASQLEKEGMNSLLATKIDSLINQYVLTHQFDAPKSIFDLSRLVKTKASHYKGTAISAIMLGSFLSGGPK

SEQ ID NO: 3797 - DNA, 873 bp, Streptococcus agalactiae
atgttgaaactggatttaaaaacaaagataaaagaaactattttaattgcctttggtgtggctctctatactttcggctttgtcaaatttaatatggctaatcatttggctgaaggaggtatttccggtgtcactttgattatccatgcacttttcggagttaatccagcactttcatcacttctccttaatatcccgttatttatattaggggctaggattttagggaaaaaatccttattgttaactatatatggtacagtgttaatgtcttttttcatgtggttttggcaacaaatccctgtaacagtccctttgaaaaacgatatgatgttagttgcagtagctgctggaattttagcaggaactggtagtggtttagtatttagatatggtgcaactacaggtggtgcagatattattggtcgtattgtagaggaaaaatctggaataaaattagggcaaaccttattgtttattgatgctatagttctaacgtcttcacttgtttatattaatttacaacagatgctatatacgttagtagctagctttgtatttagtcaagtgttaacaaatgttgaaaatgggggctacactgttcgtggaatgatcattattaccaaagaatcagaatctgcagcagcaaccattttgcatgaaattaataggggtgtaacttttttacggggccaaggtgcctactcaggtagagagcatgatgtcttgtacgtagctcttaacccaagtgaagtgcgtgatgtgaaagaaatcatggctgatttagacccagatgcttttatttctgttataaatgtagatgaagttattagctcagattttaaaattcgacgaagaaattacgataaataa

SEQ ID NO: 3798 - protein, 290 aa, Streptococcus agalactiae
MLKLDLKTKIKETILIAFGVALYTFGFVKFNMANHLAEGGISGVTLIIHALFGVNPALSSLLLNIPLFILGARILGKKSLLLTIYGTVLMSFFMWFWQQIPVTVPLKNDMMLVAVAAGILAGTGSGLVFRYGATTGGADIIGRIVEEKSGIKLGQTLLFIDAIVLTSSLVYINLQQMLYTLVASFVFSQVLTNVENGGYTVRGMIIITKESESAAATILHEINRGVTFLRGQGAYSGREHDVLYVALNPSEVRDVKEIMADLDPDAFISVINVDEVISSDFKIRRRNYDK

SEQ ID NO: 3799 - DNA, 945 bp, Streptococcus agalactiae
atgaaaactagacgaacccctttagaaaaaaaggtaaaatatattatcagtgtatgggctaaaaaatttggtctcttacacactttaaaaagtatctcacgagaaaaatatgcagagaaaatttcggcttcattgctgtatggtattctatccagtgttgctgtcaatttcttttttcaacctggacatgtttattcaagtggagcaactggtttagctcaggttatttcagctgtcagtaaacactggttttcttttgaaataccagttgctttagctttttatgccattaatatccctttgctgatattatcttggcgtaagattggacataaatttactatttttacgtttatcacagtaactgtaagctctatcttcattcaactaatgcctcaaatcacccttacaactgatcccttaatcaatgctatctttggtggtttaattatgggagctggtgttggttttagctttaagtctagaatttctagtgggggaacagatattatcagtttgacaattagaaagaaaacaggcagagatgtaggtagtatttcttttattattaatggtattattttattatttgcaggtcttttatttggttggaagtacgctttgtactcgatggtgaccatttttgtatcaagtagagttacagatgccatttttacaaagcaaaaaaagatgcaagcgatgattgttaccagtaagcctgattgcgtcattaaacgtatccatcgtgatttacatcgtggtgtaacctgtatcaatgatgctgaaggtacttataatcatgagaaaaaagcagttttaataactatattaacacgtgaagaatttagtgattttaaatatttaatgctaaaagcggatccaaaagcctttgtttccgttgcagaaaatgttcatattattggacgattcgttgatgatgattaa

SEQ ID NO: 3800 - protein, 314 aa, Streptococcus agalactiae
MKTRRTPLEKKVKYIISVWAKKFGLLHTLKSISREKYAEKISASLLYGILSSVAVNFFFQPGHVYSSGATGLAQVISAVSKHWFSFEIPVALAFYAINIPLLILSWRKIGHKFTIFTFITVTVSSIFIQLMPQITLTTDPLINAIFGGLIMGAGVGFSFKSRISSGGTDIISLTIRKKTGRDVGSISFIINGIILLFAGLLFGWKYALYSMVTIFVSSRVTDAIFTKQKKMQAMIVTSKPDCVIKRIHRDLHRGVTCINDAEGTYNHEKKAVLITILTREEFSDFKYLMLKADPKAFVSVAENVHIIGRFVDDD

SEQ ID NO: 3801 - protein, 1752 aa, Streptococcus agalactiae
ATGAAACGTAGTATGTATGCTGGGCGTGTTCGTAGTGAGCACATAGGAACATCGATTACTTTAAAAGGATGGGTTGGTCGTCGTCGTGACCTTGGAGGCCTTATTTTTATTGATCTTCGCGATCGCGAGGGAATCATGCAATTAGTTATTAATCCTGAAGAAGTATCAGCCTCAGTTATGGCAACCGCAGAAAGTCTCCGTAGTGAATTTGTTATAGAGGTTAGCGGTGTAGTGACAGCACGAGAACAAGCTAATGATAATTTACCAACAGGAGAAGTTGAATTAAAAGTGCAAGAATTATCGATTCTTAATACCTCGAAAACAACACCATTTGAAATTAAAGATGGTATTGAGGCAAATGATGATACACGCATGCGTTACCGTTACTTGGATCTTCGTCGTCCGGAAATGCTTGAAAATTTCAAATTACGTGCGAAAGTAACACACTCAATCCGTAATTACCTTGACAACTTAGAGTTTATTGATGTCGAAACTCCGATGCTAACAAAATCAACTCCAGAGGGGGCACGAGACTATTTGGTTCCATCACGTGTCAACCAAGGACATTTTTATGCCCTTCCACAAAGCCCTCAAATTACAAAACAGCTATTGATGAATGCGGGATTTGATCGTTATTATCAAATTGTCAAATGTTTCCGTGATGAGGATTTACGTGGAGACCGTCAACCTGAGTTTACACAAGTTGACTTAGAGACATCATTCCTTAGTGATCAAGAAATTCAAGACATTGTTGAGGGTATGATTGCTAAAGTAATGAAAGACACTAAAGGTTTAGAGGTTTCTTTACCATTCCCAAGGATGGCATATGATGATGCAATGAATAACTACGGGTCTGATAAGCCTGATACAAGGTTTGATATGCTTTTACAAGACTTGACAGAAATTGTCAAAGAAGTTGACTTCAAGGTGTTCTCAGAAGCTTCAGTAGTTAAAGCGATTGTTGTCAAAGATAAGGCGGACAAGTACTCTCGAAAAAATATTGATAAATTAACAGAAATTGCAAAACAATACGGTGCCAAAGGTTTAGCATGGCTAAAATATGCAGATAATACTATTTCAGGTCCGGTTGCTAAGTTCTTGACAGCTATTGAAGGTAGGTTGACAGAAGCTTTACAGCTAGAGAATAATGACTTAATTCTATTTGTAGCAGATAGTCTTGAAGTAGCTAACGAGACTTTAGGAGCGCTTCGTACACGCATTGCAAAAGAACTTGAACTCATTGATTATTCTAAATTTAATTTCCTATGGGTTGTTGATTGGCCAATGTTTGAGTGGTCAGAAGAAGAGGGACGATATATGTCGGCTCATCATCCATTCACCTTGCCAACAGCGGAGACAGCGCATGAGTTGGAAGGGGATTTGGCTAAAGTACGTGCAGTTGCCTATGATATTGTTTTGAATGGATATGAGTTAGGCGGTGGTAGCCTACGTATTAACCAAAAAGATACACAAGAGCGTATGTTCAAGGCTTTAGGATTTAGCGCTGAATCAGCTCAGGAACAGTTTGGTTTCTTACTTGAAGCTATGGATTACGGCTTCCCACCACATGGTGGATTGGCAATAGGCCTTGACCGCTTTGTTATGTTGTTAGCAGGCAAGGACAATATTCGAGAAGTTATTGCATTCCCTAAAAACAATAAGGCTAGTGATCCAATGACTCAAGCTCCTAGTCTCGTTTCAGAACAACAATTAGAAGAATTATCACTTACTGTAGAAAGTTATGAAAACTAG

SEQ ID NO: 3802 - protein, 583 aa, Streptococcus agalactiae
MKRSMYAGRVRSEHIGTSITLKGWVGRRRDLGGLIFIDLRDREGIMQLVINPEEVSASVMATAESLRSEFVIEVSGVVTAREQANDNLPTGEVELKVQELSILNTSKTTPFEIKDGIEANDDTRMRYRYLDLRRPEMLENFKLRAKVTHSIRNYLDNLEFIDVETPMLTKSTPEGARDYLVPSRVNQGHFYALPQSPQITKQLLMNAGFDRYYQIVKCFRDEDLRGDRQPEFTQVDLETSFLSDQEIQDIVEGMIAKVMKDTKGLEVSLPFPRMAYDDAMNNYGSDKPDTRFDMLLQDLTEIVKEVDFKVFSEASVVKAIVVKDKADKYSRKNIDKLTEIAKQYGAKGLAWLKYADNTISGPVAKFLTAIEGRLTEALQLENNDLILFVADSLEVANETLGALRTRIAKELELIDYSKFNFLWVVDWPMFEWSEEEGRYMSAHHPFTLPTAETAHELEGDLAKVRAVAYDIVLNGYELGGGSLRINQKDTQERMFKALGFSAESAQEQFGFLLEAMDYGFPPHGGLAIGLDRFVMLLAGKDNIREVIAFPKNNKASDPMTQAPSLVSEQQLEELSLTVESYEN

SEQ ID NO: 3803 - protein, 1281 aa, Streptococcus agalactiae
ATGAAACTTCAAAAACCAAAAGGGACTCAGGATATCTTACCTGGAGAATCAGCAAAGTGGCAATACGTTGAAAATGTTATACGCAATCTCTTTAAACAATATCATTATGATGAAATTCGTACACCAATGTTTGAACATTACGAGGTTATTAGTCGCTCAGTTGGGGATACAACGGATATCGTTACAAAAGAGATGTATGATTTTCATGATAAAGGAGATCGTCACATTACGCTTCGTCCAGAAGGAACAGCACCTGTTGTACGTTCTTATGTTGAAAATAAACTATTTGCACCAGAAGTTCAAAAACCAACCAAAATGTATTATATTGGATCAATGTTCCGATATGAGCGCCCACAGGCTGGTCGTTTACGAGAATTTCATCAAGTAGGCGTTGAGTGCTTTGGATCAAATAATCCAGCAACTGATGTTGAAACAATCGCAATGGGACATCATCTATTTGAAGATTTAGGTATCAAAAACGTTAAACTTCATCTTAATAGTTTAGGGAATCCAGAAAGTCGTCAGGCCTATCGCCAAGCTCTTATTGATTACTTAACACCCATACGTGAACAATTGTCTAAGGATAGTCAACGTCGTTTGAATGAAAATCCATTGCGCGTACTAGACTCTAAGGAGCCAGAAGACAAACTAGCAGTTGAAAATGCTCCTTCTATTTTAGATTATTTAGATGAGTCAAGCCAAGCCCACTTTGATGCTGTGTGTCATATGCTTGATGCTCTAAATATTCCATACATCATTGATACTAATATGGTTCGTGGTCTTGATTATTATAATCATACTATTTTTGAGTTTATCACTGAGATTGAAGATAATGAATTAACGATCTGTGCTGGAGGCCGTTATGACGGCTTAGTATCCTATTTTGGTGGACCAGAAACACCAGCATTTGGTTTTGGATTAGGATTAGAACGCTTGCTCTTAATATTAGATAAGCAAGGGATTTCTTTACCAATAGAAAATACTATAGATCTGTATATAGCTGTATTAGGATCAGAGGCTAATCTAGCTGCCTTAGATTTGGCACAATCAATACGTCATCAGGGTTTTAAAGTAGAGCGTGATTATTTGGGTCGTAAAATCAAAGCACAATTTAAGTCTGCAGATACTTTTAATGCTAAAGTGATTATGACATTAGGTAGCAGTGAAGTAGATTCGAAAGAGGTCGGTTTAAAAAATAATCAAACACGTCAAGAAGTTAAAGTTAGTTTTGAAAACATTAAAACAGATTTTTCATCTGTGCTTAAACAATTAGGATTGTAA

SEQ ID NO: 3804 - protein, 426 aa, Streptococcus agalactiae
MKLQKPKGTQDILPGESAKWQYVENVIRNLFKQYHYDEIRTPMFEHYEVISRSVGDTTDIVTKEMYDFHDKGDRHITLRPEGTAPVVRSYVENKLFAPEVQKPTKMYYIGSMFRYERPQAGRLREFHQVGVECFGSNNPATDVETIAMGHHLFEDLGIKNVKLHLNSLGNPESRQAYRQALIDYLTPIREQLSKDSQRRLNENPLRVLDSKEPEDKLAVENAPSILDYLDESSQAHFDAVCHMLDALNIPYIIDTNMVRGLDYYNHTIFEFITEIEDNELTICAGGRYDGLVSYFGGPETPAFGFGLGLERLLLILDKQGISLPIENTIDLYIAVLGSEANLAALDLAQSIRHQGFKVERDYLGRKIKAQFKSADTFNAKVIMTLGSSEVDSKEVGLKNNQTRQEVKVSFENIKTDFSSVLKQLGL

SEQ ID NO: 3805 - protein, 183 aa, Streptococcus agalactiae
ATGGCAGTACCTGCACGTCACACTTCAAAAGCGAAGAAAAACAAACGTCGTACACACTACAAATTGACAGCTCCATCTGTACAATTCGACGAAACTACTGGAGATTACTCACGTTCACACCGTGTATCACTCAAAGGATACTACAAAGGACGTAAAATCGCTAAAGCTAACGAAGCTAAATAA

SEQ ID NO: 3806 - protein, 60 aa, Streptococcus agalactiae
MAVPARHTSKAKKNKRRTHYKLTAPSVQFDETTGDYSRSHRVSLKGYYKGRKIAKANEAK

SEQ ID NO: 3807 - protein, 150 aa, Streptococcus agalactiae
ATGCGCGTAAATATTACACTTGAACATAAAGAATCTGGTGAACGCTTGTACCTTACTTCAAAAAACAAACGTAACACTCCAGACCGTCTTCAATTGAAAAAATACTCACCAAAACTTCGTAAACACGTTGTTTTCACTGAAGTTAAATAA

SEQ ID NO: 3808 - protein, 49 aa, Streptococcus agalactiae
MRVNITLEHKESGERLYLTSKNKRNTPDRLQLKKYSPKLRKHVVFTEVK

SEQ ID NO: 3809 - protein, 672 aa, Streptococcus agalactiae
ATGACAAACTATAAAAACAACTTTAAAAAATTCATGAGCAATAAATTATACGTAGGGTTAGCTTCCATTACGCTACTTGGTATTGGGGGAGCTATAGGAGTAAGTGGAGCTGCATTAGCGCATAACCATCACTCAGAACACATGTCTTTTGAACATAAGCATGAAGGACACGATAAACATCACGATCATAGAGAAAAATACTCACTAAAAACATTAAAGAATATCTCGACAAAAATCGATTATAAGACTGCCTTAGAAACTGCCAAAAAAGAAGCTCGCTCAGGCTTTATTTCACAAATTGAATTAAATACCAAAGGTGATACACCTTTTTATGAAATCAAAGTTATTGATAATAAAATAGCTAAAAAATATAAAATTGATGCTAATTCTGGGAAGATCCTTTCAACAACATCAGATAATCAACTCAATTCAAAAGATGCCCAATTAAAACAACCAAGTAAAGATATTCAGACTGCATTACAAGCTATTCAAGCAAAATATAAAAATGCAAAAATAAAAGAAATTTCTCTTGCGAATAACAAATCAAATAAGCTAGTTTATAAAGTAAAACTACTTGATGGAAATACTCCTAAGATTGCCCAATTTGATAGTGATAAAGCATCATTTATAAAGGCAAATAAGCTTAATACAACTCATAAAAATCACGACTAA

SEQ ID NO: 3810 - protein, 223 aa, Streptococcus agalactiae
MTNYKNNFKKFMSNKLYVGLASITLLGIGGAIGVSGAALAHNHHSEHMSFEHKHEGHDKHHDHREKYSLKTLKNISTKIDYKTALETAKKEARSGFISQIELNTKGDTPFYEIKVIDNKIAKKYKIDANSGKILSTTSDNQLNSKDAQLKQPSKDIQTALQAIQAKYKNAKIKEISLANNKSNKLVYKVKLLDGNTPKIAQFDSDKASFIKANKLNTTHKNHD

SEQ ID NO: 3811 - protein, 672 aa, Streptococcus agalactiae
ATGAAAATCCTTGTTGTTGAAGATGAGTTTGACTTGAACCGTAGTATTGTAAAACTTTTAAAAAAGCAACACTACAGTGTTGACAGTGCTTCAAATGGTGAAGAAGCCTTACAATTTGTTTCAGTGGCAGAATATGATGTGATTATCTTAGATGTAATGATGCCAAAAATGGACGGCTTCACCTTTTTAAAACTGCTTCGCAACAAAGGAAGTCAAGTATCTATTCTTATGTTGACTGCTCGAGATGCCGTTGAAGATCGTATCGCAGGTCTAGATTTTGGTGCGGATGATTACCTTGTAAAACCATTTGAATTTGGAGAACTCATGGCCCGAATTCGAGCTATGTTACGACGTGCAAATAGACAAGTATCTTCTGATGATATTCAAATTCAAGATATAACAATCAATTTATCTACAAAGCAAGTTTGGAGAAACGACAATTTGATTGATTTAACAGCTAAGGAATACGAAGTCCTTGAGTATTTGGCACGTCACAGAGACCAAGTCCTCTCTCGTCATCAAATTCGTGAACACGTTTGGGATTATGATTATTATGGAGAGTCCAATATTATTGATGTCCTTATCAAAAACCTTCGTCGAAAACTAGATAACAATCGAGATGGATCACTAATAAAAACTAAACGAGGTTTAGGATATGTTATTCCAAAGTAA

SEQ ID NO: 3812 - protein, 223 aa, Streptococcus agalactiae
MKILVVEDEFDLNRSIVKLLKKQHYSVDSASNGEEALQFVSVAEYDVIILDVMMPKMDGFTFLKLLRNKGSQVSILMLTARDAVEDRIAGLDFGADDYLVKPFEFGELMARIRAMLRRANRQVSSDDIQIQDITINLSTKQVWRNDNLIDLTAKEYEVLEYLARHRDQVLSRHQIREHVWDYDYYGESNIIDVLIKNLRRKLDNNRDGSLIKTKRGLGYVIPK

SEQ ID NO: 3813 - protein, 1113 aa, Streptococcus agalactiae
ATGTTATTCCAAAGTAAAATAAATTACCCTAAAAAGTCTAGCATCATCACTCAAATTACCCTCTGGTACAGCTCTTTTATTTTTATCCTTGTTATCGGTGTATTAATTGGTTCATTTTTTATTTCAAAAAGCATTGCTGAAAACAAATCTAAAAAAAATTTAGAAGCTAAAGCTGTGCAAATGAGTCAAGCGTTAGCTAAAGGTCATCGGTATGAGGCTTTTGAAGATGGAATATTTTATTCAGTCTATGACCAAAATGGAAAAGTTATCTATTCTGGTTTTCCAAAAGGATTTAAAAGGGATTTAGACCATCAACATAAACATAAAAAGAAATTATCTCTATTTTCCATGGAGAATCGTACCTTTCAGTATGTTGATATTCCAATTTCTGGGAAAAATCAGTGGTTACGTGCTATCCGTACTGTTGACAGACTGGATAAGCAATTAACTGAATTGTTATTTAGTTTGGGTATCGTTCTTCCTCTTATGTTGATTATAATAACTGTTGGTGGCTATTTAATTTTAAAGCGCACTTTTAGACCGATTCAAGAAATTACTGAAACCGCTCAATTTATTACCCAAAATGAAGACTATACTAAGCGAATTATCACTAAAAATAACGAAAATGAATTAACTGAGCTAGCAGCTGTTATCAATACTATGTTGGCTTCTATTGAATCATCATTTGTTCGGGAAAAACAATTTAACAATGATGTTTCTCATGAACTACGGACTCCTGTAACAGTTATACTTTCTGAAAGTGAATACGGAAAAAACTACGCAGAAAATTTAAGTGAAGCAAAAGAATCCTTTGAGGTTATACACCGTCAGTCACTATCAATGAAAAAATTAGTTGAGCAACTTCTAGAATTGACTAAGGCAGAAAATCCATTATCAATTCAGTTAGAACCTCTTAATTTCTCAATTATGATGAAGCAACTAGTATCCGATTCGAGTAGATTATTAGATAATACCCCTATACACCTTGACTCTCAAATCGAAGATGACCTTTGGATTATAGGTCAACAAACACTACTCAAACGGCTTTTTGATAATCTATTTTCAAATGCTATTAAATTTACAAANNNNNCATTCCATTCATTAATTAATTAA

SEQ ID NO: 3814 - protein, 370 aa, Streptococcus agalactiae
  VARIANT 362, 363, 364: Xaa = Any Amino Acid
MLFQSKINYPKKSSIITQITLWYSSFIFILVIGVLIGSFFISKSIAENKSKKNLEAKAVQMSQALAKGHRYEAFEDGIFYSVYDQNGKVIYSGFPKGFKRDLDHQHKHKKKLSLFSMENRTFQYVDIPISGKNQWLRAIRTVDRLDKQLTELLFSLGIVLPLMLIIITVGGYLILKRTFRPIQEITETAQFITQNEDYTKRIITKNNENELTELAAVINTMLASIESSFVREKQFNNDVSHELRTPVTVILSESEYGKNYAENLSEAKESFEVIHRQSLSMKKLVEQLLELTKAENPLSIQLEPLNFSIMMKQLVSDSSRLLDNTPIHLDSQIEDDLWIIGQQTLLKRLFDNLFSNAIKFTXXXFHSLIN

SEQ ID NO: 3815 - protein, 1554 aa, Streptococcus agalactiae
ATGCCAGAAAAAATGACAAACAGTGAAAACAAAAGGAGTAAAGGTTTTCGAATGCCAGGTGCCTTTACAATATTATTCATTTTAACAATCTTTTCGGTTTTGGCTACATGGTGGATACCTGCTGGGTCCTATTCAAAATTACAATTTGATACAGCATCATCCAAACTAGTAGTAACAGATCCAAATGGTAAGACAGTTCATGTTCCAGCAACGCAAACACAGTTGGATAAGATGAATGTCAAAATTAAAATTAAAGAATTTACTTCTGGTGCTATTAGTAAGCCAGTTTCAGTTCCAAATACTTACAAACGTTTGAAGCAAAATCCAGCAGGCATTGGCTCCGTGACGACTAGTATGGTAAATGGAACCATTGAAGCTGTTGATATTATGGTATTTATCATGGTACTTGGAGGCATGATAGGAGTAGTTAGAAAGAGTGGCGCTTTTGAGTCTGGTCTTCTAGCTTTAACAAAGAAAACCAAAGGTAGAGAGTTTTTATTGATATTTTTAGTTTCCTTATTGATGGTTTTAGGCGGTACTCTATGTGGTATTGAAGAAGAAGCAGTTGCTTTTTATCCTATTTTAGTTCCAATCTTTTTAGCCATGGGTTATGATTCTATCATTTGTGTAGGTGCTATTTTCTTAGCAAGTTCTGTTGGGACATCATTTTCAACAATTAATCCGTTTTCTTCTGTTATTGCTTCAAATGCAGCTGGTATTAGTTTCACAGAAGGCTTATCATGGCGTACAGCAGGGTGTATTGCAGGTGCTATTTTTGTTGTGGTGTATCTACATTGGTATGCTAAAAAAATAAAAGCGAATCCAGAGTTTTCATATTCCTATGAAGATAGAGTAGAATTTAATGCTAAATGGGGCATGACAACTAACCATACACCCTCACTCTTTACTATTAGACAAAAAATTATTTTAAGTTTATTTGTTATTTCATTTCCTTTGATGGTTTGGGGAGTAATGTCACAGGGATGGTGGTTTCCAACCATGGCTTCTTCCTTTTTAGCTATTACAATTATTATTATGTTTTTAACAGCAACTGGGGCAAATGGTATTGGAGAAAGGGATGTTGTTGATGAGTTTGTTAATGGTGCATCAAGCCTTGTTGGGGTTTCATTAATCATTGGTTTAGCGCGTGGTATCAATATTATTTTGAGCCAAGGTTATATATCAGATACGATGCTTTACACAGCTTCAAAATTAGCTTCACATGTTAGTGGCTCTGTCTTTATCATTGTTATGATGTTTATCTACTTTGTGTTAGGATTTGTTGTTCCATCCTCGTCGGGTTTAGCAGTACTTTCAATGCCAATTCTAGCACCTCTTGCAGATACTGTTGGGATTCCTCGTTCAGTAGTAGTAATGGCTTATCAATTTGGGCAGTATGCAATGTTGTTTTTAGCACCTACTGGACTAGTTATGGCAACCTTGCAGATGTTAGATATGAAGTACTCCCATTGGCTAAAATTTGTGTGGCCGGTTGTTTTATTCCTCCTAATATTTGGTGGCGGTTTGTTAGTTCTACAAGTTTTAATACTTTAA

SEQ ID NO: 3816 - protein, 517 aa, Streptococcus agalactiae
MPEKMTNSENKRSKGFRMPGAFTILFILTIFSVLATWWIPAGSYSKLQFDTASSKLVVTDPNGKTVHVPATQTQLDKMNVKIKIKEFTSGAISKPVSVPNTYKRLKQNPAGIGSVTTSMVNGTIEAVDIMVFIMVLGGMIGVVRKSGAFESGLLALTKKTKGREFLLIFLVSLLMVLGGTLCGIEEEAVAFYPILVPIFLAMGYDSIICVGAIFLASSVGTSFSTINPFSSVIASNAAGISFTEGLSWRTAGCIAGAIFVVVYLHWYAKKIKANPEFSYSYEDRVEFNAKWGMTTNHTPSLFTIRQKIILSLFVISFPLMVWGVMSQGWWFPTMASSFLAITIIIMFLTATGANGIGERDVVDEFVNGASSLVGVSLIIGLARGINIILSQGYISDTMLYTASKLASHVSGSVFIIVMMFIYFVLGFVVPSSSGLAVLSMPILAPLADTVGIPRSVVVMAYQFGQYAMLFLAPTGLVMATLQMLDMKYSHWLKFVWPVVLFLLIFGGGLLVLQVLIL

SEQ ID NO: 3817 - protein, 927 aa, Streptococcus agalactiae
ATGGCAAAAATTGTTGTTGCACTAGGAGGAAATGCCTTAGGAAATTCTCCAGAAGAACAATTAAGATTAGTAAAACATACTGCAAAATCATTGGTGGCCTTGATAAAAAAGGGACACGAAATTGTTGTAAGTCATGGTAATGGACCACAAGTTGGTGCCATTAATTTAGGAATGAATTTTGCGGCTGAGAGTGGTCAAGGAACTAATTTTCCTTTTCCAGAATGTGGAGCAATGAGCCAAGGATACATAGGCTATCATCTCCAACAGAGCCTTTTAAATGAATTACGTCAAGAGGGAATAAATAAGGAAGTTGCTACAATTATTACCCAAATTGAGGTGGATGAATCAGACCAAGCATTTAGCGCACCTACCAAGCCTATAGGCACCTTTTATGATAAGGAGACATCAGAAAAGATTGCTATAGAGAAAGGGTATACTTTCGTAGAAGACGCTGGACGAGGGTATCGTCGTGTTGTTGCTTCACCTGAACCTAAAAAAATCATCGAAATTAATAGCATTAAAACACTTATTGAAAATGATACCCTAGTTATCGCAGGTGGAGGTGGAGGCATCCCTGTCATTAATAAGGGAGGTTATGAAGGTATTGCAGCTGTTATTGATAAAGACAAATCTAGTGCACTGTTAGCAGGAGAACTAGCTGCGGATCAATTGATTATTCTCACTGCAGTTGATTATGTTTATACTCAATTTGGTAAAGAAAATCAAAAAGCTTTAACAGAGGTTAATGAGAATCAAATGATTGATTACGTTAACCAAGGTGAGTTTGCAAAAGGAAGTATGTTACCTAAAGTAATAGCCTGTATGAGTTTCTTAGATCACAATCCGAAAGGAACAGCCTTAATCACCTCATTAAATGGTTTAGAAGATGCATTAGATGGGAAATTAGGAACACGTATAACTAAGTAA

SEQ ID NO: 3818 - protein, 308 aa, Streptococcus agalactiae
MAKIVVALGGNALGNSPEEQLRLVKHTAKSLVALIKKGHEIVVSHGNGPQVGAINLGMNFAAESGQGTNFPFPECGAMSQGYIGYHLQQSLLNELRQEGINKEVATIITQIEVDESDQAFSAPTKPIGTFYDKETSEKIAIEKGYTFVEDAGRGYRRVVASPEPKKIIEINSIKTLIENDTLVIAGGGGGIPVINKGGYEGIAAVIDKDKSSALLAGELAADQLIILTAVDYVYTQFGKENQKALTEVNENQMIDYVNQGEFAKGSMLPKVIACMSFLDHNPKGTALITSLNGLEDALDGKLGTRITK

SEQ ID NO: 3819 - protein, 999 aa, Streptococcus agalactiae
ATGAAAAATTTACGTAACCGTAGTTTTCTTACTTTATTGGATTTTAGTACAGCAGAAGTTGAATTTCTTTTAAAACTTTCAGAAGATTTAAAACGTGCTAAATACGCAGGAATTGAACAACAAAAACTTGTTGGTAAAAATATCGCTTTGATTTTTGAAAAAGATTCTACACGGACACGTTGCGCTTTTGAAGTTGCTGCTCACGATCAAGGAGCTCATGTTACTTATTTAGGTCCAACAGGCAGTCAGATGGGTAAAAAAGAGACCTCAAAAGACACTGCGCGTGTGCTAGGTGGTATGTATGATGGTATTGAGTATCGTGGATTTTCTCAAGAAACAGTTGAGACTTTAGCCGAATTTTCAGGAGTTCCTGTGTGGAATGGTTTAACCGATGCTGATCATCCAACGCAAGTACTAGCCGATTTTCTGACCGCTAAGGAATGCTTACATAAGCCCTATAAAGATATTCGCTTTACGTATGTGGGTGATGGACGTAACAATGTCGCTAATGCCTTGATGATCGGTGCTTCTATTGTAGGCATGACTTATCATTTGGTTTGTCCTAAAGAATTAGAGCCAGATCCTGAACTACTCTCTAAATGTCAAGAAATTGCGAAAACTACTGGTGCTTCTATTGAAATCACTGCTGATATTGCAGAAGGCGTCAGAGATTCAGACGTCCTATATACAGATGTTTGGGTTTCAATGGGAGAACCGGATGAAGTTTGGAAAGAAAGAATAGCTCTTTTAGAACCCTATCGTATTACCCAAGAAATGCTTAATATGACAGAAAATCCAAACGTTATTTTCGAGCATTGCTTGCCCTCATTTCATAATATAGATACTAAAGTTGGATACGACATTTATGAAAAATATGGTTTGAAGGAAATGGAAGTATCAGATGAAGTTTTTGAAGGCCCTCACTCAGTTGTTTTCCAAGAAGCTGAAAATCGTATGCATACTATTAAAGCAGTTATGGTAGCAACTTTAGGTGATTAG

SEQ ID NO: 3820 - protein, 332 aa, Streptococcus agalactiae
MKNLRNRSFLTLLDFSTAEVEFLLKLSEDLKRAKYAGIEQQKLVGKNIALIFEKDSTRTRCAFEVAAHDQGAHVTYLGPTGSQMGKKETSKDTARVLGGMYDGIEYRGFSQETVETLAEFSGVPVWNGLTDADHPTQVLADFLTAKECLHKPYKDIRFTYVGDGRNNVANALMIGASIVGMTYHLVCPKELEPDPELLSKCQEIAKTTGASIEITADIAEGVRDSDVLYTDVWVSMGEPDEVWKERIALLEPYRITQEMLNMTENPNVIFEHCLPSFHNIDTKVGYDIYEKYGLKEMEVSDEVFEGPHSVVFQEAENRMHTIKAVMVATLGD

SEQ ID NO: 3821 - protein, 1263 aa, Streptococcus agalactiae
ATGCTAGATATATTATCAGAAAAACATCTAGAAAGAAGGCAGCGTATTATTATCTCTGCAATAGCTATCGCCTTAGCTGCTCAAATCAATATCTCAATACTTGCTGATGGGTTTATTATGACCTTATCTTTGTTCATTTTGCCTGTCTTTTTATATTTTAATGACGACATTAATCCAATTCTTCTCTGTCTAGGAATTACTTTTGCTTCTCCTATCTTCAGAGGAATCATATTAAGTATCGCTGGCGAGGCTGAGATTCATCAAATAATTGAATTCGTTTTAACTGATATGGCGTTTTATATTTGTTATGGCATCACCTTTTATACTATTTATTGGCATCGTTCCTACCGTAATAAAGGTACTTTTTTCTTTTCTATCATTATTTGTGATTATTTTGCCAACCTTGTAGAAATTAGTTTTCTCATAAAGTTTAACAATTATACTATAACTATATTCGCTACTTTATTTGCCATAGCACTTTTGCGAGCTTTTATTAGTTGCGCTGTGGCTTATACTTATAGTTATCTATCACTTCTCTTACAAAAAGACGATCACGAACGTCGATACTATTATTTTATGTGGTCAACTTCAGCCGTTAAAAGCGAGGTTTATTTTATGCAAAAAAATATCATTGAAATTGAAAACATCATGAAAAATGCTTATTTATTAGATAAAGAGTTATCCAAATATCATCTACCTAAAGAATACCAACACCTCTCTCTAGATATTTCGCGGGACGTTCACGAAGTTAAGAAAGATTACCAAAATATTATTAAAGGCTTAGGAACCTATTTTAGTGTAAAAAATGAATCAACTATGGCATTGAAAGATATCTTTCAAATTGTTTTATCTTATACTAGGAGTATTATTCAATTTCGGCATCAAGATATCATTATTCTCGAAAATAATAAATGTAATTTGATAATATCAAACTATTACTATTTACTAACCATTATTTCCAATATCGTTTTAAATGCAGTAGAAGCTATTGATAAACAAAAAAAGGGTACAATCAGTGTTCACACAGAAGAATTAGAAGATTTTATTAAAATTGAGATTAGTGATAACGGACCAGGAATACCTGATAAAATGAAACACATGATTTTCAAACCTGGATTTTCGACTAAATTTGATGCTAATGGTGATATCTATCGAGGAATCGGGCTATCCCACGTGCGTATTTTAATGGAAGAGCAATATCAAGGAACGATAACTGTTTGTCCTAATCAGCCAAANNNNNCATTCCATTCATTAATTAATTAA

SEQ ID NO: 3822 - protein, 420 aa, Streptococcus agalactiae
  VARIANT 412, 413, 414: Xaa = Any Amino Acid
MLDILSEKHLERRQRIIISAIAIALAAQINISILADGFIMTLSLFILPVFLYFNDDINPILLCLGITFASPIFRGIILSIAGEAEIHQIIEFVLTDMAFYICYGITFYTIYWHRSYRNKGTFFFSIIICDYFANLVEISFLIKFNNYTITIFATLFAIALLRAFISCAVAYTYSYLSLLLQKDDHERRYYYFMWSTSAVKSEVYFMQKNIIEIENIMKNAYLLDKELSKYHLPKEYQHLSLDISRDVHEVKKDYQNIIKGLGTYFSVKNESTMALKDIFQIVLSYTRSIIQFRHQDIIILENNKCNLIISNYYYLLTIISNIVLNAVEAIDKQKKGTISVHTEELEDFIKIEISDNGPGIPDKMKHMIFKPGFSTKFDANGDIYRGIGLSHVRILMEEQYQGTITVCPNQPXXXFHSLIN

SEQ ID NO: 3823 - protein, 723 aa, Streptococcus agalactiae
ATGATTTCATTTGAAAATGTTAGTAAATCATATGGTGATCATACCATCATTGATAATATTAGTTGCCATATTCAAAGAGGAGAATTCTTTGTCCTTGTGGGGGCCAGTGGCAGTGGTAAAACTACCATCCTCAAGATGATTAATCGTCTCATCGAACCAAGCCAAGGCGCTATTACTTTAGATGGGGAAAACATTACATCACTTGATTTGCGACAATTACGCTTAGAAACTGGTTATGTCTTGCAACAAATTGCACTTTTCCCTAATTTAACAGTTGGAGAAAATATAGAACTTATCCCTGAAATGAAGGGCTGGTCAAAAGGTGACCAAAAAAAAGCCGCTAGCGACCTTCTTGATAAGGTGGGTTTACCTGCTAAGGACTACTTTAATCGCTATCCTCATGAGCTCTCTGGTGGGGAACAACAACGCATAGGTATCCTACGAGCAATCGTTGCTAAACCTAAGGTACTACTTATGGATGAGCCATTTTCTGCTTTAGACCCTATCTCAAGACGTCAATTACAAGATATCACCAAACAATTACAGTCTGAATTGGGTATTACATTAGTGTTTGTCACCCATGACATGAAGGAAGCTATGCGTCTTGCAGATAGAATTTGTGTTATTAAGGAAGGTAAGATAGTGCAATTGGATAGACCAGAAATAATTCAAAATAATCCCTCTGACCAATTTGTTAGAACCCTATTTGAAGAGGAGAACTGA

SEQ ID NO: 3824 - protein, 240 aa, Streptococcus agalactiae
MISFENVSKSYGDHTIIDNISCHIQRGEFFVLVGASGSGKTTILKMINRLIEPSQGAITLDGENITSLDLRQLRLETGYVLQQIALFPNLTVGENIELIPEMKGWSKGDQKKAASDLLDKVGLPAKDYFNRYPHELSGGEQQRIGILRAIVAKPKVLLMDEPFSALDPISRRQLQDITKQLQSELGITLVFVTHDMKEAMRLADRICVIKEGKIVQLDRPEIIQNNPSDQFVRTLFEEEN

SEQ ID NO: 3825 - protein, 1515 aa, Streptococcus agalactiae
ATGACAACACTAATCACTACCTTTCAAGAGCGTTTTGGAGATTGGACTCAAAGTCTTATTGAACACCTCCAGCTATCACTACTAACACTTATTTTAGCAACTTTAATTGCTATTCCACTCGGTATCATCATTAGTCATTATAAAAAAATCAGTCATGTTGTCCTTCAGATAACTGGGATATTTCAAACAATTCCTTCTTTAGCCTTGCTTGGTTTATTTATACCTTTTATGGGAATTGGAACTGTACCAGCTGTCGTTGCACTAATTATTTACGCTCTATTTCCAATTTTACAAAATACTGTAACAGTACTGATGCAAATTGATGCTAATCTCATTGAGGCAGCAACCGCTTTTGGAATGACACGTTGGGAAAGGCTTAAAAAGTTTGAGTTAGCTTTAAGTATGCCTGTTATCATCTCAGGCATTAGAACTGCCTCTGTTATGATTATTGGTACAGCTACATTAGCTAGTCTTATCGGAGCTGGTGGCCTTGGATCATTTATTTTGTTAGGGATTGATCGCAACAATCCTTCTCTAATTCTCATAGGGGCAATCTCTTCTGCTGTCTTAGCTATTATATTTAGTGGTTTAATTGGATTACTAGAAAAGGCTAGATTACGAACCATAGCCGTTTCTGGTATACTTTTACTAGCAGGCTTAGGACTATCCTATGCTCCAAAATGGATGCCTGGAACAAATACTGCAACGATAACTGTTGCAGGGAAGTTAGGAACTGAACCAGATATTTTAATTAATATGTACAAAGAACTTATTGAGGATCAGACAGATATCAAAGTTAAGCTTAAACCTAATTTCGGAAAAACAACTTTCTTATATCAAGCCCTAAAATCTGGTGATATTGATCTTTACCCAGAGTTTACAGGTACTATTACATCAAGTTTACTTAAAAATCCTCCTAAAGTAAGTAATAACCCTAAACAGGTTTACAACTTAGCCAAAAACGGTATTTTAAAACAAGATAAGTTGTCACTTTTGTCACCTATGGCTTATCAAAACACCTACGCTGTAGCTGTTAAAAAAGATTACGCTGAAGCTAATCAACTCAAAAATATCAGCGACCTAAAAAAATTAGATAAACTAAAAGCTGGTTTCACTTTAGAATTTAAGGATAGAGAGGATGGGAGTATTGGTTTACAGAAACATTATGGTTTAAACCTTGATATCTCAACCTTAGAACCTGCTTTACGATACCAAGCTATCAATAGTAAAGATGTCAATATTATTGACGCTTACTCTACCGATAGTGAATTAATCCAGTATCAACTTCAAATTCTCAAAGACGATAAGCATCTATTTCCGCCATATCAAGGAGCACCGCTACTAAGGCAAGATACGATTAAAAAATACCCTCAAGTAAAAAAAGCTCTCAATAAACTTGCTGGTCATATCACTGAAAAAGAAATGCAAGAAATGAACTACCAAGTAGCTGTAAAGCATAAATCAGCAGCTACAGTAGCTAAACAATATTTAAAAGCACATCATATTATAAAGTAG

SEQ ID NO: 3826 - protein, 504 aa, Streptococcus agalactiae
MTTLITTFQERFGDWTQSLIEHLQLSLLTLILATLIAIPLGIIISHYKKISHVVLQITGIFQTIPSLALLGLFIPFMGIGTVPAVVALIIYALFPILQNTVTVLMQIDANLIEAATAFGMTRWERLKKFELALSMPVIISGIRTASVMIIGTATLASLIGAGGLGSFILLGIDRNNPSLILIGAISSAVLAIIFSGLIGLLEKARLRTIAVSGILLLAGLGLSYAPKWMPGTNTATITVAGKLGTEPDILINMYKELIEDQTDIKVKLKPNFGKTTFLYQALKSGDIDLYPEFTGTITSSLLKNPPKVSNNPKQVYNLAKNGILKQDKLSLLSPMAYQNTYAVAVKKDYAEANQLKNISDLKKLDKLKAGFTLEFKDREDGSIGLQKHYGLNLDISTLEPALRYQAINSKDVNIIDAYSTDSELIQYQLQILKDDKHLFPPYQGAPLLRQDTIKKYPQVKKALNKLAGHITEKEMQEMNYQVAVKHKSAATVAKQYLKAHHIIK

SEQ ID NO: 3827 - protein, 2502 aa, Streptococcus agalactiae
GTGATTAAAATTGTATTTTTTATATCTGTTTTAGTGCTTATTATTGTTGAAATGATTCATTTGAAACGAACTATTTCTGTTGAGCAACTAAAGAGTGTTTTTGGGCAATTATCTCCAATGAATCTTTTCTTAATTATCCTTGTGGGGGTTATCGCTGTCTTACCGACAACCGGATATGACTTTGTACTGAATGGACTTTTACGTACAGATAAAAGCAAAAGGTATATTTTACAGACTAGTTGGTGTATCAACACTTTTAATAACTTGTCAGGATTCGGTGGCTTAATCGATATTGGGTTGCGCATGGCTTTTTATGGTAAAAAAGGTCAAGAGAAGAGTGACCTAAGAGAAGTGACTCGTTTTTTACCCTATCTTATTTCTGGTCTGTCATTTATTAGTGTGATTGCCTTAATCATGAGCCATATTTTTCATGCCAAAGCTAGTGTTGATTACTATTATTTGGTATTAATTGGTGCTAGTATGTATTTTCCTGTTATTTATTGGATTTCTGGTCATAAAGGAAGCCATTATTTCGGAGATATGCCATCTAGTACTCGTATAAAATTAGGTGTTGTTTCTTTTTTTGAATGGGGATGTGCGGCCGCAGCATTTATAATTATCGGTTATTTAATGGGCATTCATCTACCAGTTTATAAAATTTTACCACTATTTTGTATTGGTTGTGCCGTCGGGATTGTATCCCTTATTCCCGGTGGATTAGGAAGTTTTGAATTAGTTCTATTTACAGGGTTTGCTGCCGAGGGACTACCTAAAGAAACTGTGGTTGCATGGTTATTACTTTATCGTTTAGCCTACTATATTATTCCATTCTTTGCAGGTATCTATTTCTTTATCCATTATTTAGGTAGTCAAATAAATCAACGTTATGAAAATGTCCCGAAAGAGTTAGTATCAACTGTTCTACAAACCATGGTGAGCCATTTGATGCGTATTTTAGGTGCATTCTTAATATTTTCAACAGCATTTTTTGAAAATATTACTTATATTATGTGGTTGCAGAAGCTAGGCTTGGACCCATTACAAGAACAAATGTTATGGCAGTTTCCAGGTTTATTGCTGGGGGTTTGTTTTATTCTCTTAGCTAGAACTATTGATCAAAAAGTGAAAAATGCTTTTCCAATTGCTATTATCTGGATTACTTTGACATTGTTTTATCTTAATTTAGGTCATATTAGTTGGCGACTATCTTTCTGGTTTATTTTACTATTGTTAGGCTTATTAGTCATTAAGCCAACTCTCTATAAAAAACAATTTATTTATAGCTGGGAAGAGCGTATTAAGGATGGAATCATTATCGTTAGTTTAATGGGAGTTCTATTTTATATTGCAGGACTACTATTCCCTATCAGGGCTCATATTACAGGTGGTAGTATTGAACGCCTGCATTATATCATAGCATGGGAGCCGATAGCATTGGCTACGTTGATTCTTACTCTCGTTTATTTATGTTTGGTTAAGATTTTACAAGGAAAATCTTGTCAGATTGGTGATGTGTTCAATGTGGATCGTTATAAAAAACTACTTCAAGCTTACGGTGGTTCTTCGGATAGCGGTTTAGCCTTTTTAAATGATAAAAGGCTCTACTGGTACCAAAAAAATGGAGAAGATTGCGTTGCGTTCCAATTTGTAATTGTCAATAATAAATGTCTTATTATGGGGGAACCAGCCGGTGATGACACTTATATTCGTGAAGCTATTGAATCGTTTATTGATGATGCTGATAAGCTAGACTATGACCTTGTTTTTTACAGTATTGGACAGAAGTTGACACTACTTTTACATGAGTATGGTTTTGACTTTATGAAAGTTGGTGAGGATGCTTTAGTTAATTTAGAAACGTTTACTCTTAAAGGGAATAAGTACAAACCTTTCAGAAATGCCCTAAATAGAGTTGAAAAGGATGGTTTCTATTTCGAAGTTGTACAATCGCCACATAGTCAAGAGCTACTAAATAGTTTGGAAGAGATTTCTAATACTTGGTTAGAAGGACGTCCTGAAAAAGGTTTCTCACTAGGATATTTTAATAAAGATTATTTCCAACAAGCCCCAATAGCTTTGGTAAAAAATGCTGAACACGAAGTTGTTGCTTTTGCTAATATTATGCCAAACTATGAAAAGAGTATTATCTCTATTGATTTAATGCGTCACGATAAACAGAAAATTCCGAATGGCGTTATGGATTTCCTCTTTTTATCATTATTCTCTTATTATCAAGAGAAGGGATACCACTATTTTGATTTGGGGATGGCACCTTTATCAGGAGTTGGTCGCGTTGAAACAAGTTTTGCTAAAGAGAGAATGGCGTATCTTGTCTATCATTTCGGTAGTCATTTCTACTCATTTAATGGTTTACACAAGTATAAGAAGAAGTTTACACCATTGTGGTCGGAACGTTATATTTCTTGTTCTCGTTCGTCCTGGTTAATTTGTGCTATTTGTGCCCTATTAATGGAAGATAGTAAAATTAAGATTGTTAAATAA

SEQ ID NO: 3828 - protein, 833 aa, Streptococcus agalactiae
MIKIVFFISVLVLIIVEMIHLKRTISVEQLKSVFGQLSPMNLFLIILVGVIAVLPTTGYDFVLNGLLRTDKSKRYILQTSWCINTFNNLSGFGGLIDIGLRMAFYGKKGQEKSDLREVTRFLPYLISGLSFISVIALIMSHIFHAKASVDYYYLVLIGASMYFPVIYWISGHKGSHYFGDMPSSTRIKLGVVSFFEWGCAAAAFIIIGYLMGIHLPVYKILPLFCIGCAVGIVSLIPGGLGSFELVLFTGFAAEGLPKETVVAWLLLYRLAYYIIPFFAGIYFFIHYLGSQINQRYENVPKELVSTVLQTMVSHLMRILGAFLIFSTAFFENITYIMWLQKLGLDPLQEQMLWQFPGLLLGVCFILLARTIDQKVKNAFPIAIIWITLTLFYLNLGHISWRLSFWFILLLLGLLVIKPTLYKKQFIYSWEERIKDGIIIVSLMGVLFYIAGLLFPIRAHITGGSIERLHYIIAWEPIALATLILTLVYLCLVKILQGKSCQIGDVFNVDRYKKLLQAYGGSSDSGLAFLNDKRLYWYQKNGEDCVAFQFVIVNNKCLIMGEPAGDDTYIREAIESFIDDADKLDYDLVFYSIGQKLTLLLHEYGFDFMKVGEDALVNLETFTLKGNKYKPFRNALNRVEKDGFYFEVVQSPHSQELLNSLEEISNTWLEGRPEKGFSLGYFNKDYFQQAPIALVKNAEHEVVAFANIMPNYEKSIISIDLMRHDKQKIPNGVMDFLFLSLFSYYQEKGYHYFDLGMAPLSGVGRVETSFAKERMAYLVYHFGSHFYSFNGLHKYKKKFTPLWSERYISCSRSSWLICAICALLMEDSKIKIVK

SEQ ID NO: 3829 - protein, 744 aa, Streptococcus agalactiae
ATGACTGAGAACTGGTTACATACTAAAGATGGTTCAGATATTTATTATCGTGTCGTTGGTCAAGGTCAACCGATTGTTTTTTTACATGGCAATAGCTTAAGTAGTCGCTATTTTGATAAGCAAATAGCATATTTTTCTAAGTATTACCAAGTTATTGTTATGGATAGTAGAGGGCATGGCAAAAGTCATGCAAAGCTAAATACCATTAGTTTCAGGCAAATAGCAGTTGACTTAAAGGATATCTTAGTTCATTTAGAGATTGATAAAGTTATATTGGTAGGCCATAGCGATGGTGCCAATTTAGCTTTAGTTTTTCAAACGATGTTTCCAGGTATGGTTAGAGGGCTTTTGCTTAATTCAGGGAACCTGACTATTCATGGTCAGCGATGGTGGGATATTCTTTTAGTAAGGATTGCCTATAAATTCCTTCACTATTTAGGGAAACTCTTTCCGTATATGAGGCAAAAAGCTCAAGTTATTTCGCTTATGTTGGAGGATTTGAAGATTAGTCCAGCTGATTTACAGCATGTGTCAACTCCTGTAATGGTTTTGGTTGGAAATAAGGACATAATTAAGTTAAATCATTCTAAGAAACTTGCTTCTTATTTTCCAAGGGGGGAGTTTTATTCTTTAGTTGGCTTTGGGCATCACATTATTAAGCAAGATTCCCATGTTTTTAATATTATTGCAAAAAAGTTTATCAACGATACGTTGAAAGGAGAAATTGTTGAAAAAGCTAATTGA

SEQ ID NO: 3830 - protein, 247 aa, Streptococcus agalactiae
MTENWLHTKDGSDIYYRVVGQGQPIVFLHGNSLSSRYFDKQIAYFSKYYQVIVMDSRGHGKSHAKLNTISFRQIAVDLKDILVHLEIDKVILVGHSDGANLALVFQTMFPGMVRGLLLNSGNLTIHGQRWWDILLVRIAYKFLHYLGKLFPYMRQKAQVISLMLEDLKISPADLQHVSTPVMVLVGNKDIIKLNHSKKLASYFPRGEFYSLVGFGHHIIKQDSHVFNIIAKKFINDTLKGEIVEKAN

SEQ ID NO: 3831 - protein, 357 aa, Streptococcus agalactiae
ATGTCTACTTTAACAATAATTATTGCAACATTAACTGCTTTGGAACATTTTTATATTATGTATTTGGAGACGTTAGCCACCCAGTCAAATATGACTGGGAAGATTTTTAGTATGTCTAAAGAAGAGTTGTCATATTTACCCGTTATTAAACTTTTTAAGAATCAAGGTGTATACAACGGCTTGATTGGCCTATTCCTCCTTTATGGGTTATATATTTCACAGAATCAAGAAATTGTAGCTGTTTTTTTAATCAATGTATTGCTAGTTGCTATTTATGGTGCTTTGACAGTTGATAAAAAAATCTTATTAAAACAGGGTGGTTTACCTATATTAGCTCTTTTAACATTCTTATTTTAA

SEQ ID NO: 3832 - protein, 118 aa, Streptococcus agalactiae
MSTLTIIIATLTALEHFYIMYLETLATQSNMTGKIFSMSKEELSYLPVIKLFKNQGVYNGLIGLFLLYGLYISQNQEIVAVFLINVLLVAIYGALTVDKKILLKQGGLPILALLTFLF

SEQ ID NO: 3833 - protein, 2214 aa, Streptococcus agalactiae
ATGTGGGATCCTTATGGGAATACTAAAAATTTACCTGTGGCAGTCGTTAACCAAGATAAATCGGCTAAATTAAATGGAAAAACTATTTCAATTGGCAAAGATATGGAGGACAATTTGTCTAAAAATGATAGCTTAGATTTCCATTTTACAACAGCTAAAAGAGCAGAAAAAGAATTAGAAAAGGGTCACTATTATATGGTTATTACCTTTCCTAAAGATCTTTCTAGAAAAGCGACAACTCTCATGACAGAAAAACCAGAAAGGTTAAATATTACTTATAAAACTACTAAGGGGCGTAGTTTTGTAGCTTCAAAAATGAGTGAGACAGCAGCTAATAAACTAAAAGATGAGGTAGCAGAATCTATTACAGGGACTTATACTGAATCAGTTTTTAAAAATATGGGTTCTATGAAAACAGGTATCAATAAAGCTGCTGATGGGAGTCAAGAATTATTAAATGGTTCTAATAAGCTACAGGATGGGAGCCAAACCTTGACAAGTAATTTAGATGTTTTAGCAAGCTCTAGTCAAACTTTTTCTGGAGGAGCTAATAAACTAAATAGTGGAATAAACCTTTATACAGATGGTGTGGGGACCCTATCTAACGGGTTAGAAACATTATCAGATGGTGTTACTGCTTACACAACAGGTGTGCATAAGTTGAGTGAAGGTAGTCAAAAATTAGATGATAAGTCTCAAGCATTGGTGGAAGGATCAGAAAAGTTGACGGATGGTTTACAACAATTGTCACAAGCAACTCAACTAAAACCAGAGCAAGAACGTACTTTGCAGAACCTTTCAGATGGATTAAAGAATCTAAATCAGATTATTACAAATTTACAATCGACAGCAACTACTGATAGCGATACTAATAGTAAGTTATTTAATTTTTTATCAACTATTGAATCAAGTACAAAGGCTTTGATGAATACGGCTGCTGCTGATAAACAAAAGCAAATGACTGCGGTACAATCAACGTCAGCTTTTAAAAGTTTAACCCCTGAACAACAATCTCAAATCACCTCAGCGGTTACTGGAACACCTACTTCAGCTGAGACAATTGCAGCAAATATTTCTTCAAATATAGAAAATATGAAAACTGTGCTTAGTGTAGCATCTAGTTCAGCCCCTTCTAATAATGGATCACAAAATCTTCAAACTTTGTCAGGAACAGCTAACAATTTAGTATTAAAAGCTATCTCAGATTTAGATAAAATTCAAAAATTGCCAACGGCTACTAAGCAGTTATATCAAGGTAGTCAAACCTTGACAAAAGGAATCACGGATTATACGAATGCTGTAGGGCAATTACGCAAAGGTGCAGTAACTTTAGATAGTAAATCCAATCAATTGATTTCAGGAACACAAAAAGCAAGTCAGGGAGCTCAAACTTTAGATAGTAAATCGGATCAATTGAGAGACGGAGCGGGGCAATTAGCTAGTGGTTCTGATAGAATTGCAGATGGTTCTAATAAGCTTGCTGGGGGAGGACATCAGTTGACAGATGGGTTGACAGAGTTGTCAGGTGGTGTTTCTCAATTATCAAGTTCTTTGGGGAAAGCTGGGGACCAGTTGTCCATGGTTTCTGTAAATAAAGATAATGCCAATGCAGTATCTAGCCCAGTCACTATCAAGCATGAAGATTATGATAGCGTTGATACGAATGGTGTTGGAATGGCACCATACATGATTTCAGTTGCGTTGATGGTGGTAGCTTTATCAGCCAATGTTATTTTTGCGAAAGCTTTATCTGGCAAAGAGCCAGCTAATCGTTTTAGTTGGGCTAAAAATAAATTATTAATCAATGGATTCATTGCAACTCTAGCAGCAACTATCTTATTTTTTGCAGTTCAATTTATAGGTCTTAAACCAGATTACCCTGGAAAAACCTACTTTATTATCCTATTGACAGCATGGACTTTGATGGCATTAGTAACTGCTTTAGTGGGATGGGATAATAGGTATGGTTCCTTCTTGTCGTTATTAATATTATTATTCCAGCTTGGTTCAAGCGCAGGAACTTACCCAATAGAATTGAGTCCTAAGTTCTTTCAAACAATTCAACCATTTTTACCGATGACTTACTCTGTTTCAGGATTAAGAGAGACCATCTCGTTGACGGGAGACGTTAACCATCAATGGAGAATGCTAGTAATCTTTTTAGTATCATCGATGATACTTGCTCTTCTTATTTATCGTAAACAAGAAGATTAA

SEQ ID NO: 3834 - protein, 737 aa, Streptococcus agalactiae
MWDPYGNTKNLPVAVVNQDKSAKLNGKTISIGKDMEDNLSKNDSLDFHFTTAKRAEKELEKGHYYMVITFPKDLSRKATTLMTEKPERLNITYKTTKGRSFVASKMSETAANKLKDEVAESITGTYTESVFKNMGSMKTGINKAADGSQELLNGSNKLQDGSQTLTSNLDVLASSSQTFSGGANKLNSGINLYTDGVGTLSNGLETLSDGVTAYTTGVHKLSEGSQKLDDKSQALVEGSEKLTDGLQQLSQATQLKPEQERTLQNLSDGLKNLNQIITNLQSTATTDSDTNSKLFNFLSTIESSTKALMNTAAADKQKQMTAVQSTSAFKSLTPEQQSQITSAVTGTPTSAETIAANISSNIENMKTVLSVASSSAPSNNGSQNLQTLSGTANNLVLKAISDLDKIQKLPTATKQLYQGSQTLTKGITDYTNAVGQLRKGAVTLDSKSNQLISGTQKASQGAQTLDSKSDQLRDGAGQLASGSDRIADGSNKLAGGGHQLTDGLTELSGGVSQLSSSLGKAGDQLSMVSVNKDNANAVSSPVTIKHEDYDSVDTNGVGMAPYMISVALMVVALSANVIFAKALSGKEPANRFSWAKNKLLINGFIATLAATILFFAVQFIGLKPDYPGKTYFIILLTAWTLMALVTALVGWDNRYGSFLSLLILLFQLGSSAGTYPIELSPKFFQTIQPFLPMTYSVSGLRETISLTGDVNHQWRMLVIFLVSSMILALLIYRKQED

SEQ ID NO: 3835 - protein, 183 aa, Streptococcus agalactiae
ATGTTAGACCACTTCCCAAGTGGTGAACTTTCCAAAAGTCAACAAGAAGCTATTTTCAAATTTTATAAACAATTAGATTATTTTGTGACTGATACCCCCGCTAGTTTTGATTATTTTAAAAAAAATTTGGAGTCCTACGGATATAAAATCTATACTGAGGGAGATAAGATAGATTTTGATTAA

SEQ ID NO: 3836 - protein, 60 aa, Streptococcus agalactiae
MLDHFPSGELSKSQQEAIFKFYKQLDYFVTDTPASFDYFKKNLESYGYKIYTEGDKIDFD

SEQ ID NO: 3837 - protein, 102 aa, Streptococcus agalactiae
ATGAAAATAGCTCATGAATTACCAAATTTCCCGACGTTAGGAAATATCGGAACAGAAGCTCTCTACCTTATTGCCACCCTACCAGATAACCAAAAGCAGTAA

SEQ ID NO: 3838 - protein, 33 aa, Streptococcus agalactiae
MKIAHELPNFPTLGNIGTEALYLIATLPDNQKQ

SEQ ID NO: 3839 - protein, 243 aa, Streptococcus agalactiae
TTGTGGTTAAGTATTTTGTTGATGTTAATAAAATTGTACGGTTTGATTTTGGAGTGCGTGAAATATCTTGAGATTACCTTAGCTTATGTAACACGAAAGGCTTATAATATAGGCTTTTCGATAGAAAAATATCTTGAGATTATCTTTTTGAAAGGAACAATAAATATGAATATTAACCTTCTTGAAGGAATTGAAATTGAATATAAGTCCGCTGACCTTGCTAAAACCTTATCGCTTTTATAG

SEQ ID NO: 3840 - protein, 80 aa, Streptococcus agalactiae
MWLSILLMLIKLYGLILECVKYLEITLAYVTRKAYNIGFSIEKYLEIIFLKGTINMNINLLEGIEIEYKSADLAKTLSLL

SEQ ID NO: 3841 - protein, 342 aa, Streptococcus agalactiae
ATGGATATTTTTAGTGAAGAATTTAAAAATGAACTTCGATTCATTGTGAAAGATACCGTTTCTGATATAGTCACAAAAGCCATAAAAAATGGATCTTTTAATTCTACCTTTACGATTGACGTTGCTAATGACGCTTTTTTATCTCAAAAGTTTTGCATGTCAAAAAGTTCTGTTGGAACTATTAGAAGAGAGATGAGAGATTTCCCTAGTTACACGAAGTTTCTTAGAAATGGCGGATCTCTTGTAACTGTCAAAGGTTTTGATGAATACCTGCAATATCGCGGTAGCTGGGAATGGAAGAAAGAAAAAGCTAAATTAAGAACGAAAAAAAGGACTCGTTAA

SEQ ID NO: 3842 - protein, 113 aa, Streptococcus agalactiae
MDIFSEEFKNELRFIVKDTVSDIVTKAIKNGSFNSTFTIDVANDAFLSQKFCMSKSSVGTIRREMRDFPSYTKFLRNGGSLVTVKGFDEYLQYRGSWEWKKEKAKLRTKKRTR

SEQ ID NO: 3843 - protein, 966 aa, Streptococcus agalactiae
ATGGAGAATTTAAGTACGAGGTTAGTTGATAAAAGTATTGAAGCTTTTATTATGGGACTTGAAATATACAATAAACCAACGATAAAGTACCGAATTGAGGGCTTTAGTTTCTTTATTTGTAATGCTTGGGAATTGATGCTTAAAGCTGAAATGTTAAATCGTAATCAATCTATCTATTTTAAGGATAATCCTGATAGAACACTAAGCTTAGAAGGTGTTATAAAAAAAATATACTCGGACGACAGCACTAGAATTCGACTTAATCTTGAGCGCATTATTGAACTAAGGAATATTAGTACTCACTACATAACAGAAGATTATGAATTAAAGTATGCTCCACTTTTCCAAGCTTGTGTACTTAACTATGTCAATGAACTTCAACGATTTCATTCAAGAGATGTTACAAAGGCCATTTCCCAAAATTTTTTAACTATCACTGCAACTTACGAACCATTATCTAACGAACAAATTAGATTAAAATATCCTGCGGAAATTGCTGAAAAATTCATCCAACAGGCAAATGCCATAGATGTCTTAGTGACAGAGTATAATTCTGATAAATTCGCTATTGGTATTAAACAAAATCTTTATATTACTAAGAAAAAATCTGAAGCCGATTTTATAGTATCAATTGCAAATCAATCACCTTCTCAAGTTGCTATTTTAAAAGATTTAAAAGATCCATCAGAAACGCACAAGTATTCATATGCAAATATTATATCTGTTGTAAATGATAGACTAAATAAAAAGAATATTAAACTTAATTATAAATCTGGTTTTAATCAATATGTCCTAACATTAGTGATTGATTTCTATTCAATAAAGTCTGATGAAAAATATTCTTATTGCCATAAAATAGGTAAATCTGAACACTACACTTATTCTCAAAAATTCGTTGATTTTATTATCTCTGAAATAGAAAAAGACCCTCAACATTTTGTTGAAAGTCTGAAAAAATCTAAATAA

SEQ ID NO: 3844 - protein, 321 aa, Streptococcus agalactiae
MENLSTRLVDKSIEAFIMGLEIYNKPTIKYRIEGFSFFICNAWELMLKAEMLNRNQSIYFKDNPDRTLSLEGVIKKIYSDDSTRIRLNLERIIELRNISTHYITEDYELKYAPLFQACVLNYVNELQRFHSRDVTKAISQNFLTITATYEPLSNEQIRLKYPAEIAEKFIQQANAIDVLVTEYNSDKFAIGIKQNLYITKKKSEADFIVSIANQSPSQVAILKDLKDPSETHKYSYANIISVVNDRLNKKNIKLNYKSGFNQYVLTLVIDFYSIKSDEKYSYCHKIGKSEHYTYSQKFVDFIISEIEKDPQHFVESLKKSK

SEQ ID NO: 3845 - protein, 1173 aa, Streptococcus agalactiae
ATGATCATGAAAATAACTGAAGTAAAAAAGAAAGATGGTACGGTAATTTATCGTGCCAGTATTTATCTTGGTACTGATAAAGTAACAGGTAAAAAAGTAACTACTAAAATAACAGGACGAACTAAGAAAGAAGTTAGAGAAAAAGCTAAGCAAGAAGCTATCGAGTTTATAAAAAATGGTTCTACTCGCTTCAAAGCTACTTCCGTAACAAGTTATCAGGAACTTGCAACCTTATGGTGGGATAGTTACAAACATACCGTAAAATACAATACTCAGCTAGCTACTGAAAAGCTGTTAACCGTTCATGTCATACCAATTTTTGGAGCATATAAGCTTGATAAGTTAACGACACCACTTATACAGTCTATCATCAATAAACTAGCTGATAAAACTAATAAAGGGGAAAGAAAAGCTTACCTCCATTATGACAGAATACACGCGCTGAATAAACGTATACTACAGTATGGCGTTATCATGCAAGCTATACCATTCAACCCTGCGCGTGAGGTCATTCTCCCTCGCAACACTAAGAAAGCTAACACTAAAAGAGTAAAGCATTTCGAAAATGATGAACTAAGAACATTTTTCAACTACTTAAACAATCTAGATAAAAATAAATACAGATACTTCTATGAAGTCACACTTTATAAGTTTTTATTAGCTACAGGTTGTCGCATTAATGAAGCGTTAGCTCTAAACTGGTCAGATATCGACTTGGATAATGCCGTTGTTCATATCACAAAAACGCTAAATTACAAACAAGAAATTAATAGTCCAAAGTCAAAGTCAAGCTATCGTGATATTGACATAGATAGTCGAACAGTTACGATGCTTAAGCAGTATAGACGACGACAGATTCAAGAAGCATGGAAGTTAGGGCGTTCAGAAACAGTGGTATTTTCTGATTTTATCCATAAGTACCCAAACAATAGAACCTTACAAACTCGATTAAGAACACATTTTAAAAGAGCAAATGTATCGAATATAGGCTTTCATGGTTTTCGTCACACTCACGCTAGTTTATTGCTGAACACAGGTATCCCCTACAAAGAACTCCAATATAGATTAGGTCATTCTACTCTATCTATGACTATGGATATTTATAGCCATTTATCAAAAGAGAATGCAAAAAAAGCTGTCTCATTCTTTGAAACAGCAATTAACTCAATATAG

SEQ ID NO: 3846 - protein, 390 aa, Streptococcus agalactiae
MIMKITEVKKKDGTVIYRASIYLGTDKVTGKKVTTKITGRTKKEVREKAKQEAIEFIKNGSTRFKATSVTSYQELATLWWDSYKHTVKYNTQLATEKLLTVHVIPIFGAYKLDKLTTPLIQSIINKLADKTNKGERKAYLHYDRIHALNKRILQYGVIMQAIPFNPAREVILPRNTKKANTKRVKHFENDELRTFFNYLNNLDKNKYRYFYEVTLYKFLLATGCRINEALALNWSDIDLDNAVVHITKTLNYKQEINSPKSKSSYRDIDIDSRTVTMLKQYRRRQIQEAWKLGRSETVVFSDFIHKYPNNRTLQTRLRTHFKRANVSNIGFHGFRHTHASLLLNTGIPYKELQYRLGHSTLSMTMDIYSHLSKENAKKAVSFFETAINSI

SEQ ID NO: 3847 - protein, 612 aa, Streptococcus agalactiae
ATGTCACGTTATACTGGTCCATCATGGAAACAATCACGTCGCCTTGGTTTATCACTTACAGGCACAGGTAAAGAATTGGCACGTCGTAACTACGTACCTGGTCAGCACGGTCCTAATAACCGTAGCAAGCTTTCAGAATATGGCTTGCAGTTAGCTGAGAAACAAAAACTTCGTTTTTCATACGGACTTGGTGAAAAACAATTCCGTAACTTGTTCGTACAAGCTACTAAAGCAAAAGAAGGAACTCTTGGTTTCAACTTTATGGTTCTTTTAGAGCGTCGTCTTGATAACGTTGTTTATCGTTTAGGACTTGCAACAACTCGTCGCCAAGCTCGTCAATTTGTTAACCATGGTCATATCCTTGTTGATGGTAAACGTGTTGATATCCCATCATACCGCGTTACTCCAGGACAAGTTATTTCAGTTCGTGAAAAATCAATGAAAGTACCTGCAATCCTTGAAGCTGTTGAAGCTACTTTAGGACGTCCAGCTTTCGTATCATTTGATGCTGAAAAACTTGAAGGTTCATTGACTCGCCTTCCAGAACGCGATGAAATTAACCCAGAAATCAATGAAGCACTTGTCGTTGAATTCTACAACAAAATGCTTTAA

SEQ ID NO: 3848 - protein, 203 aa, Streptococcus agalactiae
MSRYTGPSWKQSRRLGLSLTGTGKELARRNYVPGQHGPNNRSKLSEYGLQLAEKQKLRFSYGLGEKQFRNLFVQATKAKEGTLGFNFMVLLERRLDNVVYRLGLATTRRQARQFVNHGHILVDGKRVDIPSYRVTPGQVISVREKSMKVPAILEAVEATLGRPAFVSFDAEKLEGSLTRLPERDEINPEINEALVVEFYNKML

SEQ ID NO: 3849 - protein, 288 aa, Streptococcus agalactiae
ATGAGTGATGCATTTGCAGATGTTGCAAAAATGAAAAAAATAAAAGAAGATATCAAGTCACATGAGGGACAGATGGTCGAACTTACTCTCGAAAATGGTCGTAAGAGGGAAAAAAATAAAATTGGGCGCCTAATTGAAGTTTACCCATCTTTGTTTATCGTAGAGTATAAGGATACTGCAGCTGTACCAGGAGCAATTGATAATACTTATGTAGAGTCTTACACTTATTCAGATATTTTAACTGAGAAAACTTTAATTCGTTATTTTGATGACGAGTCAGCAGAATAG

SEQ ID NO: 3850 - protein, 95 aa, Streptococcus agalactiae
MSDAFADVAKMKKIKEDIKSHEGQMVELTLENGRKREKNKIGRLIEVYPSLFIVEYKDTAAVPGAIDNTYVESYTYSDILTEKTLIRYFDDESAE

SEQ ID NO: 3851 - protein, 185 aa, Streptococcus agalactiae
TTGTTGCTTTCTTATATCGAGATGATTATTATCGTAGAGAGGGCGAAGAAGCAGAGGAAATTGTAGAAGATAATACTGTTGAGGTTATTTTAGAAAAGAACCGTGCTGGTGCGCGTGGGACAGTAAAATTAATGTTTCAAAAGGAATATAATAAATTTTCTAGTATAGCTCAATTTGAAGAATAG

SEQ ID NO: 3852 - protein, 61 aa, Streptococcus agalactiae
MLLFLYRDDYYRREGEEAEEIVEDNTVEVILEKNRAGARGTVKLMFQKEYNKFSSIAQFEE

SEQ ID NO: 3853 - protein, 162 aa, Streptococcus agalactiae
TTGAAGATTTAGCTAAGAATTAAAGGTTCCTGTTATCGCATTAAGCCAGCTCTCTCGTGGGGTTGAGCAAAGGCAGGATAAACGACCGGTCTTATCTGATATTCGTGAATCTGGATCGATTGAACAAGATGCTGACATTGTTGCTTTCTTATATCGAGATGA

SEQ ID NO: 3854 - protein, 54 aa, Streptococcus agalactiae
MKILAKELKVPVIALSQLSRGVEQRQDKRPVLSDIRESGSIEQDADIVAFLISR

SEQ ID NO: 3855 - protein, 151 aa, Streptococcus agalactiae
ATGATACGCCCCGGGATTAAAAATACAGAAATTAGAGCACGCTCTAGGAAGTTATCTCAAGAAGTTGATGATGGTTTAGGTTTAATCGTCATTGACTACCTCCAATTAATTTCAGGAACTAGACCAGAAATCGTCAGCAAGAAGTTTCTGA

SEQ ID NO: 3856 - protein, 50 aa, Streptococcus agalactiae
MIRPGIKNTEIRARSRKLSQEVDDGLGLIVIDYLQLISGTRPENRPARSF

SEQ ID NO: 3857 - protein, 888 aa, Streptococcus agalactiae
TTGGTAGAAGTATCTGAGCTAAGAGTACAACCTCAAGACCTGTTGGCAGAACAGGCCGTTCTAGGATCTATCTTTATCTCACCAGAGAAACTGATTATGGTGAGAGAATTTATAAGTCCAGATGATTTTTATAAATATTCACACAAAGTTATCTTCAGAGCGATGATTACCTTAGCTGATAGAAATGATGCAATTGATGCTGCTACTGTTAGAAATATTTTAGATGACCAAGGTGATCTTCAAAACATTGGTGGGTTGGGCTATATTGTTGAATTAGTTAATAGTGTTCCAACAAGTGCTAATGCGGAGTTTTATGCCAAAATAGTTTCTGAGAAAGCCATGTTGCGAGATATCATTTCTAAGTTGACAGATACTGTCAACATGGCCTATGAAGGAAATGATTCTGATGAAATTATTGCCACCGCTGAGAAGGCTTTAGTTGATATTAACGAACACAGTAATCGTAGCGGGTTTAGAAAGATATCTGATGTTTTAAAAGTTAATTACGAAAACTTAGAATTACGTTCACAGCAAACCTCAGATGTCACAGGTTTACCAACTGGATTTAGAGATTTAGACAGGATTACTACAGGTTTACATCCAGATCAATTAATCATCTTAGCGGCCCGTCCTGCAGTAGGTAAAACAGCCTTTGTTTTAAATATTGCTCAAAATGTTGGAACTAAACAAAATAGACCTGTAGCTATTTTTTCACTTGAAATGGGGGCTGAGAGTTTAGTTGACCGTATGTTGGCAGCAGAGGGAATGGTTGATTCTCATAGTTTACGAACTGGTCAGTTGACGGATCCAGATTGGAATAATGTAACGATTGCTCCAGGAGCTTTGGCGGATGCGCCAATTTATATTGATGATACGCCCCGGGATTAA

SEQ ID NO: 3858 - protein, 295 aa, Streptococcus agalactiae
MVEVSELRVQPQDLLAEQAVLGSIFISPEKLIMVREFISPDDFYKYSHKVIFRAMITLADRNDAIDAATVRNILDDQGDLQNIGGLGYIVELVNSVPTSANAEFYAKIVSEKAMLRDIISKLTDTVNMAYEGNDSDEIIATAEKALVDINEHSNRSGFRKISDVLKVNYENLELRSQQTSDVTGLPTGFRDLDRITTGLHPDQLIILAARPAVGKTAFVLNIAQNVGTKQNRPVAIFSLEMGAESLVDRMLAAEGMVDSHSLRTGQLTDPDWNNVTIAPGALADAPIYIDDTPRD

SEQ ID NO: 3859 - protein, 331 aa, Streptococcus agalactiae
ATGAAAGTTATTTTTTTACAAGATGTTAAGGGGAAAGGAAAAAAAGGTGAGGTTAAGGAAGTACCTACTGGTTATGCTCAAAACTTCTTATTAAAAAAGAATCTAGCTAAAGAAGCAACGACACAAGCTATCGGTGAATTAAAAGGAAAACAAAAGTCCGAAGAAAAAGCACAAGCAGAAATTTTAGCACAGGCAAAGGAGCTGAAAACACAATTAGAATCCGAAACTACCCGAGTGCAATTTATTGAAAAGGTAGGTCCAGATGGTCGTACGTTTGGTTCTATCACAGCCAAAAAGATTGCTGAAGAGTTACAAAAACATACGGCATTAA

SEQ ID NO: 3860 - protein, 110 aa, Streptococcus agalactiae
MKVIFLQDVKGKGKKGEVKEVPTGYAQNFLLKKNLAKEATTQAIGELKGKQKSEEKAQAEILAQAKELKTQLESETTRVQFIEKVGPDGRTFGSITAKKIAEELPKTIRH

SEQ ID NO: 3861 - protein, 1386 aa, Streptococcus agalactiae
ATGNNNNNCGTGACTAGTTTTATTTCTGATTTTACACAGTCTAAAAATATTTTTTATCGTCGTGTCAATATGGATCGATACTATATTTTTACCGACTATAGCGTTTTAAATACATTGATAAAAGATAAATTTGATATTTTAAATGAGTTTCGAAAACGCGCTCAGGAAAACCATTTATCATTAACATTAAGTATGGGAATTTCTTATGGTGATGGTAACCATAATCAAATTGGGCAAATTGCTTTAGAAAATCTTAATACAGCACTCGTTCGCGGAGGAGATCAAATAGTAGTACGTGAAAATGATAGTAGTAAAAAAGCACTTTACTTTGGTGGTGGTGCTGTTTCAACTATTAAACGTTCACGAACACGTACCAGAGCTATGATGACTGCTATTTCTGACCGTTTGAAAGTAGTTGATAGTGTCTTTATTGTGGGACACAGGAAATTGGACATGGATGCACTAGGTGCATCTGTAGGGATGCAATTTTTTGCTAGTAATATTGTTAATGCCAGTTATGTAGTTTATGACCCAAATGACATGAATTCTGATATTGAAAGAGCAATTGATTACTTGCAAGAAGACGGCGAAACACGTCTCGTAAGTGTTGAGAGAGCTTTTGAATTAATTACTCAAAATTCTTTATTAGTCATGGTAGACCATTCTAAAACAGCTTTAACCTTATCTAAGGAATTCTTTAACAAGTTTGCAGATGTTATTGTGGTAGATCATCATAGAAGAGATGAAGATTTTCCAAAAAATGCTGTTCTTTCATTTATAGAAAGTGGCGCAAGTAGTGCCAGCGAATTAGTTACAGAATTGATTCAATTTCAACAAGCTAAAGATAAATTAAGCCGCAGTCAAGCAAGTATTTTAATGGCTGGTATCATGCTTGATACAAGAAATTTTGCATCTAATGTAACGAGTAGAACTTTTGATGTGGCAAGCTATTTACGCGGTTTAGGTAGTAATAGTATGGCTATTCAAAAAATATCAGCTACAGATTTTGATGAATATCGTTTAATTAATGAATTGATTTTAAAAGGTGAGCGTATTTATGATAACATCATTGTTGCTACCGGAGAAGAACATAAAGTTTACTCGCATGTTATAGCTAGTAAAGCAGCTGACACCATGTTGACAATGGCAGGTATTGAGGCTACTTTTGTTATTACTAAAAACAGTTCAAATATTGGTATTTCAGCGCGCAGTAGAAATAATATCAATGTCCAGCGTATTATGGAAAAACTTGGTGGTGGCGGACATTTTAGTTTTGCTGCTTGTCAAATACAAGACAAGTCTGTAAAGCAAGTTAGACGTATGTTACTGGAAATAATTGACGAAGATTTAAGAGAAAATAGTACAGTCGAAAATAGAAGGGATTAA

SEQ ID NO: 3862 - protein, 461 aa, Streptococcus agalactiae
  VARIANT 2, 3: Xaa = Any Amino Acid
MXXVTSFISDFTQSKNIFYRRVNMDRYYIFTDYSVLNTLIKDKFDILNEFRKRAQENHLSLTLSMGISYGDGNHNQIGQIALENLNTALVRGGDQIVVRENDSSKKALYFGGGAVSTIKRSRTRTRAMMTAISDRLKVVDSVFIVGHRKLDMDALGASVGMQFFASNIVNASYVVYDPNDMNSDIERAIDYLQEDGETRLVSVERAFELITQNSLLVMVDHSKTALTLSKEFFNKFADVIVVDHHRRDEDFPKNAVLSFIESGASSASELVTELIQFQQAKDKLSRSQASILMAGIMLDTRNFASNVTSRTFDVASYLRGLGSNSMAIQKISATDFDEYRLINELILKGERIYDNIIVATGEEHKVYSHVIASKAADTMLTMAGIEATFVITKNSSNIGISARSRNNINVQRIMEKLGGGGHFSFAACQIQDKSVKQVRRMLLEIIDEDLRENSTVENRRD

SEQ ID NO: 3863 - protein, 372 aa, Streptococcus agalactiae
ATGAAAAGATTTCGTTTTGCAACCGTCCATTTAGTTTTAATAGGCCTGATTTTATTTGGACTATTAGCTATTTGTGTTAGGTTATTTCAATCCTATACGGCTCTATTATTGGCTATTTTTGTTGCTTTATCTTTTGTTGTTGCCTTATTATATTACCAAAAGATAACTTATGAACTATCTGAAGTTGAACAAATTGAATTACTTAATGATCAAACAGAAGTTTCTCTTAAGAGTCTTCTTGAACAAATGCCAGTTGGTGTTATACAATTTGATCTTGAAACAAATGATATTGAGTGGTTTAACCCTTATGCAGAATTGATTTTTACTGGGGATAATGGTCATTTTNNNNNCATTCATTCATTAATTAATTAA

SEQ ID NO: 3864 - protein, 123 aa, Streptococcus agalactiae
  VARIANT 116, 117: Xaa = Any Amino Acid
MKRFRFATVHLVLIGLILFGLLAICVRLFQSYTALLLAIFVALSFVVALLYYQKITYELSEVEQIELLNDQTEVSLKSLLEQMPVGVIQFDLETNDIEWFNPYAELIFTGDNGHFXXIHSLIN

SEQ ID NO: 3865 - protein, 1902 aa, Streptococcus agalactiae
ATGACACATAATTTTGCAGAAAACTATGATATTATCGTTGTTGGAGCGGGTCATTCAGGTGTGGAAGCTAGTCTAGCTGCTAGTCGTATGGGATGTAAGACACTTCTAGCCACTATCAACTTAGAAATGTTAGCATTTATGCCTTGTAATCCTTCTATAGGTGGCTCTGCTAAAGGTATCGTTGTCAGAGAGATTGACGCTTTAGGTGGTGAAATGGGTAAAAACATTGATAAAACCTATATACAAATGAAAATGCTTAATACAGGTAAGGGGCCTGCTGTCCGTGCCTTAAGAGCACAAGCTGATAAAGCCCTCTATGCACAAACAATGAAGCAAACTGTAGAAAAGCAAGAAAATCTTACCTTAAGACAAGCTATGATTGACGAAATACTTGTTGAAGATGGAAAGGTTGTGGGGGTTCGTACAGCAACTAATCAGAAATTTTCAGCAAAATCTGTTGTTATAACAACAGGTACTGCTCTTCGAGGAGAGATTATATTAGGTGATCTTAAGTACTCCTCGGGCCCTAATAATAGTTTAGCTTCTGTGACATTGGCAGATAATTTAAGAGACCTAGGATTAGAAATTGGTCGTTTCAAAACTGGAACACCTCCTCGTGTAAAAGCCTCCTCTATTAATTATGAAAAGACAGAGATACAACCTGGGGATGAGCAACCAAATCATTTTTCATTTATGTCTAGGGATGAAGATTATATTACTGACCAGGTACCGTGCTGGTTGACCTATACGAATACTTTGAGTCATGACATCATCAATCAAAATCTACACCGTGCTCCTATGTTTTCTGGAATCGTTAAGGGAGTTGGTCCTAGATATTGTCCGTCAATTGAAGATAAAATTGTGCGTTTTGCTGATAAAGAGCGCCACCAACTCTTCTTAGAACCAGAAGGTAGATACACTGAAGAAGTTTATGTTCAAGGGCTATCAACGAGTCTTCCTGAGGATGTTCAAGTTGATTTATTACGTTCTATAAAAGGGCTTGAAAATGCTGAAATGATGCGTACAGGCTATGCTATTGAGTATGATATTGTATTGCCTCATCAATTAAGAGCAACACTCGAAACAAAAGTAATTGCTGGTTTGTTTACTGCAGGACAGACTAATGGTACTTCAGGTTATGAAGAAGCTGCTGGTCAAGGGTTGGTTGCTGGGATCAACGCTGCTCTTAAAGTTCAAGGGAAGCCAGAACTTATTTTAAAACGAAGTGATGCTTACATTGGTGTCATGATTGATGATTTAGTTACCAAAGGGACTCTAGAACCATATCGTCTGTTGACAAGTCGCGCAGAATATCGTCTGATTCTTCGTCATGATAATGCAGATATGCGTTTAACAGAAATCGGTTATGAGATTGGCCTAGTAGATGAAGAGCGTTATGCGATATTTAAAAAGCGTCAAATGCAATTTGAAAATGAATTAGAACGTTTAGACTCTATAAAGTTAAAGCCAGTTTCTGAGACAAATAAACGGATTCAAGAATTGGGCTTTAAACCTTTGACAGATGCTTTAACTGCCAAAGAATTTATGCGCCGCCCACAAATCACATATGCAGTAGCAACGGATTTTGTTGGTTGTGCTGATGAGCCATTAGACAGTAAGGTTATTGAACTTTTGGAAACTGAAATTAAATACGAAGGCTATATTAAAAAGGCTTTAGATCAAGTTGCAAAAATGAAACGAATGGAAGAAAAACGTATTCCCCCTCATATTGACTGGGACGACATTGATTCTATCGCAACAGAAGCTAGACAAAAATTCAAAAAAATTAACCCAGAAACGCTAGGTCAGGCTAGTCGTATTTCAGGAGTTAATCCAGCCGATATTAGTATTTTAATGGTTTACCTTGAAGGAAGACAAAAAGGTCGTAAAAATATCAATTGA

SEQ ID NO: 3866 - protein, 633 aa, Streptococcus agalactiae
MTHNFAENYDIIVVGAGHSGVEASLAASRMGCKTLLATINLEMLAFMPCNPSIGGSAKGIVVREIDALGGEMGKNIDKTYIQMKMLNTGKGPAVRALRAQADKALYAQTMKQTVEKQENLTLRQAMIDEILVEDGKVVGVRTATNQKFSAKSVVITTGTALRGEIILGDLKYSSGPNNSLASVTLADNLRDLGLEIGRFKTGTPPRVKASSINYEKTEIQPGDEQPNHFSFMSRDEDYITDQVPCWLTYTNTLSHDIINQNLHRAPMFSGIVKGVGPRYCPSIEDKIVRFADKERHQLFLEPEGRYTEEVYVQGLSTSLPEDVQVDLLRSIKGLENAEMMRTGYAIEYDIVLPHQLRATLETKVIAGLFTAGQTNGTSGYEEAAGQGLVAGINAALKVQGKPELILKRSDAYIGVMIDDLVTKGTLEPYRLLTSRAEYRLILRHDNADMRLTEIGYEIGLVDEERYAIFKKRQMQFENELERLDSIKLKPVSETNKRIQELGFKPLTDALTAKEFMRRPQITYAVATDFVGCADEPLDSKVIELLETEIKYEGYIKKALDQVAKMKRMEEKRIPPHIDWDDIDSIATEARQKFKKINPETLGQASRISGVNPADISILMVYLEGRQKGRKNIN

SEQ ID NO: 3867 - protein, 645 aa, Streptococcus agalactiae
ATGATTTCAAAATTTATTTTAGCTTTCATGGCTTTTTTCGCCATTATGAATCCCATTTCTAATTTGCCAGCTTTTATGGCTTTAGTAGCTGATGATGATCAGAAGATTTCACGTCGGATTGCAGCAAAAGGAGTATTACTTGCTTTTGTCATTATTGTAATCTTTGTATTAAGTGGCCACTTACTTTTTAACTTATTTGGGATTACCCTAGCCGCCCTAAAAATATCTGGTGGAATATTGGTAGGCATTATAGGTTATAAAATGATTAATGGTATACATTCACCAACCAATAAAAACCTAGAGGAGCATAAGGATGATCCAATGAATGTGGCAGTTTCACCATTAGCAATGCCCCTTTTGGCAGGTCCGGGTACTATTGCAACTGCTATGGGGTTATCAAGTGGTGGTTTATCTGGCAAACTCATTACTATACTTGCTTTTGCCATATTATGTGTGATAATGTATGTTATTTTAATAAGTGCAAACGAAATTACTAAATTTCTTTGGAAAAAATGCAATGACTATAATCACCAAAATGATGGGACTTATTTTGATGACTATCGGGATAGAGATGCTAATAACAGGCATAAAAATTGGTTTTCATTTAACATAGCCTATCCCCTCTGGTTGACTTTTAAAAGATAA

SEQ ID NO: 3868 - protein, 214 aa, Streptococcus agalactiae
MISKFILAFMAFFAIMNPISNLPAFMALVADDDQKISRRIAAKGVLLAFVIIVIFVLSGHLLFNLFGITLAALKISGGILVGIIGYKMINGIHSPTNKNLEEHKDDPMNVAVSPLAMPLLAGPGTIATAMGLSSGGLSGKLITILAFAILCVIMYVILISANEITKFLWKKCNDYNHQNDGTYFDDYRDRDANNRHKNWFSFNIAYPLWLTFKR

SEQ ID NO: 3869 - protein, 1122 aa, Streptococcus agalactiae
ATGACTGATAATTCAAACATTCGTGTCGTTGTAGGCATGAGTGGAGGTGTTGATTCATCAGTAACTGCCCTGCTTTTAAAAGAGCAAGGTTATGATGTTATTGGTGTTTTTATGAAAAATTGGGATGACACAGATGAATTTGGTGTTTGTACGGCTACTGAAGATTATAAAGATGTTGCTGCTGTTGCTGATCAGATCGGCATACCATACTACTCTGTCAACTTTGAAAAAGAGTATTGGGACAGGGTTTTCGAATATTTTTTAGCAGAATATCGAGCAGGTCGTACGCCAAATCCAGATGTTATGTGTAATAAGGAAATTAAATTTAAAGCATTTCTAGATTATGCGATGACATTAGGTGCTGACTATGTAGCAACAGGTCATTATGCACAAGTAACACGTGATGAGAACGGAATAGTTCATATGCTTAGAGGAGCAGATAATAATAAGGATCAAACTTATTTTCTAAGTCAATTATCTCAGGAGCAATTGCAAAAAACGTTATTTCCACTTGGTCATTTACAAAAACCAGAAGTTCGCCGTATAGCTGAAGAAGCAGGACTTGCGACCGCTAAGAAAAAAGACTCTACTGGTATTTGTTTTATTGGAGAAAAAAATTTCAAGGATTTCCTGGGTCAATATTTACCGGCTCAACCAGGTCGTATGATGACTGTTGATGGTCGTGACATGGGTGAACATGCTGGTTTAATGTATTATACTATTGGTCAAAGAGGGGGCCTTGGTATTGGTGGGCAACATGGTGGAGATAATAAACCTTGGTTTGTAGTTGGAAAGGATTTAAGTAAAAACATTCTTTATGTAGGTCAAGGTTTCTATCATGACTCATTGATGTCAACTAGCTTGACAGCTTCTGAAATCCACTTTACACGTGATATGCCTAATGAATTTAAGCTAGAATGTACAGCTAAGTTCAGATATCGTCAACCTGACAGTAAAGTTACAGTTTACGTAAAAGGTAATCAAGCAAGGGTTGTGTTTGATGATTTACAACGAGCAATCACACCAGGTCAAGCTGTTGTTTTTTATAATGAACAAGAATGTTTAGGCGGTGGGATGATTGATCAGGCTTATCGTGATGATAAAATCTGTCAATACATTTAA

SEQ ID NO: 3870 - protein, 373 aa, Streptococcus agalactiae
MTDNSNIRVVVGMSGGVDSSVTALLLKEQGYDVIGVFMKNWDDTDEFGVCTATEDYKDVAAVADQIGIPYYSVNFEKEYWDRVFEYFLAEYRAGRTPNPDVMCNKEIKFKAFLDYAMTLGADYVATGHYAQVTRDENGIVHMLRGADNNKDQTYFLSQLSQEQLQKTLFPLGHLQKPEVRRIAEEAGLATAKKKDSTGICFIGEKNFKDFLGQYLPAQPGRMMTVDGRDMGEHAGLMYYTIGQRGGLGIGGQHGGDNKPWFVVGKDLSKNILYVGQGFYHDSLMSTSLTASEIHFTRDMPNEFKLECTAKFRYRQPDSKVTVYVKGNQARVVFDDLQRAITPGQAVVFYNEQECLGGGMIDQAYRDDKICQYI

SEQ ID NO: 3871 - protein, 669 aa, Streptococcus agalactiae
ATGAAACATTTAAAATTTCAATCGGTCTTCGACATTATTGGTCCTGTTATGATTGGACCATCAAGTAGTCATACTGCAGGAGCTGTCCGCATTGGTAAAGTTGTCCATTCTATTTTTGGTGAACCTAGTGAAGTAACCTTTCATTTATACAATTCTTTTGCTAAAACTTACCAAGGACACGGTACTGATAAAGCATTGGTTGCAGGGATTCTAGGAATGGATACAGATAATCCAGATATTAAAAACTCTCTTGAAATTGCTCATCAAAAAGGAATTAAGATTTACTGGGATATCCTAAAAGATAGTAATTCACCACATCCAAATACTGCGAAAATAACTGTTAAAAATGGGGATAGGAGCATGAGTATTACAGGAGTGTCAATTGGTGGCGGAAACATCCAAGTTACTGAGTTGAATGGATTCTCAGTTTCATTAACAATGAATACTCCTACTTTAATTATCGTTCATCAAGATATACCTGGCATGATTGCTAAAGTAACTGATATTTTATCTGACTTTAACATTAATATTGCTCAAATGAATGTAACACGCGAAAGTGCAGGAGAAAAAGCTATCATGATTATAGAAGTAGATTCACGAGATTGTCAACAAGCTGTCAAAAAGATAGAAGCTATTCCTCATTTACACAATGTCAACTTCTTTGATTAA

SEQ ID NO: 3872 - protein, 222 aa, Streptococcus agalactiae
MKHLKFQSVFDIIGPVMIGPSSSHTAGAVRIGKVVHSIFGEPSEVTFHLYNSFAKTYQGHGTDKALVAGILGMDTDNPDIKNSLEIAHQKGIKIYWDILKDSNSPHPNTAKITVKNGDRSMSITGVSIGGGNIQVTELNGFSVSLTMNTPTLIIVHQDIPGMIAKVTDILSDFNINIAQMNVTRESAGEKAIMIIEVDSRDCQQAVKKIEAIPHLHNVNFFD

SEQ ID NO: 3873 - protein, 804 aa, Streptococcus agalactiae
ATGATCCAAACGGAAATTGAAATGACTGGTAGAAGTCGTGAAGAAATTCGTTATATTATGTCCCGAAATCTTGAAGTCATGAAAGCTTCTGTTATTGATGGATTAACCCCTAGTAAATCAATCAGTGGTTTAACAGGCGGTGATGCTGTCAAGATGGATCAATATTTACAATCAGGAAAAACTATTTCAGATACCACAATCCTAGCTGCCGTTAGGAATGCTATGGCTGTTAATGAGTTAAATGCTAAGATGGGACTGGTCTGTGCAACACCAACTGCAGGTAGTGCAGGATGTTTACCAGCTGTGATTTCTACAGCCATTGAAAAGCTTAATTTAACAGAAGAAGAGCAACTTGATTTTCTATTTACAGCCGGCGCATTTGGTCTCGTCATTGGTAATAATGCCTCTATCTCAGGTGCAGAAGGAGGTTGCCAAGCTGAAGTTGGGTCAGCTAGTGCTATGGCTGCGGCTGCTTTAGTTATGGCTGCTGGAGGTACTCCTTTCCAAGCTAGCCAAGCTATAGCATTTGTTATTAAAAATATGCTTGGACTTATCTGTGACCCTGTTGCAGGTTTAGTTGAAGTCCCTTGTGTGAAGCGGAATGCTCTTGGATCAAGTTTTGCACTTGTTGCTGCTGATATGGCCTTGGCTGGTATTGAATCGCAAATTCCAGTAGATGAAGTTATTGATGCAATGTATCAAGTTGGATCAAGTTTACCGACTGCTTTTCGTGAGACTGCAGAAGGAGGACTTGCTGCCACGCCGACAGGAAGACGTTATAGTAAAGAAATTTTTGGGGAATAA

SEQ ID NO: 3874 - protein, 267 aa, Streptococcus agalactiae
MIQTEIEMTGRSREEIRYIMSRNLEVMKASVIDGLTPSKSISGLTGGDAVKMDQYLQSGKTISDTTILAAVRNAMAVNELNAKMGLVCATPTAGSAGCLPAVISTAIEKLNLTEEEQLDFLFTAGAFGLVIGNNASISGAEGGCQAEVGSASAMAAAALVMAAGGTPFQASQAIAFVIKNMLGLICDPVAGLVEVPCVKRNALGSSFALVAADMALAGIESQIPVDEVIDAMYQVGSSLPTAFRETAEGGLAATPTGRRYSKEIFGE

SEQ ID NO: 3875 - protein, 678 aa, Streptococcus agalactiae
TTGAATGTAAAAAAACATCATTTAGCTTATGGAGCTATCACTTTAGTAGCCCTTTTTTCATGTATTTTGGCTGTAATGGTCATCTTTAAAAGTTCACAAGTTACTACTGAATCTTTGTCAAAAGCAGATAAAGTTCGCGTAGCCAAAAAATCAAAAATGACTAAGGCGACATCTAAATCAAAAGTAGAAGATGTAAAACAGGCTCCAAAACCTTCTCAGGCATCTAATGAAGCCCCAAAATCAAGTTCTCAATCTACAGAAGCTAATTCTCAGCAACAAGTTACTGCGAGTGAAGAGGCAGCTGTAGAACAAGCAGTTGTAACAGAAAACACCCCTGCTACCAGTCAGGCACAACAAGCTTATGCTGTTACTGAGACAACTTATAGACCTGCTCAACACCAGACGAGTGGCCAAGTATTGAGTAATGGAAATACTGCAGGGGCTATTGGCTCAGCAGCTGCAGCACAAATGGCTGCTGCAACAGGAGTCCCTCAGTCTACTTGGGAACATATTATTGCCCGTGAATCAAATGGTAATCCTAATGTTGCTAATGCCTCAGGAGCTTCAGGACTTTTCCAAACGATGCCAGGTTGGGGTTCAACAGCTACAGTTCAGGATCAAGTTAATTCAGCTATTAAAGCTTATCGTGCTCAAGGTTTATCAGCTTGGGGTTACTAG

SEQ ID NO: 3876 - protein, 225 aa, Streptococcus agalactiae
MNVKKHHLAYGAITLVALFSCILAVMVIFKSSQVTTESLSKADKVRVAKKSKMTKATSKSKVEDVKQAPKPSQASNEAPKSSSQSTEANSQQQVTASEEAAVEQAVVTENTPATSQAQQAYAVTETTYRPAQHQTSGQVLSNGNTAGAIGSAAAAQMAAATGVPQSTWEHIIARESNGNPNVANASGASGLFQTMPGWGSTATVQDQVNSAIKAYRAQGLSAWGY

SEQ ID NO: 3877 - protein, 540 aa, Streptococcus agalactiae
ATGTCAATAACCTCGGTTAAAAAATCAAAACCATTTAAATTAGGAGTGGCAGGTCTTTTAGTGGGTGCTTCATTAGCTTTACCACTTTCAGTAAGCGCAGCATCTTATACCGTGAAATCAGGTGATACCTTATCAGCTATTGCTAAAAATCATAAAACTACGGTACAAGAGTTAGTGTCTCTCAATAGTATCAGTAACGCTGATGTCATCAGTATAGGTGATGTTTTAAAATTGGATAATTCTACAGCTAGTCAAGCAGAAGCAAAATCTCAACCAACAATTGAAAATTCAATGAATTCTTCATCAAATTTGAGTTCAAGTGATTCAGCCGCAAAAGAAGAAATAGCTCGTCGTGAATCAAATGGTAGTTATACTGCACAGAATGGACAATATTATGGAAGATATCAACTGTCTCAATCTTACCTAAATGGCGACTTATCTCCTGAAAATCAAGAAAAAGTAGCGGACAATTATGTGGTTTCTCGTTACGGATCTTGGTCGGCAGCGCTATCATTTTGGAATAGTAACGGCTGGTATTAA

SEQ ID NO: 3878 - protein, 179 aa, Streptococcus agalactiae
MSITSVKKSKPFKLGVAGLLVGASLALPLSVSAASYTVKSGDTLSAIAKNHKTTVQELVSLNSISNADVISIGDVLKLDNSTASQAEAKSQPTIENSMNSSSNLSSSDSAAKEEIARRESNGSYTAQNGQYYGRYQLSQSYLNGDLSPENQEKVADNYVVSRYGSWSAALSFWNSNGWY

SEQ ID NO: 3879 - protein, 795 aa, Streptococcus agalactiae
ATGGATAAATTGATTTTGGGACGTTACATACCAGGTAATTCTCTCATTCATAAATTAGATCCTCGAAGTAAGTTACTAGCCATGTTGCTTTTTATCATTATTGTTTTTTGGGCAAATAATGTAGTGACAAATGTGATCGTATTCATTTTTACGTTGGTTATTGTGGGTTTATCTCAGATAAAATTTTCCTATTTTTTCAATGGTATTAAACCGATGGTTGGTATTATTTTATTTACAACCCTCTTCCAGATGCTGTTTGCACAAGGCGGGCAGGTTATCTTCTCGTTTTGGATTTTTAGCATCACTAGCCTTGGGTTACAACAAGCAGCACTTATTTTTATGAGATTTGTTTTAATTATCTTCTTTTCGACATTACTTACCTTAACTACTACTCCGTTAAGTTTAGCAGATGCTGTTGAATCTTTGTTAAAACCATTGGAAGTACTGAGAGTACCAGCACACGAGATTGGTTTGATGTTATCCCTTAGCTTACGTTTCGTTCCTACTTTAATGGATGATACAACACGTATCATGAATGCTCAAAGAGCTCGTGGAGTTGATTTTGGAGAGGGAAACCTAATTCATAAGGTTAAGTCTATTATCCCTATTTTGATTCCATTATTTGCTTCTAGTTTTAAAAGAGCAGATGCGTTGGCAATTGCTATGGAAGCAAGAGGTTATCAAGGCGGAGCCAATCGTAGTAAGTACCGTTTATTGAAGTGGACTGTTCGGGATACTTTTAGTATATTACTTATGTTATTATTGGGTTTGAGTTTGTTTCTATTAAAAAATTAA

SEQ ID NO: 3880 - protein, 264 aa, Streptococcus agalactiae
MDKLILGRYIPGNSLIHKLDPRSKLLAMLLFIIIVFWANNVVTNVIVFIFTLVIVGLSQIKFSYFFNGIKPMVGIILFTTLFQMLFAQGGQVIFSFWIFSITSLGLQQAALIFMRFVLIIFFSTLLTLTTTPLSLADAVESLLKPLEVLRVPAHEIGLMLSLSLRFVPTLMDDTTRIMNAQRARGVDFGEGNLIHKVKSIIPILIPLFASSFKRADALAIAMEARGYQGGANRSKYRLLKWTVRDTFSILLMLLLGLSLFLLKN

SEQ ID NO: 3881 - protein, 842 aa, Streptococcus agalactiae
ATGGGAATTGAATTTAAAAATGTAAGTTATACCTATCAAGCCGGCACTCCTTTTGAAGGGCGTGCCCTTTTTGACGTCAATCTGAAAATTGAAGATGCTTCCTATACCGCGTTCATTGGGCACACAGGTTCTGGAAAATCAACTATTATGCAACTTTTGAATGGTTTACATATTCCTACAAAAGGTGAGGTAATTGTCGATGATTTTTCTATTAAAGCAGGGGACAAGAACAAAGAAATCAAATTATAAGGCAAAAAGTTGGTTTAGTTTTTCAATTTCCAGAAAGTCAGCTTTTTGAAGAGACAGTTTTAAAGGATGTTGCTTTTGGACCACAAAATTTTGGTATTTCTCAGATTGAAGCTGAAAGGCTGGCTGAAGAAAAATTAAGGTTAGTTGGTATCAGTGAGGATTTATTCGATAAAAATCCATTTGAACTTTCTGGAGGGCAGATGAGGCGGGTTGCTATAGCTGGTATTTTAGCGATGGAACCCAAAGTACTAGTACTGGATGAGCCAACAGCTGGACTTGATCCTAAGGGAAGAAAAGAATTAATGACTCTTTTTAAAAATCTTCATAAAAAAGGAATGACTATCGTCTTAGTGACTCACTTAATGGACGATGTAGCGGATTATGCTGACTATGTGTATGTTTTAGAAGCAGGGAAAGTAACCTTATCAGGACAACCAAAACAGATTTTTCAAGAAGTAGAACTTTTAGAAAGTAAACAATTAGGAGTTCCCAAAATCACCAAGTTTGCTCAAAGACTATCTCATAAGGGATTAAATTTACCTAGTTTACCAATTACTATTAACGAATTTGTGGAGGCTATTAAGCATGGATAA

SEQ ID NO: 3882 - protein, 280 aa, Streptococcus agalactiae
MGIEFKNVSYTYQAGTPFEGRALFDVNLKIEDASYTAFIGHTGSGKSTIMQLLNGLHIPTKGEVIVDDFSIKAGDKNKEIKFIRQKVGLVFQFPESQLFEETVLKDVAFGPQNFGISQIEAERLAEEKLRLVGISEDLFDKNPFELSGGQMRRVAIAGILAMEPKVLVLDEPTAGLDPKGRKELMTLFKNLHKKGMTIVLVTHLMDDVADYADYVYVLEAGKVTLSGQPKQIFQEVELLESKQLGVPKITKFAQRLSHKGLNLPSLPITINEFVEAIKHG

SEQ ID NO: 3883 - protein, 840 aa, Streptococcus agalactiae
ATGACAAATATTATTACCGTTAATAATCTCTTTTTTAAATATGATAGTAATCAAACACATTATCAATTGGAGAATGTATCGTTTCATGTGAAACAAGGAGAATGGCTATCTATTATTGGTCATAATGGTTCTGGGAAATCCACTACTGTTCGTTTAATAGATGGACTTTTAGAGGCGGAGTCTGGCCAGATTATCATTGATGGACAAGAGTTAACCGAAGATAATGTCTGGGAGTTACGTCACAAGATTGGCATGGTATTTCAAAATCCTGATAACCAATTTGTAGGGGCAACTGTTGAAGATGACGTCGCCTTTGGTTTGGAAAATAAAGGTATTCCTTTGAAAGACATGAAAGAAAGAGTGGACCAAGCACTTGATTTGGTAGGAATGTCTGAATTTAAAATGAGGGAGCCTGCACGTTTATCTGGAGGACAAAAGCAGCGTGTAGCCATTGCAGGAGCTGTAGCTATGCGTCCACAAGTTATCATCTTGGATGAGGCGACTAGTATGCTTGATCCTGAGGGACGATTGGAACTGATAAGAACGATACGAGCTATTCGTCAAAAATATAATCTTACTGTTATTTCAATTACACACGACTTAGATGAAGTTGCATTGAGTGATCGTGTCATCGTTATGAAAAATGGTAAAGTTGAGTCGACATCCACTCCAAAAGCGTTATTTGGTCGTGGAAATCGTTTGATTAGTTTAGGTTTAGATGTTCCCTTTACAAGTAGGTTAATGGCAGAACTGGCTGCTAATGGTCTTGATATAGGGACAGAGTATCTTACAGAGAAGGAATTAGAAGAACAATTATGGGAATTGAATTTAAAAATGTAA

SEQ ID NO: 3884 - protein, 279 aa, Streptococcus agalactiae
MTNIITVNNLFFKYDSNQTHYQLENVSFHVKQGEWLSIIGHNGSGKSTTVRLIDGLLEAESGQIIIDGQELTEDNVWELRHKIGMVFQNPDNQFVGATVEDDVAFGLENKGIPLKDMKERVDQALDLVGMSEFKMREPARLSGGQKQRVAIAGAVAMRPQVIILDEATSMLDPEGRLELIRTIRAIRQKYNLTVISITHDLDEVALSDRVIVMKNGKVESTSTPKALFGRGNRLISLGLDVPFTSRLMAELAANGLDIGTEYLTEKELEEQLWELNLKM

SEQ ID NO: 3885 - protein, 543 aa, Streptococcus agalactiae
ATGATGAAGAAAGAAAATATTCCGAATCTATTAACTGTAGTCAGAATTTTAATGATTCCGTTATTTATAGTATTAACTTCAGTAACAACAAGTACAACTTGGCATATTGTTGCAGCTATTGTATTTGCTATTGCAAGTTTGACCGATTACCTAGATGGTTATCTAGCACGTAAATGGCAAGTAGTAACAAATTTTGGGAAATTTGCAGACCCATTAGCTGATAAAATGCTAGTTATGAGTGCTTTTATCATGTTAGTTGGACTAGACTTAGCACCAGCTTGGGTTTCAGCTATTATCATTTGTAGAGAGTTAGCAGTTACAGGTTTGCGTTTACTTTTAGTTGAAACAGGTGGAACAGTACTTGCTGCAGCTATGCCAGGGAAAATAAAGACGGCTACTCAAATGTTTGCAGTTATTTTTTTGTTAGTACATTGGATGACACTTGGTAACATCATGTTATACATTGCTCTATTCTTTACCTTGTATTCAGGCTACGACTATTTTAAAGGTGCAGGCTTCTTATTTAAGGATACTTTTAAATAA

SEQ ID NO: 3886 - protein, 180 aa, Streptococcus agalactiae
MMKKENIPNLLTVVRILMIPLFIVLTSVTTSTTWHIVAAIVFAIASLTDYLDGYLARKWQVVTNFGKFADPLADKMLVMSAFIMLVGLDLAPAWVSAIIICRELAVTGLRLLLVETGGTVLAAAMPGKIKTATQMFAVIFLLVHWMTLGNIMLYIALFFTLYSGYDYFKGAGFLFKDTFK

SEQ ID NO: 3887 - protein, 402 aa, Streptococcus agalactiae
ATGGAATGNNNNNCTGGTCAAATTGATGATTCTTTTGATATAGAAATTGAAGTTCATCCAGATTTTGAGTGCGTTATTATTTCTTTAGATACGACAGAGCCAATTGCTTTTTCAACTCAGTTGAGGTTATTGCTAAAAAATGCTTTGCAATCATCTGATCTTACCGAAAGCCACTTAAAAAACGTTAAGAGAGAGCTCTATGGCGATTTTTTAAGAAGCTTAGATTCTATTGAAAATCTCGCAATGCAATTCGTCACCTATTTATATGATGGAAAAACGATGTATTTGGATTTGCCATCTATCGTTGAAGAATTAGATTTGGAAGATGTCATTACGATTGGTAAGGATTTCTTAGATAATGCTGACACATCTGACTTCGTTATTTTTCCAAAATCTTCGTAA

SEQ ID NO: 3888 - protein, 133 aa, Streptococcus agalactiae
  VARIANT 3, 4, 5: Xaa = Any Amino Acid
MEXXXGQIDDSFDIEIEVHPDFECVIISLDTTEPIAFSTQLRLLLKNALQSSDLTESHLKNVKRELYGDFLRSLDSIENLAMQFVTYLYDGKTMYLDLPSIVEELDLEDVITIGKDFLDNADTSDFVIFPKSS

SEQ ID NO: 3889 - protein, 747 aa, Streptococcus agalactiae
ATGAATGAATGNNNNNCACCTAGTCTAAGACGAAAATTTTTAGATATAGATATTGGACAAATTAAGCCAACGTACTTAGCTGAACTTTCAAATTACAATCATGTATTAAAACAAAGAAACACTTATCTAAAAACTACTAATAACGTCGACAAAACTTTTTTAACAGTCCTTGATGAACAATTAGCTGATTATGGAAGTCGTGTCATTGAACACCGTTTTGATTTTATCCAAGCCCTAAATGATGAAGCGGACAAACATCACTACATTATCAGTACTGAGTTAGAACATTTATCTATTCACTACAAATCGTCAATAGAGTTTACAGATAAGTCAAGTATTAGGGAACATTTTTTAAACCAATTATCTAAAAGCCACTCAAGAGACATCTTTAAGAAAAACACAAGCATCGGACCTCATCGTGATGATATTACTTTCTTTATTAATGATATCAATGCTACTTTTGCTAGCCAAGGGCAACAAAGAAGCCTTATTTTATCATTGAAATTAGCAGAAATTGAGCTAATAAAAACCGTTACCAACGATTATCCGATTCTCTTACTTGACGACGTCATGAGTGAACTTGACAACCATCGTCAACTAAAACTCTTAGAGGGAATCAAAGAGAATGTTCAAACATTTATTACTACAACAAGTTTAGAACATTTAAGTGCTTTACCTGATCAACTCAAAATCTTTAACGTTAGTGATGGTACTATTAGTATTAATGAAAAAAAAGCAACAGATTAA

SEQ ID NO: 3890 - protein, 248 aa, Streptococcus agalactiae
  VARIANT 4, 5, 6: Xaa = Any Amino Acid
MNEXXXPSLRRKFLDIDIGQIKPTYLAELSNYNHVLKQRNTYLKTTNNVDKTFLTVLDEQLADYGSRVIEHRFDFIQALNDEADKHHYIISTELEHLSIHYKSSIEFTDKSSIREHFLNQLSKSHSRDIFKKNTSIGPHRDDITFFINDINATFASQGQQRSLILSLKLAEIELIKTVTNDYPILLLDDVMSELDNHRQLKLLEGIKENVQTFITTTSLEHLSALPDQLKIFNVSDGTISINEKKATD

SEQ ID NO: 3891 - protein, 708 aa, Streptococcus agalactiae
ATGACTGCCTCATTGTGGATTTTTGGTATCTTAGGTGGTATCCTATGGTCAGTCGGCCAAAATGGTCAATTCCAAGCAATGAAATATATGGGAGTCTCTGTTGCTAATCCACTGTCAAGTGGTGCACAATTAGTAGGTGGAAGCCTAGTTGGTGCTTTAGTCTTTCATGAATGGACTAAGCCAATCCAATTTATTTTAGGATTGACAGCGTTGACATTATTAGTTATCGGCTTCTATTTCTCAAGTAAACGTGATGTCTCAGAACAAGCTTTGGCAACACATCAAGAGTTTTCAAAAGGATTTGCTACAATTGCTTATTCAACTGTAGGTTACATCTCATACGCAGTTTTATTTAATAACATTATGAAGTTCGACGCTATGGCCGTTATTTTACCCATGGCTGTTGGAATGTGTCTAGGTGCAATTTGTTTCATGAAGTTTCGTGTTAACTTTGAGGCTGTTGTTGTTAAAAATATGATTACAGGTCTCATGTGGGGCGTTGGTAATGTCTTCATGTTATTGGCAGCAGCTAAAGCAGGGCTAGCAATTGCTTTTAGTTTTTCTCAACTTGGAGTAATTATCTCTATTATTGGTGGTATTTTATTTTTAGGTGAGACAAAAACGAAGAAAGAGCAGAAGTGGGTTGTCATGGGTATCCTTTGTTTTGTTATGGGTGCTATATTACTTGGTATTGTTAAATCTTATTAA

SEQ ID NO: 3892 - protein, 235 aa, Streptococcus agalactiae
MTASLWIFGILGGILWSVGQNGQFQAMKYMGVSVANPLSSGAQLVGGSLVGALVFHEWTKPIQFILGLTALTLLVIGFYFSSKRDVSEQALATHQEFSKGFATIAYSTVGYISYAVLFNNIMKFDAMAVILPMAVGMCLGAICFMKFRVNFEAVVVKNMITGLMWGVGNVFMLLAAAKAGLAIAFSFSQLGVIISIIGGILFLGETKTKKEQKWVVMGILCFVMGAILLGIVKSY

SEQ ID NO: 3893 - protein, 663 aa, Streptococcus agalactiae
ATGAAAAATTATGGAAAAATTTTAAAAGAGTTGAGAGAGGACAAAGGTATATCCCTAAGTTCTCTAGCCAAAAGTGCTCAATTATCAAAATCAACTCTATCACGTTTTGAAAATGGTGAGACACAAATAGGTATTGATAAATTTATTAAAGCTTTACAAACGTTGGAGGTTGGGGTAACTATCAATGAAGTATCCATTCTAGATTCAAAAGTTAAGGCTGGAACTTCTAATACTGATTTAGAGCAATTAACTTTACTGGAATCTTATCGAGATAATGAAGATATCATGAGAATTTTCAGTTTCCAAAAACAACAATCCTGTGATAGAATAGAAAGCAATGTTCTCAAAATATTGGCTAAACTTTTTATTTCAAATTTAGGGTTAAATATGAGGCTGCCTCAAGATGAGATTAACCTGGTAGTTACTTATCTGAATGGTGTGACACAGTACAATGATTTTTATTTCAAAGTCATCTGCTATTTTCAAGATATTTTACCTGAAGATGTTATTTTAAATAAGATTAGTAATATGACTAAAGAACAGTTACCTTATTCTAAATCACTGGTCAATTTATTGATAAAACAAGTCATTATAGCTTTGGAAAAAGATAGTGTTGATAAAGCTATAGTATTTGCTGATCTTGCTAATAAAGTTAGTCAATAG

SEQ ID NO: 3894 - protein, 220 aa, Streptococcus agalactiae
MKNYGKILKELREDKGISLSSLAKSAQLSKSTLSRFENGETQIGIDKFIKALQTLEVGVTINEVSILDSKVKAGTSNTDLEQLTLLESYRDNEDIMRIFSFQKQQSCDRIESNVLKILAKLFISNLGLNMRLPQDEINLVVTYLNGVTQYNDFYFKVICYFQDILPEDVILNKISNMTKEQLPYSKSLVNLLIKQVIIALEKDSVDKAIVFADLANKVSQ

SEQ ID NO: 3895 - protein, 1482 aa, Streptococcus agalactiae
ATGTCAAATTGGGATACTAAGTTTTTGAAAAAAGGTTTTACTTTTGATGATGTTCTGCTTATTCCTGCTGAAAGCCATGTTTTACCAAATGAAGTTGATATGAAGACAAAGTTGGCTGATAATTTGACATTAAACATTCCAATCATTACAGCTGCAATGGATACAGTTACAGATAGTAAGATGGCTATTGCTATTGCACGTGCTGGTGGGCTTGGTATCATTCATAAAAATATGTCAATAGTTGATCAAGCAGAAGAAGTTCGTAAAGTTAAACGCTCAGAAAATGGTGTTATTATTGACCCATTCTTCTTGACACCAGATAATACTGTCTCTGAAGCTGAGGAATTGATGCAAAACTATCGCATTAGTGGAGTTCCTATTGTAGAGACACTCGAGAATCGTAAATTAGTTGGAATTATTACTAACCGTGATATGCGTTTCATTTCTGATTATAAACAACTAATCTCAGAGCACATGACAAGTCAAAATCTTGTAACAGCTCCTATTGGTACAGATCTTGAAACTGCAGAGCGTATTCTTCATGAGCATCGTATTGAAAAGCTACCTTTAGTAGATGATGAGGGACGTCTTTCAGGACTTATTACTATTAAGGATATCGAAAAAGTTATTGAATTTCCTAAGGCAGCAAAAGATGAATTTGGACGTCTCTTAGTTGCAGGTGCAGTAGGTGTAACCTCTGATACTTTTGAACGTGCAGAAGCTTTGTTTGAAGCAGGTGCAGATGCTATTGTCATTGATACAGCACATGGACATTCAGCTGGTGTGCTCCGTAAAATTGCTGAAATTCGTGCTCACTTCCCTAATCGCACATTGATTGCGGGAAATATTGCTACAGCAGAAGGAGCGCGTGCACTTTATGATGCAGGTGTGGATGTCGTTAAAGTTGGTATTGGTCCAGGTTCAATTTGTACGACTCGTGTCGTTGCTGGGGTAGGTGTTCCTCAGATTACAGCTATTTACGATGCAGCGGCTGTTGCGCGTGAGTACGGTAAGACTATCATTGCTGATGGTGGTATTAAATATTCAGGTGATATTGTAAAAGCACTTGCAGCAGGTGGAAATGCAGTTATGCTAGGTTCAATGTTTGCAGGAACAGATGAAGCGCCAGGAGAAACAGAAATTTTCCAAGGGCGTAAGTTCAAGACATACCGTGGTATGGGCTCAATTGCAGCAATGAAAAAAGGTTCAAGCGATCGTTATTTCCAAGGTTCTGTAAACGAGGCTAACAAATTGGTTCCAGAAGGTATTGAAGGTCGTGTAGCATACAAAGGTTCAGTAGCCGATATTGTTTTCCAAATGCTTGGTGGCATTCGCTCTGGTATGGGATATGTAGGTGCAGCGAACATAAAAGAACTTCATGATAATGCTCAATTTGTTGAAATGTCAGGAGCTGGCTTGAAAGAAAGCCATCCCCATGATGTTCAAATTACAAATGAGGCACCAAATTATTCAGTACACTAA

SEQ ID NO: 3896 - protein, 493 aa, Streptococcus agalactiae
MSNWDTKFLKKGFTFDDVLLIPAESHVLPNEVDMKTKLADNLTLNIPIITAAMDTVTDSKMAIAIARAGGLGIIHKNMSIVDQAEEVRKVKRSENGVIIDPFFLTPDNTVSEAEELMQNYRISGVPIVETLENRKLVGIITNRDMRFISDYKQLISEHMTSQNLVTAPIGTDLETAERILHEHRIEKLPLVDDEGRLSGLITIKDIEKVIEFPKAAKDEFGRLLVAGAVGVTSDTFERAEALFEAGADAIVIDTAHGHSAGVLRKIAEIRAHFPNRTLIAGNIATAEGARALYDAGVDVVKVGIGPGSICTTRVVAGVGVPQITAIYDAAAVAREYGKTIIADGGIKYSGDIVKALAAGGNAVMLGSMFAGTDEAPGETEIFQGRKFKTYRGMGSIAAMKKGSSDRYFQGSVNEANKLVPEGIEGRVAYKGSVADIVFQMLGGIRSGMGYVGAANIKELHDNAQFVEMSGAGLKESHPHDVQITNEAPNYSVH

SEQ ID NO: 3897 - protein, 486 aa, Streptococcus agalactiae
ATGAATAAAAAAGAAACAAGACACCAATTAATTCGTTCCTTAGTCTCTGAGACTAAGGTGCGTACACAACATGAGTTAAGGGAATTACTAGAAAAAAATGGCGTTTCAGTGACGCAAGCAACATTATCTCGAGATATGAAGGAACTTAATTTAATTAAGGTTAACGAAAGCAGTGATAATGCTATAGAAACTTATTATGAGATTCATAGTATATCTCAGAAGCGTTGGGAAGAACGGTTACGTTTTTACATGGAAGATGCCCTAGTCATGCTGTTTCCAGTTCAAAACCAAATCGTTTTGAAGACACTACCTGGCTTAGCTCAATCTTTTGGCTCCATATTAGATTCGATTTTATTACCTGAGATCTTAGCAACTGTCTGTGGTGATGATACTTGTTTGATTATTTGTAATAATAGTGAAGAAGCTCAAAAGTGTTTTGAGAAATTAAGTCAGTATACGCCGCCTTTCTTCTTCTCAAAAAAATAG

SEQ ID NO: 3898 - protein, 161 aa, Streptococcus agalactiae
MNKKETRHQLIRSLVSETKVRTQHELRELLEKNGVSVTQATLSRDMKELNLIKVNESSDNAIETYYEIHSISQKRWEERLRFYMEDALVMLFPVQNQIVLKTLPGLAQSFGSILDSILLPEILATVCGDDTCLIICNNSEEAQKCFEKLSQYTPPFFFSKK

SEQ ID NO: 3899 - protein, 681 aa, Streptococcus agalactiae
GTGATTACAAAAGAACAATATTTTTATTTCAGACAACTAGATGATTTTAAACACTTTACTATTGAACAATTTGACCATATTGTGAGCCACATTAAACATCGTACAGCTCTAAAAAATCATACCTTATTTTTTGAAGGTGATTACCGTGAAAAACTGTTTTTAATCCAGTCAGGACATGTAAAAATTGAACAATCAGACGCTTCTGGTTCTTTCATTTATACAGATTATGTTAGACAAGGTACGGTTTTTCCTTATGGAGGTCTCTTTTTGGATGATGATTACCATTTTTCAGCAGTGGCTATTACGGATATTGAGTATTTTTCTCTGCCAATGGCTTTATACGAAGAATACTCTCTTCAAAATATCAATCAAATGAAGCATCTTTGTCGGAAATATTCTAAGCTATTACGAGTTCATGAAATACGACTTCGTAATATGGTGACTTCAAGTGCCAGTATGAGAGTTATCCAATCGCTTGCAACTCTACTTTTGCAAGTTCCTACAGAAAGGGGACATTTACCTTTTCCTATTACAACGATTGAAATTGCCAATATGAGCGGAACTACTCGCGAGACAGTTAGTCATGTTTTAAAGGAATTACGCCAAAAAGATATCGTTGAAATGAAAGGAAAGAAGCTTCTCTATAATAATAAAAATTATTTCAAGAAATTCATTGAATAA

SEQ ID NO: 3900 - protein, 226 aa, Streptococcus agalactiae
MITKEQYFYFRQLDDFKHFTIEQFDHIVSHIKHRTALKNHTLFFEGDYREKLFLIQSGHVKIEQSDASGSFIYTDYVRQGTVFPYGGLFLDDDYHFSAVAITDIEYFSLPMALYEEYSLQNINQMKHLCRKYSKLLRVHEIRLRNMVTSSASMRVIQSLATLLLQVPTERGHLPFPITTIEIANMSGTTRETVSHVLKELRQKDIVEMKGKKLLYNNKNYFKKFIE

SEQ ID NO: 3901 - protein, 705 aa, Streptococcus agalactiae
ATGACTAAATTTATTGTTGATTCATCGTACTGGAATTTGTTTCCAACTTCTAAAATTGGAGTAATCTTAATCAAAGATTATCACATGGACAGAAACCTTGAAACAGAACTTAAACAGTTACTGTCTGATAGTCATTCTTTAGCAAAAAAATATTTGCAAGAGAAAGAATTCAGTCAAAACAGAGTTATCCAAACTTATCGCAAAGCATATCAAACCTTTAAAACTAAAAAAGGTGCACGTTCAAGTATCGAAGCATTATTGAAGCGAGTTAATTCAGGAAACGAAATTACTAGTATAAATCCTCTAGTTGATATCTATAATGCCGCTAGCCTTAGGTTTGGATTACCTATTGGTGCTGAGGATAGTGATACATTTAGAGGTGATTTAAAACTAACTATTACCAATGGTGGTGATGAATTTTACTTGATTGGCGAAGATTTTAACAGACCAACTCTTTCAGGTGAGCTTGCCTATGTTGATGATGTTGGAGCAGTTTGCCGCTGTTTTAATTGGCGTGATGGAAAACGTACTATGATTACCGATAATACTCAGAATGCTTTTTTAGTTATCGAATTAATTGATAATGGAAGAGAAATTATTTTTAAAGAAGCGTTGGACTTTATCGCCACCAATACAAATCGTTTTCTAAAAGCTAAAACACAGACCATCATATTAGATAAAGAACACAGTGAAATAACGCTATAA

SEQ ID NO: 3902 - protein, 234 aa, Streptococcus agalactiae
MTKFIVDSSYWNLFPTSKIGVILIKDYHMDRNLETELKQLLSDSHSLAKKYLQEKEFSQNRVIQTYRKAYQTFKTKKGARSSIEALLKRVNSGNEITSINPLVDIYNAASLRFGLPIGAEDSDTFRGDLKLTITNGGDEFYLIGEDFNRPTLSGELAYVDDVGAVCRCFNWRDGKRTMITDNTQNAFLVIELIDNGREIIFKEALDFIATNTNRFLKAKTQTIILDKEHSEITL

SEQ ID NO: 3903 - protein, 1233 aa, Streptococcus agalactiae
ATGACTCAAACACATCCAATTCATGTTTTCTCAGAAATTGGAAAACTTAAAAAAGTTATGCTACACCGTCCAGGTAAAGAAATAGAAAATCTGATGCCTGATTATTTAGAGAGACTCTTGTTTGATGATATCCCATTTTTGGAAGATGCACAAAAAGAACACGATGCGTTTGCACAAGCACTTCGCAACGAAGGAGTCGAAGTACTTTACCTTGAAAATCTTGCTGCCGAGTCGTTAACAAACCAAGAAATTCGTGAACAGTTTATCGATGAGTACATTGGCGAAGCAAATGTTCGCGGTCGTGCTACTAAAAAAGCTATTCGAGAATTATTACTCAATATCAAAGATAATAAAGAACTTATCGAAAAAACTATGGCAGGTATCCAAAAGTCTGAGCTACCTGAAATCCCATCTTCTGAAAAAGGTCTAACTGATCTTGTCGAATCTAATTATCCATTTGCCATAGATCCGATGCCAAATCTTTACTTTACACGTGATCCATTTGCAACTATTGGGAATGGAGTTTCATTAAATCATATGTTCTCTGAAACACGTAATCGCGAAACTTTATACGGTAAATATATCTTTACACATCACCCAGAGTACGGTGGAAAAGTCCCTATGGTCTATGAACGTGAAGAAACAACTCGTATTGAAGGTGGAGATGAGCTTGTCCTTTCTAAAGATGTCCTTGCCGTTGGTATCTCTCAACGTACTGATGCTGCCTCTATTGAAAAACTCTTAGTCAATATTTTTAAACAAAATTTAGGTTTTAAAAAGGTTTTAGCATTTGAATTTGCAAATAATCGTAAATTTATGCACCTTGACACAGTCTTTACAATGGTTGACTATGACAAGTTTACAATTCACCCAGAAATTGAAGGCGATCTTCGCGTTTACTCTGTAACTTACGAAAACCAAGATCTTCATATTGAAGAAGAAAAAGGTGATTTGGCAGATCTTCTAGCGAAAAACCTAGGAGTTGAGAAAGTGGAATTGATTCGTTGTGGGGGTGACAACTTAGTCGCTGCTGGACGTGAACAATGGAATGATGGTTCAAATACATTAACTATAGCACCAGGTGTCGTTATCGTTTACAACAGAAATACAATCACAAATGCAATCTTAGAGTCCAAAGGATTGAAATTAATTAAGATTAATGGAAGTGAATTAGTTCGTGGGCGTGGTGGACCACGCTGCATGTCAATGCCATTTGAACGTGAAGACCTTTAA

SEQ ID NO: 3904 - protein, 410 aa, Streptococcus agalactiae
MTQTHPIHVFSEIGKLKKVMLHRPGKEIENLMPDYLERLLFDDIPFLEDAQKEHDAFAQALRNEGVEVLYLENLAAESLTNQEIREQFIDEYIGEANVRGRATKKAIRELLLNIKDNKELIEKTMAGIQKSELPEIPSSEKGLTDLVESNYPFAIDPMPNLYFTRDPFATIGNGVSLNHMFSETRNRETLYGKYIFTHHPEYGGKVPMVYEREETTRIEGGDELVLSKDVLAVGISQRTDAASIEKLLVNIFKQNLGFKKVLAFEFANNRKFMHLDTVFTMVDYDKFTIHPEIEGDLRVYSVTYENQDLHIEEEKGDLADLLAKNLGVEKVELIRCGGDNLVAAGREQWNDGSNTLTIAPGVVIVYNRNTITNAILESKGLKLIKINGSELVRGRGGPRCMSMPFEREDL

SEQ ID NO: 3905 - protein, 432 aa, Streptococcus agalactiae
ATGAAGCTATTAGTCAATCACTTGCCTTACCAAAGAGCTGCAAGCCTATATATTCGCTTTTCTGTTTTCGTTATCGAAAGAAATATAAAAATGGAAGAAGAATTCGATGATAATGACGAGCAAGATACTATTTATGCTGTTCTTTATGATGGGAAACAGCCAGTTTCAACAGGACGCTTTCTTCCTGAAACTCAAACAGAAGCTCGTTTGACTCGAATTGCGACTTTAAAAGGTTATCGTGGTAACGGCTATGGTACCAAAATTATTATAGCACTAGAAAATTATGCAAAAGAAAATGGTTATCACTATCTAACTATACATGCTGAATTGACAGCAAAAGATTTCTACCAGACACTTGGGTATCAAGCTACTGGGAATATTTATATGGAAGACGGGGAAGCCTGTCAAACACTCGAAAAATATTTAATTTAA

SEQ ID NO: 3906 - protein, 143 aa, Streptococcus agalactiae
MKLLVNHLPYQRAASLYIRFSVFVIERNIKMEEEFDDNDEQDTIYAVLYDGKQPVSTGRFLPETQTEARLTRIATLKGYRGNGYGTKIIIALENYAKENGYHYLTIHAELTAKDFYQTLGYQATGNIYMEDGEACQTLEKYLI

SEQ ID NO: 3907 - protein, 1014 aa, Streptococcus agalactiae
ATGACACAAGTATTTCAAGGACGTAGTTTCTTAGCAGAAAAAGATTTTTCTCGTGAGGAATTTGAATATCTTATTGATTTTTCAGCTCATTTAAAAGACCTTAAAAAACGTGGTGTTCCTCATCATTATCTTGAAGGTAAAAATATTGCTCTCTTATTTGAAAAAACATCTACTCGTACTCGCGCAGCCTTTACAACTGCAGCAATTGACCTAGGCGCTCATCCGGAATACCTTGGTGCAAATGATATTCAACTTGGTAAAAAAGAATCAACAGAAGATACTGCTAAGGTTTTAGGACGTATGTTTGATGGTATTGAATTCCGTGGTTTTAGCCAAAGAATGGTTGAAGAGCTTGCTGAATTTTCTGGAGTACCTGTCTGGAATGGTTTAACAGATGAATGGCATCCAACACAAATGCTAGCTGACTACCTTACTATCAAAGAAAACTTCGGTAAACTTGAAGGTATTACTCTTGTTTACTGTGGTGACGGACGTAACAATGTTGCCAACTCGCTTTTAGTGGCTGGGACTTTGATGGGGGTCAATGTACACATCTTTTCTCCAAAAGAACTTTTCCCTGCTGAAGAGATTGTTAAATTGGCTGAAGAATATGCCAAAGAGTCCGGGGCTCACGTTCTCGTTACTGATAATGTAGACGAAGCTGTAAAGGGAGCAGATGTCTTTTACACTGATGTCTGGGTATCGATGGGAGAAGAAGATAAGTTCAAAGAACGCGTTGAACTTCTTCAACCATATCAAGTAAACATGGAACTGATTAAAAAAGCTAATAATGATAATCTTATCTTCTTACACTGCTTACCTGCATTCCATGATACAAATACCGTTTACGGCAAAGACGTCGCTGAAAAATTTGGCGTCAAGGAAATGGAAGTTACTGATGAAGTCTTCCGTAGCAAATATGCTCGTCATTTCGACCAAGCTGAAAATCGTATGCACACTATTAAAGCTGTAATGGCTGCAACCCTTGGAAATCTTTTCATTCCAAAAGTTTAA

SEQ ID NO: 3908 - protein, 337 aa, Streptococcus agalactiae
MTQVFQGRSFLAEKDFSREEFEYLIDFSAHLKDLKKRGVPHHYLEGKNIALLFEKTSTRTRAAFTTAAIDLGAHPEYLGANDIQLGKKESTEDTAKVLGRMFDGIEFRGFSQRMVEELAEFSGVPVWNGLTDEWHPTQMLADYLTIKENFGKLEGITLVYCGDGRNNVANSLLVAGTLMGVNVHIFSPKELFPAEEIVKLAEEYAKESGAHVLVTDNVDEAVKGADVFYTDVWVSMGEEDKFKERVELLQPYQVNMELIKKANNDNLIFLHCLPAFHDTNTVYGKDVAEKFGVKEMEVTDEVFRSKYARHFDQAENRMHTIKAVMAATLGNLFIPKV

SEQ ID NO: 3909 - protein, 1428 aa, Streptococcus agalactiae
ATGGAAAAAGAAAAAAAATTAGGTCTTTTACCACTAACAATGCTTGTCATTGGCTCTCTTATCGGTGGCGGAATCTTTGATTTAATGCAAAATATGAGTTCCAGAGCCGGTTTGGTACCAATGCTTATTGCTTGGGTAATTACTGCTATCGGGATGGGGACTTTCGTTTTAAGTTTTCAAAATTTATCTGAAAAAAGGCCGGACCTAACAGCTGGAATCTTTAGTTACGCTAAAGAGGGGTTTGGAAACTTTATGGGATTTAACTCTGCATGGGGTTATTGGTTATCAGCTTGGCTTGGAAATGTTGCCTACGCTGCACTCTTATTCAGTTCACTCGGTTATTTCTTTAAATTCTTTGGTAATGGAAATAATATCATCTCAATTATTGGAGCAAGTATAGTTATTTGGGTTGTCCATTTCTTAATTTTAAGAGGTGTTAATACAGCTGCATTTATTAATACCATAGTTACCTTTGCAAAATTAGTACCTGTTATTATTTTCTTAATTTCAGCGTTATTAGCTTTCAAATTTAACATTTTTAGTCTTGATATCTGGGGAAATGGATTACATCAATCAATTTTCAACCAAGTCAATTCAACTATGAAAACCGCTGTTTGGGTATTTATTGGTATTGAGGGCGCCGTTGTCTTCTCAGGTCGTGCTAAAAAACACTCTGATATTGGTAAAGCAAGTATCCTAGCATTATTCACTATGATTTCACTTTATGTATTGATTTCTGTTTTATCACTTGGTATCATGTCACGTCCAGAACTTGCAAACTTAAAAACACCAGCTATGGCTTACGTTCTAGAAAAGGCTGTTGGTCACTGGGGCGCTATCTTAGTTAACCTTGGTGTTATCATTTCAGTATTTGGCGCTATTCTTGCTTGGACTTTATTTGCAGCAGAATTACCATATCAAGCTGCTAAAGAAGGTGCTTTTCCTAAATTCTTTGCAAAAGAAAATAAAAACAAAGCTCCAATCAATTCACTCTTAGTCACTAATCTTTGTGTACAAGCATTCTTAATCACGTTCTTATTCACACAAAGTGCTTATCGTTTTGGTTTCGCATTAGCATCATCTGCTATCTTAATTCCTTATGCTTTTACAGCACTATATCAATTACAATTCACACTCCGTGAGGATAAGTCAACTCCAGGACATCAAAAGAATTTAATTATCGGTATCCTCGCTACAATCTATGCTGTTTACCTTATCTACGCTGGTGGTTTTGATTACTTACTTTTGACAATGATTGCTTACACTCTAGGTATGATTCTCTATATTAAAATGAGAAAAGATGACAAGCTTCCTATCTTTGTGGGATATGAAAAAATTAGTGCCATTGTCATTCTAGCGCTTTGCTTATTATGTATTATTGAAATTATGACTGGACAAATTGACATTGCTGCAATCCTAGCAGGTTAG

SEQ ID NO: 3910 - protein, 475 aa, Streptococcus agalactiae
MEKEKKLGLLPLTMLVIGSLIGGGIFDLMQNMSSRAGLVPMLIAWVITAIGMGTFVLSFQNLSEKRPDLTAGIFSYAKEGFGNFMGFNSAWGYWLSAWLGNVAYAALLFSSLGYFFKFFGNGNNIISIIGASIVIWVVHFLILRGVNTAAFINTIVTFAKLVPVIIFLISALLAFKFNIFSLDIWGNGLHQSIFNQVNSTMKTAVWVFIGIEGAVVFSGRAKKHSDIGKASILALFTMISLYVLISVLSLGIMSRPELANLKTPAMAYVLEKAVGHWGAILVNLGVIISVFGAILAWTLFAAELPYQAAKEGAFPKFFAKENKNKAPINSLLVTNLCVQAFLITFLFTQSAYRFGFALASSAILIPYAFTALYQLQFTLREDKSTPGHQKNLIIGILATIYAVYLIYAGGFDYLLLTMIAYTLGMILYIKMRKDDKLPIFVGYEKISAIVILALCLLCIIEIMTGQIDIAAILAG

SEQ ID NO: 3911 - DNA, 957 bp, Streptococcus agalactiae
ttggtaaaagaacatcaaaaaatcgtagttgccttaggtggcaacgctattctatcaacagatgcttcagcaaaagcacaacaagaagcattaatcaacacatcaaaatcactggtcaaactgattaaagaaggccatgatgtcattgttactcatggaaatggtccccaagttggtaacttattgctacagcaagcagcttcagattctgaaaagaatccagcaatgcctttggatacttgtgttgccatgacagaaggaagtattggtttttggttacaaaatgctcttaacaatgaattacaagaacaaggcattgacaaagaggttgcaacagtggtaactcaagttattgtagatgaaaaagatcaagctttcactaatccaacaaaacctattggcccattcttatctgaagaagatgccaagaaacaagcccaagaaacaggttcaaaatttaaagaagatgctggccgtggatggcgtaaagtcgttccttcaccaaaaccggttggtatcaaagaagcttctgttattagacggttagtggactctggtgtggttgttattagcgcaggtggtggaggtgtaccagttattgaagatgctaatacaaaggcattaaaaggggttgaagctgttattgacaaagactttgccagtcaaactttatcagaacttgttgatgctgacttattcatcgtcttaactggcgttgacaacgtttttgttaattttaataaacctaatcaagaaaaattagaagaagttactgtttcacaaatgaaacaatatatcactgaaaatcaatttgcccctggaagtatgctaccaaaggtcgaagctgcgattgcttttgttgaaaataaacctgaatcacgagctattattacttcacttgaaaatattgataatgttttagcccaaaatgcagggacacaaattgttgcaaattaa

SEQ ID NO: 3912 - protein, 318 aa, Streptococcus agalactiae
MVKEHQKIVVALGGNAILSTDASAKAQQEALINTSKSLVKLIKEGHDVIVTHGNGPQVGNLLLQQAASDSEKNPAMPLDTCVAMTEGSIGFWLQNALNNELQEQGIDKEVATVVTQVIVDEKDQAFTNPTKPIGPFLSEEDAKKQAQETGSKFKEDAGRGWRKVVPSPKPVGIKEASVIRRLVDSGVVVISAGGGGVPVIEDANTKALKGVEAVIDKDFASQTLSELVDADLFIVLTGVDNVFVNFNKPNQEKLEEVTVSQMKQYITENQFAPGSMLPKVEAAIAFVENKPESRAIITSLENIDNVLAQNAGTQIVAN

SEQ ID NO: 3913 - DNA, 1026 bp, Streptococcus agalactiae
atgacaaaaccaattatcttaacaggtgatagaccgacaggaaagttgcatattggacattatgtaggtagcttaaaaaatagagttctacttcaaaatgagggtagctatactttatttgtctttttagcagaccaacaagcactgacagaccatgctaaagatccgcaaactattgttgaatcaattggtaatgttgcacttgattatttagctgttgggttagatccaaacaagtcgactttattcattcaaagtcaaattcctgagttagcagaattaagtatgtattatatgaacttggtttcacttgcacgtttagaacgtaatccaactgtaaaaacagaaattgctcaaaaaggttttggtgagtctattccagcaggattcttagtttatcctgttgcacaagcagctgatataaccgcttttaaagctaaccttgttcctgtagggactgaccaaaaaccaatgattgaacaaacacgtgaaatagttagatctttcaatcatgcttataattgtcaggttttagttgaaccagagggaatctatccagaaaatgatgcagcaggtcgtctgccagggttagatggtaatgcaaaaatgtctaagtcattaaataatggaatctttttagcagatgatatggatacagttaagaaaaaagttatgagtatgtatactgatccaaaccacattaaagtagaagaaccaggacaaatcgaaggtaatatggtatttcattaccttgatgtttttggaagagatgaagaccaaaaagagattactgctatgaaagaacactatcaaaaaggtggacttggggatgttaaaacaaaacgttatctacttgatatcttagagcgtgaattatcacctattagagaacgtcgcctcgaatatgctaaagatatgggacaagtttatcaaatgttacaaaaaggtagtgagaaagctcaagctgttgcagcctctactttggatgaggttaaatcagccatgggtttgaactattttaaataa

SEQ ID NO: 3914 - protein, 341 aa, Streptococcus agalactiae
MTKPIILTGDRPTGKLHIGHYVGSLKNRVLLQNEGSYTLFVFLADQQALTDHAKDPQTIVESIGNVALDYLAVGLDPNKSTLFIQSQIPELAELSMYYMNLVSLARLERNPTVKTEIAQKGFGESIPAGFLVYPVAQAADITAFKANLVPVGTDQKPMIEQTREIVRSFNHAYNCQVLVEPEGIYPENDAAGRLPGLDGNAKMSKSLNNGIFLADDMDTVKKKVMSMYTDPNHIKVEEPGQIEGNMVFHYLDVFGRDEDQKEITAMKEHYQKGGLGDVKTKRYLLDILERELSPIRERRLEYAKDMGQVYQMLQKGSEKAQAVAASTLDEVKSAMGLNYFK

SEQ ID NO: 3915 - DNA, 165 bp, Streptococcus agalactiae
  misc_feature 4, 5, 6, 7, 8: n = A,T,C or G
atgnnnnnagttctagcatttattattggagcattggtagctgcaatagtttacgatatttttgcatatagagctattttaggtgtgacgataacgcttttaattattatgattcattatacgattgaaattattaagaacgatttaacgttacataatgtttaa

SEQ ID NO: 3916 - protein, 54 aa, Streptococcus agalactiae
  VARIANT 2, 3: Xaa = Any Amino Acid
MXXVLAFIIGALVAAIVYDIFAYRAILGVTITLLIIMIHYTIEIIKNDLTLHNV

SEQ ID NO: 3917 - DNA, 297 bp, Streptococcus agalactiae
  misc_feature 279, 280, 281, 282, 283: n = A,T,C or G
ttgaaaccaaatgcagcatctaaagctcaagaagttaatactatgtgggctagaactactaaaaaatcaacagaagatcaaaaggtggctaattcgcaatggaatagccttgtctggaatcccaaaacgggtaagttgaaaacaaatgctaaagaggaagtagctaaagctcttgaagcggaagacggatgggacagacttaagtttattgcaaagaatgcaaacttagagaccaacgctcggataaccatggcggaaagttctagtcgaaactggccnnnnncattcattcattaa

SEQ ID NO: 3918 - protein, 98 aa, Streptococcus agalactiae
  VARIANT 94, 95: Xaa = Any Amino Acid
MKPNAASKAQEVNTMWARTTKKSTEDQKVANSQWNSLVWNPKTGKLKTNAKEEVAKALEAEDGWDRLKFIAKNANLETNARITMAESSSRNWPXXFIH

SEQ ID NO: 3919 - DNA, 243 bp, Streptococcus agalactiae
  misc_feature 216, 217, 218, 219, 220: n = A,T,C or G
atgaaagtatttggttgggattctgctttttttattatgattatcaatattccattgctccttctttgctactttggcttaggtaaacaaacctttttaaaaactgtctatggttcttggatttttcctgtttttattaagttaacacaaagtgtaccaactttgacccacaacccactcctcgcagcactttttggaggtgttattgtaggatgnnnnncattccattcattaattaattaa

SEQ ID NO: 3920 - protein, 80 aa, Streptococcus agalactiae
  VARIANT 72, 73, 74: Xaa = Any Amino Acid
MKVFGWDSAFFIMIINIPLLLLCYFGLGKQTFLKTVYGSWIFPVFIKLTQSVPTLTHNPLLAALFGGVIVGXXXFHSLIN

SEQ ID NO: 3921 - protein, 405 aa, Streptococcus agalactiae
ATGAATAGAGAAGTAGGTTTCGGCCGAAAAGTACTACAAATTTTAGAGGATTTAAATATTAGTTTTGAACATATGCCAACTGGCATAGATGATCTATCCATTGTCTTACGTGAAAAAGAATTGACACCAATCAAAGAACAAGAAATCTTAAATTACCTAACTCGTAAACTAGAAGTAGATTACGTTGACATCCAACACAATCTATCTACAATCGTAATTGTAGGTGAAAATATGAAAAGTCAGATTGGAGTCACTGCAACAGCGACACAAGCCTTATCAAGAGAAAAAATCAATATCACCATGATATCACAAGGTTCAAGCGAAGTCTCCATTATGTTCGTTATAAACAGTAAGGATGAAAAAAGAGCTATTAAAGCACTATATGAAACATTCTTCCAAAAATAG

SEQ ID NO: 3922 - protein, 134 aa, Streptococcus agalactiae
MNREVGFGRKVLQILEDLNISFEHMPTGIDDLSIVLREKELTPIKEQEILNYLTRKLEVDYVDIQHNLSTIVIVGENMKSQIGVTATATQALSREKINITMISQGSSEVSIMFVINSKDEKRAIKALYETFFQK

SEQ ID NO: 3923 - protein, 147 aa, Streptococcus agalactiae
ATGTCAGACAAGAAAACATTTGAAGAAAATTTACAGGAATTAGAGACAATTGTCTCACGTTTAGAAACAGGTGATGTTGCCTTAGAAGATGCCATTGCTGAATTTCAAAAAGGAATGCTTATTTCAAAAGAGTTACAAAGAACTTAA

SEQ ID NO: 3924 - protein, 48 aa, Streptococcus agalactiae
MSDKKTFEENLQELETIVSRLETGDVALEDAIAEFQKGMLISKELQRT

SEQ ID NO: 3925 - protein, 465 aa, Streptococcus agalactiae
TTGCAAAAATCAAAGCAATCAGTTATTTTTAGGCAACCAGAGCGTCTATATGATGGTTTCCTTCAAAAATTAGATAACCTAAATCAGCAGTTAACATATTCTATGCGTGATAAACTACAAACAGTAAGACAAAAGCAAGGTTTGCTTCATCAAAAACTGCAAGGCATAGATTTAAAACAGCGTATTCATATTTACCAAGAGCGTGTTGTGCAAAGTAGACGACTATTATCAAGTACAATGACTAGTCAGTATGACAGCAAGCTAGCACGTTTTGAAAAGGCTCAAGATGCGCTTATATCATTGGATAGTTCTAGAATTGTAGCGCGTGGTTACGCTATTATCGAAAAAAACCATACTTTAGTATCTACTACTAATGGAATAAATGAAGGAGATCATTTGCAAGTTAAGATGCAAGATGGTCTTTTAGAAGTTGAGGTGAAGGATGTCAGACAAGAAAACATTTGA

SEQ ID NO: 3926 - protein, 154 aa, Streptococcus agalactiae
MQKSKQSVIFRQPERLYDGFLQKLDNLNQQLTYSMRDKLQTVRQKQGLLHQKLQGIDLKQRIHIYQERVVQSRRLLSSTMTSQYDSKLARFEKAQDALISLDSSRIVARGYAIIEKNHTLVSTTNGINEGDHLQVKMQDGLLEVEVKDVRQENI

SEQ ID NO: 3927 - protein, 192 aa, Streptococcus agalactiae
ATGAATGNNNNNGATTCTATTCAAATTGATGTCGAAAATGCTATGAAAGAAATTATCGATAAGTATAGTCAATTGTTTGATACGCCTATAATCGATGATTTATTCACAGAAAAAGAAAAACAATTAAAGCAATCTTATGATGTCGAAACTACATTGACAGAAATGTTCGAGGTGGAATATGAAGATAACTAA

SEQ ID NO: 3928 - protein, 63 aa, Streptococcus agalactiae
  VARIANT 3, 4: Xaa = Any Amino Acid
MNXXDSIQIDVENAMKEIIDKYSQLFDTPIIDDLFTEKEKQLKQSYDVETTLTEMFEVEYEDN

SEQ ID NO: 3929 - protein, 684 aa, Streptococcus agalactiae
ATGAAGATAACTAAAGCAACAGAGATTACAAAGACTCATAATTGGCGCATATTAATCTATGGCAAACCCGGAAACGGGAAAACTTACTTAATTAATTATTTAAAAGGAAAGACACTGATTTTAGACATGGACCATTCATCTAAAACGATTGCCGGAAACGAAAACATTGATATTATCCAATTTGACAGGACGCACCCTAGCGACTTTATGACTGAATTCTTGACAGAATTACCAGAACTTATCAAAGAATATGACAATTTAGTCATTGATAATATCACAAGTTGGCAATCAGACTGGTTTATCGAACAAGGTCGCAAGTCTAAAAATGGAATCACAAACGAATTGCAACAATACAACATGTGGACCAATTACTATTTACGAGTATTGACTACCATTTACAGCCAACCTATTAATATTTTTGTGACTGCTTGGGAATCAACGCAAGATTTAACGCTCGAGAGCGGACAAATGATTACACAATACGTCCCAGATATCCGCAAACAAGTCCTAAGCCAAACGCTAGGTTTAACCGATGTTGTCGGACGCATTCAAGTAAATCCAAAAACTGGTGGACACGGGATCCTTTTGGAAGGAAGCGATGGACTGTACGCAAAAAATAGGCTTGATAATAGGACCGTTTGTAAGGCGGAAGAGTTGTTTAATTTCGAAGGGAGTGATGCGTAA

SEQ ID NO: 3930 - protein, 227 aa, Streptococcus agalactiae
MKITKATEITKTHNWRILIYGKPGNGKTYLINYLKGKTLILDMDHSSKTIAGNENIDIIQFDRTHPSDFMTEFLTELPELIKEYDNLVIDNITSWQSDWFIEQGRKSKNGITNELQQYNMWTNYYLRVLTTIYSQPINIFVTAWESTQDLTLESGQMITQYVPDIRKQVLSQTLGLTDVVGRIQVNPKTGGHGILLEGSDGLYAKNRLDNRTVCKAEELFNFEGSDA

SEQ ID NO: 3931 - DNA, 1365 bp, Streptococcus agalactiae
atgattgttagtccacctggaagtggtaagtcagtagtcatttctgatattgctaagtcagcgactcaaaaaaacggatacgttttattcttggtccatcgcaaagaattaattgaccaaatcactaatagttttaaattccatggaattgacatgaataaagtggatttaatgacagttggtaaagctaaaaaccgcttggataaattaacaaaaccaaccttaattatcacagatgagggtcatcatgggaaagctagtacctaccaaatgatctatgaatacttttcagacgtgccgaggattggttttactgctacaccttggcgtctatcaggcgacggttttacagacacttacgatgttatggttcttggtaaaacggtcgagtggcttatcaataataataaacttgcaccatatgattattatagtgttctatcaattgatactgcgaaattaaaagtacaaaacggagattactccaataaatcgattgacgaatcatttggtaaaaagatttttggtgatgtagttcaagagtatataaaaaaagcgaacggtcagaaagctattttatacgctcactcggtagaagcatcgcaggcatttgctaaagaattccaatctatgggaattaatgcaatacacgcagatgcaaaaacgcctaaagccaaacgggataaaagcatgaaagatttccgtgacggtaaaatacaagttatctgtaacgttgatttgatatcagaaggtttcgatgtcccagattgtacagtaactattctttgtagacctacaaaatcattagtattatttttacaacagtctatgcggtcgatgagatatcaacctaataaaaaagctatcattttagatcacgtaggaaactggaatattcacggcttacctgacacaccgcatcattgggagaattatttccgaggagggtggaagaagaagtcgaataaaactaacacggtacacgcaaaagaatgtcctgtgtgttcagctttgtggccacttagtcaacagctctgtgaattatgcaatcatgattttggattgaaagaaaaacaagagaaagaacgcatagaggcagaacttgaactcataaaacgtgagcggtttagaatcaaacaacttgctaataagaagtttggtaaagatttaaaaacaaactgggaaattgcccaagctagagttaaagacgctggcaaaggaaaaccattatataaacttatctatttctacttaaaaactgattgggtagaaacaaacgttaatgaacttgccgaagtaacaggcaagtcagaaaaagaaatatatagcgcctacaattggctaaaaaagaaattaagaggataa

SEQ ID NO: 3932 - protein, 454 aa, Streptococcus agalactiae
MIVSPPGSGKSVVISDIAKSATQKNGYVLFLVHRKELIDQITNSFKFHGIDMNKVDLMTVGKAKNRLDKLTKPTLIITDEGHHGKASTYQMIYEYFSDVPRIGFTATPWRLSGDGFTDTYDVMVLGKTVEWLINNNKLAPYDYYSVLSIDTAKLKVQNGDYSNKSIDESFGKKIFGDVVQEYIKKANGQKAILYAHSVEASQAFAKEFQSMGINAIHADAKTPKAKRDKSMKDFRDGKIQVICNVDLISEGFDVPDCTVTILCRPTKSLVLFLQQSMRSMRYQPNKKAIILDHVGNWNIHGLPDTPHHWENYFRGGWKKKSNKTNTVHAKECPVCSALWPLSQQLCELCNHDFGLKEKQEKERIEAELELIKRERFRIKQLANKKFGKDLKTNWEIAQARVKDAGKGKPLYKLIYFYLKTDWVETNVNELAEVTGKSEKEIYSAYNWLKKKLRG

SEQ ID NO: 3933 - DNA, 483 bp, Streptococcus agalactiae
atggcaggatttacaacagatttttcagaagttaaagaacacgcagaattcaaagaacaaccatacgaaatgattgtttatgatgcatatgaagcagtaaatgaccgtaacggcaaaaaacgtgttgttattgactatgttgttcgaaacgatatcaagcaagaaatgcaaaactaccacttatgggatgagcaatatcccaactcacaaactgggaagtatcatatcggcattttaatgggtaaagcaaaagcacttggtatcaaagaggggcaacactacgatagttttgaagcgtttttaaacgacttcaaaggacgcactgcaaaagtaaccgttaaacttgacgaatataacggaaataaatacccgaaagttcgttacgcaaatcaaagcgatgtgcctgaaagccaccacatatggaaagaaaaaacaactggatttacacaagctgagattgaagaagacgatctaccgttctaa

SEQ ID NO: 3934 - protein, 160 aa, Streptococcus agalactiae
MAGFTTDFSEVKEHAEFKEQPYEMIVYDAYEAVNDRNGKKRVVIDYVVRNDIKQEMQNYHLWDEQYPNSQTGKYHIGILMGKAKALGIKEGQHYDSFEAFLNDFKGRTAKVTVKLDEYNGNKYPKVRYANQSDVPESHHIWKEKTTGFTQAEIEEDDLPF

SEQ ID NO: 3935 - DNA, 1554 bp, Streptococcus agalactiae
atgacatcaaatgaatttattgaagctttatcaaaattgaccaccgaaaccgattggggagccccaatcttcggcgagtcagtgcttaaagctgaattacgaaaacacttatttaaaattgtcccaattgatcacaatgggtatatccacaaactgttttattcagaaatggttaaagatgaagatgtcatgtattttgtgtcagatggacgaaaaacttatcgctttttatttggagatacaattctaaagactgataaacaaggcaatgaatatctcacatactccgttgaaaataattttccgccatttgcaaaactagttatcgactacattctaggtgcttacacgttttttgagaataaactttatgacattcgatataagcaatttaaattgattgatgattttacacttcagactaagtatggtttcaaagactctggtcacattttagagatactacaaggtatccacaaaacattaaacatccaaccaatcaattatattgaaccatatcagattgcttgcaaggatttcataatcgaccttgaaaattctgaaatcattaaccaaccgcctttgcaaaacgtatcttattttaagtattacgaagtagactacaaaacagcaataaacagtaagtctattgcagaaaaatatcttgaatacgttattgcagatagcaattcgttaaacaatgcaatactacaatcttattttatcgcccaagtggcgtgtggtgttagacctaaaaccaacttcttcatctcaaaatctggagtaaggactggtaaagggttaaggcatatagctttatctggtctattcaataagattgatgttgagctagatacattaaaaagtaatggatttgaagcgttacaggcgtgggcgatgttctcgggtggagaaatggctctagcgacggaacagggagatattcaaggcaatgcaatggagcgtgtacttaaaattattgcaacagagaaaacacacgttgcacgagcaattgggcaaaatcagtcaatggttaatttaacgagtgttctgtgtattgacacaaaccgtactgttgcgctgtcggatgaaatgaatggacgaaaggttttaattcagtttaaagatagaccaaaaactgaaactgattatgaaagagagagcgtattcaggaaatattggctagcatttactgatcgtgataaaaatccaaaaatcgatggttgtatcggttttctgttaaactcactcgagcgtttccaaaaaattggtaaatggtatcaatggaaagatgttgaagtatttaatgatatcgatttagacgaatttcaagttgctttaataaatgcattacaagaagttgattttgtacagcgaactgataacaaagaagttattgacttatcattacaagtttacggaaaaagcaatcatgcattaagtaaagccatatctgaaattggtgtacgtagcaggtcgaagaaagttaacgggaaaacagtcagagggtatgaaatcgaaaataaaacacgttttgataaatatatcctttaa

SEQ ID NO: 3936 - protein, 517 aa, Streptococcus agalactiae
MTSNEFIEALSKLTTETDWGAPIFGESVLKAELRKHLFKIVPIDHNGYIHKLFYSEMVKDEDVMYFVSDGRKTYRFLFGDTILKTDKQGNEYLTYSVENNFPPFAKLVIDYILGAYTFFENKLYDIRYKQFKLIDDFTLQTKYGFKDSGHILEILQGIHKTLNIQPINYIEPYQIACKDFIIDLENSEIINQPPLQNVSYFKYYEVDYKTAINSKSIAEKYLEYVIADSNSLNNAILQSYFIAQVACGVRPKTNFFISKSGVRTGKGLRHIALSGLFNKIDVELDTLKSNGFEALQAWAMFSGGEMALATEQGDIQGNAMERVLKIIATEKTHVARAIGQNQSMVNLTSVLCIDTNRTVALSDEMNGRKVLIQFKDRPKTETDYERESVFRKYWLAFTDRDKNPKIDGCIGFLLNSLERFQKIGKWYQWKDVEVFNDIDLDEFQVALINALQEVDFVQRTDNKEVIDLSLQVYGKSNHALSKAISEIGVRSRSKKVNGKTVRGYEIENKTRFDKYIL

SEQ ID NO: 3937 - DNA, 870 bp, Streptococcus agalactiae
atgtaccacacaacagcactttcattcttaaaaaaaggatatcaggttataccgcttagaaaagatactggaacgccaatgattaagtttaaagatatccaaataacggaagaagtgatcaaaaatacaaactggtttaattgtgattatgctttattaatgcgtggcatttggtgtattgatattgatactcatgacatggacgagaagttagctaaagagttatacataatgataaaaaagatggggattgatttattatctgtattatcgactgataagtatgacaatggactagatggttattcgtcaattattaggcatgagtataaaaacgaattaatcagtaattttaaaaatacattcgcagaattaactgcaagtggtggtatgcacatactctttaaaaaacgcgatgatattaattacacgcaaaaaataggagtaatgcctggtgttgacataaaagcgaatgataataattttgtcaaaatattcccatctgacggacgtgaagttttacaagcagttaaaacattaccttattatgatggaaaatttgaagaggaagcatttaaaccaaaacaagaaggtataacaacctattttggaggttctgtcacatatacatcaaacggaagtcacgaaggccgagaggcttatgaacgtgtagcaactggaacatcatataacaggaatgatgatttgtttaaaggagcgtgttgggcgtttgaaaatggtatcgatattgatgatttaacatcaattattgggacggttaaaggcagagacgtatttacgagagaggagtttgaattaacaattgaatcagcgaaacgaaaagtcagctacgtcactatcagaacatga

SEQ ID NO: 3938 - protein, 289 aa, Streptococcus agalactiae
MYHTTALSFLKKGYQVIPLRKDTGTPMIKFKDIQITEEVIKNTNWFNCDYALLMRGIWCIDIDTHDMDEKLAKELYIMIKKMGIDLLSVLSTDKYDNGLDGYSSIIRHEYKNELISNFKNTFAELTASGGMHILFKKRDDINYTQKIGVMPGVDIKANDNNFVKIFPSDGREVLQAVKTLPYYDGKFEEEAFKPKQEGITTYFGGSVTYTSNGSHEGREAYERVATGTSYNRNDDLFKGACWAFENGIDIDDLTSIIGTVKGRDVFTREEFELTIESAKRKVSYVTIRT

SEQ ID NO: 3939 - DNA, 282 bp, Streptococcus agalactiae
atggaattatcacaagcggggtatatggtatttcgagcaaatgtcggaaaggtgaaaacagcagatggtagattttttgatacaggtttaccaaaaggtttttgtgatttgtttggattcaaaccaaacggacaaatattttttatcgaagttaaaaatgaaacaggtcggataagaccagaacagaaaaactttatggaggttatggcatcgaaaggggcgttagccggagtggcacggtcagtggaagatgctttgaaaatagtaaatggatatcattaa

SEQ ID NO: 3940 - protein, 93 aa, Streptococcus agalactiae
MELSQAGYMVFRANVGKVKTADGRFFDTGLPKGFCDLFGFKPNGQIFFIEVKNETGRIRPEQKNFMEVMASKGALAGVARSVEDALKIVNGYH

SEQ ID NO: 3941 - protein, 159 aa, Streptococcus agalactiae
ATGACACACGTAGTTAGGGTTTACGATCACATTGGGGGACGAATGTTGCCTACTGTTTATAAAGACAAAGAGTTTAAGACTAAAGACGAAGCTATTGCTTATCGTGATAGCTTAATCGCTAAAAGTGACGCAGAGTATTTTTTGAGAGGTGAGTTATGA

SEQ ID NO: 3942 - protein, 52 aa, Streptococcus agalactiae
MTHVVRVYDHIGGRMLPTVYKDKEFKTKDEAIAYRDSLIAKSDAEYFLRGEL

SEQ ID NO: 3943 - protein, 384 aa, Streptococcus agalactiae
ATGATACCGAAATTTAGAGCGTGGCCAAAGAAATTCAAACGCATGTATAAGGTTACCCTTATTGATTACGAAAACGGTGATGTAGGATTAAAAGACGAGCATGGAGGCGTTGCAATAGGCGATATTAAGCAACTTATTCTCATGCAATCAACAGGAATGCTTGATAAAAATGGCGTTGAGATTTGGGAAGGGGATATAGTTTTAACAACACGTCTCATAGATTACACATATAAAAATTTTAAAGGTGTAGTAAAAATGTTAGAAGGTTGCTGGTTAATTGACACAGGAACTGATGCTGTCTATTTATGGTCAGAATTCGAAGAAAACGAAGTTGTCGGAAACATACACGAAAATCCAGAGTTACTAGAAAGGATAGAAGGATGA

SEQ ID NO: 3944 - protein, 127 aa, Streptococcus agalactiae
MIPKFRAWPKKFKRMYKVTLIDYENGDVGLKDEHGGVAIGDIKQLILMQSTGMLDKNGVEIWEGDIVLTTRLIDYTYKNFKGVVKMLEGCWLIDTGTDAVYLWSEFEENEVVGNIHENPELLERIEG

SEQ ID NO: 3945 - protein, 339 aa, Streptococcus agalactiae
ATGAAAATACATGATATTCCAAAAAATACTTTAGTTATTAAACATGGAGATACATTACCGATTGAGGAACTTCGAGAACAATGGGAAAGCATGACTCATGAGGAAAGGCAAGGTTGGTACACGACAACATGTGAACGTTTTAGAATTGAGGCAGATGATGTTATTGATTATATTATCGAAAAAATGAGCGATGATGGTTATGAAGAAATGGACGTGTTTTTAGCAGGTAATTTACCATCAGATGCAACAGAAAAATTACAAGCTGTTTTAGACGAGCTATTCGATAACCATGCAGCTGACGTTTACTATCCAGACAAACTGATAGAGSGTACAGAATGA

SEQ ID NO: 3946 - protein, 112 aa, Streptococcus agalactiae
  VARIANT 110: Xaa = Any Amino Acid
MKIHDIPKNTLVIKHGDTLPIEELREQWESMTHEERQGWYTTTCERFRIEADDVIDYIIEKMSDDGYEEMDVFLAGNLPSDATEKLQAVLDELFDNHAADVYYPDKLIEXTE

SEQ ID NO: 3947 - protein, 940 aa, Streptococcus agalactiae
ATGTTGCAAACTATAGGTACAAAGTTAGAGGCTCTTTGGGATCCTGGACTAAAAATGCTTGCTTTTTCATTTGGTAGTTTTTTAGTAGCAGTAATGGTAGGTTTTTTAGGTGCTAGGACAGCAGCTAGTTTTACTAGTCGATTACGTTCAGATATTTTTAACCATGTGATGGATTATTCTGATGCAGAAATTAAGCGATTTTCTATCCCCTCTCTATTAACGCGCACAACTAACGACTTGACTCAGCTACAGATCCTTATTGTAATGGGAATGCAGGTTGTTACCCGTGGACCAATTATGGCAATATGGGCCTTGACTAAAATTTGGGTAAAAGCGATCAATGGACTGGGGCAGCTGGAGTAGCGGTTATTATCGTTATGATATTACTTAGCGTTCTACTCTTACTTGCTTTCCGAGACAACGTCAAATCCAAGGTTTTACAGATGCGCTTAATGCAACTACTAGAGAGGCACTCTCTGGTGTTAGAGTTATTCGTGCCTACAATGCTGAAAAGTATCAAACAGATAAGTTCAAACGTGAAAATGACGATTTAACAAAATTGAACCTTTTTGTTTATAGATTGATGTCGCTTATGAATCCTGTGATGACAGTGGTTTCATCTGGATTGACTTTAGCTATTTATTGGATTGGCTCTTATTTGATTAATGATATTTCTGTGCCTAAAGTTACAGGAACAAGTGTATCTGTATTGGCTGCTAAATCAGCTATCACTGATCGAGTGGATCTTTTTTCAAACATGGTTGTTTTTTCATCTTATGCTATGCAAGTTGTTATGGGATTTATGATGATGGTAGCTATTTTTATCATCATGCCTCGTGCTTTAGTATCGGCTAGACGTATTAATGAGGTACTAACTTTAGCCCCAACAGTAATATTAAAGAAAATAGTCATATCCAAAGNNNNNCATTCCATTCATTAA

SEQ ID NO: 3948 - protein, 313 aa, Streptococcus agalactiae
  VARIANT 308, 309: Xaa = Any Amino Acid
MLQTIGTKLEALWDPGLKMLAFSFGSFLVAVMVGFLGARTAASFTSRLRSDIFNHVMDYSDAEIKRFSIPSLLTRTTNDLTQLQILIVMGMQVVTRGPIMAIWALTKIWGKSDQWTGAAGVAVIIVMILLSVLLLLAFPRQRQIQGFTDALNATTREALSGVRVIRAYNAEKYQTDKFKRENDDLTKLNLFVYRLMSLMNPVMTVVSSGLTLAIYWIGSYLINDISVPKVTGTSVSVLAAKSAITDRVDLFSNMVVFSSYAMQVVMGFMMMVAIFIIMPRALVSARRINEVLTLAPTVILKKIVISKXXHSIH

SEQ ID NO: 3949 - protein, 504 aa, Streptococcus agalactiae
GTGGGGACGTGGGGCAATTTCATTGACGATGATGTCATCTGCGGTCGCATTTCTCAAAACCGTATCTTTGAAAAAGACTTTCTGGCAAATAAGGCTGGCGTGACTGTCGCTCCCTATAAGGTGGTGACATCTAGCCTTGACCTAGAGGGGCTTGACTTGACCAAGACCTATGTCCTCAAGACAGCGACAGGTGGTTATGACGGTCATGGGCAAAAGGTTATCCGCTCAGCAGAAGACCTGCCAGAGGCGCAGCAATTAGCCAACTCAGCTCAGTGTGTCTTGGAAGAGTTTGTCAACTTCGACCTTGAAATATCAGTCATCGTGTCTGGAAATGGTCAGGATGTGACGGTCTTTCCCGTTCAGGAAAATATCCACCGCAACAATATCCTGTCAAAAACCATCGTACCAGCTCGCATCTCAGACCAACTAGCTGACAAGGCTAAGGAAATGGCTGTGCAGATTGCCAAGAAACTCCAGCTATCAGGNNNNNCATTCATTCATTAA

SEQ ID NO: 3950 - protein, 167 aa, Streptococcus agalactiae
  VARIANT 163, 164: Xaa = Any Amino Acid
MGTWGNFIDDDVICGRISQNRIFEKDFLANKAGVTVAPYKVVTSSLDLEGLDLTKTYVLKTATGGYDGHGQKVIRSAEDLPEAQQLANSAQCVLEEFVNFDLEISVIVSGNGQDVTVFPVQENIHRNNILSKTIVPARISDQLADKAKEMAVQIAKKLQLSGXXFIH

SEQ ID NO: 3951 - DNA, 126 bp, Streptococcus agalactiae
atgattgtgcgtaagaacggaaagatatttgattatgtgttaccacacgaagaagtgagagaagaagaggttgtgacagtagagagagtggtcgatgtgctggaagaattagactatattaaatga

SEQ ID NO: 3952 - protein, 41 aa, Streptococcus agalactiae
MIVRKNGKIFDYVLPHEEVREEEVVTVERVVDVLEELDYIK

SEQ ID NO: 3953 - DNA, 159 bp, Streptococcus agalactiae
  misc_feature 132, 133, 134, 135, 136: n = A,T,C or G
ttgtggctcaaattgtacagattgtttttcccagtaattcctggaggtgttacaacagtagcaggtttcttaatttttggtcctaccttaggctttatttataactatattgggattatcatcggaagtgcnnnnncattccattcattaattaattaa

SEQ ID NO: 3954 - protein, 52 aa, Streptococcus agalactiae
  VARIANT 45, 46: Xaa = Any Amino Acid
MWLKLYRLFFPVIPGGVTTVAGFLIFGPTLGFIYNYIGIIIGSAXXFHSLIN

SEQ ID NO: 3955 - DNA, 450 bp, Streptococcus agalactiae
  misc_feature 12, 13, 14, 15, 16: n = A,T,C or G
atgaatgaatgnnnnntgagtcataaaggtatccttaattttgctaaaattaaagagtatgctcgtcaattaatgacagaatttgatgtgcgtggtgctggtgaacatgttttagcaagaggattttctggtggtaaccaacaaaaagcaattattgctcgtgaagtggatcgcgatccagacctactcattgttagccaaccgactcgtggtctagatgttggtgctatcgagtatattcataaacgtttgattgaagagcgcgataaagggaaagcggtcttagtagttagctttgagttagatgaaatcttaaacttatcagatcgtattgcagttattcatgatggtaaaattcaaggaattgttaaacccgaccaaaccaacaagcaagaattgggtattttgatggctggtggaaaaattgaaaaggaggagagagatgtctaa

SEQ ID NO: 3956 - protein, 149 aa, Streptococcus agalactiae
  VARIANT 4, 5, 6: Xaa = Any Amino Acid
MNEXXXSHKGILNFAKIKEYARQLMTEFDVRGAGEHVLARGFSGGNQQKAIIAREVDRDPDLLIVSQPTRGLDVGAIEYIHKRLIEERDKGKAVLVVSFELDEILNLSDRIAVIHDGKIQGIVKPDQTNKQELGILMAGGKIEKEERDV

SEQ ID NO: 3957 - DNA, 567 bp, Streptococcus agalactiae
  misc_feature 540, 541, 542, 543, 544: n = A,T,C or G
atgtctaagaaggcgcaaaaaattgcagttcctctgatttcagttgtactaggaatcattctaggagctattattatgctgatatttggttatgatccactttggggttatgagggattgttccaaacagcattcggtagtataaaaaatattggtgaaattttccgtgcaatgggaccattaattttaattgctctaggtttctcagttgccagtcgtgcaggtttctttaatattggacttccagggcaagccttatcaggatggattgccgcaggttggttcgctctttcacacccagatatgccacgtccagcaatgattctttgtactattattattggtatcgttgctgggggaatcactggagctattccaggtattctcagagcataccttggaacaagtgaagttattgtaactattatgatgaactatattgktctttattcaggaaatgctattgtacaacgtgttttcccaaaagcattatgcgtacaagtgactcgagtgtatatgtttctggcaatgcatcatacnnnnncattccattcattaattaattaa

SEQ ID NO: 3958 - protein, 188 aa, Streptococcus agalactiae
  VARIANT 148, 181, 182: Xaa = Any Amino Acid
MSKKAQKIAVPLISVVLGIILGAIIMLIFGYDPLWGYEGLFQTAFGSIKNIGEIFRAMGPLILIALGFSVASRAGFFNIGLPGQALSGWIAAGWFALSHPDMPRPAMILCTIIIGIVAGGITGAIPGILRAYLGTSEVIVTIMMNYIXLYSGNAIVQRVFPKALCVQVTRVYMFLAMHHTXXFHSLIN

SEQ ID NO: 3959 - DNA, 768 bp, Streptococcus agalactiae
  misc_feature 8, 9, 10, 11, 12: n = A,T,C or G
atgaatgnnnnngggggggattttggagatttcatccgaagtggcttagatgcattggaaatcagacaccaatttttaagtattggtggagaaacacgtcattgtattgcagttttacatgagggtcagcagactgaaattctagaaaaaggtccacatattactaaagatgaagcagacgcctttttgaatcatctaaaacttatctttgatgctgcaactatcataacagtatcaggaagtttaccaaagggactcccctcagattattatgctaggttaatctccctagcgaatcactttaataagaaagttgttttagactgttcaggagaagcattacgttcggttttaaaatctagtgctaagccgaccgtcattaaacctaaccttgaagaattaacacaattaattggaaaaccaattagctatagtttagacgaattaaaatctaccttacagcaagatctttttagaggaattgattgggttattgtttctttaggtgctaggggagcttttgctaaacatgggaatcactactatcaagtgacgattccaaaaatagaagttattaatccagttggttcaggggatgcaacggttgcaggaatcgcgtctgctttggaacatcaactagatgatacaaatttgcttaagagagctaatgtcttgggtatgcttaatgcacaagaaacattaacagggcatatcaatctgacctactatcaagaattaatcagtcaaatccaagtgaaagaggtatag

SEQ ID NO: 3960 - protein, 255 aa, Streptococcus agalactiae
  VARIANT 3, 4: Xaa = Any Amino Acid
MNXXGGDFGDFIRSGLDALEIRHQFLSIGGETRHCIAVLHEGQQTEILEKGPHITKDEADAFLNHLKLIFDAATIITVSGSLPKGLPSDYYARLISLANHFNKKVVLDCSGEALRSVLKSSAKPTVIKPNLEELTQLIGKPISYSLDELKSTLQQDLFRGIDWVIVSLGARGAFAKHGNHYYQVTIPKIEVINPVGSGDATVAGIASALEHQLDDTNLLKRANVLGMLNAQETLTGHINLTYYQELISQIQVKEV

SEQ ID NO: 3961 - protein, 960 aa, Streptococcus agalactiae
ATGATGCCTTATCGTCAAGTTTGCAAAGTAATAGATAGCACTTTGCAAACAATCATAACAAAAGACTGTGTTTTAAAAGCAGTAAAATTTGTAGAAAAATTGTTAAAAGAAAAAGAACGCTATCGTTTTTATTTGGAAGAGCCACCCGAACGTAAAAAAGTGAAAAAACTGTATGTTGAGGGTGATGGAGTCATGATTAAAAGCACAGATTCTAGAGAGGAAAGAAGGTATTTAGATTTAACACATTTTGTTATTCATACAGGCTCAAAAAAAGTTTCTACTAAAAGATATGAATTGCGGGACAAGCACGAAATATTACAGCTTAATTATGATAAAGCTAAATATAATCTTTTAGATTATATTTATAATAACTATGAAGTAGATGACTATACTATTTTAATCACTAACTCTGATATGGGTAAAGGCTATACTAGTAGAGTTTTTAAGGAATTAGGAAAAGCACTTAAGGTAAAGAAACATGAGCATTTTTGGGATATCTATCATGTTAAAGAAAAGTTAAGTTCATACCTTAGAAAATATCCAATTGAATTAACCGATTTTGCTTTAGATGCGGTAAAAAAATATAATTCTGATAAGCTTGAATTAGTTTTTGATACTGTTGAATCACTGATTTGTGATGAACTTGAAGATCAAGAATTTCAGAAGTTTAAGAAAAAAGTATTAAATAATTTCAAATATATAAAACCAGCTCATCTTAGAAATCTTTCAAATCGTGGTATTGGTATCATGGAATCMCAACACAGAAAGATAACGTATAGAATGAAGCGACGTGGCATGTATTGGTCAAAGTGGGGAATCTCCACAATGGCAAATATGATTATACTTGAAAGAGCTAACGGTTTACGAGAATTATTTTTCGGTTCTTGGAGAAAGGTATACAGTGAGTATAAAGAAGGTTCATTAGTGCAGGGCGACTTTTTTAAAAGACAGATGAATTAG

SEQ ID NO: 3962 - protein, 319 aa, Streptococcus agalactiae
MMPYRQVCKVIDSTLQTIITKDCVLKAVKFVEKLLKEKERYRFYLEEPPERKKVKKLYVEGDGVMIKSTDSREERRYLDLTHFVIHTGSKKVSTKRYELRDKHEILQLNYDKAKYNLLDYIYNNYEVDDYTILITNSDMGKGYTSRVFKELGKALKVKKHEHFWDIYHVKEKLSSYLRKYPIELTDFALDAVKKYNSDKLELVFDTVESLICDELEDQEFQKFKKKVLNNFKYIKPAHLRNLSNRGIGIMESQHRKITYRMKRRGMYWSKWGISTMANMIILERANGLRELFFGSWRKVYSEYKEGSLVQGDFFKRQMN

SEQ ID NO: 3963 - protein, 845 aa, Streptococcus agalactiae
ATGTCTGAAAAAAATGCTTATGCCCAGTCTGGTGTTGATGTAGAAGCGGGCTACGAAGTTGTCGAACGTATCAAGAAACACGTTGCTCGCACAGAACGTGCTGGTGTCATGGGAGCTCTCGGTGGCTTTGGTGGTATGTTTGACCTGTCACAAACAGGTGTTAAAGAACCTGTCTTGATTTCAGGGACTGACGGTGTCGGAACTAAACTCATGCTTGCTATCAAGTACGACAAGCACGACACAATCGGTCAAGACTGTGTTGCCATGTGTGTCAACGATATTATTGCAGCAGGTGCTGAGCCCCTTTACTTCCTTGACTATGTCGCGACTGGTAAAAACGAACCTGCCAAATTGGAACAGGTTGTCGCTGGTGTTGCTGAAGGTTGTGTTCAAGCTAGCGCAGCTCTTATCGGTGGTGAAACGGCTGAGATGCCTGGTATGTATGGCGAAGATGATTATGACCTTGCAGGCTTTGCTGTTGGTGTGGCTGAAAAATCTCAAATCATCGACGGTTCAAAGGTAAAAGAAGGGGATATTCTTCTTGGACTTGCTTCAGTGGTATCCATTCAAATGGTTATTCATTGGTACGTCGTGTCTTTGCTGACTACACTGGTGATGAGGTGCTTCCAGAGCTTGAAGGCAAACAACTCAAGGATGTCCTTCTTGAGCCAACTCGTATCTATGTTAAAGCAGCTCTGCCATTGATCAAGGAAGAACTAGTTAACGGTATCGCCCACATCACGGGTGGTGGTTTTATCGAGAATGTTCCTCGTATGTTTGCGGATGATTTGGCTGCGGAAATCGATGAGGATAAGGTGNNNNNCATTCATTCATTAATTAATTAA

SEQ ID NO: 3964 - protein, 281 aa, Streptococcus agalactiae
  VARIANT 274, 275: Xaa = Any Amino Acid
MSEKNAYAQSGVDVEAGYEVVERIKKHVARTERAGVMGALGGFGGMFDLSQTGVKEPVLISGTDGVGTKLMLAIKYDKHDTIGQDCVAMCVNDIIAAGAEPLYFLDYVATGKNEPAKLEQVVAGVAEGCVQASAALIGGETAEMPGMYGEDDYDLAGFAVGVAEKSQIIDGSKVKEGDILLGLASSGIHSNGYSLVRRVFADYTGDEVLPELEGKQLKDVLLEPTRIYVKAALPLIKEELVNGIAHITGGGFIENVPRMFADDLAAEIDEDKVXXIHSLIN

SEQ ID NO: 3965 - protein, 192 aa, Streptococcus agalactiae
ATGNNNNNTCTAACTTATCTATCAATCGATTGGTTAATTAAATCAATTGGACTCGAAACAAAAGCACCAAATGGTGGTTTATGCGTAGCTTACTTTGATGGACATTATCCAACACCGCTTTATGATTATGAAGAAGAATACCTCAGAAGTTTAGAAGAAAAAACAAGTTTTTATATTCAAAAAGTGAAATAA

SEQ ID NO: 3966 - protein, 63 aa, Streptococcus agalactiae
  VARIANT 2, 3: Xaa = Any Amino Acid
MXXLTYLSIDWLIKSIGLETKAPNGGLCVAYFDGHYPTPLYDYEEEYLRSLEEKTSFYIQKVK

SEQ ID NO: 3967 - protein, 126 aa, Streptococcus agalactiae
TTGGATGACTTGTGGGTAGCGGAGAATTCCAAMGAACTTGGAGATAGCTGGGTCTCTCCGAATAGCTTTAGGGCTAGCGTCGATGTTAGTCTCTTGGANNNNNCATTCCATTCATTAATTAATTAA

SEQ ID NO: 3968 - protein, 41 aa, Streptococcus agalactiae
  VARIANT 11, 33, 34, 35: Xaa = Any Amino Acid
MDDLWVAENSXELGDSWVSPNSFRASVDVSLLXXXFHSLIN

SEQ ID NO: 3969 - protein, 643 aa, Streptococcus agalactiae
TTGCTTCATACGAATCATTCCTTCGCGTTGTAGATTCAATGGTAACACAACATTTCAAATGGTTACGTAAATCAAAAACACACACAACATGGCGTAAAAATTATCCAGCGCTTAACCTAATTGCAGCTTCAACTGTTTTCCAACAAGATCATAATGGTTATACTCACCAAGATCCAGGTATTTTAACTCATTTAGCTGAAAAAACACCTGAATACATTCGTGAATATTTACCAGCAGATACTAACTCACTTCTAGCTGTTATGGATAAAGCGTTTAAAGCTGAAGATAAAATTAATTTAATTGTGACATCTAAGCACCCTCGTCCACAATTTTACTCTATTGCTGAAGCAGAAGAGTTAGTGGCAGAAGGATATAAGGTGATTGACTGGGCTTCAAATGTGTCGCTTAATCAAGAGCCAGATGTTGTCTTTGCTGCGGCGGGAACAGAACCTAACTTAGAAGCTTTGGCAGCTATTAGCATTCTTCATAAGGCTTTCCCAGAACTTAAGATTAGATTTGTTAATGTATTAGACATCCTAAAACTTCGTCATCCTTCACAAGATGCTCGCGGTTTATCAGATGAAGAGTTTAACAAAGTCTTTACCACAGATAAACCTGTTATTTTTGCTTTCCATGGTTATGA

SEQ ID NO: 3970 - protein, 214 aa, Streptococcus agalactiae
MLSYESFLRVVDSMVTQHFKWLRKSKTHTTWRKNYPALNLIAASTVFQQDHNGYTHQDPGILTHLAEKTPEYIREYLPADTNSLLAVMDKAFKAEDKINLIVTSKHPRPQFYSIAEAEELVAEGYKVIDWASNVSLNQEPDVVFAAAGTEPNLEALAAISILHKAFPELKIRFVNVLDILKLRHPSQDARGLSDEEFNKVFTTDKPVIFAFPWL

SEQ ID NO: 3971 - DNA, 837 bp, Streptococcus agalactiae
  misc_feature 811, 812, 813, 814, 815: n = A,T,C or G
atgaagaaattaattataggtatttttagtctaattattatagcgattcttgcttggcaaggtttttcgtttttgaaacataaagaaataaaacttcaacaagctgttgttgaaaaagaaattcgcatagccgagaaaacggtagaagtggtgaaaagacagaaaactgaacgtgttctttttcttgaacctaaaggatatgacaaaagtctaagcgctgatattttaaagtggaatcaaaaaagctttgagcataaaaaattttatgacaatcaatacattattctacgtcctcaattagcagattctaactttgcaaatgttaaaaaattatccatttatcaaatcttatatcaaaaagaaaaaggaagtatgtttcaaaaatcaagtcgccttttgagaacctacttacttgatcaaaataagaaaccttttgaattagatgagcttttagctcataatatatctggatttaaggctattttagaaaatatagctccaggaactcaactaaaggaacatgatagcaataaagaatttttaaaaactggaagagtaacagatgggctagatgttaaagatggtaagttaattattaatgatttaaaattaccacttgataaattatataatgtgatcgatgagtcatatttaaaatcaagtgatctagatttagtttctaatttaaaagctaaagcaccacgtgttgcacttacctttgatgatggaccaaatgaaaaaacgactcctaaagccttagaaatccttaaaagatataatgctaaagcgactttctttgtaatgggacaannnnncattcattcattaattaattaa

SEQ ID NO: 3972 - protein, 278 aa, Streptococcus agalactiae
  VARIANT 271, 272: Xaa = Any Amino Acid
MKKLIIGIFSLIIIAILAWQGFSFLKHKEIKLQQAVVEKEIRIAEKTVEVVKRQKTERVLFLEPKGYDKSLSADILKWNQKSFEHKKFYDNQYIILRPQLADSNFANVKKLSIYQILYQKEKGSMFQKSSRLLRTYLLDQNKKPFELDELLAHNISGFKAILENIAPGTQLKEHDSNKEFLKTGRVTDGLDVKDGKLIINDLKLPLDKLYNVIDESYLKSSDLDLVSNLKAKAPRVALTFDDGPNEKTTPKALEILKRYNAKATFFVMGQXXIHSLIN

SEQ ID NO: 3973 - DNA, 156 bp, Streptococcus agalactiae
  misc_feature 133, 134, 135, 136, 137: n = A,T,C or G
ttgctttcccatggttatgaagatatgattcgagatattttctttagtcgtcacaatcataatttgcatacgcatggtyaccgtgaaaatggtgacatcacaacaccatttgatatgcgcgtgatgtcagaannnnncattccattcattaattaa

SEQ ID NO: 3974 - protein, 51 aa, Streptococcus agalactiae
  VARIANT 27, 45, 46: Xaa = Any Amino Acid
MLSHGYEDMIRDIFFSRHNHNLHTHGXRENGDITTPFDMRVMSEXXIPFIN

SEQ ID NO: 3975 - DNA, 195 bp, Streptococcus agalactiae
  misc_feature 173, 174, 175, 176, 177: n = A,T,C or G
atggggaaaatgttgccggttgaagacattaaccttaaaatttaccctggtgattttgtttgtttcatcggtacgagtggatcaggtaaaacaacattaatgcgtatggttaaccatatgttaaaaccaacaaatggtactctattatttaagggaaaagatattctacttcnnnnncattcattcattaattaa

SEQ ID NO: 3976 - protein, 64 aa, Streptococcus agalactiae
  VARIANT 58, 59: Xaa = Any Amino Acid
MGKMLPVEDINLKIYPGDFVCFIGTSGSGKTTLMRMVNHMLKPTNGTLLFKGKDILLXXHSFIN

SEQ ID NO: 3977 - DNA, 390 bp, Streptococcus agalactiae
atgttgatgacctttcaggaggtcagaggcaaaaagtatggattgcttatggctttagcacaagatacagatactatctttttagacgaacctacaacttatcttgacatgaatcatcaattagaagtcttagaattgctcaaaaaacttaatgacgaaacgcaaaaaacaattattatggtcctacacgacctaaacctgtctgcgcgctattctgattatctagttgcaatgaaaaccggtaaaattatctatgaaggtagtcctagtcagatcatgactaaagatattatcaaagatatttttaagattgatgctcatatcattcaggaccctattagtaaacaacctgttttgttatcttatcaattatcaactgatcaaaattaa

SEQ ID NO: 3978 - protein, 129 aa, Streptococcus agalactiae
MLMTFQEVRGKKYGLLMALAQDTDTIFLDEPTTYLDMNHQLEVLELLKKLNDETQKTIIMVLHDLNLSARYSDYLVAMKTGKIIYEGSPSQIMTKDIIKDIFKIDAHIIQDPISKQPVLLSYQLSTDQN

SEQ ID NO: 3979 - DNA, 633 bp, Streptococcus agalactiae
atgaaaaaaattggaattattgtcctcacactactgaccttctttttggtatcttgcggacaacaaactaaacaagaaagcactaaaacaactatttctaaaatgcctaaaattgaaggcttcacctattatggaaaaattcctgaaaatccgaaaaaagtaattaattttacatattcttacactgggtatttattaaaactaggtgttaatgtttcaagttacagtttagacttagaaaaagatagccccgtttttggtaaacaactgaaagaagctaaaaaattaactgctgatgatacagaagctattgccgcacaaaaacctgatttaatcatggttttcgatcaagatccaaacatcaatactctgaaaaaaattgcaccaactttagttattaaatatggtgcacaaaattatttagatatgatgccagccttggggaaagtattcggtaaagaaaaasaasctaatcagtgggttagccaatggaaaactaaaactctcgctgtcaaaaaagatttacaccatatcttaaagcctaacactacttttactattatggatttttatgataaaaatatctatttatatggtaataattttggacgcaggtggagaactaatctatga

SEQ ID NO: 3980 - protein, 210 aa, Streptococcus agalactiae
  VARIANT 157: Xaa = Any Amino Acid
MKKIGIIVLTLLTFFLVSCGQQTKQESTKTTISKMPKIEGFTYYGKIPENPKKVINFTYSYTGYLLKLGVNVSSYSLDLEKDSPVFGKQLKEAKKLTADDTEAIAAQKPDLIMVFDQDPNINTLKKIAPTLVIKYGAQNYLDMMPALGKVFGKEKZXNQWVSQWKTKTLAVKKDLHHILKPNTTFTIMDFYDKNIYLYGNNFGRRWRTNL

SEQ ID NO: 3981 - protein, 216 aa, Streptococcus agalactiae
ATGAATAGGTTGAAAGGATTAAGAGAATCTAAGAATTTAACAGTAATGCAATTCATTGAAGAAATTCGTCAAATTGCTCCAACAATGACTGCGACGCAATGGATAGCTTATGAACGTAGAGGAATTGTAGGATATAACGATAATTTTTGGCAAATGATTGCAGATTTTTTTCACGTCGACCTTGGCTATCTTTNNNNNCATTCATTCATTAATTAA

SEQ ID NO: 3982 - protein, 71 aa, Streptococcus agalactiae
  VARIANT 65, 66: Xaa = Any Amino Acid
MNRLKGLRESKNLTVMQFIEEIRQIAPTMTATQWIAYERRGIVGYNDNFWQMIADFFHVDLGYLXXHSFIN

SEQ ID NO: 3983 - protein, 225 aa, Streptococcus agalactiae
ATGGAAAATCCAATGACAGGAATAGCAATACTAGCATTTATTGCTTTGCTTGCATATTTCGGCAATCGCAATAGCAATCAAAAGACAATCACTAAGACTGTTGAGACAGTGTTAGATAACTATCAAGTTGTACGAAAAGTTGATAGACCAAAACGCACGGATTTTATAGAGTTACCTACCCCAGGGTCGTGTGGGAAAGTCTGGGGCAAGGATAGACCTTTTTAA

SEQ ID NO: 3984 - protein, 74 aa, Streptococcus agalactiae
MENPMTGIAILAFIALLAYFGNRNSNQKTITKTVETVLDNYQVVRKVDRPKRTDFIELPTPGSCGKVWGKDRPF

SEQ ID NO: 3985 - protein, 291 aa, Streptococcus agalactiae
ATGGCGATTGAAATTTTTGGTCCAGATTTTAGAAAAGAATTACTTGAAGATTTAATTGCTTTAAACAGAGAAGCACTAAAAATAGCCCAGACAAAAAACTCTAAGTCTATTGAATGGGTGACGATGAAACAACTCGAAAAAGAAACCGGCTGGGGACGCACTAAGTTGAGTGAGTGGAGAGATGAAGGCAATTTTAGTTTTAAACGTTCGTCTCTCAACGGGAAAGTGCTATATGACCTAGCGGATGTCAATAGATTTCTACGAACAAGTGGATTTAGAAAAGGAGTATGA

SEQ ID NO: 3986 - protein, 96 aa, Streptococcus agalactiae
MAIEIFGPDFRKELLEDLIALNREALKIAQTKNSKSIEWVTMKQLEKETGWGRTKLSEWRDEGNFSFKRSSLNGKVLYDLADVNRFLRTSGFRKGV

SEQ ID NO: 3987 - protein, 135 aa, Streptococcus agalactiae
ATGAGACCAAAACAATATCCGTATAGCGGAAATAAAAAAGAATCTATTGCGGTAACAGTAGATTCTGAAAAATTAGTCCTTTTACAAGAACAAATTTCGATTCTTGAAGAGAGACTTAACTTATCTAATGATTAG

SEQ ID NO: 3988 - protein, 44 aa, Streptococcus agalactiae
MRPKQYPYSGNKKESIAVTVDSEKLVLLQEQISILEERLNLSND

SEQ ID NO: 3989 - protein, 378 aa, Streptococcus agalactiae
GTGATTTTCATAAAATTACCTCGCTTTATTAAATATTATACCAAAAAAGAAAGGATAAAAATGAATGAAGTAACATTATCAAATAACTTGCAACAGATTGAACTTGATTTAAGACAAGAAAACGAACAGATTGGAAAGTCTATTTGGAAAATAGGTTGCATGTTAAAACATGTTAAAGAAAATGATTTGACACATGGTCAATTTATGGATTGGTACCAAAATATTGGGTACAACAAGAATTTCGTTAGCAAGGCAATAACGATAGCTGACAAACTTTCAAATTTCCCAGCGTTGGGAAATATTGGAACAGAAGCTCTCTACCTTATCGCCACCCTACCAGATAACCAAAAGCAAGAACAACTTGAACTGATTGGGTAA

SEQ ID NO: 3990 - protein, 125 aa, Streptococcus agalactiae
MIFIKLPRFIKYYTKKERIKMNEVTLSNNLQQIELDLRQENEQIGKSIWKIGCMLKHVKENDLTHGQFMDWYQNIGYNKNFVSKAITIADKLSNFPALGNIGTEALYLIATLPDNQKQEQLELIG

SEQ ID NO: 3991 - DNA, 528 bp, Streptococcus agalactiae
atgaaaatcactgaaattgatgtccaaatgtggactttatacgcaactgtagtaatcgccattttaggtttcgttttcaatgccatttccctctggcagacaaagaaagctaccgaagatatggctaagccttatgttaatttttatattgatgcagtatctgtcaaagaccagcaacgcctatttgtcatcaagaactttggccaatcgccggcttatatcactaaaattgaaatcatcggcgaattggatgagtataataacaagtaccaattccaatcccttgtaggtaatatgcttgcaccaggacaaaaactgacctcttcgattgaaaaatcatataaaggtaatgcctcggcaaatattgaatatactgaccaacataggaaagtttacaaagatacattcaaactaaatccaagaatgacagaagatttactttatactgtcaatgagtccaataaaaataaagaagtttctacagctatcagacaatcaacaatggcgctccttcgtgatttacgttaa

SEQ ID NO: 3992 - protein, 175 aa, Streptococcus agalactiae
MKITEIDVQMWTLYATVVIAILGFVFNAISLWQTKKATEDMAKPYVNFYIDAVSVKDQQRLFVIKNFGQSPAYITKIEIIGELDEYNNKYQFQSLVGNMLAPGQKLTSSIEKSYKGNASANIEYTDQHRKVYKDTFKLNPRMTEDLLYTVNESNKNKEVSTAIRQSTMALLRDLR

SEQ ID NO: 3993 - DNA, 162 bp, Streptococcus agalactiae
ttgaaatataaagaaaggaaacatatgaacgaagcaaaaatatattatgaaatttcaacaaaagatatcaatgaagcaatcgacattaaaaataaaatcctcatcaatacaactgataaggagaaggttgatatcaaattttatgttggtaatggtttttaa

SEQ ID NO: 3994 - protein, 53 aa, Streptococcus agalactiae
MKYKERKHMNEAKIYYEISTKDINEAIDIKNKILINTTDKEKVDIKFYVGNGF

SEQ ID NO: 3995 - DNA, 396 bp, Streptococcus agalactiae
ttgtctaacatgatagacaaaatatttgttaataaaactaacaaaccgctagaaaggacacatatgactaaagcagaacgaattagacgtttctactatgagaatccaaattcaaaattagcagattcgtatcaagcacttaaagaatatgacatttctgaaagtcatatcaaagtgacattgagtagagatagaaaaaatggtgtatgtgacaccaattatgactatactcaatattttgaatcgactaaagcaaaagaagaactcacagaatggaaacgagatgttcggaaagatttagtcgaacaattgctacaagcaaatgcaaatgaaactgatagtaatcaaattcgattgaatgcgaaaacaattaatcagttgttagttgaaatataa

SEQ ID NO: 3996 - protein, 131 aa, Streptococcus agalactiae
MSNMIDKIFVNKTNKPLERTHMTKAERIRRFYYENPNSKLADSYQALKEYDISESHIKVTLSRDRKNGVCDTNYDYTQYFESTKAKEELTEWKRDVRKDLVEQLLQANANETDSNQIRLNAKTINQLLVEI

SEQ ID NO: 3997 - DNA, 192 bp, Streptococcus agalactiae
atgcaacaatttaatctaaaacaactacgagagaaaaaaggatttactcaaaatgaattagctgataaagctaacgttagtcgttcgctcgtggttggtttagaaacaggttcatattcagagacatctacagcatctctgaagaaattggcgaaagctttggacgtaaagattaaggatttatttttttaa

SEQ ID NO: 3998 - protein, 63 aa, Streptococcus agalactiae
MQQFNLKQLREKKGFTQNELADKANVSRSLVVGLETGSYSETSTASLKKLAKALDVKIKDLFF

SEQ ID NO: 3999 - DNA, 675 bp, Streptococcus agalactiae
atggatttatcacagtgggaagcttccgatttgattgcttttgtgtctataattatcttaggaacatcttttattgcgcctgcatttgtcgcttttgtgcaaaggcaaactgaactgcgctctaagaaattagatatatttaaagaaaattattcaaaacgatacaatcgtcaatattatatttttcaagattttattgaaaagagcggaaatataatcgcgcaactagattcaaaagtagtccctagtgataaaaatatacaagaattcgagtcggcagcattaaaatgtcttatattcttagaccccaaagaacgtaaagaatttgatgtgtttcggattgatgtaaaaaaagaactaggtattgaagaccctcgagaaaagccttcgacaattcatacattaattaatcctaaacctttcttgggcattaatagtattttattcaaacagcaaatagttaaccaactttatacctctttcaacaaatgtattaaaattgcttcagcaaaattggccaccatagaggaagaagagcaagagcaattatatttagtatcagcaagcatcccccagcgtctaggtcgaacattaatatcagcaaaaagaaaactgtcgactcaattaaaattaaaagcgaaagcaatacgcaaacaactccgaagaaagacataa

SEQ ID NO: 4000 - protein, 224 aa, Streptococcus agalactiae
MDLSQWEASDLIAFVSIIILGTSFIAPAFVAFVQRQTELRSKKLDIFKENYSKRYNRQYYIFQDFIEKSGNIIAQLDSKVVPSDKNIQEFESAALKCLIFLDPKERKEFDVFRIDVKKELGIEDPREKPSTIHTLINPKPFLGINSILFKQQIVNQLYTSFNKCIKIASAKLATIEEEEQEQLYLVSASIPQRLGRTLISAKRKLSTQLKLKAKAIRKQLRRKT

SEQ ID NO: 4001 - protein, 159 aa, Streptococcus agalactiae
ATGAATTGGAAAAAACTAATGCTTGGCGACTTAGAACACACGTTTACTAGTCGTGATGGCAAAGAAAAAACAAGCGTTGAATTTGAAGGTGGCTTATTGCCAGCTCTGTTAGTGCTAGGTGGTATCACTTGGCTGATCGCTTGGTTTATTACAAAATAA

SEQ ID NO: 4002 - protein, 52 aa, Streptococcus agalactiae
MNWKKLMLGDLEHTFTSRDGKEKTSVEFEGGLLPALLVLGGITWLIAWFITK

SEQ ID NO: 4003 - protein, 129 aa, Streptococcus agalactiae
ATGGAATGNNNNNAAGAAGCATACGCAAAAGAAAAAGACCCAATCGCTAGGTGCGAGCTAGCAATAGGGTATCTTAAATTAGGAAGCTATTTAGAAGATTTCGGCATTTTATCTACCAAACGTATCTAA

SEQ ID NO: 4004 - protein, 42 aa, Streptococcus agalactiae
  VARIANT 3, 4, 5: Xaa = Any Amino Acid
MEXXXEAYAKEKDPIARCELAIGYLKLGSYLEDFGILSTKRI

SEQ ID NO: 4005 - protein, 198 aa, Streptococcus agalactiae
ATGAAAATTTCTAATTCAAAAGATTTAGCTCTCGCTATTGTCGCTTCTTCTAGTCCTACTTTGTCTATCGAAGATAAAATCAAACTTTACGAAGACGCCTATAAAGCTGTAGAGGCTCACAATAAGCCTATCATTGAAGCTGAAAACGAACGACGAGCAAAGGACGTTGAAGCGTTTTTAGATACGTTTGGTAGATAA

SEQ ID NO: 4006 - protein, 65 aa, Streptococcus agalactiae
MKISNSKDLALAIVASSSPTLSIEDKIKLYEDAYKAVEAHNKPIIEAENERRAKDVEAFLDTFGR

SEQ ID NO: 4007 - protein, 93 aa, Streptococcus agalactiae
ATGAATGAATGNNNNNTTCGTCGTACTCAGTTTGACAAAGCTAAAGCAGGAGCCCGTGCTCATATCTTAGAAAGGTTTACTTGTGCGGCTTGA

SEQ ID NO: 4008 - protein, 30 aa, Streptococcus agalactiae
  VARIANT 4, 5, 6: Xaa = Any Amino Acid
MNEXXXRRTQFDKAKAGARAHILERFTCAA

SEQ ID NO: 4009 - protein, 759 aa, Streptococcus agalactiae
ATGTCACGTTTTGAATTATCGGAGCGTCAGAGTCAAGCTATTTTAGATATGCGTCTTCGTCGTTTAACTGGATTAGAACGCGATAAAATCCAATCAGAATACAATGACTTACTAGCTTTAATTGCTGATTTAGCAGATATCTTAGCTAAGCCTGAACGTGTTGTTACCATTATAAAAGAAGAGATGGATGAGGTTAAGCGTAAGTATGCTGATGCCCGTCGTACAGAATTAATGATTGGTGAAGTTTTATCACTTGAAGATGAAGACCTTATTGAGGAAGAAGATGTTCTTATTACTCTCTCAAACAAGGGATATATCAAGCGTCTCGCTCAAGATGAGTTTAGAGCACAAAAACGTGGAGGACGCGGTATTCAAGGGACTGGAGTTAATAACGATGATTTTGTTCGTGAATTGGTTTCAACAAGTACTCACGATACTGTGCTTTTCTTTACAAATTTAGGGCGTGTGTATCGTTTGAAAGCATATGAAATTCCAGAATATGGACGTACAGCTAAAGGCCTCCCTATCGTTAACCTTTTAAAACTTGACGAAGGTGAGACAATTCAAACAATTATTAACGCTAGAAAAGAAGATGTCGCTAATAAATATTTCTTTTTCACAACTCAGCAAGGTATAGTGAAACGTACAAGTGTTTCTGAATTTAGTAACATTCGTCAAAATGGACTTCGTGCTATTAATTTGAAAGAGAATGACGAGTTGATTAACGTCCTCTTGNNNNNCATTCCATTCATTAATTAA

SEQ ID NO: 4010 - protein, 252 aa, Streptococcus agalactiae
  VARIANT 246, 247: Xaa = Any Amino Acid
MSRFELSERQSQAILDMRLRRLTGLERDKIQSEYNDLLALIADLADILAKPERVVTIIKEEMDEVKRKYADARRTELMIGEVLSLEDEDLIEEEDVLITLSNKGYIKRLAQDEFRAQKRGGRGIQGTGVNNDDFVRELVSTSTHDTVLFFTNLGRVYRLKAYEIPEYGRTAKGLPIVNLLKLDEGETIQTIINARKEDVANKYFFFTTQQGIVKRTSVSEFSNIRQNGLRAINLKENDELINVLLXXIPFIN

SEQ ID NO: 4011 - protein, 747 aa, Streptococcus agalactiae
ATGGCAAATCAACTTAATATTTCCCGCACAGCTATTTGGAAAGGTATAAAAACGTTAGAAGAATTAGGCCTAGAGATTGAGTCTGTCACTAACAAGGGCTACCGATTGGTATCAGGTGACATATTATTACCAGAACAACTCGAACAAGAAATTGGTATTAAGGTTAGTCTTAATAATAATAGTGCTTCAACCCAACTAGATGCTAAAATGGGGATAGAAAGTAAATTAAAGACTCCACACCTTTTTTTAGCTCCTAATCAAAAAAAAGCTAAAGGACGTTTTGATAGACCTTTCTTTACATCAAATCAAGGCGGCATCTATATGTCTCTTTTATTACAACCTAATGTACCGATTGAAGATATAAAACCTTATACTGTCATGGTAGCCTCTAGTGCTGTAAAAGCTATCTCACGGTTAACAGGAATTAATCCTGAAATTAAGTGGGTCAATGATATTTATTTAGATAATAAAAAAATAGCTGGTATTTTAACCGAGGCTATCGCTTCTGTTGAGAGTGGGTTGGTAACGAATGTTATTATAGGATTAGGTATCAATTTCTATATCAAAGAGTTCCCTAGGGCGTTAACTAAGCGCGCAGGTAGTCTCTTTACAGAGCAACCGACCATAACTAGAAATCAATTGATTACAGAAATCTGGAATCTCTTTTTCAATATTCCACTAGAGGATCACTTAAAGGTATGTAGAGAAAAATCCCTAGTCTTAGNNNNNCATTCATTCATTAATTAA

SEQ ID NO: 4012 - protein, 248 aa, Streptococcus agalactiae
  VARIANT 242, 243: Xaa = Any Amino Acid
MANQLNISRTAIWKGIKTLEELGLEIESVTNKGYRLVSGDILLPEQLEQEIGIKVSLNNNSASTQLDAKMGIESKLKTPHLFLAPNQKKAKGRFDRPFFTSNQGGIYMSLLLQPNVPIEDIKPYTVMVASSAVKAISRLTGINPEIKWVNDIYLDNKKIAGILTEAIASVESGLVTNVIIGLGINFYIKEFPRALTKRAGSLFTEQPTITRNQLITEIWNLFFNIPLEDHLKVCREKSLVLXXHSFIN

SEQ ID NO: 4013 - protein, 116 aa, Streptococcus agalactiae
ATGATTATTGCTATTCAAGGTGGTATGGCTGTAGGGAAAACCACAGCTTTGAAAATCATTGAGAATGTTTACCCCAAAATCGCTATTAGTTTTGAGGATATTTCTCCAGTAGTTGA

SEQ ID NO: 4014 - protein, 38 aa, Streptococcus agalactiae
MIIAIQGGMAVGKTTALKIIENVYPKIAISFEDISPSS

SEQ ID NO: 4015 - protein, 669 aa, Streptococcus agalactiae
ATGTTCAATGTCATGCGATTGACAGAAGATGACCAAGTGTTCTTGGTTTTTGATGATGCCATCAAGCGTCTGGCAAAGGTGGTGGACAGCTCTGCTCATCGCTTCCAAATTCTAGAAGAGCTAGACAMCAATGTTGAAATGCCAGTTCAAGTGACCATTGCCTCAGGTTTTCCCAAGGGAGACAAGTTGGATTTTGTGACGCAAAAGGCAACAGAATTGGGTGCTGCGGCTATCTGGGGATTCCCAGCTGACTGGTCAGTCGTCAAGTGGGACGGCAAGAAACTAGCTAAAAAAGAAGATAAGCTGGCAAAAATTGCTCTGGGCGCAGCGGAGCAGAGCAAGCGTAATCGTCTTCCTCAGGTTCGTTTATTTGAGAAGAAGGCTGATTTTCAAGCGGAGCTTGCAGGCTTTGATAAGATTTTTATCGCCTATGAAGAGTCTGCCAAGGAGGGTGAATTGTCAGCGCTAGCCCAGAACTTGCAGACTGTAAAAGCAGGTGACAAGCTCCTCTTCATCTTTGGACCAGAAGGGGGCATTTCTCCAAAAGAAATCGCAGCTTTTGAAGAGGTTGGAGCTATCAAGGTGGGCTTGGGGCCACGCATCATGCGCACAGAAACAGCGCCGCTCTATGCTCTAAGTGTTATTAGTTACTCAGCGGAGTTATTATGA

SEQ ID NO: 4016 - protein, 222 aa, Streptococcus agalactiae
  VARIANT 43: Xaa = Any Amino Acid
MFNVMRLTEDDQVFLVFDDAIKRLAKVVDSSAHRFQILEELDXNVEMPVQVTIASGFPKGDKLDFVTQKATELGAAAIWGFPADWSVVKWDGKKLAKKEDKLAKIALGAAEQSKRNRLPQVRLFEKKADFQAELAGFDKIFIAYEESAKEGELSALAQNLQTVKAGDKLLFIFGPEGGISPKEIAAFEEVGAIKVGLGPRIMRTETAPLYALSVISYSAELL

SEQ ID NO: 4017 - protein, 861 aa, Streptococcus agalactiae
ATGGTGCSTGGGTTATTTCCAGTGAGACCTGTGCTTTTGAGGTGGTAGGCGCAAAATGGGTTAGAGATGTTGAACCTGGTGAAGTTATTCTTATAGACGATAGTGGTATTCAATGTGATCGTTATACTGATGAAACGCAACTGGCAATTTGTTCGATGGAATATGTCTATTTTGCAAGGCCGGATTCAACTATACATGGTGTTAATGTTCATACGGCTCGAAAAAATATGGGAAAGCGTCTTGCACAAGAATTTAAACAGGATGCTGATATTGTAATTGGTGTCCCAAATTCGTCCTTATCGGCTGCTATGGGCTTTGCTGAAGAATCCGGATTACCAAATGAGATGGGCCTTGTAAAAAATCAGTATACGCAGCGAACCTTTATTCAACCGACACAAGAATTAAGGGAACAAGGTGTTCGAATGAAATTATCAGCGGTATCTGGTGTTGTCAAAGGAAAGCGCGTTGTTATGATTGATGACTCAATTGTAAGAGGAACGACTTCTAGAAGGATTGTAGGATTATTAAGAGAAGCAGGAGCTACTGAAGTACATGTTGCTATAGCTAGTCCAGAATTAAAGTATCCTTGTTTTTATGGAATTGATATTCAAACAAGACGAGAATTAATTTCAGCAAATCACGCTGTTGACGAAGTGTGTGATATTATTGGCGCAGATAGTCTAACTTATCTATCAATCGATGGGTTAATTAAATCATTGGACTCGAAACAAAGCACCAAATGGTGGTTTATGCGTAGCTTACTTTGATGGACATTATCCCACACCGCTTTATGATTATGAAGAAGAATACCTCAGAAGTTTAGAAGAAAAAAACAGTTTTTNNNNNCATTCCATTCATTAA

SEQ ID NO: 4018 - protein, 287 aa, Streptococcus agalactiae
  VARIANT 3, 282, 283: Xaa = Any Amino Acid
MVXGLFPSETCAFEVVGAKWVRDVEPGEVILIDDSGIQCDRYTDETQLAICSMEYVYFARPDSTIHGVNVHTARKNMGKRLAQEFKQDADIVIGVPNSSLSAAMGFAEESGLPNEMGLVKNQYTQRTFIQPTQELREQGVRMKLSAVSGVVKGKRVVMIDDSIVRGTTSRRIVGLLREAGATEVHVAIASPELKYPCFYGIDIQTRRELISANHAVDEVCDIIGADSLTYLSIDGLIKSIGLETKAPNGGLCVAYFDGHYPTPLYDYEEEYLRSLEEKNSFXXHSIH

SEQ ID NO: 4019 - protein, 548 aa, Streptococcus agalactiae
ATGATTACGTTATTAAAAGATCAGAGCTTCGATGAAATTTCAACGATTAATCTAACTAAAACAGCTGGAATCAGTCGTTCTAGTTTTTATACTCATTATAAAGATAAATATGAAATGATTGATCAATACCAACAGTCACTCTTCAATAAAGTCGAATATATTTTTGATCGCAATCAATTTAAAAAAGAAGATGCCTTGCTCGAAATTTTTCAATTCTTAGATAGAGAATCATTATTTGCTGCTCTCTTAACCCAAAATGGAACAAAAGAAATTCAGACCTACATCCTTAATAAATTACAATTAATGCTTTCTAAAGAATTACCTGTGGTCAATCCAGATGCAACAAAGTCTGATATCAACCGTTTGTATTATAGTGTCTATCTCAGTCATGCTATTTTTGGAGTCTATCAAATGTGGATAACACGAGGAAAAAAAGAAAGCCCTCAACAAATTACACAAGTGCTACTCAGTTTATTACCTCAAACTTAAAACCAGCCTTCCTTATAGGCTGGTCATTTTTAGTTAGGTTTATTTTATCCTCATTATAG

SEQ ID NO: 4020 - protein, 182 aa, Streptococcus agalactiae
MITLLKDQSFDEISTINLTKTAGISRSSFYTHYKDKYEMIDQYQQSLFNKVEYIFDRNQFKKEDALLEIFQFLDRESLFAALLTQNGTKEIQTYILNKLQLMLSKELPVVNPDATKSDINRLYYSVYLSHAIFGVYQMWITRRKKRKPSTNYTSATQFITSNLKPAFLIGWSFLVRFILSSL

SEQ ID NO: 4021 - protein, 297 aa, Streptococcus agalactiae
ATGAATCTAAATGATAGATTAAAAATAGAAGAAATGGAAGAGAAGTATGATAGCTTCAAACCTAGAATCAATGCATTAGTAGAAGCTATAGATGATTTTCAAAAGCACTATGAAGATTACGTGAAATTAAGAGAATTTTATGGTAGCGAAGACTGGTTTAGACTATCAGAACAAACAGAAAATAATCTCAAATGCGGTGTACTGAGTGAGGATCAGCTCTTTGATTTTATAGGAGAACATAACGAGCTTGTAGGCCAATTTTTAGATATGTCTTCTCAAATGTATCGTCATTTATAA

SEQ ID NO: 4022 - protein, 98 aa, Streptococcus agalactiae
MNLNDRLKIEEMEEKYDSFKPRINALVEAIDDFQKHYEDYVKLREFYGSEDWFRLSEQTENNLKCGVLSEDQLFDFIGEHNELVGQFLDMSSQMYRHL

SEQ ID NO: 4023 - protein, 97 aa, Streptococcus agalactiae
ATGGCTTTTTGAGAGAGGTCAACTTTTAGACATTGTCCAAAAAGCTGTTAATGACGCGAATCCCAAAATGCCGGNNNNNCATTCATTCATTAATTAA

SEQ ID NO: 4024 - protein, 32 aa, Streptococcus agalactiae
  VARIANT 26, 27: Xaa = Any Amino Acid
MGFLKRGQLLDIVQKAVNDANPKMPXXHSFIN

SEQ ID NO: 4025 - protein, 411 aa, Streptococcus agalactiae
ATGTATGATTTGGGAGATACTCTAACGGCGTGGCTTTTAAATCTTGCACAACCAGTTACATTTTTGACTATATTTTTAGGTATTGGAATTTTATACTTTATTTTACCTAACGCACGAATTAGAAAAGTACGTTATGTCATTCCAGGGACATTATTTTCAACGTTTGTTATTGGTTTTTTTAGTAATTTAATTAGCCAATACGTCTTAAATAGGGTTGAGAAAATGGTAGATATTAAAACGTTTGGTTCGGTCGTTATCTTTATCTTAATGCTATGGTTTATTTTCTTAGCCCACATTATGATTTTAGGTGCAATACTGAATGCCAGCGTTCAAGAAATTGCGACAGGAAAAATTGAATCAAGGCGTGGAGATATTATGTCTCTTATCCAAAAATCCAAAGAAGAAAAATAA

SEQ ID NO: 4026 - protein, 136 aa, Streptococcus agalactiae
MYDLGDTLTAWLLNLAQPVTFLTIFLGIGILYFILPNARIRKVRYVIPGTLFSTFVIGFFSNLISQYVLNRVEKMVDIKTFGSVVIFILMLWFIFLAHIMILGAILNASVQEIATGKIESRRGDIMSLIQKSKEEK

SEQ ID NO: 4027 - protein, 456 aa, Streptococcus agalactiae
ATGGAATGNNNNNAAATCGTTACTGAAAAATGTATTCAAAATGAAGTCAGCTTATATTTACTGTTCGGACTATTAACATCCCTTCTTTATTTAGTTATTCGACAAGGGATTTTTAATTTCTCGCAGGACGCTCCATTCTCTGCAATAGTTGCTAACATAATAGCTATACTTTTTGCTTTTTTTACAAATGATCGATTTGTTTTTAAACAAACTAAAATTGGACAGCTTCAACGCTTACAAACATTTGTCATCGCTAGATTAGGCACATTAGGATTAGATTTGATATTAGCTGTTATTTTTGTTGATCAATTTCCTTCTATTATCGGACAATTCGTTCAGCACAATTTAAATAAAATCAACACCATTGAAAGCCTTGTATCTCAAATATTAATTATTTTACTCAACTACATCTTGAGCAAATTTGTTATTTTTAAAGACAAAAAAAGACAACTCTAA

SEQ ID NO: 4028 - protein, 151 aa, Streptococcus agalactiae
  VARIANT 3, 4, 5: Xaa = Any Amino Acid
MEXXXIVTEKCIQNEVSLYLLFGLLTSLLYLVIRQGIFNFSQDAPFSAIVANIIAILFAFFTNDRFVFKQTKIGQLQRLQTFVIARLGTLGLDLILAVIFVDQFPSIIGQFVQHNLNKINTIESLVSQILIILLNYILSKFVIFKDKKRQL

SEQ ID NO: 4029 - protein, 501 aa, Streptococcus agalactiae
ATGAGTGAAGCAATTATTGCAAAAAAAGCTGAACAAGTTGAACTTATTGCTGAGAAAATGAAAGCAGCAGCAAGTATCGTTGTTGTTGATTCACGTGGTCTTACTGTTGAGCAAGATACTAACTTACGTCGTTCACTTCGTGAAAGCGATGTTGAGTTTAAAGTTATCAAAAACTCAATTTTAACTCGTGCAGCTGAAAAAGCAGGTCTTGAAGACCTTAAAGAACTTTTTGTTGGTCCATCAGCAGTTGCGTTTTCTAACGAAGATGTTATTGCACCAGCTAAAGTTATTAGCGATTTCGCTAAAGATGCAGAAGCTCTTGAAATCAAAGGTGGTTCAGTAGACGGTAAATTCACTTCAGTTGAAGAAATTAACGCTCTTGCTAAATTACCAAACAAAGAAGGTATGCTTTCAATGCTCCTTTCAGTACTTCAAGCGCCAGTACGCAACGTTGCATATGCTGTCAAAGCAGTTGCAGAAAAAGACGAAGAAGTGGCATAA

SEQ ID NO: 4030 - protein, 166 aa, Streptococcus agalactiae
MSEAIIAKKAEQVELIAEKMKAAASIVVVDSRGLTVEQDTNLRRSLRESDVEFKVIKNSILTRAAEKAGLEDLKELFVGPSAVAFSNEDVIAPAKVISDFAKDAEALEIKGGSVDGKFTSVEEINALAKLPNKEGMLSMLLSVLQAPVRNVAYAVKAVAEKDEEVA

SEQ ID NO: 4031 - protein, 89 aa, Streptococcus agalactiae
GTGGTGARCTGCTGCTGCTAAGACTCATTTGACGTGAATTACAGCTGCTGGAGACAAAAAAGTGGCGTTNNNNNCATTCCATTCATTAA

SEQ ID NO: 4032 - protein, 30 aa, Streptococcus agalactiae
  VARIANT 4, 25, 26: Xaa = Any Amino Acid
VGEXAAAKTHFDRELQLLETKKWRXXHSIH

SEQ ID NO: 4033 - protein, 123 aa, Streptococcus agalactiae
ATGAATGNNNNNTACAGTGAGACAGAAGTTGGTCCAGCGACACGTAAACTATATGATGAGTTAGTAGGGATCCAGTTTGGTGATGTTGAAGCACCAGAAGGGTGGATTTATAAAGTAGATTAA

SEQ ID NO: 4034 - protein, 40 aa, Streptococcus agalactiae
  VARIANT 3, 4: Xaa = Any Amino Acid
MNXXYSETEVGPATRKLYDELVGIQFGDVEAPEGWIYKVD

SEQ ID NO: 4035 - protein, 231 aa, Streptococcus agalactiae
GTGAGTAAAAAAGATAAGAAAATTGAAATTCAAATTTCAGACGCTCAAGTAACAGTTAATGGAACTAAGGTTGATGGATACCAACTCGTTATTGGAAAAAAAATTGTAGGTCAAATTGCAGAGCTAGATTCTAAATTTGCTGTGATTAAAGGTGAGCAAGTGAGTGGATTCTATAAAAATTTAGATCAAGCTATGGGAAATATTATTGAAGAATATAATCTTAATCGCTAA

SEQ ID NO: 4036 - protein, 76 aa, Streptococcus agalactiae
MSKKDKKIEIQISDAQVTVNGTKVDGYQLVIGKKIVGQIAELDSKFAVIKGEQVSGFYKNLDQAMGNIIEEYNLNR

SEQ ID NO: 4037 - protein, 1401 aa, Streptococcus agalactiae
TTGGGGTATAGCCAAGCGGTAAGGCAAGGGACTTTGACTCCCTCATGCGTTGGTTCGAATCCAGCTACCCCAGTCAAAGGTATCAAACTTTTGTTTGACACCGTCAAAGAGATATTTGTTGTCCTTGCGGGTTACCTTGAGAAAATATATTGTTATCAAAAGCTAGCTCGGCTAGCTTTTGTTGGAGGATTTTTTAGAATGAATGAATTTGAAGATTTGCTAAACAGTGTTAGCGAAGTGAACCCTGGTGACGTTGTCACTGCGGAAGTTTTAACAGTTGATAACGGTCAAGCAAACGTTGTTATCGATGGTACTGGTGTTGAAGGTGTCTTGACACTTCGTGAATTGACTAACGATCGTGATGCTGATATCAATGATTTTGTTAAAGCTGGCGACACAGTTGAAGTACTTGTTCTTCGTCAAGTTGTAGGTAAAGATACTGATACAGTAACTTTCCTTGTATCTAAAAAACGCTTGGAAGCTCGTAAAGCATGGGACAAACTTGTTGGTCGTGAAGGTGAAGTTGTTACTGTTAAAGGTACACGTGCTGTTAAAGGCGGACTTTCAGTTGAATTTGAAGGACTTCGTGGTTTCATCCCAGCTTCAATGATTGATACTCGTTTTGTACGTAACACTGAAAAATTTGTTGGACAAGAATTTGATGCTAAAATCAAAGAAGTTGATGCAGCAGAAAATCGCTTCATCCTTTCACGTCGTGAAGTTGTTGAAGAATCTGCAGCTGCAGCACGTAAAGAAGTTTTCTCAAACATTGAAGTAGGTTCAGTTGTAACTGGTAAAGTTGCTCGTTTAACAAGCTTTGGTGCTTTCATTGACCTTGGTGGTGTTGATGGACTTGTACACGTAACTGAATTATCACATGAGCGCAATGTTTCACCTAAATCAGTTGTAACTGTTGGTGAAGAAGTTGAAGTTAAAGTACTTTCAATTGATGAAGAAGCTGGTCGTGTATCACTTTCACTTAAAGCAACTACACCTGGCCCATGGGATGGCGTTGAACAAAAACTTGCTGCTGGTGATGTTATTGAAGGTAAAGTAAAACGCTTGACTGACTTTGGTGCTTTTGTTGAAGTGTTACCTGGCATTGATGGACTCGTACACATTTCACAAATTTCACACAAACGTGTTGAAAATCCTAAAGACGTATTATCTGCAGGACAAGAAGTTACTGTTAAAGTTCTTGAAGTTAATTCAGATGCAGAACGTGTATCACTTTCAATGAAAGCTCTTGAAGAGCGTCCAGCGCAAGCAGAAGGTGAAAAAGAAGAAAAACGTCAATCACGTCCACGTCGTCCACGTCGTCAAGAAAAACGCGACTACGAGCTTCCAGAAACACAAACTGGATTCTCTATGGCTGACTTATTCGGTGATATTGAATTATAA

SEQ ID NO: 4038 - protein, 466 aa, Streptococcus agalactiae
MGYSQAVRQGTLTPSCVGSNPATPVKGIKLLFDTVKEIFVVLAGYLEKIYCYQKLARLAFVGGFFRMNEFEDLLNSVSEVNPGDVVTAEVLTVDNGQANVVIDGTGVEGVLTLRELTNDRDADINDFVKAGDTVEVLVLRQVVGKDTDTVTFLVSKKRLEARKAWDKLVGREGEVVTVKGTRAVKGGLSVEFEGLRGFIPASMIDTRFVRNTEKFVGQEFDAKIKEVDAAENRFILSRREVVEESAAAARKEVFSNIEVGSVVTGKVARLTSFGAFIDLGGVDGLVHVTELSHERNVSPKSVVTVGEEVEVKVLSIDEEAGRVSLSLKATTPGPWDGVEQKLAAGDVIEGKVKRLTDFGAFVEVLPGIDGLVHISQISHKRVENPKDVLSAGQEVTVKVLEVNSDAERVSLSMKALEERPAQAEGEKEEKRQSRPRRPRRQEKRDYELPETQTGFSMADLFGDIEL

SEQ ID NO: 4039 - protein, 1077 aa, Streptococcus agalactiae
ATGGCGTATTTCCGTAAACGCGACAACGGGTGGGAGTATCGAATATCGTATAAAGATATAACTGGTAAGTACCGACAAAAATCAAAGAGCGGTTTTAAAACAAAGAAACAAGCTGAACTTGAAGCAAATAAGATAGAGATAGAATTATCTAAAGGATTTCAAATAAATAATAATATAGAATTTTGTACTTACTTTAAAAATCGGTCTGAACTTTATAAAAAGCCAAATGTAACTGCTACTACTTGGGATAAGTACAACTATACTTTGTCTAAGATAAAAGGGTATTTCGATAAAGCCAAGTTATCATCAATTAAACCAAGTCATTACCAAAAATTTATTAGTGATTATTTAAACCAGTACAACTGGCAAACTATTAAAATGATAAATACTCACATCAGACAATCAATAAAAATGGCTATCCATGAAGGTTATATTACTAAAGATTTCACTGCTTTCGTCGTCCTTCCGAAACCAGATGATAGTAACGTAGATAGTAAATTTTTAGAGCTATCAGAATATCAAAAATTAATTTCAGAGACTAGTAATGAAGTGAAGTATAAGTCGCATTTTTGTATTTATTTAATAGCAACAACTGGATTAAGATTTTCAGAGGCTATGGGATTGACTTGGAGCGATATAGATAGAGATGAGTTGCTACTACATGTCAACAAGACTTACAAAGTGTTTGGAAGTGATAAAGGATTTCAACCAACTAAAAATAAACACTCAATTAGATATGTACCAATAAATAACACAACTATCAAATTGCTAGATCAATATAGGTTGTTATTCAAAACAGAAACAAGGATATTTGAAGGAATATCAAATACAGCTGTCAACAAGACACTAAAAAAATTAGTTGGCAGAAATATACACATTCATTCCCTAAGACATACTTATGTGTCTCATTTAATATCAGAAGGAATCGACTTGTTTGCTATTTCCAAGATAGTTGGACACAAAGATTTAAATATCACACTAAGCACGTATGCTCATTTGCTGGAAGATACAAAAAACAAGAACAATGAAATTATTAGGGAATTATTTGGGGCGAATTTGGGGCATAAACTAATATAA

SEQ ID NO: 4040 - protein, 358 aa, Streptococcus agalactiae
MAYFRKRDNGWEYRISYKDITGKYRQKSKSGFKTKKQAELEANKIEIELSKGFQINNNIEFCTYFKNRSELYKKPNVTATTWDKYNYTLSKIKGYFDKAKLSSIKPSHYQKFISDYLNQYNWQTIKMINTHIRQSIKMAIHEGYITKDFTAFVVLPKPDDSNVDSKFLELSEYQKLISETSNEVKYKSHFCIYLIATTGLRFSEAMGLTWSDIDRDELLLHVNKTYKVFGSDKGFQPTKNKHSIRYVPINNTTIKLLDQYRLLFKTETRIFEGISNTAVNKTLKKLVGRNIHIHSLRHTYVSHLISEGIDLFAISKIVGHKDLNITLSTYAHLLEDTKNKNNEIIRELFGANLGHKLI

SEQ ID NO: 4041 - protein, 687 aa, Streptococcus agalactiae
TTGAAATCTTCAATAGCACATCGATTTGCGGAGAGATTTCAAAATCAAACATATGCTTATTTGAATACTAATAATTATAGCAGTGATAAAATTTTAGAAATTAGCTATATAGTATCCAAATTTTCGAAAATTATTAATACAAATAAGAAGTTTAAAAATAACTCTATCAACCACTATGTAAATAACTATAGTGATGTCCCTATTTGGGTAATTATTGATTATATAGAGTTTGGAGATTTGTTAACTTTTATAAAAAATCTTGATAAAAGTTTGCAAAATGATGTTGCTATTGATTTAGTAAGTTTTGTACTTGATAATCTAAAAATCACACAACAATTCACTCCTGAAACAATGCTAGGTTTATTAAATAATATAAGAGAGACTAGGAATGTTTGTGCCCATAACAATAGGCTAATAGGATTTGAATGTAGAGCTAGCTCTACATACTATTCTGACTTACACAGTCTGTTTAATATAACACCTGACGATTCAAGAAAAAATGTATTCACTACATTTATTAGTTTACAATGCTTTCTTAGTAACTCAGAATATGCAAAATTGCATAACTCAATAAGAAAAAGAGTAAATCAATTAAAAAATAAAGTTGGGCAAGATAAAGTTAATGAAATTCTTGAACAACTTGGATTCCCAATAAATTGGAATGACCAACCAAAACTTAGACAATAA

SEQ ID NO: 4042 - protein, 228 aa, Streptococcus agalactiae
MKSSIAHRFAERFQNQTYAYLNTNNYSSDKILEISYIVSKFSKIINTNKKFKNNSINHYVNNYSDVPIWVIIDYIEFGDLLTFIKNLDKSLQNDVAIDLVSFVLDNLKITQQFTPETMLGLLNNIRETRNVCAHNNRLIGFECRASSTYYSDLHSLFNITPDDSRKNVFTTFISLQCFLSNSEYAKLHNSIRKRVNQLKNKVGQDKVNEILEQLGFPINWNDQPKLRQ

SEQ ID NO: 4043 - protein, 189 aa, Streptococcus agalactiae
TTGAAAGAATTTAAATCACTTACTGATCAACTCAATTTATTAAAAGATCGTGGTCTAAAAATAGGAGATGAAGAAAAAGCTGAATTATATCTATTGACCAATAACTACTACAACATCATAAACGGTTACGGAAATTCTTTTGCTCTGAAAAAAATAAATACGATGATGATGCAACATTTGAAAAAATAG

SEQ ID NO: 4044 - protein, 62 aa, Streptococcus agalactiae
MKEFKSLTDQLNLLKDRGLKIGDEEKAELYLLTNNYYNIINGYGNSFALKKINTMMMQHLKK

SEQ ID NO: 4045 - protein, 111 aa, Streptococcus agalactiae
TTGGTAGAGCAATGGATTGAAGCTCCATGTGTCGGCCGTTCGATTCCGTCTCGCGCCATTTATACCTTAGGAGAGATAGCGGANNNNNCATTCCATTCATTAATTAATTAA

SEQ ID NO: 4046 - protein, 36 aa, Streptococcus agalactiae
  VARIANT 28, 29, 30: Xaa = Any Amino Acid
MVEQWIEAPCVGRSIPSRAIYTLGEIAXXXFHSLIN

SEQ ID NO: 4047 - protein, 1647 aa, Streptococcus agalactiae
ATGACCGCTCTGGGTAAAACACTTTCTAACGTAGGTAGATTAGTAGGTTGGATAGGAAAGTTATCTGGTGAAATGAAAGGCGCAAAAGCAGCAGAAGGATTAGCTACTGCTGTAGGCGGTCTAGGTGCTAATTCTGCAACAGCGGCAGCTAGTGTAGGGCTTTTAGGAAATCCAGTGACTTGGGGGGGCATCATCGGCGGTGCTGCGGTTATCGGAATAGGTATATTAGCTAATAAGATATATGAAGCTCACCAGCGTACCCAAGAGTGGGGAACTAAAGTTAATCAAGTTCAAGCTAACGAACTACAGGCTTTTAAAGATAAAGTTGATAAGACGAATCAGTCGATGGCAGGATTCAGAGGTGGAGCTGACCAAGTCAATGCTGTTAAGACAGCATTTCAAGGACTAGTTACCGAAATCGAAAAACTAGAAAATAAAGACTTAAGTAAAAACGTTAAATTAGCAGAGCAACTTGGTTTCAGTCAAGAAACGATAGAACAGTTGAAAAAATCAAGCAGGCAAACAATTGATAATGTCAAGCAGATGTCTGATGAAGTCATTAATATCTATCAAAACGCTAGCAACGAACATAGAAGATTAACTGAAGAAGAGAATGCTGTTGTTTTAGCAAATCAAAATGAGCTTATCAATGTGCAGCTATCAAAATTGAACTACTCTGCTAAAGAGAAGAAGGCAATTACCAAGGCGATGAATGGTGAGCTAGAAGCGTTAAATAGTCAGCAGTTAACTAAGGCTCTTGAAGTTACTGAAAAATGGATAAAAGCTGAAAATAAATCATATCAAAAGTTAAAAAGTGGTCTTAAAAAAGCTTATGACTCTATCAAAGGTGATGATGAAGCTGCTGTTAAAGCGAGGGAAGAAATCCACAAGAAACAGCAACAACTCGAAGCTGACCATTACTTGAAAATGGAAGCTTATGGCAAACGTTATGCTAAAATCCAAAAGAAATTGCTTAAAGGGACTGCGAAATATTTAGACCCGCAGTTGCAACAAGCGATGGTTAACGATGTCAAAAAGCAAATGAAGGAGCTTGGGTTATCTTATGAAGAGTTGATGAAGAAGACAACCAAAGCAGCATCTAAAGCTCAAGAAGTTAATACTATGTGGGCTAGAACTACTAAAAAATCAACAGAAGATCAAAAGGTGGCTAATTCGCAATGGAATAGCCTTGTCTGGAATCCCAAAACGGGTAAGTTGAAAACAAATGCTAAAGAGGAAGTAGCTAAAGCTCTTGAAGCGGAAGACGGATGGGACAGACTTAAGTTTATTGCAAAGAATGCAAACTTAGAGACCAACGCTCGGATAACCATGGCGGAAGTTCTAGTCGAAACTGGCAAATGGGATGCTCTCGAACCAGAAGATAAAGAACTAATCGTTGATGGGCATCAAGGCATTCAATCCATAGTAGAAAGCAAGGAAAATTTAAAAACATGGAATAGTTTGCCAGAAGGCGTTAAGCGTATTCTAGGCGACAATAAAGATTTTCTTGATAAAAAAGGAGTTGCGACCAAAGCGCTCGAAAATTGGAATTCGTTGTCTCCAAAACAGCAAAAGTTACTAGCAAAAGATATGACTAGTTCTGATGTTAGAAAGCAAAAAAAGNNNNNCATTCCATTCATTAATTAA

SEQ ID NO: 4048 - protein, 548 aa, Streptococcus agalactiae
  VARIANT 542, 543: Xaa = Any Amino Acid
MTALGKTLSNVGRLVGWIGKLSGEMKGAKAAEGLATAVGGLGANSATAAASVGLLGNPVTWGGIIGGAAVIGIGILANKIYEAHQRTQEWGTKVNQVQANELQAFKDKVDKTNQSMAGFRGGADQVNAVKTAFQGLVTEIEKLENKDLSKNVKLAEQLGFSQETIEQLKKSSRQTIDNVKQMSDEVINIYQNASNEHRRLTEEENAVVLANQNELINVQLSKLNYSAKEKKAITKAMNGELEALNSQQLTKALEVTEKWIKAENKSYQKLKSGLKKAYDSIKGDDEAAVKAREEIHKKQQQLEADHYLKMEAYGKRYAKIQKKLLKGTAKYLDPQLQQAMVNDVKKQMKELGLSYEELMKKTTKAASKAQEVNTMWARTTKKSTEDQKVANSQWNSLVWNPKTGKLKTNAKEEVAKALEAEDGWDRLKFIAKNANLETNARITMAEVLVETGKWDALEPEDKELIVDGHQGIQSIVESKENLKTWNSLPEGVKRILGDNKDFLDKKGVATKALENWNSLSPKQQKLLAKDMTSSDVRKQKKXXIPFIN

SEQ ID NO: 4049 - protein, 333 aa, Streptococcus agalactiae
ATGAATGAATGNNNNNTTATCGCTATGATACGTGAAACTGGTGTCTCCTACTATTGTAATCTAGCAAGTCCGTATATCTTGGACCCTGAAGCACTCAAGTATATTGACTATGACCTTGATGTCAAAGTATTTGCAGATGGTGAAAAAAGACTACTAGATGTGGACGAATATGAACAGCATAAAGCTCAGATGAACTATCCTACCGATATTGATTATATATTAAAGGAAAATGTAAAAATATTGGTAGAATGGATAAATGAGAATAAAGGCCCCTTTTCATCATCATATATCAATATCTGGTATAAACGGTACCTTGAATTGAAAAAGCGCTAA

SEQ ID NO: 4050 - protein, 110 aa, Streptococcus agalactiae
  VARIANT 4, 5, 6: Xaa = Any Amino Acid
MNEXXXIAMIRETGVSYYCNLASPYILDPEALKYIDYDLDVKVFADGEKRLLDVDEYEQHKAQMNYPTDIDYILKENVKILVEWINENKGPFSSSYINIWYKRYLELKKR

SEQ ID NO: 4051 - protein, 413 aa, Streptococcus agalactiae
ATGACACAAGCTATTTTAGAAATTAAACATTTGAAAAAATCTTACGGAAGCAATGAAGTGTTAAAAGATATTTCGCTTTCGGTCAACAAAGGCGAAGTTATTTCTATCATTGGTTCTTCTGGATCAGGAAAATCAACTTTCCTACGTTCTATTAACCTCTTAGAAGAACCAAGTGGAGGAGAAATCTTATATCACGGTCACAATGTTCTTGAAAAAGGCTATGATTTAAATAATTATCGTGAAAAACTTGGGATGGTCTTTCAATCTTTTAACCTCTTTGAAAATTTAAATATCTTAGAGAATGCTATTGTCGCACAGACTACTGTTCTAAAACGTGAACGCCAAGAAGCTGAAAAGATTGCTAAAGAAAACTTAAATGCTGTTGGCATGACTGAGCAATATTGGAAAGCTAA

SEQ ID NO: 4052 - protein, 137 aa, Streptococcus agalactiae
MTQAILEIKHLKKSYGSNEVLKDISLSVNKGEVISIIGSSGSGKSTFLRSINLLEEPSGGEILYHGHNVLEKGYDLNNYREKLGMVFQSFNLFENLNILENAIVAQTTVLKRERQEAEKIAKENLNAVGMTEQYWES

SEQ ID NO: 4053 - protein, 340 aa, Streptococcus agalactiae
ATGGAATGNNNNNAACCGCAACTGCACTTGGTTTCCCCACGGACAAACCATGCGAAAAATTGTTCTACCACAAGTTGTACGTAACATACTCCCAGCTACTGGTAATGAGTTTGTTATCAATATCAAAGATACCTCTGTACTGAACGTTATCTCTGTTGTCGAACTCTACTTCTCTGGTAATACTGTTGCAACACAAACCTACCAATATTTCCAAACATTCACCATTATTGCGATTATTTACTTCATCTTAACCTTCACCGTAACACGTATCTTACGTTACATTGAAAAACGTTTTGATTCAGATAATTACACAACCGGTGCGAATCAATTACAAGTCTAG

SEQ ID NO: 4054 - protein, 113 aa, Streptococcus agalactiae
  VARIANT 3, 4, 5: Xaa = Any Amino Acid
MEXXXPQLHLVSPTDKPLRKIVLPQVVRNILPATGNEFVINIKDTSVLNVISVVELYFSGNTVATQTYQYFQTFTIIAIIYFILTFTVTRILRYIEKRFDSDNYTTGANQLQV

SEQ ID NO: 4055 - protein, 642 aa, Streptococcus agalactiae
ATGNNNNNTTCAGGTGTTGCCCAAATCACTCTTTATAATAATGATAATCGAATCATTTACTGTCCTGGAGCCAACGGAAAAGTTGATACTAAAAAATGGTCTCAGGAGTGGTCAATAATTAAAGAAGCTGATTTAGTTGTATTACAAAATGAAATTCCTCATCAAGCAAATATGAAAATTGCTAATTTTTGTAAAGAACATAGTATTAAATTACTCTATAATCCTGCACCATCTAGAGAGACTGATATTGAGATGCTCGATAAGGTCGATTATTTCACACCAAATGAACACGAATGTCAAGAGCTGTTCCCAAACCAAAAACTAGAGGATATATTAGCCACATATCCTGAAAAACTAATCGTAACACTCGGCACAAAAGGAGCCATCTACTCTGATGGAAAAGAAAGTCATTTAATTCCTGCTTTAGAAACTAAAGCTGTTGATACAACTGGTGCAGGTGATACTTTTAACGGTGCATTCGGTTATGCTATCTCGAAAAAATTTAAGATTGCTAAGGCCTTACGTTTTGCAACTCTAGCTGCTCACTTATCCGTGCAAAAATTTGGTGCACAGGGTGGCATGCCTACAATTAAAGAAATGGAGGACAACCAACATTATGAAAAAGACTGGTATATTAAATAG

SEQ ID NO: 4056 - protein, 213 aa, Streptococcus agalactiae
  VARIANT 2, 3: Xaa = Any Amino Acid
MXXSGVAQITLYNNDNRIIYCPGANGKVDTKKWSQEWSIIKEADLVVLQNEIPHQANMKIANFCKEHSIKLLYNPAPSRETDIEMLDKVDYFTPNEHECQELFPNQKLEDILATYPEKLIVTLGTKGAIYSDGKESHLIPALETKAVDTTGAGDTFNGAFGYAISKKFKIAKALRFATLAAHLSVQKFGAQGGMPTIKEMEDNQHYEKDWYIK

SEQ ID NO: 4057 - protein, 516 aa, Streptococcus agalactiae
ATGKTTATTTTCTGGCGTCAAAAAGCCGCGCATTGCGGTTTGCCCGCGCGGCTGTTTTCGGGGACCATGGGCGCCTTTGCAACCTGCCAACGAGAGGCGCCCATGGCCAACCACGACCTGTCCTACACCCCCGATCCTGATGCTGACTCCATCTCATCCGACGTAATTGGCTTCAACGGTATCCTGGTCTCCACCCAGATCCCGACCCGCGCCGACGGCAGCCTGGAGCTGGGCGATATCTCCCTGCAATGCGAATGCACCCTGCAAGCGCTGAAAGTCGCGCTGGAAAAGGCCGGCAGCTCCATGGATCGGGTAATGCACCTGACCATTTATCTGACGGATATGGCCGATCGTGCGGCCTTTAATGAAGTCTACAAACGCTTCTTTGCCAAGCCCTGGCCCGCGCATCCATCGCCATCAGTACGGCGGTGTACAACGTTCAGCCGTTCCTGTTGGTCATGCTGGCGGCGCTGTTTCTCGGTGAAAAAATCACCTTACAGAAACTGGCCTGGCTGA

SEQ ID NO: 4058 - protein, 171 aa, Streptococcus agalactiae
  VARIANT 2: Xaa = Any Amino Acid
MXIFWRQKAAHCGLPARLFSGTMGAFATCQREAPMANHDLSYTPDPDADSISSDVIGFNGILVSTQIPTRADGSLELGDISLQCECTLQALKVALEKAGSSMDRVMHLTIYLTDMADRAAFNEVYKRFFAKPWPAHPSPSVRRCTTFSRSCWSCWRRCFSVKKSPYRNWPG

SEQ ID NO: 4059 - protein, 390 aa, Streptococcus agalactiae
GTCACCGAATACAAAGGACTGTTTACTGCACTCGAACGCTCCATGGCCGTGGTCGAATTTGACCTCAATGGCAAGGTGTTGAGTGCTAACGACAACTTCCTGAGGACGCTGGGTTACAGCCGTGAGCAACTGCTCGGCAAATCCCATCGTGATTTCTGCTTGCCAGCGCTGACCAGCAGCTCGGCCTATGGCCAGTTCTGGGCTGACCTCAAGGCCGGAAAGTTCGTGTCAGGTACGTTTAAGCGGGTGGACTCCCAAGGCAGGACTATCTGGCTTGAGGCCAGCTACAACCCGGTGCTGGATGAGCGTGGCCAGGTGTTGAAAGTGGTCAAGTACGCGTTGGACGCACTGCCAAGGTTGAACAGGAAGCCGCTACGCGCAGCAAACTGA

SEQ ID NO: 4060 - protein, 129 aa, Streptococcus agalactiae
VTEYKGLFTALERSMAVVEFDLNGKVLSANDNFLRTLGYSREQLLGKSHRDFCLPALTSSSAYGQFWADLKAGKFVSGTFKRVDSQGRTIWLEASYNPVLDERGQVLKVVKYALDALPRLNRKPLRAAN

SEQ ID NO: 4061 - protein, 840 aa, Streptococcus agalactiae
ATGCATTTGATTCGTCGAAGCCATAACCCAAGTTTTATGGGGAAGGTAAAAGAAGCTTTAAGCACTGTAAAGGGAGGTTTCGCCTATCTACTGATGACAGAAGATAAATTAATTGCTGCTCTTGACCCTAATGCCTTTCGTCCTTTGTCAATTGGACAAATGCAAAATGGTGCCTGGGTTATTTCCAGTGAGACCTGTGCTTTTGAGGTGGTAGGCGCAAAATGGGTTAGAGATGTTGAACCTGGTGAAGTTATTCTTATAGACGATAGTGGTATTCAATGTGATCGTTATACTGATGAAACGCAACTGGCAATTTGTTCGATGGAATATGTCTATTTTGCAAGGCCGGATTCAACTATACATGGTGTTAATGTTCATACGGCTCGAAAAAATATGGGAAAGCGTCTTGCACAAGAATTTAAACAGGATGCTGATATTGTAATTGGTGTCCCAAATTCGTCCTTATCGGCTGCTATGGGCTTTGCTGAAGAATCCGGATTACCAAATGAGATGGGCCTTGTAAAAAATCAGTATACGCAGCGAACCTTTATTCAACCGACACAAGAATTAAGGGAACAAGGTGTTCGAATGAAATTATCAGCGGTATCTGGTGTTGTCAAAGGAAAGCGCGTTGTTATGATTGATGACTCAATTGTAAGAGGAACGACTTCTAGAAGGATTGTAGGATTATTAAGAGAAGCAGGAGCTACTGAAGTACATGTTGCTATAGCTAGTCCAGAATTAAAGTATCCTTGKTTTTATGGAATTGATATTCAAACAAGACGAGAATTTATTTCAGCAATCACGCTGTTTGACCAAGNNNNNCATTCCATTCATTAA

SEQ ID NO: 4062 - protein, 279 aa, Streptococcus agalactiae
  VARIANT 252, 274, 275: Xaa = Any Amino Acid
MHLIRRSHNPSFMGKVKEALSTVKGGFAYLLMTEDKLIAALDPNAFRPLSIGQMQNGAWVISSETCAFEVVGAKWVRDVEPGEVILIDDSGIQCDRYTDETQLAICSMEYVYFARPDSTIHGVNVHTARKNMGKRLAQEFKQDADIVIGVPNSSLSAAMGFAEESGLPNEMGLVKNQYTQRTFIQPTQELREQGVRMKLSAVSGVVKGKRVVMIDDSIVRGTTSRRIVGLLREAGATEVHVAIASPELKYPXFYGIDIQTRREFISAITLFDQXXHSIH

SEQ ID NO: 4063 - protein, 857 aa, Streptococcus agalactiae
ATGGAATGNNNNNCGCCATTTAAATGCCTATGCTGGTATATGGGTTACTGCAAGCCACAATCCAGCACCTTCAATGGTTATAAAGTCTACGGACAAGACGGAGGTCAACTACCACCAGCTGATGCTGATGCACTAACAGACTTTATCCGTGCTATTGAAAATCCATTTGCAGTTGAACTTGCTGATTTAGATGAAAGCAAATCAGCGGGTCTTATTCAAGTTATCGGTGAAGATGTTGATATTGAATATCTTAGAGAGGTTAAAGATGTTAATATCAATCAAGATTTAATCAATAACTTTGGAAAAGACATGAAAATTGTCTATACTCCTCTCCACGGAACTGGTGAGATGTTGACACGCCGTGCCCTTGCTCAAGCCGGTTTTGAATCTGTTGTTGTAGTAGAATCACAAGCTAAGGCAGATCCAGACTTTTCTACTGTCAAATCTCCTAACCCTGAAAGCCAAGCTGCCTTTGCTCTTGCTGAAGAACTCGGACGAGAAGTTGATGCAGATGTCTTAGTAGCTACTGATCCTGATGCAGACCGCCTAGGCGTTGAAATTCGCCAACCAGATGGTTCTTATAAAAACCTTTCTGGAAATCAAATTGGAGCGATTATTGCGAAATACATCCTGGAAGCTCATAAACAGCAGGAACACTTCCAGAAAATGCTGCTCTCGCTAAWTCAATCGTATCAACAGAATTAGTAACAAAAATTGCCGAAAGTTATGGCGCTACAATGTTTAACGTTTTAACTGGATTTAAATTCATCGCTGAGAAAATTCAAGAGTTGAAGAAAAACATAACCACACCTATAGTTGGTTTGAAGAAAGCTCNNNNNCATTCATTCATTAATTAA

SEQ ID NO: 4064 - protein, 286 aa, Streptococcus agalactiae
  VARIANT 3, 4, 5, 229, 280, 281: Xaa = Any Amino Acid
MEXXXPFKCLCWYYGLLQATIQHLSNGYKVYGQDGGQLPPADADALTDFIRAIENPFAVELADLDESKSAGLIQVIGEDVDIEYLREVKDVNINQDLINNFGKDMKIVYTPLHGTGEMLTRRALAQAGFESVVVVESQAKADPDFSTVKSPNPESQAAFALAEELGREVDADVLVATDPDADRLGVEIRQPDGSYKNLSGNQIGAIIAKYILEAHKTAGTLPENAALAXSIVSTELVTKIAESYGATMFNVLTGFKFIAEKIQELKKNITTPIVGLKKAXXHSFIN

SEQ ID NO: 4065 - protein, 336 aa, Streptococcus agalactiae
ATGATATCCTGTTATTATACTGCAGATAAAAAAACATTTAACAAGCCTGTCTTAGAGGATTTAGCACAAGGCATTTACAGCCTTCCTCTACTTCTTGCCATTGAAGAAAATCCTGATATTTTCAAACCTATTTTAGATAAAAAAACAGATATGGCTACTGAAGACATGGAAAAAATTGCTTATCTCGTCGTTTCCCATAGAGGTGTTGACAAAGCTCGCCATCTAGCTCGTAAATTTACTGAAAAAGCTATTAGTGACATAAATAAGCTACCCCAGAGCTCTGCAAAAAAACAGTTGCTACAATTAACTAATTACCTTTTAAAACGCAAAATTTAA

SEQ ID NO: 4066 - protein, 111 aa, Streptococcus agalactiae
MISCYYTADKKTFNKPVLEDLAQGIYSLPLLLAIEENPDIFKPILDKKTDMATEDMEKIAYLVVSHRGVDKARHLARKFTEKAISDINKLPQSSAKKQLLQLTNYLLKRKI

SEQ ID NO: 4067 - protein, 280 aa, Streptococcus agalactiae
TTGGCTAGATCTTACTAAAAGATGTCCCAATTGTATCTTAGATGAGCCAACTGTTGGACTTGATCCTATTACTGAACAAGCCTTACTAAGGGTATTTATGAAAGAATTGGAAGGTAAGACCTTAGTTTGGATTACACATCACTTAAAAGGTATTGAACATGCTGATCGTATCTTATTTATAGAAAATGGGCAATTAGAGTTGGAAGGTTCTCCTCAAGAATTGTCTCAAAGTAGCCAACGTTACCGTCAGCTGAAAGCCTCTGATGATGGTGATCTATGA

SEQ ID NO: 4068 - protein, 93 aa, Streptococcus agalactiae
MARILLKDVPIVILDEPTVGLDPITEQALLRVFMKELEGKTLVWITHHLKGIEHADRILFIENGQLELEGSPQELSQSSQRYRQLKASDDGDL

SEQ ID NO: 4069 - protein, 368 aa, Streptococcus agalactiae
ATGAATGNNNNNGGAAGAGTTGAGCAGATTCGATGGAAACTAGTGGAGCGACCAGATGGTTTCTATCATTTTGTCCTTGTTGATGAGACAATTGTTGGTTTTCTTAGATTGGTATCAAAGACGAGGAGAAGCGTGCTTGGCTTGGTACGGCGGCTATTCTTCCCCAATATCAAGGGCAGGGCTACGGCTCAGCAGCGATGGCTTTATTAGAGAAAACCTATCYTAAGCTTACAAAGTGGGATTTATGTACGATTGCGCAAGAAAAACTAATGGTCAGTTTTTATGAAAAATGTGGTTATCATTCAACCCATACCGAACCTGAGCAAGAAGGAATGGATATGGTCTATATGACAAAGAAGATAGAATAA

SEQ ID NO: 4070 - protein, 122 aa, Streptococcus agalactiae
  VARIANT 3, 4, 75: Xaa = Any Amino Acid
MNXXGRVEQIRWKLVERPDGFYHFVLVDETIVGFLRLVIKDEEKRAWLGTAAILPQYQGQGYGSAAMALLEKTYXKLTKWDLCTIAQEKLMVSFYEKCGYHSTHTEPEQEGMDMVYMTKKIE

SEQ ID NO: 4071 - protein, 549 aa, Streptococcus agalactiae
TTGGAATTCCCTCTCAAAGATATCAAATACCTGCTTGAGCAAGCAAAAGAGGAAAGGCAAGACTTATTAGCCCAACAAATCAAATTGCTTGAATGGAAAAGATCGCACCTTGAGCAGGTTATCACCCATGCGAAACGATTACAAGAAAAAGGAGATGATTATATGAATTTCGATGTTTATAATAAAACAGAATTAGAACAATTACAAGCTGAAGCAAAAGAAAAGTGGGGACAAACAGCAGCCTACAAAGAATTTGCTCAAAAACATGCTTCAGATGACTTTGCACAAATTAGCCAAGAAATGGCAAAAATAATGGTACAATTTGGGCAATTAAAGACACAAAATGTATCTGATGAATCTGTTCAAATGTGTGTGAAACGGCTACAAGACTATATCTCTCAGCATTTTTACACCTGTACCAATGAAATCCTTGCTGGACTAGGACAAATGTATCAATCAGATGACCGGTTTAGTCAATCAATTGACAAAGCTGGTGGAGCAGGAACAAGTGAATTTGTCAGCCAAGCTATTGCTTACTATTGCCAATAA

SEQ ID NO: 4072 - protein, 182 aa, Streptococcus agalactiae
MEFPLKDIKYLLEQAKEERQDLLAQQIKLLEWKRSHLEQVITHAKRLQEKGDDYMNFDVYNKTELEQLQAEAKEKWGQTAAYKEFAQKHASDDFAQISQEMAKIMVQFGQLKTQNVSDESVQMCVKRLQDYISQHFYTCTNEILAGLGQMYQSDDRFSQSIDKAGGAGTSEFVSQAIAYYCQ

SEQ ID NO: 4073 - protein, 672 aa, Streptococcus agalactiae
ATGTCAGACTATTTATCCGTGTCGACACTGACTAAGTATTTAAAATTAAAATTTGACAAAGACCCTTATTTAGAGAGGGTTTATTTAACTGGGCAAGTGTCTAATTTTCGTCGTCGCCCAAACCATCAATATTTCTCTTTAAAAGATGATAAATCAGTCATTCAGGCGACAATGTGGTCAGGTCACTTCAAAAAATTGGGTTTTGAATTAGAGGAAGGGATGAAGGTTAATGTAGTTGGCCGTGTTCAACTTTATGAACCAAGCGGCTCCTACTCTATTATTGTTGAAAAAGCAGAACCGGATGGTATAGGAGCTCTTGCTATCCAATTTGAACAACTAAAGAAGAAACTCTCTCAAGCAGGTTATTTTGATGATCGTCATAAGCAATTAATTCCTCAATTTGTTAGAAAAATAGGAGTTGTGACTAGTCCAAGTGGAGCCGTTATTCGGGATATTATTACAACAGTATCTCGTCGATTTCCAGGAGTGGAAATATTACTTTTCCCCACAAAAGTTCAAGGAGAGGGCGCAGCTCAGGAAATAGCACAAACTATTGCTTTAGCTAACGAGAAAAAGGATTTGGATCTATTAATTGTTGGCCGTGGGGGARGKTCTATTGAGGACTTATGGGCATTTTATGAAGAANNNNNCATTCATTCATTAATTAATTAA

SEQ ID NO: 4074 - protein, 223 aa, Streptococcus agalactiae
  VARIANT 204, 216, 217: Xaa = Any Amino Acid
MSDYLSVSTLTKYLKLKFDKDPYLERVYLTGQVSNFRRRPNHQYFSLKDDKSVIQATMWSGHFKKLGFELEEGMKVNVVGRVQLYEPSGSYSIIVEKAEPDGIGALAIQFEQLKKKLSQAGYFDDRHKQLIPQFVRKIGVVTSPSGAVIRDIITTVSRRFPGVEILLFPTKVQGEGAAQEIAQTIALANEKKDLDLLIVGRGGXSIEDLWAFYEEXXIHSLIN

SEQ ID NO: 4075 - protein, 132 aa, Streptococcus agalactiae
ATGNNNNNGTATCAGTGGGGAGTTTATCTACATTCGGCAATTGCTCAAGGATTATCTAAAGAAGCCTATGTTGTTCTACCGACAACGATTAGTGATGAGATTCCAAAAGAAATGGCTAGACTATCTAAATAA

SEQ ID NO: 4076 - protein, 43 aa, Streptococcus agalactiae
  VARIANT 2, 3: Xaa = Any Amino Acid
MXXYQWGVYLHSAIAQGLSKEAYVVLPTTISDEIPKEMARLSK

SEQ ID NO: 4077 - protein, 180 aa, Streptococcus agalactiae
ATGAATGAATGNNNNNTTCCAGAACCAGATCCGGAGAGTGTTTGTCAACGTGTTCACCAGCCGTATAATCCAGCTATTGAGCAAGACGGACAAGAACGTCAAATGCACGAGATTACCCCTGGTCATTTTGTTTTATCTACACCCCAAGAAGCTGAAGAATATAAAAAACAAATATTATAA

SEQ ID NO: 4078 - protein, 59 aa, Streptococcus agalactiae
  VARIANT 4, 5, 6: Xaa = Any Amino Acid
MNEXXXPEPDPESVCQRVHQPYNPAIEQDGQERQMHEITPGHFVLSTPQEAEEYKKQIL

SEQ ID NO: 4079 - protein, 201 aa, Streptococcus agalactiae
ATGTCACAAGAAAAACTAAAATCAAAATTAGATCAAGCAAAAGGTGGTGCTAAAGAAGGCTTTGGCAAAATAACCGGTGATAAAGAGTTAGAAGCAAAAGGATTTGTTGAAAAAACAATTGCTAAAGGCAAAGAACTAGCAGATGATGCTAAAGATGCTGTTGAAGAGGCAGTAGATGCTGTCAAAGAAAAACTGAAATAA

SEQ ID NO: 4080 - protein, 66 aa, Streptococcus agalactiae; identical to SEQ ID NO: 1138

SEQ ID NO: 4081 - protein, 897 aa, Streptococcus agalactiae
ATGAATAATCTAGTTCTTCCTCAGAATTTAAACAAATATAACATTACGAAAATCGTTACCAATTTCAATAGATTACTTGCTTTAAGTGATAACAGGACACTTACAGTAGATATGAGAAACATTGAGTTTGCGGAACCTAGTGGAGTAATTTCGTTATATAATATGTTAACTTTTGCTACAAAAAGAAAAGATGCAAACATCAAGTGGTTAATATGCGAAGAAAGCTCTTTAAATAAACGTCAAAGGCAAGCTATGTTGTATCTAGTAGATTGTGGCTTTTTTAAAGTGTTTGATAAATTGGTTTATAAAGAGCCGGAACTGCGCCCGACTACTTTTGAAATTAAATTTATTAACACTGAACAAATAGCTCAATGGAAGGTAACAGACTTTAAGAATTGGTTACAAAAGCAAACTGGCAGAACAAATGAGTTTAGTTCTATTTGTGTAGCGGTTGACGAAATTTTTAATAATATTGCAGATCATTCTAAGGAATCTAAGGGATGTATTTTTGGGCAATACTATCCCAAGAACAAGGAGATTGTAATAGCAGTATCTGATTTCGGAATAGGAATCCCTCAGTCTATAAAGCGAAAATTTAAAAAGGATGAGCCTGACAACAAGTTAATAGAATTCGCTCTTCAAGAGGGTGTTTCTGCAGAAACTATACCTCAAAATAGAGGGGCAGGGCTTTCTAATATTGTAAATACTTTAACTACTAACAAAGTCGGGAACTTTACAATTATATCTAATTGTGGTATAGTCTCGGTATCAGATAATAAAATTACTCAAAGTTATTCGTCTGAGGAATCATATCCTGGTACTTTTTTTGAAATTCGAATAGATGTATCGAATGACAATTTATATGATTTAGAAGAGGAGGAAGAATTCGAATGGTAA

SEQ ID NO: 4082 - protein, 298 aa, Streptococcus agalactiae
MNNLVLPQNLNKYNITKIVTNFNRLLALSDNRTLTVDMRNIEFAEPSGVISLYNMLTFATKRKDANIKWLICEESSLNKRQRQAMLYLVDCGFFKVFDKLVYKEPELRPTTFEIKFINTEQIAQWKVTDFKNWLQKQTGRTNEFSSICVAVDEIFNNIADHSKESKGCIFGQYYPKNKEIVIAVSDFGIGIPQSIKRKFKKDEPDNKLIEFALQEGVSAETIPQNRGAGLSNIVNTLTTNKVGNFTIISNCGIVSVSDNKITQSYSSEESYPGTFFEIRIDVSNDNLYDLEEEEEFEW

SEQ ID NO: 4083 - protein, 132 aa, Streptococcus agalactiae
ATGTCGGTAGCAAAAAATTATGGAGGTAAAGCTCCTTTAGATAAGACAAATGCCCTCGCAAAAGCGAGGGCTATTTTTATTGAAATATTGAAATCTCTTTATAAAAATAGTAAAATAGTTTCGCTATTATAA

SEQ ID NO: 4084 - protein, 43 aa, Streptococcus agalactiae
MSVAKNYGGKAPLDKTNALAKARAIFIEILKSLYKNSKIVSLL

SEQ ID NO: 4085 - protein, 1344 aa, Streptococcus agalactiae
ATGGCTACATACCAGGAATATAAAAGTCGTTCAAATGGCAATGCTTACGATATTGATGGATCGTTTGGTGCGCAATGTTGGGATGGTTATGCAGACTACTGTAAGTACCTAGGACTGCCATACGCAAACTGTACAAATACAGGATACGCAAGGGACATATGGGAGCAACGTCACGAAAATGGTATTTTAAACTACTTTGATGAAGTGGAAGTTATGCAAGCTGGTGATGTTGCTATTTTTATGGTTGTTGACGGTGTAACGCCTTACAGTCATGTAGCAATTTTTGACAGCGATGCAGGAGGCGGATATGGCTGGTTTTTGGGGCAAAATCAAGGCGGTGCTAATGGCGCATACAATCTTGTAAAAATCCCATACTCCGCAACATACCCAACTGCCTTTAGACCAAAAGTTTTTAAAAATGCAGTTACTGTTACAGGTAATATAGGACTAAATAAAGGAGATTACTTTATTGATGTATCAGCTTATCAACAAGCAGACTTAACTGCTACTTGTCGGCAAGCTGGCACTACTAAAACGATTATCAAAGTATCTGAGTCACTCGCTTGGCTGTCTGACAGGCATCAGCAACAAGCTAATACTAGTGACCCTGTTGGTTATTATCACTTCGGACGATTTGGAGGAGATATCAACTTAGCACAACGAGAAGCAGATTTATTTTTGTCCAATTTACCAAGTAAAAAAGTTTCTTACCTAGTCATTGACTACGAAGACTCTGCAAGTGCTGACAAACAAGCTAACACTAATGCAGTTATTGTGTTTATGGATAAAATTGCAAACGCTGGATATAAGCCTATTTATTACAGCTACAAACCTTTTACGCTTAATAATATTGATTATCAACAAATTATAGCTAAGTACCCAAACAGTATTTGGATAGCTGGTTATCCAGATTATGAAGTACGAAAAGACCCACTTTGGGAGTTCTTCCCTTCAATGGATGGTGTGCGCTGGTGGCAGTTTACAAGTGTAGGAGTAGCAGGTGGTTTAGATAAAAATATTGTATTATTAGCAGATGATAGTAGCAAAGTTGATATACCTAAGATTGACAAACCACAAGAACCACAAAGCCAGCTTACTTTTAATCAAAAGCTAGATACTAACACTAAATTAGACAACTCAAATGTACCTTACTACGAAGCAACCCTTAGCACAGACTATTATGTAGAGTCTAAGCCAAACGCAAGTAGCGCTGATAAAGAATTTATCAAAGCAGGAACTCGCGTAAGAGTCTACGAAAAAGTGAATGGATGGTCACGCATTAATGCTTCTCAGTCTGACCAATGGGTAGAAGATAAGTATTTAGCTAATGCCACACAAGTATAA

SEQ ID NO: 4086 - protein, 447 aa, Streptococcus agalactiae
MATYQEYKSRSNGNAYDIDGSFGAQCWDGYADYCKYLGLPYANCTNTGYARDIWEQRHENGILNYFDEVEVMQAGDVAIFMVVDGVTPYSHVAIFDSDAGGGYGWFLGQNQGGANGAYNLVKIPYSATYPTAFRPKVFKNAVTVTGNIGLNKGDYFIDVSAYQQADLTATCRQAGTTKTIIKVSESLAWLSDRHQQQANTSDPVGYYHFGRFGGDINLAQREADLFLSNLPSKKVSYLVIDYEDSASADKQANTNAVIVFMDKIANAGYKPIYYSYKPFTLNNIDYQQIIAKYPNSIWIAGYPDYEVRKDPLWEFFPSMDGVRWWQFTSVGVAGGLDKNIVLLADDSSKVDIPKIDKPQEPQSQLTFNQKLDTNTKLDNSNVPYYEATLSTDYYVESKPNASSADKEFIKAGTRVRVYEKVNGWSRINASQSDQWVEDKYLANATQV

SEQ ID NO: 4087 - protein, 228 aa, Streptococcus agalactiae
ATGATTAATTTAAAATTACGACTACAAAACAAAGTAACTTTGATGGCTATTTTAGGAGCTATATTTTTGCTAGCGCAACAATTAGGTATTAAATTACCGTCAAATATTGCGGATATTGCAAACACAGCAGTAACGCTTTTGGTATTACTTGGAGTTGTTACAGACCCAACAACCGAAGGTCTTTCAGACAGTGAGCAAGCATTGACTTACCACGAGCCAAAAAAATAG

SEQ ID NO: 4088 - protein, 75 aa, Streptococcus agalactiae
MINLKLRLQNKVTLMAILGAIFLLAQQLGIKLPSNIADIANTAVTLLVLLGVVTDPTTEGLSDSEQALTYHEPKK

SEQ ID NO: 4089 - protein, 129 aa, Streptococcus agalactiae
ATGATGATTAATTACTTTGCAATGCAGATTGAACTAGGGTGGATTACTATTGATGACGTTCCAGCATTTTGTCGTGAGCGAGTACGTAAACTAATTGAAGTTTCTACGGTTGGTACAGAAGGAAAATGA

SEQ ID NO: 4090 - protein, 42 aa, Streptococcus agalactiae
MMINYFAMQIELGWITIDDVPAFCRERVRKLIEVSTVGTEGK

SEQ ID NO: 4091 - protein, 393 aa, Streptococcus agalactiae
ATGCTTGAATTTTTGAATAGATACCCAGTTTTACTGGAAGATAAAAGTGTAAAAGAGACTAAAGCGATTTTAGCATTTACGTCTAGCACGATTAAAGCAAATTTTGAAGTGACGCTACCAGCAGAAGAAAATGATAAAAAATTTGCTGAAACTTTAAAAACGTGTGAAAAGCTTATCTTTGAGCAACTTTACAAAGACAAAGCAGAAGCAGAACAATTTGAAAAAATTAATGACGCAATTGCTAAGTCAAAGGCGCAATCAGATAAAGCGGAAAATATGATTAAACTGATGTCAGCAACTGTTAACGATTTGATTAAGACAATGGCTGACGGAGGGAAATTGAATGATACAACGCTTAACAACGCTAGCGAAAATAGCAGTACACATATTTAA

SEQ ID NO: 4092 - protein, 130 aa, Streptococcus agalactiae
MLEFLNRYPVLLEDKSVKETKAILAFTSSTIKANFEVTLPAEENDKKFAETLKTCEKLIFEQLYKDKAEAEQFEKINDAIAKSKAQSDKAENMIKLMSATVNDLIKTMADGGKLNDTTLNNASENSSTHI

SEQ ID NO: 4093 - protein, 2025 aa, Streptococcus agalactiae
ATGGGAACTGCTACATATAGTAGGTCGTGGGGGAATAACCTGACACTTGAAATATTGTCTGCTTGGAATAAGCCAAATATCGCAAGTAATACAAGCACAGTCAATGTACAAGTTTTTTTAAAAATGTCTAGTTATGGCTATATTTCAATAGGTGAAACTAGACCTTTAAAAATAACAGTTGATGGTAGAGCTGAGACCATCAATGTTAATCCATCGATAAATTACGGACAGAGAAAACTATTATTTGCTAAAGATTACATTGTTAATCATAATTCAGATGGAAATAAACCACTATTCAATATTTCAGCATATTATCCAATAAACTTTAGCAATTATGGTGAAGCGACTGCAAATCAGTCTATCTCGCTACCTAAAATTAATAGACTTAGTGTATCAAGTGCTATTAGTGGTGTGCTAGGTAATGCAGTAACTATCACAATCAATAGATATTCAACGTCATTTACTCACAATTTGAAATATGATTTTAAGGGTAGTACAGGTACTATCGCAACTGGCGTTGGTACTAGCTATTTGTGGACTATACCGCCAACGTTTGCTAATTTACTGCCTAATGAATTAACTGGTACAGGTAATCTGATTGTTGAGACGATGGATGGATCAGCAAAGATTGGTGAGACAAAATATACTTTATCAATAACAATACCTAATACAGCTACTTATAAGCCAAAATTGTCAAGTATCACTCTATCTGATACAAATACTTTAACTAGTAGCATTGTTAGTGGAAACAATTTTGTTAGGATTATAAGTAAAGTTAAAGTTGATTTTGGCTCAGCTATTGGAAACAACGGTTCAACAATAACAAGTTATAATGCTGAAATTGTCGGGAAAAGTAACTCAATTATCGGTAATGGTAGCGTATTTGATAAATTGGACTTTTTTGGTTCAGCAACAATCAGAGCAACGGTAACTGATAGCAGAGGTCTAACATCAGAACCAGTTGACACAAAAATTAATGTCATTGATTATTTTTTACCAATTGTTACAAGTGCAAAAGTAGTCAGGTCTCAGCAAAATCCTGACATTTTACAAGTCTTGCCATTTGTTAAGATTGCACCAATTATAGTTGGTGGAATACAAAAAAACCAACTCAAAATGTCGGTATCTGTTGCACCATACAATACTGGTATCTATGCAGTTGATAGTGGCGCAGCTACAAATACCTGGTCAACAATTTCCCAAATGTCAGGCGCCCCTTTAAATCTTGGCGGCACTTATGACAAATCAAAATCTTGGCTTGTTAAAGTATCTGTCAGTGATAGTTTAATGTCAGCAATCCCTATTACTCAAACGATTTCTAGTGAGTTTGTTCTAGTAACTAAAGCACCTTCTGGTGTTGCATTTGGGAAAATTTGGGAACATGGCATTATTGATGCCAAAGGCGATGTTTATGTTGACGGTACTATTTATTGTGGCGATAAGGCGATACAGCAAAAACCACTTGCTTTAAATAATGGTGGCTCTTTTAGACATGACGACACCGACCTAAATAGCTTGCAAGACACAGGTTTTTATTGTGTATTTAGAGGTGCTAATAGACCGGCTGGGGCAGGCCCTGGCTATGTAACTGTTGTAAGACATGAGACAGCAAACTATGCTTATCAACAATTTTACGATCGAACAAATAAAACTATTTTTACCAGAGTGCTGGAAAACGGTGTTTGGAGCGGTTGGAGTGAGTACGCTAAAAAAGATAGCTTACCGCAATCCGCACCAGCGGTAGAAGATACTGGTTGGCAATACATCGGCAACGGTTTTAATTACAGGAAAATTGGTAGCATGGTCACTATTAAATATGACTTTGCAACAAATGGAATAAACCAGTTTACGGTCGGTTCCATGCCAACGAATTTAATTCCAAACGAAATGATGTTTGCGGTTACTGCGTGGACTGTGCAATTAAATGTATTAAATGTACAAGTTAGTGCAGATGGTCGTATTTTATGGTTCAACCCATCAAAATGGGCGGTTAATGTTAAAGGACAAATTAATTGGATAATTTAA

SEQ ID NO: 4094 - protein, 674 aa, Streptococcus agalactiae
MGTATYSRSWGNNLTLEILSAWNKPNIASNTSTVNVQVFLKMSSYGYISIGETRPLKITVDGRAETINVNPSINYGQRKLLFAKDYIVNHNSDGNKPLFNISAYYPINFSNYGEATANQSISLPKINRLSVSSAISGVLGNAVTITINRYSTSFTHNLKYDFKGSTGTIATGVGTSYLWTIPPTFANLLPNELTGTGNLIVETMDGSAKIGETKYTLSITIPNTATYKPKLSSITLSDTNTLTSSIVSGNNFVRIISKVKVDFGSAIGNNGSTITSYNAEIVGKSNSIIGNGSVFDKLDFFGSATIRATVTDSRGLTSEPVDTKINVIDYFLPIVTSAKVVRSQQNPDILQVLPFVKIAPIIVGGIQKNQLKMSVSVAPYNTGIYAVDSGAATNTWSTISQMSGAPLNLGGTYDKSKSWLVKVSVSDSLMSAIPITQTISSEFVLVTKAPSGVAFGKIWEHGIIDAKGDVYVDGTIYCGDKAIQQKPLALNNGGSFRHDDTDLNSLQDTGFYCVFRGANRPAGAGPGYVTVVRHETANYAYQQFYDRTNKTIFTRVLENGVWSGWSEYAKKDSLPQSAPAVEDTGWQYIGNGFNYRKIGSMVTIKYDFATNGINQFTVGSMPTNLIPNEMMFAVTAWTVQLNVLNVQVSADGRILWFNPSKWAVNVKGQINWII

SEQ ID NO: 4095 - protein, 3828 aa, Streptococcus agalactiae
GTGGTTGTAATAACTCTAGTAATACACGACGCAAAGTTACATCCAGTTTTGCTTTTAGACAATGAGCGACAAGGAGCACTTAATTATTATGATGATTTGTGGACTAGACAGCTCACAACTGGTTCGTCAGCATTTGAGTTTTCTGTTTATAAAAAATCGCTGTTGGGTGATAATCCACTTAATCACAAATATCACGCACTAAACGATCAAGCATTTGTTTCTTTTGTACACAAAGATAAAGTACAATTGTTTAACATCATGCGAGTCGAGGAAACAGAGACAACAATACATTGCTATTGCGAAAATCTTAATTTAGAGTTACTAAACGAGTATTGCAACGCATATAAAGCAACTAAAGCAATGTCATTTGAAGAGTATCTTGTGCAGTTTGATATTTTAAATTGGGGTGCTTTGACAATTGGCACAAACGAAGTTAAGGACAAAAAACTGACATTGGAATGGACTGGTCAAGACACTAAGTTAGCTCGTATTTTGTCAATTGCTAATAATTTTGATGCAGAAATCGAATTTGAAACTCAATTACACAACAATCACACGTTTAAAGCGTTTATTGTAAATGTGTACAAGGAATACGAAGAGGGCGTGTCCTATGGCGTAGGTCGTGACCGCAGCGACATAGTGTTGAGATATCAAAAAAATGTAACTGGTATCACTAAAAAATTAGACAAGCGCCAGATTTACAACGCCATACGCCCGTATGGCAAAAAGACAGTCAAAGGCGAGCGCGTTATTTCTAATCCTGTAACTCGCAAAGTCACTAAAACAGTTGGGTCAAATCGTACATATTTAGGCGGAGACCTCAAATATTATGGTCATACAATCAAAAAAGCTAACGTACAATCTATTATTAACTACGCGGTGCAGTATAATATTTTGCCGAGTGGAATCATATGTCAACTGTACTTAGAAAGTCTTTGGGGTGATTCAGCAGTTGGTAAACGTGACAATAACTGGGCAGGTATAAGCGGCGGAGCACAGACACGCCCTAGTGGAGTAAAAGTCACTACTGGAATGGCTCGTCCTCCCAGCGAGGGTGGAACATACATGCACTACGCAAGTGTTGATGACTTTTTAAAAGATTATACTTATCTTTTAGCTAAACAAGGACTATATAACGTTGTTGGCAAAAAGAATATAGCAGACTATACAAAAGGTTTGTTTCGTGTCGGTGGCGCTAAAGATGATTACGCGGCAGCAGGATATCAACATTACATATCAACCATGACCTCAATACGCAATGGGATAAATAAAGTTAGCGGAAATATCTTAAACACTATTGATACTTTGTGGCAGACTCCTGTAAAGCCAATAACGTCAGTAACAACTGCGAAAAGAGCTACTAAAACAATACAAGCTATTAATGAGGCTACTAAGTTGAAAGGGCGCAGAGTTGGTTCTGGGCAGTGTTATGCGCTGTCTGGGTGGTATGCGAAAAAATTGGATGGCGCTTGGATTGACAGCTCTATTGGTGGTATTCGTGGTCGGATTGGCGGTGGTATGGCTGCTGCCTTAATCGGCACTGATTATAATTGGGGTGCATATGGGTGGAAGGTAGATAAATCACCTAACGCTAGAAACTTAAAAGCTGGTGGTATTTATAATGTACGAGCAAATCGAGGCGCTCCTTTTTATACCACAGGCTGGGGGCATACAGGTATTATCAAGAGTGTGTCCAAGACCAGAGTTACTGTTTTGGAGCAAAACTTTGTTGGCCGCATGTATGTTGTCGAAAACTCATATGACATTAACTCTTTCGTGTCTGGATTACAAACAGTATGTTACCCTCGTGAAATAGCGCAAGGTATGTCTGTCAATGGTGCAACTACTCAGCAAGTTACTGGTGGAACACAGATATCGTACGAAGAAGTTGTACAAGAGGCGCAAACAGAAACATATGAAGAAGAACAAATCATCTATATTGACAACTCTATCTACAAAGAGTGGAAAGATGAAAACGGTAAAGTAGAGTACTATCTCAAAAATGGATTTTTGTACGCACCACTTTCAAGAGACCGCTATCCATCTGTTTTAACCGGTAATGAGACACGAGACAACTGGATACGAAAAGACATGGAAGTCGAGACTGATAGTCAAGAAGTCTTGATGTCAACAGGTCTAAAAGACTTAAAAGCACACGCATATCCAGCAATTACATACGAAGTTGATGGCTATGTTGACTTAGAACTTGGTGATGTTGTGCGGATACAGGACGACGGATACGAGCCACCGCTAATTCTCACAGCGAGGGTTATTGAGCAAGAAATATCAATAACAAATCCCAGCTCTAACAAAACTAAATTCAGCAATTTTGTCGAAAAAGAAAGTCAGTTAGCTTCCGACTTAATTAGTGATATGTTGCGTCTATACGATGAGTCAATTCCATACGATATACAACTAGCGACTTCAAACGGAGTTGCTTTTAAAAATGGGGTTGGTGAGTCTGTATTAACGCCTAACCTGCAAAAAAATGGGAAAGATTACGATGCTATTTATTTTTATAAAAATGGCGACTCACTGATTGAGATAGGTCCTTCGCTAACAGTTAAAGCAAGTGACTTTAACCATGTTTTAAACATAACAGTCGAAGCTTATGTTAACGAGGAACTTGTAGCAAGTACGCAAATATCCTTTACAGATACTGAGGATGGAGAAAAAGGCGATGATGGTGCTACATCATGGACAGCGTGGGCCAATTCGAAAGATGGAAAAGTTGACTTTAGTATTACTGAAGCTAAAAATAGAAGATTTATCGGTACTTATACTGGATTAACGCAATCAACAAATTATCTTGACTACAAGTGGATTGATATGTCTGCTAATGTTGTCATTGGTACTCAAAATTTACTTGATGGTACAAAATCATTTTCTGGAAGTTGGTTTACCGAAGGTACAATATTTGAGACTACAAAAATCAGCGAATATCCATTTGAATTTAAGAAATGGAAGTCTGGAAATAAGGTTAGTCACACTATCGAGTTTGATGTTAAAGCTGGTGTAACATACACTTTTACAGCTGCTATAGCAAGAGAAAATGCTGGAAGATTGTACTTCTATTTGTATGACTTGTTTGCAAACCATATCACAAGTAACACACCTCGTGAGACGATAATTGAAAATGTCACTACAGATATCCAGATGTTTAAAGTTACATTTGTACCGCTCAGAGACGGTAAAATAAAACCACGCTTTGCCATGCTTGCCAGTGATGCAGGTTGGTTTATGACTGGTGGATATATGCTTGTCAAAGGTAATAAATCTGGAGATTGGCAAGAGTCCGAAGTTGATAGAATAAACAATCTCGACACAAAAGCTGATCAAGAATTAACCCAAGCACAAATTCTAGCTCTTGAAGAAAGAACTGCTATAGCAAGAGAAAATGCAATTGCTGAGGCTATGCAGAATACACTCAGTGAAGTTGAAACTAAGTGGAAGCTTTGGTATGACTTAAATACGATAGACGAAAAGCAAAAAGTTGCAAACGACATCGCTCAATTGTTTGATCGTACAACTGAGTTTAAACAACTATTAGGTGAGGCAAGTGCAAGATTTAGCTTTATCAACAATGAAACGTTGATTGGTGAAGAGGGCGTTGCTATCGGTGACAAAGGCGGAAAAGCAAAGTTATTTCTATCAAATGACAGCATTTCATTTGTGACAAATGGTGTTGCTCAGATGACATTGACAGGTGATACCTTAACAATAAAAAATGGACTGTTTACAGAGCGTATACAAATTGGAAATTTTGTTGAAGAAGTCTATGACAGAAATCCATTATTTAATGTTATCAGAGCAATTAGAAATAGTTAG

SEQ ID NO: 4096 - protein, 1275 aa, Streptococcus agalactiae
MVVITLVIHDAKLHPVLLLDNERQGALNYYDDLWTRQLTTGSSAFEFSVYKKSLLGDNPLNHKYHALNDQAFVSFVHKDKVQLFNIMRVEETETTIHCYCENLNLELLNEYCNAYKATKAMSFEEYLVQFDILNWGALTIGTNEVKDKKLTLEWTGQDTKLARILSIANNFDAEIEFETQLHNNHTFKAFIVNVYKEYEEGVSYGVGRDRSDIVLRYQKNVTGITKKLDKRQIYNAIRPYGKKTVKGERVISNPVTRKVTKTVGSNRTYLGGDLKYYGHTIKKANVQSIINYAVQYNILPSGIICQLYLESLWGDSAVGKRDNNWAGISGGAQTRPSGVKVTTGMARPPSEGGTYMHYASVDDFLKDYTYLLAKQGLYNVVGKKNIADYTKGLFRVGGAKDDYAAAGYQHYISTMTSIRNGINKVSGNILNTIDTLWQTPVKPITSVTTAKRATKTIQAINEATKLKGRRVGSGQCYALSGWYAKKLDGAWIDSSIGGIRGRIGGGMAAALIGTDYNWGAYGWKVDKSPNARNLKAGGIYNVRANRGAPFYTTGWGHTGIIKSVSKTRVTVLEQNFVGRMYVVENSYDINSFVSGLQTVCYPREIAQGMSVNGATTQQVTGGTQISYEEVVQEAQTETYEEEQIIYIDNSIYKEWKDENGKVEYYLKNGFLYAPLSRDRYPSVLTGNETRDNWIRKDMEVETDSQEVLMSTGLKDLKAHAYPAITYEVDGYVDLELGDVVRIQDDGYEPPLILTARVIEQEISITNPSSNKTKFSNFVEKESQLASDLISDMLRLYDESIPYDIQLATSNGVAFKNGVGESVLTPNLQKNGKDYDAIYFYKNGDSLIEIGPSLTVKASDFNHVLNITVEAYVNEELVASTQISFTDTEDGEKGDDGATSWTAWANSKDGKVDFSITEAKNRRFIGTYTGLTQSTNYLDYKWIDMSANVVIGTQNLLDGTKSFSGSWFTEGTIFETTKISEYPFEFKKWKSGNKVSHTIEFDVKAGVTYTFTAAIARENAGRLYFYLYDLFANHITSNTPRETIIENVTTDIQMFKVTFVPLRDGKIKPRFAMLASDAGWFMTGGYMLVKGNKSGDWQESEVDRINNLDTKADQELTQAQILALEERTAIARENAIAEAMQNTLSEVETKWKLWYDLNTIDEKQKVANDIAQLFDRTTEFKQLLGEASARFSFINNETLIGEEGVAIGDKGGKAKLFLSNDSISFVTNGVAQMTLTGDTLTIKNGLFTERIQIGNFVEEVYDRNPLFNVIRAIRNS

SEQ ID NO: 4097 - protein, 1509 aa, Streptococcus agalactiae
ATGAAATTTGATGGTATAGATCTATCTAATGTCATAGAGATACACGACATCAAAAGAGACGTCGGAAATACACGTAATGTTATTTCAAGTAGCGCTTTAAAAATTGGCGAGCACGTTCAATCTGTGCACGTTGGAGCTAAAAAAATAAGTGTTGATTTTTCTATTTGGACCAGAAATAGAAACGAGGTAAAACATAATTTAGCGAAGGTTTTCAACAGAACAACACCTAGAAAATTGTTTTTTTCTGACGAACCAGATAAATATTATATGGCAATAGTTGTAGATGACATACCGATGGTTGAAGATGTTATCAAGCGTTCAATAGGGACTATCACTTTTTTAATTCCAGATGGCGTCGCTCATTCAACTACTTACAAAAAGTTTTTAGATTACACGCAAGATGGAAATAAACTAACATTTAAATTGCAAAACGAGGGTAACACCAATGCGTTGCCAATTATCAAAATAAAACACAACTCCGAAAATGGCTACATCGGCATCGCAAACGAAACAGGTGCTTTTGCACTTGGATCATCAGAAGAAGAAGACGGGACTATCGTGCATCGCAACGAAGTCCTTTTTGATTACTCAAAAGCGATAGCACAATCTTTGGATGGTGCGCCAAACGTCGCAAAACTTAATCACATGCCACCGACGTACGATACAGAGCTGAAACGGATGCGCATTGATAACATCTTAGGTTCTGGCAAGGGCGGTGAATATGTTGTTATTGGAAATAGAGGCACCACACCGGGATACACAGAACATGTAGGAACTCGCACATTTGACATTAAACCAGATTCTAATGGAGAGTATACGATGAACGAACATTTTTGGTGGCAACAGATTTTTATTGCTACTGCGCAGGATCAGAAAGGTTTTTTAAAGCTTTGTGTAACGGGAATCGACGATGAAGGAAATGACGAGTTTTTGTATGGAATCGAAACTTACAAACGGAAAAATGGTTTTGAAACAGAGTACAATTTTTTTGCGCTTGATGACGACGGTGTGGGTTGGAGATTTTATAAGCAGTTTAAATTCCAAGCAGACAGAAATTATCACAATCCTTTTTCAATGAATAGAAGTAGAGCGGTTGAGATTTTCAGGGAAGAAGATAAGTTTCGTATTTATTTTAACGGTGCGCATCATCATGTAACTGTTCCATCTCTTAAAGGGAAAAAATCCCGCAAGATACACCTTGCAATGGGAACATGTAGTGATAGTTCTAAATATATCAATTATAATCTTTTTGAAAAAGTTAATTTTGAAAAAATGGGAGTGTCTCATTACAACAATATCGTCAATAAATATCAACCAGGGGATGAGGTTATCATTAACTTTGAAAATGATACAGTCAAAACCAAAGAGCTTAATTCCTTACAGGACATGGTCTTAGGCTCTCAACCAATATCTATACCACCGGGAGAGTCAGAGTTGGTTATGCAGTTATCTAAATTTTCTCAGTCTGCACCAAATGTTGAGATACTTATGGAAGAGAGGTGGTTGTAA

SEQ ID NO: 4098 - protein, 502 aa, Streptococcus agalactiae
MKFDGIDLSNVIEIHDIKRDVGNTRNVISSSALKIGEHVQSVHVGAKKISVDFSIWTRNRNEVKHNLAKVFNRTTPRKLFFSDEPDKYYMAIVVDDIPMVEDVIKRSIGTITFLIPDGVAHSTTYKKFLDYTQDGNKLTFKLQNEGNTNALPIIKIKHNSENGYIGIANETGAFALGSSEEEDGTIVHRNEVLFDYSKAIAQSLDGAPNVAKLNHMPPTYDTELKRMRIDNILGSGKGGEYVVIGNRGTTPGYTEHVGTRTFDIKPDSNGEYTMNEHFWWQQIFIATAQDQKGFLKLCVTGIDDEGNDEFLYGIETYKRKNGFETEYNFFALDDDGVGWRFYKQFKFQADRNYHNPFSMNRSRAVEIFREEDKFRIYFNGAHHHVTVPSLKGKKSRKIHLAMGTCSDSSKYINYNLFEKVNFEKMGVSHYNNIVNKYQPGDEVIINFENDTVKTKELNSLQDMVLGSQPISIPPGESELVMQLSKFSQSAPNVEILMEERWL

SEQ ID NO: 4099 - protein, 1248 aa, Streptococcus agalactiae
ATGNNNNNAGACACCAAAGCAGCATCTAAAGCTCAAGAAGTTAATACTATGTGGGCTAGAACTACTAAAAAATCAACAGAAGATCAAAAGGTGGCTAATTCGCAATGGAATAGCCTTGTCTGGAATCCCAAAACGGGTAAGTTGAAAACAAATGCTAAAGAGGAAGTAGCTAAAGCTCTTGAAGCGGAAGACGGATGGGACAGACTTAAGTTTATTGCAAAGAATGCAAACTTAGAGACCAACGCTCGGATAACCATGGCGGAAGTTCTAGTCGAAACTGGCAAATGGGATGCTCTCGAACCAGAAGATAAAGAACTAATCGTTGATGGGCATCAAGGCATTCAATCCATAGTAGAAAGCAAGGAAAATTTAAAAACATGGAATAGTTTGCCAGAAGGCGTTAAGCGTATTCTAGGCGACAATAAAGATTTTCTTGATAAAAAAGGAGTTGCGACCAAAGCGCTCGAAAATTGGAATTCGTTGTCTCCAAAACAGCAAAAGTTACTAGCAAAAGATATGACTAGTTCTGATGTTGAGAAAGCAAAAAAAGCAGTCAACAGCATTGTTCAAAAGAAACCAACAAGCATTAAAGCTAAAAATGATACAAAACCTGATGTCAATTCTGCGCAACGAGCAATTGATAGCGCTAAACAACGTCAACCTATCTCAATTAGAGCTAGGAATGACGCAGGAGGAGTCATAGAACAACTATTAGCTAGCATACCGAGAACGGTTACTATAGGAATCGCTGCTGCTGCAGCTAATGCCTTTAAGTTCGCAAATGGTACTGATTATCACCCAGGCGGTTTTGCAATGGTCAATGACCAAAAAGGGCCTTTATATAAAGAACTAGTAACTTTACCAAATGGACAATCATTCATCCCAGATGGCCGTGATGTAGTATTACCACTGCCGAAAGGTTCGAAAGTCATGAAAGCTAGTATGACCAGGGACTATATGAAAAATTTAGGAATACCTAAATATGCTAACGGCGTTGGAATACCTAAAGATTCGACGTTTGTCAAAAGCATTACAATCCCTAAAAGGGGAGTATCAGAAACGACATCATACGACGACTCTAATATTGCAAGAATTTTGAACGAAATTTTACTAACGCTTAGAACAAAAAATCATGAGACAAAAAATGGCGATGTCTATTTAGATATGAGAAAGGTCGGCAGGATGATTAAAGAACACAACGAGTCTGAAAGTATCATGCTTAAACGAATGCGAGGTGAACTGTCATAG

SEQ ID NO: 4100 - protein, 415 aa, Streptococcus agalactiae
  VARIANT 2, 3: Xaa = Any Amino Acid
MXXDTKAASKAQEVNTMWARTTKKSTEDQKVANSQWNSLVWNPKTGKLKTNAKEEVAKALEAEDGWDRLKFIAKNANLETNARITMAEVLVETGKWDALEPEDKELIVDGHQGIQSIVESKENLKTWNSLPEGVKRILGDNKDFLDKKGVATKALENWNSLSPKQQKLLAKDMTSSDVEKAKKAVNSIVQKKPTSIKAKNDTKPDVNSAQRAIDSAKQRQPISIRARNDAGGVIEQLLASIPRTVTIGIAAAAANAFKFANGTDYHPGGFAMVNDQKGPLYKELVTLPNGQSFIPDGRDVVLPLPKGSKVMKASMTRDYMKNLGIPKYANGVGIPKDSTFVKSITIPKRGVSETTSYDDSNIARILNEILLTLRTKNHETKNGDVYLDMRKVGRMIKEHNESESIMLKRMRGELS

SEQ ID NO: 4101 - protein, 483 aa, Streptococcus agalactiae
ATGAATGNNNNNTCAGGTGGACAACGACAACGTATTTGGATTGCACGTGCTTTAGCAGTAGAGCCTAAATTTATCATTGCTGATGAACCAATATCTGCCTTAGATGTTTCAATCCAAGCACAAGTTGTTAATTTAATGCAAAAATTGCAAAGAGAACAAGGATTGACTTATTTGTTTATCGCACATGATTTGTCTATGGTAAAATACATTTCAGATCGTATCGGTGTTATGCATTGGGGGAAACTGTTAGAAGTTGGAACATCTGATGATGTTTATAACAATCCAATCCACCCTTATACGAAGAGTCTATTATCAGCTATTCCAGAACCAGATCCGGAGAGTGAACGTCAACGTGTTCACCAGCCGTATAATCCAGCTATTGAGCAAGACGGACAAGAACGTCAAATGCACGAGATTACCCCTGGTCATTTTGTTTTATCTACACCCCAAGAAGCTGAAGAATATAAAAAACAAATATTATAA

SEQ ID NO: 4102 - protein, 160 aa, Streptococcus agalactiae
  VARIANT 3, 4: Xaa = Any Amino Acid
MNXXSGGQRQRIWIARALAVEPKFIIADEPISALDVSIQAQVVNLMQKLQREQGLTYLFIAHDLSMVKYISDRIGVMHWGKLLEVGTSDDVYNNPIHPYTKSLLSAIPEPDPESERQRVHQPYNPAIEQDGQERQMHEITPGHFVLSTPQEAEEYKKQIL

SEQ ID NO: 4103 - protein, 543 aa, Streptococcus agalactiae
ATGGCAAGAGGAAGAGGTAAATTAACTCCTCAAGAAATAGAGGCATTAAGATTCTTTTCGAGCAAACTAAATGATTTGCTCAATGAAACAAGTACAAAGCAAGTCGAACTCTCAAAGGCTACAGGAATACCACCAAGCACTCTTACAGGTTATGTTAAAGGAACATCTTTACCTATTCCAGGTAACGTCCAAAAAATAGCAGATTACTTTGGATTAATGAAGTCTGATATAGACCCAAGATTTGCACCTCGTAAGAAAAAACATGAACTCAAAATTCCTACTTCTCCGCTCGTTAACAAAATTACTAAGACGGTTGTTGAATTAAATGTTCCACGTAAACAACAAGTACTAGATTATGCTACAGAGCAACTAAAAGAGCAAAAAAATAAAATAACCTCCATAGAAGAAACGTTGTACGAATATAAAGTATATGAAAAACTCTCTGCTGGTACAGGGTATGGTTACTTTGGCGACGGAAATTACGACACTGTCTTTTATGATGAGCAATTAGACTATGATTTTGCNNNNNCATTCATTCATTAA

SEQ ID NO: 4104 - protein, 180 aa, Streptococcus agalactiae
  VARIANT 176, 177: Xaa = Any Amino Acid
MARGRGKLTPQEIEALRFFSSKLNDLLNETSTKQVELSKATGIPPSTLTGYVKGTSLPIPGNVQKIADYFGLMKSDIDPRFAPRKKKHELKIPTSPLVNKITKTVVELNVPRKQQVLDYATEQLKEQKNKITSIEETLYEYKVYEKLSAGTGYGYFGDGNYDTVFYDEQLDYDFAXXFIH

SEQ ID NO: 4105 - protein, 261 aa, Streptococcus agalactiae
ATGAATGNNNNNATTGGAAGAATTACTAATGTTGCTTCATTAGCATTGCGTCTTTTTGGTAATATCTTTTCTGGTGAAGTTGTCACTGGATTACTTTTACAACTTGCAGTTTTATCACCATTTACAGGTCCACTAGCTTTTGCATTGAATATCGTTTGGACAGCATTCTCAATGTTTATTGGTTTCATCCAAGCGTATGTGTTCATTATCTTGAGCTCAAGTTATATTGGACACAAAGTTCATGGTGACGAAGAAGAATAA

SEQ ID NO: 4106 - protein, 86 aa, Streptococcus agalactiae
  VARIANT 3, 4: Xaa = Any Amino Acid
MNXXIGRITNVASLALRLFGNIFSGEVVTGLLLQLAVLSPFTGPLAFALNIVWTAFSMFIGFIQAYVFIILSSSYIGHKVHGDEEE

SEQ ID NO: 4107 - protein, 452 aa, Streptococcus agalactiae
GTATCTGGCTCTGTGCTTCTCTTATTTATCTTAATTAAGACTTTTGCATGGAAACAAATCACAGGTATTTTTGAAGCCCGTGAACAAAAGATAGCTAATGATATTGATACTGCTGAACAGGCACGTCAACAAGCTGAAGCTTTTGCAACTAAGCGCGAGGAAGAACTATCTAACGCTAAAACTGAAGCTAATCAAATCATTGATAACGCTAAAGAGACAGGTCTTGCAAAAGGTGATCAAATTATTTCAGAAGCAAAAACTGAAGCTGATCGATTAAAAGAAAAAGCACATCAAGATATTGCCCAAAATAAGGCAGAAGCACTAGCAGATGTTAAGGGTGAAGTAGCAGATTTAACAGTTTTATTAGCTGAAAAAATATGGTATCAAATCTTGATAAAGAAGCTCAGAGTAATCTCATTGATAGCTATATTWAAAAGCTAGGAGATGCCTAA

SEQ ID NO: 4108 - protein, 150 aa, Streptococcus agalactiae
  VARIANT 145: Xaa = Any Amino Acid
VSGSVLLLFILIKTFAWKQITGIFEAREQKIANDIDTAEQARQQAEAFATKREEELSNAKTEANQIIDNAKETGLAKGDQIISEAKTEADRLKEKAHQDIAQNKAEALADVKGEVADLTVLLAEKIMVSNLDKEAQSNLIDSYIXKLGDA

SEQ ID NO: 4109 - protein, 762 aa, Streptococcus agalactiae
TTGGCTAAAACTCTACGCAAAGCACCTCAAATAATTGCTAGTGACATTGCTGAACAAATTAAAAGCGACCAATTTGAAAAGGTGGAAGCTGTTGGACCTTACGTTAACTTTTTCCTTGATAAAGCCGCAATCTCAAGTCAAGTTTTAAAACAAGTCTTATCTGATGGTTCTGCCTATGCTACTCAAAATATTGGTGAAGGACGAAATGTTGCCATTGACATGTCTAGTCCAAATATTGCTAAGCCATTCTCAATTGGACACCTTCGTTCAACAGTTATTGGTGATAGTTTAGCTAATATTTTTGATAAAATTGGCTATCATCCTGTTAAAATTAATCACCTTGGCGACTGGGGTAAACAATTTGGAATGTTAATCGTTGCCTATAAAAAATGGGGCAATGAAGAGGCTGTCCGTGCTCATCCCATCGATGAACTTTTAAAACTTTATGTCCGTATTAATGCTGAAGCCGAGACAGACCCTAGCGTTGATGAAGAGGCACGTGAGTGGTTTCGTAAACTTGAAGCTAACGATCCTGAAGCAACTGAATTATGGCAATGGTTCCGTGACGAGTCATTATTAGAATTCAACCGTCTTTACGATCAAATGAATGTTACATTTGATAGCTATAACGGCGAGGCATTCTACAACGACAAAATGGATGAAGTGCTTGAACTGCTAGAATCTAAAAACCTCCTAGTCGAATCTAAAGGTGCACAAGTTGTTAACCTAGAAAANNNNNCATTCCATTCATTAATTAATTAA

SEQ ID NO: 4110 - protein, 253 aa, Streptococcus agalactiae
  VARIANT 245, 246, 247: Xaa = Any Amino Acid
MAKTLRKAPQIIASDIAEQIKSDQFEKVEAVGPYVNFFLDKAAISSQVLKQVLSDGSAYATQNIGEGRNVAIDMSSPNIAKPFSIGHLRSTVIGDSLANIFDKIGYHPVKINHLGDWGKQFGMLIVAYKKWGNEEAVRAHPIDELLKLYVRINAEAETDPSVDEEAREWFRKLEANDPEATELWQWFRDESLLEFNRLYDQMNVTFDSYNGEAFYNDKMDEVLELLESKNLLVESKGAQVVNLEXXXFHSLIN

SEQ ID NO: 4111 - protein, 96 aa, Streptococcus agalactiae
GTGGCCGATCACCCTCTCAGGTCGGCTATGTATCGTCGCCTTGATGAGCCTTTACCTCACCAACTAGCNNNNNCATTCCATTCATTAATTAATTAA

SEQ ID NO: 4112 - protein, 31 aa, Streptococcus agalactiae
  VARIANT 24, 25: Xaa = Any Amino Acid
MADHPLRSAMYRRLDEPLPHQLAXXFHSLIN

SEQ ID NO: 4113 - protein, 191 aa, Streptococcus agalactiae
ATGNNNNNGAAGAGYTATTATCAGCTATTCCAGAACCAGATCCGGAGAGTGAACGTCAACGTGTTCACCAGCCGTATAATCCAGCTATTGAGCAAGACGGACAAGAACGTCAAATGCACGAGATTACCCCTGGTCATTTTGTTTTATCTACACCCCAAGAAGCTGAAGAATATAAAAAACAAATATTATAA

SEQ ID NO: 4114 - protein, 63 aa, Streptococcus agalactiae
  VARIANT 2, 3: Xaa = Any Amino Acid
MXXKSLLSAIPEPDPESERQRVHQPYNPAIEQDGQERQMHEITPGHFVLSTPQEAEEYKKQIL

SEQ ID NO: 4115 - protein, 1173 aa, Streptococcus agalactiae
ATGAATAAATTTAAGGTAAACATTTCAGGAATGACTTGTACGGGTTGTGAAAAACACGTAGAATCAGCACTTGAAAAGATAGGTGCTAAAAATATTGAGTCTAGTTATCGTCGTGGTGAAGCAGTATTTGAACTGTCCGATGATATTGAGGTTGAAAGTGCAATAAAGGCGATTACTGACGCACAATATCAACCGGGCGAAGCAGAAGAAATACAAGTGCAATCGGAAAAAAGGACAGATGTAAGTTTAAATGATGAAGGTAACTATGATTATGATTACATCATCATCGGTTCTGGTGGAGCTGCCTTTTCATCTGCCATTGAAGCCGTTACTTTGAACGCAAAAGTGGCTATGATTGAGCGTGGAACGGTGGGTGGAACTTGCGTTAATGTCGGATGCGTTCCTTCTAAGACCTTATTAAGAGCAGGGGAAATCAATCATCTAGCAAAAAATAATCCATTTGTGGGATTACACACTTCGGCTTCAAATGTTGATTTAGCGCCATTAGTAAAACAAAAGAATGATTTAGTAACCGAGATGCGAAATGAAAAATATGTGAATTTAATTGATGATTATGGTTTTGAATTAATAAAAGGTGAAGCAAAATTCGTAAATGAAAATACAGTTGAAGTAAATGGCAATCAAATCACAGCCAAAAGATTTTTAATAGCTACAGGTGCTTCTTCAACTGCACCTAATATTCCCGGATTAGATGAAGTAGATTATTTAACAAGCACTAGCTTATTGGAATTAAAGAAGGTTCCAAATCGTCTTACCGTAATTGGTTCAGGATATATCGGCATGGAATTAGGACAACTATTTCATAACCTCGGGTCAGAAGTCACTTTGATTCAAAGAAGCGAGCGTCTATTAAAAGAATACGATCCTGAAATTTCAGAAGCCATTACTAAGGCCTTAACAGAACAGGGAATTAATTTAGTAACAGGTGCAACCTATGAACGAGTTGAGCAAGATGGAGACATTAAAAAAGTTCATGTTGAGATAAATGGTAAAAAGCGAATTATTGAAGCAGAACAATTGCTAATTGCCACTGGAAGAAAACCAAATACAGAATCATTAAACTTACATGCAGCAGGCGTTGAAGTTGGTTCCCGTGGTGAAATTGTCATTGATGATTATCTTAAAACCGACCANNNNNCATTCATTCATTAA

SEQ ID NO: 4116 - protein, 390 aa, Streptococcus agalactiae
  VARIANT 385, 386, 387: Xaa = Any Amino Acid
MNKFKVNISGMTCTGCEKHVESALEKIGAKNIESSYRRGEAVFELSDDIEVESAIKAITDAQYQPGEAEEIQVQSEKRTDVSLNDEGNYDYDYIIIGSGGAAFSSAIEAVTLNAKVAMIERGTVGGTCVNVGCVPSKTLLRAGEINHLAKNNPFVGLHTSASNVDLAPLVKQKNDLVTEMRNEKYVNLIDDYGFELIKGEAKFVNENTVEVNGNQITAKRFLIATGASSTAPNIPGLDEVDYLTSTSLLELKKVPNRLTVIGSGYIGMELGQLFHNLGSEVTLIQRSERLLKEYDPEISEAITKALTEQGINLVTGATYERVEQDGDIKKVHVEINGKKRIIEAEQLLIATGRKPNTESLNLHAAGVEVGSRGEIVIDDYLKTDXXXFIH

SEQ ID NO: 4117 - protein, 393 aa, Streptococcus agalactiae
ATGATTTATCGCATTAGTGAGTTTGCAGATAAATGTGGAGTTAATAAAGAAACGATCAGATATTACGAGCGAAAAAATTTATTACAAGAACCTCACCGAACGGAAGCTGGTTATCGGATATATTCATATGATGACGTTAAGCGTGTTGGGTTTATTAAACGAATACAGGAACTTGGTTTCTCTTTAAGCGAGATTTATAAATTACTTGGTGTTGTAGATAAAGATGGAGTTCGTTGTCAAGATATGTTCGAATTTGTTTCTAAAAAACAAAAGGAAGTGCAAAAACAAATGGAGGATTTAAAACGAATTGAAACTATGTTAGACGACTTAAAACAACGATGTCCAGATGAAAAGCAATTACATTCGTGTCCAATAATAGAAACATTAACATGA

SEQ ID NO: 4118 - protein, 130 aa, Streptococcus agalactiae
MIYRISEFADKCGVNKETIRYYERKNLLQEPHRTEAGYRIYSYDDVKRVGFIKRIQELGFSLSEIYKLLGVVDKDGVRCQDMFEFVSKKQKEVQKQMEDLKRIETMLDDLKQRCPDEKQLHSCPIIETLT

SEQ ID NO: 4119 - protein, 93 aa, Streptococcus agalactiae
ATGAAACAAGCACTTCAGGTATTTGAAATTCTAGGAGAACATAATATAAAAGCACAGTACCAAGAGCACTATGACAAATATATTAATCAATAG

SEQ ID NO: 4120 - protein, 30 aa, Streptococcus agalactiae
MKQALQVFEILGEHNIKAQYQEHYDKYINQ

SEQ ID NO: 4121 - protein, 294 aa, Streptococcus agalactiae; identical to SEQ ID NO: 3627

SEQ ID NO: 4122 - protein, 97 aa, Streptococcus agalactiae; identical to SEQ ID NO: 3628

SEQ ID NO: 4123 - protein, 137 aa, Streptococcus agalactiae
ATGATTACCCAGATTTACCAGAAGTTGAAGAGACTGGTATGACCTTTGAAAGAAATGCTCGACTTAAAGCAGAGACTATTTCAAAATTAACTGGAAAAATGGTAATTTCAGATGNNNNNCATTCATTCATTAATTAA

SEQ ID NO: 4124 - protein, 45 aa, Streptococcus agalactiae
  VARIANT 39, 40: Xaa = Any Amino Acid
MITPDLPEVEETGMTFERNARLKAETISKLTGKMVISDXXHSFIN

SEQ ID NO: 4125 - protein, 454 aa, Streptococcus agalactiae
ATGACAAAAACAATTTTTGAAAGTAAAACTGAAGGCAATTGGTTTTTAGGTAGTTTCCAAGCTTTTAATTATTTTACTTGTTTTGGTAATGATGAATCTTACGAAGCTATCCAAGATGTTTTTCATCGTCTATTATCAACTTTGAAAGTTGAAGGTCTACAGCTTCACGTTGTGCAGATGACTTCGGATTTTCAATTATTAGCATTCCTCGTTGATATGATTAATCAAGAGTATTCAAGGCATATCAAAGTGACTCAACATAAAGGGGCCATCTTAGTTAGTGAAGATGATCAGTTGTTCTTAGTTCACTTACCTAAAGAGGGCACTTCTTTAGAAAAATTCTTTGATTTAAAGAATGATAATAATTTTGGGGATACCATATTAATTGCGACTCACAATGAAGGAAAAACGAAGGAATTTAGAGAATTATTTGGGAAATTAGGACTCAAAGTGA

SEQ ID NO: 4126 - protein, 151 aa, Streptococcus agalactiae
MTKTIFESKTEGNWFLGSFQAFNYFTCFGNDESYEAIQDVFHRLLSTLKVEGLQLHVVQMTSDFQLLAFLVDMINQEYSRHIKVTQHKGAILVSEDDQLFLVHLPKEGTSLEKFFDLKNDNNFGDTILIATHNEGKTKEFRELFWEIRTQS

SEQ ID NO: 4127 - protein, 329 aa, Streptococcus agalactiae
ATGTCTTCTAGTTTAGCCAAAAAGGTGGTTTATGAACGTTGTCCCCATTAGTTGGTAAATTAGATACTTTAATTTTAGGTTGCACGCATTATCCCCTATTACGTCCCATCATTCAAAATGTTATGGGGGCTGAGGTTAAATTAATTGATAGTGGCGCAGAAACCGTTCGTGATATTTCTGTTTTATTGAACTATTTTGAGATAAACCATAATTGGCAAAATAAACACGGTGGTCATCACTTTTACACAACCGCCAGCCCAAAAGGTTTTAAAGAAATTGCAGAACAATGGCTTAGTCAAGAAATAAATGTGGAGCGTATCGTATTATGA

SEQ ID NO: 4128 - protein, 109 aa, Streptococcus agalactiae
MSSSLAKKVVYETLSPLVGKLDTLILGCTHYPLLRPIIQNVMGAEVKLIDSGAETVRDISVLLNYFEINHNWQNKHGGHHFYTTASPKGFKEIAEQWLSQEINVERIVL

SEQ ID NO: 4129 - protein, 981 aa, Streptococcus agalactiae
GTGGCTAGAGCTATACGTCAGAAACTTTATCAAGGATATCGCTACAAAGATATTTTAGTTTTACTAGGAGATGTAGATAGTTATAAACTACAATTAAGTAAGATTTTTGAGCAGTATGATATTCCTTATTATTTCGGTAAAGCTGAAACAATGGCTGCGCACCCTTTAGTTCATTTTATGGATTCCTTGTCTCGAATAAAACGTTATCGATTTAGAGCTGAAGATGTTTTAAATCTTTTTAAGACAGGTATTTATGGAGAGATTAGCCAAGATGATTTAGATTATTTTGAGGCTTATATCTCATATGCAGACATTAAAGGTCCTAAGAAGTTCTTTACAGATTTTGTTGTGGGGGCTAAAAAATTTGATTTAGGGCGTCTTAACACTATTCGTCAGTCCCTCCTTACTCCACTGGAAAGTTTTGTGAAAACGAAAAAACAAGACGGTATAAAAACACTCAACCAATTCATGTTTTTCCTTACTCAGGTAGGTTTGAGTGACAATTTATCGCGATTAGTTGGTCAAATGTCTGAAAATGAACAAGAAAAACATCAAGAAGTTTGGAAAACATTTACAGATATTTTAGAGCAGTTTCAAACAATATTTGGTCAAGAAAAATTAAATTTAGACGAATTTTTATCGTTATTAAATTCAGGTATGATGCAAGCCGAGTATCGTATGGTCCCTGCTACTGTTGATGTGGTTACTGTTAAGTCTTACGATTTGGTAGAACCACATAGTAATCAATTTGTCTATGCCCTAGGCATGACACAATCACATTTTCCAAAGATTGCTCAAAACAAATCTTTAATATCTGATATTGAACGTCAGCTTATAAATGATGCCAATGACACTGATGGTCATTTTGACATTATGACGCAAGAAAATTTGAAGAAAAACCATTTTGCTGCCCTCTCTCTTTTTAATGCTGCTAAACAAGAATTAGTGTTGACTATANNNNNCATTCCATTCATTAATTAA

SEQ ID NO: 4130 - protein, 326 aa, Streptococcus agalactiae
  VARIANT 320, 321: Xaa = Any Amino Acid
MARAIRQKLYQGYRYKDILVLLGDVDSYKLQLSKIFEQYDIPYYFGKAETMAAHPLVHFMDSLSRIKRYRFRAEDVLNLFKTGIYGEISQDDLDYFEAYISYADIKGPKKFFTDFVVGAKKFDLGRLNTIRQSLLTPLESFVKTKKQDGIKTLNQFMFFLTQVGLSDNLSRLVGQMSENEQEKHQEVWKTFTDILEQFQTIFGQEKLNLDEFLSLLNSGMMQAEYRMVPATVDVVTVKSYDLVEPHSNQFVYALGMTQSHFPKIAQNKSLISDIERQLINDANDTDGHFDIMTQENLKKNHFAALSLFNAAKQELVLTIXXIPFIN

SEQ ID NO: 4131 - protein, 956 aa, Streptococcus agalactiae
ATGNNNNNTTATGCTAAAATCCAAAAGAAATTGCTTAAAGGGACTGCGAAATATTTAGACCCGCAGTTGCAACAAGCGATGGTTAACGATGTCAAAAAGCAAATGAAGGAGCTTGGGTTATCTTATGAAGAGTTGATGAAGAAGACAACCAAAGCAGCATCTAAAGCTCAAGAAGTTAATACTATGTGGGCTAGAACTACTAAAAAATCAACAGAAGATCAAAAGGTGGCTAATTCGCAATGGAATAGCCTTGTCTGGAATCCCAAAACGGGTAAGTTGAAAACAAATGCTAAAGAGGAAGTAGCTAAAGCTCTTGAAGCGGAAGACGGATGGGACAGACTTAAGTTTATTGCAAAGAATGCAAACTTAGAGACCAACGCTCGGATAACCATGGCGGAAGTTCTAGTCGAAACTGGCAAATGGGATGCTCTCGAACCAGAAGATAAAGAACTAATCGTTGATGGGCATCAAGGCATTCAATCCATAGTAGAAAGCAAGGAAAATTTAAAAACATGGAATAGTTTGCCAGAAGGCGTTAAGCGTATTCTAGGCGACAATAAAGATTTTCTTGATAAAAAAGGAGTTGCGACCAAAGCGCTCGAAAATTGGAATTCGTTGTCTCCAAAACAGCAAAAGTTACTAGCAAAAGATATGACTAGTTCTGATGTTGAGAAAGCAAAAAAAGCAGTCAACAGCATTGTTCAAAAGAAACCAACAAGCATTAAAGCTAAAAATGATACAAAACCTGATGTCAATTCTGCGCAACGAGCAATTGATAGCGCTAAACAACGTCAACCTATCTCATTAGAGCTAGGAATGACGCAGGAGGAGTCATAGAACAACTATTAGCTAGCATACCGAGAACGGTTACTATARGAATCGCTGCTGCTGCAGCTAATGCCTTTAAGTTCCGCAATGGTACTGATTATCACCNNNNNCATTCATTCATTAATTAA

SEQ ID NO: 4132 - protein, 318 aa, Streptococcus agalactiae
  VARIANT 2, 3, 293, 312, 313: Xaa = Any Amino Acid
MXXYAKIQKKLLKGTAKYLDPQLQQAMVNDVKKQMKELGLSYEELMKKTTKAASKAQEVNTMWARTTKKSTEDQKVANSQWNSLVWNPKTGKLKTNAKEEVAKALEAEDGWDRLKFIAKNANLETNARITMAEVLVETGKWDALEPEDKELIVDGHQGIQSIVESKENLKTWNSLPEGVKRILGDNKDFLDKKGVATKALENWNSLSPKQQKLLAKDMTSSDVEKAKKAVNSIVQKKPTSIKAKNDTKPDVNSAQRAIDSAKQRQPISIRARNDAGGVIEQLLASIPRTVTIXIAAAAANAFKFRNGTDYHXXHSFIN

SEQ ID NO: 4133 - protein, 606 aa, Streptococcus agalactiae
ATGACTGATAAACCCTTTGGTGTGAATATTATGCTTTTATCACCTTTTGTAGATGATATTGTTGATTTGGTTATTGAAGAAGGTGTAAAAGTTGTAACGACGGGTGCAGGTAATCCTGGTAAGTACATGGAGCGCTTTCATGAAGCAGGTATAACAGTAATCCCTGTTGTTCCTAGTGTTGCATTAGCAAAACGTATGGAGAAATTAGGGGCTGATGCTATCATTACAGAAGGAATGGAAGCGGGTGGTCACATCGGAAAACTGACCACGATGACATTAGTACGACAGGTTGTTGATGCTGTTACAATTCCAGTCATTGCCGCAGGTGGTATAGCAGATGGGCGTGGGGCTGCTGCGGGTTTCATGTTAGGAGCTGATGCTGTTCAGGTAGGAACTCGTTTTGTTGTTGCTAAAGAATCTAATGCTCACCCTAATTACAAAGCAAAAATCTTAAAAGCAAAAGATATCGACACTGCTGTTTCTGCTCAGGTAGTAGGTCATCCAGTTCGTGCCTTAAAAAATAAACTAGTAACAACCTATAGCCAAGCAGAAAAAGATTATTTAGCTGGCCGTATTCACNNNNNCATTCATTCATTAATTAATTAA

SEQ ID NO: 4134 - protein, 201 aa, Streptococcus agalactiae
  VARIANT 194, 195: Xaa = Any Amino Acid
MTDKPFGVNIMLLSPFVDDIVDLVIEEGVKVVTTGAGNPGKYMERFHEAGITVIPVVPSVALAKRMEKLGADAIITEGMEAGGHIGKLTTMTLVRQVVDAVTIPVIAAGGIADGRGAAAGFMLGADAVQVGTRFVVAKESNAHPNYKAKILKAKDIDTAVSAQVVGHPVRALKNKLVTTYSQAEKDYLAGRIHXXIHSLIN

SEQ ID NO: 4135 - protein, 110 aa, Streptococcus agalactiae
ATGCGTGGGTCGCTGATGAGATCTGCAGGAGCAGTTCTAAGGCAGGKGTCTAGGTATATKGGTGAGGAAATGCCCCTAAAGAGGTGTCAAAGCAAATATTGATAAAATAA

SEQ ID NO: 4136 - protein, 38 aa, Streptococcus agalactiae
  VARIANT 22: Xaa = Any Amino Acid
MAWVADGDLAGAVSKAGVLGIXGEEMPLKRLSKQILIK

SEQ ID NO: 4137 - protein, 290 aa, Streptococcus agalactiae
ATGACGGATGAAGAACTTGATGACGTAGCTCAAGAAACTGAGTTACTAAAGGAGGTTGAAAGTACTGACAAGAAGCGCGTGGTTCCTTTATTTGACAATAGCCAAGAGAAAGCGGACAAACAAGACATATTCATGGCTTTCATCTCAGACCACAACCAACTCGCCGAACACGTTTCCATGAATTATAAAAAGATGACTCAAGAGGATTTAGGAGCTGKAMKTGATCTATCAGCCAAGGCTTTAATTATTTGTATGATATGGCTATTGAGGGTGAGTTACTGGTTAAATAA

SEQ ID NO: 4138 - protein, 96 aa, Streptococcus agalactiae
  VARIANT 73, 74: Xaa = Any Amino Acid
MTDEELDDVAQETELLKEVESTDKKRVVPLFDNSQEKADKQDIFMAFISDHNQLAEHVSMNYKKMTQEDLGAXXESISQGFNYLYDMAIEGELLVK

SEQ ID NO: 4139 - protein, 489 aa, Streptococcus agalactiae
ATGTTAGAACTAGCTATTGAGAGTATCATTAAACCAATGAAGAAACAGGAAAAGACTAGAGTTACAGGAACAATAAATGACCAATCTATCACCATAGACCTAGATAACCTAATCGTCCATTATGAGGGGCAAGAATTCTTACTTGAAACGATACCAGGAACTTATGGTGGTAAGCGCTACTTCTTCCTGTGTCCTGACTGTGAGAGACGTTGTAGAAAGTTATTTAAGGCTTCTCATGCCTTTGCTTGTGGTACTTGTCAGAAGCTTCATCAAGCGACACTCAATCGAAGTAAGACAGATTGTCAATACTATTGGCAACTAGCCTTTAAAGAGTGTCTGAAAGTAGATTCAAAAGCAAAACACAAACATGGTTATTATAGTTATGATGACTTTCCTAAGCGTCCAAAGTACATGAGAATGACTAAATACTTATATCATTGGAAGAGATTCCATTACTATATGGATAAGGGGGACAAATACTGGCTATAA

SEQ ID NO: 4140 - protein, 162 aa, Streptococcus agalactiae
MLELAIESIIKPMKKQEKTRVTGTINDQSITIDLDNLIVHYEGQEFLLETIPGTYGGKRYFFLCPDCERRCRKLFKASHAFACGTCQKLHQATLNRSKTDCQYYWQLAFKECLKVDSKAKHKHGYYSYDDFPKRPKYMRMTKYLYHWKRFHYYMDKGDKYWL

SEQ ID NO: 4141 - protein, 120 aa, Streptococcus agalactiae
GTGGATGACTTATCATGGGATGAGATACCCGACAAGCTAGGTTATTCAAGGAATACTGCATTCAAATTACATAGAGAAGCTTTAGAGGTATTAGATGAGCAAGAAGAACGCTATTCGTAA

SEQ ID NO: 4142 - protein, 39 aa, Streptococcus agalactiae
MDDLSWDEIPDKLGYSRNTAFKLHREALEVLDEQEERYS

SEQ ID NO: 4143 - protein, 372 aa, Streptococcus agalactiae
AAGAAGAACGCTATTCGTAAATTAAAAGAGTTTCATAGATGGCAACGTATCGCCAATAGCCTTGATTTAAGCTATAACGAGCGTTACCAGTTTGATATAAAATATCATCCCACGCGCAGAGAACACCTTGAAATAAGCCGAGAATGTGCCTTAGAGGAGCTAGACGCTATCAAGTATGCTATCAACCAACTGTCTAAGATAGACTACAGAAAGATATTGATTGAGTGTTACTTGATTAGTGAGAAAAAAACTCAGCAAGACATCATAGCAGAACTTAACAAAAGTCAAAGTTGGTACTACGAGACTAAGAAAAGAGCTTTGCTTGAATTCGCCCAGAGTTATAGGAATGGTGTGTTAATAACAACAGCATAG

SEQ ID NO: 4144 - protein, 123 aa, Streptococcus agalactiae
KKNAIRKLKEFHRWQRIANSLDLSYNERYQFDIKYHPTRREHLEISRECALEELDAIKYAINQLSKIDYRKILIECYLISEKKTQQDIIAELNKSQSWYYETKKRALLEFAQSYRNGVLITTA

SEQ ID NO: 4145 - protein, 615 aa, Streptococcus agalactiae
ATGAATGNNNNNACTGTTGGAACGATTGTCTGTCTCTCATTTTTGGGTTTAACAGCATGCTCTTCTTCAAATACTCAGCAAACYTYTACTTCAAAATCAAATGTATCACAACATAAAAATATCAAAGCTGACCATGAAGAATTACGTTTGAAATTTAATAAAGTAAAGTTAGGAGTTAAAGCAAATAACTTTAAAGGAGGCACTAGTCTCGCTGAATTAAAACAATTATTTGGTGGCGAACCAAATGAAAAATTTGATACACCAGCGGGAAATGTCACTCTTAAAGGCTATCGTTGGAATGTCGATGATATCTCCATTACTATACAATTATTAAACGATAGTAGCATTGTTCGTTCAATTAGTAATTTTAAGTTTATTCGTGATGCCAACATCACAACAAAAGATTATAATAGTTTAAAAAATGGCATGTCATACAATAAAGTAAAAGAACTTCTAGGAGAACCTGATGATATTTCTCAAGCAGTTTCTTCAGATAAGGAGGAACTACAGGCTGCATGGATTAGTGGCATCCAGTCGTCAGACAGTGATCCGGGAATTAACCTTACATTTGAAAATGATAAACTCACTAACAAACAACAGCATGGTTTAAAATAA

SEQ ID NO: 4146 - protein, 204 aa, Streptococcus agalactiae
  VARIANT 3, 4, 29: Xaa = Any Amino Acid
MNXXTVGTIVCLSFLGLTACSSSNTQQTXTSKSNVSQHKNIKADHEELRLKFNKVKLGVKANNFKGGTSLAELKQLFGGEPNEKFDTPAGNVTLKGYRWNVDDISITIQLLNDSSIVRSISNFKFIRDANITTKDYNSLKNGMSYNKVKELLGEPDDISQAVSSDKEELQAAWISGIQSSDSDPGINLTFENDKLTNKQQHGLK

SEQ ID NO: 4147 - protein, 188 aa, Streptococcus agalactiae
ATGAATGNNNNNGATTTAACCGCTGTATTGACTATGATTGATTTAAGTCATGCAACGCTACGAAACATTAAACAAAACTTGTTCTGGGCTTTTGCTTACAACCTTGTAGGTATTCCAGTTGCGATGGGTCTTTTGTATATTTTTGGCGGACTATTGATGAGTCCAATGTTGCGGGGCAGTCGCCGTGA

SEQ ID NO: 4148 - protein, 62 aa, Streptococcus agalactiae
  VARIANT 3, 4: Xaa = Any Amino Acid
MNXXDLTAVLTMIDLSHATLRNIKQNLFWAFAYNLVGIPVAMGLLYIFGGLLMSPMLAGQSP

SEQ ID NO: 4149 - protein, 168 aa, Streptococcus agalactiae
ATGAAGGCTGTTAAAGCACTTAGAAGACGCGGTGTTGAAGTAATCATGATTACTGGAGATAACAAACGAACAGCCAAAGCGATTGCTAAGCAAGTGGGTATAGACAGTGTATTAAGTGAAGTATTACCTGAAGATAAAGCAGAGGAAGTCAAAAAACTGCTGGTTTGA

SEQ ID NO: 4150 - protein, 55 aa, Streptococcus agalactiae
MKAVKALRRRGVEVIMITGDNKRTAKAIAKQVGIDSVLSEVLPEDKAEEVKKLLV

SEQ ID NO: 4151 - protein, 516 aa, Streptococcus agalactiae
ATGGAATGNNNNNTAAACTTATCTCGAACATATTCTTTTACATCTGTAAACAACGAGGAGGAAAGGAAAATGAGCACAATAGAACTTAATACTTCTATCACAGATGCTGAATGGGAAGTAATGCGTGTAGTTTGGGCAAATGATTTAGTAACTAGTAAAACAGTCATCTCTGTATTGAAAGAAAAAATGGACTGGACAGAATCCACTATCAAAACGATCTTAGGTCGATTAGTTGAAAAAGGCGTACTAAATACAGAGCAAGAAGGTAGAAAGTTTATTTACACTGCCAATATTGTAGAGAAAGAAGCCGTAAGGGATTTTGCAGAAGATATTTTTAACCGTATTTGCAAAAAGAAAGTCGGAAATGTAATAGGAAGCATCATTGAAGATCATGTCTTAAGCTTCGATGATATAGATCGACTAGAGAAAATATTAGAGATAAAAAAATCTTTCGCAGTAGAAGAAGTGGATTGTCAGTGTACAGAAGGGCAATGCGATTGCCATGAAGGCTGTTAA

SEQ ID NO: 4152 - protein, 171 aa, Streptococcus agalactiae
  VARIANT 3, 4, 5: Xaa = Any Amino Acid
MEXXXNLSRTYSFTSVNNEEERKMSTIELNTSITDAEWEVMRVVWANDLVTSKTVISVLKEKMDWTESTIKTILGRLVEKGVLNTEQEGRKFIYTANIVEKEAVRDFAEDIFNRICKKKVGNVIGSIIEDHVLSFDDIDRLEKILEIKKSFAVEEVDCQCTEGQCDCHEGC

SEQ ID NO: 4153 - protein, 455 aa, Streptococcus agalactiae
ATGACATTTGACACCATGATCAATTAGCGGTTAATACAGTCCGCACGCTTTCTATTGATGCTATCCAAGCAGCAAATTCTGGGCACCCAGGTCTTCCTATGGGAGCTGCGCCTATGGCTTATGTGCTTTGGAATAAATTCTTAAATGTAAACCCAAAAACAAGTCGCAATTGGACAAACCGTGACCGTTTTGTGCTATCAGCTGGGCATGGTTCAGCTCTTCTTTATAGCCTACTTCATTTAGCTGGCTATGATTTATCAATTGATGATTTAAAACAATTTCGCCAATGGGGATCAAAAACACCTGGACATCCAGAAGTTAACCATACTGATGGTGTAGAAGCAACAACTGGACCTTTAGGGCAAGGTATTGCTAATGCTGTTGGTATGGCAATGGCTGAAGCCCATTTAAACCAACATATTTACCCCAACCGAAGCTTGATCCTGCCTCAATAG

SEQ ID NO: 4154 - protein, 151 aa, Streptococcus agalactiae
MTFDTIDQLAVNTVRTLSIDAIQAANSGHPGLPMGAAPMAYVLWNKFLNVNPKTSRNWTNRDRFVLSAGHGSALLYSLLHLAGYDLSIDDLKQFRQWGSKTPGHPEVNHTDGVEATTGPLGQGIANAVGMAMAEAHLNQHIYPNRSLILPQ

SEQ ID NO: 4155 - protein, 319 aa, Streptococcus agalactiae
ATGAATGAATGNNNNNTTAATAAAGGTGCTTATATTTATCAGAAGCTAAAGGTGAACTTGATGGTATCATCATTGCAACAGGTTCAGAAGTTAAATTAGCTTTAGATACTCAAGACAAACTGAGTCAGAGGGCATCCATGTTCGCGTCGTATCTATGCCAGCACAAAACATTTTTGATGAMCAAGAGGCTTCATATCAAGAGCAAGTGCTTCCATCAGCTGTTACAAAACGTCTTGCTATTGAGGCAGGATCAAGCTTCGGTTGGGGTAAATATGTTGGTTTAAATGGGCTTCAGCCATTGCCATACCAACAGCATTAG

SEQ ID NO: 4156 - protein, 106 aa, Streptococcus agalactiae
  VARIANT 4, 5, 6, 61: Xaa = Any Amino Acid
MNEXXXNKGAYILSEAKGELDGIIIATGSEVKLALDTQDKLESEGIHVRVVSMPAQNIFDXQEASYQEQVLPSAVTKRLAIEAGSSFGWGKYVGLNGLQPLPYQQH

SEQ ID NO: 4157 - protein, 123 aa, Streptococcus agalactiae
GTGGGTAGCGGAGAAATTCAAACGAACTTGGAGATAGCTGGTTCTCTCCGAAATAGCTTTAGGGCTAGCGTCGATGTTAAGTCTCTTGGAGTAGANNNNNCATTCCATTCATTAATTAATTAA

SEQ ID NO: 4158 - protein, 40 aa, Streptococcus agalactiae
  VARIANT 32, 33, 34: Xaa = Any Amino Acid
MGSGEIQTNLEIAGSLRNSFRASVDVKSLGVXXXFHSLIN

SEQ ID NO: 4159 - protein, 268 aa, Streptococcus agalactiae
TTGAAACTACTTACTTTCGGAGCAGGCAGGGGCTAACACCGTCAACAATATTCTTTACGGGCTAGAACGTCTTGAATTTTTCCCAGAAGCAGGATTTAACGCAGATGACAGAGTAGGTGAAACTATTTACCCGCCACATAATACTCGTTGTATTGTTTTAGGGGACTACCTAGCTTTTTATCACATTTTAGAAGACAGAAAAGCCGTTTTTGTATCTGATATTATCCATAGCAAACAAGACTATATCAAACTGTTTAAGAAAAAATAA

SEQ ID NO: 4160 - protein, 89 aa, Streptococcus agalactiae
MKLLTFREQAGANTVNNILYGLERLEFFPEAGFNADDRVGETIYPPHNTRCIVLGDYLAFYHILEDRKAVFVSDIIHSKQDYIKLFKKK

SEQ ID NO: 4161 - protein, 429 aa, Streptococcus agalactiae
ATGCATGCTTTTGATTTTGATAAATTTGATGGGACAACTATAGTAGCACGTAATGCTGAGAATGGGGAAAAGTTAATTACTCTTGATGGTGAAGAGCGTGACTTAATAGCTGATGACTTGGTCATTGCGGTAAATGATCAACCAGTTGCTTTGGCAGGCGTTATGGGAGGACAATCAACTGAAATTGGTAGTTCTTCTAAGACAGTGGTCCTTGAAGCGGCAGTATTTAATGGAACAAGTATCCGCAAAACAAGTGGAAGACTCAACCTTCGTTCAGAATCATCTTCTCGCTTTGAAAAAGGTATCAATTATGATACAGTTTCAGAGGCTATGGATTTTGCGGCTGCAATGTTACAAGAATTGTATCAAGCATTCCTGAAACAACATTTTGGCGAAGTGCTGAGCGATCAACAGTCATCGGCCACATAA

SEQ ID NO: 4162 - protein, 142 aa, Streptococcus agalactiae
MHAFDFDKFDGTTIVARNAENGEKLITLDGEERDLIADDLVIAVNDQPVALAGVMGGQSTEIGSSSKTVVLEAAVFNGTSIRKTSGRLNLRSESSSRFEKGINYDTVSEAMDFAAAMLQELYQAFLKQHFGEVLSDQQSSAT

SEQ ID NO: 4163 - protein, 714 aa, Streptococcus agalactiae
ATGAATGNNNNNTATTCTCTCATTAGGGTGTTCCTGTTTAGAAAAAAAGTTAATAAATACGGGCAATTCCCTAAGGAACATCATTTATATGAAGCACCTGAGGACCTTTCACCACTAGAGTTAACTCAAAGCATTTATAGTATGAGTTTTAAAAATTTTCAAGATGAGGAGAAGAAAACTCACCTTATCAGTCAAGAACAACTCATTCAGTCAATTCTATTAGACTTGATTGATAGAAAAGTATTGAATTATGATGATAACTTGTTATCTCTAGCTAACTTAGATAGAGCTTCTGATGCAGAAATAGATTTTATAGAGTTTGCTTTTGCGGATTCTACGAGTTTGAAGCCAGATCAACTCTTTTCTAATTACCAATTTAGTTATAAAGAAACACTACGTGAACTGAAAAAGCAGCACAAGGCTTCAGATCTGCAAACTCAAATGAGACGCCGAGGAAGTAATGCCTTATCAAGAATTACGCGTCTCACAAGGTTGATTTCTAAAGACAATATAAACTCTCTTAGAAGAAAGGGAATTTCATCCCCTTATCGTAAAATGTCTTCAGAAGAGTCTAAAGAATTATCTAGGTTGAAAAGATTCAGTTACCTATCACCTCTTATTTCTTTTGTTGTTATAATTTATACGCTTTTTTTAAATTATTTTACCTATTTCTGTATCTATCTCTTATKGGTKGGGGTWATCTGGTGGTGAATA

SEQ ID NO: 4164 - protein, 238 aa, Streptococcus agalactiae
  VARIANT 3, 4, 230, 232, 234: Xaa = Any Amino Acid
MNXXYSLIRVFLFRKKVNKYGQFPKEHHLYEAPEDLSPLELTQSIYSMSFKNFQDEEKKTHLISQEQLIQSILLDLIDRKVLNYDDNLLSLANLDRASDAEIDFIEFAFADSTSLKPDQLFSNYQFSYKETLRELKKQHKASDLQTQMRRRGSNALSRITRLTRLISKDNINSLRRKGISSPYRKMSSEESKELSRLKRFSYLSPLISFVVIIYTLFLNYFTYFCIYLLXGXGXPGGE

SEQ ID NO: 4165 - protein, 451 aa, Streptococcus agalactiae
TGATGAAGATGATTTAGAGCGTATCGAACGTTTGCACAATTTGCGGGGAGTTATCGTCTTTACAGACCCAGATTATAATGGCGAGCGTATCCGTAAAATCATCATGAATGCCATTCCGACAGTCCGCCATGCCTTCCTCAATCGAGACGAGGCAAAGCCAGGCTCAAAGACCAAGGGACGATCTCTGGGTGTCGAGCATGCCAGCTTTGAAGATTTGCAGAAGGCACTCTCAAAAGTGACTCAGCATTTCGATGATGAAGATCATTTCGATATCACCCAAGCAGACCTCATTCGTTGGGGATTCATTACTGCTAGCGATAGCCGAAAACGCCGTGAGTATCTTGGGAATCAACTCCGTATCGGCTACTCAAATGGTAAACAACTCCTCAAACGCCTCAGACTCTTCGGAGTGACCAAGGCAGAAGTTGAAGAGTGTATGGAGGGGTATTAA

SEQ ID NO: 4166 - protein, 150 aa, Streptococcus agalactiae
LNEDDLERIERLHNLRGVIVFTDPDYNGERIRKIIMNAIPTVRHAFLNRDEAKPGSKTKGRSLGVEHASFEDLQKALSKVTQHFDDEDHFDITQADLIRWGFITASDSRKRREYLGNQLRIGYSNGKQLLKRLRLFGVTKAEVEECMEGY

SEQ ID NO: 4167 - protein, 91 aa, Streptococcus agalactiae
GTGATCGTTGTCGAAGGGAAAGATGATACTGYTAATCTGCGACGCTTTTACAATGTTGATACCTATGAAACTAGAGGTTCAGCAATGATGA

SEQ ID NO: 4168 - protein, 30 aa, Streptococcus agalactiae
  VARIANT 11: Xaa = Any Amino Acid
MIVVEGKDDTXNLRRFYNVDTYETRGSAIE

SEQ ID NO: 4169 - protein, 336 aa, Streptococcus agalactiae
ATGAATTTTGAAACAGTCATTGGACTTGAAGTCCATGTTGAATTAAATACGAACTCTAAAATTTTCTCACCTTCTTCCGCTCATTTTGGTCAGGAACAAAATGCTAATACAAATGTAATTGACTGGTCTTTCCCAGGTGTCCTTCCAGTCATGAATAAAGGAGTTATTGATGCAGGAATCAAGGCGGCACTTGCCTTGAATATGGATATCCATCAAAACATGCATTTTGATCGTAAAAATTATTTCTATCCAGATAATCCTAAAGCTTATCAAATTTCACAGTTTGATGAGCCTATTGGTTACAATGGTTGGATTGAAATCGAATTCTTCAGCTGA

SEQ ID NO: 4170 - protein, 111 aa, Streptococcus agalactiae
MNFETVIGLEVHVELNTNSKIFSPSSAHFGQEQNANTNVIDWSFPGVLPVMNKGVIDAGIKAALALNMDIHQNMHFDRKNYFYPDNPKAYQISQFDEPIGYNGWIEIEFFS

SEQ ID NO: 4171 - protein, 107 aa, Streptococcus agalactiae
ATGGGTCCGAAWTTCAGTGAAGAACCAATATATCAGGTTGCTGCTGCCTTCGAAGCAACGACAGATTATCATAAACAACAMCCTAAATTTTTGGAGGTGAGAACTAA

SEQ ID NO: 4172 - protein, 35 aa, Streptococcus agalactiae
  VARIANT 4, 27: Xaa = Any Amino Acid
MGPXFSEEPIYQVAAAFEATTDYHKQXPKIFGGEN

SEQ ID NO: 4173 - protein, 615 aa, Streptococcus agalactiae
ATGNNNNNTAATAATATAGTCTCCACAATATGGGATGTTGTGCTAAATCATCTCAATATTATGGAATCGGAAAGTCAAAATTATGATGCCACATTCAATATACTTATGATTAGTTATTCTGTTGTTGTAGGTCCTTTTTTTGAAGAAGTTTTATACCGAGGAATAGTATTGAATTTATTATCCAAGTATGGTAAATGGTTTGCCATTATCACTTCTGGCATCCTATTTGGTTTAATGCACCAAGACATTTCTCAGCTATTGACTACATCTATTGCGGGTATCATAATGGGTTTTATCGCTTACCATTATTCCTTTAAGGTAGCCCTACTCCTTCATATCTGCAATAACTTTATCGTAGAAATTTTCACCCAGCTATCAACAGTAAACGAGTTATACGGGACTTATTTTGAAAATATATTGCTAATTTTAGCAATCTTATTTATATTATATTACCTTTTTACTCATAGGAATACTGCTCGCCGTCGTATAAGTCTGCACTCTAACGTTCGAGAGGCTGACTCAATAAACTCTAAACAACATACAAAATTATTACTTACTAGTTGGCCTTTTATTCTCCTTGTCATTTACGACATTGTCCTAACAACTATTAATTAA

SEQ ID NO: 4174 - protein, 204 aa, Streptococcus agalactiae
  VARIANT 2, 3: Xaa = Any Amino Acid
MXXNNIVSTIWDVVLNHLNIMESESQNYDATFNILMISYSVVVGPFFEEVLYRGIVLNLLSKYGKWFAIITSGILFGLMHQDISQLLTTSIAGIIMGFIAYHYSFKVALLLHICNNFIVEIFTQLSTVNELYGTYFENILLILAILFILYYLFTHRNTARRRISLHSNVREADSINSKQHTKLLLTSWPFILLVIYDIVLTTIN

SEQ ID NO: 4175 - protein, 93 aa, Streptococcus agalactiae; identical to SEQ ID NO: 3679

SEQ ID NO: 4176 - protein, 30 aa, Streptococcus agalactiae; identical to SEQ ID NO: 3680
  VARIANT 23, 24: Xaa = Any Amino Acid

SEQ ID NO: 4177 - protein, 447 aa, Streptococcus agalactiae
ATGAGCACAATAGAACTTAATACTTCTATCACAGATGCTGAATGGGAAGTAATGCGTGTAGTTTGGGCAAATGATTTAGTAACTAGTAAAACAGTCATCTCTGTATTGAAAGAAAAAATGGACTGGACAGAATCCACTATCAAAACGATCTTAGGTCGATTAGTTGAAAAAGGCGTACTAAATACAGAGCAAGAAGGTAGAAAGTTTATTTACACTGCCAATATTGTAGAGAAAGAAGCCGTAAGGGATTTTGCAGAAGATATTTTTAACCGTATTTGCAAAAAGAAAGTCGGAAATGTAATAGGAAGCATCATTGAAGATCATGTCTTAAGCTTCGATGATATAGATCGACTAGAGAAAATATTAGAGATAAAAAAATCTTTCGCAGTAGAAGAAGTGGATTGTCAGTGTACAGAAGGGCAATGCGATTGCCATGAAGGCTGTTAA

SEQ ID NO: 4178 - protein, 148 aa, Streptococcus agalactiae
MSTIELNTSITDAEWEVMRVVWANDLVTSKTVISVLKEKMDWTESTIKTILGRLVEKGVLNTEQEGRKFIYTANIVEKEAVRDFAEDIFNRICKKKVGNVIGSIIEDHVLSFDDIDRLEKILEIKKSFAVEEVDCQCTEGQCDCHEGC

SEQ ID NO: 4179 - protein, 375 aa, Streptococcus agalactiae
ATGAAGGCTGTTAAAGCACTTAGAAGACGCGGTGTTGAAGTAATCATGATTACTGGAGATAACAAACGAACAGCCAAAGCGATTGCTAAGCAAGTGGGTATAGACAGTGTATTAAGTGAAGTATTACCTGAAGATAAAGCAGAGGAAGTCAAAAAACTACAAGAGGCAGGCAAGAAGGTAGCGATGGTTGGAGACGGCATTAACGATGCACCCGCATTAGCTCAAGCAAATGTCGGAATTGCAGTTGGATCAGGTACAGACGTGGCGATTGAATCGGCTGATATTGTCCTTATGCGTAATGATTTAACCGCTGTATTGACTACGATTGATTTAAGTCATGCAACGCTNNNNNCATTCCATTCATTAATTAATTAA

SEQ ID NO: 4180 - protein, 124 aa, Streptococcus agalactiae
  VARIANT 117, 118: Xaa = Any Amino Acid
MKAVKALRRRGVEVIMITGDNKRTAKAIAKQVGIDSVLSEVLPEDKAEEVKKLQEAGKKVAMVGDGINDAPALAQANVGIAVGSGTDVAIESADIVLMRNDLTAVLTTIDLSHATLXXFHSLIN

SEQ ID NO: 4181 - protein, 435 aa, Streptococcus agalactiae
ATGACGTTTTTTCCAGAAATTAATATACAAAAAACTAAATCAAACGCTAAGCGAAAACTAAGAGAGTATCCACGCTGGCGTAGGATCGCTAATGATGTAGATACTCAAAAAGTGACAGCCACTTATTCCTTTGAACCTAGACAATCACATGGAACCCCTAGTAAGCCGGTTGAACGCTTAGCACTCAATCGTGTGTCAGCGGAACAAGAATTAGAAGCAATTGAGCAATCGGTTAGTATGATACTAGAGCCAGAAAAGCGCAGGATTTTGTATGACAAATACTTATCTCCTTACAAGAATGCAGATAAGGTTATTTATACAGAATTATGTATGTCAGAGAGCTTTTATTATGACACGCTAGATGCTGCATTATTAGCTTTTGCAGAGCTTTATAGGGAGGGCTCTTTGATTGTAGAGCAAGGAGTTTTTGACTAG

SEQ ID NO: 4182 - protein, 144 aa, Streptococcus agalactiae
MTFFPEINIQKTKSNAKRKLREYPRWRRIANDVDTQKVTATYSFEPRQSHGTPSKPVERLALNRVSAEQELEAIEQSVSMILEPEKRRILYDKYLSPYKNADKVIYTELCMSESFYYDTLDAALLAFAELYREGSLIVEQGVFD

SEQ ID NO: 4183 - protein, 267 aa, Streptococcus agalactiae
ATGAAAGAAAAAACAATTTTTATATCAAAAAAATATGCAAATGACTTTAACAATGACAAATATAATTTGTCCTCTGGCTATTATTTTAGAAGTGGTGAAAAACATGATATTGCTATTGTTAAATATGGTGAAAAAGATTATTTAAAAAATACTGATTTAGCATATGTTGTATGCGATAAGATCGTTGACGCAGACTCTATAAGCTTCGTTTATCATGGTGAATATGAAACTTGGCATTTTAAACTATTAAACACAGAAGCAAATTAA

SEQ ID NO: 4184 - protein, 88 aa, Streptococcus agalactiae
MKEKTIFISKKYANDFNNDKYNLSSGYYFRSGEKHDIAIVKYGEKDYLKNTDLAYVVCDKIVDADSISFVYHGEYETWHFKLLNTEAN

SEQ ID NO: 4185 - protein, 423 aa, Streptococcus agalactiae
ATGCCTGAATTAATTAACAGTGAATATTTTCAATTGCCATTGGAGTTATTAGAGTCTAATTTAGATTTCTTGAAGGGATTTTATAATAAAAATCTATTTGAAGATATAGACAATGCAAAATTATTGATTGACAGATACGAGAAAGCAATTGCGATTTTAAGCGAGATAGCAAACCTCGACCAACTCATTAATATGCACCAATTCGGCTACACAGTCGAAAAAGAGAAGCTTTATACGGTTGAGATACCAAATCCGAATAGTGATTTAAAATTAATTTTAGTAAAGGTAAACAAGAAACTAAAATTAATTGAAGTATATGAAGATCAATTAGAGGAATACAAAAATATTAGAAACCTCACAGAACAAGAAATCCGCAAAGATTTCGACTGGGCATGGCAATTTAGAAAAGATGTGACAGAATGA

SEQ ID NO: 4186 - protein, 140 aa, Streptococcus agalactiae
MPELINSEYFQLPLELLESNLDFLKGFYNKNLFEDIDNAKLLIDRYEKAIAILSEIANLDQLINMHQFGYTVEKEKLYTVEIPNPNSDLKLILVKVNKKLKLIEVYEDQLEEYKNIRNLTEQEIRKDFDWAWQFRKDVTE

SEQ ID NO: 4187 - protein, 339 aa, Streptococcus agalactiae
ATGAAAATACATGATATTCCAAAAAATACTTTAGTTATTAAACATGGAGATACATTACCGATTGAGGAACTTCGAGAACAATGGGAAAGCATGACTCATGAGGAAAGGCAAGGTTGGTACACGACAACATGTGAACGTTTTAGAATTGAGGCAGATGATGTTATTGATTATATTATCGAAAAAATGAGCGATGATGGTTATGAAGAAATGGACGTGTTTTTAGCAGGTAATTTACCATCAGATGCAACAGAAAAATTACAAGCTGTTTTAGACGAGCTATTCGATAACCATGCAGCTGACGTTTACTATCCAGACAAACTGATAGAGGTAACAGAATGA

SEQ ID NO: 4188 - protein, 112 aa, Streptococcus agalactiae
MKIHDIPKNTLVIKHGDTLPIEELREQWESMTHEERQGWYTTTCERFRIEADDVIDYIIEKMSDDGYEEMDVFLAGNLPSDATEKLQAVLDELFDNHAADVYYPDKLIEVTE

SEQ ID NO: 4189 - protein, 180 aa, Streptococcus agalactiae
ATGGAATGNNNNNTAGATTACACATATAAAAATTTTAAAGGTGTAGTAAAAATGTTAGAAGGTTGCTGGTTAATTGACACAGGAACTGATGCTGTCTATTTATGGTCAGAATTCGAAGAAAACGAAGTTGTCGGAAACATACACGAAAATCCAGAGTTACTAGAAAGGATAGAAGGATGA

SEQ ID NO: 4190 - protein, 59 aa, Streptococcus agalactiae
  VARIANT 3, 4, 5: Xaa = Any Amino Acid
MEXXXDYTYKNFKGVVKMLEGCWLIDTGTDAVYLWSEFEENEVVGNIHENPELLERIEG

SEQ ID NO: 4191 - protein, 975 aa, Streptococcus agalactiae
ATGNNNNNGAATAAGGATTCTTTATCAAAAATGACCTTTAAGAATAAATACGACCATAATTATATCGCTGTCTGTATCTTGGACTCCTCTGAAAAGGATTGTTATGATTTGAAACATAACTCGTTAAGGATAATAAACAAAGATGCTCTTACTTCAGAGTTAACCTGCTTAACTGTTGATCAAGCTTTTATTAACATACCCATTGAATTATTTGGTAAATACCAAATACAAGATATTATTAATGACATTGAAGCAATGGGAGTGATTGTCAATGTTAATGTAGAGGCACTTAGCTTTGATAATATAGGAGAAAAGCGAATCCAAACTTTTGAAGGATATAGTGTTATTACATATTCTATGAAATTCTATAAATATAGTCACCTTATAGCAAAACGATTTTTGGATATCATGGGTGCTATTATAGGTTTGCTCATATGTGGCATTGTGGCAATTTTTCTAGTTCCGCAAATCAGAAAAGATGGTGGACCGGCTATCTTTTCTCAAAATAGAGTAGGTCGTAATGGTAGGATTTTTAGATTCTATAAATTCAGATCAATGCGAGTAGATGCAGAACAAATTAAGAAAGATTTATTAGTTCACAATCAAATGACAGGGCTAATGTTTAAGTTAGACGATGATCCTAGAATTACTAAAATAGGAAAATTTATTCGAAAAACAAGCATAGATGAGTTGCCTCAATTCTATAATGTTTTAAAAGGTGATATGAGTTTAGTAGGAACACGCCCTCCCACAGTTGATGAATATGAAAAGTATAATTCAACGCAGAAGCGACGCCTTAGTTTTAAGCCAGGAATCACTGGTTTGTGGCAAATATCTGGTAGAAATAATATTACTGATTTTGATGAAATCGTAAAGTTAGATGTTCAATATATCAATGAATGGTCTATTTGGTCAGATATTAAGATTATTCTCCTAACATTAAAGGTAGTCTTACTTGGGACAGGAGCTAAGTAA

SEQ ID NO: 4192 - protein, 324 aa, Streptococcus agalactiae
  VARIANT 2, 3: Xaa = Any Amino Acid
MXXNKDSLSKMTFKNKYDHNYIAVCILDSSEKDCYDLKHNSLRIINKDALTSELTCLTVDQAFINIPIELFGKYQIQDIINDIEAMGVIVNVNVEALSFDNIGEKRIQTFEGYSVITYSMKFYKYSHLIAKRFLDIMGAIIGLLICGIVAIFLVPQIRKDGGPAIFSQNRVGRNGRIFRFYKFRSMRVDAEQIKKDLLVHNQMTGLMFKLDDDPRITKIGKFIRKTSIDELPQFYNVLKGDMSLVGTRPPTVDEYEKYNSTQKRRLSFKPGITGLWQISGRNNITDFDEIVKLDVQYINEWSIWSDIKIILLTLKVVLLGTGAK

SEQ ID NO: 4193 - protein, 450 aa, Streptococcus agalactiae
ATGAAAATTTGTCTGGTTGGTTCAAGTGGTGGTCATCTAGCACACTTGAACCTTTTGAAACCCATTTGGGAAAAAGAAGATAGGTTTTGGGTAACCTTTGATAAAGAAGATGCTAGGAGTATTCTAAGAGAAGAGATTGTATATCATTGCTTCTTTCCAACAAACCGTAATGTCAAAAACTTGGTAAAAAATACTATTCTAGCTTTTAAGGTCCTTAGAAAAGAAAGACCAGATGTTATCATATCATCTGGTGCCGCTGTAGCAGTACCATTCTTTTATATTGGTAAGTTATTTGGTTGTAAGACCGTTTATATAGAGGTTTTCGACAGGATAGATAAACCAACTTTGACAGGAAAATTAGTGTATCCTGTAACAGATAAATTTATTGTTCAGTGGGAAGAAATGAAAAAAGTTTATCCTAAGGCAATTAATTTAGGAGGAATTTTTTAA

SEQ ID NO: 4194 - protein, 149 aa, Streptococcus agalactiae
MKICLVGSSGGHLAHLNLLKPIWEKEDRFWVTFDKEDARSILREEIVYHCFFPTNRNVKNLVKNTILAFKVLRKERPDVIISSGAAVAVPFFYIGKLFGCKTVYIEVFDRIDKPTLTGKLVYPVTDKFIVQWEEMKKVYPKAINLGGIF

SEQ ID NO: 4195 - protein, 492 aa, Streptococcus agalactiae
ATGATTTTTGTCACAGTGGGGACACATGAACAGCAGTTCAACCGTCTTATTAAAGAAGTTGATAGATTAAAAGGGACAGGTGCTATTGATCAAGAAGTGTTCATTCAAACGGGTTACTCAGACTTTGAACCTCAGAATTGTCAGTGGTCAAAATTTCTCTCATATGATGATATGAACTCTTACATGAAAGAAGCTGAGATTGTTATCACACATGGCGGCCCAGCGATGTTTATGAATGCAGTTTCTAAAGGAAAAAAAACTATTGTGGCTCCTAGACAAGAACAGTTTGGAGAGCATGTGAATAATCATCAGGTGGATTTCGTTAATAAGGTAAAAACAATGTATAATTTTGATATCGTTGTAGATATTGAAAGGTTACAAAATGTAGTCTATGAGGGGACGATGAATCGTCCGTTTTTAGAAACTAACAGAAGTAATTTTATTGAAGAATTTAAGGTAATATTAAAGGAGTTGTGTGATGAAAATCAATAA

SEQ ID NO: 4196 - protein, 163 aa, Streptococcus agalactiae
MIFVTVGTHEQQFNRLIKEVDRLKGTGAIDQEVFIQTGYSDFEPQNCQWSKFLSYDDMNSYMKEAEIVITHGGPAMFMNAVSKGKKTIVAPRQEQFGEHVNNHQVDFVNKVKTMYNFDIVVDIERLQNVVYEGTMNRPFLETNRSNFIEEFKVILKELCDENQ

SEQ ID NO: 4197 - protein, 1107 aa, Streptococcus agalactiae
ATGAAAATCAATAAAAATAAAAATTATTTTTTTGAAGTAATTTTTATCATACTTTTTTCTCTATTAGCTCTATATACAGGTGTTTACAGGGACGGAAATTATCTTTATGACTATCTTTTTTTACTTTATGCTTTTTATGCATTTCTGAGGTCAATCACAATTACTTATTCTAGAAAAGAAATAATAATTTTAATAAGTGTAACAATTCTTTTTGTTCTAAATAGTTTTTTTTCAAAAGGTAATAGTTGGCTTTCTATTTTGATAATATTATTAGGGAGTAGGAAGATAGCTATTGATAGGATTATAGATAGTTTATTAATATGTAAGATTATTTCATTTATAGGCGTTTTAACATTTGTAAACCTTCATATTTTAGAAAATAAGCAAGTTCTCACATATAGATATGGTGAAGTAGTAGCAAGGTATGCATATGGATTTAATCATCCCAATACCTTACATGCCTTTTTCTTTATAATAATAATGCTATTTATCTACCGTTTCTTTACTAAATTAAAGTATCTTCATTTAGTAATCATTTTAATTATTAATCAGTATATTTATTCTATTTCAGTTGCTAGAACAGGTTATTTTTTAGTAATATTTGCAGTAGTATTTTACATTATTCTACGAAATAATTTTTTGATACAGCAAGTAACTTTTAAAATAGCACCGTATGTACAGTTTATTGCGATGTTTAGTTTGTTATTATTTTCTTTATTTTTCTTTAATACTCCTATTGTTTCAAAATTAGATAACCTTTTAAGTGGTAGAATTTATTACGCGAAGCTTATCTTAACAGATTCACTTAATTTATTTGGAAATGAAATCAACTATTTTATTGATAGATATATTTTATTTTTTCATGATAACAGTTATTCTTCAACACTTGCACTAAGTGGAATTATTATTACATTTGGGTATATGTACTTATATTTTAAAACCTCTCGAAAGTTAGTGCAGGATCATAATATTGCTGCTTTATATTTATTTGTTTCAAATTCCTTGTTATTTTACTCCGAAGATTATATACGCGAGCCATTTTTAAATATTACTTTATTTTTTATAGGTAAATATATATTTAATGAATTAGGAGAGATAAATGAGTGA

SEQ ID NO: 4198 - protein, 368 aa, Streptococcus agalactiae
MKINKNKNYFFEVIFIILFSLLALYTGVYRDGNYLYDYLFLLYAFYAFLRSITITYSRKEIIILISVTILFVLNSFFSKGNSWLSILIILLGSRKIAIDRIIDSLLICKIISFIGVLTFVNLHILENKQVLTYRYGEVVARYAYGFNHPNTLHAFFFIIIMLFIYRFFTKLKYLHLVIILIINQYIYSISVARTGYFLVIFAVVFYIILRNNFLIQQVTFKIAPYVQFIAMFSLLLFSLFFFNTPIVSKLDNLLSGRIYYAKLILTDSLNLFGNEINYFIDRYILFFHDNSYSSTLALSGIIITFGYMYLYFKTSRKLVQDHNIAALYLFVSNSLLFYSEDYIREPFLNITLFFIGKYIFNELGEINE

SEQ ID NO: 4199 - protein, 972 aa, Streptococcus agalactiae
ATGAGTGATAAATTTTCAAATAAAATCAGTGTTATAGTTCCTTTATATAATGTAGAGAAATATATTATAAATTGTATTTCTTCACTTACGAATCAAACTTATCAGAATATAGAAATTATTTTGATAGATGATGGTTCTACTGATAATAGTGGTAGGATATGCAAAAAATTAGCTCAAGAGGATCATCGTATTATTTATTTAAGGAAAGAAAATGGTGGGGTTTCTAGTGCTCGAAATTTAGGGCTACAATATGCAACAGGAAGTTACATTGGTTTTGTAGACTCAGATGACTATATATCAAAAACAATGTATGAAAACTTATTAAAGAGATTATTAGAAACTAATGCGGATATCGCCGAAACTGACTTTGCCTTAATTGATAATAGATTTACGAAAAAAAAGAGGAAAAAGATACAGAAAGTTCTGAATAAAGAAGAAGCTATTAGGGAGTTTTTATCAGGAAATGTGGTTGAAAATAATCTCGTCATAAAGTTATTTAAAAAAACAGTTATTGCTAATCTAAAATTTAAAGAAGATGTGATAGTTGGTGAAGATATGCTATTTTCTTTGCAGGCCTTACAAAACTCAGATAGAGTTACAGTGGACACTACGAATGCGGATTATTTTTATGTCGTACGTTCAAATTCAACTATGAATACTATTACCGAGAAGGATATCGATAATCTTTCAATACTCGAGCAGGAGTTCAAAAAAATTGATATCCCCCAATTAAAAAGTTATTTGGAAGCCAAATTAATTCGAGAAAAGGTTAAATTTGTATCTAGAGTATTAATTAGTAATAAAGCACATTTGTACAGTGATATTATTGATAGATATTTGCAAGAGGTTAGACACTACAGCATAAAAAATATGATAAACTTTCTTTCGTCGAAACATTGTTTGACTATAACTATTATGAAAATATCACCTAAACTATATACACTTTTATATAAAGTTTTTCAAAAGCAATAA

SEQ ID NO: 4200 - protein, 323 aa, Streptococcus agalactiae
MSDKFSNKISVIVPLYNVEKYIINCISSLTNQTYQNIEIILIDDGSTDNSGRICKKLAQEDHRIIYLRKENGGVSSARNLGLQYATGSYIGFVDSDDYISKTMYENLLKRLLETNADIAETDFALIDNRFTKKKRKKIQKVLNKEEAIREFLSGNVVENNLVIKLFKKTVIANLKFKEDVIVGEDMLFSLQALQNSDRVTVDTTNADYFYVVRSNSTMNTITEKDIDNLSILEQEFKKIDIPQLKSYLEAKLIREKVKFVSRVLISNKAHLYSDIIDRYLQEVRHYSIKNMINFLSSKHCLTITIMKISPKLYTLLYKVFQKQ

SEQ ID NO: 4201 - protein, 966 aa, Streptococcus agalactiae
TTGGAAAAGATTAGTATTATTATACCGGTATACAATGTTAAGAAGTATCTTAATGATTGTATTCAATCTGTTATAAACCAGACTTACAATAATTTAGAGATTATTTTAATTGATGATGGTTCTACCGATGGTTCAGGAGACTATTGTGATGAAATTGCCAAAAAAGATAGTCGAATTTTTGTGTATCATAAGACAAACGGCGGTCTATCAGAAGCTCGAAACGTTGGAATAAAAATAAGTACCGGGAAATATATTACATTTATAGATTCAGACGATTACATCGAAAATTTATATATTGAAACTTTATACAACAGTTTAATTGAGTATAAGGCTGATATTGCTATTGTTAATAAATATCATTTAAAGGATAACGAGAAAATTGTTCATTTGGCAAATTCCAAAGAACTTTTTAGGGTATTTGATACTAAAATGATTTTAGAGAGTATGTATAGTAGAGAGAATAATTTTATTAGTACCCTGACAATGGCGCAGCTAAAATTATATCGTAAGGAACTTTTCTCTGATATAGAATTTCCCATTGGGAAAAAATATGAAGATTCTTTTACAACTTATAAGACATACATTGAAGCTAATAGGATTGTTTTTGTTAATAGACCATTATATGCCTATCGATTTCGAAGTGGGAGCATTACAAGAAGTGGTTATCAATTATCAAATTTAGACGTTTTAGAAATGTACGAAGAGCGGTTGGAATATTTTAGAGAAAGAGGATATGATTTACTTAGTACTAAATATCATTATTGTATAGCTATTGCAAATCAAAAAGAGTTATTAAAAAAACATTTCCCTAATAATCCTAAAATTTATAAATTGGACAGCCAGTTTAGAGAAATATATTGTGATATTTTAAATGAACTTCCCTTTAAAAAGCGAATAAAATTAGGAATTATTAGGTTCTTACCATTTATTAAACGGTTAAAATACCAATTTATTGAAAGTAGATGA

SEQ ID NO: 4202 - protein, 321 aa, Streptococcus agalactiae
MEKISIIIPVYNVKKYLNDCIQSVINQTYNNLEIILIDDGSTDGSGDYCDEIAKKDSRIFVYHKTNGGLSEARNVGIKISTGKYITFIDSDDYIENLYIETLYNSLIEYKADIAIVNKYHLKDNEKIVHLANSKELFRVFDTKMILESMYSRENNFISTLTMAQLKLYRKELFSDIEFPIGKKYEDSFTTYKTYIEANRIVFVNRPLYAYRFRSGSITRSGYQLSNLDVLEMYEERLEYFRERGYDLLSTKYHYCIAIANQKELLKKHFPNNPKIYKLDSQFREIYCDILNELPFKKRIKLGIIRFLPFIKRLKYQFIESR

SEQ ID NO: 4203 - protein, 864 aa, Streptococcus agalactiae
ATGCAACATATATTAGCAATTATTAGTTATAAAATGACACATGCATTAAAATGTACCGTAGATTTATTGAAAAATGATATGGATATAGTTATACACGTTGATGCCAAAAGTGATATAAAACAATATGATTCGATAAAAGAATTTGTAACTTTCACAGAAGAAAGAATAGATGTTCGTTGGGGACACTATTCTCAGATTTTAGCTATGTTAGTTCTTTTAAAATATATGAAGTCCAAAGAAAAATATCATTATATTTCTATTATTAGTGAAAGCGACATCCCATTAAAAACAGGTAAAGAAATTAATACTTTTTTAACCCTTCATAAAGGTAAAGAATTCATAGGTATGGTTTCTAACGAGCAAATGAGTGATTTTGAGTATGATAAACTCAAGTATAACTATCCTGATTTTTGTTTTTCTAAAAGAGGAATATTTAAAAAAATTTATAGAGGTACCAAAGTTTATAGGTTCTTTAAAAATGCAAGGTATTATTCCCTACCTCCTCTTCGTAAGGGAAGTCAGTGGTTTACTATTTCAAGAGAGTTTACTGACTGGATTATTGGATATTTAGATAAACACCCAGATTATCAGGAGGCTTTTTGTCATAGCTATTGTGGAGATGAATTATTTTTTCAAACATTACTAGCTATCTCTCCATTTCAAGAAAGGGTGATGAATAATAAAGATGACTGTCTCATGGGAGGGAGATATATTATTTGGGAGGCTGATAAGACATCACCTTGCGATTTATTTGCTGAAAAAGTGTTAGAATATAGGAAAGAAGCTGAGAGTGCTTTATTCTTTAGAAAAGTATCTGAAGAAAGCGATTTTGATGTTTATATGCATCTATTAAATAAACTTTAA

SEQ ID NO: 4204 - protein, 287 aa, Streptococcus agalactiae
MQHILAIISYKMTHALKCTVDLLKNDMDIVIHVDAKSDIKQYDSIKEFVTFTEERIDVRWGHYSQILAMLVLLKYMKSKEKYHYISIISESDIPLKTGKEINTFLTLHKGKEFIGMVSNEQMSDFEYDKLKYNYPDFCFSKRGIFKKIYRGTKVYRFFKNARYYSLPPLRKGSQWFTISREFTDWIIGYLDKHPDYQEAFCHSYCGDELFFQTLLAISPFQERVMNNKDDCLMGGRYIIWEADKTSPCDLFAEKVLEYRKEAESALFFRKVSEESDFDVYMHLLNKL

SEQ ID NO: 4205 - protein, 954 aa, Streptococcus agalactiae
TTGAAACTTTTATTTATTGTTCCATATTTTGGAAAATTTAATAGTTATTTTCAGTTATTTTTAAACTCAATAGCCACATCAGATCTTTGTGATTTATTGATTGTTACCGATGATAAAAGTAAATACGATTACCCTCAGAATGTTACTATTCGCTATACTAGTTTTGAAGAGTTCCGAAATGAAGTCCAAAGAAAAATGGATTTTAAAATTACTTTAGATACTCCATACAAACTCTGTGATTTTAAACCAACATACGGTTATCTATTTGAAGATGAATTGTTAAATTATCAATATTGGGGTTATTGTGACTTAGATATTATCTTTGGTGATTTAGATGGATTTTTACATCCCATACTAAATAAAGGCTTTGATAAAATTTTTGAGCTAGGTCATTGTACGATTATTAAGAATGAATCACGAATAAATCGAATGTTCCTTTCTACAGTTAATGGGGTGAAAATAGGACAAAAAGCTCTAAGTTCTTCCAAAATCGAAGTTTTTGATGAGGCATATGTTAATAGTATTAATAATATATTTATTGAAAATAATTGTAATAACTTTTTGTACAGTTTAGGAGCAGACATAGACATTTGGAAGAATAATTTTTATATTACTTCTTTCAAGAATAAAAAAGATTTTGTAGTATCAGACGCTCCCAGCATATTTTACTATGAACAAGGACACTTATATGAGTTTCACCAATATAAGTCTGTAGTAAGAAGGAGTGAGTATTTATATATTCATCTTCAACAAAGAAAAATGAAAGTTGATTTAGATGCTAGGTCTACAACTTATCTGATATTACCAAATAAGTTCGTAGAATATAGAATAGCTACAAATTGCTTGTTAACACTTAAAGAATTTAAACGGTTTATTAGTTTTGGAAAATATAGCTTTCAAAAATACCGCCTATATACTAAATTACAAAAGCAAAAAATAAAGAAGTTATTATGA

SEQ ID NO: 4206 - protein, 317 aa, Streptococcus agalactiae
MKLLFIVPYFGKFNSYFQLFLNSIATSDLCDLLIVTDDKSKYDYPQNVTIRYTSFEEFRNEVQRKMDFKITLDTPYKLCDFKPTYGYLFEDELLNYQYWGYCDLDIIFGDLDGFLHPILNKGFDKIFELGHCTIIKNESRINRMFLSTVNGVKIGQKALSSSKIEVFDEAYVNSINNIFIENNCNNFLYSLGADIDIWKNNFYITSFKNKKDFVVSDAPSIFYYEQGHLYEFHQYKSVVRRSEYLYIHLQQRKMKVDLDARSTTYLILPNKFVEYRIATNCLLTLKEFKRFISFGKYSFQKYRLYTKLQKQKIKKLL

SEQ ID NO: 4207 - protein, 930 aa, Streptococcus agalactiae
ATGAAAATGAAGAATATTTATATATGTTACACTTTATATCACCTATTGATATCTTTATGTAAGAGAGATTTATATGGAAAAATAATTATCTTAACTACTCGAATAAATAATTATGCAATATATAAAAGAAGAATAGAAAAGTTGTTTCCAGAAATACCTGTATTGATTGTAGATGATAGTGATTACAGTAAGAAATATAAATTGTTTTATCCGAAGCGAATAAAACAAGAATTGTTTAGTATAACCAACGGCAATAAAATACATATTTACAATGACTATACGCAATTAGGATATTTTTTTCATAGGAATGCTATTCCCTACCATTTAATGGAAGATGGATATAATAGTTTAAAACATCCAACGAGTATCGCTCCAGATGGTCTTTGTGACAAGATAAAAGGGAAGATAACGAATACACCCCGATATCATGGCTTCAGTAAGTATTGTAAGACGATAGAAGTAAGTAGTTTGAAAGATTTACCAACAGATGAGAGAATGTCTAAGTTTATTGAGAAGCCCAAGGATGGATTATTTTCTGATTTAGATAATAAAACTAAGGAATCTATTTTAAAGATTTTTGACATAGCCTCAATAGATATTGAAATAGCTTCTCCATCTGCTCTAATATTAACTCAACCTTTAGAGGAACATTTTAAAAGTCAAGAGGAAATATACCAATTTTACAAAAGCATAGTGGAAGAATATATTGATAAAGGTTACCACATATATATTAAAGTTCACCCTAGAGATAACATTGACTACTCTAATCTCAATGCAACAGTAATACAAAGGAACATCCCTATAGAATTATTTGATTTCCTAGAGAATATAAAATTTGATGTTGGGATTACATATTTTTCCACGGCATTAGATTTTTTAAATTGTGTTAATAAAAAAATTTTCTTATACAATATTAAGGATATTAAATGA

SEQ ID NO: 4208 - protein, 309 aa, Streptococcus agalactiae
MKMKNIYICYTLYHLLISLCKRDLYGKIIILTTRINNYAIYKRRIEKLFPEIPVLIVDDSDYSKKYKLFYPKRIKQELFSITNGNKIHIYNDYTQLGYFFHRNAIPYHLMEDGYNSLKHPTSIAPDGLCDKIKGKITNTPRYHGFSKYCKTIEVSSLKDLPTDERMSKFIEKPKDGLFSDLDNKTKESILKIFDIASIDIEIASPSALILTQPLEEHFKSQEEIYQFYKSIVEEYIDKGYHIYIKVHPRDNIDYSNLNATVIQRNIPIELFDFLENIKFDVGITYFSTALDFLNCVNKKIFLYNIKDIK

SEQ ID NO: 4209 - protein, 1383 aa, Streptococcus agalactiae
ATGAATACTAAGAAATTACTTCAATCTGGTTTTATTTATACACTCGGGAATTTATTGGTGCAAGGATTAGCCTTTATCACACTTCCCATCTACACTCGGGTCATCTCAACAGAAGTTTATGGCCAATATAGTTTATATGTCGCTTGGATGAATATTATTATGCTTTTTATTGGCCTTCAGACGAGCGGTTCTTTAAGTTCAGCCCGGGTCAAATACGGAGAAGAATTTAAAAGCTATTCTGGGAGTGCCTTTTCTGTAGGTAATATATGGTTTCTTATTATACTTTTGATAGCTTTTCTATTTAGAAGTTTTCTTGCACCATTAGTTGGTTTTTCTGAATCTATTTTTTTATTAATGGTGTGTCAAAGTTACGCTAGCTATGTGGTGACTTTCTTTGGTCAGTATTTTATACAACAACAGAGGAGTTTGGCTAATTTAATATTATCCTTAGCCAATGCAGTTTCATCTGTTGCACTATCTCTATTTTTAATTTTTCATTGGTCCGATGACTTTTTATCTAGGGTTTTGGGAGCTTTTGTTCCTACTATAATAACTGGAATAGTTGCCTTTGCTTATATTTATTATCATAGCAAATCTTTTTACAATCCTAAGTATTTTCGGTTCATTGTCACTGTGTCTATTCCTTTGATTTTTCATTTGTTAGGACATCAGTTATTAAATCAATTAGATAGGATTATGCTAGTTCGCTTATATAGTACTAAAGAAGTTGCAATGTATAGTTTCGGTTATTCGCTTGGAATGATTATTCAGATTGTTTTGAATAGTATTAATATGGCTTGGATTCCATGGTTTTTTGATGCTAGAAAAGAAAAATTACTGCAACTTTCAACTTATATTAGCCGTTATCTCTATTTAGGAGTTTTCTTAACATTAGGTTATTTGACTGTTTTTCCTGAGTTAGCTCAAATAATGGGAGGAGACAAGTATAGTAGTAGTGTTCAATTTATTTCTTTAATTATTGTCAGCTACTTTTTAGTCTTTCTCTATACATTTCCTGTAAATATCCAATTCTTCTATGCTAATACGACATGGATTCCTATTGGGACATTATTAGCTGCTGGTGTAAATTGGTTACTAAACCTTGTATTAATTCCTCATTATGCAGCCTATGGCGCTGCTATGGCTACAATAATATCTTATTTAGCCTTGTTGATTTTTCATCATATTGTTTCGAAAGTTAAATACCATTATTCAGATGTCTCAGTTAGGCAGTACATCATTTTAAGTGGTATAGTATTTAGTTATGCTATGTTAATGAACATGTTCCTAGATAATATCGTTATTAGATGGAGTTTAGGAATAATTATTCTTATAGTATATAGCATTGTTTTCAAAAAGNNNNNCATTCCATTCATTAATTAA

SEQ ID NO: 4210 - protein, 460 aa, Streptococcus agalactiae
  VARIANT 454, 455: Xaa = Any Amino Acid
MNTKKLLQSGFIYTLGNLLVQGLAFITLPIYTRVISTEVYGQYSLYVAWMNIIMLFIGLQTSGSLSSARVKYGEEFKSYSGSAFSVGNIWFLIILLIAFLFRSFLAPLVGFSESIFLLMVCQSYASYVVTFFGQYFIQQQRSLANLILSLANAVSSVALSLFLIFHWSDDFLSRVLGAFVPTIITGIVAFAYIYYHSKSFYNPKYFRFIVTVSIPLIFHLLGHQLLNQLDRIMLVRLYSTKEVAMYSFGYSLGMIIQIVLNSINMAWIPWFFDARKEKLLQLSTYISRYLYLGVFLTLGYLTVFPELAQIMGGDKYSSSVQFISLIIVSYFLVFLYTFPVNIQFFYANTTWIPIGTLLAAGVNWLLNLVLIPHYAAYGAAMATIISYLALLIFHHIVSKVKYHYSDVSVRQYIILSGIVFSYAMLMNMFLDNIVIRWSLGIIILIVYSIVFKKXXIPFIN

SEQ ID NO: 4211 - protein, 240 aa, Streptococcus agalactiae
ATGGAACCACTTATTCAAGACAACGATTTGCTATTCATCAAGGTATCTAGTCAAGTCGATATGAATGATATAGGGATATTTCAAGTCAATGGAAAAAACTTTGTAAAAAAACTCAAACGTGATTATGACGGCGCTTGGTACTTGCAAAGTTTAAATAAAAGCTATGAGGAAATCTATCTTTCAGAGAACGACAACATCCGCACGATAGGAGAAGTCGTAGATATTTACAGGGAGAGTTAA

SEQ ID NO: 4212 - protein, 79 aa, Streptococcus agalactiae
MEPLIQDNDLLFIKVSSQVDMNDIGIFQVNGKNFVKKLKRDYDGAWYLQSLNKSYEEIYLSENDNIRTIGEVVDIYRES

SEQ ID NO: 4213 - protein, 123 aa, Streptococcus agalactiae
ATGGGAACAGGCGAAGAATTTTGTGCAATAATTGAAAAAGACCAATTCGACAAAAAACCTATAAAAAAAGGAGATACTGTAACAATAGCTGGACTNNNNNCATTCCATTCATTAATTAATTAA

SEQ ID NO: 4214 - protein, 40 aa, Streptococcus agalactiae
  VARIANT 33, 34: Xaa = Any Amino Acid
MGTGEEFCAIIEKDQFDKKPIKKGDTVTIAGLXXFHSLIN

SEQ ID NO: 4215 - protein, 339 aa, Streptococcus agalactiae
ATGGGCCAAGAACCTATCATCGAATATCAAAATATCAATAAAGTGTATGGGGAAAATGTTGCGGTTGAAGACATTAACCTTAAAATTTACCCTGGTGATTTTGTTTGTTTCATCGGTACGAGTGGATCAGGTAAAACAACATTAATGCGTATGGTTAACCATATGTTAAAACCAACAAATGGTACTCTATTATTTAAGGGAAAAGATATTTCTACTATTAACCCCATTGAATTAAGACGCAGAATTGGATATGTTATCCAAAACATTGGTTTAATGCCTCATATGACCATTTACGAAAATATAGTTCTTGTACCAAAATNNNNNCATTCCATTCATTAA

SEQ ID NO: 4216 - protein, 112 aa, Streptococcus agalactiae
  VARIANT 107, 108: Xaa = Any Amino Acid
MGQEPIIEYQNINKVYGENVAVEDINLKIYPGDFVCFIGTSGSGKTTLMRMVNHMLKPTNGTLLFKGKDISTINPIELRRRIGYVIQNIGLMPHMTIYENIVLVPKXXHSIH

SEQ ID NO: 4217 - protein, 264 aa, Streptococcus agalactiae
GTGTTTAAAAACGAAAAAAGTAGACTTGCTTTTCCTGAATTACTCAGAGATGTGACAGCAGAATTAGATAGTCTTCGTCGAGAGTTAAAATCGTTAAAAAACGAAATGAGCCAACTCTCTCGAGCAGATCAAAGTTCATCAACTCAAAAAGTAAAGGTTAATAATAAGACATTCACATTTAAAGTTGACCGTACAAAGATTTTGACCATTATGGAAGAAACGGTTGTAGATAGTCAACGTTCACGNNNNNCATTCATTCATTAA

SEQ ID NO: 4218 - protein, 87 aa, Streptococcus agalactiae
  VARIANT 83, 84: Xaa = Any Amino Acid
MFKNEKSRLAFPELLRDVTAELDSLRRELKSLKNEMSQLSRADQSSSTQKVKVNNKTFTFKVDRTKILTIMEETVVDSQRSRXXFIH

SEQ ID NO: 4219 - protein, 543 aa, Streptococcus agalactiae
ATGNNNNNGGGAGTGAGCGGTAAAGGTGCGACTAAAACAGCTAAAATTAGCGGTCTGTCAGCTAGCCCGATTAAAACATATGGTTCAGATATTGCTTATTACACTTCACGCAGAGGCGTTGGTGATGTGAAATTGGAAGTTGAAGCAATTGATATCCCATTTGCCTCACTTCAAACGATTTTGGGCTATAAAAAAGGCAAAGCAACAGAAGGAGTTACATTTATCGGAGAAGATACAGAAGCACCTGAAGTATCTGTTCTTTTAGAAGCTCCAGGGACTGAGGGGAATGTATACCTCGGATTCTTTAAAGGGACTTTCTCAATGGAAGATTTCGACCTCAAAACTAAAGAAGAGAAAAACGATGGATTGGACGCACAAAAGCTTGTACTTACAGCACAGCCTGGCGATGCAGGGGAAGCGAAAGGTCAATATGTCGGTTGGGCAATGGATAAAGAAGCGAACGCAGAGGGTACAAATGCAAAAGCGTTGGTTAAACTTTTGAATCAAGGCGAACCAGGCGTAGGAGCTATTCCAGGAGTGTAA

SEQ ID NO: 4220 - protein, 180 aa, Streptococcus agalactiae
  VARIANT 2, 3: Xaa = Any Amino Acid
MXXGVSGKGATKTAKISGLSASPIKTYGSDIAYYTSRRGVGDVKLEVEAIDIPFASLQTILGYKKGKATEGVTFIGEDTEAPEVSVLLEAPGTEGNVYLGFFKGTFSMEDFDLKTKEEKNDGLDAQKLVLTAQPGDAGEAKGQYVGWAMDKEANAEGTNAKALVKLLNQGEPGVGAIPGV

SEQ ID NO: 4221 - protein, 302 aa, Streptococcus agalactiae
ATGTCAGACTTAGAAATTAAAATTAAAAATGATAACGGCGAGCTCGTGGTGAAAGAATGTAAATCTCTTACTGTGAGAGACTATCGAAATTACTTGATTATGCAAGATGAACTTGCAAAAGGAGATGATCCAGAACATGTGAAACTAGACAAACAACTAACTTTTATGGCTAGTTTGTTTGAAGGCTTAACCGTCGATATGTTATATGACAAATACAACATGTATGAATTAAACAATGCTCTGGCAAATCTATATGTTAAGTTAATCGGAGGGGAGCCAGAAGACCCAAAGGAGACAACTTA

SEQ ID NO: 4222 - protein, 100 aa, Streptococcus agalactiae
MSDLEIKIKNDNGELVVKECKSLTVRDYRNYLIMQDELAKGDDPEHVKLDKQLTFMASLFEGLTVDMLYDKYNMYELNNALANLYVKLIGGEPEDPKETT

SEQ ID NO: 4223 - protein, 2311 aa, Streptococcus agalactiae
ATGGCAAAAGGTACACCGTTAGGGAGTATGTTTATCGAACTTGGATTAGATACTTCTAAGTTTGACCCTAAGTTGCAAAGCGCAAAAAGAGCGGTTAATTATTTCAAAGCAGAGACGAGAGCTTTAGATGCTGCCTTAAAAAACACTGGAAATGCATTAAACAATAACGCAGCTAAAGCCAATGCACTACAAGCAAAATATAAGTCAGTAACACAGGCAATTGAAGCGCAAAAAAAAGTGTTAACGAGTTTGAAATCTGATTTTGACAAATTAGATCCAGGGACAGCTAAATGGGAAGCTGCAGCTGTTAATATTGAGAGAGAAAATGCAAAATTAGCAGCATTAGAGGGACAATTAGGATCTGTAAAAAAAGCTTTTGAAGAAGTTTCTGCTCAATCCGGTTTTACTGGTTTTTTACAGCGCAGTGGCAAACAGATTGACTCTTTTGGTCAAAAAATGCAAAAACTAGGTGAAGCTACTAAATGGGTAAGCGCTGGATTTGGAGCTGGAGCATTATATAGTGTCAAGGCTGCAAGTGATTTTGAATCTGCGTTTGCTGGTGTAAAAAAGACTGTTGATGAAGTAAGAGATTCGAACGGAAAAGTTATTTACTCTTATGATATGTTGTCAAAAGGAATTAGAAACATGTCTAAACAGATACCTGCATCAACGACGGAGATTTCTCATGTTGCGGAAGCTGCTGGTCAGCTAGGTATCAAAACAAAGGATGTTTTAAATTTCACTCGTGTCATGATTGATATGGGAAAATCTACTAACTTGTCATCAGAAGAAGCTGCAACTGCATTAGCTAGGTTTGCTAATATCACACAATTAGATCCATCTAAGTACAGCAATCTAGGTAGCTCAATTGTTGAGTTGGGTAACAACTTTGCGACAACTGAAAAAGAAATCGTTGAAATGGGACTGCGCTTAGCTGGTACAGGTAAGGTTGTAGGGTTGACAGACCCTCAAATTCTTGGCTTGGCAACAGCTATGAGTTCTGTTGGTATCGAAGCGGAAGCAGGTGGTTCGGCGTTTAGTCGTGTCATGCAAAAAATTAATACACAAGTGTTGTCTGGTGGCGAAGATTTGTGGAAGTTTGCAAAAATCGCTGGTAAATCTGCTGATGAATTTGCTGCATCTTGGAAGAAAAATCCACAAGAAGCCATTATTGATTTTGTTAAAGGGTTAAAACGCTTTAAAGAAGAGGGTAAAGACGTAACTGCTCACTTGCAAGATATTGGTATTGAATCAGTACGAGAGATTGACACATTACAACGTTTGGCTGGTGCTGGTGATTTACTTGGCGATGCATTTAAGTCCGCAAATAAAGGATTTAGTGAAAACAAAGCGTTGACTGATGAGGCTTCTAAACGATACGCAACTTTCCAAAGCAAACTACAACTCCTAAAAAACAAATTAAATGATGTAGCTGTCACAATGGGTGGACCATTAATGGATGCAGCTTCAAATGCCCTTGATGCATTGGAACCAATGTTTAAAGTTGTTAGGGATCTCGCAAAAGCATATTCTAACGCTAGCCCAGAAATGAAAAAACTTATCACATATGCAATTTTAGGTGCAACTGCGTTTTCTCCATTAATGACCGCTCTTGGTAAAACAACTTCTAACGTAGGTAGATTAGTAGGTTGGATAGGAAAGTTATCTGGTGAAATGAAAGGCGCAAAAGCAGCAGAAGGATTAGCTACTGCTGTAGGCGGTCTAGGTGCTAATTCTGCAACAGCGGCAGCTAGTGTAGGGCTTTTAGGAAATCCAGTGACTTGGGGGGGCATCATCGGCGGTGCTGCGGTTATCGGAATAGGTATATTAGCTAATAAGATATATGAAGCTCACCAGCGTACCCAAGAGTGGGGAACTAAAGTTAATCAAGTTCAAGCTAACGAACTACAGGCTTTTAAAGATAAAGTTGATAAGACGAATCAGTCGATGGCAGGATTCAGAGGTGGAGCTGACCAAGTCAATGCTGTTAAGACAGCATTTCAAGGACTAGTTACCGAAATCGAAAAACTAGAAAATAAAGACTTAAGTAAAAACGTTAAATTAGCAGAGCAACTTGGTTTCAGTCAAGAAACGATAGAACAGTTGAAAAAATCAAGCAGGCAAACAATTGATAATGTCAAGCAGATGTCTGATGAAGTCATTAATATCTATCAAAACGCTAGCAACGAACATAGAAGATTAACTGAAGAAGAGAATGCTGTTGTTTTAGCAAATCAAAATGAGCTTATCAATGTGCAGCTATCAAAATTGAACTACTCTGCTWAAGAGAGAAGGCATTACCAGGCGATGA

SEQ ID NO: 4224 - protein, 770 aa, Streptococcus agalactiae
  VARIANT 762, 765: Xaa = Any Amino Acid
MAKGTPLGSMFIELGLDTSKFDPKLQSAKRAVNYFKAETRALDAALKNTGNALNNNAAKANALQAKYKSVTQAIEAQKKVLTSLKSDFDKLDPGTAKWEAAAVNIERENAKLAALEGQLGSVKKAFEEVSAQSGFTGFLQRSGKQIDSFGQKMQKLGEATKWVSAGFGAGALYSVKAASDFESAFAGVKKTVDEVRDSNGKVIYSYDMLSKGIRNMSKQIPASTTEISHVAEAAGQLGIKTKDVLNFTRVMIDMGKSTNLSSEEAATALARFANITQLDPSKYSNLGSSIVELGNNFATTEKEIVEMGLRLAGTGKVVGLTDPQILGLATAMSSVGIEAEAGGSAFSRVMQKINTQVLSGGEDLWKFAKIAGKSADEFAASWKKNPQEAIIDFVKGLKRFKEEGKDVTAHLQDIGIESVREIDTLQRLAGAGDLLGDAFKSANKGFSENKALTDEASKRYATFQSKLQLLKNKLNDVAVTMGGPLMDAASNALDALEPMFKVVRDLAKAYSNASPEMKKLITYAILGATAFSPLMTALGKTTSNVGRLVGWIGKLSGEMKGAKAAEGLATAVGGLGANSATAAASVGLLGNPVTWGGIIGGAAVIGIGILANKIYEAHQRTQEWGTKVNQVQANELQAFKDKVDKTNQSMAGFRGGADQVNAVKTAFQGLVTEIEKLENKDLSKNVKLAEQLGFSQETIEQLKKSSRQTIDNVKQMSDEVINIYQNASNEHRRLTEEENAVVLANQNELINVQLSKLNYSAXERXAFTRR

SEQ ID NO: 4225 - protein, 108 aa, Streptococcus agalactiae
ATGGAGACAAACTGGATTGATATGCTGGAAGTTTTAAAGCCTGCAGAAGTCAAATCTGAGGAAGTGATGTCGTTAGAAGACTTTGTTGGGACTCTAAATGGCGGATAA

SEQ ID NO: 4226 - protein, 35 aa, Streptococcus agalactiae
METNWIDMLEVLKPAEVKSEEVMSLEDFVGTLNGG

SEQ ID NO: 4227 - protein, 303 aa, Streptococcus agalactiae
ATGTCAGACTTAGAAATTAAAATTAAAAATGATAACGGCGAGCTCGTGGTGAAAGAATGTAAATCTCTTACTGTGAGAGACTATCGAAATTACTTGATTATGCAAGATGAACTTGCAAAAGGAGATGATCCAGAACATGTGAAACTAGACAAACAACTAACTTTTATGGCTAGTTTGTTTGAAGGCTTAACCGTCGATATGTTATATGACAAATACAACATGTATGAATTAAACAATGCTCTGGCAAATCTATATGTTAAGTTAATCGGAGGGGAGCCAGAAGACCCAAAGGAGACAACTTAA

SEQ ID NO: 4228 - protein, 100 aa, Streptococcus agalactiae; identical to SEQ ID NO: 4222

SEQ ID NO: 4229 - protein, 606 aa, Streptococcus agalactiae
ATGCAAGCAGTAGGATTTAAACGAATGACAATTCAAGTTTTAAGTGATGCGAAAAAAAAGATTGTCATTGAGGGAGTGAGCGGTAAAGGTGCGACTAAAACAGCTAAAATTAGCGGTCTGTCAGCTAGCCCGATTAAAACATATGGTTCAGATATTGCTTATTACACTTCACGCAGAGGCGTTGGTGATGTGAAATTGGAAGTTGAAGCAATTGATATCCCATTTGCCTCACTTCAAACGATTTTGGGCTATAAAAAAGGCAAAGCAACAGAAGGAGTTACATTTATCGGAGAAGATACAGAAGCACCTGAAGTATCTGTTCTTTTAGAAGCTCCAGGGACTGAGGGGAATGTATACCTCGGATTCTTTAAAGGGACTTTCTCAATGGAAGATTTCGACCTCAAAACTAAAGAAGAGAAAAACGATGGATTGGACGCACAAAAGCTTGTACTTACAGCACAGCCTGGCGATGCAGGGGAAGCGAAAGGTCAATATGTCGGTTGGGCAATGGATAAAGAAGCGAACGCAGAGGGTACAAATGCAAAAGCGTTGGTTAAACTTTTGAATCAAGGCGAACCAGGCGTAGGAGCTATTCCAGGAGTGTAA

SEQ ID NO: 4230 - protein, 201 aa, Streptococcus agalactiae
MQAVGFKRMTIQVLSDAKKKIVIEGVSGKGATKTAKISGLSASPIKTYGSDIAYYTSRRGVGDVKLEVEAIDIPFASLQTILGYKKGKATEGVTFIGEDTEAPEVSVLLEAPGTEGNVYLGFFKGTFSMEDFDLKTKEEKNDGLDAQKLVLTAQPGDAGEAKGQYVGWAMDKEANAEGTNAKALVKLLNQGEPGVGAIPGV

SEQ ID NO: 4231 - protein, 381 aa, Streptococcus agalactiae
ATGGTTAAAGACATGCTAACAGAAATTGGTGAGCTTTTTAAACAAGACGAAGTTTTGAGATCAGTTAAAACAAAAACTTTTAAGCGACCAGAAAGTCTACCTTCTGACCAAACAAGCATTGTTATTGTACCTCTTGCACCACCTAGACAAACAAACTTCGGTTCAGATAAACCATTAGCTAAGAAATTTATGTATCAAATCGATGTAGAGAGTGTATCAAGGCTCGAATGTAAAGATTTGCAAAATAGGATTGAGAAAAAGCTGATGGTTATAGATTTTTTTCAAAGTGATAACGGCTTAGAACGTTATGACGAGGATACAAACAGATATCTAGATGCTAGAACTTACAAAGGATTTAGCAGTTTATATGAAGAGTATTGA

SEQ ID NO: 4232 - protein, 126 aa, Streptococcus agalactiae
MVKDMLTEIGELFKQDEVLRSVKTKTFKRPESLPSDQTSIVIVPLAPPRQTNFGSDKPLAKKFMYQIDVESVSRLECKDLQNRIEKKLMVIDFFQSDNGLERYDEDTNRYLDARTYKGFSSLYEEY

SEQ ID NO: 4233 - protein, 372 aa, Streptococcus agalactiae
ATGGATGAACTTTTAGCGAATATGGAAAAAAAGTTAGGCTCTGCGAAAGTTAACAGAGTAGTTAATAAAGCGCTAAAAGAAATCGGCGAAGAACTAGAACCTAGTTTTGAAGCTGCTATATCGGTTTATCGAAAAAGCGGAGCGACGGTTAAAAGTGCCGTTGTATCTGGGATTAAACGTGAGGAGGGAATACCAAAAGTGAAACTTGGATTCCAAGCTCCACGATGGAACATAGTCCACTTACAAGAGTTGGAATATGGATGGAAGAAGAACCGACGTGGTGTCGGGGTAATTCGACGTTATTCGGATGTTTTAGAAACGATATATCCGAAAGGCATAAAAGACAAGTTGAAGGGAGGTTTTGATGGTTAA

SEQ ID NO: 4234 - protein, 123 aa, Streptococcus agalactiae
MDELLANMEKKLGSAKVNRVVNKALKEIGEELEPSFEAAISVYRKSGATVKSAVVSGIKREEGIPKVKLGFQAPRWNIVHLQELEYGWKKNRRGVGVIRRYSDVLETIYPKGIKDKLKGGFDG

SEQ ID NO: 4235 - protein, 150 aa, Streptococcus agalactiae
ATGAAAGTAAGAACGATTCAACGATTTGAAGATTATAAAGAAGAGGTAATTCGAGAAATTGGGGATGTCTTTGTTGTCAACAAAAACCGCTTTAAAGAGATTGACGACAAATTACCTGGTTTTATCGAAGAAGTTTATGACGATGTCTAG

SEQ ID NO: 4236 - protein, 49 aa, Streptococcus agalactiae
MKVRTIQRFEDYKEEVIREIGDVFVVNKNRFKEIDDKLPGFIEEVYDDV

SEQ ID NO: 4237 - protein, 294 aa, Streptococcus agalactiae
ATGGATGAACACAAGCTTTTAAAACCATTTAAAGAACGAATGAGAGTGTTTCATGATTTGGATGATGACAATCTATCACTAATTTTGAAAAGTTCAGAGAGCGCCCTCAAAGGGTTGTTAGGGTTTGATTTGATGGATTATGAAAGCGGTAAAGAGTTAATAATGGAGCGCTCGAGATATGTCTTTAATGACTGTCTCGAGTTATTTTATGACTCTTTTAAAAACGAAATCGCACGTTTGGCTATTGAAGAAATGGAAAGAGAATATGAAAGTAAGAACGATTCAACGATTTGA

SEQ ID NO: 4238 - protein, 97 aa, Streptococcus agalactiae
MDEHKLLKPFKERMRVFHDLDDDNLSLILKSSESALKGLLGFDLMDYESGKELIMERSRYVFNDCLELFYDSFKNEIARLAIEEMEREYESKNDSTI

SEQ ID NO: 4239 - protein, 1161 aa, Streptococcus agalactiae
ATGACAATGAAATTATCGAATGAATTCAACGAAATTCGACAAAAATTTGTAGATGCAGTATCTAATCAAGCGCCACAAGAGGAACAGAGCGCTCTCTACAATAACATGCTAGAAGCAATGTTTGAAGAATCTAAAAAAGTTGCGCAAGCAGAAGTAGAATCTGCAATCGCATTGACTCCAGACGACGCAAAAATGACAGCTCGTGAACGTAAATTTTTTAATGAGATTGTAAAAACAGCGCCAGCTGGTCTAACAGAGTTAATCCCAGAAGAAACAGTTGATCGTATTTTTGAAGATTTAACAACAAAACATCCGCTTATTGGAGCTATTGGTCTTAAAAATATGGGCCTTCGCATGAAGTTCATTGATTCTGATTCTAAAGGTAAGGCCGAGTGGGGTGACTTGTACGGGGAAATCAAAGGGCAACTTCAAGCTTCATTTAGCTCAACTAAGGCTATCCAACACAAGCTCACAGCTTACGTAGTTATTCCTAAAGACGCTGTTAAGTTCGGACCAGGCTGGTTACTTCGTTTCATTATGACACAAATTGATGAAGCGTTCGCAGTTGCATTAGAAGAAGCTTTTCTAAATGGAGACGGCAATGGTAAACCAATCGGGTTATCTCGTACTCTAAAAGGTAAAGTTGTTGGCGAAAAAGCGACGTATGATGCAAAAAAACCGACAGGAGTTTTAACATTTAAAGATCCATCTACAACAGTAAAAGAATTGACGATGGTACATAAATACCACTCTGTAAAAGAAGATGGAAAGACAGCTGTTGAAGTTGATGGAAACATTGTAATCGTGGTTAATCCAGCAGATGCATGGGATGTTAAAAAACAATATACATCACTTAATGCTAACGGAACGTTCGTGACTGCTCTACCTTACAACGTTACCTTAATTGAGTCAGTCCATCAAAAGGCTAAGGAAGTTACGACTTTTGTTAAGGGACGATATGATGCATATGTTGCAGGCGGAATTGAGTTACACAAGTATACAGAGACATACGCTCTTGAAGATTTAGACTTGTTTACAGCTAAACAGTTTGCATATGGTCGTGCTAAGGATGAGACTTCAGCAGCAGTTTGGACACTTAGTGTTGCAGACCCAATTGTAATTTCTGGAGAACCAGGTGTAGGAGCTATTCCAGGAGTGTAA

SEQ ID NO: 4240 - protein, 386 aa, Streptococcus agalactiae
MTMKLSNEFNEIRQKFVDAVSNQAPQEEQSALYNNMLEAMFEESKKVAQAEVESAIALTPDDAKMTARERKFFNEIVKTAPAGLTELIPEETVDRIFEDLTTKHPLIGAIGLKNMGLRMKFIDSDSKGKAEWGDLYGEIKGQLQASFSSTKAIQHKLTAYVVIPKDAVKFGPGWLLRFIMTQIDEAFAVALEEAFLNGDGNGKPIGLSRTLKGKVVGEKATYDAKKPTGVLTFKDPSTTVKELTMVHKYHSVKEDGKTAVEVDGNIVIVVNPADAWDVKKQYTSLNANGTFVTALPYNVTLIESVHQKAKEVTTFVKGRYDAYVAGGIELHKYTETYALEDLDLFTAKQFAYGRAKDETSAAVWTLSVADPIVISGEPGVGAIPGV

SEQ ID NO: 4241 - protein, 732 aa, Streptococcus agalactiae
ATGACACAAATACAGATTAAAGGACCTATTGTTTCAGATAGCGACCGTTGTTTTTACGACTGGTTAGATATGCCAGCGACTGCACCAAAAGATGTTATCTTGCCACAAGATAATAGTGATATTGAAGTGCTTATTAACTCTGGTGGTGGTGACGTATATGCAGGGAGCGAAATTTATACCACATTGAAATCATATCAAGGAAACGTAACGGTTAAGATTGTTGGTATTGCTGCTTCGGCGGCTTCAGTAATCGCAATGGCTGGTGATGTTGTTGAGATTAGTCCTACAGCACAATTGATGATTCACAATGTATCTACTACAGTTAGTGGAGATCATAAACAAATGCTGCATGAGGCAGGAGTTTTAGAAAACTACAATATATCTATTGCTAATGCTTATGTCAATAAGACTGGCTTAGAAATGAATGAATTGCTAGATTTAATGAGCACAGAAACTTGGTTTAATGCACAGCAAGCTGTTGAAAAAGGCTTTGCAGACAAGGAAATGTTTGCTGAAGAAATCAAACAAGCGCCGCAATTGGTGGCTGGGATTGAAAATATCATTCCTAGTGATGTCATTTCAAAATTAGCTAATGCGATTAACACAAAAAAACCAGAAGTTAATATTGATGAAATCGTAGATATGGTTATTTTCAAAATGGAAAACACCGAGCAAAAAGGAACTAAAGACAGAAAAGAAGCACCAACAGGTTTTGGGGCTTTTTGTTTTTAA

SEQ ID NO: 4242 - protein, 243 aa, Streptococcus agalactiae
MTQIQIKGPIVSDSDRCFYDWLDMPATAPKDVILPQDNSDIEVLINSGGGDVYAGSEIYTTLKSYQGNVTVKIVGIAASAASVIAMAGDVVEISPTAQLMIHNVSTTVSGDHKQMLHEAGVLENYNISIANAYVNKTGLEMNELLDLMSTETWFNAQQAVEKGFADKEMFAEEIKQAPQLVAGIENIIPSDVISKLANAINTKKPEVNIDEIVDMVIFKMENTEQKGTKDRKEAPTGFGAFCF

SEQ ID NO: 4243 - protein, 1149 aa, Streptococcus agalactiae
ATGAAAATACTTGATTTTTTTGGCAGTATTTTTAAAACAGGAACTATACCTGAAAATGGGTATGATTTAGATGACATCTTCAATGATTATCAAAATCTTTACTTAAAAAATCTAGCTATTGATAAGTCCGCAGAATTTCTAGCTAGAATATTTGCTGATTCTGAAATGCGATTAGTTAATATCGAGAGTCCGTCTTGGAATTATTTGCTCAATGTACGACCAAATAACAATGAGTCAGCATCATATTTTTGGCAAAAATTTATTTATAGGTTAGTTACTCAAAATGAAGTGTTAGTTATCAAAACAGATGACGATCAGTTACTTGTCGCTGATGACTACAGTCGCAAAGAATACGCTGTATATGAAGATACATTTGATAGTGTGACTGTTAAAGACTTTATATTCAAGCGAACGTTTAAAATGAGCGAAGTTATCTTCTTGCAATACAACAATAACAGGCTATCAAGTTATATTGACGGTTTGTTTTTAGAGTACGAAAAATTACATCAGCGCATGGTAGAAACTGTTTTAAGAAACAACCAGATAAGAGGGATGATGCATGCAAAAGGCTCTTCTCAATTTACAGATAACCAGATGTCTTTGATGAAGAATTATGCTGATAAGTTGTTTAAAGCCTTTTCTGAGAGGTCTGTCGCTATAGTTCCAGCTAATGATCATATCACATATGAAGAGTTGACGAACACCACAGGTACAACAAATTTATCTGTCGATGATTTACAAAAGATAAGACGACAATTCGACGATGAAATCGCTGATATTTTAGGTATTCCACCAACTGTACTACATGGAGATATGGCTACTTTAGATAGTTCTCAAAAAGCTTTAGTGCTTTATTGCATGAGTCCGCTTAGCAAAAAGATACAAGATGAGTTAAATGCGAAAATCATCAGTAAAAGTGACTATCAAAAAGGTAAGAGACTAAAGATTGTCGGACTGTCACAACATGATATTTTTGACATTGCAGTTAATATTGATAAGTTAGTTTCAAGTGGTACGTTTACCCGCAATGAAGTACGTGAAAAACTCGACTTTGCACCGATAGATGGTGGGGATGCTATTATCTTAACTAAAAACTATGTTGAAGATGGGAAAGGAGGTGATAATACAGATGACACAAATACAGATTAA

SEQ ID NO: 4244 - protein, 382 aa, Streptococcus agalactiae
MKILDFFGSIFKTGTIPENGYDLDDIFNDYQNLYLKNLAIDKSAEFLARIFADSEMRLVNIESPSWNYLLNVRPNNNESASYFWQKFIYRLVTQNEVLVIKTDDDQLLVADDYSRKEYAVYEDTFDSVTVKDFIFKRTFKMSEVIFLQYNNNRLSSYIDGLFLEYEKLHQRMVETVLRNNQIRGMMHAKGSSQFTDNQMSLMKNYADKLFKAFSERSVAIVPANDHITYEELTNTTGTTNLSVDDLQKIRRQFDDEIADILGIPPTVLHGDMATLDSSQKALVLYCMSPLSKKIQDELNAKIISKSDYQKGKRLKIVGLSQHDIFDIAVNIDKLVSSGTFTRNEVREKLDFAPIDGGDAIILTKNYVEDGKGGDNTDDTNTD

SEQ ID NO: 4245 - protein, 1500 aa, Streptococcus agalactiae
ATGCTCGTTAATGTTATCAGAGAAAAAATACTTGTCAGAGATGACCTATATTTTGATGACAGCTTGATAGATAAGTATGTGAGATTCGCTGAAAAGAATTTTTTCCCATTAGCTGGATATCAAAAGTTTATAACTCCTTTTATTTTTTTGTTTCGAAAAGATGATGGCGAGCCACAATTTAATGAATACCTTTTAACATTGGCTCGTGGAGGTGGTAAAAATGGTTTTATGTCCACTAGAGATGCATTTTTTACAAGTCCGTTGTACCCTATCAAAAACTATGATGTAACCATTACAGCTAACTCGGAAAGACAAGGGAAGGTATCTTTTGAAGAAGTTTATGAGACTATCCAATCAAAAGGGCTAGAAAACCACTACTATTTGACTAAAATGGCAATTGTGGGACGGAAAAACAATTCTGTCTTTTCTTTTCGCACAAACAACCCCAAAACGATGGACTCTGCTCGTGATGGCTGTTTAGAATTCGATGAAATCCACCAATTTGAAGATGATAAAATCGTAAAAGTCCAAAAATCTGGTTTGGGTAAAATAGCACATGTAAGAACCTTCTTTAATGGCACAAATGGTTATGTACGTGAGGGTTTTTACGATAAAACGATTGAGAAAGCTATGCAGATACTACGAGGAGAGGTTGAAGATTTCAGAATGTTTCCTTTTATCTGCAAGCTTGATAACGCTAGCGAAGTTGACGATATGCGTAATTGGTCAAAGGCTAATCCAATGCTCGACGAAGACACACCATACGCAAAAAGACTACTAACAGTTACTAAAAGTGATTATGATGATTTGGAACTTGAACCTAGTGGTAGGCAAGAGTTTATGACAAAGCGAATGAATTTGCCGGAAGCTGATTTAGAAAAAGACGTCACTAGCCGTGAGAAACTATTAGCATGTCTCAGGGAGCCCCAGATTAGCCTCAGAGGGCGCTCTTGCGTAGCTGGGTTTGATTATGCATCTATAAGAGACTTTGCTTCTGTAGGTTTGTTATTTAAGGATAATGATGAGCTAATTTGGAAGCAACATTCATTTGTTAGACGAGAGTTTTTCAAAGCGTTTAAACTTAAAGCTCCCATCGAAGAGTGGCAAGACAAAGGATTGCTAACTCTTGTTGACGGAGACAGTATTGATCCTCGCTTGCTTGTCGATAAGTTAATTGAATGGAGGAAGGATTATAATATTGAAATAGTTTGTGCAGATGGTTTTAGGATGGATTTGCTTAAACCGCTACTAGAGGAAGCTGGCTTTGAATATGAGTTTTTACGAAATCCAGGAGCGATTCAAAGCAAAGTTGCACCTATCATTGAAGACGGTTTTGCTAATGAGCGTTTTATTTTCTTAGATGGTGACCACATGATGTTATGGTATACGGACAATACTTACGTAAAAGAAGATGGTTCTGGAAACAAGAGATTTTTGAAGAAAGAACCAGTTAGAAGAAAAACAGACSGRATYCCATGCGTTTATAGCAGCACTTTATAA

SEQ ID NO: 4246 - protein, 499 aa, Streptococcus agalactiae
  VARIANT 490: Xaa = Any Amino Acid
MLVNVIREKILVRDDLYFDDSLIDKYVRFAEKNFFPLAGYQKFITPFIFLFRKDDGEPQFNEYLLTLARGGGKNGFMSTRDAFFTSPLYPIKNYDVTITANSERQGKVSFEEVYETIQSKGLENHYYLTKMAIVGRKNNSVFSFRTNNPKTMDSARDGCLEFDEIHQFEDDKIVKVQKSGLGKIAHVRTFFNGTNGYVREGFYDKTIEKAMQILRGEVEDFRMFPFICKLDNASEVDDMRNWSKANPMLDEDTPYAKRLLTVTKSDYDDLELEPSGRQEFMTKRMNLPEADLEKDVTSREKLLACLREPQISLRGRSCVAGFDYASIRDFASVGLLFKDNDELIWKQHSFVRREFFKAFKLKAPIEEWQDKGLLTLVDGDSIDPRLLVDKLIEWRKDYNIEIVCADGFRMDLLKPLLEEAGFEYEFLRNPGAIQSKVAPIIEDGFANERFIFLDGDHMMLWYTDNTYVKEDGSGNKRFLKKEPVRRKTDXIPCVYSSTL

SEQ ID NO: 4247 - protein, 357 aa, Streptococcus agalactiae
TTGGATGAATTAAAACGTCGTAACAAATTAGTTTATAGTGAAAAATATCGCTTGAAACAGCTATTTAAAGACATTCCTGAAGATAAAAAGAAAATCGCAGAAGGATTGTTCACTCAAGCTGCACGTCTCCGCATATTACTTAACGACATGTGGATTGATATCTCAGAGAACGGCGATTATGAACTGTTTTCTCAATCAGAAACTCAGACACCTTATGAAAGAGAGCGTCCTGTAGCAAAATTATATAACTCACGAGATGCGACGTATCACAGAGTTATAAAACAATTGATCGATATGCTGCCAGAAGGAAAAACAGTCAATAAAGATGATTTTACGAACGGTGGTGATTTGTTGTGA

SEQ ID NO: 4248 - protein, 118 aa, Streptococcus agalactiae
MDELKRRNKLVYSEKYRLKQLFKDIPEDKKKIAEGLFTQAARLRILLNDMWIDISENGDYELFSQSETQTPYERERPVAKLYNSRDATYHRVIKQLIDMLPEGKTVNKDDFTNGGDLL

SEQ ID NO: 4249 - protein, 222 aa, Streptococcus agalactiae
AATGAGTGCCAATGGTGTAGACAGAACGGAAAAGTAACTACAGATAACTTAGAAGTAGACCACATCAAAGAACTTGAATTTTATCCCGAACTTGCAACTGACTTAGCTAACCTTAGAACACTTTGCAAGGACTGTCACAATAGACGACACAAGCGCTTTAACTATAAAAAGAAGAAGATCGATAAAGAAACAAATTACCGTTCCGATGAATGGTTTGGATAA

SEQ ID NO: 4250 - protein, 73 aa, Streptococcus agalactiae
NECQWCRQNGKVTTDNLEVDHIKELEFYPELATDLANLRTLCKDCHNRRHKRFNYKKKKIDKETNYRSDEWFG

SEQ ID NO: 4251 - protein, 342 aa, Streptococcus agalactiae
TTGGAAGTCGTGTCTATCTTCATGATTCAAACAACGGATATTGACTTTGTTTCATGTTATATCCTCCTAAAAAAAATAAGTATTTTATGCGTATTTTTCCTTGACAAACATCTCTTTTATGTGTATAATATAAGTATAGAAAGCGAGGTAAGCAATATGCCAATGACCCCTAAGCAAATGATTAAATTGCTTAAAAAGAACGGGTTTTATGAAATCAGTCAAAACGGTAGTCATAAAAAACTTCGTGATGACTTAGGACACCAAACAATCGTTCCAATGCACAATAAAGACCTTGGTAAGGGTCTTGAAGATACCATCTTAAAACAAGCGGGTTTGAAATAA

SEQ ID NO: 4252 - protein, 113 aa, Streptococcus agalactiae
MEVVSIFMIQTTDIDFVSCYILLKKISILCVFFLDKHLFYVYNISIESEVSNMPMTPKQMIKLLKKNGFYEISQNGSHKKLRDDLGHQTIVPMHNKDLGKGLEDTILKQAGLK

SEQ ID NO: 4253 - protein, 378 aa, Streptococcus agalactiae
ATGTTAGTTTATCCAGCCGTATTTACACAAGACTCAGATTATATCATGGTTACATTTCCAGATGTCCCTGAAGCAATCACTCAAGGTGAAGACTTTCAAGAAGCTTACGAAATGGCTGTCGAAGTCTTAGGTTTTGCCCTTGAAGATTATACTGACTATCCAAAACCAAGCTCCGTTTCTGATTTAAAAGAACAGTATCCTGATTCTGATATTGCTTTAGTTGGCATTGATATGATCGCCTACATGAAAAAGTATCACTCTAAGAAGGTACGCAAAAACGTGACTATTCCTGAGTGGTTGAACAACGCAGCCGAAGATAAAAACCTCAACTTTTCTCAAGTCCTTACTGAAGCACTTGAATTAAAATTACAAGCATAA

SEQ ID NO: 4254 - protein, 125 aa, Streptococcus agalactiae
MLVYPAVFTQDSDYIMVTFPDVPEAITQGEDFQEAYEMAVEVLGFALEDYTDYPKPSSVSDLKEQYPDSDIALVGIDMIAYMKKYHSKKVRKNVTIPEWLNNAAEDKNLNFSQVLTEALELKLQA

SEQ ID NO: 4255 - protein, 216 aa, Streptococcus agalactiae
ATGAGCAAATCGGTTAGTATGATACTAGAGCCAGAAAAGCGCAGGATTTTGTATGACAAATACTTATCTCCTTACAAGAATGCAGATAAGGTTATTTATACAGAATTATGTATGTCAGAGAGCTTTTATTATGACACGCTAGATGCTGCATTATTAGCTTTTGCAGAGCTTTATAGGGAGGGCTCTTTGATTGTAGAGCAAGGAGTTTTTGACTAG

SEQ ID NO: 4256 - protein, 71 aa, Streptococcus agalactiae
MSKSVSMILEPEKRRILYDKYLSPYKNADKVIYTELCMSESFYYDTLDAALLAFAELYREGSLIVEQGVFD

SEQ ID NO: 4257 - protein, 422 aa, Streptococcus agalactiae
ATGACAAAATCACCTGCTCGTTTAATTTCATTTATCTCAATCGCTATCGCCATCAACCTTGTTGGGGCTAATTTAGCTCTATTTTTACGCCTACCTATCTATCTAGATACTATAGGTACATTGTTAATAGCAGTTATCCTGGGACCATGGTACGCTGCCAGCACTGCTTTTCTCAGTGCACTCATCAATTGGATGACTACTGATATTTTTCACTTTATTATTCACCAGTCGCCATCGTGGTTGCTATCATTACGGGTATCTTGATTAAAAGGAATTGTAAACCCTCTAGCCTATTGTGGAAATCACTGATTATTTCTTTACCAGGAACTATTATTGCTTCAGTTATAACAGTTATCCTTTTTAAAGGAATTACCTCTAGTGGCTCAAATAATATAGCACAATTNNNNNCATTCATTCATTAA

SEQ ID NO: 4258 - protein, 140 aa, Streptococcus agalactiae
  VARIANT 135, 136, 137: Xaa = Any Amino Acid
MTKSPARLISFISIAIAINLVGANLALFLRLPIYLDTIGTLLIAVILGPWYAASTAFLSALINWMTTDIFSLYYSPVAIVVAIITGILIKRNCKPSSLLWKSLIISLPGTIIASVITVILFKGITSSGSNNIAQXXXFIH

SEQ ID NO: 4259 - protein, 983 aa, Streptococcus agalactiae
ATGAATAAAGAAAAAATTATTATCGATTGCGATCCCGGTATTGATGATACCTTAGCACTGATGTATGCTATTCAGCATCCTAAGTTAGAAGTTGTTGCTATTACTATAACAGCAGGCAATTCGCCTGTTGAGCTAGGACTAAAGAATACCTTTGTAACGCTTGAATTACTAAACCGTCACGACATTCCAGTTTATGTTGGTGATAACTTGCCTTTACAACGTGAATTTGTATCTGCTCAGGATACTCATGGAATGGATGGCCTTGGAGAGAATAACTTTACATTGGCGCAACCAATTATYTTTCAAGAAGAATCAGCAGATTGTTTTTTAGCAAACTATTTGAACACAAAAATGATACTTCTATTATAGCTCTCGGACYTCTGACCAATATCGCTCGAGCCTTACAAACTAATCCCAAATTAGGCAAACATTGCAAGCGATTTATTAGCATGGGAGGAAGTTTTAAATCACATGGCAATTGTTCTCCAGTTGCTGAATACAACTATTGGTGTGATCCTCATGCTGCACAATATGTATTTGAAAACCTTGACAAAAAAATAGAGATGGTTGGACTAGACATCACACGTCATATTGTATTAACCCCCAATCATTTATCTTATATGGAGCGTATTAATCCAGACGTATCAAGTTTTATCCAAAAAATCACAAAGTTCTACTTCGATTTTCACTGGCAATATGAGCATATTATTGGATGTGTGATAAATGATCCTTTAGCTATTGCTTACTTTGTTAATGAAAATATCGCTACTGGTTTTGATAGCTATACCGATGTTGCTTGTCACGGAATCGCCATGGGACAAACAATTGTAGATCAGTATCATTTTTATAAAAAAGATGCTAACAGTAAGATTTTAACCTCAGTCAATACTAATTTATTTTGGAATGATTTTATGACCGTCCTATTACATGCACAAAATTCAGTCATCATTGAAGACTTAGAAATGTTAGGACTTAACAAATGA

SEQ ID NO: 4260 - protein, 327 aa, Streptococcus agalactiae
  VARIANT 127: Xaa = Any Amino Acid
MNKEKIIIDCDPGIDDTLALMYAIQHPKLEVVAITITAGNSPVELGLKNTFVTLELLNRHDIPVYVGDNLPLQREFVSAQDTHGMDGLGENNFTLAQPIIFQEESADCFLANYFEHKNDTSIIALGXLTNIARALQTNPKLGKHCKRFISMGGSFKSHGNCSPVAEYNYWCDPHAAQYVFENLDKKIEMVGLDITRHIVLTPNHLSYMERINPDVSSFIQKITKFYFDFHWQYEHIIGCVINDPLAIAYFVNENIATGFDSYTDVACHGIAMGQTIVDQYHFYKKDANSKILTSVNTNLFWNDFMTVLLHAQNSVIIEDLEMLGLNK

SEQ ID NO: 4261 - protein, 114 aa, Streptococcus agalactiae
GTGAGAACATTTTCAGACACACCAAAAACATTTACATTCCACTATACTTTTAAAGACTTTGATACTGCGCAAGTTGCCTGTCATGCCATTCTAGGNNNNNCATTCATTCATTAA

SEQ ID NO: 4262 - protein, 37 aa, Streptococcus agalactiae
  VARIANT 33, 34: Xaa = Any Amino Acid
MRTFSDTPKTFTFHYTFKDFDTAQVACHAILGXXFIH

SEQ ID NO: 4263 - protein, 1395 aa, Streptococcus agalactiae
TTGAAAGATTATCAAAATAAACTATCACAAGCCACTCAACCTGCTTTTGCCCCTGCATTCAGGACGCGAAAAGGTAGAGGAGACAAAGAATATGTCATTAGTAGCCCCTACAATGTCGGTAAGGTTTTTGAATTCTACGAAAATATCTTCACAGGTATTAAATACAACGAATTTGAAAAAACTATTGAAATCACTAAAACACTCCCTTGGTCTAAAGAAAAAGGGCTATGGACGAATGAACAGACCAGCCTTTGTATTGCATTCATTGATGATAAATATCGGTTTACCCCTCGTAAAGAACATATAGAGGTAGCTATTACCGCTTTAGCTAAAAAGAACTCTTACCACCCCATTAAACAGCGTATTGAAAGTCAAAAATGGGATGGTAAAGCTAGAGGAGAACGCTACTTTATTGATCTATTAGGCTGTGCTGATAATTCCTATAATAGAGAAATTGCCAAAGTATGGCTAACAGGTCTTATAGCTAGAATTTATCTCCGTAAAGTAAAGTTTGAAGTCGTTCCTATTATCATTGATAAAAGACAAGGAACTGGAAAAAGCACTGTTACTAAGCGCTTGCTTCCTAGCTACCACACCGATTCAGAAATCAAGTTTGGTAAAAATGATAGTGATTATCAGAAGATACAAGCCAATGCCATCATCGAGCTAGGGGAGCTAAAAGGTATGTCAAAGGCAGAAATTGAAACGGTTAAAAGCTTCATTTCCTCAGATAGTGATACTTATCGTGAACCTTATGAACGTAAAGCCACTCCTCATCCAAGGCACTGTGTCTTTATCGGGACAGCTAACAAAAAATCTTTTCTTAAGGATAGTGGAACAGAAAGACGCTTCTTCCCTATTGAATGTGGTATCAATGACGTGGAAAAACATCCTATGGAGGTGGAAGAAGATTATTTCTTACAGATACTCGCTGAAGCCAAAGTATGGTTTAACAATTATGAACCACTAACACCATCTAAAGAGTTGATGAATCAGTTAGCTGATATTCAAGAAGATTATAAAGTTGAAGACGTTGACAAAGAAATCATTGACCAATTACTGAATGAGTTTCAAATTGTTGAAGGTTGGGATAGTTTATCACAGTATGAACAACGGCAATACGTCCTAAAACAGTTGGGAGAACCTTTAGATAATGCTCAAAGTTATAGTGACTACCCTTCTGCACAGACAAATTGCTTACTCCAGGTCACAAGTCCTAACCATATTGCTTATCTGGGGTTTAACCAAAAACCAACGCAAGGCGGTAAAGCTCTTATTTCTCAAAAAATACGTGACCATTTAGATAATGATGACGGCTGGAAAAAAGGAGAGAATCCCGCAAGAAAAAGACTATTTAAAGGTGGCACTCCCGTATCTTACTATGAACGAGTTTAA

SEQ ID NO: 4264 - protein, 464 aa, Streptococcus agalactiae
MKDYQNKLSQATQPAFAPAFRTRKGRGDKEYVISSPYNVGKVFEFYENIFTGIKYNEFEKTIEITKTLPWSKEKGLWTNEQTSLCIAFIDDKYRFTPRKEHIEVAITALAKKNSYHPIKQRIESQKWDGKARGERYFIDLLGCADNSYNREIAKVWLTGLIARIYLRKVKFEVVPIIIDKRQGTGKSTVTKRLLPSYHTDSEIKFGKNDSDYQKIQANAIIELGELKGMSKAEIETVKSFISSDSDTYREPYERKATPHPRHCVFIGTANKKSFLKDSGTERRFFPIECGINDVEKHPMEVEEDYFLQILAEAKVWFNNYEPLTPSKELMNQLADIQEDYKVEDVDKEIIDQLLNEFQIVEGWDSLSQYEQRQYVLKQLGEPLDNAQSYSDYPSAQTNCLLQVTSPNHIAYLGFNQKPTQGGKALISQKIRDHLDNDDGWKKGENPARKRLFKGGTPVSYYERV

SEQ ID NO: 4265 - protein, 858 aa, Streptococcus agalactiae
ATGGCTATTTATGAAGCAAGAGGCTTTAGCTCTTATTTGTACCCCTACAAAGGACAATTAGAACCGTTTGACTATATCGCACAGTTTAAACCAATGAAAACGCCTGAGGCTATCGATATTGAAGAATACAAGCGAACACAAGCTCCGTACTGTTTGAGTGGCAAGGTAACCCCAGAGAAAAACGGTAGCTATAAGCGCAATAATGCTAGTCTAGTCTATCGTGATTTGATTTTTCTTGACTATGACGAGATAGAAACAGACGTAAACCTGCCTAAAATCGTTTCTAAGACACTTTGGGAATACAGCTATATTATTTATCCAACGATTAAACACACCCCTGAGAAGCCACGCTATCGCCTTGTCGTGAAGCCTAGTGACACTATGGACAAAACGACGTATAAACAAGTGGTCAAGGAGATAGCTAATAAGATTGGACTACCGTTTGATTTAGCTAGTCTTACCTGGTCGCAATTACAAGGCTTACCCGTCACAACAGGCGACCCAGAAGACTATCAGCGCTATGTGAACCGTGGTCTTGATTATCCTGTCCCTAAAGCACCCAACCGACAGGTTACTACTACTTACACGTCACGCCCTAGAAGTCAGCGTTCTATTACCATGAGGGTCATAGATACCTTGTTTAATGGTTTTGGAGACGAAGGCGGACGTAATGTAGCCTTAACTAAATTTGTTGGTTTGCTATTTAATAAATGGGTGGATTGTGATTTAGAGACGGCTTATGAGCTGGTACAAATAGCTAACAGCGTGACAACTAAGCCACTACCCATTGATGAGATAGACAAAACTTTTAGAAGCATACTCGATACAGAACTAAGAAAGAGAGGAATCAAGCCATAG

SEQ ID NO: 4266 - protein, 285 aa, Streptococcus agalactiae
MAIYEARGFSSYLYPYKGQLEPFDYIAQFKPMKTPEAIDIEEYKRTQAPYCLSGKVTPEKNGSYKRNNASLVYRDLIFLDYDEIETDVNLPKIVSKTLWEYSYIIYPTIKHTPEKPRYRLVVKPSDTMDKTTYKQVVKEIANKIGLPFDLASLTWSQLQGLPVTTGDPEDYQRYVNRGLDYPVPKAPNRQVTTTYTSRPRSQRSITMRVIDTLFNGFGDEGGRNVALTKFVGLLFNKWVDCDLETAYELVQIANSVTTKPLPIDEIDKTFRSILDTELRKRGIKP

SEQ ID NO: 4267 - protein, 273 aa, Streptococcus agalactiae
ATGAACGTATTTAGTCAAGATTATGAAGCAAAACTCTTAGAACAAAATCTGACCGCTTTTAATCGCTTCTTAGAAGTATACCAGCAACCTAAACCAAGAGTTTTAGGGTTGATCACGGCTGAACAGGTCAAAGAGGAATTAAATATCAAAGGTAAAACCCTAAAGCGGTGGGAAAACGCTGGGTTAAAACGATACCAACCACCACTAGAAGACACAAGGAAACATTATTACAAGGTCAGTGATATTCTTATCTTTTTGGGGGTGGATGTGTAG

SEQ ID NO: 4268 - protein, 90 aa, Streptococcus agalactiae
MNVFSQDYEAKLLEQNLTAFNRFLEVYQQPKPRVLGLITAEQVKEELNIKGKTLKRWENAGLKRYQPPLEDTRKHYYKVSDILIFLGVDV

SEQ ID NO: 4269 - protein, 192 aa, Streptococcus agalactiae
ATGCAAGAACTTAACTTTACACTAACACAGACACTTATTTTATTCATTGTTTTAGGTCTCATAGGGCTTCTTCTAAGCCGTTCTAAGCCATTAATAGAGATTGACTTACCAGAAGATACCCAAGCACCTAAACCACGTCAGAATGCAAACTATGGGGCTTATATTCAAGCACAGAACCATTATTACAATTAG

SEQ ID NO: 4270 - protein, 63 aa, Streptococcus agalactiae
MQELNFTLTQTLILFIVLGLIGLLLSRSKPLIEIDLPEDTQAPKPRQNANYGAYIQAQNHYYN

SEQ ID NO: 4271 - protein, 333 aa, Streptococcus agalactiae
ATGAAATATAGAGTAGAAACAAATCCTTTTTCAAAAGATAGATACACTCCTGAACAACGAGAAATGCTCAAAAAACGCCAACTCAGCAAAGATAAAGCGGAAGCCTATTTTGCTCGACTATATAACCATCATATCGCTAGGGTGATTATTGCTAATGTAATGGCAGAGTATACGACTACATTCAGGAAAAGTGCCACTACTTTTGAAGAAGCATGGGGCGCTTTAGGTTATAAACAAACCACAGAGATTGTCTTTAGAGCCGTTAACGGTTTACCATGTTCAGAGAAAGACACAGGGGAATTAGAAACTTATTTAAGTGAGGTATCCGCATGA

SEQ ID NO: 4272 - protein, 110 aa, Streptococcus agalactiae
MKYRVETNPFSKDRYTPEQREMLKKRQLSKDKAEAYFARLYNHHIARVIIANVMAEYTTTFRKSATTFEEAWGALGYKQTTEIVFRAVNGLPCSEKDTGELETYLSEVSA

SEQ ID NO: 4273 - protein, 453 aa, Streptococcus agalactiae
GTGCTCAAAAATCAAAACAATATGATTAAGAAAAAAAGAAATCCGAGAGTACTATTTAAAAATGTCGCTTATAAACTATCTGAAATTGAAGGGAAAACATTAACAGAAATCGCTTCTTTTCTTGGATTTGGGAATTCAGAAGTTTGCAGAAGTACCCTATATAATTGGAAGCGTAGAAAATGGCTAACATTCGACCTTAAAAACGGTCATTATCGCAATGTTGAAGTATTACATGAAGTTACTCTTGAAAAGATGGCTAACAAGGAATTAAAAGAACAAGGACTCATTTATAAAGCTAGCATTTACTATGAACAAGTGGTTTCAACATCCGAAATTATAGAAGACATTAAAACCAAAACACAAGATAGAATTAAAGCTATCCACTTACAACAAAAAGCGCTAGAGCGTATCCCTAGCGAGTTATTCGCAGAATTATACACTAACATGAACTAA

SEQ ID NO: 4274 - protein, 150 aa, Streptococcus agalactiae
MLKNQNNMIKKKRNPRVLFKNVAYKLSEIEGKTLTEIASFLGFGNSEVCRSTLYNWKRRKWLTFDLKNGHYRNVEVLHEVTLEKMANKELKEQGLIYKASIYYEQVVSTSEIIEDIKTKTQDRIKAIHLQQKALERIPSELFAELYTNMN

SEQ ID NO: 4275 - protein, 639 aa, Streptococcus agalactiae
GTGAATATCATAAAACAAGTAAAAAGTTCTTTTGGAGAACTTGAAATTGATTTTTATCTGGACAGGAATAGAAATATTTTTGTGACGATTGAACAATTAGCGCAGAGATTTGGATATAAGAGCCGAAATGCTATTGAAAAGATGATAGAGCGCCAACCCTACCTCAAAGAAAAGCGATTTTCAGTTACTGACAAATTGTCAGCTACTGATGGCAAACAATACGAGACCCGACTATTCAATAAGCGAGGAATTTTTGAGATCGGTATGCTGTCCAAAACGGAGAAAGGTAAAATCTTTCGTCAATGGATTTATGACCATATCGAAGAACTAGAAAGAGAAAACGCTAACTTTAAACTGATACGAGAGCTTGAAAAGTCTAATCATAAAGAATTAACACAAGCTATCAAGGATTGGGAACACTTTAATCAATGGAGCTACAAGGCTATTAGCGACCTTTTGCTAAAATCTGTCACAGGACAGACTGCTAAACAACTGAAACAGTCACGGGTAGGTTATGAAATTGCATTAGATTGCCTAAGTGCTGATGAGTTGACGCGATATAGAAAACTTGAACAAAAAGTAATTGTCCTATTGGAGCTCAATGCAGAATATAACGATATTAAAAAATTAGTCCTTTAA

SEQ ID NO: 4276 - protein, 212 aa, Streptococcus agalactiae
MNIIKQVKSSFGELEIDFYLDRNRNIFVTIEQLAQRFGYKSRNAIEKMIERQPYLKEKRFSVTDKLSATDGKQYETRLFNKRGIFEIGMLSKTEKGKIFRQWIYDHIEELERENANFKLIRELEKSNHKELTQAIKDWEHFNQWSYKAISDLLLKSVTGQTAKQLKQSRVGYEIALDCLSADELTRYRKLEQKVIVLLELNAEYNDIKKLVL

SEQ ID NO: 4277 - protein, 603 aa, Streptococcus agalactiae
TTGAGAACAGAAACATGGAACGGATATACTATCCGATTTGTAGAGCACCAAGGTGAATGGTGGGCGGTGCTAGCTGATATTGCTAAAGCACTAGATCTGAATCCAAAATTTATTAAACAACGTTTGGGAGATGAGGTTGTTTCAAACAACCACGTCGCAGACAGTTTAGGGCGTCAACAAGAAATGTTAATCGTTAGTGAGTTTGGCATTTATGAAACTATCTTCTCAAGCCGTAAGAAGGAAGCCAAAACCTTTAAATTATGGGTATTTGAAACCATTAAACAGTTAAGACAAAGCACAGGCCTAGAGGGCTTCCAAGTATTTAGAATGTTTGATAAAGAACATCAAAAAGAAGCTATGGCAAGATTGACTAATAGCTTAGATAGGGTATCTAAGAAAGACTTGATTAAAGCTAACACAATCACAAATAAAGCCGTTTCCAACAAGTTTGGATATTCAAAAATGGTTAAAAAATCAGAAATGACACCAGATATGTTAGTTGCTAGAGAAATGATTTTAGATGATACTGTGGAACTCATGGGAATTAAAGAAAAGTTCGGATTGAATATCAGTGTGTCTGAGTCAATCTACAATAAAAATTAA

SEQ ID NO: 4278 - protein, 200 aa, Streptococcus agalactiae
MRTETWNGYTIRFVEHQGEWWAVLADIAKALDLNPKFIKQRLGDEVVSNNHVADSLGRQQEMLIVSEFGIYETIFSSRKKEAKTFKLWVFETIKQLRQSTGLEGFQVFRMFDKEHQKEAMARLTNSLDRVSKKDLIKANTITNKAVSNKFGYSKMVKKSEMTPDMLVAREMILDDTVELMGIKEKFGLNISVSESIYNKN

SEQ ID NO: 4279 - protein, 141 aa, Streptococcus agalactiae
ATGNNNNNTATTTCTTTACAGTCTTACAACAATAAAGAGACGGGTAAGAGCGCTTTTAATGACAAAGAACGACTAGCAATTAAGTCAATGGTTTCAGAAATCAAACCAGATATAACCATTGATGAATTATTTTATAGCTAG

SEQ ID NO: 4280 - protein, 46 aa, Streptococcus agalactiae
  VARIANT 2, 3: Xaa = Any Amino Acid
MXXISLQSYNNKETGKSAFNDKERLAIKSMVSEIKPDITIDELFYS

SEQ ID NO: 4281 - protein, 126 aa, Streptococcus agalactiae
ATGCGTAAAATTATTATTAACGGTGGCAAGCAACTGACGGGAGAAGTTGCTGTATCGGGTGCCAAAAATAGTGTAGTTGCCTTGATTCCTGCCACTATTCTTGCTGANNNNNCATTCATTCATTAA

SEQ ID NO: 4282 - protein, 41 aa, Streptococcus agalactiae
  VARIANT 36, 37, 38: Xaa = Any Amino Acid
MRKIIINGGKQLTGEVAVSGAKNSVVALIPATILAXXXFIH

SEQ ID NO: 4283 - protein, 672 aa, Streptococcus agalactiae
ATGAAAGATACATTGAAATTATATTTTGTTTGTGGAACTGTGGATTGCTCTAGGAAGAATATATTGACTGTTGTTGAAGAAGCCTTACAAGCAGGTATAACTCTATTTCAATTTAGAGAAAAAGGTTTTACAGCATTACAAGGTAAGGAAAAAATTGCTATGGCTAAGCAACTCCAAATACTTTGTAAGCAATATCAAGTTCCTTTTATTATTGATGATGACATTGACTTAGTTGAGTTAATTGATGCTGATGGTCTTCATATTGGACAAAATGATTTACCTGTTGATGAGGCACGGAGACGTTTACCAGATAAAATCATCGGTTTATCTGTGAGTACAATGGATGAATATCAGAAATCACAATTATCTGTTGTTGATTACATCGGAATTGGTCCTTTTAATCCGACACAATCAAAAGCAGATGCTAAGCCTGCTGTTGGCAATAGGACAACAAAGGCAGTTAGAGAAATTAATCAAGATATTCCAATCGTTGCAATAGGCGGAATCACTAGTGATTTTGTTCATGATATTATAGAATCAGGTGCAGATGGGATTGCTGTTATATCGGCTATTTCAAAAGCAAATCATATTGTAGATGCAACCAGACAATTGCGTTATGAAGTTGAAAAAGCTCTGGTTAATAGGCAAAAACACAGTGATGTAATCAAATAA

SEQ ID NO: 4284 - protein, 223 aa, Streptococcus agalactiae; identical to SEQ ID NO: 1598

SEQ ID NO: 4285 - protein, 660 aa, Streptococcus agalactiae
ATGAGCGAGTGCATAGAGGACTTAGAAGACTTGTTAAAAGTTGCAGATGCATTATTAATTAATATAGGAACACTAACAAAAGAAAGTTGGCAACTTTACCAAGAAGCAATCAAAATAGCAAATAAAAACCAAGTTCCAGTTGTATTAGATCCTGTAGCGGCAGGAGCAAGTCGTTTTCGATTAGAAGTGTCACTTGATTTATTGAAGAATTATTCTATTAGTTTACTTAGAGGAAATGGTAGTGAAATCGCTGCTTTGATTGGTGAAAAACAAGCGTCTAAAGGGGCAGATGGCGGAAAAGTGGCTGATTTAGAATCAATTGCTGTAAAAGCCAATCAAGTTTTTGATGTGCCAGTGGTTGTCACAGGAGAAACTGATGCTATCGCTGTTAGAGGAGAAGTTCGCTTATTACAAAATGGTAGTCCTTTAATGCCACTTGTTACAGGAACTGGATGTCTATTAGGGGCAGTATTGGCTGCTTTTATTGGTAGTTCTGACAGAAGCGATGATCTTGCTTGTCTGACAGAGGCCATGACTGTTTATAATGTTGCTGGAGAAATTGCAGAGAAGGTGGCAAAAGGTAAGGGGGTGGGAAGTTTCCAAGTTGCATTTTTAGATGCCCTTTCCCAGATGAAATCAGAAATGATTATGGACAAATAG

SEQ ID NO: 4286 - protein, 219 aa, Streptococcus agalactiae
MSECIEDLEDLLKVADALLINIGTLTKESWQLYQEAIKIANKNQVPVVLDPVAAGASRFRLEVSLDLLKNYSISLLRGNGSEIAALIGEKQASKGADGGKVADLESIAVKANQVFDVPVVVTGETDAIAVRGEVRLLQNGSPLMPLVTGTGCLLGAVLAAFIGSSDRSDDLACLTEAMTVYNVAGEIAEKVAKGKGVGSFQVAFLDALSQMKSEMIMDK

SEQ ID NO: 4287 - protein, 111 aa, Streptococcus agalactiae
TTGACCACATTATTAGTGATACAAATGGTTAAAGGGATTACCTCTTTTAATGGTCTAAAATACATTTTAGTCCTTGATAGCTANNNNNCATTCCATTCATTAATTAATTAA

SEQ ID NO: 4288 - protein, 36 aa, Streptococcus agalactiae
  VARIANT 28, 29, 30: Xaa = Any Amino Acid
MTTLLVIQMVKGITSFNGLKYILVLDSXXXFHSLIN

SEQ ID NO: 4289 - protein, 1167 aa, Streptococcus agalactiae; identical to SEQ ID NO: 2901

SEQ ID NO: 4290 - protein, 388 aa, Streptococcus agalactiae; identical to SEQ ID NO: 2902

SEQ ID NO: 4291 - protein, 1155 aa, Streptococcus agalactiae; identical to SEQ ID NO: 721

SEQ ID NO: 4292 - protein, 384 aa, Streptococcus agalactiae; identical to SEQ ID NO: 722
  VARIANT 2, 3: Xaa = Any Amino Acid

SEQ ID NO: 4293 - protein, 633 aa, Streptococcus agalactiae
ATGTATCAAGAATTAAATGATTATTTAGAATTCCAATCAATGAAGTATATTATGCCTGAGAAGGCAGGCCCTTTAAAGGACGATATGCAAACTTTTAAGGCAAAGGGCCAACTTGCTAGGAATAGCTTTACAGAGTTATCAAGAGCCTTAGAACAACGTATGGATGGCTTTAAAATGCAAAGAGTGAGTAATTGGGCTAATCAAGCTCAAGTAGGGCGTCCACATTTTTGGGTTTATTATCGAAAGGATACAGACCAATTAGATGATGTGGCTGTTGCGCTAAGGGTTTATGGTGTAAAAGATAGTTTTGGGGTTAGCCTTGAGGTAAGCTTTGTAGAGAGGCAAAAATCTGATAAGACACTCGAGAAGCAGGCTAGAGTGTTATCGATTCCGATTGCCTCTCCATTGTATTTTATGGTCCAAAGGCAAGGTGAAACTCATCGAGAAGAAGGCAATGAGGAAAATCGTCAACGTTTAATGCAAGAAATTAAGTCAGGGAAGGTAAGGAAAGTATTGGTAAAATATGACGTTCTTTTGACTGAAAACCAGAGCTTAGAAAATATTCTGCAACGATTGTTAGAAGGCTTTGAGAAAGTGTTACCTTACTATCAAGTTTGTCAAACTATTAGCTAA

SEQ ID NO: 4294 - protein, 210 aa, Streptococcus agalactiae; identical to SEQ ID NO: 720

SEQ ID NO: 4295 - protein, 774 aa, Streptococcus agalactiae; identical to SEQ ID NO: 729

SEQ ID NO: 4296 - protein, 257 aa, Streptococcus agalactiae; identical to SEQ ID NO: 718

SEQ ID NO: 4297 - protein, 876 aa, Streptococcus agalactiae; identical to SEQ ID NO: 727

SEQ ID NO: 4298 - protein, 291 aa, Streptococcus agalactiae; identical to SEQ ID NO: 716

SEQ ID NO: 4299 - protein, 1371 aa, Streptococcus agalactiae; identical to SEQ ID NO: 725

SEQ ID NO: 4300 - protein, 456 aa, Streptococcus agalactiae; identical to SEQ ID NO: 714

SEQ ID NO: 4301 - protein, 264 aa, Streptococcus agalactiae
ATGCCAGGCGTTTTAATTATGGAAGCTTTGGCTCAAACTGCAGGTGTTTTAGAATTATCTAAAGAAGAAAACAAAGGAAAGCTTGTTTTTTATGCAGGTATGGATAAAGTGAAATTTAAAAAGCAAGTTGTTCCAGGAGATCAATTAGTTATGACTGCTAAGTTTGTCAAACGTAGAGGAACTATAGCCGTTGTTGAAGCAATAGCAGAAGTTGATGGGAAATTAGCTGCCAGTGGAACGTTAACATTTGCAATAGGCAATTGA

SEQ ID NO: 4302 - protein, 87 aa, Streptococcus agalactiae
MPGVLIMEALAQTAGVLELSKEENKGKLVFYAGMDKVKFKKQVVPGDQLVMTAKFVKRRGTIAVVEAIAEVDGKLAASGTLTFAIGN

SEQ ID NO: 4303 - protein, 192 aa, Streptococcus agalactiae
TTGGATACTGTTAGTCTTAAAGGTGATAGTTTAAATATTAGCTTTAATCCAACTTACCTAATTGAATCTTTAAAAGCAGTAAAAAGCGAAACAGTTACGATTCGATTTATTTCTCCAGTACGTCCATTTACTTTGACACCTGGTGAAGATACTGAAGATTTCATCCAATTAATAACTCCTGTTCGTACTAAC

SEQ ID NO: 4304 - protein, 64 aa, Streptococcus agalactiae
MDTVSLKGDSLNISFNPTYLIESLKAVKSETVTIRFISPVRPFTLTPGEDTEDFIQLITPVRTN

SEQ ID NO: 4305 - protein, 879 aa, Streptococcus agalactiae
ATGACTCTATATATAATAGCTAACCCCCATGCTGGTAATAAAAATGCCTCCACTATTGTTGGTAAAATTCAGGAGCTTTATCATACTGAAGATATTTCTGTGTTCTATACAGAACAGAAAGATGATGAAAAAAAACAAGTCATTAATATACTAAGGTCTTTTAAAGAAAGTGATCATCTAATGATTATAGGAGGAGATGGTACCTTATCAAAAGTAATGACTTATCTCCCCCAACATATTCCGTGCGCTTATTATCCTGTTGGTTCGGGAAATGATTTTGCCAGAGCTTTGAAAATTCCTAACCTCAAAGAAACCCTTACCGCTATTCAGACAGAAAGATTAAAGGAAATTAATTGCTTTATTTATGATAAAGGGCTGATTTTGAATAGTTTAGATTTAGGTTTTGCAGCCTATGTCGTTTGGAAAGCATCTAACTCTAAAATAAAAAATATTTTGAATAGATATCGTCTAGGAAAAATAACTTACATTGTTATAGCTATCAAATCATTATTACATTCTTCTAAAGTACAAGTATTAGTGGAAGGAGAGACAGGACAGCAGATAAAACTAAATGACCTTTATTTTTTCGCATTAGCAAATAACACTTATTTTGGAGGTGGCATTACTATTTGGCCTAAAGCAAGTGCTTTAACTGCAGAGTTAGATATGGTTTACGCTAAAGGGCATACTTTTCTAAAACGATTAAGTATTTTATTATCTTTGGTTTTTAAAAGGCATACTACCTCTAAAAGTATAAAACACCAGACTTTCAAAGCTATGACCGTATATTTTCCTAAAAATAGTTTGATTGAAATAGATGGCGAAATAGTTGAGTTAGATCAGATTAGTTTAAAATGTCAAAAAAGGTATTTATATATG

SEQ ID NO: 4306 - protein, 293 aa, Streptococcus agalactiae
MTLYIIANPHAGNKNASTIVGKIQELYHTEDISVFYTEQKDDEKKQVINILRSFKESDHLMIIGGDGTLSKVMTYLPQHIPCAYYPVGSGNDFARALKIPNLKETLTAIQTERLKEINCFIYDKGLILNSLDLGFAAYVVWKASNSKIKNILNRYRLGKITYIVIAIKSLLHSSKVQVLVEGETGQQIKLNDLYFFALANNTYFGGGITIWPKASALTAELDMVYAKGHTFLKRLSILLSLVFKRHTTSKSIKHQTFKAMTVYFPKNSLIEIDGEIVELDQISLKCQKRYLYM

SEQ ID NO: 4307 - protein, 195 aa, Streptococcus agalactiae
ATGTATCAAGTTGGATCACTTGTTGAAATGAAAAAACCTCATGCTTGTGTAATTAAAGAAACTGGTAAAAAGGCTAATCAATGGAAGGTACTGAGAGTAGGAGCTGATATTAAAATTCAGTGTACTAACTGTCAGCATGTGATTATGATGAGTCGTTATGATTTTGAGCGAAAATTAAAAAAAGTACTGCAACCA

SEQ ID NO: 4308 - protein, 65 aa, Streptococcus agalactiae; identical to SEQ ID NO: 20

SEQ ID NO: 4309 - protein, 201 aa, Streptococcus agalactiae
TTGGATAATTTAATCAGGTTAGCTGAGATTTTTGACGTGAGCTTAGATGAACATGTTTTAGCTAAAACAAATGAAGTTAAAGTTGAACGTATTTATGAAAATAAACCCCTTGATCTACGAAAATACAATAAAATTTATTGGTTTATTTTTCGAAATATTATTCGATCTCTACTAATTATTTTAGCTATATTAACTTTCTTA

SEQ ID NO: 4310 - protein, 67 aa, Streptococcus agalactiae; identical to SEQ ID NO: 22

SEQ ID NO: 4311 - protein, 1113 aa, Streptococcus agalactiae
ATGGCTTTAACAGCAGGTATTGTAGGCTTACCAAATGTTGGTAAATCAACTTTATTTAACGCAATTACAAAAGCAGGAGCAGAAGCTGCTAATTATCCTTTTGCGACTATTGATCCCAATGTTGGTATGGTAGAAGTACCAGATGAGCGTCTACAAAAATTGACAGAATTGATTACGCCTAAAAAAACAGTTCCGACAACCTTTGAATTTACTGATATTGCAGGTATTGTTAAAGGTGCTTCGAAGGGGGAAGGTCTAGGTAATAAATTTTTAGCTAATATTCGTGAAGTGGATGCTATTGTTCATGTGGTACGTGCGTTTGATGATGAAAATGTTATGCGTGAACAAGGTCGTGAGGATGCTTTCGTTGATCCTATAGCAGATATTGATACTATTAATCTTGAATTAATCTTAGCTGATTTAGAGTCAATCAATAAACGTTATGCGCGTGTTGAAAAAATGGCACGAACTCAAAAAGATAAAGAATCAGTAGCAGAGTTCAATGTTTTACAAAAGATTAAACCTGTTTTGGAAGATGGGAAATCAGCTCGTACCATTGAGTTTACAGAAGAGGAAGCAAAAGTTGTTAAAGGTCTTTTTTTATTAACAACTAAACCTGTTTTATATGTTGCTAATGTTGATGAGGACAAAGTAGCTGATCCTGATGATATCGACTATGTTAATCAAATTCGTGCATTTGCAGAAACAGAGAATGCAGAAGTAGTCGTGATTTCTGCTCGAGCTGAAGAAGAAATATCTGAACTTGATGATGAAGATAAGTTAGAATTTTTAGAAGCTATTGGATTAACAGAATCTGGTGTTGATAAATTAACACGAGCTGCTTATCATCTTTTAGGCCTTGGAACTTACTTTACTGCTGGTGAAAAAGAGGTTCGCGCTTGGACGTTTAAGCGTGGTATAAAAGCTCCACAAGCTGCTAGTATTATCCATTCAGATTTTGAAAGAGGTTTTATTCGTGCAGTAACGATGTCATATGATGACCTTATTCAATATGGATCTGAAAAAGCAGTAAAAGAAGCTGGCCGGTTACGTGAAGAAGGAAAAGAGTATATTGTTCAAGATGGCGATATCATGGAATTCCGTTTCAATGTC

SEQ ID NO: 4312 - protein, 371 aa, Streptococcus agalactiae; identical to SEQ ID NO: 24

SEQ ID NO: 4313 - protein, 573 aa, Streptococcus agalactiae
ATGGTAAAAATGATTGTTGGATTAGGAAATCCAGGAAGTAAATATAATGATACAAAACATAATATTGGATTTATGGCTGTTGACAGAATTGTAAAAGACCTTGACGTCAACTTTACAGAAGATAAAAATTTTAAAGCAGAGATAGGTAGTGATTTTATCAACGGTGAAAAAATTTATTTTATCAAACCGACTACTTTTATGAATAACAGTGGTATTGCTGTAAAAGCCCTGCTTACTTACTACAACATTTCTATTAAGGATATGATTATCATATATGATGATTTAGACATGGAAGTCGGTAAAATACGTTTTCGTCAAAAAGGATCTGCTGGGGGACATAATGGTATCAAGTCTATTATTGCTCATTTAGGTACTCAAGAATTTGATCGTATTAAAGTAGGTATAGGACGTCCGAATGGACGTATGACAGTTATTAATCATGTTCTAGGGAAATTTGATAAAAATGATGAAATTATGATATTAAATACCCTTGATAAGGTTGACAATGCTGTCAATTATTATTTACAGACGAATGATTTTCAAAAAACAATGCAGAAATACAACGGTTTAAAA

SEQ ID NO: 4314 - protein, 191 aa, Streptococcus agalactiae
MVKMIVGLGNPGSKYNDTKHNIGFMAVDRIVKDLDVNFTEDKNFKAEIGSDFINGEKIYFIKPTTFMNNSGIAVKALLTYYNISIKDMIIIYDDLDMEVGKIRFRQKGSAGGHNGIKSIIAHLGTQEFDRIKVGIGRPNGRMTVINHVLGKFDKNDEIMILNTLDKVDNAVNYYLQTNDFQKTMQKYNGLK

SEQ ID NO: 4315 - protein, 3495 aa, Streptococcus agalactiae
ATGAATATTATAGAATTATTTAGCCAAAATAAAGTGGTGCGGACATGGCACTCTGGATTAGTAACTAATAGTCGCCAATTAGTTATGGGGTTTTCAGGAGCAAGTAAAGCTATTGCCATAGCATCAGCCTACGAGAAGTTATCTAAAAAAATTATGGTAGTCACTGCCACTCAAACCGATTCTGATAAATTATCAAGTGATATATCAAGTTTAATTGGAGAAGATAACGTTTATCAATTTTTTGCTGATGACGTTCCTGCAGCAGAGTTTATTTTCTCTTCATTAGATAAATCAATTTCACGACTCAGTGCCCTGAGGTTTCTAAAAGATCCAGAAAAAAACGGTGTTTTGATTACTAGTATCAGTGGTTTAAGGTTACTATTACCAAATCCGGAAGTTTTCTCGAAAAGTCAATATAAGTTTGAAATCGGTCAAGAATGTTATTTAGATAAATTGTGTAAGAACCTAGTCAATTTAGGTTATCAGAAAGTTTCTCAAGTATTTAGTCCTGGTGAATTTAGCCAAAGAGGAGATATTTTAGATATTTTTGAGATGACACAAGAATATCCTTATCGCTTGGAATTCTTCGGAGATGAAATAGATGGCATCAGGCAGTTTGATATTGACACTCAAAAGTCTCTTAAACAATTAGAGTCAGTACAGATTTCGCCAGCAGATGATATTATTTTACAAGATGCAGATTTCGAGCGTGCAAAGAAAAAACTTGAGGGCTATCTAGTAACAGCTAGTGAGGTACAACGCACCTATTTGAGCGAGGTTTTATCTACAACTGAGAATCATTTTAAGCACTCAGATATTCGTCGTTTTCTAAGTATCTTTTATGAAAAAGAATGGGGAATATTAGACTATATTCCTGAGGGAACTCCACTTTTTGTTGATGATTTTCAAAAAATTGTAGATCGAAATGCTAAGTTAGATTTAGAAATAGCTAGCCTTCTGACGGAAGATTTACAACAAGGCAAGTCTCATTCTAGTTTGAACTATTTTTCAGATCCTTATAAGCAATTAAGACAATACCAACCAGCAACCTTCTTTTCAAATTTCCACAAAGGATTAGGAAATCTGAAATTTGATAAACTTCATCATTTTACTCAATATGGAATGCAAGAATTTTTTAATCAATTTCCATTGTTGGTCGATGAAATCAATCGTTATAAGAAATCTGGAGCGACAGTACTGTTGCAAGTAGATTCTCAAAAAGGTTTAAATCTCCTTCAAGAAAATTTAAAAGAATATGGGTTAGATTTAATCATTTCAGATAAAAACGATATCGTTCAAAAGGAGTCACAACTTATTGTTGGGCATCTTTCAAATGGTTTTTATTTTGCAGATGAGAAAATTGTTCTGATTACTGAACGTGAGATTTATCATAGGCGTGTTAAAAGGAAAATTAGACGCAGTAATATTAGTAATGCAGAACGTCTAAAAGATTATAATGAACTTTCAGTTGGCGATTATGTTGTTCATAATGTTCATGGCGTAGGAAAATTTTTAGGTATTGAAACAATTGAGATACAAGGTATTCATCGTGATTATCTGACTATTCAATATCAAAATGCTGATCGTATCTCTATCCCCGTAGAACAAATTGAACTTCTAACAAAATATGTCTCTGCAGATGGCAAAGAGCCTAAAATTAATACGTTAAATGATGGTCGCTTCAAAAAAGCAAAACAGAGAGTTGCAAAGCAAGTAGAAGATATTGCTGATGATTTGTTGAAACTTTATGCAGAGCGTAGTCAATTACAAGGATTTGCATTTTCTCCTGACGATAATATGCAAAATGACTTTGATAATGATTTTGCATATGTAGAGACAGAGGATCAATTGCGGTCTATAAAAGAAATTAAACAGGATATGGAAGGTAATCGTCCGATGGATCGATTATTGGTTGGAGACGTTGGTTTTGGTAAGACAGAGGTTGCTATGCGTGCGGCTTTCAAAGCTGTCAATGACCATAAACAAGTTGTTGTTTTAGTCCCAACAACAGTTCTAGCCCAGCAGCATTTTGAAAATTTTAAAGAACGTTTTAGCAATTATCCTGTTACAGTTGATGTACTTAGTCGTTTTCGTAGCAAAAAAGAACAAACAGATACACTAAAAAGATTATCTAAGGGCCAAGTTGATATTATTATTGGAACACATCGACTTCTCTCTCAAGATGTTGTATTTTCGGATTTAGGGTTAATAGTTATTGATGAGGAACAGCGATTTGGTGTAAAGCATAAAGAAAAGTTAAAAGAATTAAAAACAAAAGTTGATGTATTAACTTTGACAGCGACCCCAATACCTAGAACATTACATATGTCAATGCTTGGCATTAGAGACTTATCAGTCATTGAAACACCTCCAACTAATCGTTATCCTGTGCAGACTTACGTTTTGGAGACAAATCCTGGTTTAGTTAGAGAAGCTATTATTCGTGAGATAGACAGAGGAGGACAGGTTTTTTATGTTTACAATAAAGTTGACACTATTGATCAGAAAGTTTCAGAACTTCAGGAGTTAGTACCAGAAGCTAGTATTGGTTTTGTTCATGGTCAAATGTCTGAAATTCAATTAGAAAATACATTAATAGACTTTATCAATGGAGATTACGATGTTTTAGTTGCAACGACAATAATTGAGACAGGAGTCGATATTTCAAATGTTAATACCCTCTTTGTTGAAAATGCAGATCATATGGGCTTGTCAACCCTTTATCAATTAAGAGGCCGTGTGGGTAGAAGTAATCGCATTGCTTATGCTTACCTTATGTACAGACCTGATAAAGTTTTAACAGAAATTTCTGAGAAAAGACTAGATGCAATCAAAGGGTTTACAGAATTGGGATCTGGTTTTAAAATAGCGATGCGTGATTTATCTATACGTGGTGCAGGAAATATTTTAGGAGCTTCACAAAGTGGTTTTATTGATTCGGTTGGATTCGAGATGTATTCACAGCTTCTAGAGCAAGCGATTGCCACCAAACAAGGGAAATCATTAATTCGTCAAAAAGGTAATGCTGAATTAGCCTTACAAATTGACGCCTATTTACCAGCAGAATATATATCAGATGAGCGCCAAAAAATAGAAATATATAAGCGTATTCGTGAATTAGAAACTAGGGCTGATTATGAAGCCTTACAAGATGAGTTAATAGATCGTTTTGGAGAATATCCTGATCAAGTTGCATACCTTTTAGAAATAGGACTTTTAAAAGCTTATCTGGACCTTGCCTTTACTGAATTAGTAGAAAGAAAAGGTAATGAAATAAGCATCCTATTTGAAAAAGCATCTTTGAAGTATTTTTTAACTCAAGATTATTTTGAAGCACTATCAAAAACTCAACTTAAGGCTAGAATTAGCGAAACAAATGGTAAGATGGAAGTTGTTTTTAATATCAAACATAAGAAAAATTATGAAATTATTGAAGAACTTCTAAAATTTGCCGAATGTTTTATCGAGATTAAGTCACGTAAACCAGTAGAAGAA

SEQ ID NO: 4316 - protein, 1165 aa, Streptococcus agalactiae
MNIIELFSQNKVVRTWHSGLVTNSRQLVMGFSGASKAIAIASAYEKLSKKIMVVTATQTDSDKLSSDISSLIGEDNVYQFFADDVPAAEFIFSSLDKSISRLSALRFLKDPEKNGVLITSISGLRLLLPNPEVFSKSQYKFEIGQECYLDKLCKNLVNLGYQKVSQVFSPGEFSQRGDILDIFEMTQEYPYRLEFFGDEIDGIRQFDIDTQKSLKQLESVQISPADDIILQDADFERAKKKLEGYLVTASEVQRTYLSEVLSTTENHFKHSDIRRFLSIFYEKEWGILDYIPEGTPLFVDDFQKIVDRNAKLDLEIASLLTEDLQQGKSHSSLNYFSDPYKQLRQYQPATFFSNFHKGLGNLKFDKLHHFTQYGMQEFFNQFPLLVDEINRYKKSGATVLLQVDSQKGLNLLQENLKEYGLDLIISDKNDIVQKESQLIVGHLSNGFYFADEKIVLITEREIYHRRVKRKIRRSNISNAERLKDYNELSVGDYVVHNVHGVGKFLGIETIEIQGIHRDYLTIQYQNADRISIPVEQIELLTKYVSADGKEPKINTLNDGRFKKAKQRVAKQVEDIADDLLKLYAERSQLQGFAFSPDDNMQNDFDNDFAYVETEDQLRSIKEIKQDMEGNRPMDRLLVGDVGFGKTEVAMRAAFKAVNDHKQVVVLVPTTVLAQQHFENFKERFSNYPVTVDVLSRFRSKKEQTDTLKRLSKGQVDIIIGTHRLLSQDVVFSDLGLIVIDEEQRFGVKHKEKLKELKTKVDVLTLTATPIPRTLHMSMLGIRDLSVIETPPTNRYPVQTYVLETNPGLVREAIIREIDRGGQVFYVYNKVDTIDQKVSELQELVPEASIGFVHGQMSEIQLENTLIDFINGDYDVLVATTIIETGVDISNVNTLFVENADHMGLSTLYQLRGRVGRSNRIAYAYLMYRPDKVLTEISEKRLDAIKGFTELGSGFKIAMRDLSIRGAGNILGASQSGFIDSVGFEMYSQLLEQAIATKQGKSLIRQKGNAELALQIDAYLPAEYISDERQKIEIYKRIRELETRADYEALQDELIDRFGEYPDQVAYLLEIGLLKAYLDLAFTELVERKGNEISILFEKASLKYFLTQDYFEALSKTQLKARISETNGKMEVVFNIKHKKNYEIIEELLKFAECFIEIKSRKPVEE

SEQ ID NO: 4317 - protein, 270 aa, Streptococcus agalactiae
GTGAGATTAGACAAGTATCTAAAAGTGTCGCGTATCATTAAGCGTCGTCCCGTTGCTAAAGAAGTTGCAGACAAAGGACGTGTCAAGGTGAATGGCGTATTAGCAAAGTCATCAACTGACCTAAAGCTTAATGACCAAGTTGAAATTCGTTTTGGTAATAAATTGTTGACCGTTAAAGTATTAGAAATGAAAGATAGCACTAAGAAAGAAGATGCTATCAAAATGTATGAAATTATTAATGAAACAAGGATAGAAACAGATGAGCAAGCC

SEQ ID NO: 4318 - protein, 90 aa, Streptococcus agalactiae; identical to SEQ ID NO: 32

SEQ ID NO: 4319 - protein, 369 aa, Streptococcus agalactiae
ATGAGCAAGCCTAATGTTGTTCAGTTAAATAATCAATATATTAACGATGAGAATCTAAAAAAACGTTACGAAGCTGAGGAGTTACGCCGAAAAAATCGTTTAATGGGTTGGGTTCTTATTTTTGTCATGCTTTTATTTATTTTACCCACTTATAATTTAGTTAAGAGTTACAGAACTTTACAAGAACGTCGTCAAGAAGTTGTAAAATTAACGAAAGACTATCAGACATTAACTAATAGAACTGAGAACCAGAAGTTGCTAGCAAAACAACTAAAAAATCCAGATTACGTTCAAAAATATGCTCGAGCTAAGTATTATTTCTCTAAGACCGGCGAAATGATTTACCCATTACCAGACCTTTTACCAAAA

SEQ ID NO: 4320 - protein, 123 aa, Streptococcus agalactiae; identical to SEQ ID NO: 34

SEQ ID NO: 4321 - protein, 132 aa, Streptococcus agalactiae
ATGAATAATTTAATTGAAACAATAGAACATTTTCTAGCCTACTCGGATGACAAACTAGAAGAATTAGCTGATAAGAACTATCAACTTAGGCAAACAATTGTAGAAAAAGAAAAGATTGAGAGCAGAGAAAAG

SEQ ID NO: 4322 - protein, 44 aa, Streptococcus agalactiae; identical to SEQ ID NO: 36

SEQ ID NO: 4323 - protein, 1284 aa, Streptococcus agalactiae
ATGAAGAAAGTTTTAACCTTCTTATTATGTAGCTTATATTTTGTATCAATCCCAGCTATAAGTACCGAGGAGCCATTAACGCTTTCTCAAAATAGACGATACGCCTTAACTCAGACAGTTGTGGATAAGGAAATGTATTTTGATGCTATTCCAGAGAGACCAACTACAAAAATTGAAATAAGCAGTTTTCAAGATGAAGCTTTAACCATAACAGGAGAGACTTTAGTTCCAAATACTTTATTGTCGATTGTTTCTCTTACAATTAATTCAAATGGAATTCCAGTATTTACTTTGTCCAATGGACAGTTCATAAAGGCTAGTCGTGAAGCTATTTTTAATGATTTAGTTTCTAAGCAGCAATCTGTCTCATTGGATTATTGGTTAAAACCTTCTTTTGTGACTTATGAAGCACCTTACACAAATGGTGTTAGTGAAGTTAAAAATAATTTAAAACCTTATTCCAGAGTGCATTTAGTAGAACAAGCAGAAACAGAACATGGTATTTATTATAAAACGGACAGTGGTTTTTGGATATCAGTAGAAGATCTATCGGTTGCTGATAATCGTATGGCTAAGGTTCAAGAAGTATTATTGGAAAAATATAATAAAGATAAATATGGTATATACATCAAACAATTAAATACACAGACAGTAGCTGGTATTAATATTGATAGGTCAATGTACTCTGCAAGTATTGCAAAATTAGCAACACTTTATGCTAGCCAAGAGCAAGTAAAATTAGGAAAACTGTCATTGGACAGCAAATTTGAATACAAAGATAATGTTAATCAATTTCCTAATAGCTATGATCCAAGTGGTAGTGGGAAATTAGAGAAAAAAGCTGATCATAAATTATATACCGTTAAGGAGTTACTTGAAGCAACTGCCAAGGAATCAGATAATGTTGCAACAAATATGCTAGGTTATTATGTCAATAATCAATATGATTCAATGTTTCAAACACAAGTAGACACAATTTCTGGTATGCACTGGGATATGAAAAAACGCCAGATTTCTCCACAAGCTGCGGGTAAAATGATGGAAGCAATTTATTATCAAAATGGAGATATTGTTAATTACCTATCAAAGACTGATTTTGATAATACAAGAATCCCTAAAAATATACCAGTTAAAGTAGCACATAAAATTGGAGATGCTTATGACTACAAACATGATGCGGCTATTGTTTATGCAGAACAACCTTTTATTATGATTATCTTTACGGATAAATCATCTTACGATGATATCACTAAGATTGCTGACGACGTTTACCAGGTTTTAAAA

SEQ ID NO: 4324 - protein, 428 aa, Streptococcus agalactiae; identical to SEQ ID NO: 38

SEQ ID NO: 4325 - protein, 1272 aa, Streptococcus agalactiae
ATGTATAACACTATTTTGAAAGATACCTTATCCAAAGGGTTATTTACCGCTCATCAGAAAGTTCTAATTGCTGTTTCTGGTGGCATTGATTCAATAAATTTGTTGCAATTTTTATACCAGTATCAAAAAGAGTTATCGATTAGTATTGGTATTGCACACATAAATCATGGACAGCGAAAAGAATCAGAAAAAGAAGAAGAATATATCAGACAGTGGGGACAGATACATGATGTCCCTGTCTTTATCTCTTATTTTCAAGGAATATTTTCAGAAGATAGAGCACGTAACCATCGCTACAATTTTTTTTCAAAAGTTATGCGTGAAGAAGGTTACACGGCTTTAGTAACAGCTCACCATGCTGATGATCAAGCTGAAACTGTATTTATGAGAATTTTAAGAGGAAGCAGGCTACGCTATTTATCAGGGATTAAGCAAGTGAGTGCTTTTGCAAACGGTCAATTGATTAGACCATTTCTTCCATATAAAAAGGAGTTATTACCAAATATTTTTCATTTTGAAGATGCTAGCAACGCTTCGTCTGATTATTTAAGAAATCGAATAAGAAACGTCTACTTTCCTGCTTTGGAAAGAGAAAATAATCAATTGAAAGATTCTCTCATAACTCTCTCTGAGGAAACAGAGTGTTTATTCACGGCTTTAACAGACCTAACAAGGAGCATCGAAGTAACAAACTGCTATGATTTTTTAAGGCAAACTCATTCTGTCCAAGAATTTTTATTGCAAGATTACATTAGCAAATTTCCAGATTTACAAGTGAGTAAAGAACAGTTCAGAGTAATATTAAAATTGATTAGAACTAAAGCCAATATTGACTATACTATTAAATCGGGCTATTTTCTTCATAAGGATTACGAGAGTTTTCATATTACAAAAATCCATCCTAAGACGGATAGTTTTAAGGTTGAAAAAAGATTAGAATTGCATAATATACAAATATTCTCACAATATTTATTTTCCTATGGAAAATTCATTTCTCAAGCAGACATTACTATTCCTATTTATGATACTTCTCCGATTATTTTAAGAAGAAGAAAAGAAGGGGATAGGATATTTTTAGGAAATCACACTAAAAAAATTCGCCGTCTATTTATTGATGAGAAAATAACTCTAAAAGAGAGAGAAGAAGCTGTTATTGGGGAGCAAAATAAAGAGTTGATATTTGTGATTGTTGCAGGTAGAACATATTTGAGAAAACCTTCTGAACATGATATAATGAAGGGCAAACTTTATATTGAAAATTTAGAAAAAAGG

SEQ ID NO: 4326 - protein, 424 aa, Streptococcus agalactiae; identical to SEQ ID NO: 40

SEQ ID NO: 4327 - protein, 540 aa, Streptococcus agalactiae
ATGCTTGAAAATGATATAAAAAAAGTTTTATATTCAGAAGAAGATATTATTCTGAAAACGAAAGAATTAGGAGCTAAATTAACTGCAGATTATGCAGGTAAGAATCCATTATTAGTAGGTGTATTAAAGGGGTCAGTGCCTTTTATGGCTGAGCTATTAAAGCATATTGATACACATGTTGAAATTGATTTTATGGTTGTTTCAAGCTATCATGGTGGTACAACTAGTAGTGGAGAAGTTAAAATTTTAAAAGATGTTGATACTAACATTGAAGGAAGAGATGTAATCTTTATTGAAGACATCATTGATACTGGACGTACATTAAAATACCTTCGAGATATGTTTAAGTATCGCCAAGCTAACTCTGTCAAAGTTGCAACCCTTTTTGATAAGCCAGAAGGGCGATTGGTAGATATTGATGCTGATTACGTTTGTTACGATATCCCAAATGAATTTATTGTGGGATTCGGTTTAGACTATGCTGAAAACTATCGTAACTTACCTTATGTTGGTGTGTTAAAAGAAGAAATTTACTCAAAA

SEQ ID NO: 4328 - protein, 180 aa, Streptococcus agalactiae; identical to SEQ ID NO: 42

SEQ ID NO: 4329 - protein, 1974 aa, Streptococcus agalactiae
ATGAAAAATAATAAAAATAATGGTTTTCTGAAAAATTCCTTTATTTACATATTATTGATTATTGCGGTTATTACAACCTTTCAATACTATTTAAAAGGAACTAGCTCTCAAAACCAGCAAATTTCTTATACAAAACTTGTTAAACAATTAAAAGCTGGAGAAATTAAGTCTATCTCATACCAGCCAAGTGGTGGTGTTGTTGAAGTTAGTGGGACATATAAGAAAGCCAAAACAATTAAATCAGCTAATAGTTTTACTTTTTTAGGTGGTAGTGTTGCTACTAAAGTTACAGGATTTAATTCTGTTATACTACCAAATGACTCTTCAATAAAATCTCTTGTTAGCGCTGCTGAAGAAAATAACACTAATATTCAGGTCAAACATGAAAGTTCAAGTGGGACATGGATTTCTTATATTGCCAGTTTTTTACCTTTAGTTATCATGATTGGTTTCTTCATGATGATGATGAACCAAGGCGGTGGCGGTGGCGCTCGTGGTGCCATGAGCTTTGGTAAAAATAAAGCAAGATCATCTAGTAAAGATGAGGTTAAAGTTCGATTTTCGGATGTTGCTGGAGCAGAGGAAGAAAAGCAAGAATTAATAGAAGTCGTTGACTTCCTTAAAGATCCTAAACGATATAAATCTCTAGGTGCCCGAATTCCAGCAGGGGTTCTATTAGAAGGACCTCCAGGGACAGGTAAAACCCTATTAGCAAAAGCTGTTGCCGGTGAAGCAGGGGTTCCATTCTTTAGTATTTCCGGTTCAGATTTTGTTGAAATGTTTGTCGGTGTTGGAGCTAGTCGAGTACGCTCTTTGTTTGAAGATGCTAAAAAAGCTGAACGTGCTATTATTTTCATTGATGAAATTGATGCTGTTGGACGTCGACGTGGAGCTGGTATGGGTGGCGGAAACGATGAACGTGAACAAACGCTCAACCAACTTTTAATTGAAATGGATGGTTTTGAAGGAAACGAAAGTATTATCGTTATCGCTGCTACCAACCGTAGTGATGTGTTAGATCCCGCATTACTGCGTCCAGGACGTTTTGATAGAAAAGTTCTAGTTGGACAACCTGATGTAAAAGGTCGTGAAGCAATTCTGAGAGTACATGCTAAAAATAAACCATTAGCAGATAATGTTGACTTAAAAGTAGTAGCTCAACAAACCCCAGGATTTGTTGGTGCTGATTTGGAGAATGTTCTCAATGAAGCTGCTTTAGTTGCTGCGCGACGAAATAAAAAAGTTATTGATGCTTCAGATATTGATGAAGCAGAAGACCGTGTAATTGCTGGTCCTTCTAAAAAAGATCGTACTATTTCTGAAAGAGAAAGAGCTATGGTTGCTTACCATGAAGCTGGGCACACAATTGTCGGTTTGATTCTTTCAAATGCGCGAGTTGTTCATAAAGTTACTATCGTACCACGTGGTCGTGCAGGTGGATATATGATTGCTTTACCTAAAGAAGATCAAATGCTTCTTTCAAAAGATGATATGAAAGAGCAATTAGCAGGTCTTATGGGAGGACGTGTAGCGGAAGAAATTATTTTCAACGCTCAGACAACAGGTGCCTCAAATGACTTCGAACAAGCCACTGCTATGGCCCGCGCTATGGTAACTGAATATGGTATGAGCGAGAAACTTGGACCAGTTCAATACGAAGGCAACCACGCAATGATGGCTGGTCAAATGTCACCTGAAAAATCATATTCTGCTCAAACTGCACAACTTATTGATGATGAAGTTCGTCACCTTCTTAATGAAGCACGTAATAAGGCAGCTGATATTATCAACGAAAACCGTGATACTCATAAATTAATTGCAGAAGCCCTCTTAAAATATGAGACTCTTGATGCTGCTCAGATTAAATCGATTTTTGAGACAGGTAAAATGCCTGAGACAGAAAATGATGAAGATAAAGCAAGAGCGTTATCATACGATGAAATCAAAGAAAAAATGCAAGAAGAAGATAAAAAA

SEQ ID NO: 4330 - protein, 658 aa, Streptococcus agalactiae; identical to SEQ ID NO: 44

SEQ ID NO: 4331 - protein, 1341 aa, Streptococcus agalactiae
ATGAAAAAAAGAATATTATCAGCAGTCCTTGTGAGTGGAGTAACTCTTGGAACTGCTGCCGTAACAGTAAACGCTGATGACTTTGACTCGAAAATTGCTGCTACTGATTCAGTAATCAATACTTTATCAGGGCAACAAGCAGCAGCACAAAACCAGGTGACTGCTATTAAAGGACAAGTTGGTGCTTTAGAGTCTCAACAATCAGAATTAGAAGCGCAAAATGCTCAACTTGAGGCTGTATCTCAGCAGTTAGGTCAAGAGATTCAAACTCTTTCTAATAAAATTGTTGCACGTAACGAATCTTTGAAAAAGCAAGTTCGTAGTGCTCAAAAGGGTAACTTGACTAACTATATTAATACTATTTTAAATTCGAAATCAGTATCTGATGCTGTTAATCGTGTTGTTGCTATTCGTGAGGTTGTTTCAGCTAATGAAAAGATGTTAGCACAACAAGAGGCTGACAAAGCGGCCTTAGAAGCTAAACAAATTGAAAATCAAAATGCTATAAATACTGTAGCAGCTAACAAGCAAGCTATCGAAAATAATAAAGCAGCCTTAGCAACACAAAGAGCACAATTAGAAGCAGCTCAATTAGAGTTATCTGCTCAATTGACTACAGTCCAAAATGAAAAAGCATCTTTAATTCAGGCAAAAGCACAAGCTGAGGAAGCTGCGCGTAAGGCAGCTGAAGCACAAGCAGCAGCTGAAGCGAAAGCACAAGCTGAAGCGAAAGCACAAGCTGAGTCTGTAGCAAAAGCACAGGCAGCAGCACAAGTTGAGTCTGCCACAGCTCCTACTGAAACAGTTCAAACACAACCGAGAACTGAAATAAAGCCTTCTAATCTTACGGCTACTTCTTCGGCAACTACTGTTGCTACAACTACAGCTACAGCTACTAATGAGCCAAAAGTTACTCAACCTTCTGTAGTAACTAAAGCAGTTGAAGCACCTAAAGCAGTTGTTTCTTCAACACCTAGAGCGGTATCAAAACCTGTTGTCAGAAGTTATGATTCAAGTAACACATACCCAATGGGACAATGTACTTGGGGAGCTAAGTCAATGGCTTCTTGGGTTGGTAACTATTGGGGAAATGCTAATCAGTGGGGTGCTAGTGCACGTGCAGCTGGTTATTCTGTAGGAACTACCCCTCGTGTTGGTGCAGTAGCTGTTTGGCCATATGATGGTGGTGGTTACGGGCACGTTGCAGTAGTAACGTCAGTGGCTAACAATTCATCTATCCAAGTTATGGAATCAAACTATGCTGGAAATATGAGTATTGGCAATTACCGTGGTTCATTTAACCCTAGTGCTTCTGGCTCTGTTTACTATATTTACCCAAAT

SEQ ID NO: 4332 - protein, 447 aa, Streptococcus agalactiae
MKKRILSAVLVSGVTLGTAAVTVNADDFDSKIAATDSVINTLSGQQAAAQNQVTAIKGQVGALESQQSELEAQNAQLEAVSQQLGQEIQTLSNKIVARNESLKKQVRSAQKGNLTNYINTILNSKSVSDAVNRVVAIREVVSANEKMLAQQEADKAALEAKQIENQNAINTVAANKQAIENNKAALATQRAQLEAAQLELSAQLTTVQNEKASLIQAKAQAEEAARKAAEAQAAAEAKAQAEAKAQAESVAKAQAAAQVESATAPTETVQTQPRTEIKPSNLTATSSATTVATTTATATNEPKVTQPSVVTKAVEAPKAVVSSTPRAVSKPVVRSYDSSNTYPMGQCTWGAKSMASWVGNYWGNANQWGASARAAGYSVGTTPRVGAVAVWPYDGGGYGHVAVVTSVANNSSIQVMESNYAGNMSIGNYRGSFNPSASGSVYYIYPN

SEQ ID NO: 4333 - protein, 195 aa, Streptococcus agalactiae
ATGTCTTATTCTAATTTAAAATTGTTTGCACTGTCATCAAACAAAGAACTAGCGAAAAAAGTGTCTCAGACGATTGGAATTCCGCTAGGTCAATCGACAGTTCGCCAATTTTCTGATGGTGAGATTCAAGTTAATATTGAAGAGTCTATTCGTGGCCATCATGTTTTTATTTTACAATCAANNNNNTTAATTAAT

SEQ ID NO: 4334 - protein, 65 aa, Streptococcus agalactiae
  VARIANT 61, 62: Xaa = Any Amino Acid
MSYSNLKLFALSSNKELAKKVSQTIGIPLGQSTVRQFSDGEIQVNIEESIRGHHVFILQSXXLIN

SEQ ID NO: 4335 - protein, 802 aa, Streptococcus agalactiae
ATGTTTTTTACAATCAACAAGCTCACCAGTTAATGATAATTTGATGGAAATTTTAATTATGGTTGACGCTTTAAAGCGTGCTAGTGCGGAGTCTGTTAGTGTGGTAATGCCTTACTATGGGTATGCTCGTCAAGATCGCAAGGCACGTTCTCGTGAACCTATTACTTCGAAACTCGTTGCGAACATGCTAGAAGTTGCTGGTGTTGATCGTCTTTTAACAGTTGATTTACATGCAGCTCAAATTCAGGGATTCTTTGATATTCCCGTTGATCACCTTATGGGGGCTCCCCTTATTGCAGATTACTTTGATCGTCAGGGATTGGTTGGTGATGATGTTGTTGTCGTTAGTCCTGATCATGGTGGCGTAACACGTGCACGTAAGCTGGCACAGTGTTTAAAGACACCGATTGCTATCATTGATAAGCGCCGTAGTGTTACTAAAATGAATACATCTGAAGTAATGAATATTATTGGTAATATCAAAGGTAAAAAATGTATTTTAATTGATGATATGATTGATACTGCAGGTACTATTTGCCATGCTGCAGACGCTTTAGCTGAAGCAGGGGCAACAGCGGTTTATGCTTCATGTACTCACCCTGTTTTATCAGGGCCGGCTTTGGATAATATTCAAAATTCAGCTATTGAAAAATTAATTGTGTTAGATACGATTTACCTCCCTGAAGAACGTTTGATTGATAAGATTGAACAAATTTCAATTGCGGAATTGATTGGTGAAGCTATTATCCGTATTCACGAGAAACGTCCTTTATCACCATTATTTGAAATGAATAAACTAAAA

SEQ ID NO: 4336 - protein, 268 aa, Streptococcus agalactiae
MFYLQSTSSPVNDNLMEILIMVDALKRASAESVSVVMPYYGYARQDRKARSREPITSKLVANMLEVAGVDRLLTVDLHAAQIQGFFDIPVDHLMGAPLIADYFDRQGLVGDDVVVVSPDHGGVTRARKLAQCLKTPIAIIDKRRSVTKMNTSEVMNIIGNIKGKKCILIDDMIDTAGTICHAADALAEAGATAVYASCTHPVLSGPALDNIQNSAIEKLIVLDTIYLPEERLIDKIEQISIAELIGEAIIRIHEKRPLSPLFEMNKLK

SEQ ID NO: 4337 - protein, 1173 aa, Streptococcus agalactiae
ATGACATTAGAGAAACGATTTAATAAGTACTTAGATAGAATAGAGGTCTCCTTAATTCGTCAGTTTGATCAATCTATTTCAGATATACCTGGAATGGTAAAATTAACTCTTGGAGAACCAGATTTTACCACTCCTGATCATGTTAAAGAAGCAGCTAAATCAGCTATTGATGCGAATCAATCGTATTACACTGGTATGAGCGGTTTATTAGCTCTAAGGCAAGCTGCTGCAGATTTTGCAAAGGATAAATATAATCTTACTTATAATCCTGATTGTGAGATCTTGGTTACGATAGGTGCCACAGAAGCTCTGTCTGCATCTCTTATAGCTATTTTAGAAGCTGGTGATGTTGTTCTATTACCTGCCCCCGCTTATCCAGGATATGAGCCAATAGTTAACCTTGTAGGAGCTGATATCGTAGAAATTGATACTAGAGAAAATGACTTTAGACTAACTCCTGAAATGTTAGAAACGGCTATTATCCAACAAGGTGAAAAATTAAAGGCTGTTTTACTTAATTATCCTACTAACCCTACAGGTATTACCTATTCAAGGCAAGAAATTGCTGCATTAGCTGAAGTCCTTAAAAAATATGATATTTTTGTTATTAGTGATGAAGTTTATTCTGAGTTAACTTACACTGGTCAGCAGCATGTTTCAATTGCAGAATATTTACCTAACCAAACTATCTTAATTAATGGCTTATCAAAATCACATGCTATGACTGGTTGGAGAGTTGGATTGGTGTATGCTCCTGAAGCATTTATTGCTCAAATCATTAAAAGTCATCAATACATGGTGACAGCTGCTAGTACTATTTCGCAATTTGCTGGGGTAGAAGCCTTATCTGTGGGTAAAAATGATACGTTACCTATGCGTCAAGGATATATTAAACGTAGAGATTATATCATTGATAAAATGTCTAAACTTGGTTTCAAAATAATTAAACCGAGTGGCGCTTTTTATATCTTTGCTAAAATACCTGATAGCTATCCACAGGATTCTTTCAAGTTTTGTCAGGATTTTGCTTATCAACAAGCTGTAGCTATTATTCCAGGAGTGGCTTTTGGTAAATATGGTGAAGGATATATACGTCTTTCTTATGCTGCTAGTATGGAAGTTATTGAAACAGCAATGGCTAGATTGAAAGTTTTTATGGAATCATATGAGGGT

SEQ ID NO: 4338 - protein, 391 aa, Streptococcus agalactiae; identical to SEQ ID NO: 56

SEQ ID NO: 4339 - protein, 526 aa, Streptococcus agalactiae
ATGTTTTTTGTAAAGCATGCTTCAAAGTCAAAATTCAATGCTGTGCTCCAACCTTTGACTATTGCTCATTTTATTTTAAAAATTAATGATAATGGTCTTTCTTATATTGATGATTATAAAGAAGTTTTAGCATTTCAAGAAACCAATTCAGACTTGTTTAAGTTGTCATATGCGAGTTATATTACTTCTTTGGCTGATGTGGCTATTAGTGATAATGTAGCGGATGCTCAATTATTTATTTTCCTAAAGAAAACGTTAGAATTGATTGAGGACGGTTTAGATTATGAGATTCTAACGAATATTTTTGAAGTACAACTACTAGAGAGGTTCGGTGTTGCTTTAAATTTTCATGATTGTGTTTTTTGTCATAGGGTAGGATTACCTTTTGATTTTTCACACAAATATTCTGGATTATTATGTCCAAACCATTATTATAAAGACGAGAGAAGAAACCACCTAGATCTAATATGCTGTACTTAATCAATCGTTTTCAGTCAATTCAATTTGATGTTACAAACAATTTCTG

SEQ ID NO: 4340 - protein, 176 aa, Streptococcus agalactiae
MFFVKHASKSKFNAVLQPLTIAHFILKINDNGLSYIDDYKEVLAFQETNSDLFKLSYASYITSLADVAISDNVADAQLFIFLKKTLELIEDGLDYEILTNIFEVQLLERFGVALNFHDCVFCHRVGLPFDFSHKYSGLLCPNHYYKDERRNHLDPNMLYLINRFQSIQFDDYKQFL

SEQ ID NO: 4341 - protein, 132 aa, Streptococcus agalactiae
GTGAAACCTGAGATGAAACTTAAAATTCGTCAATTTTTGGACATGATTTACGATGAATATGTAGGGATTCATCTTAAAAGTAAAAAATTTATTGATGATTTGTCTAGTTGGGGAAGTATTATGAAATCAGAT

SEQ ID NO: 4342 - protein, 44 aa, Streptococcus agalactiae
MKPEMKLKIRQFLDMIYDEYVGIHLKSKKFIDDLSSWGSIMKSD

SEQ ID NO: 4343 - protein, 849 aa, Streptococcus agalactiae
ATGAAAAAAACATTATACATTACCAATAAACTCTTTTTTGCTAACTGGTTTGTGCCAGTTATTGGTGCAGTTCTAATTCAAGTTATCGGCATCATTGTAAGTAGACGCCTTGTAGTAAAATTGCTACCTGATGATTATAAATTCAATTTATACATTGCGCTTTTACTATTTGTTCCTATTTTGGCAAGTATTTTACTATTTTTAATCTATTTTCAAAAAAGGGATTTTACTTCCTTGGGATTTACTAAAGATAATAATGTTTTAACAACGATCTCAGGATTTATTACTGGTAGTTTACTGATGTTTTTTATTTATATTTGCCACTGGTTATCAGGTTTTGTGGAAATTTCTTCCAGCAATTCCTTTTCTTTTGGACCTTTTTTCTTTTTATTTCTTGCATACTTTATCCAAAGCTTGACAGAGGAAATTTTATTTAGAGGATATGTTATGACAACAGTTACCAAATTTAAAGGTAGTTTTGCAGGTGTTTTATGTAATTCTATGTTGTTTTCTTTTATCCACTTTAGAAACTATGGTATCACAGCAATAGCACTTTTTAATTTATTTTTACTTGGTATTATTTTTTCTATTCTTTTTAATATGACCAAAAATATTCTTTTTGTTACAGGAGTTCATACTACATGGAATTTTACTATGGGATGTGTATTAGGTAATAAGGTTAGTGGGGGGGATTCTCCTGTTTCTCTTTTTAGAATTACTGAAAATTCTAGCTTTGCTCTTTGGAATGGTGGGGATTTTGGTTTTGAAGGGGGAGTACTATGTTCTTTGATATTAGTAGGTTGTTTAGCATACTTTTCTTTGGAAAGCGTGAGAGTATCTGTTAGATAT

SEQ ID NO: 4344 - protein, 283 aa, Streptococcus agalactiae; identical to SEQ ID NO: 60

SEQ ID NO: 4345 - protein, 987 aa, Streptococcus agalactiae
ATGAAGAAAATTGCTATAGATGCTATGGGTGGAGATTACGCTCCCAAAGCTATTGTAGAGGGTGTTAATCAAGCTATTTCAGATTTTAGTGATATTGAAGTACAACTCTATGGCGATCAGAAAAAAATTGAGAAATATTTAACAGTAACGGAGCGAGTTAGTATTATTCATACTGAAGAAAAAATTAATTCTGATGATGAGCCTGCTAAAGCTGTTCGTCGTAAAAAACAGTCTTCGATGGTCTTAGGAGCTAAGGCAGTCAAAGATGGTGTTGCACAGGCTTTATTTCTGCAGGGAATACAGGAGCTTTATTAGCTGCTGGTTTGTTTGTAGTAGGACGTATAAAAGGTGTTGATCGACCAGGCTTAATGTCAACTATGCTACGTTAGATGGTGTGGGTTTTGATATGCTGATTTAGGAGCTAATGCAGAAAACACAGCTTCTCATCTTCATCAATATGCTATTTTAGGGTCGTTTTATGCAAAAAATGTCCGTGGTATTGAAGTTCCTCGTGTAGGTCTCTTAAATAACGGAACGGAAGAAACAAAAGGCGATTCTCTTCATAAAGAAGCTTATGAACTGTTAGCAGCAGAGCCTTCTATTAATTTTATTGGAAATATTGAAGCACGTGATTTGATGTCTAGTGTAGCAGATGTTGTTGTCACTGATGGTTTTACTGGAAATGCTGTTCTAAAGACAATGGAAGGTACAGCTATGAGTATTATGGGAAGCCTAAAATCTTCAATTAAATCAGGTGGCGTGAAAGCTAAATTAGGAGCACTTCTATTAAAAGATAGCCTATATCAGCTAAAAGATAGTATGGACTATTCAAGCGCGGGTGGAGCGGTTCTTTTTGGTTTAAAAGCTCCAATAGTAAAATGCCATGGATCAAGTGATTCTAAAGCTGTTTATTCTACTTTGAAGCAAGTTCGTACAATGTTGGAAACTCAAGTAGTTGATCAATTAGTTGATGCCTTTACAGATGAA

SEQ ID NO: 4346 - protein, 330 aa, Streptococcus agalactiae
  VARIANT 128: Xaa = Any Amino Acid
MKKIAIDAMGGDYAPKAIVEGVNQAISDFSDIEVQLYGDQKKIEKYLTVTERVSIIHTEEKINSDDEPAKAVRRKKQSSMVLGAKAVKDGVAQAFISAGNTGALLAAGLFVVGRIKGVDRPGLMSTMXTLDGVGFDMLDLGANAENTASHLHQYAILGSFYAKNVRGIEVPRVGLLNNGTEETKGDSLHKEAYELLAAEPSINFIGNIEARDLMSSVADVVVTDGFTGNAVLKTMEGTAMSIMGSLKSSIKSGGVKAKLGALLLKDSLYQLKDSMDYSSAGGAVLFGLKAPIVKCHGSSDSKAVYSTLKQVRTMLETQVVDQLVDAFTDE

SEQ ID NO: 4347 - protein, 237 aa, Streptococcus agalactiae
ATGTCAAGAGATGAAGTTTTTGAAAAGATGCTGGAATTATTAAGGCAGCAACTTGGTGACCCACAGTTAGATATCACACCAGAGTCATCGTTACATGATGATTTAGCAATTGACTCTATCGCTTTAACAGAGTTTATTATCAATTTGGAAGATGTGTTTCATCTAGAGATTCCAGATGAGGCTGTCGAACACATGTCAAGCGTCCAACAACTATTAGATTATATCATTGAACATAAG

SEQ ID NO: 4348 - protein, 79 aa, Streptococcus agalactiae; identical to SEQ ID NO: 64

SEQ ID NO: 4349 - protein, 702 aa, Streptococcus agalactiae
GTGACTAACCAGCTTATTTATACAGGAAAAGCGAAAGATATTTATAGTACAAAAGATGAAAATGTGATTAGAACGGTCTATAAAGACCAAGCTACTATGTTGAATGGAGCTCGTAAGGAGACTATTGATGGCAAGGGAGCACTAAATAATCAGATTTCATCTCTTATTTTTGAGAAATTAAATATGGCTGGTGTGGTGACACATTATATTGAGCAAATTTCAAAAAACGAACAATTGAATAAAAAAGTTGATATTATTCCACTTGAGGTGGTGCTACGGAATGTGACAGCAGGCTCATTTTCAAAACGTTTTGGAGTGGAAGAAGGACACGTTCTTGAAACGCCAATCGTGGAATTTTACTACAAAAATGATAATCTGAATGATCCTTTTATCAATGATGAGCATGTGAAGTTTTTGGGTATTGTTAATGATGAGGAGATTGCTTATCTGAAAGGAGAGACTCGCCATATTAATGAACTCTTGAAAGATTGGTTTGCTCAGATTGGGCTTAACTTGATTGACTTCAAGTTGGAGTTCGGATTTGACAAGGATGGCAAAATCATCTTGGCTGATGAGTTCTCACCTGACAACTGCCGTCTCTGGGATGCTGATGGTAATCATATGGACAAGGATGTTTTTCGTAGGGATCTTGGTAGCTTGACCGATGTCTATCAAGTTGTACTTGAGAAGTTGATAGCATTG

SEQ ID NO: 4350 - protein, 234 aa, Streptococcus agalactiae; identical to SEQ ID NO: 66

SEQ ID NO: 4351 - protein, 3798 aa, Streptococcus agalactiae
TTGGGCTTACTGAAATCTCAATTTCAGACGTCCTCCTATTTTCGAGTCGCTCCCTTGTCGGACTTGGTATCTTATATGAATAAACGTATTTTTGTTGAGAAAAAGGCTGACTTTGGCATTAAATCGGCTAGTCTTGTGAAAGAGTTGACGCATAATCTACAACTGGCTTCTTTGAAGGATTTGCGTATCGTGCAGGTCTATGATGTCTTCAATTTGGCTGAGGATTTGCTGGCGCGTGCTGAGAAGCATATTTTCTCTGAGCAGGTGACAGACCGTCTTTTGACAGAAGCTGAAATCACTGCGGAGCTTGATAAGGTTGCCTTCTTTGCCATTGAGGCGCTTCCTGGTCAATTTGACCAACGTGCTGCTAGTTCGCAAGAAGCTTTGCTATTGCTTGGAAGTGACAGTCAGGTCAAGGTCAATACAGCTCAGCTTTACTTGGTCAATAAGGATATTGCAGAAGCAGAGCTTGAAGCCGTTAAGAACTATCTTTTGAATCCCGTTGATTCACGTTTCAAGGATATTACCTTGCCACTTGAAGTGCAGGCTTTCTCTGTGTCTGATAAGACAATCTCTAATCTTGATTTCTTCGAAACTTATCAGGCTGACGATTTTGCAGCCTATAAGGCAGAGCAGGGATTGGCTATGGAGGTCGATGACCTTCTCTTCATCCAAGATTATTTCAAATCAATCGGGCGTGTGCCAACTGAGACTGAGTTGAAAGTTTTGGATACGTATTGGTCAGACCACTGCCGTCACACAACCTTTGAAACTGAATTGAAAAACATTGATTTTTCGGCCTCTAAATTCCAAAAACAATTGCAGGCGACTTATGACAAATACATTGCCATGCGTGATGAGCTTGGTCGTTCTGAAAAGCCGCAGACACTTATGGATATGGCGACTATCTTTGGTCGTTATGAGCGTGCCAATGGTCGTCTGGACGATATGGAAGTCTCAGATGAAATCAATGCCTGCTCAGTTGAAATTGAAGTAGATGTTGATGGTGTGAAAGAGCCTTGGCTCCTCATGTTTAAGAACGAGACTCACAACCACCCAACAGAAATTGAGCCATTTGGTGGAGCGGCGACTTGTATCGGTGGTGCCATTCGTGACCCATTGTCAGGACGTTCATACGTTTATCAGGCTATGCGTATTTCAGGCGCAGGAGATATCACGACTCCGATTGCGGAAACACGTGCTGGTAAATTGCCACAACAGGTTATTTCTAAGACTGCGGCGCACGGCTATTCTTCATATGGTAACCAAATTGGGCTTGCGACAACTTATGTGCGTGAGTACTTCCACCCTGGCTTCGTAGCTAAACGCATGGAGCTTGGAGCTGTGGTTGGTGCTGCACCTAAGGAAAATGTGGTTCGTGAAAAACCAGAGGCAGGCGATGTGGTTGTCTTGCTCGGTGGTAAAACAGGTCGTGACGGTGTCGGCGGTGCGACAGGTTCATCTAAGGTTCAAACGGTTGAATCTGTGGAAACAGCTGGCGCAGAGGTACAAAAAGGGAATGCCATCGAAGAACGTAAGATTCAACGCCTTTTCCGTGATGGTAATGTCACTCGCCTAATCAAGAAATCAAATGACTTCGGTGCAGGTGGTGTCTGTGTTGCCATCGGTGAATTAGCTGATGGTCTTGAAATCGATTTGGACAAGGTGCCACTTAAATACCAAGGTCTTAATGGTACTGAAATTGCTATCTCAGAATCTCAAGAAAGGATGTCAGTTGTTGTTGGTCCAAGTGATGTGGATGCCTTCATCGCAGCCTGTAACAAGGAAAATATCGATGCAGTTGTTGTTGCGACAGTTACTGAAAAACCAAATCTTGTCATGACTTGGAATGGTGAAACAATTGTTGATTTGGAACGCTGTTTCCTTGATACCAACGGTGTTCGTGTCGTAGTTGATGCCAAAGTCGTTGACAAGGACTTAACAGTTCCAGAAGCGCGCACAACATCAGCAGAGACACTTGAAGCAGATATGCTTAAGGTCTTGTCTGACCTCAATCACGCTAGTCAAAAAGGTCTTCAAACTATCTTTGACTCATCTGTTGGTCGTTCAACCGTTAACCACCCAATCGGTGGTCGTTACCAAATCACACCGACAGAAAGTTCTGTTCAAAAATTGCCAGTTCAATATGGTGTGACAACAACAGCATCTGTTATGGCTCAAGGTTACAATCCTTATATTGCAGAGTGGTCACCTTATCACGGTGCTGCCTATGCTGTTATTGAAGCGACAGCTCGCTTGGTAGCAACGGGTGCTGACTGGTCTCGTGCACGTTTCTCTTACCAAGAGTATTTCGAGCGTATGGATAAACAGGCAGAGCGTTTTGGTCAGCCAGTATCAGCTCTTCTTGGTTCTATTGAGGCTCAGATTCAATTTGGTTTGCCATCAATCGGCGGTAAGGACTCTATGTCTGGTACTTTCGAAGAATTGACAGTACCACCAACCTTGGTAGCTTTCGGTGTGACAACAGCGGACAGCCGCAAGGTTCTCTCTCCTGAGTTTAAAGCGGCTGGTGAGAATATCTACTACATTCCAGGTCAAGCTATTTCAGAAGATATTGATTTTGACCTTATCAAGGCTAACTTTAGCCAGTTTGAGGCTATTCAAGCTCAACATAAGATTACCGCTGCCTCAGCCGTTAAATACGGTGGTGTCCTAGAAAGTCTTGCTCTCATGACTTTTGGTAACCGTATCGGTGCTTCTGTTGAAATTGCAGAGCTTGACAGCAGCTTGACAGCTCAACTCGGAGGCTTTGTCTTTACATCAGTTGAGGAAATTGCTGACGTTGTGAAGATCGGTCAAACTCAGGCAGACTTTACAGTCACTGTCAATGGAAATGACCTAGCTGGTGCAAGCCTTCTATCAGCCTTCGAAGGTAAATTAGAAGAAGTTTACCCAACAGAGTTTGAACAGGTAGATGCTATTGAGGAAGTTCCTGCTGTGGTATCAGATGTTGTTATCAAGGCTAAGGAAATTATTGAAAAACCAGTAGTTTACATCCCAGTCTTTCCTGGTACTAACTCAGAGTACGATTCAGCTAAGGCCTTTGAACAGGTTGGAGCTAGCGTCAACTTGGTGCCATTTGTAACCTTGAATGAGGCTGCTATTGCTGAGTCAGTTGATACGATGGTTGCTAATATTGCTAAGGCAAATATCATCTTCTTTGCTGGAGGTTTCTCAGCAGCGGATGAACCAGATGGCTCTGCTAAGTTTATCGTCAATATCTTGCTTAACGAGAAGGTTCGCGCAGCTATTGACAGCTTCATCGAAAAAGGTGGCCTTATCATCGGTATCTGTAATGGTTTCCAAGCCCTTGTTAAATCAGGTCTTCTTCCATACGGAAACTTCGAGGAAGCTGGTGAGACAAGTCCAACCCTCTTCTATAACGATGCTAACCAGCACGTTGCAAAGATGGTTGAGACTCGTATCGCAAATACCAATTCACCTTGGTTGGCAGGAGTTGAGGTCGGCGATATTCATGCCATTCCAGTTTCACACGGTGAAGGTAAATTTGTTGTCAGCGCTTCTGAATTTGCAGAGCTAAGAGACAATGGTCAAATCTGGAGCCAATATGTGGACTTTGACGGACAACCATCTATGGATTCTAAATACAATCCAAACGGCTCTGTCAATGCCATCGAAGGGATTACCAGCAAGAATGGTCAAATCATCGGTAAGATGGGGCACTCAGAACGCTGGGAAGACGGACTCTTCCAAAATATCCCTGGAAACAAAGACCAAAAACTCTTTGAAAGTGCTGTAAAATACTTTACAGGGAAG

SEQ ID NO: 4352 - protein, 1266 aa, Streptococcus agalactiae
MGLLKSQFQTSSYFRVAPLSDLVSYMNKRIFVEKKADFGIKSASLVKELTHNLQLASLKDLRIVQVYDVFNLAEDLLARAEKHIFSEQVTDRLLTEAEITAELDKVAFFAIEALPGQFDQRAASSQEALLLLGSDSQVKVNTAQLYLVNKDIAEAELEAVKNYLLNPVDSRFKDITLPLEVQAFSVSDKTISNLDFFETYQADDFAAYKAEQGLAMEVDDLLFIQDYFKSIGRVPTETELKVLDTYWSDHCRHTTFETELKNIDFSASKFQKQLQATYDKYIAMRDELGRSEKPQTLMDMATIFGRYERANGRLDDMEVSDEINACSVEIEVDVDGVKEPWLLMFKNETHNHPTEIEPFGGAATCIGGAIRDPLSGRSYVYQAMRISGAGDITTPIAETRAGKLPQQVISKTAAHGYSSYGNQIGLATTYVREYFHPGFVAKRMELGAVVGAAPKENVVREKPEAGDVVVLLGGKTGRDGVGGATGSSKVQTVESVETAGAEVQKGNAIEERKIQRLFRDGNVTRLIKKSNDFGAGGVCVAIGELADGLEIDLDKVPLKYQGLNGTEIAISESQERMSVVVGPSDVDAFIAACNKENIDAVVVATVTEKPNLVMTWNGETIVDLERCFLDTNGVRVVVDAKVVDKDLTVPEARTTSAETLEADMLKVLSDLNHASQKGLQTIFDSSVGRSTVNHPIGGRYQITPTESSVQKLPVQYGVTTTASVMAQGYNPYIAEWSPYHGAAYAVIEATARLVATGADWSRARFSYQEYFERMDKQAERFGQPVSALLGSIEAQIQFGLPSIGGKDSMSGTFEELTVPPTLVAFGVTTADSRKVLSPEFKAAGENIYYIPGQAISEDIDFDLIKANFSQFEAIQAQHKITAASAVKYGGVLESLALMTFGNRIGASVEIAELDSSLTAQLGGFVFTSVEEIADVVKIGQTQADFTVTVNGNDLAGASLLSAFEGKLEEVYPTEFEQVDAIEEVPAVVSDVVIKAKEIIEKPVVYIPVFPGTNSEYDSAKAFEQVGASVNLVPFVTLNEAAIAESVDTMVANIAKANIIFFAGGFSAADEPDGSAKFIVNILLNEKVRAAIDSFIEKGGLIIGICNGFQALVKSGLLPYGNFEEAGETSPTLFYNDANQHVAKMVETRIANTNSPWLAGVEVGDIHAIPVSHGEGKFVVSASEFAELRDNGQIWSQYVDFDGQPSMDSKYNPNGSVNAIEGITSKNGQIIGKMGHSERWEDGLFQNIPGNKDQKLFESAVKYFTGK

SEQ ID NO: 4353 - protein, 1452 aa, Streptococcus agalactiae
ATGACATACGAAGTAAAATCTCTAAATGAAGAATGTGGAGTCTTTGGTATCTGGGGGTATCCTCAGGCAGCTCAAGTCACTTACTTTGGGCTTCATAGCCTTCAACATCGCGGTCAAGAAGGAGCTGGTATTATTTCAAATGATAATGGGAAACTCTATGGTTATCGAAATGTTGGGCTCCTTTCTGAAGTTTTTAAGAATCAATCTGAATTAGATAATTTAACTGGGAATGCGGCTATTGGACATGTTCGGTATGCTACTGCAGGTTCTGCAGATATTCGCAATATTCAGCCTTTTCTTTATAAATTTCATGATGGGCAATTTGCTTTATGTCATAATGGTAATTTGACAAATGCTATTTCCTCAAGGAAAGAATTAGAAAAGCAAGGTGCAATTTTCAATGCCTCCTCAGATACTGAAATTTTAATGCATTTGATTCGTCGAAGCCATAACCCAAGTTTTATGGGGAAGGTAAAAGAAGCTTTAAGCACTGTAAAGGGAGGTTTCGCCTATCTACTGATGACAGAAGATAAATTAATTGCTGCTCTTGACCCTAATGCCTTTCGTCCTTTGTCAATTGGACAAATGCAAAATGGTGCCTGGGTTATTTCCAGTGAGACCTGTGCTTTTGAGGTGGTAGGCGCAAAATGGGTTAGAGATGTTGAACCTGGTGAAGTTATTCTTATAGACGATAGTGGTATTCAATGTGATCGTTATACTGATGAAACGCAACTGGCAATTTGTTCGATGGAATATGTCTATTTTGCAAGGCCGGATTCAACTATACATGGTGTTAATGTTCATACGGCTCGAAAAAATATGGGAAAGCGTCTTGCACAAGAATTTAAACAGGATGCTGATATTGTAATTGGTGTCCCAAATTCGTCCTTATCGGCTGCTATGGGCTTTGCTGAAGAATCCGGATTACCAAATGAGATGGGCCTTGTAAAAAATCAGTATACGCAGCGAACCTTTATTCAACCGACACAAGAATTAAGGGAACAAGGTGTTCGAATGAAATTATCAGCGGTATCTGGTGTTGTCAAAGGAAAGCGCGTTGTTATGATTGATGACTCAATTGTAAGAGGAACGACTTCTAGAAGGATTGTAGGATTATTAAGAGAAGCAGGAGCTACTGAAGTACATGTTGCTATAGCTAGTCCAGAATTAAAGTATCCTTGTTTTTATGGAATTGATATTCAAACAAGACGAGAATTAATTTCAGCAAATCACGCTGTTGACGAAGTGTGTGATATTATTGGCGCAGATAGTCTAACTTATCTATCAATCGATGGGTTAATTAAATCAATTGGACTCGAAACAAAAGCACCAAATGGTGGTTTATGCGTAGCTTACTTTGATGGACATTATCCAACACCGCTTTATGATTATGAAGAAGAATACCTCAGAAGTTTAGAAGAAAAAACAAGTTTTTATATTCAAAAAGTGAAA

SEQ ID NO: 4354 - protein, 484 aa, Streptococcus agalactiae
MTYEVKSLNEECGVFGIWGYPQAAQVTYFGLHSLQHRGQEGAGIISNDNGKLYGYRNVGLLSEVFKNQSELDNLTGNAAIGHVRYATAGSADIRNIQPFLYKFHDGQFALCHNGNLTNAISSRKELEKQGAIFNASSDTEILMHLIRRSHNPSFMGKVKEALSTVKGGFAYLLMTEDKLIAALDPNAFRPLSIGQMQNGAWVISSETCAFEVVGAKWVRDVEPGEVILIDDSGIQCDRYTDETQLAICSMEYVYFARPDSTIHGVNVHTARKNMGKRLAQEFKQDADIVIGVPNSSLSAAMGFAEESGLPNEMGLVKNQYTQRTFIQPTQELREQGVRMKLSAVSGVVKGKRVVMIDDSIVRGTTSRRIVGLLREAGATEVHVAIASPELKYPCFYGIDIQTRRELISANHAVDEVCDIIGADSLTYLSIDGLIKSIGLETKAPNGGLCVAYFDGHYPTPLYDYEEEYLRSLEEKTSFYIQKVK

SEQ ID NO: 4355 - protein, 1020 aa, Streptococcus agalactiae
ATGTCTGAAAAAAATGCTTATGCCCAGTCTGGTGTTGATGTAGAAGCGGGCTACGAAGTTGTCGAACGTATCAAGAAACACGTTGCTCGCACAGAACGTGCTGGTGTCATGGGAGCTCTCGGTGGCTTTGGTGGTATGTTTGACCTGTCACAAACAGGTGTTAAAGAACCTGTCTTGATTTCAGGGACTGACGGTGTCGGAACTAAACTCATGCTTGCTATCAAGTACGACAAGCACGACACAATCGGTCAAGACTGTGTTGCCATGTGTGTCAACGATATTATTGCAGCAGGTGCTGAGCCCCTTTACTTCCTTGACTATGTCGCGACTGGTAAAAACGAACCTGCCAAATTGGAACAGGTTGTCGCTGGTGTTGCTGAAGGTTGTGTTCAAGCTAGCGCAGCTCTTATCGGTGGTGAAACGGCTGAGATGCCTGGTATGTATGGCGAAGATGATTATGACCTTGCAGGCTTTGCTGTTGGTGTGGCTGAAAAATCTCAAATCATCGACGGTTCAAAGGTAAAAGAAGGGGATATTCTTCTTGGACTTGCTTCAAGTGGTATCCATTCAAATGGTTATTCATTGGTACGTCGTGTCTTTGCTGACTACACTGGTGATGAGGTGCTTCCAGAGCTTGAAGGCAAACAACTCAAGGATGTCCTTCTTGAGCCAACTCGTATCTATGTTAAAGCAGCTCTGCCATTGATCAAGGAAGAACTAGTTAACGGTATCGCCCACATCACGGGTGGTGGTTTTATCGAGAATGTTCCTCGTATGTTTGCGGATGATTTGGCTGCGGAAATCGATGAGGATAAGGTGCCTGTACTTCCGATTTTCAAGGCGCTTGAAAAATATGGTGACATCAAGCACGAAGAAATGTTTGAAATCTTCAACATGGGTGTCGGTCTTATGCTGGATGTTAACCCTGAAAATGTTGACCGTGTCAAAGAACTTTTGGACGAACCAGTCTATGAAATCGGTCGTATCATCAAGAAAGCAGACGATAGTGTGGTGATTAAA

SEQ ID NO: 4356 - protein, 340 aa, Streptococcus agalactiae
MSEKNAYAQSGVDVEAGYEVVERIKKHVARTERAGVMGALGGFGGMFDLSQTGVKEPVLISGTDGVGTKLMLAIKYDKHDTIGQDCVAMCVNDIIAAGAEPLYFLDYVATGKNEPAKLEQVVAGVAEGCVQASAALIGGETAEMPGMYGEDDYDLAGFAVGVAEKSQIIDGSKVKEGDILLGLASSGIHSNGYSLVRRVFADYTGDEVLPELEGKQLKDVLLEPTRIYVKAALPLIKEELVNGIAHITGGGFIENVPRMFADDLAAEIDEDKVPVLPIFKALEKYGDIKHEEMFEIFNMGVGLMLDVNPENVDRVKELLDEPVYEIGRIIKKADDSVVIK

SEQ ID NO: 4357 - protein, 561 aa, Streptococcus agalactiae
ATGAAAATCGCTGTTTTTGCTTCTGGTAATGGTTCCAACTTTCAGGTCATAGCAGAGCAGTTTCAAGTTAGTTTTGTCTTTTCAGATCATCGTGATGCCTATGTTTTAGAGCGTGCTCAGAACTTAGCCATTCCAAGTTTCGCTTTTGAACTCAAGGAGTTTGAGAATAAGACGGCTTACGAGCAAGCCATTGTTGATTTGTTGGACAAACACGAGATTGATTTGGTCTGTCTGGCGGGCTATATGAAGATTGTTGGAGAAACCTTACTCTCAGCCTATGAGGGCCGTATCATCAATATTCACCCAGCCTACCTGCCTGAATTTCCAGGTACCCACGGTATCGAGGATGCTTGGGAAGCTGGTGTTGACCAGTCTGGCGTGACCATCCATTGGGTGGACTCTGGTGTGGATACCGGTCAGGTCATCCAACAAGTGCGCGTGCCACGCCTAGCAGATGATAGCCTAGAAAGCTTTGAAACCCGTATCCACGAAACTGAATATCAACTCTATCCAGCTGTTTTAGATAGCTTGGGAGTGGAGAGGAAAGAATGGAATACTAAA

SEQ ID NO: 4358 - protein, 187 aa, Streptococcus agalactiae
MKIAVFASGNGSNFQVIAEQFQVSFVFSDHRDAYVLERAQNLAIPSFAFELKEFENKTAYEQAIVDLLDKHEIDLVCLAGYMKIVGETLLSAYEGRIINIHPAYLPEFPGTHGIEDAWEAGVDQSGVTIHWVDSGVDTGQVIQQVRVPRLADDSLESFETRIHETEYQLYPAVLDSLGVERKEWNTK

SEQ ID NO: 4359 - protein, 618 aa, Streptococcus agalactiae
ATGACAAATAATAATAGTTTTAATGGAGGACATAATATTGGTTCAGGCAATTCAGCTGGTAGAGATCAAATAATTAATATTACTAATTCTCAAGCAGAGCAACCAGTCGCTAAATATGATGTTGAACCTATTTGGAGAAGTCCGATTACAATGGCAGTGTTGAGTTGGATTGGCTTCTTCACTTCGATAGGAAGTTTGTTACCCCTTTATAATTTTTTAAAACCGATTATAAGTTGGGCTAAAAATTCTTTTGATGGAAATATTCCCAATGTCCAGGGTAGTCAAATTTATTTGTTTATTTTTTTAGGTTTGTTTATTTTTTCAGTTGTTATTTTTTCTTTGCGAAGAATTACTAAGAGTCAAACTCGCTATCCTTTGGGTTTTAACTATGCAATCAGTGGTGTAGGTAAAAGATTGAATATTGAAAAGTTGCATATAACTCCTTGTCCAAAATGTGGTGGAAAATTGAAATACTACAATAAGCCATATGATTGGATTAATCATTATGACGAAAATGGAAATATCAAAAAGATCAAAATTACCAAGAGAGTGCCGGCTTTAGAATGTAAAAGAAATAGCGAGCATTTTTGGTATGTAGATTCAGCTGGAACGAAAATT

SEQ ID NO: 4360 - protein, 206 aa, Streptococcus agalactiae
MTNNNSFNGGHNIGSGNSAGRDQIINITNSQAEQPVAKYDVEPIWRSPITMAVLSWIGFFTSIGSLLPLYNFLKPIISWAKNSFDGNIPNVQGSQIYLFIFLGLFIFSVVIFSLRRITKSQTRYPLGFNYAISGVGKRLNIEKLHITPCPKCGGKLKYYNKPYDWINHYDENGNIKKIKITKRVPALECKRNSEHFWYVDSAGTKI

SEQ ID NO: 4361 - protein, 1155 aa, Streptococcus agalactiae
ATGACAAGAAAACGTGCTTTAATCTCAGTTTCTGATAAGTCAGGAATTATTGACTTTGCAAAAGAATTGAAAAACTTGGGTTGGGATATTATCTCAACTGGTGGGACTAAGGTTGCCCTTGACGATGCTGGTGTTGAGACCATTACCATCGACGATGTGACTGGATTCCCAGAAATGATGGACGGTCGTGTTAAGACCCTCCACCCAAACATTCACGGTGGGCTTCTGGCTCGTCGCGACGCTGACAGCCACCTTCAGGCTGCTAAGGACAACAATATTGAGTTGATTGACCTCGTGGTTGTCAACCTCTATCCCTTCAAGGAGACCATCCTTCGCCCAGACGTGACCTACGATTTGGCGGTGGAAAACATCGATATCGGCGGTCCATCAATGCTTCGCTCAGCCGCTAAAAACCACGCTAGCGTAACCGTTGTGGTTGACCCAGCGGACTATGCCACTGTTTTGGGAGAATTGGCTGACGCTGGTCAGACGACATTTGAAACTCGTCAACGCTTGGCAGCTAAGGTCTTCCGTCATACGGCATCCTATGACGCTTTGATTGCTGAGTACTTCACAGCTCAAGTGGGAGAGGCTAAGCCTGAAAAATTGACCATCACTTATGACCTTAAACAGGCTATGCGTTACGGAGAAAATCCACAACAAGACGCTGATTTCTACCAAAAAGCCTTACCAACAGACTACTCAATCGCTTCAGCTAAACAGCTCAATGGAAAAGAATTGTCCTTCAATAATATCCGTGATGCTGATGCAGCAATCCGTATTATCCGCGATTTCAAAGACAGTCCAACGGTTGTTGCCCTCAAACACATGAACCCATGTGGTATCGGACAAGCTGATGATATTGAGACAGCTTGGGATTACGCTTATGAAGCTGACCCAGTTTCAATCTTTGGTGGAATTGTTGTCCTTAACCGTGAAGTTGACGCAGCGACAGCTGAGAAGATGCACCCTATCTTCTTGGAAATCATCATCGCACCATCATACTCAGAAGAAGCGCTAGCTATTCTCACAAATAAAAAGAAAAACTTGCGTATCCTTGAGTTGCCGTTTGATGCCCAAGCTGCCAGCGAAGTGGAAGCTGAGTACACTGGCGTAGTTGGTGGACTTTTGGTGCAAAACCAAGAAATATGCGAC

SEQ ID NO: 4362 - protein, 385 aa, Streptococcus agalactiae
MTRKRALISVSDKSGIIDFAKELKNLGWDIISTGGTKVALDDAGVETITIDDVTGFPEMMDGRVKTLHPNIHGGLLARRDADSHLQAAKDNNIELIDLVVVNLYPFKETILRPDVTYDLAVENIDIGGPSMLRSAAKNHASVTVVVDPADYATVLGELADAGQTTFETRQRLAAKVFRHTASYDALIAEYFTAQVGEAKPEKLTITYDLKQAMRYGENPQQDADFYQKALPTDYSIASAKQLNGKELSFNNIRDADAAIRIIRDFKDSPTVVALKHMNPCGIGQADDIETAWDYAYEADPVSIFGGIVVLNREVDAATAEKMHPIFLEIIIAPSYSEEALAILTNKKKNLRILELPFDAQAASEVEAEYTGVVGGLLVQNQEICD

SEQ ID NO: 4363 - protein, 252 aa, Streptococcus agalactiae
ATGATTTATACAGTAACATTAAATCCATCGATTGATTTTATTGTTCGTCTAGATACACTATTGTTGGGTAGTGTTAACCGTATGACTAGCGATGATAAATATGTAAGTGGTAAAGGAATTAATGTTAGTCGCATATTTCTTGGTTTTGCACCAAAAGTCCACCAACTACGCCAGTGTACTCAGCTTCCACTTCGCTGGCAGCTTGGGCATCAAACGGCAACTCAAGGATACGCAAGTTTTTCTTTTTATTTG

SEQ ID NO: 4364 - protein, 84 aa, Streptococcus agalactiae
MIYTVTLNPSIDFIVRLDTLLLGSVNRMTSDDKYVSGKGINVSRIFLGFAPKVHQLRQCTQLPLRWQLGHQTATQGYASFSFYL

SEQ ID NO: 4365 - protein, 363 aa, Streptococcus agalactiae
TTGTTGGACAAACACGAGATTGATTTGGTCTGTCTGGCGGGCTATATGAAGATTGTTGGAGAAACCTTACTCTCAGCCTATGAGGGCCGTATCATCAATATTCACCCAGCCTACCTGCCTGAATTTCCAGGTACCCACGGTATCGAGGATGCTTGGGAAGCTGGTGTTGACCAGTCTGGCGTGACCATCCATTGGGTGGACTCTGGTGTGGATACCGGTCAGGTCATCCAACAAGTGCGCGTGCCACGCCTAGCAGATGATAGCCTAGAAAGCTTTGAAACCCGTATCCACGAAACTGAATATCAACTCTATCCAGCTGTTTTAGATAGCTTGGGAGTGGAGAGGAAAGAATGGAATACTAAA

SEQ ID NO: 4366 - protein, 121 aa, Streptococcus agalactiae
MLDKHEIDLVCLAGYMKIVGETLLSAYEGRIINIHPAYLPEFPGTHGIEDAWEAGVDQSGVTIHWVDSGVDTGQVIQQVRVPRLADDSLESFETRIHETEYQLYPAVLDSLGVERKEWNTK

SEQ ID NO: 4367 - protein, 618 aa, Streptococcus agalactiae; identical to SEQ ID NO: 4359

SEQ ID NO: 4368 - protein, 206 aa, Streptococcus agalactiae; identical to SEQ ID NO: 4360

SEQ ID NO: 4369 - protein, 1548 aa, Streptococcus agalactiae
ATGACAAGAAAACGTGCTTTAATCTCAGTTTCTGATAAGTCAGGAATTATTGACTTTGCAAAAGAATTGAAAAACTTGGGTTGGGATATTATCTCAACTGGTGGGACTAAGGTTGCCCTTGACGATGCTGGTGTTGAGACCATTACCATCGACGATGTGACTGGATTCCCAGAAATGATGGACGGTCGTGTTAAGACCCTCCACCCAAACATTCACGGTGGGCTTCTGGCTCGTCGCGACGCTGACAGCCACCTTCAGGCTGCTAAGGACAACAATATTGAGTTGATTGACCTCGTGGTTGTCAACCTCTATCCCTTCAAGGAGACCATCCTTCGCCCAGACGTGACCTACGATTTGGCGGTGGAAAACATCGATATCGGCGGTCCATCAATGCTTCGCTCAGCCGCTAAAAACCACGCTAGCGTAACCGTTGTGGTTGACCCAGCGGACTATGCCACTGTTTTGGGAGAATTGGCTGACGCTGGTCAGACGACATTTGAAACTCGTCAACGCTTGGCAGCTAAGGTCTTCCGTCATACGGCATCCTATGACGCTTTGATTGCTGAGTACTTCACAGCTCAAGTGGGAGAGGCTAAGCCTGAAAAATTGACCATCACTTATGACCTTAAACAGGCTATGCGTTACGGAGAAAATCCACAACAAGACGCTGATTTCTACCAAAAAGCCTTACCAACAGACTACTCAATCGCTTCAGCTAAACAGCTCAATGGAAAAGAATTGTCCTTCAATAATATCCGTGATGCTGATGCAGCAATCCGTATTATCCGCGATTTCAAAGACAGTCCAACGGTTGTTGCCCTCAAACACATGAACCCATGTGGTATCGGACAAGCTGATGATATTGAGACAGCTTGGGATTACGCTTATGAAGCTGACCCAGTTTCAATCTTTGGTGGAATTGTTGTCCTTAACCGTGAAGTTGACGCAGCGACAGCTGAGAAGATGCACCCTATCTTCTTGGAAATCATCATCGCACCATCATACTCAGAAGAAGCGCTAGCTATTCTCACAAATAAAAAGAAAAACTTGCGTATCCTTGAGTTGCCGTTTGATGCCCAAGCTGCCAGCGAAGTGGAAGCTGAGTACACTGGCGTAGTTGGTGGACTTTTGGTGCAAAACCAAGACGTTGTGGCTGAAAATCCATCTGACTGGCAAGTGGTGACAGACCGCCAGCCAACAGAACAAGAGGCGACTGCCCTTGAGTTTTCCTGGAAGGCTATCAAGTATGTTAAGTCTAACGGGATTATTATTACTAACGATCACATGACGCTTGGACTCGGTGCAGGTCAAACCAACCGTGTCGGCTCAGTCAAGATTGCTATCGAGCAGGCTAAGGACCACCTTGACGGTGCCGTTCTAGCATCAGATGCCTTCTTCCCATTTGCGGACAACATTGAAGAAATCGCTGCCGCAGGGATCAAAGCAATCATCCAACCAGGTGGTTCAGTTCGTGACCAAGAATCTATTGACGCCGCAAACAAACATGGCTTGACCATGATCTTCACAGGCGTGAGACATTTTAGACAT

SEQ ID NO: 4370 - protein, 516 aa, Streptococcus agalactiae
MTRKRALISVSDKSGIIDFAKELKNLGWDIISTGGTKVALDDAGVETITIDDVTGFPEMMDGRVKTLHPNIHGGLLARRDADSHLQAAKDNNIELIDLVVVNLYPFKETILRPDVTYDLAVENIDIGGPSMLRSAAKNHASVTVVVDPADYATVLGELADAGQTTFETRQRLAAKVFRHTASYDALIAEYFTAQVGEAKPEKLTITYDLKQAMRYGENPQQDADFYQKALPTDYSIASAKQLNGKELSFNNIRDADAAIRIIRDFKDSPTVVALKHMNPCGIGQADDIETAWDYAYEADPVSIFGGIVVLNREVDAATAEKMHPIFLEIIIAPSYSEEALAILTNKKKNLRILELPFDAQAASEVEAEYTGVVGGLLVQNQDVVAENPSDWQVVTDRQPTEQEATALEFSWKAIKYVKSNGIIITNDHMTLGLGAGQTNRVGSVKIAIEQAKDHLDGAVLASDAFFPFADNIEEIAAAGIKAIIQPGGSVRDQESIDAANKHGLTMIFTGVRHFRH

SEQ ID NO: 4371 - protein, 897 aa, Streptococcus agalactiae
TTGAATAAATGGTTAGTTAAGGCAAGTTCCTTAGTTGTTTTAGGTGGTATGGTTTTATCTGCGGGTTCCCGAGTTTTAGCGGATACTTATGTCCGTCCAATTGATAATGGTAGAATTACAACAGGTTTCAATGGTTATCCTGGACATTGTGGGGTGGATTATGCTGTTCCGACTGGAACGATTATTAGGGCAGTGGCAGATGGTACTGTGAAATTTGCAGGAGCTGGAGCCAACTTTTCTTGGATGACAGACTTAGCAGGAAATTGTGTCATGATTCAACATGCGGATGGAATGCATAGTGGTTACGCTCATATGTCACGTGTGGTGGCTAGGACTGGGGAAAAAGTCAAACAAGGAGATATCATCGGTTACGTAGGAGCAACTGGTATGGCGACGGGACCTCACCTTCATTTTGAATTTTTACCAGCTAACCCTAATTTTCAAAATGGTTTCCATGGACGTATCAATCCAACGTCACTAATTGCTAACGTTGCGACCTTTAGTGGAAAAACGCAAGCATCAGCTCCAAGCATTAAGCCATTACAATCAGCTCCTGTACAGAATCAATCTAGTAAATTAAAAGTGTATCGAGTAGATGAATTACAAAAGGTTAATGGTGTTTGGTTAGTCAAAAATAACACCCTAACGCCGACTGGGTTTGATTGGAACGATAATGGTATACCAGCATCAGAAATTGATGAGGTTGATGCTAATGGTAATTTGACAGCTGACCAGGTTCTTCAAAAAGGTGGTTACTTTATCTTTAATCCTAAAACTCTTAAGACTGTAGAAAAACCCATCCAAGGAACAGCTGGTTTAACTTGGGCTAAGACACGCTTTGCTAATGGTAGTTCAGTTTGGCTTCGCGTTGACAACAGTCAAGAACTGCTTTACAAA

SEQ ID NO: 4372 - protein, 299 aa, Streptococcus agalactiae
MNKWLVKASSLVVLGGMVLSAGSRVLADTYVRPIDNGRITTGFNGYPGHCGVDYAVPTGTIIRAVADGTVKFAGAGANFSWMTDLAGNCVMIQHADGMHSGYAHMSRVVARTGEKVKQGDIIGYVGATGMATGPHLHFEFLPANPNFQNGFHGRINPTSLIANVATFSGKTQASAPSIKPLQSAPVQNQSSKLKVYRVDELQKVNGVWLVKNNTLTPTGFDWNDNGIPASEIDEVDANGNLTADQVLQKGGYFIFNPKTLKTVEKPIQGTAGLTWAKTRFANGSSVWLRVDNSQELLYK

SEQ ID NO: 4373 - protein, 1302 aa, Streptococcus agalactiae
ATGAAAATGAATAAAAAGGTACTATTGACATCGACAATGGCAGCTTCGCTATTATCAGTCGCAAGTGTTCAAGCACAAGAAACAGATACGACGTGGACAGCACGTACTGTTTCAGAGGTAAAGGCTGATTTGGTAAAGCAAGACAATAAATCATCATATACTGTGAAATATGGTGATACACTAAGCGTTATTTCAGAAGCAATGTCAATTGATATGAATGTCTTAGCAAAAATTAATAACATTGCAGATATCAATCTTATTTATCCTGAGACAACACTGACAGTAACTTACGATCAGAAGAGTCATACTGCCACTTCAATGAAAATAGAAACACCAGCAACAAATGCTGCTGGTCAAACAACAGCTACTGTGGATTTGAAAACCAATCAAGTTTCTGTTGCAGACCAAAAAGTTTCTCTCAATACAATTTCGGAAGGTATGACACCAGAAGCAGCAACAACGATTGTTTCGCCAATGAAGACATATTCTTCTGCGCCAGCTTTGAAATCAAAAGAAGTATTAGCACAAGAGCAAGCTGTTAGTCAAGCAGCAGCTAATGAACAGGTATCAACAGCTCCTGTGAAGTCGATTACTTCAGAAGTTCCAGCAGCTAAAGAGGAAGTTAAACCAACTCAGACGTCAGTCAGTCAGTCAACAACAGTATCACCAGCTTCTGTTGCCGCTGAAACACCAGCTCCAGTAGCTAAAGTAGCACCGGTAAGAACTGTAGCAGCCCCTAGAGTGGCAAGTGTTAAAGTAGTCACTCCTAAAGTAGAAACTGGTGCATCACCAGAGCATGTATCAGCTCCAGCAGTTCCTGTGACTACGACTTCAACAGCTACAGACAGTAAGTTACAAGCGACTGAAGTTAAGAGCGTTCCGGTAGCACAAAAAGCTCCAACAGCAACACCGGTAGCACAACCAGCTTCAACAACAAATGCAGTAGCTGCACATCCTGAAAATGCAGGGCTCCAACCTCATGTTGCAGCTTATAAAGAAAAAGTAGCGTCAACTTATGGAGTTAATGAATTCAGTACATACCGTGCAGGTGATCCAGGTGATCATGGTAAAGGTTTAGCAGTCGACTTTATTGTAGGTAAAAACCAAGCACTTGGTAATGAAGTTGCACAGTACTCTACACAAAATATGGCAGCAAATAACATTTCATATGTTATCTGGCAACAAAAGTTTTACTCAAATACAAATAGTATTTATGGACCTGCTAATACTTGGAATGCAATGCCAGATCGTGGTGGCGTTACTGCCAACCATTATGACCATGTTCACGTATCATTTAACAAA

SEQ ID NO: 4374 - protein, 434 aa, Streptococcus agalactiae
MKMNKKVLLTSTMAASLLSVASVQAQETDTTWTARTVSEVKADLVKQDNKSSYTVKYGDTLSVISEAMSIDMNVLAKINNIADINLIYPETTLTVTYDQKSHTATSMKIETPATNAAGQTTATVDLKTNQVSVADQKVSLNTISEGMTPEAATTIVSPMKTYSSAPALKSKEVLAQEQAVSQAAANEQVSTAPVKSITSEVPAAKEEVKPTQTSVSQSTTVSPASVAAETPAPVAKVAPVRTVAAPRVASVKVVTPKVETGASPEHVSAPAVPVTTTSTATDSKLQATEVKSVPVAQKAPTATPVAQPASTTNAVAAHPENAGLQPHVAAYKEKVASTYGVNEFSTYRAGDPGDHGKGLAVDFIVGKNQALGNEVAQYSTQNMAANNISYVIWQQKFYSNTNSIYGPANTWNAMPDRGGVTANHYDHVHVSFNK

SEQ ID NO: 4375 - protein, 588 aa, Streptococcus agalactiae
ATGCCTCTTTTAGCTTTGGCAGCTCAAGAAGCAGGAGCGGTTGGTATAAGAGCCAATAGTGTCCGCGACATTAAGGAAATTCAAGAAGTTACTAATTTACCTATCATCGGCATTATTAAACGTGAATATCCTCCACAAGAACCATTTATCACTGCTACGATGACAGAGGTGGATCAATTAGCTAGTTTAGATATTGCAGTAATAGCCTTAGATTGTACACTTAGAGAGCGTCATGATGGTTTGAGTGTAGCTGAGTTTATTCAAAAGATAAAAGGGAAATATCCTGAACAGTTGCTAATGGCTGATATAAGTACTTTTGAAGAAGGTAAAAATGCTTTTGAAGCAGGAGTTGATTTTGTGGGTACAACTCTATCTGGATACACAGATTACAGCCGCCAAGAAGAAGGACCGGATATAGAACTCCTTAATAAGCTTTGTCAAGCCGGTATAGATGTGATTGCGGAAGGTAAAATTCATACTCCTAAGCAAGCTAATGAAATTAATCATATAGGTGTTGCAGGAATTGTAGTTGGTGGTGCTATCACTAGACCAAAAGAAATAGCGGAGCGTTTCATCTCAGGACTTAGT

SEQ ID NO: 4376 - protein, 196 aa, Streptococcus agalactiae
MPLLALAAQEAGAVGIRANSVRDIKEIQEVTNLPIIGIIKREYPPQEPFITATMTEVDQLASLDIAVIALDCTLRERHDGLSVAEFIQKIKGKYPEQLLMADISTFEEGKNAFEAGVDFVGTTLSGYTDYSRQEEGPDIELLNKLCQAGIDVIAEGKIHTPKQANEINHIGVAGIVVGGAITRPKEIAERFISGLS

SEQ ID NO: 4377 - protein, 1314 aa, Streptococcus agalactiae
ATGAGTATCAAAAAAAGTGTGATTGGTTTTTGCCTCGGAGCTGCAGCATTATCAATGTTTGCTTGTGTAGACAGTAGTCAATCTGTTATGGCTGCCGAGAAGGATAAAGTCGAAATTACGTGGTGGGCTTTTCCAACCTTTACTCAAGAAAAGGCTAAGGATGGAGTAGGTACTTATGAGAAAAAAGTCATCAAGGCTTTTGAAAAGAAAAATCCTAATATAAAAGTAAAACTAGAGACAATTGATTTCACATCTGGACCTGAAAAAATCACTACAGCAATTGAAGCAGGGACAGCACCTGATGTGCTTTTTGATGCACCAGGGCGAATTATTCAATATGGTAAAAATGGTAAATTAGCAGATTTGAATGATTTATTTACAGACCAATTTATTAAGGATGTCAATAATAAGAACATCATTCAAGCTTCTAAGTCTGGCGATAAAGCCTACATGTATCCAATAAGTTCTGCCCCATTTTATATGGCGTTCAATAAAAAAATGCTTAAAGATGCAGGAGTTTTGAAACTTGTAAAAGAAGGTTGGACTACTAGTGATTTTGAAAAAGTACTAAAAGCACTAAAAAATAAAGGCTATACACCAGGTTCATTCTTTGCAAACGGGCAAGGAGGAGATCAAGGACCACGTGCATTTTTTGCTAATCTTTATAGTGCTCCAATAACAGATAAAGAAGTAACAAAATATACCACTGACACTAAAAATTCTGTAAAATCAATGAAAAAAATAGTTGAATGGATTAAGAAAGGCTACTTGATGAATGGGTCTCAGTATGATGGCTCAGCTGACATTCAAAACTTTGCTAATGGACAAACTGCTTTCACTATCCTATGGGCTCCAGCTCAACCAAAAACTCAAGCAAAATTATTAGAGTCAAGTAAAGTGGATTACCTTGAAGTGCCATTCCCATCAGAAGATGGAAAACCAGATTTAGAATACCTTGTTAATGGTTTTGCGGTCTTTAATAATAAAGATGAAAACAAAGTAAAAGCCTCTAAGAAATTTATCACTTTTATTGCTGACGATAAAAAATGGGGACCAAAAGATGTTATACGTACAGGTGCTTTCCCAGTTAGAACATCATTTGGGGATCTTTATAAAGGTGATAAACGTATGATGAAGATTTCAAAATGGACTCAATATTATTCACCATATTACAACACTATCGATGGATTTTCTGAAATGAGAACCTTATGGTTCCCAATGGTTCAATCTGTATCCAATGGTGATGAAAAACCGGCAGATGCTTTGAAAGACTTTACTCAAAAAGCAAATGATACCATTAAAAAAGCAGCTAAA

SEQ ID NO: 4378 - protein, 438 aa, Streptococcus agalactiae
MSIKKSVIGFCLGAAALSMFACVDSSQSVMAAEKDKVEITWWAFPTFTQEKAKDGVGTYEKKVIKAFEKKNPNIKVKLETIDFTSGPEKITTAIEAGTAPDVLFDAPGRIIQYGKNGKLADLNDLFTDQFIKDVNNKNIIQASKSGDKAYMYPISSAPFYMAFNKKMLKDAGVLKLVKEGWTTSDFEKVLKALKNKGYTPGSFFANGQGGDQGPRAFFANLYSAPITDKEVTKYTTDTKNSVKSMKKIVEWIKKGYLMNGSQYDGSADIQNFANGQTAFTILWAPAQPKTQAKLLESSKVDYLEVPFPSEDGKPDLEYLVNGFAVFNNKDENKVKASKKFITFIADDKKWGPKDVIRTGAFPVRTSFGDLYKGDKRMMKISKWTQYYSPYYNTIDGFSEMRTLWFPMVQSVSNGDEKPADALKDFTQKANDTIKKAAK

SEQ ID NO: 4379 - protein, 885 aa, Streptococcus agalactiae
ATGCGTACTAATAAGTTAAAGATGAGGGAAACGATGATAGCTTATGCTTTTCTAGCGCCTATTCTCTTATTTTTCTTAATTTTTGTTTTTGCACCGATGGTTATGGGCTTTGTCACTAGTTTTTTTAATTATTCTATGACACAGTTCACTTTTATTGGGTTAGCTAATTACAATCGTATGTTTCATGATTCTATTTTCATGAAATCCTTGATAAATACAGTAATCATTGTGATTGGCTCTGTGCCAGTAGTGGTTTTCTTCTCACTTTTTGTTGCTGCCAATACTTATGAAAAAAATGTTTTTTCACGCTCTTTCTACCGTTGTGTCTTCTTCTTGCCAGTAGTAACTGGTAGTGTTGCAGTCACAGTTGTTTGGAAATGGATTTATGACCCTATGTCCGGAATTTTAAATTACATTTTGAAATCAGGCCATGTCATTGAACAGAATATTAGCTGGCTTGGTGATAAGCACTGGGCATTACTTGCTATTATTATTATTTTGCTAACGACTTCAGTTGGTCAACCTATTATTCTATATATTGCGGCGATGGGAAATATTGATAATTCTCTTTGCGAAGCTGCGCGTGTTGATGGAGCCAATGAAATGCAAGTTTTTTGGCAAATTAAATGGCCGAGTCTCTTACCAACTACACTCTATATTGCAGTTATAACAACAATTAATTCATTTCAATGTTTTGCCTTAATCCAGCTCCTAACATCTGGTGGACCAAATTATTCAACAAGCACTTTGATGTATTATCTTTATGAAAAAGCCTTTAAACTATCAGAATATGGCTATGCTAATACTATGGGAGTATTCCTAGCAGTAATGATTGCTTTAATAAGTTTTGCTCAATTTAAGATCTTAGGAAATGATGTGGAATAT

SEQ ID NO: 4380 - protein, 295 aa, Streptococcus agalactiae; identical to SEQ ID NO: 94

SEQ ID NO: 4381 - protein, 828 aa, Streptococcus agalactiae
ATGAAAAAGAAAACATTCAGTGCTTATAACTTTTTAACGGCTCTTATCCTTTGTCTTTTGACAGTGCTTTTTATCTTTCCATTTTATTGGATTATGACAGGAGCTTTTAAATCTCAACCTGATACTATTATCATCCCCCCACAATGGTGGCCCAAAGCACCGACCTTAGAAAATTTTAAAGCTTTAACTGTACAAAACCCAGCTTTGAGATGGCTTTGGAATAGTGTCTTTATCTCAATTATGACAATGTTCCTAGTTTGCTGTACATCGTCAATGGCAGGCTATGTTTTAGCTAAGAAACGATTTTACGGTCAAAAAATATTGTTCTCCCTTTTTATTGCTGCTATGGCTTTACCTAAACAAGTTGTTTTAGTGCCATTAGTTAGAATTATCAATTTTATGGGGATACATGATACCTTATGGGCGGTTATTTTACCTCTTGTTGGTTGGCCTTTTGGGGTCTTCTTGATGAAACAGTTTTCTGAAAATATTCCAACAGAATTACTGGAATCAGCTAAAATTGATGGTTGTGGAGAGATTCGAACATTTATTAATGTAGCATTTCCAATTGTCAAACCTGGATTTGCTGCCCTAGCTATTTTCACATTTATCAATACTTGGAATGACTATTTTATGCAATTAGTTATGCTAACTTCTAGAAATAATCTGACCATTTCTCTTGGGGTAGCTACTATGCAGGCTGAAATGGCAACAAACTATGGCTTAATTATGGCAGGTGCAGCCTTAGCTGCTGTTCCTATTGTGACAGTATTCTTAGTTTTCCAAAAATCCTTTACTCAGGGGATTACAATGGGAGCTGTTAAAGGA

SEQ ID NO: 4382 - protein, 276 aa, Streptococcus agalactiae; identical to SEQ ID NO: 96

SEQ ID NO: 4383 - protein, 441 aa, Streptococcus agalactiae
ATGATTTACGATCATTTATTGAATTTAACGCATTATAAAGATATTAATCCTAATTTAGATTTAGCGATTGATTATCTACTAAGTCATGATTTAAGGAATTTAGATATAGGCACCTATCATATTAGCCCAGAAGTGATACTCATGGTCCAATCAAATCAACTTAGTGAGTCATTTGATCATATTTTTGAATACCATAAAAAATACCTTGATATACATTATGTCATTGAAGGACATGAAGTTATCAAATTGGGAAAAGGTGATAAGGTAGAGGTAGAGGAATACTTAGGCGATATAGGATTTATCAAGTGCTCAGAAGAGACTTCTTTTGATTTGAGAGATAATTATATAGCCTTCTTTTTCCCAGAAGAAGCTCATCAGCCAAATGGTATGGGAAGTCTAGGTAATTATGTCAAAAAAGGGGTATTGAAAGTGTTAATGGCG

SEQ ID NO: 4384 - protein, 147 aa, Streptococcus agalactiae; identical to SEQ ID NO: 98

SEQ ID NO: 4385 - protein, 660 aa, Streptococcus agalactiae
GTGAAAAAAGCAAATCAATTAATAGCAGCGATTTTTGATGTTAACAACACCTTTATGCAAGGTTGCAATGTTGTTTTTGATCTAGCATTACTAAACCTTCTTTTTATGATAACTTGCCTACCATTGGTAACTATTGGTGCTGCTAAAATTAGTTTGTATCGAACGTTGTGGCAAAAATTAGAAGGTGATCAGACAAATCTTTTAATATTGTATATAAAACACCTAAAAAAAGAGTGGTTCCAAGGTATGCTTTTAGGTTTGGTTGAACTAAGTATTTTGGTTGTGATCATATTTGATTTAACAATTCTTCATTATCAAATAGGTTTCATTGTGTCTTTCTTGAAGATAACTTGTTACGCCTTTTTGTTATTGACTGTGATGACGAGCATATACCTATTTCCTATGGCTGCCCGCTACGAAATGTCTCTTTTAGATACCGTGAAAAAGAGCTTTATAATGGCATGTTTAAACTTGAAATGGACTGGTGTATTGATGTTTTTATTAATCATGACTTGGTTTATTATGGTGCAGTCTAGTCTCTTATTTATGCTTACAGTGTCAGCTATATTTATTTTTGCTTATACCGCCTTTGCTTACTTTAAAATTATTATTTTACAAAAACAATTTGCCTATTTCAGCAAACAACAAGGAGATTATCAA

SEQ ID NO: 4386 - protein, 220 aa, Streptococcus agalactiae
MKKANQLIAAIFDVNNTFMQGCNVVFDLALLNLLFMITCLPLVTIGAAKISLYRTLWQKLEGDQTNLLILYIKHLKKEWFQGMLLGLVELSILVVIIFDLTILHYQIGFIVSFLKITCYAFLLLTVMTSIYLFPMAARYEMSLLDTVKKSFIMACLNLKWTGVLMFLLIMTWFIMVQSSLLFMLTVSAIFIFAYTAFAYFKIIILQKQFAYFSKQQGDYQ

SEQ ID NO: 4387 - protein, 915 aa, Streptococcus agalactiae
ATGAAAGATTTACAAAAATATCAAGGAATTATTCCTGCATTTTATGCTTGCTATGATGATAAGGGTGATATTTGTCCCGAACGAGTAAAAGCCCTGACCAATTATTTTATTGATAAAGGTGTTCAAGGACTTTATGTTAATGGTTCATCAGGAGAATGTATTTACCAAAGTGTAGCAGATCGTAAACTTGTACTGGAAAATGTTATGTCCGTTGCTAAGGGTAAACTAACAGTAATAGCGCATGTGGCATGTAATAATACTAAGGATAGCGTAGAGTTGGCTATGCATGCTGAAGCTATAGGTGTTGATGCTATTGCAGCAATTCCACCAATTTATTTTCGATTACCAGAGTATGCCATAGCAGATTATTGGAATACTATTAGTCAAGCAGCACCACAAACTGATTTTATTATTTACAATATTCCTCAATTAGCAGGGGTTGCTTTGACATCGGATTTATATCGAAAAATGTTACAAAATCCGCAAGTAATTGGTGTTAAAAATTCTTCCATGCCAGTTCAAGACATTCAGAATTTTGTGGCTATTGGAGGAGAAAATCATATTGTTTTTAATGGTCCAGATGAACAATTTTTGGGTGGTCGTCTCATGGGAGCAGCTGCAGGTATTGGTGGTACCTATGGCGTAATGCCAGAATTATACTTGACTTTAAATCAGTTAATTGTTGATAAAGATTTAGAAAAAGCGCGTGAACTTCAATTTACAATTAACGATATTATCACAAAGCTTTGTTCAGGTCATGGTAATATGTATGCTGTGATTAAATCTGTATTGGAAATCAATGAGCAACTAACTATAGGTTCCGTTCGGTTACCTTTAGCATCTGTAACAGAAGAAGATAAACCTATTATTAAAGAGGCAGCAGAAATGATTAGACATGCTAAAAAACAGTTTTGT

SEQ ID NO: 4388 - protein, 305 aa, Streptococcus agalactiae
MKDLQKYQGIIPAFYACYDDKGDICPERVKALTNYFIDKGVQGLYVNGSSGECIYQSVADRKLVLENVMSVAKGKLTVIAHVACNNTKDSVELAMHAEAIGVDAIAAIPPIYFRLPEYAIADYWNTISQAAPQTDFIIYNIPQLAGVALTSDLYRKMLQNPQVIGVKNSSMPVQDIQNFVAIGGENHIVFNGPDEQFLGGRLMGAAAGIGGTYGVMPELYLTLNQLIVDKDLEKARELQFTINDIITKLCSGHGNMYAVIKSVLEINEQLTIGSVRLPLASVTEEDKPIIKEAAEMIRHAKKQFC

SEQ ID NO: 4389 - protein, 879 aa, Streptococcus agalactiae
ATGACCAGAACAGTAGCAATTGATATTGGCGGTACAATGATTAAGCATGGCATTGTGGATAATTTAGGTTGTATTGTTGAGGCAAGTGAGCTTGCCACAGAAGCCTACAAAGGTGGTCCAGGCATTTTACAAAAAGTTTGTCAAATTATCGATAACTATCTAACAGAAGGGAGCATTGATGGAATTGCTATCTCATCTGCTGGCATGGTAGATCCAGATGAAGGATGCATATTTTACTCTGGTCCTCAAATTCCAAACTATGCTGGGACACAATTTAAGAAAGTTTTAGAAGACACTTATCAAGTACGCACAGAAATTGAAAATGATGTTAATTGTGCAGGATTAGCTGAAGCTGTCTCAGGTAGTGCCAAAGATAGTTCAATAGCGCTTTGTCTTACTATTGGAACAGGTATTGGTGGTTGTCTGATTATTGATAAAACAGTTTTTCATGGCTTTAGTAATTCTGCTTGTGAAGTTGGATATATGCACCTTTCAGATGGTGATTTTCAAGATTTAGCCTCTACAACTGCACTGATTGCTGATGTTGCCAAAGCGCATGGAGATGAAATTAGCCGATGGGATGGACGTCGTATTTTTCAGGAGGCTAAAGAAGGTAATGAGAAATGTATTGCAAGTATAGACCGTATGATAAACTACCTTGGTCAAGGAATCGCTAATATGGTTTATGTGGTAAATCCTGAAAAAGTTGTTTTAGGTGGTGGAATCATGGCTCAAAAAGATTATTTACAAGATAAACTTAGTGAATCTTTGAAACGAAATCTTGTGACAAGTCTTGCTGAAAAAACAGCAATAGTTTTTGCACAACACGAAAACCAAGCTGGTATGCTAGGAGCTTACTACCATTTTAAAAACAGGGGG

SEQ ID NO: 4390 - protein, 293 aa, Streptococcus agalactiae
MTRTVAIDIGGTMIKHGIVDNLGCIVEASELATEAYKGGPGILQKVCQIIDNYLTEGSIDGIAISSAGMVDPDEGCIFYSGPQIPNYAGTQFKKVLEDTYQVRTEIENDVNCAGLAEAVSGSAKDSSIALCLTIGTGIGGCLIIDKTVFHGFSNSACEVGYMHLSDGDFQDLASTTALIADVAKAHGDEISRWDGRRIFQEAKEGNEKCIASIDRMINYLGQGIANMVYVVNPEKVVLGGGIMAQKDYLQDKLSESLKRNLVTSLAEKTAIVFAQHENQAGMLGAYYHFKNRG

SEQ ID NO: 4391 - protein, 975 aa, Streptococcus agalactiae
ATGATTGAAACAATGTCGCTAGATGACATGAGAGAATACCTAGGTCAAGACCAAATTCCCGAGGATTTTGATGACTTCTGGAAAAAACAAACAATGAAATATCAAGGGAATATTGAGTATCGTCTAGACAAAAAAGATTTCAATATTACTTTTGCACAAGCTTATGATCTTCATTTTAAAGGTAGCAATGACTCTATTGTCTATGCCAAATGTTTATTCCCTAAAACAAATAAACCCTATCCTGTAGTTTTTTATTTTCATGGCTACCAAAACCAAAGTCCTGACTGGAGTGACCAACTTAATTATGTAGCAGCAGGTTACGGCGTTGTTTCAATGGATGTTCGAGGTCAAGCTGGACAGTCTCAAGACAAGGGGCATTTTGATGGCATTACAGTTAAGGGCCAAATTGTGCGAGGAATGATCTCAGGACCAAATCATCTTTTTTATAAAGACATTTATCTTGATGTTTTCCAATTGATTGATATCATTGCTACATTAGAGAGTGTTGATAGTAATCAACTTTATAGTTATGGCTGGTCTCAAGGTGGAGCACTTGCTTTGATAGCTGCAGCTCTTAATCCCAAAATCGTCAAGACCGTTGCTGTTTACCCATTTTTGTCAGACTTTAGACGAGTATTAGATTTAGGGGGTGTCAGTGAGCCCTATGATGAACTCTTCCGCTATTTTAAATATAGTGATCCTTTTCATAAAACAGAGAATAGTGTGTTAAAAACTTTGGCTTATATTGATGTTAAAAATTTTGCACATAGGATTTCTTGCCCCGTTGTTTTACTAACAGCCTTGAAAGATGATATTTGTCCTCCATCAACTCAATTTGCCATTTTTAATCGTCTGACATCAACTAAAAAGCATCTTTTATTACCAGATTATGGACATGATCCAATGACAGTGCAAGTAAAAGACTATATTTTTGATCAACTGACAGGAAGTCAATTTACAAAGCAAAAAATCGAG

SEQ ID NO: 4392 - protein, 325 aa, Streptococcus agalactiae
MIETMSLDDMREYLGQDQIPEDFDDFWKKQTMKYQGNIEYRLDKKDFNITFAQAYDLHFKGSNDSIVYAKCLFPKTNKPYPVVFYFHGYQNQSPDWSDQLNYVAAGYGVVSMDVRGQAGQSQDKGHFDGITVKGQIVRGMISGPNHLFYKDIYLDVFQLIDIIATLESVDSNQLYSYGWSQGGALALIAAALNPKIVKTVAVYPFLSDFRRVLDLGGVSEPYDELFRYFKYSDPFHKTENSVLKTLAYIDVKNFAHRISCPVVLLTALKDDICPPSTQFAIFNRLTSTKKHLLLPDYGHDPMTVQVKDYIFDQLTGSQFTKQKIE

SEQ ID NO: 4393 - protein, 801 aa, Streptococcus agalactiae
ATGACTATTTATGACCAAATTGAGTCTGCTCTTGATTTAATGACTGATTTAGAACGTGAAATTGCTTGTTATTTTATGGGGCAACCCATTTCAAAAGACGCTCTTGCTTCTACCATTGTCACTAAGCAACTACACATTTCACAAGCAGCATTAACGCGTTTTGCTAAAAAATGTGGGTTTAAAGGCTATCGTGAATTTGTTTTTGAATATTTAAAAAGCCATGAGACCATCAGTCAACAATTATACGGTCTTCAAAATGACAACACTAAGAAAGTATTTATGAATTATCAAGAGATGGTTTCTAAATCCGCTGATATTATTGATGAAGAACAGCTTCTAGAAGTATCACATATGATTGAGCAAGCTGATCGTGTTTATTTTTATGGCAAAGGGAGCTCATCGCTAGTAGCTAAAGAATTTAAAATACGCCTTATGAGGCTAGGAGTGATTTGTGAGGCTCTGGATGATACAGATAGTTTCTCATGGACTAATAGTATTGTTAATGATAGATGCCTCGTCATTGCCTTCTCACTTTCTGGGAATACCAACTCTGTTATCGGTGCCTTAAAAATCGCAAGTAGTCACGGAGCTAAAACCGTTCTATTTACAAAACAACCTCACACAATTGACTATGCTTTTGACAAGATTATTCAGGTGGCTTCTGCTAGGCATTTAGACTACGGCAATAGAATTTCGCCTCAGATCCCAATGTTAATCATGGTAGATATTATCTATGCACAATTTTTAGATATTAATAAAATAGAAAAAGAGCGAATTTTTAGAGAAACCATTATTCAACGC

SEQ ID NO: 4394 - protein, 267 aa, Streptococcus agalactiae
MTIYDQIESALDLMTDLEREIACYFMGQPISKDALASTIVTKQLHISQAALTRFAKKCGFKGYREFVFEYLKSHETISQQLYGLQNDNTKKVFMNYQEMVSKSADIIDEEQLLEVSHMIEQADRVYFYGKGSSSLVAKEFKIRLMRLGVICEALDDTDSFSWTNSIVNDRCLVIAFSLSGNTNSVIGALKIASSHGAKTVLFTKQPHTIDYAFDKIIQVASARHLDYGNRISPQIPMLIMVDIIYAQFLDINKIEKERIFRETIIQR

SEQ ID NO: 4395 - protein, 1260 aa, Streptococcus agalactiae
ATGAAATTGCTTGTTGTTGGTTCTGGTGGTCGTGAGCATGCGATTGCTAAGAAGTTGTTAGCGTCTAAGGATGTGGATCAGGTTTTTGTGGCACCTGGTAATGATGGTATGACCTTGGATGGTCTAGACTTGGTAAATATCGGAATTTCCGAACATTCTAGGCTAATTGACTTTGCTAAGGAGAATGAGATCGCTTGGACCTTTATTGGTCCTGATGATGCGCTAGCGGCTGGTATCGTTGATGATTTCAACAGTGCTGGACTCAGAGCTTTTGGTCCAACCAAGGCAGCAGCGGAGCTAGAGTGGTCAAAAGACTTTGCCAAGGAAATCATGGTCAAATACAATGTTCCAACAGCAGCCTATGGCACATTTTCAGATTTTGAAAAAGCTAAAGCCTACATCGAAGAGCAGGGCGCACCAATCGTGGTCAAGGCTGACGGCTTGGCGTTAGGTAAGGGCGTGGTCGTGGCTGAAACCGTTGAACAGGCGGTAGAGGCGGCGCAAGAGATGCTTTTAGACAACAAGTTTGGCGACTCAGGAGCGCGCGTGGTTATCGAGGAGTTCTTGGATGGTGAAGAGTTCTCCCTCTTTGCCTTCGCTAATGGCGATAAGTTCTACATCATGCCGACAGCTCAGGATCACAAGCGTGCTTTTGACGGAGACAAGGGACCAAACACTGGCGGTATGGGTGCCTATGCGCCTGTTCCTCATCTGCCTCAGAGCGTGGTGGATACAGCGGTTGAGACCATCATTAAGCCTGTCCTTGAGGGCATGATTGCTGAAGGGCGTCCTTATCTAGGTGTCCTCTATGCGGGGCTTATCCTGACAGCTGATGGCCCTAAGGTTATCGAGTTCAACTCACGTTTCGGTGACCCTGAAACTCAGATTATCCTCCCTCGCCTAACTTCCGATTTTGCTCAGAACATCGACGACATCATGATGGGCATTGAGCCTTACATCACTTGGCAGAAGGACGGCGTGACTTTGGGCGTTGTCGTTGCCTCAGAAGGCTATCCGCTCGATTACGAGAAAGGTGTGCCACTGCCTGAAAAGACCGACGGCGACATCATCACCTACTATGCAGGAGCTAAGTTTGCGGAAAATAGCAAAGCACTGCTCTCAAACGGTGGACGTGTCTATATGCTCGTCACCACAGAAGGTAGCGTCAAAGCAGGGCAGGACAAAATCTATACCCAACTAGCCCAACAAGACACAACAGGCCTCTTCTACCGAAATGATATCGGAAGCAAAGCTATTAAG

SEQ ID NO: 4396 - protein, 420 aa, Streptococcus agalactiae
MKLLVVGSGGREHAIAKKLLASKDVDQVFVAPGNDGMTLDGLDLVNIGISEHSRLIDFAKENEIAWTFIGPDDALAAGIVDDFNSAGLRAFGPTKAAAELEWSKDFAKEIMVKYNVPTAAYGTFSDFEKAKAYIEEQGAPIVVKADGLALGKGVVVAETVEQAVEAAQEMLLDNKFGDSGARVVIEEFLDGEEFSLFAFANGDKFYIMPTAQDHKRAFDGDKGPNTGGMGAYAPVPHLPQSVVDTAVETIIKPVLEGMIAEGRPYLGVLYAGLILTADGPKVIEFNSRFGDPETQIILPRLTSDFAQNIDDIMMGIEPYITWQKDGVTLGVVVASEGYPLDYEKGVPLPEKTDGDIITYYAGAKFAENSKALLSNGGRVYMLVTTEGSVKAGQDKIYTQLAQQDTTGLFYRNDIGSKAIK

SEQ ID NO: 4397 - protein, 609 aa, Streptococcus agalactiae
GTGCTAAAGCACCTAGTCGCCCTGACGTGGGTGCATCTTCGAAATCAAAGATTTCGGACTTACCGCATATTTTTCTACGGAAATTTTCGACAAGTCGAAACGTCCCTTTGTATCTTATTTATGAAAACTCCAATTATTTCTATTATCATGGGCTCCAAATCCGACTGGGGAACCATGCAAAAAACGGCTGAAGTTCTAGATAACTTTGGCATTGCTTACGAGAAGAAAGTCGTCTCTGCCCACCGTGCGCCAGACCTCATGTTCAAGCATGCTGAGGAAGCACGTGGCCGTGGTATCAAAATCATCATCGCTGGAGCAGGTGGGGCAGCTCACTTGCCTGGTATGGTGGCAGCTAAGACAACACTACCTGTTATTGGTGTGCCGGTCAAAACACGTGCCCTTTCAGGTTTGGATTCGCTCTACTCTATTGTGCAGATGCCTGGTGGTGTGCCTGTGGCGACCATGGCTATCGGAGAAGCGGGAGCGACTAACGCTGCCTTGACAGCCCTCCGTATCCTCTCTATTGAGGACCAAAATCTGGCTGATGCGCTAGCTCATTTCCATGAGGAACAAGGAAAAATCGCGGAGGAGTCAAGCAATGAACTTATT

SEQ ID NO: 4398 - protein, 203 aa, Streptococcus agalactiae
MLKHLVALTWVHLRNQRFRTYRIFFYGNFRQVETSLCILFMKTPIISIIMGSKSDWGTMQKTAEVLDNFGIAYEKKVVSAHRAPDLMFKHAEEARGRGIKIIIAGAGGAAHLPGMVAAKTTLPVIGVPVKTRALSGLDSLYSIVQMPGGVPVATMAIGEAGATNAALTALRILSIEDQNLADALAHFHEEQGKIAEESSNELI

SEQ ID NO: 4399 - protein, 1071 aa, Streptococcus agalactiae
ATGAACTTATTTAAGACCATTGGGATTATCGGTGGTGGTCAGCTGGGGCAGATGATGGCAATTGCGGCTATCTACATGGGCCACAAGGTCATCACGCTGGATCCTGCTAGTGACTGCTCTGCCTCCCGCGTTAGCGAAGTGATTGTAGCGCCTTATGATGATGTTGAGGCTTTGGGACAATTAGCTGCGCGTTGCGATGTTTTGACCTATGAGTTTGAGAATGTTGATGCCGACGGTCTGGATGCCGTTGTATCGGCTGGTCAGCTACCGCAGGGGACTGATTTGCTCCGCATTTCTCAAAACCGTATCTTTGAAAAAGACTTTCTGGCAAATAAGGCTGGTGTGACTGTCGCTCCTTACAAGGTGGTGACGTCTAGCCTTGACCTAGAGGGGTTTGACTTGACCAAGACCTATGTCCTCAAGACAGCGACAGGTGGTTATGATGGTCATGGGCAAAAGGTTATCCGCTCAGCAGAAGACCTGCCAGAGGCGCAGCAATTAGCCAACTCAGCCGAGTGTGTCTTGGAAGAGTTTGTCGACTTTGATCTTGAAATCTCAGTCATCGTGTCTGGAAATGGTCAGGATGTGACGGTCTTTCCCGTTCAGGAAAATATCCACCGCAACAATATCCTATCAAAAACTATCGTACCAGCTCGCATCTCAGACCAACTAGCTGACAAGGCTAAGAAAATGGCGGTACAGATTGCCAAGGAACTCCAGCTATCAGGAACCCTCTGTGTGGAAATGTTTGTGACCGCAGATGATATCATCGTCAATGAAATCGCCCCACGCCCCCACAACTCAGGGCACTATTCTATCGAAGCCTGTGACTTTTCACAGTTTGACACTCATATCTTGGGTGTGCTGGGGCAACCTCTCCCACCAATCAAGCTCCATGCCCCAGCCGTCATGCTTAATGTCCTTGGACAACATGTCCAGCAGGCGATTGACTATGTTGCCGAAAACCCTAGCGCTCACCTCCACATATATGGTAAACTAGAAGCGAAACATAACCGCAAGATGGGACATGTGACGGTGTTTACGGAAGATGCGGATGAGGTGGAGGAGTTT

SEQ ID NO: 4400 - protein, 357 aa, Streptococcus agalactiae
MNLFKTIGIIGGGQLGQMMAIAAIYMGHKVITLDPASDCSASRVSEVIVAPYDDVEALGQLAARCDVLTYEFENVDADGLDAVVSAGQLPQGTDLLRISQNRIFEKDFLANKAGVTVAPYKVVTSSLDLEGFDLTKTYVLKTATGGYDGHGQKVIRSAEDLPEAQQLANSAECVLEEFVDFDLEISVIVSGNGQDVTVFPVQENIHRNNILSKTIVPARISDQLADKAKKMAVQIAKELQLSGTLCVEMFVTADDIIVNEIAPRPHNSGHYSIEACDFSQFDTHILGVLGQPLPPIKLHAPAVMLNVLGQHVQQAIDYVAENPSAHLHIYGKLEAKHNRKMGHVTVFTEDADEVEEF

SEQ ID NO: 4401 - protein, 255 aa, Streptococcus agalactiae
ATGATTAAAATCATTGTTCATGCTTTTATTAATAGTGGTAAAATAGGTGTTGTTGAAGTATTATTTGCGACATCAGATGATAAACTCTTGATGACTAAAATGTCAGAATTTCAGCGCCACTACCCAGGTGATTATTTAGCTATTTATGATTTACCATTAGATACAGATTTAAATAAACTGTCCCACTACCCATCAGTAGCAATTAGTAAAGAGGACTTTCATGAAGAAAAGGCTAATGAAACTAATGAGAATAGC

SEQ ID NO: 4402 - protein, 85 aa, Streptococcus agalactiae
MIKIIVHAFINSGKIGVVEVLFATSDDKLLMTKMSEFQRHYPGDYLAIYDLPLDTDLNKLSHYPSVAISKEDFHEEKANETNENS

SEQ ID NO: 4403 - protein, 1101 aa, Streptococcus agalactiae
TTGGCTTCTGGTGAAAAGGCTAAAATTCAGAGGAAAAAAAGCGGCGCATGGTCCATGACTTACAAAACACTAGACGGGAATGTTGTTGCGACTTTTCGTCCAATGTTTAAAAAAACAGGTTCCCATTGCTATATCTCAACTTCAAAAATGACAAAATCAGATGGTAATAACAATTTTTCTATCCAAATTTATTATAAAGGTACTTCAAATGTGAAAATCAAAATGTTTGATGATAACCCAGAGCATACTATGCAGTTTTCGAAGAAGAAATTTGCTAATAATATGTTAAATAGAGATGAATCTACTACCAACCATTCTTATGATAAGGTTTTGGAAGGAGATTTAACCCCATTTATGGGTCAATTTTCAAGTGATAGTTTTAACCAAACTATTGTAGATTCGGGTATGACTTATGGGGGATATGAACCGAAAGACTACTATGAGGGGCGAACAACAGTTTTTCCTGCAATAACGAAGACAGGCTATTGGAATGGCATAACGTCTCATGGTAGTTATGTTATAAAAAACGATGATTTACCCAAGAAAATTAAAAATTATTATGAAATACATGTGTATGGCGCTAATTCTGGAGCGATAAATAGTACAGGTAGTTTGAAACGTATATTCTATTTAGTTCCCCCAAAAGTGGAGGGGCCAGATGGAAAAGTATTATCAAAAAGACAAGTTTTTGAAGTAGGAGCTAATAATCAATTAATTTCTCTTTCCTATCAATCTCCGGATTGGTGGAAAAGATATAAAAAATCTGGATTAGAAAAAGATTTAGATGTTGACGCTATTTATAGAGGTGACTTTTCCTCGTTGAAAGGAACTTGGAGAAATGGTAAAGGGGAAGTTTTAACTATTAATGATGATGGCAGTACAGATGATGGTGAAAGAATTAGTATCGGGAGTACAGAAAAAAGTAGACTCCCCTCTGTAGGGATGAGTAGTGGTAATTTTGGGGTATCTGTTTATCTCTTCCAAATTGGTGTATCGAATCCTTATATAGAGAACGGGCATACATCGGACACGACACGACCGCGCTTAGCTATTGGGCTTAACCCTGGAGATTTTCCTACAGATGCCTATTACTATCGTTAC

SEQ ID NO: 4404 - protein, 367 aa, Streptococcus agalactiae
MASGEKAKIQRKKSGAWSMTYKTLDGNVVATFRPMFKKTGSHCYISTSKMTKSDGNNNFSIQIYYKGTSNVKIKMFDDNPEHTMQFSKKKFANNMLNRDESTTNHSYDKVLEGDLTPFMGQFSSDSFNQTIVDSGMTYGGYEPKDYYEGRTTVFPAITKTGYWNGITSHGSYVIKNDDLPKKIKNYYEIHVYGANSGAINSTGSLKRIFYLVPPKVEGPDGKVLSKRQVFEVGANNQLISLSYQSPDWWKRYKKSGLEKDLDVDAIYRGDFSSLKGTWRNGKGEVLTINDDGSTDDGERISIGSTEKSRLPSVGMSSGNFGVSVYLFQIGVSNPYIENGHTSDTTRPRLAIGLNPGDFPTDAYYYRY

SEQ ID NO: 4405 - protein, 1296 aa, Streptococcus agalactiae
ATGTTAGAACGTTATTCACGCCCTGAGATGGCGGCAATTTGGACAGAAGAAAATAAATATCGTGCTTGGTTGGAGGTTGAGATTTTGGCTGACGAGGCATGGGCTGAGTTGGGTGAAATTCCTAAGGAGGATGTGACTAAGATTCGTGAGAAGGCGGATTTTGACATTGACCGCATTCTTGAGATTGAGCAGGACACGCGTCACGATGTGGTGGCTTTCACTCGTGCGGTTTCTGAGACGCTTGGTGAGGAGCGCAAGTGGGTGCACTACGGTTTGACGTCGACTGACGTGGTGGACACTGCCTACGGTTACCTCTACAAGCAGGCTAACGACATTATCCGTCGTGACCTTGAGAATTTCACAAATATCGTGGCTGAGAAAGCTAAGGAGCACAAGTTCACCATCATGATGGGTCGTACCCACGGTGTTCACGCTGAGCCAACGACTTTCGGTCTTAAGTTGGCAACTTGGTACAGTGAGATGAAACGTAATATTGAGCGTTTTGAACATGCTGCCGCAGGAGTGGAAGCTGGTAAGATTTCAGGTGCTGTTGGTAACTTTGCCAACATCCCACCTTTTGTGGAAGAATATGTCTGTGACAAATTAGGCATCCATCCGCAAGAAATTTCAACACAGGTTCTTCCACGTGATCTCCACGCAGAATATTTTGCAGTGCTTGCAAGTATTGCAACATCTATCGAACGTATGGCGACAGAGATTCGTGGTCTGCAAAAATCAGAACAACGTGAAGTTGAAGAGTTCTTTGCCAAAGGTCAGAAAGGTAGCTCTGCTATGCCTCACAAACGCAACCCAATCGGTTCAGAGAACATGACAGGGCTAGCGCGCGTAATTCGTGGTCACATGGTGACGGCTTATGAGAACGTGGCACTTTGGCACGAGCGTGATATTTCGCACTCATCAGCTGAGCGTATCATCACACCAGACACAACTATCTTGATTGACTACATGCTCAACCGTTTTGGCAATATCGTTAAGAACTTGACTGTCTTCCCAGAAAATATGATGCGCAATATGGAATCAACTTTTGGTTTGATTTATAGTCAACGTGTTATGCTCAAATTGATTGAAAAAGGAATGACACGAGAAGAAGCTTATGACTTAGTTCAACCTAAGACAGCTTATTCCTGGGACAATCAAGTGGATTTCAAACCACTTTTAGAAGAAGACACCAAAGTTACCTCTTGTCTTACACAGGAAGAACTTGATGAACTATTTAATCCGATTTATTACACAAAACGTGTTGATGATATTTTTGAAAGGTTAGGATTAGAAAAA

SEQ ID NO: 4406 - protein, 432 aa, Streptococcus agalactiae
MLERYSRPEMAAIWTEENKYRAWLEVEILADEAWAELGEIPKEDVTKIREKADFDIDRILEIEQDTRHDVVAFTRAVSETLGEERKWVHYGLTSTDVVDTAYGYLYKQANDIIRRDLENFTNIVAEKAKEHKFTIMMGRTHGVHAEPTTFGLKLATWYSEMKRNIERFEHAAAGVEAGKISGAVGNFANIPPFVEEYVCDKLGIHPQEISTQVLPRDLHAEYFAVLASIATSIERMATEIRGLQKSEQREVEEFFAKGQKGSSAMPHKRNPIGSENMTGLARVIRGHMVTAYENVALWHERDISHSSAERIITPDTTILIDYMLNRFGNIVKNLTVFPENMMRNMESTFGLIYSQRVMLKLIEKGMTREEAYDLVQPKTAYSWDNQVDFKPLLEEDTKVTSCLTQEELDELFNPIYYTKRVDDIFERLGLEK

SEQ ID NO: 4407 - protein, 900 aa, Streptococcus agalactiae
ATGTTAAAACATTTTGGTAGTAAAGTAAGAAATTTGAGAGTAACTAGAAATATTACTCGCGAAGATTTTTGTGGTGATGAAACTGAGTTATCTGTAAGACAATTAGCTAGGATTGAAAGTGGACAGTCAATTCCAAACTTGACTAAAGCTCACTACATAGCTAAACAATTGAATGTAAAATTGGATATTTTAACAGGAGGAGAGAGCTTAGAATTACCTAAACGGTATAAAGAGTTGAAGTACAAATTGTTGCGTACCCCGACTTACGGAGATGCTAATAGACTTGCAGTTAGAGAAGCATATTTTGATGAAATCTATGAAGTATTTTATGAGGAGCTCCCAGAAGATGAAAGACTAATTATTGATTGTATGCAATCAAAATTAGATGTTCATTTTTCTGTTAATGATAATTTTGGAATCACTATTTTACATGACTACTTTGATCAAATTAAGAAAAAAAAGGAATATACCACAAATGATTTTGTTATGATAGATTTATATTTACTTTGCTTTTCTATTAACTATGGAATGAAGAGCTTGTATTCTTTAGAGAACTATCATTTTATTATGTCAAAATTGTTAGAGCAAGATAATTTACTTCCTGAGGATAATTTTCAATTGAACAACGTTTTATTAAATCATGTCGAATTAGCTTTTCAATTTAAGCAGAAAAAATATGTACAGCAAATTATTCATAGAAGTAATGCTATTATGACAGAAATCCATGATTTTCAAAAAAGACCAATACTAAGCTTAATAGAGTGGAAATATTTATTAATTATTGAAAAAGATAGAACAAAAGCAGAAACATGTTTTAAACAATCAATTCTATTTGCAGAGTTAATAGGTGATCTATATTTAAAAGGAAAATTAATAGAGGAGTGGAATAAAGATTTAACA

SEQ ID NO: 4408 - protein, 300 aa, Streptococcus agalactiae
MLKHFGSKVRNLRVTRNITREDFCGDETELSVRQLARIESGQSIPNLTKAHYIAKQLNVKLDILTGGESLELPKRYKELKYKLLRTPTYGDANRLAVREAYFDEIYEVFYEELPEDERLIIDCMQSKLDVHFSVNDNFGITILHDYFDQIKKKKEYTTNDFVMIDLYLLCFSINYGMKSLYSLENYHFIMSKLLEQDNLLPEDNFQLNNVLLNHVELAFQFKQKKYVQQIIHRSNAIMTEIHDFQKRPILSLIEWKYLLIIEKDRTKAETCFKQSILFAELIGDLYLKGKLIEEWNKDLT

SEQ ID NO: 4409 - protein, 954 aa, Streptococcus agalactiae
TTGGTAGAACGTACACTTCGTCCGCAGTATTTAAGAGAGTATATTGGACAAGATAAGGTTAAAGATCAGCTAAAAATATTTATTGAAGCTGCTAAATTGCGTGATGAGTCATTGGATCATGTGTTATTATTTGGCCCTCCTGGTTTAGGGAAAACAACCATGGCATTTGTAATTGCTAATGAGTTGGGTGTCAATCTCAAACAAACATCAGGTCCCGCAATTGAAAAATCAGGGGATTTAGTAGCCATTTTAAATGATTTAGAACCAGGTGATGTTCTTTTTATTGATGAAATTCATCGTATGCCGATGGCGGTTGAAGAGGTGCTCTATAGTGCAATGGAAGACTTTTATATTGACATTATGATTGGTGCAGGAGAAACTAGTAGAAGTGTTCATCTAGATTTGCCGCCCTTTACCTTAATTGGTGCAACGACACGTGCAGGTATGTTATCTAATCCCTTACGTGCTCGCTTTGGTATTACAGGGCATATGGAGTATTATGAAGAAAATGATCTGACAGAAATTATTGAGCGTACAGCAGACATTTTTGAAATGAAAATTACTTATGAAGCTGCTTCTGAATTAGCGCGTCGCAGTCGTGGAACGCCACGTATCGCTAACCGTTTATTGAAACGTGTTCGAGATTATGCTCAAATCATGGGAGATGGTTTGATAGATGACAATATTACAGATAAAGCATTAACGATGTTAGATGTTGATCACGAGGGGCTTGATTACGTCGATCAAAAAATCTTAAGAACCATGATTGAAATGTATAATGGAGGTCCTGTTGGTTTAGGAACTCTATCCGTTAATATTGCTGAAGAACGAGATACTGTTGAAGACATGTACGAACCTTATTTAATTCAAAAAGGTTTTATTATGCGTACCCGTACCGGTCGTGTAGCTACGGATAAGGCATATGAACATTTAGGTTATCAGCGATTTGATAAA

SEQ ID NO: 4410 - protein, 318 aa, Streptococcus agalactiae
MVERTLRPQYLREYIGQDKVKDQLKIFIEAAKLRDESLDHVLLFGPPGLGKTTMAFVIANELGVNLKQTSGPAIEKSGDLVAILNDLEPGDVLFIDEIHRMPMAVEEVLYSAMEDFYIDIMIGAGETSRSVHLDLPPFTLIGATTRAGMLSNPLRARFGITGHMEYYEENDLTEIIERTADIFEMKITYEAASELARRSRGTPRIANRLLKRVRDYAQIMGDGLIDDNITDKALTMLDVDHEGLDYVDQKILRTMIEMYNGGPVGLGTLSVNIAEERDTVEDMYEPYLIQKGFIMRTRTGRVATDKAYEHLGYQRFDK

SEQ ID NO: 4411 - protein, 435 aa, Streptococcus agalactiae
ATGAAGAAAGTCTGTTTTGTTTGTCTTGGAAATATCTGCCGTAGCCCGATGGCTGAGTTTGTTATGGCGAATTTAGATAAGGAGGATAGCCTCTCGGTTGAGAGTCGTGCGACTTCAACATGGGAGCATGGAAATCCTATACATAGGGGAACGCAAGCGATTTTGCAGCGTTATCAAATTCCTTACATTAACGATAAAGGGTCACAACCTATTTCTAAAGACGATTTAGCATATTTTGATTATATCATCGGTATGGATGAGCAAAATGTCAAGGATTTAAAAGCTCTATCACAAGGAACCTACGATGATAAGATTAGCCTTTTTTGTGATGGTGGTGTTCCTGATCCATGGTATACTGGTGATTTTGAGGAAACCTATCGTCTAGTCAATGATGGCTGTAAACAGTGGTTAACGCTAATAAATAATAGTAGAGAT

SEQ ID NO: 4412 - protein, 145 aa, Streptococcus agalactiae
MKKVCFVCLGNICRSPMAEFVMANLDKEDSLSVESRATSTWEHGNPIHRGTQAILQRYQIPYINDKGSQPISKDDLAYFDYIIGMDEQNVKDLKALSQGTYDDKISLFCDGGVPDPWYTGDFEETYRLVNDGCKQWLTLINNSRD

SEQ ID NO: 4413 - protein, 657 aa, Streptococcus agalactiae
GTGCTTTTTGATGCACCAGGGCGAATTATTCAATATGGTAAAAATGGTAAATTAGCAGATTTGAATGATTTATTTACAGACCAATTTATTAAGGATGTCAATAATAAGAACATCATTCAAGCTTCTAAGTCTGGCGATAAAGCCTACATGTATCCAATAAGTTCTGCCCCATTTTATATGGCGTTCAATAAAAAAATGCTTAAAGATGCAGGAGTTTTGAAACTTGTAAAAGAAGGTTGGACTACTAGTGATTTTGAAAAAGTACTAAAAGCACTAAAAAATAAAGGCTATACACCAGGTTCATTCTTTGCAAACGGGCAAGGAGGAGATCAAGGACCACGTGCATTTTTTGCTAATCTTTATAGTGCTCCAATAACAGATAAAGAAGTAACAAAATATACCACTGACACTAAAAATTCTGTAAAATCAATGAAAAAAATAGTTGAATGGATTAAGAAAGGCTACTTGATGAATGGGTCTCAGTATGATGGCTCAGCTGACATTCAAAACTTTGCTAATGGACAAACTGCTTTCACTATCCTATGGGCTCCAGCTCAACCAAAAACTCAAGCAAAATTATTAGAGTCAAGTAAAGTGGATTACCTTGAAGTGCCATTCCCATCAGAAGATGGAAAACCAGATTTAGAATACCCTTGG

SEQ ID NO: 4414 - protein, 219 aa, Streptococcus agalactiae
MLFDAPGRIIQYGKNGKLADLNDLFTDQFIKDVNNKNIIQASKSGDKAYMYPISSAPFYMAFNKKMLKDAGVLKLVKEGWTTSDFEKVLKALKNKGYTPGSFFANGQGGDQGPRAFFANLYSAPITDKEVTKYTTDTKNSVKSMKKIVEWIKKGYLMNGSQYDGSADIQNFANGQTAFTILWAPAQPKTQAKLLESSKVDYLEVPFPSEDGKPDLEYPW

SEQ ID NO: 4415 - protein, 530 aa, Streptococcus agalactiae
ATGAAAAAAATAGTTGAATGGATTAAGAAAGGCTACTTGATGAATGGGTCTCAGTATGATGGCTCAGCTGACATTCAAAACTTTGCTAATGGACAAACTGCTTTCACTATCCTATGGGCTCCAGCTCAACCAAAAACTCAAGCAAAATTATTAGAGTCAAGTAAAGTGGATTACCTTGAAGTGCCATTCCCATCAGAAGATGGAAAACCAGATTTAGAATACCTTGTTAATGGTTTTGCGGTCTTTAATAATAAAGATGAAAACAAAGTAAAAGCCTCTAAGAAATTTATCACTTTTATTGCTGACGATAAAAAATGGGGACCAAAAGATGTTATACGTACAGGTGCTTTCCCAGTTAGAACATCATTTGGGATCTTTATAAAGGTGATAAACGTATGATGAAGATTTCAAAATGGACTCAATATTATTCACCATATTACAACACTATCGATGGATTTTCTGAAATGAGAACCTTATGGTTCCCAATGGTTCAATCTGTATCCAATGGTGATGAAANNNNNTTAATTAAT

SEQ ID NO: 4416 - protein, 177 aa, Streptococcus agalactiae
  VARIANT 173, 174: Xaa = Any Amino Acid
MKKIVEWIKKGYLMNGSQYDGSADIQNFANGQTAFTILWAPAQPKTQAKLLESSKVDYLEVPFPSEDGKPDLEYLVNGFAVFNNKDENKVKASKKFITFIADDKKWGPKDVIRTGAFPVRTSFGDLYKGDKRMMKISKWTQYYSPYYNTIDGFSEMRTLWFPMVQSVSNGDEXXLIN

SEQ ID NO: 4417 - protein, 582 aa, Streptococcus agalactiae
ATGAAAAAAATAGTTGAATGGATTAAGAAAGGCTACTTGATGAATGGGTCTCAGTATGATGGCTCAGCTGACATTCAAAACTTTGCTAATGGACAAACTGCTTTCACTATCCTATGGGCTCCAGCTCAACCAAAAACTCAAGCAAAATTATTAGAGTCAAGTAAAGTGGATTACCTTGAAGTGCCATTCCCATCAGAAGATGGAAAACCAGATTTAGAATACCTTGTTAATGGTTTTGCGGTCTTTAATAATAAAGATGAAAACAAAGTAAAAGCCTCTAAGAAATTTATCACTTTTATTGCTGACGATAAAAAATGGGGACCAAAAGATGTTATACGTACAGGTGCTTTCCCAGTTAGAACATCATTTGGGGATCTTTATAAAGGTGATAAACGTATGATGAAGATTTCAAAATGGACTCAATATTATTCACCATATTACAACACTATCGATGGATTTTCTGAAATGAGAACCTTATGGTTCCCAATGGTTCAATCTGTATCCAATGGTGATGAAAAACCGGCAGATGCTTTGAAAGACTTTACTCAAAAAGCAAATGATACCATTAAAAAAGCAGCTAAA

SEQ ID NO: 4418 - protein, 194 aa, Streptococcus agalactiae
MKKIVEWIKKGYLMNGSQYDGSADIQNFANGQTAFTILWAPAQPKTQAKLLESSKVDYLEVPFPSEDGKPDLEYLVNGFAVFNNKDENKVKASKKFITFIADDKKWGPKDVIRTGAFPVRTSFGDLYKGDKRMMKISKWTQYYSPYYNTIDGFSEMRTLWFPMVQSVSNGDEKPADALKDFTQKANDTIKKAAK

SEQ ID NO: 4419 - protein, 120 aa, Streptococcus agalactiae
GTGCTTTTTATCTTTCCATTTATTGGGATTATGACAGGAGCTTTTAATTCTCACCCTGATACTATTATCATCCCCCCACAATGGTGGCCCAAAGCACCGACCTTAGAAAATTTAAAGCTT

SEQ ID NO: 4420 - protein, 40 aa, Streptococcus agalactiae
MLFIFPFIGIMTGAFNSHPDTIIIPPQWWPKAPTLENLKL

SEQ ID NO: 4421 - protein, 624 aa, Streptococcus agalactiae
TTGAGATGGCTTTGGAATAGTGTCTTTATCTCAATTATGACAATGTTCCTAGTTTGCTGTACATCGTCAATGGCAGGCTATGTTTTAGCTAAGAAACGATTTTACGGTCAAAAAATATTGTTCTCCCTTTTTATTGCTGCTATGGCTTTACCTAAACAAGTTGTTTTAGTGCCATTAGTTAGAATTATCAATTTTATGGGGATACATGATACCTTATGGGCGGTTATTTTACCTCTTGTTGGTTGGCCTTTTGGGGTCTTCTTGATGAAACAGTTTTCTGAAAATATTCCAACAGAATTACTGGAATCAGCTAAAATTGATGGTTGTGGAGAGATTCGAACATTTATTAATGTAGCATTTCCAATTGTCAAACCTGGATTTGCTGCCCTAGCTATTTTCACATTTATCAATACTTGGAATGACTATTTTATGCAATTAGTTATGCTAACTTCTAGAAATAATCTGACCATTTCTCTTGGGGTAGCTACTATGCAGGCTGAAATGGCAACAAACTATGGCTTAATTATGGCAGGTGCAGCCTTAGCTGCTGTTCCTATTGTGACAGTATTCTTAGTTTTCCAAAAATCCTTTACTCAGGGGATTACAATGGGAGCTGTTAAAGGA

SEQ ID NO: 4422 - protein, 208 aa, Streptococcus agalactiae
MRWLWNSVFISIMTMFLVCCTSSMAGYVLAKKRFYGQKILFSLFIAAMALPKQVVLVPLVRIINFMGIHDTLWAVILPLVGWPFGVFLMKQFSENIPTELLESAKIDGCGEIRTFINVAFPIVKPGFAALAIFTFINTWNDYFMQLVMLTSRNNLTISLGVATMQAEMATNYGLIMAGAALAAVPIVTVFLVFQKSFTQGITMGAVKG

SEQ ID NO: 4423 - protein, 333 aa, Streptococcus agalactiae
TTGATAATTATTGTTGTTTTTGGTTTATCAGTATTTACCTTAACGACTTCTAGTCAAGGAGTCCTTAGCTATGATGGCGGCAAGATAAAATATGTGGGCTCTATTGTTAATCACCATATGACTGGTAAAGGTAAATTAACCTATGAGAATGGGGATTACTATAAGGGCGATTTTGTAAATGGGGTCTTTGAAGGGAAAGGAACATTTGTTTCAGTTCATGGCTGGTCCTATACAGGTGACTTTAAAAAAGGTCAACCTGATGGACAAGGTCGCCTCAATGCTAAAAATAAGAAAGTCTATAAGGGGACATTTAAACAGGGGATTTATCAAAAA

SEQ ID NO: 4424 - protein, 111 aa, Streptococcus agalactiae
MIIIVVFGLSVFTLTTSSQGVLSYDGGKIKYVGSIVNHHMTGKGKLTYENGDYYKGDFVNGVFEGKGTFVSVHGWSYTGDFKKGQPDGQGRLNAKNKKVYKGTFKQGIYQK

SEQ ID NO: 4425 - protein, 352 aa, Streptococcus agalactiae
ATGAGAATAAAATGGTTTTCTTTGGTACGTATAACAGGACTACTACTTGTTTTACTTTACCATTTCTTTAAGAATAGTTTTCCAGGAGGATTTGTTGGCGTTGACATCTTCTTTACATTTTCTGGTTTTCTGATTACGGCCTTATTGATTGATGAATTTTCTAAAACGAAAAAAATTGATTTTGTTAGTTTTTGTCGTAGACGTTTTTACCGTATTTTCCCACCATTAGTATTGATGGTTTTGGTGACAATACCTTTTGTATTTCTGGTTAAAAGTGATTTTAGAGCAAGTATTGGCTCTCAAATTATGACTGCTTTAGGTTTTACCAGCAACTTACGATCTTGACTGGTGG

SEQ ID NO: 4426 - protein, 118 aa, Streptococcus agalactiae
MRIKWFSLVRITGLLLVLLYHFFKNSFPGGFVGVDIFFTFSGFLITALLIDEFSKTKKIDFVSFCRRRFYRIFPPLVLMVLVTIPFVFLVKSDFRASIGSQIMTALGFTSNFTNLDWW

SEQ ID NO: 4427 - protein, 1426 aa, Streptococcus agalactiae
TTGACTGGTGGTAACTACGAAAGTCAATTTATCCCTCACTTATTTGTGCATACCTGGAGTCTTTCTATTGAAGTCCATTTTTATGTTTTATGGGGCTTAACGGTATGGCTCTTATCGAAAAGATCAAAAGATCAAAAGCAATTGAGGGGGACTTTGTTCCTTATTTCCATGGGAGTTTTTGGAGTCAGCTTCCTTACCATGTTTGTTAAAGCCTTTTTCGTTGATAATTTTTCAACGATATATTTCTCTACATTATCACATATATTTCCGTTCTTTTTAGGAGCGATGGTGGCTACAATATCTGTATTCGAGAGATACCGGACGATTCAAGAAAAATATCAAAAATCTGACTTTGAAGCATAATTTAATCATGATGGGTAGTGCTTTTGCTGGTCTAATGATTTTAACTTTTGCACTTGATTTTATAATCGGCTAACATATCTTTTTGGTTTTGTTTTGTCTAGCATTTTTGCTAGTGTAATGATTTACAATGCACGTATTTTACACGAGCATACACCAGATATTTCAGAACCTTTCGTGATTACTTATCTTGCTGATATCAGTTACGGTATGTACCTTTTTCATTGGCCATTTTATATTATTTTTAGTCGTTTATCCCCAAACTGGATAGCTGTTATTTTGACAGTAGTATTATCAGCAGTCTTCTCAACATTATCGTTTTATATCATTGAACCTTTTATTTTAGGTAGAAAACCTAAATTCCTTGATTATGAATTTGACTTGTTGCCTTACAAAAAGTGGTTATTTATATCGGAGGGGTACTAACTCTTATTACTGTAGTGACAATGTTGACAGCTCCAAGTATAGGAAGTTTTGAGACAGAATTATTGCAGAATTCGTTACAACAAGCTAGAACAAATACTAACCGAACACATACACTAGCCGCAGGGGATGCAGGTGCTCTTAGTGATGTGACGGTAATCGGAGATTCAGTTGCCTTAAGGTCAAGTGCTGCTTTTAATAAATTGTTACCAGAAGTACAATTAGATGCTGCGGTGAGTCGTAATTTTAGTAAATCATTTGATATTTTTGAAAACCGTATTCAAAATAAAGCCTTGTCCAAAATTGTTGTTTTGGCAGTTGGTGTGAATTCATTAGATAACTACAAGACAGACTTGAGCCAATTTATTAAATCTTTGCCTAAGGGACACCGTTTGATTATAGTAACGCCTTATAATGCTAAAAATATGAGTCAAGTTACGACAGTGCGTGATTATGAACTCTCGCTAATGAAAAATATAATTACATAACGGTTGCTGACTGGTATAAGGTTGCGACAGAACATCCAGAAATCTGGGGAAATACAGATGGTGTGCATTATAGTGATAGCGATACTACAGGGGCTGATTTATATGTTAGTAACGTCAAAAAAGCTATTCAAAAATCAGCTCAACGAGCTGCAAAA

SEQ ID NO: 4428 - protein, 477 aa, Streptococcus agalactiae
  VARIANT 258: Xaa = Any Amino Acid
MTGGNYESQFIPHLFVHTWSLSIEVHFYVLWGLTVWLLSKRSKDQKQLRGTLFLISMGVFGVSFLTMFVKAFFVDNFSTIYFSTLSHIFPFFLGAMVATISGIREITGRFKKNIKNLTLKHNLIMMGSAFAGLMILTFALDFDNRLTYLFGFVLSSIFASVMIYNARILHEHTPDISEPFVITYLADISYGMYLFHWPFYIIFSRLSPNWIAVILTVVLSAVFSTLSFYIIEPFILGRKPKFLDYEFDLLPYKKWLFXIGGVLTLITVVTMLTAPSIGSFETELLQNSLQQARTNTNRTHTLAAGDAGALSDVTVIGDSVALRSSAAFNKLLPEVQLDAAVSRNFSKSFDIFENRIQNKALSKIVVLAVGVNSLDNYKTDLSQFIKSLPKGHRLIIVTPYNAKNMSQVTTVRDYELSLMKKYNYITVADWYKVATEHPEIWGNTDGVHYSDSDTTGADLYVSNVKKAIQKSAQRAAK

SEQ ID NO: 4429 - protein, 1533 aa, Streptococcus agalactiae
ATGACTGAAAAAACTAAAGCGGTAGAAACTACAGATGTTGCTCTTGCAATTGATACATTGGTTCAAAACGGTTTAAAAGCACTTGATGAGATGCGTCAACTTAATCAAGAACAAGTTGATTATATTGTAGCTAAAGCTTCTGTTGCAGCCTTGGATGCCCATGGAGAACTTGCTCTTCATGCAGTAGAAGAAACTGGTCGTGGTGTCTTTGAAGATAAAGCGACAAAAAATTTATTTGCATGTGAACACGTCGTTAACAACATGCGTCATACAAAGACAGTGGGAGTTATTGAAGAAGACGATGTCACAGGCTTGACATTAATTGCTGAACCAGTGGGAGTTGTCTGTGGTATTACGCCAACAACCAACCCGACTTCAACTGCTATTTTCAAGTCATTAATCTCTCTTAAAACACGTAATCCAATTATTTTTGCCTTCCACCCATCAGCACAAGAATCATCAGCACATGCAGCACGTATTGTTCGTGATGCTGCTATTGCTGCTGGAGCTCCTGAAAATTGTGTCCAATGGATTGAACAACCATCGATTGATGCAACTAATGCTTTGATGAACCATGATGGTATTGCCACTATCCTTGCGACAGGTGGTAATGCGATGGTTAAAGCTGCCTACTCATGTGGGAAACCTGCCCTTGGTGTAGGTGCTGGGAATGTTCCAGCTTATGTGAAAAATCAGCTAATATCCGACAAGCCGCTCACGATATTGTTATGTCTAAATCATTTGATAACGGATGGTATGTGCATCAGAACAGGCTGTTATTATTGATAAAGAAATTTATAAAGAATTTGTTGAAGAATTTAAATCTTATCATACTTATTTCGTTAATAAGAAAGAAAAAGCTCTTCTTGAAGAATTCTGTTTTGGTGCAAAAGCAAATAGCAAAAACTGTGCTGGTGCAAAATTAAATCCAAATATTGTTGGAAAATCAGCAGTTTGGATTGCTGAACAAGCTGGATTTACTGTTCCAGAAGGAACAAATATTCTTGCCGCAGAATGTACTGAAGTTAGTGAAAAAGAACCTTTGACACGTGAAAAACTATCACCTGTTATTGCCGTATTGAAAGCTGAATCTACAGAAGATGGTGTTGAAAAAGCTCGTCAAATGGTTGAGTTTAATGGTCTAGACACTCAGCTGCTATTCATACAAAAGATGCAGACTTAGCTCGTGAATTTGGAACTAAATTCGTGCTATCCGGTTATTTGGAATTCTCCTTCTACTTTTGGTGGTATTGGGGATGTTACAATGCTTTCTTGCCATCATTGACTCTTGGTTGTGGTTCGTATGGACGTAACTCAGTTGGTGATAACGTTAGTGCTATAAATCTCTTGAATATCAAAAAAGTAGGAAGACGTAGAAATAATATGCAATGGTTTAAAGTCCCTTCAAAAACATACTTCGAACGTGATTCTATTCAATATTTGCAAAAATGTCGCGATGTTGAACGTGTCATGATTGTTACAGATCACGCCATGGTTGAGCTTGGTTTCTTGGATCGTATCATTGAACAACTT

SEQ ID NO: 4430 - protein, 513 aa, Streptococcus agalactiae
  VARIANT 383, 402, 422: Xaa = Any Amino Acid
MTEKTKAVETTDVALAIDTLVQNGLKALDEMRQLNQEQVDYIVAKASVAALDAHGELALHAVEETGRGVFEDKATKNLFACEHVVNNMRHTKTVGVIEEDDVTGLTLIAEPVGVVCGITPTTNPTSTAIFKSLISLKTRNPIIFAFHPSAQESSAHAARIVRDAAIAAGAPENCVQWIEQPSIDATNALMNHDGIATILATGGNAMVKAAYSCGKPALGVGAGNVPAYVEKSANIRQAAHDIVMSKSFDNGMVCASEQAVIIDKEIYKEFVEEFKSYHTYFVNKKEKALLEEFCFGAKANSKNCAGAKLNPNIVGKSAVWIAEQAGFTVPEGTNILAAECTEVSEKEPLTREKLSPVIAVLKAESTEDGVEKARQMVEFNGLXHSAAIHTKDADLAREFGTXIRAIRVIWNSPSTFGGIGDXYNAFLPSLTLGCGSYGRNSVGDNVSAINLLNIKKVGRRRNNMQWFKVPSKTYFERDSIQYLQKCRDVERVMIVTDHAMVELGFLDRIIEQL

SEQ ID NO: 4431 - protein, 99 aa, Streptococcus agalactiae
ATGATTGTTACAGATCACGCCATGGTTGAGCTTGGTTTCTTGGATGGTATCATTGAACAACTTGATCTTCGTCGCAATAAAGTTGTTATCAGATTTTGC

SEQ ID NO: 4432 - protein, 33 aa, Streptococcus agalactiae
MIVTDHAMVELGFLDGIIEQLDLRRNKVVIRFC

SEQ ID NO: 4433 - protein, 1011 aa, Streptococcus agalactiae
ATGCGTACCTTCAAACCAGACACTATTATTGCATTAGGTGGTGGTTCTCCTATGGATGCTGCGAAAGTTATGTGGCTCTTCTATGAACAACCAGAAGTTGATTTCCATGACCTCGTTCAAAAATTCATGGATATCCGTAAACGTGCGTTCAAATTCCCAGAACTTGGTAAGAAAACAAAATTTGTTGCTATTCCAACAACTTCTGGAACAGGTTCTGAAGTGACACCATTTGCCGTTATCTCTGACAAAGCAAATAATCGTAAATATCCAATCGCTGATTATTCATTAACACCAACTGTAGCTATCGTTGATCCGGCCCTTGTTATGACTGTTCCTGGTTTTATTGCGGCTGATACGGGTATGGATGTATTGACACATGCAACAGAGGCTTATGTTTCACAGATGGCAAATGATTATACAGACGGACTTGCCCTTCAAGCAATTAAAATTGTGTTTGACTACTTAGAACGCTCAGTAAAAGATGCTGATTTTGAAGCACGTGAAAAGATGCACAATGCGTCAACTATGGCAGGTATGGCTTTCGCCAATGCATTCTTAGGTATTTCTCACTCAATGGCGCATAAAATTGGCGCACAATTCCATACCGTACACGGACGTACAAATGCAATTCTTTTGCCGTATGTTATCCGCTATAATGGAACTCGTCCAGCTAAAACAGCAACATGGCCTAAGTACAATTACTATCGTGCTGATGAAAAATATCAAGATATCGCTAAATTACTCGGCTTACCAGCAGCAACACCAGAAGAAGCTGTCGAATCATATGCAAAAGCTGTGTATGACCTTGGAACACGTTTAGGTATTAAGATGAATTTCCGCGACCAAGGCATTGATGAAAAAGAATGGAAAGAAAAATCTCGTGAACTAGCTTTCTTAGCATATGAAGATCAATGTTCACCAGCAAATCCACGCCTTCCGATGGTAGATCACATGCAAGAAATCATCGAAGATGCTTATTATGGTTATGAGGAACGTCCAGGACGTCGTAAG

SEQ ID NO: 4434 - protein, 337 aa, Streptococcus agalactiae
MRTFKPDTIIALGGGSPMDAAKVMWLFYEQPEVDFHDLVQKFMDIRKRAFKFPELGKKTKFVAIPTTSGTGSEVTPFAVISDKANNRKYPIADYSLTPTVAIVDPALVMTVPGFIAADTGMDVLTHATEAYVSQMANDYTDGLALQAIKIVFDYLERSVKDADFEAREKMHNASTMAGMAFANAFLGISHSMAHKIGAQFHTVHGRTNAILLPYVIRYNGTRPAKTATWPKYNYYRADEKYQDIAKLLGLPAATPEEAVESYAKAVYDLGTRLGIKMNFRDQGIDEKEWKEKSRELAFLAYEDQCSPANPRLPMVDHMQEIIEDAYYGYEERPGRRK

SEQ ID NO: 4435 - protein, 348 aa, Streptococcus agalactiae
GTGTGCCATACTGATTTACACGTTGCACATGGAGATTTCGGCCAGGTACCAGGACGCATTTTGGGTCACGAAGGCATTGGTATAGTAGAAGAAATTGGAGAAGGCGTAACGTCTTTGAGGGTTGGTGATCGTGTCTCTATTGCATGGTTCTTTGAAGGGTGCGGTCATTGCGAATACTGTACTACAGGACGTGAGACGCTTTGTCGTAGTGTTAAAAATGCTGGATACAGTGTTGATGGTGGTATGAGTGAATACGCTGTCGTTACCGCGGACTATGCGGTTAAGGTTCCTGAGGGATTAGATCCAGCTCAAGCATCATCAATCACTTGTGCTGGAGTAACAACATAC

SEQ ID NO: 4436 - protein, 116 aa, Streptococcus agalactiae
MCHTDLHVAHGDFGQVPGRILGHEGIGIVEEIGEGVTSLRVGDRVSIAWFFEGCGHCEYCTTGRETLCRSVKNAGYSVDGGMSEYAVVTADYAVKVPEGLDPAQASSITCAGVTTY

SEQ ID NO: 4437 - protein, 513 aa, Streptococcus agalactiae
GTGTATGGTGCAGGTGGTCTTGGAAACTTAGCAGTCCAATATGCAAAAAAGGTATTCAATGCTCATGTTGTAGCTGTTGATATTAACGCAGATAAACTTCAATTAGCTAAAGAGGTTGGAGCAGATTTGACAGTTAATGGCAAAGAAATAAAAGATGTTGCGGCCTATATTCAAGAAAAGACAGGCGGTTGTCATGGAGTGGTTGTGACTGCTGTTTCTAAAGTTGCGTTTAATCAGGCGATTGACAGCGTTCGTGCTGGAGGTACAGTGGTAGCTGTTGGTCTTCCATCAGAATATATGGAATTGAGTATTGTAAAAACAGTACTTGATGGGATTCGTGTGGTTGGTTCCTTAGTTGGAACTCGTAAAGATTTAGAAGAAGCCTTCGCATTTGGAGCAGAAGGTTTGGTAGTACCAGTGGTTGAAAAAGTGCCTGTGGATACAGCTCCTCAAGTATTCGATGAAATGGAAAGAGGATTGATTCAAGGACGTAAAGTTCTCGACTTTACAAAG

SEQ ID NO: 4438 - protein, 171 aa, Streptococcus agalactiae
MYGAGGLGNLAVQYAKKVFNAHVVAVDINADKLQLAKEVGADLTVNGKEIKDVAAYIQEKTGGCHGVVVTAVSKVAFNQAIDSVRAGGTVVAVGLPSEYMELSIVKTVLDGIRVVGSLVGTRKDLEEAFAFGAEGLVVPVVEKVPVDTAPQVFDEMERGLIQGRKVLDFTK

SEQ ID NO: 4439 - protein, 1488 aa, Streptococcus agalactiae
ATGGCAATAGTATATCAATCAACACGTGATGCTAGTAATAAAGTGACAGCTAGTCAAGCGATTCTAAAGGGATTAGCTGACGATGGAGGACTCTTTACCCCCATCACTTTTCCAAAAGTTGATTTAGATTTCACTAAACTTAAGGATGCTTCCTACCAAGAAGTGGCTAAACTCGTTTTGTCAGCTTTTTTTGATGATTTTACTGAACAAGAATTGGATTACTGTATTAGTCAAGCTTATGATACTAAATTTGATACAACTGAAATAGCCCCAATAGTAAAGATTGGAGACCGGTATCACCTTGAATTATTTCACGGTCCTACAATTGCATTTAAAGATATGGCTTTATCCATTCTTCCTTATTTGCTAACAACAGCAGCCAAAAAACAAGGGGTTGATGATAAAATCGTTATTTTAACAGCAACATCAGGTGACACTGGTAAGGCAGCGATGGCAGGTTTTGCAGATGTTCCAGGAACTGAGATTATTGTCTTTTATCCTAAAAATGGTGTTAGTTATATCCAAGAATTGCAGATGATAACACAAGCCGGACAAAATACCCATGTTGTTGCGATTGAAGGAAATTTTGATGATGCACAGACTTCAGTTAAAGAAATGTTCAATAATTCCCTTCTTCGATCAAAATTATCACAGCAGCATATGCAGTTATCATCAGCCAATTCAATGAACATGGGTCGCCTTGTTCCTCAAATTGTTTACTATATATATGCATATGCTCAATTAGTTAAGTCAAAGGAAATCTCAATTGGTCAACCAATTAATTTTAGTGTACCTACAGGAAATTTTGGTAATATTTTAGCAGCATATTATGCTAGTCAAATTGGATTACCTGTTACCAAACTCATTTGTGCCTCAAATGATAATAACGTTCTAACAGATTTTTTTAAGACACAAACCTACGATAAAAATCGAGAATTTAAAGTGACATCAAGTCCCTCTATGGATATTTTGGTCTCCTCTAATCTAGAACGATTAATCTTTCACCTTTTAGGCGATGATGCAGAAACGACTAAAAAATTAATGGAAGATTTAGTGACTACTGGGGAGTATGCCTTAGAGGCTAGGCAAGCAAATATTTTAGAGAGCTTTGTAGCGGGATTTGCGACAGAACAATTTGTTGAATTAGACATCAAACGTTTATTTGACCAGTATCAGTATATAGAGGATCCGCATACAGCTGTAGCATCAGCTGTTTATCAAGCTTATCAGACAGAAACTAAAGATCAAACTCCAACAGTAATTGTGTCAACAGCAAGTCCTTATAAGTTCCCGAGTGTTGTTACAAAGGCTATTACAAATAAAGAAGAGATACAGGATTTCGCTGCTATTTCAATCTTAAACGATTTGTCAGGTGTTTCTTTACCTAAGGCGGTTACAGATTTACAAAAGGCCGAAGTAATCCATAGAACGGTAGTACCTACCTCAAATATGCGAGAAACGGTTGAAGAGTGTCTAGGTTTGAAACAA

SEQ ID NO: 4440 - protein, 496 aa, Streptococcus agalactiae
MAIVYQSTRDASNKVTASQAILKGLADDGGLFTPITFPKVDLDFTKLKDASYQEVAKLVLSAFFDDFTEQELDYCISQAYDTKFDTTEIAPIVKIGDRYHLELFHGPTIAFKDMALSILPYLLTTAAKKQGVDDKIVILTATSGDTGKAAMAGFADVPGTEIIVFYPKNGVSYIQELQMITQAGQNTHVVAIEGNFDDAQTSVKEMFNNSLLRSKLSQQHMQLSSANSMNMGRLVPQIVYYIYAYAQLVKSKEISIGQPINFSVPTGNFGNILAAYYASQIGLPVTKLICASNDNNVLTDFFKTQTYDKNREFKVTSSPSMDILVSSNLERLIFHLLGDDAETTKKLMEDLVTTGEYALEARQANILESFVAGFATEQFVELDIKRLFDQYQYIEDPHTAVASAVYQAYQTETKDQTPTVIVSTASPYKFPSVVTKAITNKEEIQDFAAISILNDLSGVSLPKAVTDLQKAEVIHRTVVPTSNMRETVEECLGLKQ

SEQ ID NO: 4441 - protein, 1215 aa, Streptococcus agalactiae
ATGCTCATGGGAGTAGTTGATAATTATCTAGTGGCTCAGTTAGGTGTTGTAGCAGTATCAGGTGTTTCAGTTGCTAATAATATAATTACTGTTTATCAAGCTATTTTTATAGCTTTAGGGGCGAGTATAGCAAGTCTATTGGCCAAGTCGTTAGCAGGTAGTGAGAAGGATGATGCAATTTCAGTATGTTCTCAAGCCATTTTTCTAACATTACTGATAGGGGCAGTATTAGGAATTATCTCGATTGTTTTTGGACAAACTTTCTTTAAACTTTTAGGGACAACAAAAAGTGTCGCACAAGTTGGTGGTTTATATTTAGCAATTGTGGGTGGAGGTGTTGTTACTTTAGGAATGTTAACCACCCTAGGCTCATTTTTACGTGTGCAAGGGCAACCTCGTTTACCAATGTATGTCAGTATTTTTGTCAATTTCCTCAATGCAGTCTTATCAGGTTTTGCTATTTTTGAGTGGCGCTATGGTTTGGTCGGAGTGGCAGTATCAACTCTTATCGCAAGATTAATTGGTATTTGTATCCTTGCGAAGTATCTTCCTATTAAAAAGATAATAAAAAGAATGACTTGGAAAATCAGTGCACAAATTTGGAATCTTGCCTTACCATCAGCAGGAGAACGTCTGATGATGCGAGCTGGAGATGTTGTTATAGTTGCTATTGTTGTTCAGTTAGGTACAAATGTTGTAGCGGGAAATGCTATTGGAGAAACCTTGACACAATTTAATTATATGCCAGGGCTTGGCATCGCAACTGCTACAATTATCCTAACTGCAAAATATGTAGGACAAAAAAATAGAGAATCTATAGAAGAAACTATTCAAAGTTCGTATTATATTGGCTTAGTTCTAATGATCCTTATATCAAGTTTTATGCTTCTTGCAGGCAAACCATTGACACAGTTATTTACAAATAATCCTTCTGCCATTAAAGGAAGTTTGATTGTTATTTTGCTATCTTTCGTAGGAGTACCTGCTACTATTGGGATCTTGGTTTATACAGCAGCTTGGCAAGGATTAGGAAATGCTAAACTCCCATTTTACACAACGACTATAGGCATGTGGTTAATCAGAGTAGTTCTTGGTTATTTATTAGGAATAGTTTTTGAATTAGGTTTGCTTGGGGTTTGGATGGCTACGATAGCAGATAATATCTTTAGGTGGCTGTTTTTGAAAGTTCACTATCATCGATATATTCAAAAAATG

SEQ ID NO: 4442 - protein, 405 aa, Streptococcus agalactiae
MLMGVVDNYLVAQLGVVAVSGVSVANNIITVYQAIFIALGASIASLLAKSLAGSEKDDAISVCSQAIFLTLLIGAVLGIISIVFGQTFFKLLGTTKSVAQVGGLYLAIVGGGVVTLGMLTTLGSFLRVQGQPRLPMYVSIFVNFLNAVLSGFAIFEWRYGLVGVAVSTLIARLIGICILAKYLPIKKIIKRMTWKISAQIWNLALPSAGERLMMRAGDVVIVAIVVQLGTNVVAGNAIGETLTQFNYMPGLGIATATIILTAKYVGQKNRESIEETIQSSYYIGLVLMILISSFMLLAGKPLTQLFTNNPSAIKGSLIVILLSFVGVPATIGILVYTAAWQGLGNAKLPFYTTTIGMWLIRVVLGYLLGIVFELGLLGVWMATIADNIFRWLFLKVHYHRYIQKM

SEQ ID NO: 4443 - protein, 447 aa, Streptococcus agalactiae
TTGAGTAACAAACCTGCCAAAGGCCATGTTGCAAAAGCAAACACAGCTCCTAAGCGCTTCATTCGTGAATTCAAAAACATTGAAGGCTTAGAAGTTGGTGCAGAATTATCTGTAGAACAATTTGAAGCTGGTGATGTTGTTGACGTCACAGGGACATCAAAAGGTAAAGGTTTCCAAGGTGTTATCAAACGCCATGGTCAATCACGTGGTCCTATGGCTCACGGTTCTCGTTACCATCGCCGTCCAGGTTCTATGGGACCTGTTGCGCCTAACCGCGTTTTCAAAAACAAACGCTTGGCAGGACGTATGGGTGGTAACCGTGTAACAGTTCAAAACCTTGAAATTGTACAAGTTATCCCAGAGAAAAACGTTGTCCTCATCAAAGGTAACGTACCAGGTGCTAAGAAATCTCTTATCACTATCAAATCAGCAGTTAAAGCTGCTAAA

SEQ ID NO: 4444 - protein, 149 aa, Streptococcus agalactiae
MSNKPAKGHVAKANTAPKRFIREFKNIEGLEVGAELSVEQFEAGDVVDVTGTSKGKGFQGVIKRHGQSRGPMAHGSRYHRRPGSMGPVAPNRVFKNKRLAGRMGGNRVTVQNLEIVQVIPEKNVVLIKGNVPGAKKSLITIKSAVKAAK

SEQ ID NO: 4445 - protein, 621 aa, Streptococcus agalactiae
ATGGCAAACGTTAAACTATTTGACCAAACTGGTAAAGAAGTTAGCTCAGTTGAGCTTAACGAAGCTATCTTCGGTATTGAACCAAACGAATCAGTTGTTTTTGATGTTGTAATCAGCCAACGCGCTAGCCTTCGCCAAGGAACTCACGCGGTTAAAAACCGTTCAGCAGTATCTGGTGGTGGACGTAAACCATGGCGTCAAAAAGGAACTGGACGCGCTCGTCAAGGTTCTATCCGCTCACCACAATGGCGTGGTGGTGGTGTTGTCTTTGGACCAACTCCACGTTCATACGGCTACAAACTTCCACAAAAAGTTCGTCGCCTTGCGTTGAAATCAGTTTATTCAGCAAAAGTTGCTGAAGATAAATTTGTAGCTGTAGAAAACCTTTCATTTGCAGCTCCAAAAACTGCTGAATTTGCGTCAGTTCTTTCAGCACTTAGCATTGATTCAAAAGTACTTGTAATCCTTGAAGAAGGTAACGAATTTGCTGCACTTTCAGCGCGTAACCTTCCAAACGTTACAGTTGCTACTGCAACTACTGCAAGTGTTCTTGATATCGTTAACGCAGACAAACTTCTTGTTACTAAAGAAGCAATCTCTACAATCGAGGGGGTTCTTGCA

SEQ ID NO: 4446 - protein, 207 aa, Streptococcus agalactiae; identical to SEQ ID NO: 146

SEQ ID NO: 4447 - protein, 294 aa, Streptococcus agalactiae
ATGAATTTGTATGACGTAATCAAAAAACCTGTTATCACTGAGAAATCAATGGTTGCTCTTGAAGCAGGGAAATATACATTTGAAGTTGACACACGTGCACACAAACTTTTGATCAAACAAGCTGTTGAAGCTGCATTTGACGGAGTAAAAGTTGCAAGTGTAAACACTGTGACAGTTAAACCAAAAGCAAAACGTGTTGGTCGTTACACAGGTTTCACTTCAAAAACTAAAAAAGCTATCATCACTCTTACAGCTGATTCAAAAGCAATCGAGTTGTTTGCTGCTGAAGCTGAA

SEQ ID NO: 4448 - protein, 98 aa, Streptococcus agalactiae; identical to SEQ ID NO: 148

SEQ ID NO: 4449 - protein, 831 aa, Streptococcus agalactiae
GTGGGTATTAAAGTTTATAAACCAACGACAAATGGCCGTCGTAATATGACTTCTTTGGATTTTGCAGAAATCACTACAAACACTCCTGAGAAATCATTGCTTGTTTCACTAAAGAATAAAGCAGGACGTAACAACAACGGACGTATTACTGTTCGTCACCAAGGTGGTGGACACAAACGTCATTACCGTTTGATTGACTTCAAACGTAATAAAGATGGTGTTGAAGCAGTTGTTAAAACAATTGAATACGATCCAAATCGTACTGCAAATATTGCTCTTGTACACTATACTGATGGTGTTAAAGCTTACATTCTTGCGCCTAAAGGCCTTGAAGTAGGTCAACGCATTATTTCTGGTCCAGAAGCAGATATCAAAGTTGGTAACGCACTTCCACTTGCTAACATTCCAGTCGGTACAGTTATCCATAATATTGAATTGCAACCAGGTAAAGGTGCTGAATTGATTCGTGCCGCGGGTGCTTCTGCTCAAGTACTTGGTCAAGAAGGTAAATATGTTCTTGTTCGCCTTCAATCAGGTGAAGTACGTATGATCCTTGGTACTTGCCGTGCAACAATTGGTACTGTTGGTAATGAACAACAATCACTTGTTAACATTGGTAAAGCAGGACGTAATCGTTGGAAAGGTGTTCGCCCTACAGTTCGTGGTTCTGTAATGAACCCTAATGATCACCCACACGGTGGTGGTGAAGGTAAAGCACCAGTTGGTCGTAAAGCACCATCTACTCCATGGGGTAAACCTGCACTTGGACTTAAAACTCGTAATAAGAAAGCTAAATCAGACAAACTTATTGTTCGTCGTCGTAACCAAAAA

SEQ ID NO: 4450 - protein, 277 aa, Streptococcus agalactiae; identical to SEQ ID NO: 150

SEQ ID NO: 4451 - protein, 276 aa, Streptococcus agalactiae
ATGGGACGTAGTCTTAAAAAAGGACCTTTCGTCGACGAGCATTTAATGAAAAAAGTTGAAGCTCAAGCAAATGACGAAAAGAAAAAAGTAATCAAAACTTGGTCACGTCGTTCAACGATTTTCCCAAGTTTCATCGGATACACAATCGCAGTTTATGATGGACGTAAACATGTTCCTGTTTATATCCAAGAGGACATGGTAGGTCACAAACTTGGTGAATTTGCACCAACACGTACTTACAAAGGTCACGCAGCTGACGACAAGAAAACACGTCGT

SEQ ID NO: 4452 - protein, 92 aa, Streptococcus agalactiae; identical to SEQ ID NO: 152

SEQ ID NO: 4453 - protein, 342 aa, Streptococcus agalactiae
ATGGCAGAAATTACTTCAGCTAAAGCAATGGCTCGTACAGTGCGTGTTTCACCTCGTAAAACACGTTTAGTACTTGATCTTATCCGTGGTAAGAATGTTGCTGACGCAATCGCAATCTTAAAATTCACTCCAAACAAAGCAGCTCGTGTTATTGAGAAAACTCTTAACTCAGCAATTGCAAATGCAGAGAACAACTTTGGTTTGGAAAAAGCAAACTTGGTAGTATCTGAAACATTCGCTAACGAAGGACCAACAATGAAACGTTTCCGTCCACGTGCGAAAGGTTCAGCTTCACCAATCAACAAACGTACAACTCACGTAACTGTAGTTGTATCAGAAAAA

SEQ ID NO: 4454 - protein, 114 aa, Streptococcus agalactiae; identical to SEQ ID NO: 154

SEQ ID NO: 4455 - protein, 624 aa, Streptococcus agalactiae
ATGCGTGTCGGAATCATCCGTGACTGGGATGCGAAATGGTATGCTGAAAAAGAATACGCGGATTACCTTCATGAAGATCTTGCAATCCGTAAATTCATTAATAAAGAATTAGCTGACGCATCAGTTTCAACTATTGAAATTGAACGTGCAGTAAACAAAGTTATTGTTTCACTTCACACTGCTAAACCAGGTATGGTTATCGGTAAAGGTGGAGCAAATGTTGACGCTCTTCGTGGTCAACTTAACAAATTAACTGGAAAACAAGTACACATCAACATCATTGAAATCAAACAACCTGATTTAGATGCTCACCTTGTTGGTGAAAATATTGCTCGTCAATTAGAGCAACGTGTTGCTTTCCGTCGTGCTCAAAAACAAGCAATCCAACGTACAATGCGTGCAGGAGCTAAAGGTATTAAAACTCAAGTTTCTGGTCGTTTGAACGGTGCTGATATCGCTCGTGCTGAAGGTTATTCAGAAGGAACTGTTCCACTTCACACGCTTCGTGCTGATATCGACTATGCTTGGGAAGAAGCTGACACAACTTATGGTAAACTTGGCGTTAAAGTTTGGATTTACCGTGGAGAAGTTCTTCCAGCTCGTAAAAACACTAAAGGAGGCAAA

SEQ ID NO: 4456 - protein, 208 aa, Streptococcus agalactiae; identical to SEQ ID NO: 156

SEQ ID NO: 4457 - protein, 411 aa, Streptococcus agalactiae
ATGTTAGTACCTAAACGTGTTAAACACCGTCGCGAATTCCGTGGAAAAATGCGCGGTGAGGCTAAAGGTGGTAAAGAAGTTTCATTCGGTGAATACGGACTTCAAGCTACAACTAGCCACTGGATTACAAACCGTCAAATCGAAGCTGCCCGTATTGCGATGACTCGTTACATGAAACGTGGTGGTAAAGTTTGGATTAAAATCTTCCCACACAAATCATACACTGCAAAAGCTATCGGTGTACGTATGGGTTCTGGTAAAGGGGCACCTGAAGGTTGGGTAGCACCAGTTAAACGTGGTAAAGTGATGTTTGAAATTGCTGGTGTTTCTGAAGAAGTTGCACGTGAAGCATTACGTCTTGCTAGCCACAAATTACCAGTTAAATGCAAATTCGTAAAACGTGAAGCAGAA

SEQ ID NO: 4458 - protein, 137 aa, Streptococcus agalactiae; identical to SEQ ID NO: 158

SEQ ID NO: 4459 - protein, 255 aa, Streptococcus agalactiae
ATGTCTTCTCCTTATTCTGCTTCACGTTTTACGAATTTGCATTTAACTGGTAATTTGTGGCTAGCAAGACGTAATGCTTCACGTGCAACTTCTTCAGAAACACCAGCAATTTCAAACATCACTTTACCACGTTTAACTGGTGCTACCCAACCTTCAGGTGCCCCTTTACCAGAACCCATACGTACACCGATAGCTTTTGCAGTGTATGATTTGTGTGGGAAGATTTTAATCCAAACTTTACCACCACGTTTCATG

SEQ ID NO: 4460 - protein, 85 aa, Streptococcus agalactiae
MSSPYSASRFTNLHLTGNLWLARRNASRATSSETPAISNITLPRLTGATQPSGAPLPEPIRTPIAFAVYDLCGKILIQTLPPRFM

SEQ ID NO: 4461 - protein, 204 aa, Streptococcus agalactiae
ATGAAACTTCAAGAAATTAAAGATTTTGTTAAAGAGCTTCGTGGATTGTCTCAAGAAGAACTTGCTAAGAAAGAAAACGAACTCAAAAAAGAATTGTTTGATCTTCGTTTCCAAGCTGCAGCAGGTCAACTTGAAAAGACTGCTCGCCTTGACGAAGTTAAGAAACAAATTGCACGTGTTAAAACTGTGCAATCAGAAATGAAA

SEQ ID NO: 4462 - protein, 68 aa, Streptococcus agalactiae; identical to SEQ ID NO: 160

SEQ ID NO: 4463 - protein, 258 aa, Streptococcus agalactiae
ATGGAACGTAATCAACGTAAAACTCTTTACGGACGCGTAGTGTCTGACAAGATGGACAAAACAATCACAGTTGTAGTTGAAACTAAACGTAACCACCCAGTCTATGGTAAACGTATCAACTATTCTAAAAAATATAAAGCACATGATGAAAACAACGTTGCTAAAGAAGGCGATATCGTTCGTATCATGGAAACTCGCCCACTTTCAGCTACAAAACGTTTCCGTCTTGTGGAAGTAGTGGAAAAAGCTGTTATTATC

SEQ ID NO: 4464 - protein, 86 aa, Streptococcus agalactiae; identical to SEQ ID NO: 162

SEQ ID NO: 4465 - protein, 366 aa, Streptococcus agalactiae
ATGATTCAACAAGAAACTCGCTTGAAAGTTGCTGATAATAGCGGTGCTCGTGAGATCTTGACTATCAAAGTACTTGGTGGTTCAGGACGTAAATTCGCTAACATCGGTGACGTAATCGTTGCTTCTGTAAAACAAGCTACTCCTGGTGGAGCAGTTAAAAAAGGTGATGTGGTTAAAGCTGTTATCGTTCGTACAAAAACTGGTGCACGCCGCCCAGACGGTTCATACATCAAATTTGACGACAATGCTGCTGTAATCATCCGTGACGATAAAACTCCTCGCGGAACTCGTATCTTTGGCCCAGTTGCACGTGAATTGCGTGAAGGTGGCTACATGAAGATCGTTTCATTGGCACCAGAAGTACTT

SEQ ID NO: 4466 - protein, 122 aa, Streptococcus agalactiae; identical to SEQ ID NO: 164

SEQ ID NO: 4467 - protein, 303 aa, Streptococcus agalactiae
ATGTTTGTAAAAAAAGGCGACAAAGTTCGCGTTATTGCTGGTAAGGACAAAGGCACTGAAGCTGTAGTTCTTAAAGCTCTTCCAAAAGTAAACAAAGTTGTTGTTGAAGGCGTAGCCCTCATCAAGAAACATCAAAAACCAAATAACGAAAACCCTCAAGGCGCTATCGTTGAAAAAGAAGCTCCAATCCATGTGTCAAACGTTCAAGTTCTTGATAAAAATGGTGTAGCAGGACGTGTTGGTTACAAAGTTGTTGACGGCAAAAAAGTTCGTTACAACAAAAAATCAGGCGAAGTGCTTGAT

SEQ ID NO: 4468 - protein, 101 aa, Streptococcus agalactiae; identical to SEQ ID NO: 166

SEQ ID NO: 4469 - protein, 540 aa, Streptococcus agalactiae
ATGGCAAATCGCTTAAAAGAAAAATATACTAATGAAGTTGTTCCTGCGTTGACAGAAAAATTTAACTATTCATCTGTTATGGCTGTGCCAAAAGTTGAGAAAATCGTTCTTAACATGGGTGTTGGTGATGCTGTATCAAACGCTAAAAATCTTGAGAAAGCTGCTGCTGAGTTAGCACTTATTTCAGGTCAAAAACCACTTATTACTAAAGCTAAGAAATCAATCGCTGGCTTCCGTCTTCGTGAAGGTGTAGCGATCGGTGCAAAAGTTACCCTCCGTGGTGAACGTATGTACGAATTCTTGGATAAATTAGTTTCTGTTTCACTTCCACGTGTACGTGACTTCCATGGTGTTCCAACGAAATCATTTGATGGACGTGGAAACTACACTCTTGGAGTTAAAGAACAATTGATCTTCCCAGAAATCAACTTTGATGACGTTGATAAAGTACGTGGTCTTGATATCGTTATCGTTACTACTGCTAACACTGATGAAGAGTCACGTGAATTGCTAAAAGGCCTTGGAATGCCTTTTGCAAAG

SEQ ID NO: 4470 - protein, 180 aa, Streptococcus agalactiae; identical to SEQ ID NO: 168

SEQ ID NO: 4471 - protein, 396 aa, Streptococcus agalactiae
ATGGTTATGACTGACCCAATTGCAGACTTTTTAACTCGTATTCGTAATGCTAACCAAGCAAAACATGAAGTGTTAGAAGTACCTGCATCAAACATTAAAAAAGGGATTGCTGATATCCTTAAACGTGAAGGTTTTGTAAAAAACGTTGAAGTTATTGAAGATGACAAACAAGGCATCATCCGTGTGTTCCTTAAATATGGACAAAATGGTGAACGTGTTATCACTAACTTGAAACGTATTTCAAAACCAGGTCTTCGTGTTTATACTAAACATGAAGATATGCCTAAAGTTCTTAACGGACTTGGTATTGCAATTGTATCAACTTCTGAAGGTCTTTTGACTGACAAAGAAGCTCGCCAAAAAAATGTTGGTGGAGAAGTACTTGCATATATTTGG

SEQ ID NO: 4472 - protein, 132 aa, Streptococcus agalactiae
MVMTDPIADFLTRIRNANQAKHEVLEVPASNIKKGIADILKREGFVKNVEVIEDDKQGIIRVFLKYGQNGERVITNLKRISKPGLRVYTKHEDMPKVLNGLGIAIVSTSEGLLTDKEARQKNVGGEVLAYIW

SEQ ID NO: 4473 - protein, 529 aa, Streptococcus agalactiae
ATGTCACGTATTGGTAATAAAGTAATTACATTGCCTGCAGGTGTTGAAATCATTAACAAGGATAATGTTGTTACTGTAAAAGGACCTAAAGGCGAACTCACTCGTGAGTTTAATAAAAATATTGGAATCACTGTTGAAGGGACTGAAGTAACAGTTACTCGTCCTAACGACTCAAAGAAATAAAACATTCATGGTACAACTCGTGCGAACTTGAACACAGGTTGTTGGTGTTTCTGAAGGTTTCAAAAAAGCTCTTGAAATGCGCGGTGTTGGTTACCGTGCACAACTTCAAGGATCAAAACTTGTTCTTTCTGTTGGTAAGTCTCACCAAGACGAAGTTGAAGCTCCAGAAGGCGTTACTTTTGAAGTGCCAACTCCAACAACAATCAACGTAATCGGTATCAACAAAGAAAGCGTTGGACAAACTGCTGCTTACGTTCGTAGCTTACGTTCACCAGAACCATATAAAGGTAAAGGTATTCGTTACGTTGGTGAATTCGTACGCCGTAAAGAAGGTAAAACAGGTAAA

SEQ ID NO: 4474 - protein, 178 aa, Streptococcus agalactiae
MSRIGNKVITLPAGVEIINKDNVVTVKGPKGELTREFNKNIGITVEGTEVTVTRPNDSKEMKTIHGTTRANLNNMVVGVSEGFKKALEMRGVGYRAQLQGSKLVLSVGKSHQDEVEAPEGVTFEVPTPTTINVIGINKESVGQTAAYVRSLRSPEPYKGKGIRYVGEFVRRKEGKTGK

SEQ ID NO: 4475 - protein, 354 aa, Streptococcus agalactiae
GTGATTTCGAAACCAGATAAAAATAAAATCCGCCAAAAACGCCACCGTCGCGTTCGCGGTAAACTCTCTGGAACTGCTGATCGCCCACGTTTGAACATTTTCCGTTCTAATACAGGCATCTACGCTCAAGTAATTGATGACGTAGCGGGTGTAACGCTCGCAAGTGCATCAACTCTTGATAAAGAAGTTTCTAACGGAACAAAAACAGAACAAGCCGTTGTTGTCGGTAAACTTGTTGCTGAACGCGCAGTAGCTAAAGGTATTTCTGAAGTGGTGTTTGACCGCGGTGGATATCTCTATCACGGACGTGTAAAAGCTTTGGCTGACTCAGCTCGTGAAAACGGATTGAAATTC

SEQ ID NO: 4476 - protein, 118 aa, Streptococcus agalactiae; identical to SEQ ID NO: 176

SEQ ID NO: 4477 - protein, 492 aa, Streptococcus agalactiae
ATGGCATTTAAAGATAATGCAGTAGAACTTGAAGAGCGCGTTGTTGCGATTAACCGCGTTACAAAAGTTGTTAAAGGTGGACGTCGTCTACGTTTTGCAGCTCTTGTAGTTGTTGGTGACCGTAATGGTCGTGTTGGTTTCGGTACAGGTAAAGCTCAAGAAGTACCAGAAGCTATTCGCAAAGCTGTTGAAGCTGCTAAGAAAAACATGGTTGAAGTTCCTATGGTCGGTACAACAATTCCTCACGAAGTTCGTTCAGAATTTGGTGGAGCGAAAGTATTGTTGAAACCAGCTGTTGAGGGTGCTGGAGTTGCCGCTGGTGGTGCTGTTCGTGCCGTCATCGAATTAGCAGGTGTTGCAGATATTACATCTAAATCACTTGGTTCAAACACTCCAATCAACATTGTTCGCGCAACTGTTGAGGGCTTGAAACAATTAAAACGTGCAGAAGAAGTTGCTGCTTTACGTGGCATTTCTGTTTCTGACTTAGCA

SEQ ID NO: 4478 - protein, 164 aa, Streptococcus agalactiae; identical to SEQ ID NO: 178

SEQ ID NO: 4479 - protein, 321 aa, Streptococcus agalactiae
TTGTTCTGGTTTGCGACCGATTGGAGACTTAGTCAAAGTAATTTTAATTTGAGCCATTATAATCCCCTTTCTTATGCTAAGTCAGAAACAGAAATGCCACGTAAAGCAGCAACTTCTTCTGCACGTTTTAATTGTTTCAAGCCCTCAACAGTTGCGCGAACAATGTTGATTGGAGTGTTTGAACCAAGTGATTTAGATGTAATATCTGCAACACCTGCTAATTCGATGACGGCACGAACAGCACCACCAGCGGCAACTCCAGCACCCTCAACAGCTGGTTTCAACAATACTTTCGCTCCACCAAATTCTGAACGAACTTCG

SEQ ID NO: 4480 - protein, 107 aa, Streptococcus agalactiae
MFWFATDWRLSQSNFNLSHYNPLSYAKSETEMPRKAATSSARFNCFKPSTVARTMLIGVFEPSDLDVISATPANSMTARTAPPAATPAPSTAGFNNTFAPPNSERTS

SEQ ID NO: 4481 - protein, 177 aa, Streptococcus agalactiae
ATGGCTCAAATTAAAATTACTTTGACTAAGTCTCCAATCGGTCGCAAACCAGAACAACGTAAAACAGTTGTTGCCCTTGGACTTGGTAAATTAAATTCTTCAGTTGTTAAGGAAGATAATGCTGCCATCCGTGGTATGGTTAACGCTATCTCTCACTTAGTAACTGTTGAAGAAGCT

SEQ ID NO: 4482 - protein, 59 aa, Streptococcus agalactiae; identical to SEQ ID NO: 180

SEQ ID NO: 4483 - protein, 438 aa, Streptococcus agalactiae
ATGAAACTTCATGAATTAAAACCTGCAGAAGGATCACGTAAAGTCCGCAATCGTGTGGGTCGCGGTACATCTTCAGGTAATGGTAAAACTTCTGGACGTGGTCAAAAAGGACAAAAAGCGCGTAGTGGTGGTGGAGTACGCCTTGGTTTTGAAGGTGGACAAACTCCATTGTTCCGCCGTATGCCAAAACGTGGGTTCTCAAACATCAATGCAAAAGAATATGCTCTTGTGAACCTTGACCAATTAAATGTCTTTGAAGATGGTACTGAAGTAACTCCAGTTGTTCTTAAAGAAGCTGGAATCGTGCGTGCTGAAAAATCAGGCGTTAAAATTCTTGGTAATGGTGAATTAACTAAGAAATTGTCTGTTAAAGCAGCTAAGTTTTCTAAATCTGCTGAAGCAGCTATCACTGCTAAAGGTGGTTCAATCGAAGTCATC

SEQ ID NO: 4484 - protein, 146 aa, Streptococcus agalactiae; identical to SEQ ID NO: 182

SEQ ID NO: 4485 - protein, 1302 aa, Streptococcus agalactiae
ATGTTTTTAAAATTACTTAGAGATGCACTCAAAGTAAAGATGGTAAGAAATAAAATTTTATTTACTATCTTTATCCTTCTTGTATTTCGTATCGGAACGCATATCACAGTACCGGGCATCAATGTTAAGAGTTTAGAACAAATGGGTGAACTTCCATTTCTAAATATGCTTAACTTAGTTAGTGGTAATGCAATGAGAAACTTTTCGGTATTCTCTATGGGAGTTAGCCCATACATTACTGCGTCTATTGTTGTTCAGCTACTTCAAATGGATATTCTTCCGAAGTTTGTTGAATGGGGAAAACAAGGAGAGGTAGGTCGTCGTAAGCTTAACCAAGCTACACGTTATATTTCTTTGTTCCTTGCATTCGTACAATCAATTGGTATTACTGCTGGTTTTAACACTCTATCAAGTGTTGCTTTAGTTAAAACTCCGAATGTACAAACATATTTGCTTATTGGTGCAATCCTTACAACAGGTAGTATGGTGGTTACTTGGCTAGGTGAACAAATTACTGATAAGGGATTCGGAAATGGAGTGTCTATGATTATCTTTGCGGGTATCATTTCTTCCATTCCAAGTGCAATTACAACTATCTACGAAGATTTCTTTGTAAATGTACGCTCTTCAGCAATTACAAATTCTTACATCTTTGTCGGGATTCTTATTGTAGCAGTATTAGCAATTGTATTTTTTACAACATTTATTCAACAAGCTGAATACAAAATTCCAATCCAATATACAAAACTTGTTCAAGGAGCTCCTACAAGTTCATATCTTCCTCTAAAAGTAAATCCAGCTGGTGTTATTCCCGTTATCTTTGCTAGCTCGATTACAACAATTCCAAGTACGATTATTCCTTTCTTTCAAAATGGCAAAGAAATTCCTTGGCTTACTAAACTCCAAGAATTACTTAATTATCAAACCCCAGTCGGTATGATTATCTATGCTATCTTGATTATTCTGTTCTCTTTCTTCTATACTTTTGTACAAGTAAACCCTGAAAAGACAGCAGAGAATCTTCAAAAAAATTCGTCCTACATTCCAAGTATTCGACCAGGACGAGAAACAGAAGAATATATGTCATCGCTATTGAAAAAATTAGCAACAATTGGTTCAGTATTTCTAGCATTTATTTCCTTGTTACCAATTATTGCTCAACAAGCGTTGCATTTGTCATCAAGTATTGCGTTAGGTGGGACAAGCTTACTCATTTTGATTGCAACGGGTATTGAAGGTATGAAACAACTCGAGGGCTATCTTTTGAAGAGACGCTATGTTGGATTCATGAATACAACAGAA

SEQ ID NO: 4486 - protein, 434 aa, Streptococcus agalactiae
MFLKLLRDALKVKMVRNKILFTIFILLVFRIGTHITVPGINVKSLEQMGELPFLNMLNLVSGNAMRNFSVFSMGVSPYITASIVVQLLQMDILPKFVEWGKQGEVGRRKLNQATRYISLFLAFVQSIGITAGFNTLSSVALVKTPNVQTYLLIGAILTTGSMVVTWLGEQITDKGFGNGVSMIIFAGIISSIPSAITTIYEDFFVNVRSSAITNSYIFVGILIVAVLAIVFFTTFIQQAEYKIPIQYTKLVQGAPTSSYLPLKVNPAGVIPVIFASSITTIPSTIIPFFQNGKEIPWLTKLQELLNYQTPVGMIIYAILIILFSFFYTFVQVNPEKTAENLQKNSSYIPSIRPGRETEEYMSSLLKKLATIGSVFLAFISLLPIIAQQALHLSSSIALGGTSLLILIATGIEGMKQLEGYLLKRRYVGFMNTTE

SEQ ID NO: 4487 - protein, 636 aa, Streptococcus agalactiae
ATGAATCTTTTAATTATGGGTTTGCCTGGTGCTGGTAAAGGTACTCAAGCAGCTAAGATCGTTGAAGAATTTGGTGTTGCTCACATCTCAACAGGGGATATGTTCCGCGCCGCAATGGCTAATCAAACCGAAATGGGACGTTTAGCTAAAAGTTATATTGATAAAGGTGAATTGGTTCCTGATGAAGTAACAAACGGGATTGTAAAAGAGCGCTTAGCTGAGGATGATATCGCAGAAAAAGGTTTTTTACTTGATGGATATCCACGTACTATTGAACAAGCACACGCCTTAGATGCTACGCTTGAAGAACTAGGACTACGCTTAGATGGTGTTATTAATATTAAAGTGGATCCATCATGTCTTATAGAGCGTTTGAGTGGTCGTATTATCAATCGTAAAACTGGTGAAACTTTCCACAAAGTGTTCAACCCACCAGTAGATTATAAAGAAGAAGATTACTATCAACGTGAAGATGATAAGCCTGAAACTGTCAAACGTCGCTTGGACGTTAATATTGCTCAAGGAGAACCTATTCTTGAACACTATCGTAAGCTTGGTCTTGTTACAGATATTGAAGGTAATCAAGAAATAACAGAAGTTTTTGCAGATGTTGAAAAAGCGTTGCTAGAACTCAAA

SEQ ID NO: 4488 - protein, 212 aa, Streptococcus agalactiae; identical to SEQ ID NO: 186

SEQ ID NO: 4489 - protein, 216 aa, Streptococcus agalactiae
GTGGCAAAAGAAGATGTGATTGAAATTGAAGGTAAAGTTGTTGAAACTATGCCTAACGCAATGTTTACTGTTGAGTTGGAAAATGGACACCAAATTTTGGCAACTGTATCAGGAAAAATCCGTAAAAACTACATCCGTATTTTGGTAGGTGATCGTGTTACTGTTGAAATGAGCCCATACGATTTAACACGTGGACGCATCACATACCGCTTTAAA

SEQ ID NO: 4490 - protein, 72 aa, Streptococcus agalactiae; identical to SEQ ID NO: 188

SEQ ID NO: 4491 - protein, 336 aa, Streptococcus agalactiae
ATGGCTCGTATTGCTGGAGTTGATATTCCAAATGACAAACGTGTAGTAATTTCACTTACTTATGTATACGGAATTGGTCTTTCTACATCTAAAAAAATCTTAGCAGCTGCAGGTATTTCTGAAGATATCCGCGTTAAAGATTTGACACCAGATCAAGAGGACGCTATCCGTCGTGAAGTTGATGCAATCAAAGTTGAAGGTGACCTACGTCGTGAGGTAAACTTGAATATTAAACGTTTGATGGAAATCGGTTCATACCGTGGAATCCGTCACCGTCGTGGACTTCCTGTCCGTGGACAAAATACTAAAAATAACGCTCGCACTCGTAAANNNNNT

SEQ ID NO: 4492 - protein, 112 aa, Streptococcus agalactiae
  VARIANT 111, 112: Xaa = Any Amino Acid
MARIAGVDIPNDKRVVISLTYVYGIGLSTSKKILAAAGISEDIRVKDLTPDQEDAIRREVDAIKVEGDLRREVNLNIKRLMEIGSYRGIRHRRGLPVRGQNTKNNARTRKXX

SEQ ID NO: 4493 - protein, 290 aa, Streptococcus agalactiae
ATGATTACAGATGTGCATGGTAACGCTCTTGCATGGTCATCAGCTGGTGCTCTTGGATTTAAAGGTTCTCGTAAATCTACTCCATTTGCTGCTCAAATGGCTGCTGAAGCTGCTGCTAAATCTGCACAAGAACACGGTCTTAAAACTGTTGAAGTTACTGTAAAAGGTCCTGGTTCAGGTCGTGAATCTGCTATCCGTGCCCTTGCTGCAGCTGGTCTTGAAGTAACTGCAATTCGTGATGTGACTCCTGTACCACATAATGGTGCTCGTCCTCAAAACGTCGTCGTGTA

SEQ ID NO: 4494 - protein, 97 aa, Streptococcus agalactiae
  VARIANT 92: Xaa = Any Amino Acid
MITDVHGNALAWSSAGALGFKGSRKSTPFAAQMAAEAAAKSAQEHGLKTVEVTVKGPGSGRESAIRALAAAGLEVTAIRDVTPVPHNGARPXKRRRV

SEQ ID NO: 4495 - protein, 936 aa, Streptococcus agalactiae
ATGATTGAGTTTGAAAAACCAATAATAACAAAAATTGATGAAAATAAAGATTACGGCAGATTTGTCATCGAACCACTAGAACGTGGCTACGGTACAACTCTAGGAAACTCTCTTCGTCGTGTGCTTCTGTCTTCACTTCCAGGTGCAGCAGTCACATCAATCAAAATTGATGGAGTATTACACGAATTTGATACTATCCCAGGTGTACGTGAAGATGTGATGCAAATCATCCTTAATGTAAAAGGACTTGCTGTGAAATCTTACGTCGAAGACGAAAAGATTATCGAACTAGACGTTGAAGGTCCTGCAGAAATTACTGCCGGAGATATTTTAACAGATAGTGATATCGAAATTGTAAACCCTGACCATTATCTTTTCACAATTGCTGAAGGTCACAGTTTGAAAGCAACAATGACAGTTGCTAAAAACCGAGGTTATGTTCCAGCAGAAGGAAATAAAAAAGATGATGCACCAGTGGGAACATTGGCTGTAGATTCAATCTATACACCAGTGAAAAAAGTTAATTATCAAGTTGAACCTGCTCGTGTAGGTAGTAACGATGGCTTTGATAAATTAACTATTGAAATCATGACAAATGGCACAATCATTCCTGAGGATGCTCTTGGTCTTTCAGCTCGCGTCTTAATTGAACACTTAAACTTGTTTACTGATTTAACAGAGGTTGCTAAAGCAACTGAAGTAATGAAGGAAACAGAGAAAGTGAACGATGAGAAAGTGCTTGACCGCACAATTGAGGAACTTGATTTGTCAGTGCGCTCATATAACTGTTTAAAACGTGCTGGAATTAATACAGTATTTGATTTAACAGAAAAAACTGAGCCTGAAATGATGAAAGTCCGAAACTTAGGACGTAAGAGTCTTGAAGAAGTTAAAATTAAACTTGCCGATCTAGGTCTTGGATTAAAAAACGATAAA

SEQ ID NO: 4496 - protein, 312 aa, Streptococcus agalactiae; identical to SEQ ID NO: 194

SEQ ID NO: 4497 - protein, 384 aa, Streptococcus agalactiae
ATGGCTTACCGTAAACTAGGACGCACTAGCTCACAACGTAAGGCAATGCTTCGTGATTTGACAACCGATCTTCTTATCAACGAATCAATTGTAACTACTGAAGCACGTGCTAAAGAAATCCGTAAAACAGTTGAAAAAATGATTACTCTAGGTAAACGTGGTGATTTACATGCTCGTCGTCAAGCTGCTGCTTATGTACGTAATGAAATTGCATCAGAAAACTATGATGAAGCTTCTGATAAATATACATCAACAACAGCTCTTCAAAAACTTTTTGACGACATCGCACCTCGTTATGCTGAACGTAACGGAGGATACACTCGTATTCTTAAAACAGAACCACGCCGTGGCGATGCTGCCCCAATGGCAATTATTGAATTAGTA

SEQ ID NO: 4498 - protein, 128 aa, Streptococcus agalactiae; identical to SEQ ID NO: 196

SEQ ID NO: 4499 - protein, 264 aa, Streptococcus agalactiae
ATGAAAAAATATGTAAAATGGTTAATTCCCATATCTATTATTGGGATGTTACTAGCAGGCTGTCAAATGAATAGTGAATCTAAAAGTCAGTCAAACGAAGTAAAAAATAGCAAACACTCAGCAGTAAAGAAAGATAAAAAAATGACAAAAAAAGAACAATTAGTTTATCTCAATGAGCATGAACAAGAAATAATTGATTTTGTAAAATCACATAACCAACAAATTGAGTCCGTTCAATTCGATTGGTCAGGTATAAAAGTAGAA

SEQ ID NO: 4500 - protein, 88 aa, Streptococcus agalactiae
MKKYVKWLIPISIIGMLLAGCQMNSESKSQSNEVKNSKHSAVKKDKKMTKKEQLVYLNEHEQEIIDFVKSHNQQIESVQFDWSGIKVE

SEQ ID NO: 4501 - protein, 318 aa, Streptococcus agalactiae
TTGAGTAATTGGAACTTAGATAATTTTGATAACTTACATAGCTCTTTAGCAGAAAGTGCATATAATAGTCGACCTAATTCATTTCCTGAATTATTTGAGACTGACTCAGTAACAGAAGTAAAATTTTCTCAACCCTCAGAAGATAACAAAGGTCAAATCACACAGGGTGGCACTAACCTCCCCAATGATGGTATTGTCTACCTGCAACCAGATAAGTCCTTAAAATCTATTGATGAAAATGTAAAGGTTCGCGTTCCTGATGTCAATGGCGGTTATCACTCTGAGCATTGTGTTACTAATTCCTATCAGAAAGGTTAC

SEQ ID NO: 4502 - protein, 106 aa, Streptococcus agalactiae
MSNWNLDNFDNLHSSLAESAYNSRPNSFPELFETDSVTEVKFSQPSEDNKGQITQGGTNLPNDGIVYLQPDKSLKSIDENVKVRVPDVNGGYHSEHCVTNSYQKGY

SEQ ID NO: 4503 - protein, 549 aa, Streptococcus agalactiae
ATGACTAAAATTTATCATATGATTTTATGTAATTCTGATATAATGAAGATTTTAGCTATAATAAAATCTCTTCCACTGAATGATTGTTGGCTGTGTGCTGGCACATTGAGAAACTTTATATGGAATAAACTTTCTGGAATAAATGAGACATTGACATCAGATATTGATGTTGTATTTTTTGATAAAAATATTTCTTATGAAGAAACGGTGGTATTAGAACAACAATTAAAGGATAACTATCCACAGTACGATTGGGAACTTAAAAATGAATTTTACATGAATACTCATTCTCCTAATACCCCAAAGTATACTAGCTCTAAAGATGCTATTTCGAAATTTCCTGAAAAGTGTACTGCAGTGGGAGCAAGGTTAGATGATAGAAATCAACTCGAACTTTACCTCCCTTATGGTGAAGAGGAAATATTAAATTTCATTGTTAGTCCTACGCCATATTTTGAAGAGGATCTATTACGTTATAATGTTTATTTGAAGCGAGTGGATAAGAAGAAATGGAATAATATTTGGCCTCGTTTAACAATCATAAAAAAA

SEQ ID NO: 4504 - protein, 183 aa, Streptococcus agalactiae
MTKIYHMILCNSDIMKILAIIKSLPLNDCWLCAGTLRNFIWNKLSGINETLTSDIDVVFFDKNISYEETVVLEQQLKDNYPQYDWELKNEFYMNTHSPNTPKYTSSKDAISKFPEKCTAVGARLDDRNQLELYLPYGEEEILNFIVSPTPYFEEDLLRYNVYLKRVDKKKWNNIWPRLTIIKK

SEQ ID NO: 4505 - protein, 417 aa, Streptococcus agalactiae
ATGAAAATGACAGTCTATTTTGATGGTAATTTTTGGTTGGGTTTGATTGAGTACGATGATGATGGTGATTACAAAGTTTTTCGGTATTTTTTTGGAAAAGAACCTAAAGATGATGATGTTTTTAATTTTATAAATCATAAACTTAATGATTTGATAAAAAAATATGAGTTTGTTAAAACGGATATTTCTCTAAAGCGTACGAATGAACACAAAAAAAGTCCTAAAAGAATGCAAAGAGAAATTAATAGAGAAAAACGTAAGCCAGTAGTATCTACAAAAGCGCAATTGGCGATGAAAACTATTCATATGAGTATAAAAAACGAACGTCAATTAAGTCAGAAATGTAAGAAAAATGAGTTAAGAAAGCATCGGTACCAATTAAAACAAGAAAAACGTTACCAAAAGAAAAAAGGACAT

SEQ ID NO: 4506 - protein, 139 aa, Streptococcus agalactiae; identical to SEQ ID NO: 208

SEQ ID NO: 4507 - protein, 432 aa, Streptococcus agalactiae
ATGAAGCTGAGAAGAAATTATTTTGTTCAACTTTGGGAATATGATGATTGGATTCAAGAAGGGCGTATTGTACTTTTTAGGTTGCTTGAAGAACATCCGTATTTATTGGATAATGAAAGCAAACTATTCATTTACTTTAAAACAAAATTTTCAAATTATTTAAACGATGTATTAAGACATCAAGATTGTCAAAAGCGACAATTTAATAAAATGCCTTATGAAGAAATCAGTGAAGTTAGTCACTATGTTAAGAGTAAAGGACTAGTTTTAGATGACTATATTGCTTATCGTGATACTTTAACAAAAGTGGAAGAAACTTTGTCAGATATTGATAAAGAAAAATTTGAAAAACTGATTAGTGGTGAACGTTTCGCGGGGAAGAAACAATTCATACGAGATATTCAACCTTTTTTCAATGCTTTTAAAGCGGAT

SEQ ID NO: 4508 - protein, 144 aa, Streptococcus agalactiae; identical to SEQ ID NO: 210

SEQ ID NO: 4509 - protein, 690 aa, Streptococcus agalactiae
ATGAGTAAAGTTCGTTTATATATCGCTCGTCATGGTAAAACAATGTTTAATACAATTGGTCGCGCTCAGGGGTGGAGTGATACTCCTTTAACTACTTTTGGAGAACTCGGGATTAAAGAGCTTGGTTTGGGACTAAAGGCTTCAAATATTAGTTTTAAAGAGGCTTTTTCTAGTGATAGTGGACGTACTTTACAAACTATGGAAATTATTCTCAGGGAAGTGCAACAAGAAAATATTCCCTATACGAGAGATAAACGAATCCGCGAGTGGTGCTTTGGTAGTTTGGATGGAGGATATGATGGCGACCTTTTTAATGGCGTTCTGCCTCGAGTTTCAAACGGAGATATGAGCCATTTGACACACGAAGAAATTGCTAATTTGATTTGTCAAGTTGATACGGCTGGCTGGGCAGAACCGTGGGCAATATTGAGTAACCGTATTCTGTCAGGCTTCACTGCTATAGCTAAAAAAATAGAGGATATTGGGGGAGGTAATGCGATTGTTGTCAGTCATGGGATGACTATTGCGACTTTTTTATGGTTAATCGACCATAGTACCCCTCGTAGTTTAGGCATAGATAATGGTAGTGTCTCAGTCGTTGATTTTGAAGATGGAACATTTTCTATTCAATCTATTGGGGATATGTCCTATCGAGAAAAAGGAAGAGAAATTTTAGAAAAAACATTGCAA

SEQ ID NO: 4510 - protein, 230 aa, Streptococcus agalactiae
MSKVRLYIARHGKTMFNTIGRAQGWSDTPLTTFGELGIKELGLGLKASNISFKEAFSSDSGRTLQTMEIILREVQQENIPYTRDKRIREWCFGSLDGGYDGDLFNGVLPRVSNGDMSHLTHEEIANLICQVDTAGWAEPWAILSNRILSGFTAIAKKIEDIGGGNAIVVSHGMTIATFLWLIDHSTPRSLGIDNGSVSVVDFEDGTFSIQSIGDMSYREKGREILEKTLQ

SEQ ID NO: 4511 - protein, 750 aa, Streptococcus agalactiae
ATGAAAAAAAATAAAATTATCCGATTCAGTTTAGTTGGTGTTCTACTTGCGATACTATGCTTTAGTCTTTTTGCTTTATTGAAGCCTAACAGTCAACAATCATCATCTCAAAAGTTGAGGAATGAGGATATAAAAAAGATATCCTCTCAAAAAAGAAATAAGAAATTACAATTACCAGCTGTATCATCAAAAGATTGGAACTTGATTTTGGTCAATCGTGACCATAAACATGAAGAATTAAGTCCAGATGTGGTTCCTGTTGAAAATATTTATTTGGATAAACGTATTACGAAGCAAGCTACTCAGTTTTTAGAGGCTGCTAGAGCAATTGATTCACGAGAACATTTAATTTCGGGTTATCGTAGTGTTGCCTATCAGGAGAAGTTGTTCAATTCTTATGTTACTCAAGAGATGACTAGTAACCCTAATTTGACGAGGGGACAAGCAGAAAAGTTGGTAAAAACTTACTCTCAGCCTGCAGGTGCTAGTGAACACCAGACTGGATTAGCGATGGATATGAGTACTGTAGATTCTTTGAATGAGAGCGATCCTAGAGTAGTCAGTCAGTTGAAAAAGATAGCTCCACAATATGGTTTTGTCTTACGGTTTCCGGATGGTAAAACAGCAGAAACAGGGGTAGGTTATGAAGATTGGCATTACCGCTATGTTGGGGTAGAGTCTGCAAAATATATGGCCAAACATCATTTAACATTAGAAGAATACATAACTTTATTAAAGGAGAATAACCAA

SEQ ID NO: 4512 - protein, 250 aa, Streptococcus agalactiae; identical to SEQ ID NO: 214

SEQ ID NO: 4513 - protein, 573 aa, Streptococcus agalactiae
ATGAGGAAACGTTTTTCCTTGCTAAATTTTATTGTTGTTACTTTTATTTTCTTTTTCTTTATTCTTTTTCCGCTTTTAAACCATAAGGGAAAAGTAGATGCTAATTCTAGGCAGAGTGTTACCTACACCAAAGAAGAATTTATACAAAAAATTGTGCCAGATGCGCAAGATCTAGGAAAGTCGTACGGTATTCGTCCTTCATTTATTATTGCACAGGCGGCTTTGGATTCTGATTTCGGAGAGAAAATATTAGCTAATAAGTATCATAATCTGTTTGGTTTGCTTGCAGAACCAGGAACGCCCTCAATTACCTTAAATGATAGTAGTACAGGAAAAAAACAGGAAAAGCAATTTACTCATTATAAATCTTGGAAGTATTCAATGTATGATTACCTTGCTCATATAAAATCTGGAGCGACAGGCAAAAAAGATTCATATACTATAATGGTGTCTGTTAAAAATCCAAAAACTTTAGTGCAAAAATTACAAGATAGTGGTTTTGATAATGACAAAAAGTACGCTAAAAAAATGACGGAAATCATTGATTTGTATGATTTAACAAGATATGATAAG

SEQ ID NO: 4514 - protein, 191 aa, Streptococcus agalactiae; identical to SEQ ID NO: 216

SEQ ID NO: 4515 - protein, 1080 aa, Streptococcus agalactiae
ATGTGTAAGAGTGCTAATTTCAGAAAGACCGAGAGGGGTGATGTTTTTGTGATTACACAACGTCAAAATGATATTTTGAATTTAATCGTTGAGTTATTTACACAAACTCATGAACCAGTAGGGTCTAAAGCTTTACAGAGAACGATTGAATCTAGTAGCGCCACTATTCGTAATGATATGGCAAAACTAGAGAAGTTGGGGTTATTGGAAAAAGCACACACTTCTAGTGGACGGATGCCGAGTCCAGCTGGTTTTAAGTATTTTGTAGAGCACTCCCTTAGACTAGATAGTATTGATGAGCAAGATATTTATCATGTTATAAAAGCTTTTGACTTTGAAGCATTCAAATTAGAAGACATGCTTCAAAAAGCTAGTCATATTTTATCGGAGATGACGGGCTATACATCCGTTATTTTAGATGTGGAGCCAGCTCGTCAACGTTTGACAGGGTTTGATGTTGTTCAGCTTAGCAACCATGATGCTCTAGCAGTCATGACTTTAGATGAATCTAAGCCAGTGACAGTGCAGTTTGCTATTCCAAGAAACTTTTTGACACGTGACTTGATAGCATTTAAAGCTATCGTAGAGGAGCGCTTGCTGGATGGTAGTGTCATGGATATTCATTATAAGTTGAGGACAGAAATTCCTCAGATCGTTCAGAAGTATTTTGTAACTACGGATAATGTTTTACAACTATTTGATTATGTTTTTTCAGAGCTGTTTCTGGAAACGGTATTTGTAGCTGGCAAGGTAAATTCTTTAACATATTCAGATCTATCAACGTATCAGTTTTTGGATAATGAGCAGCAAGTAGCAATTTCTTTGAGGCAAGGTCTGAAAGAGGGTGAGATGGCTTCTGTCCAAGTGGCAGATAGTCAAGAAGCCGCACTTGCAGATGTGTCAGTTTTAACTCACAAATTTTTGATTCCTTACCGTGGATTTGGACTCCTGAGTTTGATTGGTCCTATTGATATGGATTATCGTAGGTCTGTTAGTTTGGTAAACATTATCGGAAAGGTATTGGCTGCTAAATTAGGTGATTATTATCGATACCTAAATTCTAACCATTATGAAGTTCAC

SEQ ID NO: 4516 - protein, 360 aa, Streptococcus agalactiae
MCKSANFRKTERGDVFVITQRQNDILNLIVELFTQTHEPVGSKALQRTIESSSATIRNDMAKLEKLGLLEKAHTSSGRMPSPAGFKYFVEHSLRLDSIDEQDIYHVIKAFDFEAFKLEDMLQKASHILSEMTGYTSVILDVEPARQRLTGFDVVQLSNHDALAVMTLDESKPVTVQFAIPRNFLTRDLIAFKAIVEERLLDGSVMDIHYKLRTEIPQIVQKYFVTTDNVLQLFDYVFSELFLETVFVAGKVNSLTYSDLSTYQFLDNEQQVAISLRQGLKEGEMASVQVADSQEAALADVSVLTHKFLIPYRGFGLLSLIGPIDMDYRRSVSLVNIIGKVLAAKLGDYYRYLNSNHYEVH

SEQ ID NO: 4517 - protein, 527 aa, Streptococcus agalactiae
ATGGCAGTATTCAATAAGTTATTTAAAAGGAGGCACTCAGTGTCAGAAGAAATTAAAAAAGACGATTTACAGGAAGAAGTGGAAGCCACTGAAACTGAAGAGACAGTTGAGGAAGTTATTGAAGAAATTCCTGAAAAATCAGAGTTAGAACTCGCAAACGAGCGTGCTGATGAGTTTGAAAATAAATACTTGCGTGCTCATGCAGAAATGCAGAATATACAGCGTCGCTCTAGTGAAGAACGTCAACAACTTCAACGCTATCGTTCTCAGGATCTGGCAAAAGCAATCTTACCATCGCTTGACAATCTAGAACGTGCCTTGGCTGTTGAAGGGTTGACAGATGATGTTAAAAAAGGTTTAGAAATGACTCGTGATAGCCTTATTCAAGCACTAAAGGAAGAAGGCGTAGAAGAAGTAGAAGTCGACTCATTTGACCACAACTTTCATATGGCAGTTCAGACCCTTCCAGCCGATGATGAACATCCAGCCGATAGCAGCAGAATCTCAAAAGGANNNNNTTAATTAAT

SEQ ID NO: 4518 - protein, 176 aa, Streptococcus agalactiae
  VARIANT 172, 173: Xaa = Any Amino Acid
MAVFNKLFKRRHSVSEEIKKDDLQEEVEATETEETVEEVIEEIPEKSELELANERADEFENKYLRAHAEMQNIQRRSSEERQQLQRYRSQDLAKAILPSLDNLERALAVEGLTDDVKKGLEMTRDSLIQALKEEGVEEVEVDSFDHNFHMAVQTLPADDEHPADSMQNLKRXXLIN

SEQ ID NO: 4519 - protein, 1827 aa, Streptococcus agalactiae
ATGTCTAAAATTATTGGTATTGACTTAGGTACAACAAACTCAGCAGTAGCAGTTCTTGAAGGGACTGAATCAAAAATCATTGCTAACCCAGAAGGCAATCGTACAACTCCTTCAGTAGTATCATTCAAAAATGGTGAAATTATCGTGGGTGATGCTGCAAAACGTCAAGCGGTAACAAATCCAGATACTGTTATCTCTATCAAATCAAAGATGGGAACTTCTGAAAAAGTTTCTGCAAATGGTAAAGAATATACTCCTCAAGAAATTTCAGCAATGATTCTTCAATACCTTAAAGGTTATGCTGAAGACTATCTTGGAGAAAAAGTAGAAAAAGCAGTTATTACTGTTCCAGCTTACTTCAACGATGCACAACGTCAGGCAACTAAAGACGCTGGTAAAATTGCAGGTCTTGAAGTAGAACGTATCGTTAACGAACCAACAGCAGCCGCACTTGCTTATGGTATGGACAAGACTGACAAGGATGAAAAAATCTTAGTTTTTGACCTTGGTGGTGGTACATTTGACGTATCAATCCTTGAATTAGGTGATGGTGTCTTCGACGTTCTTGCAACAGCAGGTGATAACAAACTTGGTGGTGACGACTTTGACCAGAAAATTATTGATTTCTTGGTAGAAGAATTCAAGAAAGAAAATGGTATTGATCTTTCTCAAGACAAAATGGCTCTTCAACGCTTGAAAGATGCTGCTGAAAAAGCTAAAAAAGACCTTTCAGGTGTAACTCAAACTCAAATTTCATTACCGTTCATCACTGCTGGTTCTGCTGGTCCTCTTCACTTGGAGATGAGCTTATCACGTGCTAAATTTGACGATCTCACTCGTGACCTTGTTGAACGTACGAAAACTCCAGTTCGTCAAGCTCTTTCAGATGCAGGCTTGTCATTGTCAGAAATTGATGAAGTTATCCTCGTTGGTGGATCAACACGTATCCCAGCAGTTGTTGAAGCTGTAAAAGCTGAAACTGGTAAAGAACCAAATAAATCTGTTAACCCTGATGAAGTGGTTGCCATGGGTGCTGCTATCCAAGGTGGTGTTATCACTGGGGATGTGAAAGACGTTGTACTTCTTGACGTAACACCATTGTCACTTGGTATTGAAACAATGGGTGGTGTCTTCACTAAATTGATCGACCGCAACACAACTATCCCAACATCTAAATCACAAGTCTTCTCAACAGCAGCAGACAACCAACCAGCCGTTGATATCCATGTTCTTCAAGGTGAACGCCCAATGGCAGCAGATAACAAAACACTCGGTCGCTTCCAATTGACTGATATCCCAGCTGCACCTCGTGGAATCCCACAAATTGAAGTAACATTTGATATCGATAAAAATGGTATTGTATCTGTTAAAGCTAAAGATCTCGGTACTCAAAAAGAACAACACATTGTTATCCAATCTAATTCAGGATTAACTGATGAAGAAATTGATAAAATGATGAAAGATGCTGAAGCAAATGCTGAAGCAGATGCAAAACGTAAAGAAGAAGTTGATCTTAAAAATGAAGTTGACCAAGCCATCTTTGCAACAGAAAAAACTATTAAAGAAACTGAAGGCAAAGGTTTTGATACAGAACGCGATGCAGCGCAATCAGCACTTGATGAGTTGAAAAAAGCTCAAGAATCAGGTAACCTTGACGACATGAAAGCTAAACTTGAAGCTCTTAACGAAAAAGCACAAGCTCTTGCAGTTAAACTTTACGAACAAGCGGCTGCAGCACAACAAGCAGCTCAAGGGGCTGAAGGTGCACAATCAGCTGATTCATCAAGCAAGGGTGATGATGTTGTAGATGGCGAATTCACTGAGAAA

SEQ ID NO: 4520 - protein, 609 aa, Streptococcus agalactiae; identical to SEQ ID NO: 222

SEQ ID NO: 4521 - protein, 1137 aa, Streptococcus agalactiae
ATGAACAATACAGAATTTTATGATCGTCTTGGCGTTTCAAAAGATGCTTCTCAGGACGAAATAAAAAAAGCTTACCGTAGGATGTCTAAGAAATACCATCCAGATATTAATAAGGAAACGGGAGCAGAGGAAAAATATAAAGAGGTTCAAGAAGCTTATGAAACCTTGAGTGATACACAAAAACGTGCTGCCTATGATCAATATGGCGCTGCTGGGGCAAATGGCGGTTTTGGTGGCTTCGATGGTGGCGGTTTTGGTGGCTTCGATGGTGGTGGCTTTGGTGGTTTTGAAGACATCTTCTCAAGCTTTTTTGGTGGAGGAGGGATGCGCAATCCTAATGCACCACGTCAAGGAGATGACCTACAATATCGTGTTAATTTAAGTTTTGAAGAAGCTATCTTTGGAGCTGAAAAAGAAGTATCTTATAATCGGGAGTCATCATGTCATACTTGTTCAGGAAGTGGAGCTAAGCCAGGTACTAGCCCTGTGACTTGTCAAAAGTGTCATGGTTCGGGTGTGATTAATGTTGATACACAAACACCTCTAGGAACAATGCGTCGCCAAGTGACTTGTGATGTTTGTCAGGGTAGTGGTCAAGAAATCAAAGAGAAATGTCCAACATGTCATGGAACTGGTCATGAGAAGAAGACGCATAAAGTATCAGTTAAAATACCTGCAGGAGTTGAAACTGGGCAACAAATTCGTTTAACAGGACAAGGTGAAGCTGGCTTCAATGGTGGTCCTTATGGTGATCTCTTTGTTATTATTAACGTTCTCCCAAGCCAACAGTTTGAGCGTAATGGATCAACAATTTATTATACTTTGAAAATTAGCTTTGTCCAAGCTGCTTTGGGTGATACAATTGATATACCTACTGTCCATGGAGCGGTAGAAATGTCAATTCCTGCTGGTACTCAGACAGGAAAAACGTTCCGTCTTCGCGGAAAAGGTGCCCCTAAACTTCGAGGGGGTGGACAAGGTGATCAGCATGTTACTGTTAACATCGTAACTCCTACTAAATTGAATGATGCTCAAAAAGAGGCATTGCACGCTTTTGCAGAGGCAAGTGGAGATAAGATGGTACATCCGAAGAAGAAAGGTTTCTTTGATAAAGTCAAAGATGCTTTAGATGTTGAT

SEQ ID NO: 4522 - protein, 379 aa, Streptococcus agalactiae
MNNTEFYDRLGVSKDASQDEIKKAYRRMSKKYHPDINKETGAEEKYKEVQEAYETLSDTQKRAAYDQYGAAGANGGFGGFDGGGFGGFDGGGFGGFEDIFSSFFGGGGMRNPNAPRQGDDLQYRVNLSFEEAIFGAEKEVSYNRESSCHTCSGSGAKPGTSPVTCQKCHGSGVINVDTQTPLGTMRRQVTCDVCQGSGQEIKEKCPTCHGTGHEKKTHKVSVKIPAGVETGQQIRLTGQGEAGFNGGPYGDLFVIINVLPSQQFERNGSTIYYTLKISFVQAALGDTIDIPTVHGAVEMSIPAGTQTGKTFRLRGKGAPKLRGGGQGDQHVTVNIVTPTKLNDAQKEALHAFAEASGDKMVHPKKKGFFDKVKDALDVD

SEQ ID NO: 4523 - protein, 1244 aa, Streptococcus agalactiae
ATGGTAACCAAAGTTGAAGAGATTCGCTCATATTTGATAGCTTCTATACAAAATGGTAAGTTGGCTCCAGGAGATCGCCTACCATCTATAAGACAGTTAGCTAATCAATTTTCCTGTAACAAGGATACAGTGCAACGAGTTTTGATGGAATTGCGTTTTGATAATTATGTCTATGCAAAGCCTAGGTCAGGCTATTACGTCTTTGATTCTCATGAAGAGGAAGTTGAAGAAGGGGTTAGTTTACCAAACTCTGAGATTGCAAATATAGCTTATGATGATTTTAGATTGTGTTTGAATGAGACCCTTATTGGTAGGGAAGATTACCTTTTCAATTATTACTATCGTCAAGAAGGTCTTCTGATTTAAGTAAAGCGGTGGCTAAATTAATGGAAGAAACAGGGGTCTATGTTCCTCTTGATGATATTGTTATTACAGCTGGTACTCAACAGGCATTATTTATTTTGACACAGGTTACCTTTCCAAATCGAAAATATCGAGTTTTAATAGAAGAACCGACCTATCCTCGTATGATTGAACTAATCAAAACACAAAATTTACCCTATGAAACTATCTCTCGAGGTACTCATGGAATTGATTTTCAGCGTTTAGAGGAGATTTTCCAGACACAATCAATTAAGTTTTTTTATGTTATACCTCGCATGCATAATCCTTTGGGAACATCCTATAATCCGGTAGAGATGAAAAGATTAATAGAGATGGCAGAGAAGTATGATGTTTATATTGTGGAAGATGACTATATGTCTGATTTTGCAAGTCAGTCACCATTACATTATTATGATACTCACGGGCGTGTTATTTATCTAAAATCTTTTTCAAAGGCTATTTTCCCTGCTTTAAGATTAGCTGCGATTTGTTTACCACAAGCTTTAAAATCAACATTTATGGCTTACAAGAAGTTGATGGATTATGATACTAATCTGATTTTACAAAAAGCATTAGCGCTTTATATTGAAAATGGCCTTTATGGTAAGAATAGTCAATATTTGAAATATCGTTATCAGAAAGACCTTGCAAATTCAAAATCTATTTTAGCTGATCAGCCTAATCTACCCCCATATAGTTTACATCACGATAGTGTATTATTTGATTGTTCGAAACTCGATAACTTCAAAATATTACGGCAATACGGCGATACTTTGGAAAATTATTTTTGTCAAAAATCGCATCAATCTCTCTTACAAGTAAAAAATGATTCCTGCTTAAAGCAGTTCTTGGGATCGTTG

SEQ ID NO: 4524 - protein, 415 aa, Streptococcus agalactiae
MVTKVEEIRSYLIASIQNGKLAPGDRLPSIRQLANQFSCNKDTVQRVLMELRFDNYVYAKPRSGYYVFDSHEEEVEEGVSLPNSEIANIAYDDFRLCLNETLIGREDYLFNYYYRQEGLLDLSKAVAKLMEETGVYVPLDDIVITAGTQQALFILTQVTFPNRKYRVLIEEPTYPRMIELIKTQNLPYETISRGTHGIDFQRLEEIFQTQSIKFFYVIPRMHNPLGTSYNPVEMKRLIEMAEKYDVYIVEDDYMSDFASQSPLHYYDTHGRVIYLKSFSKAIFPALRLAAICLPQALKSTFMAYKKLMDYDTNLILQKALALYIENGLYGKNSQYLKYRYQKDLANSKSILADQPNLPPYSLHHDSVLFDCSKLDNFKILRQYGDTLENYFCQKSHQSLLQVKNDSCLKQFLGSL

SEQ ID NO: 4525 - protein, 774 aa, Streptococcus agalactiae
ATGACAAGGTATAAGGCACAGATTTCTTATGATGGTTCAGCTTTTTCAGGCTTCCAAAGACAACCAAATTGTAGGACAGTTCAAGAAGAAATTGAGAGAACTCTTAAGCGCCTAAATAGCGGGAACGATGTGATAATCCATGGTGCTGGTCGCACAGATGCTGGTGTTCATGCTTATGGACAAGTTATTCATTTTGATTTACCACAGGCGCGTGATGTAGAAAAATTACGCTTTGGTTTAGATACACAGTGTCCAGACGATATTGATATTGTCAAAGTAGAGCAAGTGTCTGATGATTTTCATTGTCGATATGATAAACACATTAAAACTTATGAGTTTTTAGTAGATATTGGTAGGCCGAAAAATCCTATGATGAGAAACTATGCAACACATTACCCTTATCCTGTCATTATTGAGCTTATGCAAGAAGCTATTAAAGATTTAGTAGGTACCCATGATTTTACAGGCTTTACTGCTTCAGGTACGAGTGTAGAAAATAAAGTACGTACTATTTTTGATGCGAAAATTCAGTTTGAAGCGTCTAAAAATCTTTTAATTTTTACCTTTACAGGAAATGGTTTTTTGTATAAACAGGTGCGTAACATGGTTGGTACCCTGCTAAAAATTGGTAATGGACGCATGCCTATTAGCCAAATCAAAACAATTTTACAGGCTAAAAATCGGGATTTAGCAGGTCCAACTGCGGCAGGAAATGGTTTATATTTGAAGGAGATTATTTATGAAGACAAGGAATGTTTTAGCAATTTCAGGAAA

SEQ ID NO: 4526 - protein, 258 aa, Streptococcus agalactiae
MTRYKAQISYDGSAFSGFQRQPNCRTVQEEIERTLKRLNSGNDVIIHGAGRTDAGVHAYGQVIHFDLPQARDVEKLRFGLDTQCPDDIDIVKVEQVSDDFHCRYDKHIKTYEFLVDIGRPKNPMMRNYATHYPYPVIIELMQEAIKDLVGTHDFTGFTASGTSVENKVRTIFDAKIQFEASKNLLIFTFTGNGFLYKQVRNMVGTLLKIGNGRMPISQIKTILQAKNRDLAGPTAAGNGLYLKEIIYEDKECFSNFRK

SEQ ID NO: 4527 - protein, 756 aa, Streptococcus agalactiae
ATGAAGACAAGGAATGTTTTAGCAATTTCAGGAAATGATATTTTCTCTGGCGGCGGCTTGCATGCAGATTTAGCAACTTACGTTGTTAATAAATTACATGGTTTTGTGGCAGTAACATGCTTAACAGCAATGTCAGATAAAGGGTTTGAAGTCATTCCTATAGAGGCATCTATACTAAAGCAGCAACTAGAAAGTTTAAAAGATGTAGAGTTTGGGTCTATTAAACTAGGATTGCTTCCCAATGTAGAAACAGCACAAGTTGTTTTGGAATTTGTAAAATCAAAACAAGAATGTCCAGTAGTCTTAGACCCAGTCTTAGTTTGTAAAGAAAATCATGATTTAGAAGTTAGCCAATTACGTGAGCAGCTAATTGCGTTTTTCCCATATGCTGATGTGATTACTCCTAATTTAGTAGAGGCTCAATTATTAACGGGTCTTTCGATTGAAAACTTAGATCAAATGAAAATTGCTGCTGAGAAACTTTACGATATGGGGGCTAAACATGTTGTTATCAAAGGGGGCAACCGTTTAAATGCTGAAGAGGCTACAGACCTTTACTATGATGGTGAACGTTTTGAAACCTATGTTTTTCCTGTAGTAGATGCCAATAATACAGGTGCTGGATGTACATTTGCGTCAAGTATTGCCAGCCAATTAGCTATGGGTAAAAATGTAGAAGATGCAGTCAAAATGTCTAAAGGTTTCGTCTATCAAGCTATTAAAGCATCGGATAAGTACGGAGTTGTCCAACATTTT

SEQ ID NO: 4528 - protein, 252 aa, Streptococcus agalactiae
MKTRNVLAISGNDIFSGGGLHADLATYVVNKLHGFVAVTCLTAMSDKGFEVIPIEASILKQQLESLKDVEFGSIKLGLLPNVETAQVVLEFVKSKQECPVVLDPVLVCKENHDLEVSQLREQLIAFFPYADVITPNLVEAQLLTGLSIENLDQMKIAAEKLYDMGAKHVVIKGGNRLNAEEATDLYYDGERFETYVFPVVDANNTGAGCTFASSIASQLAMGKNVEDAVKMSKGFVYQAIKASDKYGVVQHF

SEQ ID NO: 4529 - protein, 462 aa, Streptococcus agalactiae
ATGAGGAAAGAGAAAACTAGTCAATTGGTTCAATTGGCAATTGTAACAGCTATATCTATTGTATTGGGGATGTTTATAAGTATTCCGACACCAACAGGTTTTTTGACATTACTAGATGCTGGAATATTCTTTGCTGCCTTTTACTTTGGCAAAAAAGAAGGGGCTGTGGTAGGTGCCTTAGCTGGTTTTTTAATTGATTTATTGAAAGGTTATCCCAATTGGATGTTCTTTAGTTTATTGATTCATGGGGCGCAAGGGTATTTAGCGGGTTTACCAGGTAGAAGACGTCTTTTAGGTCTTATTAGTGCAACTCTTGTTATGGTATTAGGTTATGCTATAGCTAGTGGATTGATGTATGGTTGGGGAGCTGTTCTACCAGATATTCCTGGCAATATTATGCAAAATATGGTTGGTATGGTCGTTGGTTTTGCTCTTAATAAGTCTCTAGAAAGAGTGAAGAAA

SEQ ID NO: 4530 - protein, 154 aa, Streptococcus agalactiae
MRKEKTSQLVQLAIVTAISIVLGMFISIPTPTGFLTLLDAGIFFAAFYFGKKEGAVVGALAGFLIDLLKGYPNWMFFSLLIHGAQGYLAGLPGRRRLLGLISATLVMVLGYAIASGLMYGWGAVLPDIPGNIMQNMVGMVVGFALNKSLERVKK

SEQ ID NO: 4531 - protein, 567 aa, Streptococcus agalactiae
ATGATACTAGATTATAATAAGTTAAAGCAGGAAACTAAAGCTATTGTAGTTGATATTATTGAACGTAGCGCTCTTAAAAAAGGTCAAATTTTTGTACTAGGTCTATCATCTAGTGAGGTTTCTGGTGGTTTAATTGGAAAAAATTCTAGTTCTGAAATTGGTGAAATTATCGTTGAAGTTATCCTCAAAGAGTTACATTCACGCGGCATCTATTTAGCAGTTCAAGGTTGTGAACATGTTAATAGAGCGTTGGTTGTTGAAGCAGAATTGGCTGAACGTCAACAGTTGGAAGTCGTTAATGTTGTTCCTAATCTACATGCTGGCGGTAGTGGTCAGGTTGCAGCTTTTAAGTTGATGACATCACCAGTTGAGGTTGAAGAAATTGTGGCACATGCTGGAATTGATATTGGAGATACTTCTATTGGAATGCATATCAAGAGAGTACAAGTTCCCTTGATTCCAATTAGTCGTGAGTTGGGAGGAGCACACGTTACAGCACTAGCTAGTCGTCCTAAATTAATTGGCGGTGCTAGAGCAGGATATACGAGCGATCCAATCCGTAAATTT

SEQ ID NO: 4532 - protein, 189 aa, Streptococcus agalactiae
MILDYNKLKQETKAIVVDIIERSALKKGQIFVLGLSSSEVSGGLIGKNSSSEIGEIIVEVILKELHSRGIYLAVQGCEHVNRALVVEAELAERQQLEVVNVVPNLHAGGSGQVAAFKLMTSPVEVEEIVAHAGIDIGDTSIGMHIKRVQVPLIPISRELGGAHVTALASRPKLIGGARAGYTSDPIRKF

SEQ ID NO: 4533 - protein, 840 aa, Streptococcus agalactiae
ATGATTACTTTAGAAAAATTTATAGACCATCTTAATGTAGAGGAAGTTTTATTTACTTTCTTCACCAAACTAATATCAATCTTATTATTGATCATTGCATTCGTTATCGTTAGGCAAGTCATCAATTATCTTTTCGAAAAGACTGTTAATCGCTCACTCGCCTTTTCTAGACAAAAAGTAGCTCGTCAAAAAACATTAGCTAAACTTTCTCACAATGTTTTAAACTATACCCTTTATTTCTTTCTATTCTATTGGATTTTAAGTATATTGGGCGTTCCAATTTCTAGTTTATTAGCTGGGGCTGGTATTGCTGGGGTTGCTATTGGACTTGGTGCTCAAGGCTTCTTATCAGATGTTGTCAATGGCTTTTTTATTCTACTAGAAAACCAATTTGATGTTGGTGATATTATTAATGTTGGTACTGTATCAGGCACTGTTACTAATGTTGGGATACGCACCACACAAATTCATGATTTCGATGGAACCTTACACTTCATTCCTAATCGTAATATTACAATTGTCAGCAATAAATCTCGTAGCAATATGCGTGCTCAAATTGATATTCCTTTATTTGTTCATACAAACCTTGATCAGATTTCTGATATTGTAACAAAAATCAATGAAGAGTATGTTTCAAAACACCCTGCTATCGTTGGAGAGCCTACTGTTTTTGGTCCTACAACCAATGCTAATGGTCAATTTGTTTATCGTATTAATATCTTCACGCAAAACGGTGCTCAGTTTGACATCTATGCTGAATTTTACAAACTTTATCAAAAAGCTATTCTTGAAGAAGGTATTGACTTACCAACGTACAATTTCTCCAATAACCACTCTCGT

SEQ ID NO: 4534 - protein, 280 aa, Streptococcus agalactiae
MITLEKFIDHLNVEEVLFTFFTKLISILLLIIAFVIVRQVINYLFEKTVNRSLAFSRQKVARQKTLAKLSHNVLNYTLYFFLFYWILSILGVPISSLLAGAGIAGVAIGLGAQGFLSDVVNGFFILLENQFDVGDIINVGTVSGTVTNVGIRTTQIHDFDGTLHFIPNRNITIVSNKSRSNMRAQIDIPLFVHTNLDQISDIVTKINEEYVSKHPAIVGEPTVFGPTTNANGQFVYRINIFTQNGAQFDIYAEFYKLYQKAILEEGIDLPTYNFSNNHSR

SEQ ID NO: 4535 - protein, 1281 aa, Streptococcus agalactiae
ATGTCTACATCATTTGAAAATAAAGCTACAAACCGTGGTATTATCACATTTACAATTAGTCAAGATGAGATCAAGCCAGCTCTTGATCAAGCATTCAACAAAGTTAAAAAAGATTTGAACGTTCCAGGATTCCGTAAAGGACATATGCCTCGTACAGTTTTCAACCAAAAATTTGGTGAAGAAGCACTCTACGAAAATGCATTGAATTTAGTGTTGCCAAAGGCTTACGAAGCAGCTGTTGCAGAACTTGGTTTAGACGTTGTTGCTCAACCAAAAATTGATGTTGTATCAATGGAAAAAGGTCAAGATTGGAAGTTGACAGCTGAAGTTGTTACAAAACCAGAAGTTAAACTTGGAGATTACAAAGACCTTTCAGTAGAAGTTGATGCTTCAAAAGAAGTTTCAGCTGAAGAAGTTGATGCTAAAGTTGAACGTGAGCGTAACAACCTTGCAGAATTGACTGTTAAAGATGGTGAAGCAGCACAAGGTGATACAGTTGTTATTGACTTTGTAGGTTCAGTTGATGGTGTTGAATTTGATGGTGGTAAAGGAGATAACTTCTCACTTGAACTTGGTTCAGGTCAATTTATCCCAGGATTTGAAGAACAATTAGTAGGTTCTAAAGCTGGTCAAACTGTAGACGTTAATGTAACATTCCCAGAAGATTATCAAGCAGAAGATCTTGCAGGTAAAGATGCTAAATTTGTTACAACAATTCATGAAGTAAAAACTAAAGAAGTTCCAGCACTTGATGATGAACTTGCAAAAGATATTGATGATGAAGTTGAAACACTTGATGAGTTGAAAGCAAAATATCGCAAAGAGCTAGAATCAGCAAAAGAAATTGCATTTGATGATGCAGTTGAAGGTGCAGCAATCGAATTAGCTGTTGCCAATGCAGAAATTGTTGAATTACCAGAAGAAATGGTTCATGATGAAGTACATCGTGCTATGAATGAGTTCATGGGTAATATGCAACGTCAAGGAATTTCACCAGAAATGTACTTCCAATTAACAGGTACAACTGAAGAAGACCTTCATAAGCAATACCAAGCAGATGCTGACAAACGCGTTAAAACTAACCTTGTTATTGAAGCAATTGCAGCTGCAGAAGGCTTTGAAGCAACAGATGAAGAAATCGAAAAAGAAATCACAGATCTTGCTTCAGAATACAATATGGAAGCTGACCAAGTACGCGGTCTACTTTCAGCAGATATGCTTAAACATGATATTGCAATGAAAAAAGCGGTTGACGTTATCACTAGCTCAGCTACTGTAAAA

SEQ ID NO: 4536 - protein, 427 aa, Streptococcus agalactiae
MSTSFENKATNRGIITFTISQDEIKPALDQAFNKVKKDLNVPGFRKGHMPRTVFNQKFGEEALYENALNLVLPKAYEAAVAELGLDVVAQPKIDVVSMEKGQDWKLTAEVVTKPEVKLGDYKDLSVEVDASKEVSAEEVDAKVERERNNLAELTVKDGEAAQGDTVVIDFVGSVDGVEFDGGKGDNFSLELGSGQFIPGFEEQLVGSKAGQTVDVNVTFPEDYQAEDLAGKDAKFVTTIHEVKTKEVPALDDELAKDIDDEVETLDELKAKYRKELESAKEIAFDDAVEGAAIELAVANAEIVELPEEMVHDEVHRAMNEFMGNMQRQGISPEMYFQLTGTTEEDLHKQYQADADKRVKTNLVIEAIAAAEGFEATDEEIEKEITDLASEYNMEADQVRGLLSADMLKHDIAMKKAVDVITSSATVK

SEQ ID NO: 4537 - protein, 182 aa, Streptococcus agalactiae
TTGGAATTAGAAGTATTTGCTGGGCAAGAAAAAAGTGAACTTTCGATGATTGAAGTTGCTCGCGCTATTTTAGAGCAACGTGGTCGTGATAACGAAATGTACTTCAGCGATTTGGTAAATGATATTCAAACCTACCTTGGAAATCTGACTCAGCAATTCGTGAGTCATNNNNNTTAATTAAT

SEQ ID NO: 4538 - protein, 61 aa, Streptococcus agalactiae
  VARIANT 57, 58: Xaa = Any Amino Acid
MELEVFAGQEKSELSMIEVARAILEQRGRDNEMYFSDLVNDIQTYLGKSDSAIRESXXLIN

SEQ ID NO: 4539 - protein, 231 aa, Streptococcus agalactiae
ATGGATGGTGATGAAGATGCTATTGATTACAATGATGATGATCCAGAAGATGAAGATTTCACAGAAGAAACACCAAGTTTAGAATATGATGAAGAAAACCCTGACGATGAAAAATCAGAGGTAGAATCGTATGATTCTGAGATTAATGAAATCATTCCTGATGAAGATTTAGATGAGGATGTAGAAATCAACGAAGAAGACGATGAAGAGGAAGAAGAGGAAGAAGAGGTT

SEQ ID NO: 4540 - protein, 77 aa, Streptococcus agalactiae
MDGDEDAIDYNDDDPEDEDFTEETPSLEYDEENPDDEKSEVESYDSEINEIIPDEDLDEDVEINEEDDEEEEEEEEV

SEQ ID NO: 4541 - protein, 143 aa, Streptococcus agalactiae
ATGACAAAGTATATTTTTGTTACAGGTGTGTGGTCTCTTCTATTGGTAAGGGGTGTTGCAGCAAGTCTTGGGCGCTTACTAAAAAACGTGGGCTAAAGGTGACAATTCAAAAATGATCCATATATTAATATTCCCAGGGACAA

SEQ ID NO: 4542 - protein, 50 aa, Streptococcus agalactiae
  VARIANT 40: Xaa = Any Amino Acid
MTKYIFVTGGVVSSIGKGIVAASLGRLLKNRGLKVTIQKXDPYINITQGQ

SEQ ID NO: 4543 - protein, 1324 aa, Streptococcus agalactiae
ATGAGCCCTTATCAACATGAGAAAGTTTATGTTACAGATGATGGTGCAGAAACTGACCTTGACCTTGGACACTACGAGCGTTTTATTGATATTAACTTAAACAAATATTCAAATGTTACAACGGGTAAGATTTATAGTGAAGTTCTTAAAAAAGAACGCCGTGGAGAATACCTTGGTGCAACTGTTCAAGTTATCCCACACGTTACGGATGCTTTGAAAGAAAAAATCAAACGTGCTGCGACAACTACAGATTCAGATGTTATTATTACTGAAGTTGGCGGTACTGTTGGAGATATTGAGAGCCTTCCGTTTTTAGAAGCACTTCGTCAAATGAAGGCAGATGTTGGTTCTGATAATGTTATGTACATTCATACAACGTTATTACCATACCTAAAGGCTGCCGGCGAAATGAAAACAAAACCGACTCAACATTCTGTTAAAGAGTTACGTGGCCTAGGTATCCAACCTAATATGCTTGTTATCCGTACAGAGCAACCAGCAGGTCAAAGTATTAAGAATAAATTGGCACAATTTTGTGATGTTGCACCAGAGGCTGTTATAGAGTCCCTTGATGTTGACCATATTTATCAAATTCCACTTAACATGCAAGCTCAAAATATGGATCAAATTGTTTGTGATCACTTGAAGCTTGAGACACCTGCTGCTGATATGACAGAATGGTCAGCAATGGTTGATAAAGTAATGAACCTTGAGAAAAAAGTTAAAATTGCATTGGTTGGTAAATATGTTGAATTACCTGATGCCTACCTTTCAGTTGTGGAAGCCCTTAAGCACTCAGGGTACGTCAACGATGTTGCTATTGATTTAAAATGGGTAAATGCTGCTGAAGTGACAGAAGATAATATTAAAGAACTTGTCGGAGATGCAGATGGTATTATCGTTCCTGGTGGATTTGGCCAAAGAGGTAGTGAGGGTAAAATTGAAGCAATTCGCTATGCACGTGAAAATGATGTTCCAATGCTTGGTGTTTGTCTCGGAATGCAGCTAACTTGTGTCGAATTTGCGCGTAATGTTTTAAAACTTCATGGAGCTAATTCAGCAGAGCTTGACCCTAAAACACCGTTCCCAATCATTGATATTATGCGTGATCAAATCGATATTGAAGATATGGGTGGTACTCTTCGCCTTGGTCTATATCCATGTAAATTGAAAGCAGGTTCAAGAGCTGCGGCAGCTTATAATAATCAAGAAGTTGTCCAACGTCGTCACCGTCACCGTTATGATTTATACAAAATTCCGTGAGCAATTTGAGGCTGCTGGATTTCTTTAGGGGTATCACCGGATATCGTTTGATGGAAGTTGT

SEQ ID NO: 4544 - protein, 443 aa, Streptococcus agalactiae
  VARIANT 437: Xaa = Any Amino Acid
MSPYQHEKVYVTDDGAETDLDLGHYERFIDINLNKYSNVTTGKIYSEVLKKERRGEYLGATVQVIPHVTDALKEKIKRAATTTDSDVIITEVGGTVGDIESLPFLEALRQMKADVGSDNVMYIHTTLLPYLKAAGEMKTKPTQHSVKELRGLGIQPNMLVIRTEQPAGQSIKNKLAQFCDVAPEAVIESLDVDHIYQIPLNMQAQNMDQIVCDHLKLETPAADMTEWSAMVDKVMNLEKKVKIALVGKYVELPDAYLSVVEALKHSGYVNDVAIDLKWVNAAEVTEDNIKELVGDADGIIVPGGFGQRGSEGKIEAIRYARENDVPMLGVCLGMQLTCVEFARNVLKLHGANSAELDPKTPFPIIDIMRDQIDIEDMGGTLRLGLYPCKLKAGSRAAAAYNNQEVVQRRHRHRYEFNTKFREQFEAAGLSFRGITGXSFDGSC

SEQ ID NO: 4545 - protein, 132 aa, Streptococcus agalactiae
ATGGAAGTTGTTGAGTTACCAGAGAAAAAATTCTTTGTTGCAGCACAATACCATCCAGAATTACAATCACGTCCTAACCATGCTGAAGAGCTTTACACAGCTTTTGTAACAGCAGCAGTTGAAAATATGAAA

SEQ ID NO: 4546 - protein, 44 aa, Streptococcus agalactiae
MEVVELPEKKFFVAAQYHPELQSRPNHAEELYTAFVTAAVENMK

SEQ ID NO: 4547 - protein, 924 aa, Streptococcus agalactiae
ATGAAAAAGATTCGATTATCAAAGTTTATTAAAATGATTGTTGTTATTTTGTTTTTAATTAGTGTAGCAGCTAGTTTTTATTTTTTCCACGTTGCCCAAGTTCGAGATGATAAATCCTTTATTTCAAATGGTCAACGTAAGCCTGGAAACTCTTTATATGCTTATGATAAATCCTTTGATAAGCTATTAAAGCAAAAAATAGAAATGACAAACCAAAATATAAAGCAAGTTGCTTGGTATGTTCCTGCTGCTAAGAAAACTCATAAGACAGCTGTTGTCGTTCATGGTTTTGCGAATAGCAAAGAGAATATGAAGGCATATGGTTGGCTGTTTCATAAGTTAGGATACAATGTTCTTATGCCTGACAATATTGCACATGGTGAAAGTCATGGGCAGTTGATAGGCTATGGCTGGAACGACCGCGAGAACATTATCAAATGGACAGAAATGATAGTTGATAAGAATCCATCAAGCCAAATTACTTTATTTGGTGTTTCAATGGGTGGAGCAACAGTCATGATGGCTAGTGGTGAAAAATTACCTAGTCAGGTTGTTAATATCATTGAAGATTGCGGTTATTCTAGTGTTTGGGATGAATTAAAATTTCAGGCTAAAGAGATGTATGGTTTACCAGCCTTCCCACTCTTATATGAAGTTTCAACAATTTCTAAAATCAGAGCAGGTTTTTCGTATGGACAAGCAAGTAGTGTCGAACAATTGAAAAAGAATAATTTACCAGCCCTCTTTATTCATGGTGATAAGGATAATTTTGTTCCAACAAGTATGGTTTATGACAACTATAAAGCTACAGCAGGTAAGAAAGAGCTTTATATTGTAAAAGGGGCAAAACATGCGAAATCTTTTGAAACAGAGCCAGAAAAATATGAGAAACGTATCTCTAGTTTTTTGAAAAAATATGAAAAA

SEQ ID NO: 4548 - protein, 308 aa, Streptococcus agalactiae
MKKIRLSKFIKMIVVILFLISVAASFYFFHVAQVRDDKSFISNGQRKPGNSLYAYDKSFDKLLKQKIEMTNQNIKQVAWYVPAAKKTHKTAVVVHGFANSKENMKAYGWLFHKLGYNVLMPDNIAHGESHGQLIGYGWNDRENIIKWTEMIVDKNPSSQITLFGVSMGGATVMMASGEKLPSQVVNIIEDCGYSSVWDELKFQAKEMYGLPAFPLLYEVSTISKIRAGFSYGQASSVEQLKKNNLPALFIHGDKDNFVPTSMVYDNYKATAGKKELYIVKGAKHAKSFETEPEKYEKRISSFLKKYEK

SEQ ID NO: 4549 - protein, 443 aa, Streptococcus agalactiae
ATGTCAAAGTACGTGGCTTTGAATTAGTTAGCCAATTTAGCAATAAAGAGTTATTACCAAAACGAGAAACAGCTCACGCAGCTGGCTATGATTTAAAAGTAGCTAAAAAAACGGTTATTGAACCTGGTGAAATTACATTGGTCCCGACCGGTATTAAAGCACACATGCAACCAGGGGAGGTCCTGTACCTTTATGATCGTTCATCGAATCCACGTAAAAAAGGGATTGTCCTAATAAATTCAGTTGGTGTTATTGATGGTGACTACTATAATAACCAAGTCAATGAAGGACATATTTTTGCACAGATGCAAAATATTACTGATCAGGCTGTTATTTTAGAAGAAGGGGAACGGATTGTTCAGGCTGTTTTTGCCCCATTCTTATTGGCAGATGACGATCAGGCTACAGGAATGCGTACAGGTGGTTTTGGTAGTACTGGAAAA

SEQ ID NO: 4550 - protein, 148 aa, Streptococcus agalactiae
MSKVRGFELVSQFSNKELLPKRETAHAAGYDLKVAKKTVIEPGEITLVPTGIKAHMQPGEVLYLYDRSSNPRKKGIVLINSVGVIDGDYYNNQVNEGHIFAQMQNITDQAVILEEGERIVQAVFAPFLLADDDQATGMRTGGFGSTGK

SEQ ID NO: 4551 - protein, 1362 aa, Streptococcus agalactiae
GTGGCTAAGAAAAAATCAGTCTTCACCTGTCAAGAGTGTGGTTACCAATCACCTAAGTATTTGGGACGTTGTCCAAATTGCTCAGCCTGGTCTTCATTTGTAGAAGAGGTTGAAGTTCAAGAAGTTAAAAATGCACGAGTTAGTTTGAACGGTGAAAAGTCCCGACCGACGAAGTTAAAAGATGTTTCCTCAATTAACTATTCTAGAACTAAGACTGATATGGATGAATTTAACCGTGTTCTAGGAGGCGGCGTTGTACCAGGAAGTTTGGTTCTGATTGGAGGAGACCCTGGGATAGGTAAATCTACTTTATTACTACAAGTATCAACTCAGCTAGCTAATAAAGGTACAGTATTATATGTCTCAGGTGAGGAATCTGCAGAACAGATTAAGTTACGAAGTGAGCGTCTAGGCGATATCGATAATGAATTTTACCTTTATGCCGAGACTAATATGCAAAGTATTCGGTCGGAGATTGAGAAGATTAAACCAGATTTTCTTATTATTGATTCTATACAAACTATTATGAGTCCCGAAGTATCAAGTGTCCAAGGCTCTGTTAGCCAAGTTCGCGAAGTGACCGCTGAGTTGATGCAGTTAGCTAAAACTAATAATATTGCTACTTTTATTGTAGGTCATGTGACTAAGGAGGGAACATTAGCAGGCCCTCGAATGCTAGAACATATGGTGGATACGGTTCTTTATTTTGAAGGGGAGCGTCATCACACGTTCCGTATTTTACGGGCAGTCAAAAACCGTTTTGGTTCGACCAATGAAATAGGTATCTTTGAAATGCAGTCGGGTGGTCTAGTTGAAGTTTTGAATCCAAGTCAAGTTTTTCTTGAAGAACGTTTAGACGGTGCAACAGGATCTGCTATTGTTGTTACTATGGAAGGAACAAGGCCTATTTTAGCAGAGGTTCAAGCTTTAGTGACTCCAACTGTTTTTGGAAATGCTAAGCGCACAACCACAGGTCTTGACTTTAATCGTGTCAGTCTTATTATGGCAGTTCTAGAAAAACGTTGTGGTTTATTGCTTCAAAATCAAGATGCCTATTTAAAATCAGCGGGTGGTGTTAAATTGGATGAACCAGCAATTGATTTAGCTGTTGCTGTAGCTATTGCTTCCAGTTACAAAGAAAAACCCACAAATCCAAAAGAATCATTTATTGGAGAAATTGGACTCACTGGTGAGATTCGTCGCGTGACACGTATTGAGCAACGTATTAATGAGGCTAGTAAATTGGGCTTTACTAAAATTTACGCACCAAAGAATTCTCTAGCTGGGATTGAAATACCTAAAGGCATTGATGTTATTGGTGTGACAACTGTTAGTCAGGTCTTAAAAGCAGTGTTTTCAACA

SEQ ID NO: 4552 - protein, 454 aa, Streptococcus agalactiae
MAKKKSVFTCQECGYQSPKYLGRCPNCSAWSSFVEEVEVQEVKNARVSLNGEKSRPTKLKDVSSINYSRTKTDMDEFNRVLGGGVVPGSLVLIGGDPGIGKSTLLLQVSTQLANKGTVLYVSGEESAEQIKLRSERLGDIDNEFYLYAETNMQSIRSEIEKIKPDFLIIDSIQTIMSPEVSSVQGSVSQVREVTAELMQLAKTNNIATFIVGHVTKEGTLAGPRMLEHMVDTVLYFEGERHHTFRILRAVKNRFGSTNEIGIFEMQSGGLVEVLNPSQVFLEERLDGATGSAIVVTMEGTRPILAEVQALVTPTVFGNAKRTTTGLDFNRVSLIMAVLEKRCGLLLQNQDAYLKSAGGVKLDEPAIDLAVAVAIASSYKEKPTNPKESFIGEIGLTGEIRRVTRIEQRINEASKLGFTKIYAPKNSLAGIEIPKGIDVIGVTTVSQVLKAVFST

SEQ ID NO: 4553 - protein, 495 aa, Streptococcus agalactiae
ATGACCACTTATTTTGATAACTTTTTAAAAACCAATCAAGCCTATGCTGACTTACATGGAACAGCTCATCTACCTATCAAGCCAAAGACAAAGGTTGCTATTGTAACCTGTATGGATTCTCGTTTACACGTTGCTCAAGCTCTAGGGCTAGATTTAGGAGATGCTCATATTTTACGTAATGCTGGTGGACGAGTTACAGACGATGTTCTACGTTCTTTAGTTATTTCGCAACAACAATTAGGAACACGAGAAATCGTTGTTCTACACCATACAGATTGTGGAGCACAGACGTTTACTAACGAAGCTTTTGCTACTCAATTACAGAGAGATTTGGGTGTTGATATGCATGGACATGATTTTCTTCCTTTTAATGATATTGAAGAAAGCGTTCGTGAGGATGTGGCAAAATTACATGCTTCTCCATTAATCCCAAATGATGTTGTTATTTCTGGTGCTATTTATGATGTAGATACTGGTCGTATGGTGGAAGTTAAA

SEQ ID NO: 4554 - protein, 165 aa, Streptococcus agalactiae
MTTYFDNFLKTNQAYADLHGTAHLPIKPKTKVAIVTCMDSRLHVAQALGLDLGDAHILRNAGGRVTDDVLRSLVISQQQLGTREIVVLHHTDCGAQTFTNEAFATQLQRDLGVDMHGHDFLPFNDIEESVREDVAKLHASPLIPNDVVISGAIYDVDTGRMVEVK

SEQ ID NO: 4555 - protein, 1317 aa, Streptococcus agalactiae
ATGAAAAAATATGATGTCATTGTTCTTGGTTTTGGTAAAGCAGGTAAAACATTAGCAGCAAAATTAGCAACACAAGGTAAAAGCGTTGCAATGGTCGAAGAAGACGATAAAATGTATGGGGGAACATGTATCAACATTGGATGTATTCCGACAAAAACGCTTTTAGTATCAGCTAGCAAAAATCACGATTTTCAAGAAGCTATGACTACTAGAAATGAAGTTACAAGTCGTTTACGTGCTAAAAATTTTGCTATGTTGGATAATAAAGACACTGTGGATGTTTATAATGCTAAAGCTCGCTTTATATCAAATAAAGTGGTCGAATTAACAGGAGGAGCTGACAAACAAGAACTTACAGCTGATGTTATTATTATCAATACTGGTGCTAAGTCAGTACAATTACCAATCCCAGGATTAGCTGATTCTCAACATGTTTATGATTCAACGGCAATCCAAGAATTGGCTCATCTTCCTAAACGGTTAGGTATCATTGGAGGCGGTAATATTGGTCTTGAATTTGCGACTTTATATTCTGAATTAGGGAGCAAAGTGACAGTTATTGATAGTCAATCTCGTATCTTTGCGCGTGAGGAAGAGGAATTATCAGAGATGGCTCAAGATTATTTAGAAGAGATGGGAATATCTTTTAAATTATCAGCCGATATCAAATCTGTGCAAAATGAAGATGAAGACGTTGTTATTAGCTTTGAGGATGAAAAATTAAGCTTTGATGCAGTATTATATGCAACAGGACGTAAGCCAAATACAGAAGGTTTAGCACTTGAAAATACAGATATTAAATTGACAGAACGTGGAGCTATTGCTGTTGATGAATATTGCCAAACTTCTGTTGAGAATATTTTTGCAGTTGGTGATGTTAATGGCGGCCCTCAATTCACATATATTTCTTTAGATGACTCACGTATTGTCTTAAATTATTTGAATGGTGATAAGGATTATTCTCTAAAAAATCGAGGAGCAGTACCGACTTCAACCTTTACAAATCCTCCTTTAGCAACGGTAGGTCTAGATGAAAAGACCGCTAAGGAAAAAGGATATCAAGTTAAATCTAATAGCCTTCTTGTTTCTGCCATGCCACGTGCACATGTTAATAATGACCTTAGAGGTATTTTTAAAGTTGTGGTAGATACTGAGACAAATCTTATTTTGGGAGCTCGCTTATTTGGTGCAGAATCCCATGAATTAATTAATATCATCACAATGGCAATGGATAATAAAATCCCATATACTTATTTCCAAAAACAAATTTTCACTCACCCAACAATGGTAGAGAATTTTAATGATTTGTTTAACTTT

SEQ ID NO: 4556 - protein, 439 aa, Streptococcus agalactiae
MKKYDVIVLGFGKAGKTLAAKLATQGKSVAMVEEDDKMYGGTCINIGCIPTKTLLVSASKNHDFQEAMTTRNEVTSRLRAKNFAMLDNKDTVDVYNAKARFISNKVVELTGGADKQELTADVIIINTGAKSVQLPIPGLADSQHVYDSTAIQELAHLPKRLGIIGGGNIGLEFATLYSELGSKVTVIDSQSRIFAREEEELSEMAQDYLEEMGISFKLSADIKSVQNEDEDVVISFEDEKLSFDAVLYATGRKPNTEGLALENTDIKLTERGAIAVDEYCQTSVENIFAVGDVNGGPQFTYISLDDSRIVLNYLNGDKDYSLKNRGAVPTSTFTNPPLATVGLDEKTAKEKGYQVKSNSLLVSAMPRAHVNNDLRGIFKVVVDTETNLILGARLFGAESHELINIITMAMDNKIPYTYFQKQIFTHPTMVENFNDLFNF

SEQ ID NO: 4557 - protein, 1434 aa, Streptococcus agalactiae
GTGCGTTATGCACCAAGTCCAACAGGATTGTTACACATCGGAAATGCGCGTACTGCGCTCTTTAACTACCTTTATGCTCGCCATCATGGTGGGGATTTTGTTATTCGTATTGAAGATACTGACCGAAAACGCCACGTCGAAGATGGTGAACGCTCTCAATTGGAGAACTTACGTTGGCTAGGTATGGACTGGGATGAAAGCCCTGAAACACATGAAAATTATCGTCAATCAGAACGCCTTGAGCTCTACCAACGTTATATTGATCAGTTGTTAGCAGAAGGTAAAGCCTACAAGTCCTATGTGACTGAGGAAGAATTAGCAGCAGAGCGTGAACGCCAAGAATTGGCAGGCGAAACACCTCGCTATATCAACGAATTTATCGGAATGTCAGAAACTGAAAAAGAAGCTTACATTGCAGAACGTGAAGCATCAGGCATCATTCCGACAGTACGCCTTGCTGTTAATGAATCTGGGATTTATAAATGGACTGATATGGTAAAAGGTGACATTGAGTTTGAAGGCTCTAATATCGGCGGAGACTGGGTTATTCAGAAGAAAGATGGTTATCCAACTTACAATTTCGCAGTAGTTATTGATGATCATGACATGCAAATTTCGCATGTTATTCGTGGCGATGACCATATTGCAAATACGCCAAAACAATTAATGGTTTATGAAGCACTCGGTTGGGAAGCGCCACAATTTGGTCACATGACATTGATTATAAACTCAGAGACTGGTAAGAAATTATCAAAACGCGACACCAATACTCTTCAATTTATCGAAGACTATCGTAAAAAAGGTTATATGTCGGAAGCTGTCTTTAATTTCATTGCCCTTCTTGGTTGGAATCCTGGTGGAGAAGAAGAAATCTTCTCACGCGAGCAATTAATTAATCTATTTGATGAAAATCGTCTTAGCAAATCACCAGCAGCATTCGATCAGAAGAAGATGGATTGGATGAGTAATGATTACCTAAAAAATGCTGATTTTGAGAGTGTTTTTGCACTTTGCAAACCATTCTTAGAAGAAGCTGGTCGACTTACAGACAAAGCTGAAAAATTAGTTGAGCTTTATAAACCTCAATTAAAATCAGCTGATGAGATTGTACCATTAACAGACCTTTTCTTTGCAGATTTTCCAGAATTAACAGAAGCCGAAAAAGAAGTAATGGCAGCAGAAACAGTCCCAACAGTCTTATCTGCTTTTAAGGAAAAGTTAGTATCGCTTTCTGACGAAGAATTCACTAGAGATACTATTTTCCCTCAAATTAAGGCTGTTCAAAAAGAAACAGGTATTAAAGGTAAGAACCTATTTATGCCTATTCGTATTGCGGTTTCTGGTGAAATGCATGGACCAGAGTTACCAGATACTATTTATTTATTAGGTAAAGAAAAATCAGTTCAACATATCGATAATATGTTAGCAAAATTA

SEQ ID NO: 4558 - protein, 478 aa, Streptococcus agalactiae
MRYAPSPTGLLHIGNARTALFNYLYARHHGGDFVIRIEDTDRKRHVEDGERSQLENLRWLGMDWDESPETHENYRQSERLELYQRYIDQLLAEGKAYKSYVTEEELAAERERQELAGETPRYINEFIGMSETEKEAYIAEREASGIIPTVRLAVNESGIYKWTDMVKGDIEFEGSNIGGDWVIQKKDGYPTYNFAVVIDDHDMQISHVIRGDDHIANTPKQLMVYEALGWEAPQFGHMTLIINSETGKKLSKRDTNTLQFIEDYRKKGYMSEAVFNFIALLGWNPGGEEEIFSREQLINLFDENRLSKSPAAFDQKKMDWMSNDYLKNADFESVFALCKPFLEEAGRLTDKAEKLVELYKPQLKSADEIVPLTDLFFADFPELTEAEKEVMAAETVPTVLSAFKEKLVSLSDEEFTRDTIFPQIKAVQKETGIKGKNLFMPIRIAVSGEMHGPELPDTIYLLGKEKSVQHIDNMLAKL

SEQ ID NO: 4559 - protein, 327 aa, Streptococcus agalactiae
TTGAATACTACACAAAATATGATTCAAGGACATAAAGATGTCCAAATTATTTTCGCACAAAATGATGAAATGGCACTTGGGGCTGCACAGGCTGTCAAATCTGCTGGCTTGCAAAATGTTCTTATCGTAGGAATTGATGGTCAGCCAGATGCCCATGATGCCATTAAAAAAGGAGATATTTCAGCCACTATTGCACAACAACCAGCTAAGATGGGAGAAATAGCAATTCAAGCAGCAATTGATCATTATAAAGGCAAAAAAGTAGAGAAAGAAACAATTTCTCCAATTTACCTTGTTACCAAAGACAATGTTGAAAAATACAATTGG

SEQ ID NO: 4560 - protein, 109 aa, Streptococcus agalactiae
MNTTQNMIQGHKDVQIIFAQNDEMALGAAQAVKSAGLQNVLIVGIDGQPDAHDAIKKGDISATIAQQPAKMGEIAIQAAIDHYKGKKVEKETISPIYLVTKDNVEKYNW

SEQ ID NO: 4561 - protein, 114 aa, Streptococcus agalactiae
TTGAATACTACACCAAATATGATTTCAGGACATAAAGATGTCCAAATTATTTTCGCACCAAATGATGAAATGGCACTTGGGGCTGCACAGGCTGTCAAATCTGCTGGCNNNNNT

SEQ ID NO: 4562 - protein, 38 aa, Streptococcus agalactiae
  VARIANT 37, 38: Xaa = Any Amino Acid
MNTTPNMISGHKDVQIIFAPNDEMALGAAQAVKSAGXX

SEQ ID NO: 4563 - protein, 638 aa, Streptococcus agalactiae
ATGAAATTTGGAAAAAAACTTGGCTTTCTAGCCTTATTGATGTCTATTGTCCTCATTCTAGGTGCATGTGGTAAAACTGGACTTGGAAATTCTACTGGGAATTCTACAAAAAATGTAACCAAAAAATCTGCTAAAAACTTGAAACTAGGTGTATCTATTTCAACAACTAACAATCCCTACTTTGTTGCGATGAAAGACGGTATTGACAAATATGCTAGCAATAAAAAAATAAGCATTAAGGTAGCTGATGCTCAAGATGACGCCGCACGTCAAGCAGATGATGTCCAAAACTTTATTAGTCAAAACGTAGATGCTATTTTGATTAATCCCGTTGACTCAAAAGCTATTGTAACAGCTATTAAGTCTGCAAACAACGCTAATATTCCTGTTATTCTAATGGACCGTGGTAGTGAGGGAGGCAAAGTATTAACTACTGTCGCTTCAGATAACGTTGCTGCTGGTAAGATGGCTGCGGATTATGCTGTTAAAAAACTAGGCAAAAAAGCAAAAGCCTTTGAATTATCTGGAGTACCAGGTGCCTCTGCTACTGTAGACCGTGGTAAAGGATTTCATTCAGTTGCAAATCTAAACTTGACATTCTTTCAGCCAATCTGCCAATTTTGACCGCGCCAAAGCTT

SEQ ID NO: 4564 - protein, 213 aa, Streptococcus agalactiae
MKFGKKLGFLALLMSIVLILGACGKTGLGNSTGNSTKNVTKKSAKNLKLGVSISTTNNPYFVAMKDGIDKYASNKKISIKVADAQDDAARQADDVQNFISQNVDAILINPVDSKAIVTAIKSANNANIPVILMDRGSEGGKVLTTVASDNVAAGKMAADYAVKKLGKKAKAFELSGVPGASATVDRGKGFHSVAKSKLDILSANLPILTAPKL

SEQ ID NO: 4565 - protein, 927 aa, Streptococcus agalactiae
ATGAAATATATATCAGAGTTAACAACCCTGATTGCGTTAGCTGGTTTAATGGTTATTATCACACTCATTAATCCTAATTTCCTCACAACCAATAATCTACTCAATTTATTATTACAAGTAACTGCAAATGGTTTTATCGCTTTCGGGATGACCTTCGTTATTTTGACTGGCGGTATTGATTTATCAGTCGGGTCCATATTAGCCCTATCTAGTGCATTAACAGCTGGATTAATCGGCCACGGAGTACCCGTTGGTATTGCTATCGTTTTATCTGTTGCCTTAGGTGGCATCTTGGGAATGCTAAACGGACTCTTCATTTCTTACGGAAAATTAGCACCATTTATCGTTACACTGGCAACAATGACTATCTTTAGAGGAGCAACGCTAGTTTATTCAAACGGCAACCCAATTACCGCTGGCTTATCCGATAGTTTTCTATTCCAATTTTTGGGACAAGGCTATATTGTTGGTATCCCATTCCCAGTCATTCTCATGTTTCTTACTTTTATTATTTTGTATATTTTGTTACATAAAACAGCCTTCGGGAAATCTGTTTACGCTTTAGGAGGTAATGAAAAAGCAGCGTATATCTCGGGTATTAAGTTAAACAAAGTTAAAATTATCATCTACACTATCTCAGGTATCATGGCTTCCATTTCTGGGTTAATTATCACATCACGCCTTAGCTCAGCACAACCAACAGCTGGAGCAAGTTATGAGATGGATGCTATTGCCGCCGTTGTCTTAGGTGGAACGTCTTTATCTGGTGGGAAAGGACGTATCATTGGAACATTGATTGGTGCTCTCATTATTGGTGTCCTGAACAATGGATTAAACATCATTGGTGTCTCTGCATTTTGGCAACAAGTTGTGAAAGGTATCGTTATTTTAATGGCTGTTTTACTTGATCGCTTTAAAGTAGCAAAA

SEQ ID NO: 4566 - protein, 309 aa, Streptococcus agalactiae
MKYISELTTLIALAGLMVIITLINPNFLTTNNLLNLLLQVTANGFIAFGMTFVILTGGIDLSVGSILALSSALTAGLIGHGVPVGIAIVLSVALGGILGMLNGLFISYGKLAPFIVTLATMTIFRGATLVYSNGNPITAGLSDSFLFQFLGQGYIVGIPFPVILMFLTFIILYILLHKTAFGKSVYALGGNEKAAYISGIKLNKVKIIIYTISGIMASISGLIITSRLSSAQPTAGASYEMDAIAAVVLGGTSLSGGKGRIIGTLIGALIIGVLNNGLNIIGVSAFWQQVVKGIVILMAVLLDRFKVAK

SEQ ID NO: 4567 - protein, 1476 aa, Streptococcus agalactiae
ATGAAAATTGACATGAGGAATATCTCCAAATCCTTCGGTACTAATAAAGTTCTAGAGAAGATTGATTTGGAATTACAATCTGGTCAAATACACGCGCTTATGGGTGAAAATGGTGCGGGTAAATCAACCTTAATGAACATTCTAACAGGACTTTTTCCAGCAAGTACAGGAACTATTTATATTGATGGCGAGGAACGAACTTTTTCAAACCCTCAAGAAGCAGAGGAATTTGGCATTAGTTTTATTCACCAAGAGATGAATACTTGGCCGGAAATGACTGTCTTGGAAAATCTCTTTCTTGGACGTGAAATCAAGACAACTTTTGGCTTACTCAATCAAAAATTAATGAGACAAAAAGCACTTGAAGCTTTTAAAAGATTAGGTGTGACTATTCCCCTAGACATCCCGATTGGTAACTTGTCTGTTGGACAACAACAAATGATTGAAATCGCCAAAAGTCTCCTAAACCAACTCTCTATTTTGGTAATGGATGAACCGACTGCTGCTTTAACAGATCGTGAAACTGAAAATCTTTTCCGAGTTATCCGAAGTTTAAAACAAGAAGGAGTGGGCATTGTCTATATCTCCCATCGAATGGAGGAAATTTTTAAAATCACTGACTTCGTAACCGTCATGAGAGATGGTGTCATTGTAGATACAAAAGAAACATCACTCACAAATTCTGACGAATTGGTTAAAAAAATGGTTGGCCGAAAATTGGAAGATTACTATCCTGAAAAACATTCTGAAATTGGGCCTGTTGCTTTTGAAGTTAGTAACCTCTGTGGAGATAATTTCGAGGACGTTTCCTTTTATGTCCGTAAAGGCGAGATTCTTGGATTTTCTGGATTAATGGGAGCTGGGCGTACTGAAGTTATGCGAACTATCTTTGGAATTGATAAAAAGAAGTCTGGTAAGGTGAAAATTGATAACCAAGAAATCACTATTACTAGCCCAAGTCAAGCTATCAAGCAGGGCATTGGTTTTTTGACCGAAAATAGAAAAGATGAAGGTCTCATCCTAGACTTCAATATCAAGGACAATATGACTCTCCCTAGCACTAAAGATTTTAGCAAACATGGTTTCTTTGATGAAAAAACAAGCACAACATTTGTGCAACAATTGATTAATCGCCTCTACATTAAATCAGGGAGACCAGATTTAGAGGTTGGAAATCTTTCTGGAGGTAACCAACAAAAGGTCGTTCTCGCTAAATGGATTGGTATTGCTCCTAAAGTCTTAATTCTTGATGAGCCAACACGTGGTGTTGATGTCGGAGCTAAACGAGAGATTTACCAATTAATGAATGAACTAGCAGACAGAGGTGTTCCAATTGTCATGGTATCATCAGACTTACCTGAAATTCTAGGTGTTAGTGACCGCATCATGGTAATGCACGAAGGTCGAATCAGTGGAGAACTCAGTCGAAAAGAAGCTGACCAAGAAAAAGTTATGCAACTAGCCACAGGAGGTAAG

SEQ ID NO: 4568 - protein, 492 aa, Streptococcus agalactiae
MKIDMRNISKSFGTNKVLEKIDLELQSGQIHALMGENGAGKSTLMNILTGLFPASTGTIYIDGEERTFSNPQEAEEFGISFIHQEMNTWPEMTVLENLFLGREIKTTFGLLNQKLMRQKALEAFKRLGVTIPLDIPIGNLSVGQQQMIEIAKSLLNQLSILVMDEPTAALTDRETENLFRVIRSLKQEGVGIVYISHRMEEIFKITDFVTVMRDGVIVDTKETSLTNSDELVKKMVGRKLEDYYPEKHSEIGPVAFEVSNLCGDNFEDVSFYVRKGEILGFSGLMGAGRTEVMRTIFGIDKKKSGKVKIDNQEITITSPSQAIKQGIGFLTENRKDEGLILDFNIKDNMTLPSTKDFSKHGFFDEKTSTTFVQQLINRLYIKSGRPDLEVGNLSGGNQQKVVLAKWIGIAPKVLILDEPTRGVDVGAKREIYQLMNELADRGVPIVMVSSDLPEILGVSDRIMVMHEGRISGELSRKEADQEKVMQLATGGK

SEQ ID NO: 4569 - protein, 396 aa, Streptococcus agalactiae
ATGAAAAAGACTGGCATATTAAATAGTCATCTCGCTAAATTAGCAGATGACCTTGGGCATACTGATCGAGTTTGTATTGGAGATCTGGGTCTACCTGTTCCAAATGGCATTCCAAAGATTGATTTGTCTTTGACCTCTGGAATACCTAGTTTCCAAGAGGTACTTGATATCTATTTAGAGAATATCTTAGTTGAAAAAGTCATTTTAGCAGAAGAAATCAAGGAAGCAAATCCGGATCAATTATCAAGGTTATTAGCTAAACTTGATAACTCTGTTAGCATAGAGTACGTCAGTCACGATCATTTAAAACAAATGACCCAAGATGTCAAAGCAGTTATTCGTACAGGTGAAAATACACCGTATTCAAATATTATTCTACAATCTGGTGTTATCATC

SEQ ID NO: 4570 - protein, 132 aa, Streptococcus agalactiae
MKKTGILNSHLAKLADDLGHTDRVCIGDLGLPVPNGIPKIDLSLTSGIPSFQEVLDIYLENILVEKVILAEEIKEANPDQLSRLLAKLDNSVSIEYVSHDHLKQMTQDVKAVIRTGENTPYSNIILQSGVII

SEQ ID NO: 4571 - protein, 909 aa, Streptococcus agalactiae
ATGAGTAACATTGTCATTATCGGTAGTATTTCCATGGACTTAGTTATGGAAACCAATCGTATCGCCAAAGAGGGAGAAACCGTATTTGGCCAACGTTTTTCAATGGTTCCAGGAGGTAAAGGTGCTAATCAGGCTGTCGCTATTGGGCGTCTTAGCCAAGATCGAGATAATATTACTATTCTTGGTGCCATTGGCGAGGATTCTTTTGGTCCCATTCTTTTGGATAATTTAAACAAAAACCATGTTACTACGGATTTTGTGGGAACGATACCATCTTCTTCAGGTGTTGCCCAAATCACTCTTTATAATAATGATAATCGAATCATTTACTGTCCTGGAGCCAACGGAAAAGTTGATACTAAAAAGTGGTCTCAGGAGTGGTCAATAATTAAAGAAGCTGATTTAGTTGTATTACAAAATGAAATTCCTCATCAAGCAAATATGAAAATTGCTAATTTTTGTAAAGAACATAGTATTAAATTACTCTATAATCCTGCACCATCTAGAAAGACTGATATTGAGATGCTCGATAAGGTCGATTATTTCACACCAAATGAACACGAATGTCAAGAGCTGTTCCCAAACCAAAAACTAGAGGATATATTAGCCACATATCCTGAAAAACTAATTGTAACACTCGGCACAAAAGGAGCCATCTACTCTGATGGAAAAGAAAGCCATTTAATTCCTGCCTTAGAAACTAAAGCTGTTGATACAACTGGTGCAGGTGATACTTTTAACGGTGCATTCGGTTATGCTATCTCGAAAAAATTTAAGATTGCTAATGCCTTACGTTTTGCAACTCTAGCTGCTCACTTATCCGTGCAAAAATTTGGTGCACAGGGTGGCATGCCTACAATTAAAGAAATGGAGGACAACCAACATTATGAAAAAGACTGGCATATTAAA

SEQ ID NO: 4572 - protein, 303 aa, Streptococcus agalactiae
MSNIVIIGSISMDLVMETNRIAKEGETVFGQRFSMVPGGKGANQAVAIGRLSQDRDNITILGAIGEDSFGPILLDNLNKNHVTTDFVGTIPSSSGVAQITLYNNDNRIIYCPGANGKVDTKKWSQEWSIIKEADLVVLQNEIPHQANMKIANFCKEHSIKLLYNPAPSRKTDIEMLDKVDYFTPNEHECQELFPNQKLEDILATYPEKLIVTLGTKGAIYSDGKESHLIPALETKAVDTTGAGDTFNGAFGYAISKKFKIANALRFATLAAHLSVQKFGAQGGMPTIKEMEDNQHYEKDWHIK

SEQ ID NO: 4573 - protein, 984 aa, Streptococcus agalactiae
ATGAGTACGATTAGACAAGTCGCCGAGAAAGCTGGCGTATCAACATCTACTGTCTCAAGGTATATATCCCAAAATGGTTACGTTAGTCAAAAAGCAAGTCAAAAAATCGAGCAAGCTATCCGCGAACTCCATTATGTTCCAAATTTCCTTGCACAATCTCTGAAAACCAAAAAAAATCAACTTGTTGGATTACTACTTCCCGATATTTCAAACCCTTTCTTTCCAAGACTTGCTAGAGGAGTTGAAGAATTTCTAAAAGAACAGGGTTATCGTGTCATGCTTGGCAACACAAATAACAAGAGCCATTTAGAAGAAGAGTACTTAAATGTGCTATTACAAAGTAATGCTGCAGGGATTATTACAACACACGATTTCACCAAAAATCATCCTGAAATAGATATTCCAGTTGTAGTTGTTGACCGCGTTAATCAAGAAACACAGTACGGCGTTTTCTCTGATAATAAAGAGGGAGGAAAATTAGCAGCTCAAGCTATTTGGACAGCAGGTGCTACCAATATATTACTCATTCGTGGTCCGCTAGATAAAGCTGATAACCTTAATCAAAGGTTTCAAGGAAGCCAAAATTACCTATTAAACAAAGGGGCTCGTTTTGCTATCGAAGATAGTGCCAGTTTTGATTTTGCAGAGATTCAAATTGAAGCGAAAACTTTACTTGACCACCATCCAGATATTGATAGCATTATCGCTCCATCTGATATACATGCTATTGCCTACCTACACGAGATTCTTAATCGAGGGAAGCGAATCCCTGAAGATGTACAAATTATTGGTTATGATGATATTTTAATGAGCCAATTTATCTACCCTTCGTTGTCAACTATTCACCAATCATCATATATTATGGGACAAAAAGCAGCTGAATTAATTTTCAAAATTACTAATCAATTACCTATTACCAATAAGCGTATTAAATTACCCGTTCATTATGTCGAACGTGAAACCCTAAGGAGGAAAATAGATGAG

SEQ ID NO: 4574 - protein, 328 aa, Streptococcus agalactiae
MSTIRQVAEKAGVSTSTVSRYISQNGYVSQKASQKIEQAIRELHYVPNFLAQSLKTKKNQLVGLLLPDISNPFFPRLARGVEEFLKEQGYRVMLGNTNNKSHLEEEYLNVLLQSNAAGIITTHDFTKNHPEIDIPVVVVDRVNQETQYGVFSDNKEGGKLAAQAIWTAGATNILLIRGPLDKADNLNQRFQGSQNYLLNKGARFAIEDSASFDFAEIQIEAKTLLDHHPDIDSIIAPSDIHAIAYLHEILNRGKRIPEDVQIIGYDDILMSQFIYPSLSTIHQSSYIMGQKAAELIFKITNQLPITNKRIKLPVHYVERETLRRKIDE

SEQ ID NO: 4575 - protein, 96 aa, Streptococcus agalactiae
GTGAACATAGTATCACAGCTTTATGACTTGAATATGACCTCTAAAAATAATGATATTTTATCATTAAATTATTTAAAAAATAGCTTGACAATTTTT

SEQ ID NO: 4576 - protein, 32 aa, Streptococcus agalactiae
MNIVSQLYDLNMTSKNNDILSLNYLKNSLTIF

SEQ ID NO: 4577 - protein, 1086 aa, Streptococcus agalactiae
ATGTCACATGCTTGGAAAGAATTAACCTTTTATAAGAAAAAATACCTCCTGATTGAATTGCTAATCATTGTTATGATGTTCATGGTAGTTTTTTTATCAGGTTTAGCAAACGGTTTAGGTAGAGCTGTTAGTGCTGCTATTGAAAATAACCCAGCTCAAACCTATATTTTGAATGAAGGTGCTGAACAAGTGATTACATCATCTGTATTGACAACTAAAGATCAGACAGATTTAAACAGTTTGAATTTAAAAGATAGTACCACTTTAAATATTCAACGTTCGAGTTTAACTCGACAAGGACATGAAAAGAAAATTGATATTTCTTATTTTGCTATTGATAAAGATTCTTTTATGGCACCTACACTTTCTGAGGGAAAACAACTGACAAGTTACAAAAAAGCTATTATTTTAAATGATAGTTTAAAAGCTGAAGGGATAAAGTTAGGTGATAAAGTGATTGATAAGTCATCATCTATATCACTAACAGTCGTTGGATTTGTCCATAATAGTATGTATGGTCACGGACCTGTGGCATTTATTGATAAAGACATTTATACCGAAATTAATAAAAAGATTAATCCTCAATACCAGTTCTTACCTCAGGCATTAGTTATGAAAAATGATAAAAGTATATCTCATTTACCAACTCAATTAGAAGCTGTTAGTAAAAAAGATGTCATTCAACATATTCCTGGTTATAGTGCCGAACAATCCACTTTGAATATGATTTTATGGGTCCTTGTCGTAGCTTCAGCTGGTATTTTAGGTGTCTTTTTCTACATCATCACACTTCAAAAGCGTCATGAATTTAGCGTCATGAAAGCTATTGGGACAAAAATGTCAGAGATTGCCCTATTTCAATTGAGTCAAGTCATCATATTGGCACTGTTTGGTATCATTGTTGGAGATGGATTGGCGATTGCTCTCTCTTATGTATTACCAGCTCAAATGCCATTTGTTATTAATTGGCAAAATATTATTTTAGTATCGTTTGTATTTTTAGTCATTGCAATGATTAGTAGTGCTCTGTCAATTGTAAAAGTTGCTAAAATCGACCCAGTCGAAGTTATTAATGGGGGAGGAGAA

SEQ ID NO: 4578 - protein, 362 aa, Streptococcus agalactiae
MSHAWKELTFYKKKYLLIELLIIVMMFMVVFLSGLANGLGRAVSAAIENNPAQTYILNEGAEQVITSSVLTTKDQTDLNSLNLKDSTTLNIQRSSLTRQGHEKKIDISYFAIDKDSFMAPTLSEGKQLTSYKKAIILNDSLKAEGIKLGDKVIDKSSSISLTVVGFVHNSMYGHGPVAFIDKDIYTEINKKINPQYQFLPQALVMKNDKSISHLPTQLEAVSKKDVIQHIPGYSAEQSTLNMILWVLVVASAGILGVFFYIITLQKRHEFSVMKAIGTKMSEIALFQLSQVIILALFGIIVGDGLAIALSYVLPAQMPFVINWQNIILVSFVFLVIAMISSALSIVKVAKIDPVEVINGGGE

SEQ ID NO: 4579 - protein, 684 aa, Streptococcus agalactiae
ATGTCAGCAATCTTAGAATTAAAACACATCTCAAAACACTATCCAGATGGAGATGAGCTTTTATCAATATTAGATAATTTAGATTTATCAGTTTCTGCAGGTGAGTTTGTAGCTATACTGGGACCCTCAGGTTCAGGTAAAAGCACACTTTTATCCATTGCAGGGTTACTTCTTGGCGCAGATCAAGGTAGTTTGTATGTCAATCATGAGAACGTTACGGATTTGTCTCAAAGACAAAGAACACAATTGCGCCGTGAAGCACTAGGTTTTATATTTCAAAGTCATCAACTGCTTCCTTATTTAACAATCCAAGAACAGTTGCAACAAGAGGCTCGATTTGCAAAACACTATGATAAGAAAACAAGCTTGGAAGAAATTAATAAATTATTATCAGATTTAGGAATAGAGCAGTGTGCACATAAATACCCTAACCAATTATCGGGAGGACAAAAGCAACGCGCAGCAATTGCTAGAGCATTTATTAATCATCCTAAGGTTATCTTGGCAGATGAGCCAACAGCTAGCCTTGATGAAGAACGTGGGCGTCAAGTTACAGAACTTATTCGTCAGGAAGTTAAATCACATAATACTGCAGCTATTATGGTGACACACGATGAGCGCGTTCTAGATTTAGTAGATACCGTTTATCGTTTAAAGGACGGGAAATTAGTTAAAGAAAACTTC

SEQ ID NO: 4580 - protein, 228 aa, Streptococcus agalactiae
MSAILELKHISKHYPDGDELLSILDNLDLSVSAGEFVAILGPSGSGKSTLLSIAGLLLGADQGSLYVNHENVTDLSQRQRTQLRREALGFIFQSHQLLPYLTIQEQLQQEARFAKHYDKKTSLEEINKLLSDLGIEQCAHKYPNQLSGGQKQRAAIARAFINHPKVILADEPTASLDEERGRQVTELIRQEVKSHNTAAIMVTHDERVLDLVDTVYRLKDGKLVKENF

SEQ ID NO: 4581 - protein, 669 aa, Streptococcus agalactiae
ATGATTAAAATATTAGTTGTAGAGGATAACATTGTTCAACAAAAAATCATTACCACAAAATTAACACAAGAGGGCTACCAATTTATCACTGCTTCAAATGGACAAGAAGCTCTAAATTGTCTAGATACAGAAGAAGTACAATTGATTATAACTGATATCATGATGCCCATGATGGATGGTTATCAATTAATTCAAGAACTCAGGTCAGCTGCTTATAATGTCCCAATCATTGTTATGACAGCAAAATCACAAATGGAAGATATGACAAAAGGGTTTGGCCTTGGTGCAGATGATTATATGGTTAAGCCTGTGCAGTTACAAGAATTAGCTTTACGTATTAAGGCACTCTTGAGGAGAGCTAATATTGTAGCTCAACATCAGCTAATTATTGGGAATACTTGTCTTAATGAAGATGAATTAAGCTTGAAATATTTTGAGCAAGAAATTGTATTTCCTCAGAAAGAATTTAGGGTTCTTTTCCACTTACTTAGCTATCCTAATAGGATTTTCACACGTTTAGAACTATTGGATAGTATTTGGGGAATGGATACTGATTTAGATGAGCGGGTGGTAGATGCTTGCATCAATAAAATTAGACGAAAAGTAGAACACTTACCAGATTTTAAGATTGAGACGGTGAGAGGGGTAGGGTATCGTGCAAAAAATGAC

SEQ ID NO: 4582 - protein, 223 aa, Streptococcus agalactiae
MIKILVVEDNIVQQKIITTKLTQEGYQFITASNGQEALNCLDTEEVQLIITDIMMPMMDGYQLIQELRSAAYNVPIIVMTAKSQMEDMTKGFGLGADDYMVKPVQLQELALRIKALLRRANIVAQHQLIIGNTCLNEDELSLKYFEQEIVFPQKEFRVLFHLLSYPNRIFTRLELLDSIWGMDTDLDERVVDACINKIRRKVEHLPDFKIETVRGVGYRAKND

SEQ ID NO: 4583 - protein, 1068 aa, Streptococcus agalactiae
ATGACTAAGCTAAGGCGATTTCGGTTTCCGTTAAGATTTTATTTCACATTAATGTTTGTGTTAACGATGCTTTTCTCAGTCCTAGCTTCTCTTTTACTAGTTGCAGCAATAGTTTTTACTTTTTTTCAAGGAGTCTTAACTACTCATGTATTACAAGTTAGCGCTCTCGCTGTTGTTTTTTTAAGCCTTGTGATAGCTAGTATTAGTATGTGGTACGGTTCTTATCATTTAACAAAACCAATTTTAGATATTAGCCGTATTGTGTCCAATGTTGCAGACGGTGACTTTGAAGGGCATATTTATCGAAACAGTAATCGTCGTAAATCCTATGAGTATTATAATGAATTGGATGAGCTATCTGAAAGTATTAATCAGATGATTGTTTCTTTATCTCATATGGATCATATGCGAAAAGACTTTATCACTAATGTTTCTCATGAGCTAAAGACTCCGATTGCTGCAGTAGCTAATATTGTAGAACTATTACAAGATCCAGAATTAGATGAAGAAACACAAAGTGAGTTATTAGGTCTTGTTAAAACAGAGAGCCTAAGGTTAACAAGATTATGTGATACGATGTTGCAAATGTCGCGCGTGGATAATCAGGAGACTATTGGGGAGCTATCCTCTGTTCGTGTAGATGAACAAATTCGTCAAGCAATGATTAGTTTAACAGAACGTTGGCAAGCTAAAAGAATAAATTTTCAACTGGATTCAAAACCATATACTGTTTACTCAAACTCTGACTTACTGATGCAAGTTTGGATAAACCTTTTAGATAATGCAATAAAATATTCCGATGATATTGTAGACTTACGTGTACGAATGGAAGAAACTAATAATCATTATCTGAGAGTTATTATTTCTGATAAAGGTAGGGGAATTTCTCAATATGATGTTCAGCATATATTTGATAAATTTTACCAAGCGGATCAGTCGCATAATCAACAAGGAAATGGATTAGGACTAGCAATAGTTAAACGTATAATTGTTCTTTGTAAGGGACGTATTAGTGTCTCCAGTCAGTTTGAAATTGGAACAGAATTTTGTGTAGAACTACCTTTATCA

SEQ ID NO: 4584 - protein, 356 aa, Streptococcus agalactiae
MTKLRRFRFPLRFYFTLMFVLTMLFSVLASLLLVAAIVFTFFQGVLTTHVLQVSALAVVFLSLVIASISMWYGSYHLTKPILDISRIVSNVADGDFEGHIYRNSNRRKSYEYYNELDELSESINQMIVSLSHMDHMRKDFITNVSHELKTPIAAVANIVELLQDPELDEETQSELLGLVKTESLRLTRLCDTMLQMSRVDNQETIGELSSVRVDEQIRQAMISLTERWQAKRINFQLDSKPYTVYSNSDLLMQVWINLLDNAIKYSDDIVDLRVRMEETNNHYLRVIISDKGRGISQYDVQHIFDKFYQADQSHNQQGNGLGLAIVKRIIVLCKGRISVSSQFEIGTEFCVELPLS

SEQ ID NO: 4585 - protein, 1188 aa, Streptococcus agalactiae
ATGGGAAAAGAAAAATTAATTTTAGCTTATTCTGGTGGTTTAGATACCTCTGTTGCTATAGCTTGGTTAAAAAAAGATTATGACGTTATTGCTGTCTGTATGGATGTTGGCGAAGGTAAAGATCTTGATTTTATTCACGATAAGGCTTTAACAATAGGTGCCATAGAATCTTATATTTTAGATGTTAAAGATGAGTTCGCTGAGCATTTTGTGTTACCAGCTTTACAGGCACATGCGATGTATGAACAAAAATACCCGCTTGTTTCAGCGCTTAGTCGTCCAATTATTGCTCAAAAATTAGTTGAAATGGCACATCAAACAGGTGCGACCACAATTGCCCATGGATGTACAGGTAAAGGAAATGACCAAGTGCGTTTTGAAGTTGCAATTGCAGCACTAGATCCTGAATTAAAAGTAATTGCCCCTGTTCGTGAGTGGAAGTGGCATCGTGAAGAGGAAATTACTTTTGCAAAAGCTAACGGCGTACCTATTCCAGCAGATTTAGATAACCCTTATTCTATAGACCAAAATTTATGGGGACGTGCCAATGAATGTGGTGTGCTTGAGAATCCTTGGAATCAAGCGCCAGAAGAAGCTTTTGGTATTACAAAATCACCAGAAGAAGCTCCTGATTGTGCAGAATATATTGATATTACGTTCCAAAATGGGAAGCCTATAGCTATAAACAATCAAGAAATGACACTAGCAGATTTGATTTTATCGCTAAATGAAATTGCAGGAAAACATGGTATTGGACGCATTGATCATGTTGAAAATCGTTTAGTCGGTATCAAATCACGTGAAATTTATGAATGTCCTGCGGCAATGGTACTGTTAGCTGCTCATAAAGAAATTGAAGATTTAACATTAGTCCGTGAAGTGTCTCATTTTAAACCTATCCTTGAAAATGAACTATCAAATCTTATTTATAATGCTTTATGGTTTAGTCCAGCTACAAAAGCTATCATTGCCTATGTCAAAGAAACACAAAAAGTGGTTAATGGTACTACAAAAGTTAAGTTATATAAAGGTTCTGCCAAAGTCGTTGCTCGCCACTCGTCTAATTCATTATATGATGAGAACTTAGCAACTTATACAGCTGCTGATAACTTTGATCAAGATGCAGCAGTTGGTTTTATCAAACTCTGGGGACTTCCAACCCAAGTTAATGCACAAGTAAACAAAGGA

SEQ ID NO: 4586 - protein, 396 aa, Streptococcus agalactiae
MGKEKLILAYSGGLDTSVAIAWLKKDYDVIAVCMDVGEGKDLDFIHDKALTIGAIESYILDVKDEFAEHFVLPALQAHAMYEQKYPLVSALSRPIIAQKLVEMAHQTGATTIAHGCTGKGNDQVRFEVAIAALDPELKVIAPVREWKWHREEEITFAKANGVPIPADLDNPYSIDQNLWGRANECGVLENPWNQAPEEAFGITKSPEEAPDCAEYIDITFQNGKPIAINNQEMTLADLILSLNEIAGKHGIGRIDHVENRLVGIKSREIYECPAAMVLLAAHKEIEDLTLVREVSHFKPILENELSNLIYNALWFSPATKAIIAYVKETQKVVNGTTKVKLYKGSAKVVARHSSNSLYDENLATYTAADNFDQDAAVGFIKLWGLPTQVNAQVNKG

SEQ ID NO: 4587 - protein, 1382 aa, Streptococcus agalactiae
ATGACAAAAAATCATAAGTTATGGGGTGGTCGTTTTGAAAGTAGTCTTGAAAAATGGGTTGAAGAGTTCGGTGCATCAATCAGTTTCGACCAAAAGTTAGCTCCCTATGATATGAAGGCTTCTATGGCCCATGTCACAATGTTAGGCAAAACGGATATTATTAGTCAAGAAGAAGCAGGCTTGATAAAAGATGGTTAAAAATACTGCAAGATAAATACAGAGCAGGTCAATTGACTTTTAGCATATCAAATGAAGACATTCATATGACATAGAGAGCTTATAACCGCTGAAATTGGAGAAGTAGCAGGTAAGCTTCATACTGCACGTTCACGAAATGATCAAGTGGCTACAGATATGCACCTTTATTTGAAAGATAAATTGCAAGAAATGTTGAAGAAATTGCTTCATTTACGAACAACCTTAGTTAATTTAGCAGAAAATCATATCTATACTGTTATGCCAGGATATACACATTTACAACATGCTCAGCCGATTTCATTTGGACATCATCTAATGGCTTACTATAATATGTTTACGCGTGATACAGAGCGATTAGAGTTTAATATGAAACACACCGATCTATCACCATTAGGAGCAGCAGCTCTAGCAGGGACCACGTTTCCTATTGACCGCCATATGACAACTCGTTTATTAGATTTGAAAAACCATATAGTAATTCGCTTGATGCTGTCTCAGATCGTGATTTTATCATAGAATTTTTATCCAATGCTAGCATTTTAATGATGCATTTATCACGTTTTTGTGAAGAAATCATTAATTGGTGCAGTTATGAATATCAATTCATCACATTATCAGATACTTTCTCTACAGGATCATCTATTATGCCTCAAAAGAAAAATCCTGATATGGCAGAATTAATTCGAGGGAAGACAGGCCGTGTTTATGGAAATTTATTTAGTTTACTAACTGTTATGAAATCATTGCCGTTAGCTTATAACAAAGATTTACAAGAAGATAAAGAAGGGATGTTTGATAGCGTAGAAACAGTCAGCATAGCTATTGAAATCATGGCTAATATGCTTGAGACAATGACTGTGAATGAGCACATAATGATGACCTCAACGGAGACTGATTTTTCAAATGCAACAGAATTAGCAGATTATTTAGCAAGTAAGGGGATACCTTTCAGAAAAGCACATGAAATTGTAGGTAAATTGGTTTTAGAATGCAGTAAAAATGGTTCTTATTTACAGGATATACCTTTAAAATATTATCAAGAAATTTCAGAGTTGATAGAAAACGATATCTATGAGATATTAACTGCAAAGACAGCAGTTAAACGAAGAAATTCATTAGGAGGAACAGGGTTTGACCAGGTTAAAGAACAGATCCTGTTGGCACGTAAAGAATTGAAAGCGGAA

SEQ ID NO: 4588 - protein, 462 aa, Streptococcus agalactiae
  VARIANT 90: Xaa = Any Amino Acid
MTKNHKLWGGRFESSLEKWVEEFGASISFDQKLAPYDMKASMAHVTMLGKTDIISQEEAGLIKDGLKILQDKYRAGQLTFSISNEDIHMXIESLLTAEIGEVAGKLHTARSRNDQVATDMHLYLKDKLQEMLKKLLHLRTTLVNLAENHIYTVMPGYTHLQHAQPISFGHHLMAYYNMFTRDTERLEFNMKHTDLSPLGAAALAGTTFPIDRHMTTRLLDFEKPYSNSLDAVSDRDFIIEFLSNASILMMHLSRFCEEIINWCSYEYQFITLSDTFSTGSSIMPQKKNPDMAELIRGKTGRVYGNLFSLLTVMKSLPLAYNKDLQEDKEGMFDSVETVSIAIEIMANMLETMTVNEHIMMTSTETDFSNATELADYLASKGIPFRKAHEIVGKLVLECSKNGSYLQDIPLKYYQEISELIENDIYEILTAKTAVKRRNSLGGTGFDQVKEQILLARKELKAE

SEQ ID NO: 4589 - protein, 258 aa, Streptococcus agalactiae
ATGGCAATCGTTTCAGCAGAAAAATTCGTCCAAGCAGCTCGTGATAACGGCTATGCAGTAGGTGGATTTAACACAAACAACCTTGAGTGGACTCAAGCTATCTTGCGCGCAGCAGAAGCTAAAAAAGCTCCAGTACTTATCCAAACTTCAATGGGTGCGGCTAAATACATGGGTGGTTACAAACTTTGTAAACAACTTATTGAAACTTTGGTTGAATCAATGGGTATTACTGTACCAGTTGCTATCCANNNNNTTAAT

SEQ ID NO: 4590 - protein, 86 aa, Streptococcus agalactiae
  VARIANT 83, 84, 85: Xaa = Any Amino Acid
MAIVSAEKFVQAARDNGYAVGGFNTNNLEWTQAILRAAEAKKAPVLIQTSMGAAKYMGGYKLCKQLIETLVESMGITVPVAIXXXN

SEQ ID NO: 4591 - protein, 1628 aa, Streptococcus agalactiae
ATGGTACAAGCTGCCAGCACACGTCTGAGTAAACAGGCAGAGTATGTCAACTCATTAAATGTATTCCCAGTTCCAGATGGTGATACTGGTACGAATATGGGGATGACTATGGAAAACGGAGCCAAGGAAGTTTCGGACAAACCAGCGACGACTGTTGGAGAAGTTGGTCAAATTCTTTCTAAAGGTGTATTGATGGGAGCACGTGGAATTCAGGTGTAATTACATCACAATTATTCCGTGGTTTTGGTCAAAGTATCAAGGATAAAGAAGAATTAACGGGTCAAGATTTGGCACACGCTTTCCAGAATGGTGTTGAAGTAGCTTATAAAGCCGTTATGAAACCAGTTGAAGGAACTATCTTGACAGTATCACGCGGTGCAGCTACCGCTGCTCTAAAGAAAGCTGAAGAAACTGATGATGCAGTTGAAGTTATGCGCGCAACTCTCAAAGGTGCTAAGCGTGCTCTTGCTAAAACACCGGAGATGCTACCTGTTCTTAAAGAGGTTGGTGTTGTTGATTCTGGTGGTCAAGGACTCGTCTTTATTTACGAAGGTTTCCTCTCAGCACTGACTGGGGAATATATCGCATCAGAAGATTTTAAAGCAACTCCCGCAACAATGACTGAAATGGTTAATGCAGAGCACCATAAAGCTGTAGTAGGCCATGTAGCCACAGAAGATATTAAATATGGCTATTGTACAGAAGTCATGGTTGGTTTAAAGCAAGGACCAACTTACGTTAAGGAATTTAACTACGAAGAATTTCAAGGTTATCTTAGCAATCTAGGGGATTCTTTACTAGTTGTTAATGATGATGAAATCGTCAAGGTTCATGTTCATACAGAAGATCCAGGTCTTGTTATGCAAGAAGGTTTGAAATATGGGTCGCTTGTGAAGGTTAAAGTTGAAAACATGCGTAACCAACATGATGCCCAAATGCAAAAGGTTGAAGTTGAAGAAACTGTCAAAGAAACTAAAGAATATGGTATTATTGCTGTTGTAGCTGGTGACGGTCTAGCTGAGATTTTTAAATCACAAGGTGTTGATTATATCATCTCTGGCGGCCAGACTATGAACCCATCTACAGAAGATATTGTAAAAGCGATTGAAAAAGTAAACGCTAGAAATGTTATTATTTTACCAAACAATAAGAACATCTTCATGGCTGCACAGTCAGCTGCAGATGTCGTTGATATTCCAGCAGCAGTAGTAGAGACACGTACAGTTCCACAAGGATTTACTAGCTTACTTGCTTTTGATCCTGCTAAGTCTCTTGAAACTAATGTAGCTGATATGACAAATAGCCTCTCAGATGTCATTAGTGGTAGTGTGACTTTAGCTGTTCGTGATACAACGATAGATGGCCTTGAAATTCATGAAAACGACATCCTTGGGATGGTTGATGGTAAAATTCTAGTATCTACACCAGATATGGAAAAAGCACTTAAAGACACTTTTGATAAAATGATTGATGAAGATAGTGAAATCGTGACAATCTATGTTGGTGAAGATGGTAAACAAGCATTAGCCGAGACCTTGTCGGAATATCTTGAGGAGACTTATGAAGATGTTGAAGTTGAGATCCACCAAGGAGATCAACCTGTATATCCATACCTCATGAGCGTTGAA

SEQ ID NO: 4592 - protein, 543 aa, Streptococcus agalactiae
MVQAASTRLSKQAEYVNSLNVFPVPDGDTGTNMGMTMENGAKEVSDKPATTVGEVGQILSKGVLMGARGNSGVITSQLFRGFGQSIKDKEELTGQDLAHAFQNGVEVAYKAVMKPVEGTILTVSRGAATAALKKAEETDDAVEVMRATLKGAKRALAKTPEMLPVLKEVGVVDSGGQGLVFIYEGFLSALTGEYIASEDFKATPATMTEMVNAEHHKAVVGHVATEDIKYGYCTEVMVGLKQGPTYVKEFNYEEFQGYLSNLGDSLLVVNDDEIVKVHVHTEDPGLVMQEGLKYGSLVKVKVENMRNQHDAQMQKVEVEETVKETKEYGIIAVVAGDGLAEIFKSQGVDYIISGGQTMNPSTEDIVKAIEKVNARNVIILPNNKNIFMAAQSAADVVDIPAAVVETRTVPQGFTSLLAFDPAKSLETNVADMTNSLSDVISGSVTLAVRDTTIDGLEIHENDILGMVDGKILVSTPDMEKALKDTFDKMIDEDSEIVTIYVGEDGKQALAETLSEYLEETYEDVEVEIHQGDQPVYPYLMSVE

SEQ ID NO: 4593 - protein, 882 aa, Streptococcus agalactiae
ATGTCATTAATTATTCTTACGGTTATTTTGGTTTTAGTGATTGTTCTGTTGATAACTTCTTTATACGTTGTTAAACAACAGACAGTAGCCATCATTGAACGCTTTGGTAAATATCAAAAGACTGCTACTAGTGGTATTCATATTCGTGTACCATTGGGTATAGATAAGATTGCAGCACGAGTGCAGTTACGTCTTTTACAGAGTGAAATTATCGTTGAGACAAAAACAAAAGATAACGTTTTTGTCACTTTAAATATTGCTACACAATATCGTGTCAATGAAAATAACGTTACAGATGCTTATTACAAATTAATAAAGCCAGAAGCTCAGATTAAATCTTATATCGAAGATGCTTTGCGTTCATCAGTACCTAAACTTACATTAGATGAGCTATTCGAAAAGAAAGATGAAATAGCCTTGGAAGTTCAACATCAAGTGGCAGAAGAAATGTCAACATACGGCTACATCATTGTTAAGACTTTAATTACTAAGGTTGAGCCAGATGCAGAAGTAAAACAATCCATGAACGAAATCAATGCTGCACAACGTAAACGTGTAGCAGCTCAAGAATTAGCGAATGCTGATAAGATTAAAATTGTAACTGCTGCAGAAGCAGAAGCAGAAAAAGATCGTCTACATGGTGTGGGTATTGCGCAACAACGTAAAGCAATTGTAGATGGGTTAGCTGATTCGATTCAAGAATTGAAAGATGCTAACGTGACATTGACAGAAGAACAAATCATGTCTATCTTGTTAACAAATCAATATTTAGATACTTTAAATACATTTGCTATTAATGGTAATCAAACGATTTTCTTACCAAATAACCCAGAAGGTGTTGAAGATATTCGTACACAAGTTTTATCTGCTCTTAAAACAAGA

SEQ ID NO: 4594 - protein, 294 aa, Streptococcus agalactiae; identical to SEQ ID NO: 274

SEQ ID NO: 4595 - protein, 114 aa, Streptococcus agalactiae
ATGGCTGAAAAAACAGACCTATCGTCAGCCTATCGCAGACTTAAAAGTCCTAACATTAAAACTAGAAAACGTGCTCTGAAAATCATTCATGAGTACAAACGTTACGGTAAAAAA

SEQ ID NO: 4596 - protein, 38 aa, Streptococcus agalactiae; identical to SEQ ID NO: 276

SEQ ID NO: 4597 - protein, 168 aa, Streptococcus agalactiae
ATGAAACTTAAAATCAGTGTTTTAACAGCAGCTTCAGCTGTCACTCTATTATTAGCTACTTCAGCAAGTCTTGCGAAGGCAGACACAGTGTCTTATCCTTCACGCGATGCCGGGTTTATCTACTCTCGTGGGTACGCTCCAAAACACTTCCTAAGTGCTTACGATAAA

SEQ ID NO: 4598 - protein, 56 aa, Streptococcus agalactiae
MKLKISVLTAASAVTLLLATSASLAKADTVSYPSRDAGFIYSRGYAPKHFLSAYDK

SEQ ID NO: 4599 - protein, 168 aa, Streptococcus agalactiae; identical to SEQ ID NO: 4597

SEQ ID NO: 4600 - protein, 56 aa, Streptococcus agalactiae; identical to SEQ ID NO: 4598

SEQ ID NO: 4601 - protein, 489 aa, Streptococcus agalactiae
GTGAATAAATTTTATTTTAAGAAGCGTTGTAGAAATTCCTTAGTTCTTTCTTGTGTTGGATTTTCGAAAAGTTGTTTAGGAGTACCCTGCTCTGCAATGATTCCTTTGTCCATGAAAATAACGCGGTCTGATACTTCTTTAGCAAATTCCATCTCGTGTGTCACAATTATCATTGTTAATCCAGATTTAGCTAGATCTTGCATTGTTTTAAGGACCTCACCAACCATTTCTGGATCCAAGGCTGAAGTTGGTTCATCAAAAAGTATAGCTTCTGGGTTAACAGAAAGTGCTCGGGCGATTGCGACACGTTGCTTTTGCCCACCTGATAATTGTTTTGGTTTAGCTTTCCAATATTGCTCAGTCATGCCAACAGCATTTAAGTTTTCTTTAGCAATCTTTTCAGCTTCTTGGCGTTCACGTTTTAGAACAGTAGTCTGTGCGACAATAGCATTCTCTAAGATGTTTAAATTTTCAAAGAGGTTAAAAGAT

SEQ ID NO: 4602 - protein, 163 aa, Streptococcus agalactiae
MNKFYFKKRCRNSLVLSCVGFSKSCLGVPCSAMIPLSMKITRSDTSLANSISCVTIIIVNPDLARSCIVLRTSPTISGSKAEVGSSKSIASGLTESARAIATRCFCPPDNCFGLAFQYCSVMPTAFKFSLAIFSASWRSRFRTVVCATIAFSKMFKFSKRLKD

SEQ ID NO: 4603 - protein, 738 aa, Streptococcus agalactiae
ATGACACAAGCTATTTTAGAAATTAAACATTTGAAAAAATCTTACGGAAGCAATGAAGTGTTAAAAGATATTTCGCTTTCGGTCAACAAAGGCGAAGTTATTTCTATCATTGGTTCTTCTGGATCAGGAAAATCAACTTTCCTACGTTCTATTAACCTCTTAGAAGAACCAAGTGGAGGAGAAATCTTATATCACGGTCACAATGTTCTTGAAAAAGGTTATGATTTAAATAATTATCGTGAAAAACTTGGGATGGTCTTTCAATCTTTTAACCTCTTTGAAAATTTAAACATCTTAGAGAATGCTATTGTCGCACAGACTACTGTTCTAAAACGTGAACGCCAAGAAGCTGAAAAGATTGCTAAAGAAAACTTAAATGCTGTTGGCATGACTGAGCAATATTGGAAAGCTAAACCAAAACAATTATCAGGTGGGCAAAAGCAACGTGTCGCAATCGCCCGAGCACTTTCTGTTAACCCAGAAGCTATACTTTTTGATGAACCAACTTCAGCCTTGGATCCAGAAATGGTTGGTGAGGTCCTTAAAACAATGCAAGATCTAGCTAAATCTGGATTAACAATGATAATTGTGACACACGAGATGGAATTTGCTAAAGAAGTATCAGACCGCGTTATTTTCATGGACAAAGGAATCATTGCAGAGCAGGGTACTCCTAAACAACTTTTCGAAAATCCAACACAAGAAAGAACTAAGGAATTTCTACAACGCTTCTTAAAA

SEQ ID NO: 4604 - protein, 246 aa, Streptococcus agalactiae
MTQAILEIKHLKKSYGSNEVLKDISLSVNKGEVISIIGSSGSGKSTFLRSINLLEEPSGGEILYHGHNVLEKGYDLNNYREKLGMVFQSFNLFENLNILENAIVAQTTVLKRERQEAEKIAKENLNAVGMTEQYWKAKPKQLSGGQKQRVAIARALSVNPEAILFDEPTSALDPEMVGEVLKTMQDLAKSGLTMIIVTHEMEFAKEVSDRVIFMDKGIIAEQGTPKQLFENPTQERTKEFLQRFLK

SEQ ID NO: 4605 - protein, 1548 aa, Streptococcus agalactiae
ATGAAAAAAATATTACTAAGTTTATTCACTGCTTTGCTTATCACCTTTGGAGGTATGACAAGTATACAAGCAGATGAATATCTACGTGTCGGTATGGAGGCAGCCTATGCTCCTTTCAACTGGACACAAAATGATAACACAAATGGTGCCGTTCCTATTGAAGGAACTGATCAATATGCTAATGGTTATGATGTACAAGTCGCTAAAAAGTTAGCTAAAAAGTTAAATAAAAAAGTTGTTGTTGTCAAAACAAAATGGGAAGGCCTTGTTCCAGCACTAACTTCTGGAAAACTCGATATGATTATTGCAGGAATGAGTCCTACCGAAGAACGTAAAAAAGAAATTAATTTTTCAAAGCCTTACTACATTTCAGAACCTACTCTAGTTGTTAACGCTGAAGGAAAATATACTAATGCTAAAAATATTAGTGATTTCAAAAATGCTAAAGTAACTGCCCAACAAGGAGTCTACTTATACAACCTCATTGATCAAATCAATGGTGTCAAAAAAGAAGTTGCCATGGGGGACTTTAATCAATTAAGACAAGCTGTAGAATCTGGTGTTGTAGACGCCTATGTTTCAGAACGTCCAGATGCAACTTCCGCTCAAACTGCTAATCCTAAATTAAAAATGATTGAACTGCACCAAGGGTTTAAAACATCTGATGCTGATACAAATATTTCTGTTGGGATGCGTAAAGGTGACAATCGTATTAATCAAGTCAATCAAGTTCTCGAAAGCATTTCTAGAGATAAACAAATCGCCTTGATGGATAAGATGATTAAAGAACAACCATCCGTTAAAAAAGAAAAAAATGGAAAACCAAACTTCTTTGAACAGATGGCAACTATTTTAAAAAACAATGGTTCTCAATTCCTCAGAGGAACAGCTACAACCCTCCTAATTTCTATGGTAGGAACTATCGTCGGATTATTTATCGGCCTTCTCATCGGTGTTTTCCGTACAGCACCAAAATCTGACAATAAGTTAAAGGCTGCCTTACAAAAATTATTAGGTTGGTTACTTAACATCTATATTGAGGTCTTCCGCGGGACACCTATGATTGTACAATCGATGGTTATCTACTACGGAACAGCACAAGCTTTTGGAGTTTCGCTGGACCGTACACTAGCAGCTATATTTATTGTTTCAATCAATACTGGTGCTTATATGAGTGAAATTGTGCGTGGTGGTATTTTCTCTGTCGATAAAGGACAATTTGAAGCCGCAACTGCACTTGGTTTCACCCACGGACAAACCATGCGAAAAATTGTTCTACCACAAGTTGTACGTAACATACTCCCAGCTACTGGTAATGAGTTTGTTATCAATATCAAAGATACCTCTGTACTGAACGTTATCTCTGTTGTCGAACTCTACTTCTCTGGTAATACTGTTGCAACACAAACCTACCAATATTTCCAAACATTCACCATTATTGCGATTATTTACTTCATCTTAACCTTCACCGTAACACGTATCTTACGTTACATTGAAAAACGTTTTGATTCAGATAATTACACAACCGGTGCGAATCAATTACAAGTC

SEQ ID NO: 4606 - protein, 516 aa, Streptococcus agalactiae; identical to SEQ ID NO: 288

SEQ ID NO: 4607 - protein, 321 aa, Streptococcus agalactiae
ATGATAATGAAGAAATGTTTTTTGGCTATTTGTTTAGCTCTTAGTTTTTTTATGGTTTCAGTTCAAGCAGATGAGGTGGACTATAACATTCCTCATTATGAGGGTAATCTAACTATTCACAATGATAATAGTGCTGATTTTACAGAGAAGGTTACTTACCAATTTGATTCGTCCTATAATGGACAGTATGTCACATTAGGTACGGCGGGTAAGTTACCTGACAATTTGATATTAATAATAGCCACAGTTGAGTTTCATTAATGGTAAAGTAAGGAAAGTAGTTACCAGATAGAAGATTTGGAGGATGGCTANNNNNTTAAT

SEQ ID NO: 4608 - protein, 109 aa, Streptococcus agalactiae
  VARIANT 75, 106, 107, 108: Xaa = Any Amino Acid
MIMKKCFLAICLALSFFMVSVQADEVDYNIPHYEGNLTIHNDNSADFTEKVTYQFDSSYNGQYVTLGTAGKLPDXFDINNKPQVEVSINGKVRKVSYQIEDLEDGXXXN

SEQ ID NO: 4609 - protein, 1569 aa, Streptococcus agalactiae
ATGGCTACCGTTTTGAAAGTGTTTAATGGTGGTGAAGCAGGTGATACTGTTAAAGTCAATGTTCAGTGGAAACTAAAAAATGTTCTATTTATGCATAAGGATGTTGGTGAACTTAACTGGATTCCTATTAGCGACTGGGATAAAACGTTAGAGAAAGTAGATTTTTGGATATCAACTGACAAAAAGGTTGCTCTTTCTCGTCTTTGGGGGCACTTGGGTTATCTTAAAACTCCTCCTAAAATAAGACAAAATAATAATCGTTACCATTTGACAGCTTTTAATGTAAACAAACGATTAGAATTTCATGGTTATTGGGATAGATCTTATTTTAATCTACCTACAAACAGTAAAAATAATTATAAGAAAAAAATTGAACATCAAGAGAAGATGATAGAGCGTCATGGTTTTATCCTAAGTTTCTTGTTAAGGATATTATTACCTTCATTCTTTATTATTGTGACACTATTCATCTCAATTAGGGTGTTCCTGTTTAGAAAAAAAGTTAATAAATACGGGCAATTCCCTAAGGATCATCATTTATATGAAGCACCTGAGGACCTTTCACCACTAGAGTTAACTCAAAGCATTTATAGTATGAGTTTTAAAAATTTTCAAGATGAGGAGAAGAAAACTCACCTTATCAGTCAAGAACAACTCATTCAGTCAATTCTATTAGACTTGATTGATAGAAAAGTATTGAATTATGATGATAACTTGTTATCTCTAGCTAACTTAGATAGAGCTTCTGATGCAGAAATAGATTTTATAGAGTTTGCTTTTGCGGATTCTACGAGTTTGAAGCCAGACCAACTCTTTTCTAATTACCAATTTAGTTATAAAGAAACACTACGTGAACTGAAAAAGCAGCACAAGGCTTCAGATCTGCAAACTCAAATGAGACGCCGAGGAAGTAATGCCTTATCAAGAATTACGCGTCTCACGAGGTTGATTTCTAAAGATAATATAAACTCTCTTAGAAGCAAGGGAATTTCATCACCTTATCGTAAAATGTCTTCAGAAGAGTCTAAAGAATTATCTAGGTTGAAAAGATTCAGTTACCTATCACCTCTTATTTCTTTTGTTGTTATAATTTATACGCTTTTTTTAAATTATTTTACCTATTTCTGTATCTATCTCTTATTGTTTGTTGTTATCCTGTTGTTGAATAAAATCATTTTTATGATGACAAGAAAAATAAGTAACGGTTATATTGTAACTGAAGATGGAGCAAGTCGTATCTACCAATGGACTAGTTTTAGGAACATGCTAAGGGATATCAAATCGTTTGATCGTTCAGAGTTAGAAAGTATCGTACTATGGAATCGAATATTGGTTTACGCTACTTTATTCGGCTACGCTGACCGTGTTGAGAAAGTACTCAGAGTGAACCAAATAGATATTCCAGAAAGATTTGCAAACATTGATAGTCATCGATTTGCGATTTCAGTCAATCAATCTAGTAATCATTTTTCAACGATAACTGAAGATGTTAGTCACGCTTCTAATTTTAGTGTTAATTCAGGCGGTTCTTCAGGTGGTTTCTCAGGCGGCGGAGGTGGCGGTGCCTTC

SEQ ID NO: 4610 - protein, 523 aa, Streptococcus agalactiae
MATVLKVFNGGEAGDTVKVNVQWKLKNVLFMHKDVGELNWIPISDWDKTLEKVDFWISTDKKVALSRLWGHLGYLKTPPKIRQNNNRYHLTAFNVNKRLEFHGYWDRSYFNLPTNSKNNYKKKIEHQEKMIERHGFILSFLLRILLPSFFIIVTLFISIRVFLFRKKVNKYGQFPKDHHLYEAPEDLSPLELTQSIYSMSFKNFQDEEKKTHLISQEQLIQSILLDLIDRKVLNYDDNLLSLANLDRASDAEIDFIEFAFADSTSLKPDQLFSNYQFSYKETLRELKKQHKASDLQTQMRRRGSNALSRITRLTRLISKDNINSLRSKGISSPYRKMSSEESKELSRLKRFSYLSPLISFVVIIYTLFLNYFTYFCIYLLLFVVILLLNKIIFMMTRKISNGYIVTEDGASRIYQWTSFRNMLRDIKSFDRSELESIVLWNRILVYATLFGYADRVEKVLRVNQIDIPERFANIDSHRFAISVNQSSNHFSTITEDVSHASNFSVNSGGSSGGFSGGGGGGAF

SEQ ID NO: 4611 - protein, 835 aa, Streptococcus agalactiae
ATGTTAATAATTGAATTACTCAAAGCCCTATTTTTAGGAGTCGTTGAGGGAGTGACAGAATGGTTACCTGTTTCTAGTACTGGCCATTTAATCTTGGTTCAAGAGTTTATGAAGTTGAACCAAAGCAAATCCTTTGTTGAAATGTTTAATATTGTTATACAACTTGGGGCAATTATGGCAGTTATTGTCATTTATTTTAAACGCCTTAACCCATTTCAGCCAGGTAAATCTGCTAGAGAAATCGTTTAACTTGGCATTATGGTTAAAAGTAGTGATAGCTTGTATTCCATCTATTTTAATTGCTTTACCATTTGATAATTGGTTTGAAGCTCATTTTAATTTCATGATCCCGATTGCAATAGCCCTAATCTTTTATGGTTTTGTCTTCATATGGGTTGAAAAACGTAATGCACACCTCAAACCACAGGTAACCGAATTGGCAAGTATGTCTTATAAGACAGCTTTCTTGATTGGATGCTTCCAGGTTCTCAGTATTGTTCCGGGAACCAGTCGTTCTGGAGCTACTATTTTAGGAGCAATTATTATTGGAACTAGTCGTTCGGTCGCTGCTGACTTTACTTTCTTCCTTGCCATCCCAACTATGTTTGGTTATAGTGGACTTAAGGCGGTTAAATACTTTTTAGATGGTAACGTCTTGAGTTTAGACCAATCTTTAATACTTTTAGTAGCAAGTCTGACAGCTTTCGTAGTTAGTTTATATGTTATTCGTTTCTTGACAGACTATGTCAAACGACACGATTTCACCATCTTTGGTAAGTATCGTATAGTCTTAGGAAGTTTACTCATCCTCTACTGGTTAGTTGTTCATTTATTC

SEQ ID NO: 4612 - protein, 279 aa, Streptococcus agalactiae
  VARIANT 81: Xaa = Any Amino Acid
MLIIELLKALFLGVVEGVTEWLPVSSTGHLILVQEFMKLNQSKSFVEMFNIVIQLGAIMAVIVIYFKRLNPFQPGKSAREXRLTWQLWLKVVIACIPSILIALPFDNWFEAHFNFMIPIAIALIFYGFVFIWVEKRNAHLKPQVTELASMSYKTAFLIGCFQVLSIVPGTSRSGATILGAIIIGTSRSVAADFTFFLAIPTMFGYSGLKAVKYFLDGNVLSLDQSLILLVASLTAFVVSLYVIRFLTDYVKRHDFTIFGKYRIVLGSLLILYWLVVHLF

SEQ ID NO: 4613 - protein, 681 aa, Streptococcus agalactiae
ATGGAGCTGAAAGATTTCCTAATCCCTCAGGAGAAGACTGAGGAATTTTTCTATTCTGTCATGGATGAATTAGACTTGCCAGAAAACTTTAAAAATAGTGGTATGTTAAGTTTTCGAGTAACACCTAAAAAAGATCGCATTGATGTTTTTGTTACAAAGTCTGAATTAAGTAAAGATTTAAATTTAGAAGAATTAGCAGATTTGGGTGACATTTCAAAAATGTCTCCAGAAGACTTTTTTAAAACATTGGAACAATCGATGTTGGAAAAAGGGGATACGGATGCCCATGCCAAATTAGCAGAAATTGAAAATATGATGGATAAAGCAACTCAAGAAGTAGTTGAGGAAAATGTTTCTGAAGAACAACCTGAAAAGGAAGTAGAAACGATTGGATATGTTCACTATGTCTTTGATTTTGATAATATTGAAGCTGTAGTTCGATTTTCACAAACGATTGATTTTCCAATAGAAGCTTCTGAACTCTATAAAAATGGTAAAGGCTATCATATGACAATTTTGCTAGACTTGGAAAACCAACCAAGCTACTTTGCTAATTTGATGTACGCTCGAATGCTTGAACATGCTAATGTGGGCACAAAAACACGAGCTTACTTGAAAGAGCATAGTATTCAATTGATTCATGATGATGCTATTTCAAAATTACAAATGATTGAGATGGGA

SEQ ID NO: 4614 - protein, 227 aa, Streptococcus agalactiae
MELKDFLIPQEKTEEFFYSVMDELDLPENFKNSGMLSFRVTPKKDRIDVFVTKSELSKDLNLEELADLGDISKMSPEDFFKTLEQSMLEKGDTDAHAKLAEIENMMDKATQEVVEENVSEEQPEKEVETIGYVHYVFDFDNIEAVVRFSQTIDFPIEASELYKNGKGYHMTILLDLENQPSYFANLMYARMLEHANVGTKTRAYLKEHSIQLIHDDAISKLQMIEMG

SEQ ID NO: 4615 - protein, 1014 aa, Streptococcus agalactiae
ATGCCAAGTAGTGGTGGTTTAGCAATATTTCTCTCCTTTGTTGTAACAACATTATTTTTCATGCCAATGGCGGCCAGTAGACACTTTATAGAAGTCTCTTATTTTCACTACATTTTGCCTGTAATTATTGGCGGTCTCGTAGTTACAACAACAGGATTTATAGATGACATCTTTGAATTAAGACCTCGTTATAAAATGTTGGGAATTATTATTGCAGCTGTTATCATATGGAAATTTACACATTTTAGATTTGATAGTTTTAAGATTCCAATAGGTGGTCCACTCTTGGAGTTTGGTCCTATTTTAACTTTCTTTTTGACAGTTTTATGGATTATTTCAATCACTAATGCTATCAATCTGATTGATGGTCTAGATGGTCTAGTTAGTGGTGTTTCAATCATCAGTCTAGCAACGATGGCAGTGGTTTCTTATTTCTTTTTACCTAAAATAGATTTTTTTCTCACGCTAACTATTGTTATTTTAATCGCCTCAATAGTTGGTTTTTTCCCTTATAATTATCATCCAGCCATTATCTACCTAGGTGATGCTGGTGCCTTGTTTATAGGATTTATGATTGGTGTATTATCGCTTCAAGGTTTAAAAAACTCCACAGCTGTTGCAGTTATAACACCTGTCATTATTTTAGGAGTTCCTATTTTGGATACAGCTGTTGCTATTGTGAGGCGTAAATTATCAGGAAAAAAGATTTCTGAAGCTGATAAGATGCACCTGCATCACCGATTGCTATCTATGGGATTTACACATAGAGGAGCAGTTTTAGTTGTTTATGGTATTGCAATTATCTTTTCGCTTATCGCTTTGCTTTTAAATGTTTCTAGTCGTATTGGGGGAATTTTTCTTCTATTGGCGCTACTATTAGCAATGGAAATTTTTATAGAAGGTTTAAATATTTGGGGTGAGAATCGGACACCACTATTTAATCTCTTAAAGTTCATTGGTAACAGTGATTACAGACAAAGTGTTATTGCTAAATATAGCGATAAGCATCAAAAA

SEQ ID NO: 4616 - protein, 338 aa, Streptococcus agalactiae
MPSSGGLAIFLSFVVTTLFFMPMAASRHFIEVSYFHYILPVIIGGLVVTTTGFIDDIFELRPRYKMLGIIIAAVIIWKFTHFRFDSFKIPIGGPLLEFGPILTFFLTVLWIISITNAINLIDGLDGLVSGVSIISLATMAVVSYFFLPKIDFFLTLTIVILIASIVGFFPYNYHPAIIYLGDAGALFIGFMIGVLSLQGLKNSTAVAVITPVIILGVPILDTAVAIVRRKLSGKKISEADKMHLHHRLLSMGFTHRGAVLVVYGIAIIFSLIALLLNVSSRIGGIFLLLALLLAMEIFIEGLNIWGENRTPLFNLLKFIGNSDYRQSVIAKYSDKHQK

SEQ ID NO: 4617 - protein, 768 aa, Streptococcus agalactiae
ATGTCTGTACTTGAAATCAAAAATCTTCATGTTTCTATTGAAGATAAAGAAATTTTAAAAGGTCTTAATTTAACGTTGAAAACAGGAGAAATTGCTGCTATCATGGGTCCAAATGGTACTGGGAAGTCGACACTTTCAGCAGCTATTATGGGAAATCCTAATTATGAAGTTACAGCAGGTGAAATTCTTTTTGATGGTGAAGATATTTTAGAGCTAGAAGTGGATGAACGTGCTCGTTTGGGTCTATTTCTTGCCATGCAATACCCTTCAGAGGTTCCAGGGATTACTAATGCTGAATTTATCCGAGCAGCTATGAATGCGGGAAAGGCTGATGATGATAAAATTTCCATCCGCCAATTTATCACTAAGTTAGATGAAAAGATGGAACTACTTGGCATGAAAGAAGAAATGGCGGAACGTTATCTTAACGAAGGTTTTTCAGGTGGTGAGAAGAAGCGCAATGAAATTTTACAACTCCTAATGTTAGAGCCTAAGTTTGCCCTCTTGGATGAGATTGACTCTGGCCTTGATATTGATGCTCTTAAAGTGGTATCAAAGGGAGTCAATGAAATGCGTGGTGAAGGTTTTGGTGCTATGATTATTACACACTATCAACGCCTTTTGAATTACATTACACCAGATAAAGTACACGTTATGATGGACGGGAAGGTAGTATTGTCAGGAGGACCAGAATTAGCGGTTCGCCTTGAGAAAGAAGGTTATGCTCAAATCGCTGAAGAGCTTGGTTTAGAGTATAAAGAAGAAGTC

SEQ ID NO: 4618 - protein, 256 aa, Streptococcus agalactiae; identical to SEQ ID NO: 300

SEQ ID NO: 4619 - protein, 1257 aa, Streptococcus agalactiae
ATGTCTAAAGAAGCTATATTAATTTTTTACAAGCCAAAGGTGAGCCTACTTGGTTACAAGAATTACGACTAAAGGCTTTTGAAAAAATAGAAGAACTAGAATTACCAGTAATTGAACGTGTAAAATTTCATAGATGGAATTTAGGTGATGGAACTATTTTAGAGAATGACTATACAGCTAACATTCCAGATTTCACAGAGTTAGGAAACAATCCCAAGTTGGTTCAAATTGGGACCCAAACTGTCCTTGAACAAGTTCCTATGGAATTAATAGAGAAAGGCGTTGTCTTTACAGATTTCTATTCGGCTTTGGAAGAAATTCCAGAAGTCATAGAGCGCTACTTTGGGAAAGCACGTCCTTTTGAAGAAGATAGACTTGCTGCCTATCACACAGCTTACTTCAACAGTGGTGCAGTGCTTTATATTCCAGATAATGTTGAAATTACTCAACCAATCGAAGGTCTTTTTTATCAAGATAATCAATCTAAAGTACCATTTAATAAGCATATCCTTCTTATTGTTGGAAAGAATGCGAAAGTTAGTTACTTAGAGCGATTTGAGTCAATTGGTGATGGGACAGAACGAACAAGTGCTAATATTTCTGTAGAAGTAATTGCCCAAGCAGGTAGCCAAATTAAATTTGCTTCAATTGATCGCCTCGGAGAAAATGTGACAACGTTTATAAGTCGTCGTGGTCGTCACAGTAGCGATGCAACAATAGATTGGGCCCTTGGGGTGATGAATGAGGGCAATGTTGTTGCTGACTTTGATTCTGATTTAATTGGTGATGGAAGCCACGCTAATTTAAAAGTAGTTGCTGCCTCGTCAGGGCGTCAAGTTCAAGGAATTGATACGCGTGTTACAAACTACGGCTGTAATTCAGTAGGACATATTTTACAGCATGGGGTTATTTTAGAGCGTGGGACTCTTACTTTTAACGGTATCGGACATATTATAAAAGGTGCAAAGGGAGCAGACGCCCAACAAGAAAGCCGAGTTCTCATGTTATCAGACAAAGCACGTTCAGATGCTAATCCTATCCTTTTGATTGATGAAAATGATGTTACAGCTGGTCACGCAGCCTCAATTGGTCAGGTTGACCCAGGGATTATATTATTTGATGAGCCGTGGCTTGAACCAAAAAACAGCAGAGCAATTAGTTATTCGTGGATTTTTAGGAACAGTCATTGCTGAAATACCAGTAAAAGAAGTTCGCGATGAAATGATTGCCGTTATTGATACAAAACTAGAAAAACGT

SEQ ID NO: 4620 - protein, 420 aa, Streptococcus agalactiae
MSKEAILNFLQAKGEPTWLQELRLKAFEKIEELELPVIERVKFHRWNLGDGTILENDYTANIPDFTELGNNPKLVQIGTQTVLEQVPMELIEKGVVFTDFYSALEEIPEVIERYFGKARPFEEDRLAAYHTAYFNSGAVLYIPDNVEITQPIEGLFYQDNQSKVPFNKHILLIVGKNAKVSYLERFESIGDGTERTSANISVEVIAQAGSQIKFASIDRLGENVTTFISRRGRHSSDATIDWALGVMNEGNVVADFDSDLIGDGSHANLKVVAASSGRQVQGIDTRVTNYGCNSVGHILQHGVILERGTLTFNGIGHIIKGAKGADAQQESRVLMLSDKARSDANPILLIDENDVTAGHAASIGQVDPEDLYYLMSRGLNQKTAEQLVIRGFLGTVIAEIPVKEVRDEMIAVIDTKLEKR

SEQ ID NO: 4621 - protein, 1230 aa, Streptococcus agalactiae
ATGACATTACTAGATAGTTATAAACTAAAGCAAGATTTCCCAATTTTAAATCAATTAGTTAATGATGAGCCGCTTATCTATTTAGATAATGCAGCAACGACACAAAAACCGAATCAAGTTTTAGAAACTTTGCGAGCTTACTACCAAAACGACAATGCAAATGTCCATCGTGGTGTTCATACTTTAGCAGAACGAGCGACTGCTCAGTACGAGACTGCTCGTGAAAAAGCAAGGCAGTTTTTAAATGCTAAATCAAGTAAAGAAATTTTATTCACACGTGGCACCACAACAGGATTAAATTGGGTAGCTAAGTTTGCCGAAAGTATTTTAGAACGAGGTGATGAGGTACTTATTTCCATTATGGAGCATCATTCTAATATTATCCCATGGCAACAAGCTTGTGAGAGAACTGGTGCTAAATTGGTTTATGCCTATCTAAAAGATGGTTCTTTAGATTTAGAAGATTTCTATAATAAATTATCCTCTAAAACTAAATTTGTTAGTTTGGCACATATCTCGAATGTACTTGGCTGTATTACACCAGTAAAAGCAATAGCAGAACGTGTGCATCAAGTTGGGGCATACATGGTTGTTGATGGAGCTCAATCAGCGCCACATATGGCGATTGATGTTCAAGACCTTGATTGTGATTTCTTCGCCTTATCTGGCCATAAGATGCTTGGTCCTACTGGTATTGGTGTTCTTTATGGGAAAGAAAGCATTTTGGATAAGATGCCACCTGTCGAATTTGGTGGTGAAATGATTGATTTTGTCTATGAGCAAAGTGCAACATGGAAGGAATTGCCCTGGAAGTTTGAAGCTGGAACGCCTAATATTGCTGGAGCGATCGCTTTTGGAGAAGCTTTAGATTATTTAACGGATGTTGGTATGGATGAGATTCATCAATATGAACAAAGTTTAGTTTCTTATGTGTTGCCTAAATTACAGGCTATCGATGGTTTAACTATTTACGGACCTAGTGATGCTGAATCTCATGTAGGCGTTATTGCCTTCAATTTAGAAGGTTTACACCCACATGATGTGGCAACTGCAATGGATTACGAAGGAGTGGCTGTTCGTGCAGGTCATCATTGTGCACAACCCCTTATTAATCATCTTGGTATCCATTCGGCGGTTCGAGCAAGTTTCTATTTCTATAATACCAAAGAGGATTGCGACAAATTGGTAGACGCTATCCAAAAAACTAAGGAGTTTTTCAATGGCACTCTC

SEQ ID NO: 4622 - protein, 410 aa, Streptococcus agalactiae
MTLLDSYKLKQDFPILNQLVNDEPLIYLDNAATTQKPNQVLETLRAYYQNDNANVHRGVHTLAERATAQYETAREKARQFLNAKSSKEILFTRGTTTGLNWVAKFAESILERGDEVLISIMEHHSNIIPWQQACERTGAKLVYAYLKDGSLDLEDFYNKLSSKTKFVSLAHISNVLGCITPVKAIAERVHQVGAYMVVDGAQSAPHMAIDVQDLDCDFFALSGHKMLGPTGIGVLYGKESILDKMPPVEFGGEMIDFVYEQSATWKELPWKFEAGTPNIAGAIAFGEALDYLTDVGMDEIHQYEQSLVSYVLPKLQAIDGLTIYGPSDAESHVGVIAFNLEGLHPHDVATAMDYEGVAVRAGHHCAQPLINHLGIHSAVRASFYFYNTKEDCDKLVDAIQKTKEFFNGTL

SEQ ID NO: 4623 - protein, 441 aa, Streptococcus agalactiae
ATGGCACTCTCTAAATTAGATAACCTCTACATGGCAGTGGTAGCTGATCATTCAAAACACCCTCATCATCATGGATTTTTAGAAGGCGTTGAACAAGTGCAGTTAAATAATCCTACATGTGGAGATGTTATTTCCTTATCTGTTAAATTTGATGGAAATATTATTTCAGATATTGCATTTGCTGGTAATGGTTGTACAATTTCTACGGCTTCATCAAGCATGATGACAGATGCAGTTATTGGGAAAACAAAAGAAGAAGCATTGCAGCTTGCTGATGTATTCTCCAAAATGGTTCAAGGCGATCAAAATCCAAAACAAGAGAAACTTGGGGATGCAGAGTTTCTAGCTGGGGTATCAAAATTTCCACAACGTATCAAATGTGCTACGCTTTCGTGGAATGCTTTAAGAAAGGCTATTGAGAGAGATAATCAGGCAGAACTC

SEQ ID NO: 4624 - protein, 147 aa, Streptococcus agalactiae; identical to SEQ ID NO: 306

SEQ ID NO: 4625 - protein, 1361 aa, Streptococcus agalactiae
ATGTCCGAAATAAATGAAAAAGTAGAACCACAGCCAATAGATCTTGGGGAATATAAATTTGGATTTCATGACGATGTAAAGCCAATTTATTCTACGGGAAAAGGTCTAAATGAGGCTGTTATTCGTGAGTTATCTGCAGCTAAGGGTGAACCTGAGTGGATGTTGGACTTTCGTCTAAAATCCTTGGAAACGTTTAATAAAATGCCAATGCAGACCTGGGGAGCAGATTTATCAGATATTGATTTTGATGATATTATTTATTATCAAAAAGCATCTGATAAACCTGCGCGTGATTGGGATGATGTTCCAGAAAAAATCAAAGAAACTTTTGAAAGAATTGGGATTCCAGAAGCTGAAAGAGCTTATCTTGCAGGAGCATCAGCACAATATGAATCAGAAGTGGTTTATCATAATATGAAAGAAGAATATGATAAGCTGGGTATTGTTTTTACGGATACTGACTCTGCACTTAAAGAGTACCCAGAGCTATTCAAAAAATATTTTGCTAAACTTGTCCCTCCAACAGATAATAAATTAGCTGCTCTGAACTCTGCTGTATGGTCAGGTGGAACATTTATTTATGTCCCTAAAGGTGTTAAGGTGGATATTCCACTTCAAACTTACTTCCGTATTAATAATGAAAATACTGGACAATTTGAACGTACTCTCATTATTGTTGACGAGGGAGCAAGTGTTCACTACGTTGAAGGTTGTACCGCCCCAACTTATTCTTCAAATAGTTTACATGCAGCTATAGTTGAAATTTTTGCACTTGATGGAGCTTATATGCGCTATACGACTATTCAAAATTGGTCCGATAATGTCTATAATTTAGTGACAAAACGTGCTACCGCTAAAAAAGATGCAACAGTTGAGTGGATAGATGGAAATCTAGGTGCTAAAACAACAATGAAATACCCATCGGTTTACCTTGATGGTGAAGGAGCATGTGGCACGATGTTGTCTATTGCTTTTGCAAACAAAGGACAACACCAAGATACGGGTGCAAAGATGATTCATAATGCTCCCCATACTAGTTCATCCATTGTCTCTAAATCAATTGCTAAGGGTGGGGGAAAAGTTGATTATCGAGGTCAAGTGACATTTAATAAAGATTCCAAAAAATCAGTGTCACATATAGAATGTGACACCATATTGATGGATGATATTTCAAAATCAGATACCATACCGTTTAATGAGATTCATAATTCACAGGTGCTTTAGAGCATGAAGCAAAGGTGTCTAAGATTTCTGAAGAGCAACTGTACTACTTGATGAGTCGAGGTTTATCTGAAGCTGAAGCAACAGAAATGATTGTTATGGGGTTTGTTGAGCCCTCTACGAAAGNNNNNTTAATTAAT

SEQ ID NO: 4626 - protein, 454 aa, Streptococcus agalactiae
  VARIANT 450, 451: Xaa = Any Amino Acid
MSEINEKVEPQPIDLGEYKFGFHDDVKPIYSTGKGLNEAVIRELSAAKGEPEWMLDFRLKSLETFNKMPMQTWGADLSDIDFDDIIYYQKASDKPARDWDDVPEKIKETFERIGIPEAERAYLAGASAQYESEVVYHNMKEEYDKLGIVFTDTDSALKEYPELFKKYFAKLVPPTDNKLAALNSAVWSGGTFIYVPKGVKVDIPLQTYFRINNENTGQFERTLIIVDEGASVHYVEGCTAPTYSSNSLHAAIVEIFALDGAYMRYTTIQNWSDNVYNLVTKRATAKKDATVEWIDGNLGAKTTMKYPSVYLDGEGACGTMLSIAFANKGQHQDTGAKMIHNAPHTSSSIVSKSIAKGGGKVDYRGQVTFNKDSKKSVSHIECDTILMDDISKSDTIPFNEIHNSQVALEHEAKVSKISEEQLYYLMSRGLSEAEATEMIVMGFVEPSTKXXLIN

SEQ ID NO: 4627 - protein, 1185 aa, Streptococcus agalactiae
ATGCCTAAATTAATCGTATCTTTCCTCTGCATTTTATTATCCCTGACTTGTGTAAACTCTGTGCAAGCTGAAGAACATAAAGATATTATGCAAATTACCCGAGAAGCCGGATATGATGTTAAAGATATTAATAAACCTAAAGCGTCTATCGTTATTGACAATAAAGGTCATATTTTGTGGGAAGATAACGCTGATTTAGAACGTGATCCCGCTAGCATGTCTAAAATGTTTACTTTATATTTACTATTTGAAGACTTAGCTAAAGGAAAAACAAGCCTCAACACCACAGTGACTGCAACAGAAACAGACCAAGCCATAAGTAAGATTTATGAAATTAGTAATAACAATATTCATGCTGGGGTTGCTTATCCTATTCGTGAACTGATTACTATGACGGCTGTCCCGTCATCTAATGTAGCAACTATTATGATTGCTAACCACTTATCACAAAACAATCCTGACGCCTTCATTAAACGAATCAATGAAACCGCCAAGAAACTCGATATGACAAAAACTCACTTTTATAACCCTAGTGGGGCGGTAGCAAGTGCTTTTAATGGACTTTACTCCCCAAAAGAATACGATAACAATGCTACTAACGTTACGACTGCACGTGATCTATCAATTTTAACCTATCATTTCCTTAAAAAATACCCTGATATACTGAACTATACAAAATATCCTGAAGTCAAGGCCATGGTCGGAACTCCTTATGAAGAAACATTTACAACTTATAACTACTCTACCCCCGGCGCTAAATTTGGATTAGAAGGAGTAGATGGCTTAAAAACTGGTTCTAGCCCTAGCGCTGCTTTTAATGCCTTAGTTACAGCTAAACGCCAGAATACTCGTTTGATAACTGTGATTTTAGGCGTTGGCGATTGGTCAGACCAAGACGGAGAGTACTATCGTCATCCGTTTGTCAACGCTCTTGTAGAAAAAGGTTTTAAAGACGCTAAAAATATTTCTTCTAAAACTCCTGTATTAAAAGCCGTTAAACCTAAAAAAGAAGTTACTAAAACCAAAACCAAATCTATTCAAGAACAGCCTCAAACAAAAGAACAGTGGTGGACAAAAACAGATCAATTTATTCAATCACATTTTGTATCTATTTTAATTGTTCTGGGAACCATCGCTATCCTTTGTCTTTTAGCTGGGATAGTATTACTTATAAAGCGCTCTAGA

SEQ ID NO: 4628 - protein, 395 aa, Streptococcus agalactiae
MPKLIVSFLCILLSLTCVNSVQAEEHKDIMQITREAGYDVKDINKPKASIVIDNKGHILWEDNADLERDPASMSKMFTLYLLFEDLAKGKTSLNTTVTATETDQAISKIYEISNNNIHAGVAYPIRELITMTAVPSSNVATIMIANHLSQNNPDAFIKRINETAKKLDMTKTHFYNPSGAVASAFNGLYSPKEYDNNATNVTTARDLSILTYHFLKKYPDILNYTKYPEVKAMVGTPYEETFTTYNYSTPGAKFGLEGVDGLKTGSSPSAAFNALVTAKRQNTRLITVILGVGDWSDQDGEYYRHPFVNALVEKGFKDAKNISSKTPVLKAVKPKKEVTKTKTKSIQEQPQTKEQWWTKTDQFIQSHFVSILIVLGTIAILCLLAGIVLLIKRSR

SEQ ID NO: 4629 - protein, 1107 aa, Streptococcus agalactiae
TTGTATGAAAAAGATGCTAACAGACCCGCTGCTATTGCTTCCTTGACTAAAATAATGACCGTTTATATGGTCTATAAAGAAATTGATAACGGTAACCTCAAGTGGAATACCAAAGTAAATATATCTGACTACCCTTATCAACTAACACGTGAATCTGATGCTAGTAATGTTCCTTTAGAAAAAAGGCGCTATACTGTTAAACAGCTCGTGGACGCTGCCATGATTTCTAGTGCTAACAGTGCAGCCATTGCTTTGGCTGAACATATTTCAGGAACTGAAAGTAAATTTGTTGATAAAATGACTGCTCAATTGGAAAAGTGGGGAATTCATGATAGCCACCTAGTCAATGCTTCTGGCTTAAATAATAGTATGTTAGGCAATCACATTTATCCAAAATCGTCACAAAACGACGAAAATAAAATGAGTGCACGTGATATTGCTATTGTTGCCTACCATTTGGTCAACGAATATCCTTCCATTCTTAAGATTACTAGTAAGTCCGTTGCTAAATTTGATAAAGATATTATGCATTCTTATAACTACATGCTACCAGATATGCCTGTCTTTAGACCAGGTATTACAGGTTTGAAAACTGGGACAACGGAATTAGCTGGCCAATCTTTTATTGCTACATCTACTGAAAGTGGAATGAGACTACTCACTGTTATTATGCATGCTGATAAGGCCGATAAAGACAAATATGCTCGCTTTACAGCAACTAACTCTCTCTTGAACTATATCACAAACACCTACGAACCTAACCTTGTATTAGCTAAAGGAGCTACATATAAAGGTAAAGAAGCAAGTGTGAGAGACGGAAAAGAACAATCGGTTATCGCTGTTGCTAAAAACGATTTGAAAGTAGCACAGAAGAAAAATATCACTAAACAAAATCAGTTAAAAATTAACTTTAAAAAAGAGCTTACTGCTCCTATTACAAAAAAAGAGAACCTAGGGAAAGCTTATTACGTTGACCTTAATAAGGTTGGAAAAGGCTATCTCATAAAGGAACCTAGCGTTCATTTAGTGGCAAAAGATAGTATTGAGCGCAGTTTCTTCCTCAAAGTGTGGTGGAATCATTTTGTGCGCTACGTTAACGAAAAACTT

SEQ ID NO: 4630 - protein, 369 aa, Streptococcus agalactiae
MYEKDANRPAAIASLTKIMTVYMVYKEIDNGNLKWNTKVNISDYPYQLTRESDASNVPLEKRRYTVKQLVDAAMISSANSAAIALAEHISGTESKFVDKMTAQLEKWGIHDSHLVNASGLNNSMLGNHIYPKSSQNDENKMSARDIAIVAYHLVNEYPSILKITSKSVAKFDKDIMHSYNYMLPDMPVFRPGITGLKTGTTELAGQSFIATSTESGMRLLTVIMHADKADKDKYARFTATNSLLNYITNTYEPNLVLAKGATYKGKEASVRDGKEQSVIAVAKNDLKVAQKKNITKQNQLKINFKKELTAPITKKENLGKAYYVDLNKVGKGYLIKEPSVHLVAKDSIERSFFLKVWWNHFVRYVNEKL

SEQ ID NO: 4631 - protein, 1338 aa, Streptococcus agalactiae
TTGAAGTGGTCAGATGGCAGTAAACTTACTGCAAAGGATTTTGTTTATTCATGGCAACGTTTAGTTGATCCTAAGACAGCTTCACAATATGCTTACCTTGCTGTTGAAGGGCATGTGCTTAATGCCGATAAAATCAACGAAGGACAAGAGAAAGACTTGAATAAGCTAGGTGTTAAGGCAGAAGGCGATGACAAAGTTGTTATTACTTTATCTAGTCCGTCTCCACAATTCATCTACTACCTTGCATTCACTAATTTCATGCCACAAAAACAAGAAGTTGTTGAAAAATATGGAAAAGATTACGCAACTACTTCAAAAAATACAGTTTACTCAGGACCATATACTGTTGAAGGTTGGAATGGTTCAAATGGTACTTTCACCCTGAAGAAAAACAAAAATTATTGGGACGCTAAAAATGTAAAAACAAAAGAAGTTCGCATCCAGACTGTTAAAAAACCAGATACCGCCGTTCAAATGTATAAACGTGGTGAATTAGATGCAGCTAATATCTCAAATACTTCTGCTATTTATCAAGCTAATAAAAATAATAAAGATGTCACAGATGTTCTAGAAGCGACCACTGCCTATATGCAATATAATACTACTGGTTCTGTGAAAGGGCTTGATAATGTTAAGATTCGTCGCGCCTTAAACTTAGCAACTAACCGTAAAGGAGTTGTTCAAGCAGCCGTTGATACAGGCTCAAAACCGGCAATTGCTTTTGCACCGACTGGTTTAGCCAAAACACCAGATGGAACTGATTTGGCAAAATATGTTGCCCCAGGTTATGAATATAATAAAACTGAAGCAGCAAAACTCTTTAAAGAAGGTTTGGCTGAATCAGGCTTGACTAAGCTAAAATTAACAATTACAGCAGATGCTGATGTTCCTGCTGCCAAAAACTCTGTTGACTATATCAAGTCTACTTGGGAAGCTGCTCTTCCAGGACTTACTGTTGAAGAAAAATTTGTAACCTTTAAACAACGCTTAGAAGACAGTAGAAAACAAAACTTTGATATCGTAGTTTCTGTTTGGGGTGGGGATTATCCAGAAGGGTCAACTTTCTACGGCCTCTTTAAGTCAGATTCACAAAATAACGATGGAAAATTTGCTAACAAGGACTATGACGCTGCTTATAACAAGGCAATTTCCGAAGATGCCTTAAAACCAGAAGAATCAGCAAAGGACTATAAAGAAGCAGAGAAAATTCTATTTGAGCAAGGCGCTTATAACCCACTCTACTTCCGTAGTGGTAAAGGTTTACAAAATCCAAAATTAAAAGGTGTTATTCGTAATACTACAGGTTTGTCAATAGACTTTACACATGCTTATAAAAAA

SEQ ID NO: 4632 - protein, 446 aa, Streptococcus agalactiae
MKWSDGSKLTAKDFVYSWQRLVDPKTASQYAYLAVEGHVLNADKINEGQEKDLNKLGVKAEGDDKVVITLSSPSPQFIYYLAFTNFMPQKQEVVEKYGKDYATTSKNTVYSGPYTVEGWNGSNGTFTLKKNKNYWDAKNVKTKEVRIQTVKKPDTAVQMYKRGELDAANISNTSAIYQANKNNKDVTDVLEATTAYMQYNTTGSVKGLDNVKIRRALNLATNRKGVVQAAVDTGSKPAIAFAPTGLAKTPDGTDLAKYVAPGYEYNKTEAAKLFKEGLAESGLTKLKLTITADADVPAAKNSVDYIKSTWEAALPGLTVEEKFVTFKQRLEDSRKQNFDIVVSVWGGDYPEGSTFYGLFKSDSQNNDGKFANKDYDAAYNKAISEDALKPEESAKDYKEAEKILFEQGAYNPLYFRSGKGLQNPKLKGVIRNTTGLSIDFTHAYKK

SEQ ID NO: 4633 - protein, 912 aa, Streptococcus agalactiae
ATGATTAAATATATTTTAAAGCGTGTTGCTATTTTGTTAGTAACGCTATGGGTTGTCATAACCCTATCGTTCTTTCTGATGCAGATCCTTCCAGGAACACCCTACAATAATCCAAAACTCACTGAAGAAATGATCGCATTACTTAATAAACAGTATGGTTTAGACAAGCCTGTATGGCAACAATATTTGACTTACCTTTGGAATGTACTTCATGGTGACTTTGGAACGAGTTATCAATCAGTGAATCAGCCAGTATCACGTATGATTAGCTTGAGATTAGGAGTTTCAGTACATCTAGGTGTTCAGGCTCTCGTATTTGGTGTTTTAGGCGGTATTTTGGTAGGAGCTATTTCGGCACGTCATAAGAATGATAAAGTCGATGGTATCTTAAGTGTTATTGCAACGCTAGGGATTTCTATGCCTTCATTTATCATTGGTATTTTATTATTAGACTATTTTGGATTTAAGTGGAACTTGTTGCCTTTATCAGGTTGGGGGACTTTCTCTCAAACAATTTTACCTTCTTTAGCTCTAGGACTCCCTACATTAGCATCTGTTTCACGCTTCTTCCGTAGTGAAATGATTGAAACTTTAAATTCTGATTATGTGCAACTAGCTCGTTCAAAAGGTATGACAATTCGTCAAGTAACTCGAAAACATGCTTACCGTAATTCTATGATTCCAATTTTAACTCTAATCGGCCCTTTGGCGGCGGGTCTGTTAACTGGTTCTGCACTAATTGAACAGATCTTTTCGATTCCAGGAATTGGGCAGCAGTTTGTTACTTCGATTCCAACAAAAGACTATCCTGTTATTATGGGGACAACCATTGTTTATGCAGTAATGTTGATGGTTGCTATCTTGATAACAGACGTTGTTATTAGTATCGTAGACCCACGCGTTCGCTTGCAG

SEQ ID NO: 4634 - protein, 304 aa, Streptococcus agalactiae
MIKYILKRVAILLVTLWVVITLSFFLMQILPGTPYNNPKLTEEMIALLNKQYGLDKPVWQQYLTYLWNVLHGDFGTSYQSVNQPVSRMISLRLGVSVHLGVQALVFGVLGGILVGAISARHKNDKVDGILSVIATLGISMPSFIIGILLLDYFGFKWNLLPLSGWGTFSQTILPSLALGLPTLASVSRFFRSEMIETLNSDYVQLARSKGMTIRQVTRKHAYRNSMIPILTLIGPLAAGLLTGSALIEQIFSIPGIGQQFVTSIPTKDYPVIMGTTIVYAVMLMVAILITDVVISIVDPRVRLQ

SEQ ID NO: 4635 - protein, 1029 aa, Streptococcus agalactiae
ATGGCAGATAAAAACAGAACATTTAAACTTGTAGGTGCAGGATCTTCTAGCACACAAGAAAAAATTGAAAAGCCTGCTCTTTCGTTTATGCAAGATGCGTGGCGTCGCTTGAAAAAAAACAAGTTAGCAGTGGTTTCACTCTATTTATTAGCTCTTTTACTTACTTTTTCGTTAGCCTCAAATTTATTTGTAACTCAGAAGGATGCTAATGGGTTTGATTCAAAAAAAGTAACGACATATCGCAACTTACCACCTAAATTGAGTTCAAACCTTCCTTTTTGGAATGGTAGCATTAAGTACGCTGGAAATACAGAATCTACAGACGCTTATAAGTCTCAAAATGTCCCTGAAAAAGTTAAGTATGCTTTAGGTACAGATTCTCTAGGGAGAAGTGTTGCTAAGCGCATCATCGTAGGTATTCGAATTTCCTTACTTGTAGCTATTGCAGCTACATTCATTGATTTAATTATCGGTGTTACATACGGTCTTGTTTCAGGTTTTGCTGGAGGACGCCTTGATACATTAATGCAACGTATCGTAGAGGTAATTTCATCAATTCCAAACTTAGTTATCGTTACAATGTTAGGTTTGGTCCTTGGTAACGGTATTACGGCTATTATTATCTCTATTGCTTTTACCGGATGGACTTCTATGTCTCGTCAGGTAAGGAATTTAACCCTATCATATCGAGAAAGAGAGTTTGTGCTTGCTGCACGTTCACTTGGGGAAAGTCCGATTAAAATAGCTTTCAAACATATTTTACCTAACATTTCTGGTATTATCATTGTACAAATTATGATGACAATCCCAAGTGCTATTATGTATGAAGCAGTACTTTCAGCGATCAATTTAGGTGTTAAACCACCGACAGCTTCATTAGGATCATTGATTTCAGATGCACAAGAAAATTTACAATATTATCCATATCAAGTTATCTTGCCAGCTTTAGCATTGGTAATGATTTCATTGGCATTTATTTTGCTTGGTGATGGGTTGCGAGATGCTTTTGATCCAAAATCTAGCGATGAA

SEQ ID NO: 4636 - protein, 343 aa, Streptococcus agalactiae
MADKNRTFKLVGAGSSSTQEKIEKPALSFMQDAWRRLKKNKLAVVSLYLLALLLTFSLASNLFVTQKDANGFDSKKVTTYRNLPPKLSSNLPFWNGSIKYAGNTESTDAYKSQNVPEKVKYALGTDSLGRSVAKRIIVGIRISLLVAIAATFIDLIIGVTYGLVSGFAGGRLDTLMQRIVEVISSIPNLVIVTMLGLVLGNGITAIIISIAFTGWTSMSRQVRNLTLSYREREFVLAARSLGESPIKIAFKHILPNISGIIIVQIMMTIPSAIMYEAVLSAINLGVKPPTASLGSLISDAQENLQYYPYQVILPALALVMISLAFILLGDGLRDAFDPKSSDE

SEQ ID NO: 4637 - protein, 1044 aa, Streptococcus agalactiae
ATGGAAAAAGAAACTATTTTAAGTGTTAATAATCTTCATGTTGACTTCCACACATATGCTGGAGAAGTAAAAGCAATTCGTGATGTCAACTTTGAATTAAAAAAAGGTGAGACTCTTGCAATCGTTGGTGAATCTGGTTCAGGAAAATCTGTAACTACCAGAACTTTAATTGGTTTAAATGCTAAAAATTCAGAGATATCGGGGAATGTTCAATTTAAGGGGCGTAACCTTGTTGAACTATCAGAAGAAGAGTGGACTAAGGTACGCGGGAATGAGATTTCTATGATTTTCCAAGACCCTATGACTAGTTTGGATCCAACGATGAAAATTGGTATGCAAATAGCGGAGCCAATGATGATTCATCAAAAAATTTCAAAAAAGGATGCTTTAAAATTAGCTCTTGAGCTAATGAAAGATGTAGGTATCCCAAATGCTGAAGAGCATATTAATGATTACCCACATCAGTGGTCTGGAGGAATGCGCCAACGTGCGGTTATAGCGATTGCTTTAGCTGCTGATCCTGAAATTCTTATTGCTGATGAACCAACGACTGCTTTAGATGTAACAATTCAAGCACAAATTTTGAACTTAATGAAAAAAATTCAAGCAGAACGAGACTCCTCCATTGTTTTCATAACTCATGACTTAGGGGTCGTTGCAGGGATGGCAGACCGTGTAGCAGTTATGTATGCAGGGAAAATTGTTGAATTTGGGACTGTTGATGAAGTCTTTTATAATCCACAACATCCATATACTTGGGGATTGTTGAATTCAATGCCGACAACCGACACAGAATCAGGTAGTTTAGAGTCAATTCCGGGAACACCACCAGATTTGTTGAATCCACCTAAAGGAGATGCATTTGCAGCTCGTAATGAATTTGCATTAGATATTGATCATGAAGAAGAACCACCGTACTTCAAAGTTTCAGAAACACATTTCGCTGCTACATGGCTTTTAGATGAAAGATCACCTAAGGTGCTTCCTCCATTACCGATCCAAAAACGTTGGGAAAAATGGAACGAGATTGAAGGGAGGAAAGCC

SEQ ID NO: 4638 - protein, 348 aa, Streptococcus agalactiae; identical to SEQ ID NO: 320

SEQ ID NO: 4639 - protein, 930 aa, Streptococcus agalactiae
ATGACTGAAAATCGAAAAAAATTAGTTGAAGTCAAAAATGTTTCTTTGACCTTCAATAAAGGAAAAGCTAATGAAGTGAGAGCAATTGATAATGTTAGTTTTGACATTTATGAAGGTGAAGTGTTTGGATTAGTTGGGGAATCTGGATCAGGAAAGACAACCGTTGGACGTTCAATTTTAAAACTTTATGATATTTCTGATGGAGAAATTACCTTTAATGGAGAAGTGATCTCACATCTGAAAGGTAAAGCATTACATAGTTTTCGTAAAGACGCTCAGATGATTTTTCAGGATCCTCAGGCTAGCTTAAACGGCCGTATGAAGATTCGTGATATCGTAGCAGAAGGTTTAGATATACATAAATTAGCTAAATCAAAATCAGATCGTGATAGTAAAGTTCAGGCCCTATTAGATCTTGTAGGGTTAAATAAAGATCATTTAACACGTTATCCGCATGAATTTTCAGGTGGACAACGACAACGTATCGGGATTGCACGTGCTTTAGCAGTAGAGCCTAAATTTATCATTGCTGATGAACCAATATCTGCCTTAGATGTTTCAATCCAAGCACAAGTTGTTAATTTAATGCAAAAATTGCAAAGAGAACAAGGATTGACTTATTTGTTTATCGCACATGATTTGTCTATGGTAAAATACATTTCAGATCGTATCGGTGTTATGCATTGGGGAAAACTGTTAGAAGTTGGGACATCTGATGATGTTTATAACAATCCAATCCACCCCTATACGAAGAGTCTATTATCAGCTATTCCAGAACCAGATCCGGAGAGTGAACGTCAACGTGTTCACCAGCCGTATAATCCAGCTATTGAGCAAGACGGACAAGAACGTCAAATGCACGAGATTACCCCTTGTCATTTTGTTTTATCTACACCCCAAGAAGCTGAAGAATATAAAAAACAAATATTA

SEQ ID NO: 4640 - protein, 310 aa, Streptococcus agalactiae
MTENRKKLVEVKNVSLTFNKGKANEVRAIDNVSFDIYEGEVFGLVGESGSGKTTVGRSILKLYDISDGEITFNGEVISHLKGKALHSFRKDAQMIFQDPQASLNGRMKIRDIVAEGLDIHKLAKSKSDRDSKVQALLDLVGLNKDHLTRYPHEFSGGQRQRIGIARALAVEPKFIIADEPISALDVSIQAQVVNLMQKLQREQGLTYLFIAHDLSMVKYISDRIGVMHWGKLLEVGTSDDVYNNPIHPYTKSLLSAIPEPDPESERQRVHQPYNPAIEQDGQERQMHEITPCHFVLSTPQEAEEYKKQIL

SEQ ID NO: 4641 - protein, 849 aa, Streptococcus agalactiae
ATGAGAATTTTTGAGAAAGCTCCTGCCAAACTTAATTTAGGATTAGATATTAAAGGACGATGTGACGATGGTTATCATGAATTAGCTATGATTATGGTTAGTATTGATCTTAATGACTACGTTACCATTTCTGAGCTAAAGGAAGATTGTATTGTTATCGATTCTGATAGTAGCAAAATGCCTTTAAATAATGATAATGATGTGTTTAAAGCTGCAGATATAATCAAAAATCAATATGGTATTAATAAAGGTGTTCATATTAGATTAGAAAAATCCATTCCTGTCTGTGCAGGACTGGGGGGTGGTTCTACTGATGCTGCTGCTACAATAAGAGCTCTTAATCGATTATGGAATCTTCAAATGGACTATGACGAAATGGTTGCTATTGGTTTTAAAATTGGTAGTGATGTTCCTTATTGTCTTGGTGGGGGATGTTCGTTAGTATTAGGTAAAGGTGAAATTGTTAAACCCTTACCGACATTGAGACCATGTTGGATAGTTCTGGTTAAGCCGGATTTTGGTATTTCAACTAAATCCATTTTTAGAGATATTGATTGTAAGTCTATAAGCAGAGTTGATATTGATTTATTAAAGTCTGCTATTTTGTCATCAGATTATCAGTTAATGGTCAAATCTATGGGAAATTCACTCGAGGATATTACAATTACTAAAAATCCAGTTATAAGTACAATAAAAGAACGTATGTTAAATTCTGGAGCCGATGTTGCATTAATGACAGGAAGTGGACCAACTGTTTTTTCAATGTGTTCTACAGAGAAAAAAGCTGATCGTGTTTTTAATAGTATGAAAGGTTTTTGCAAAGAAGTTTATAAAGTTAGGTTGTTGAGA

SEQ ID NO: 4642 - protein, 283 aa, Streptococcus agalactiae
MRIFEKAPAKLNLGLDIKGRCDDGYHELAMIMVSIDLNDYVTISELKEDCIVIDSDSSKMPLNNDNDVFKAADIIKNQYGINKGVHIRLEKSIPVCAGLGGGSTDAAATIRALNRLWNLQMDYDEMVAIGFKIGSDVPYCLGGGCSLVLGKGEIVKPLPTLRPCWIVLVKPDFGISTKSIFRDIDCKSISRVDIDLLKSAILSSDYQLMVKSMGNSLEDITITKNPVISTIKERMLNSGADVALMTGSGPTVFSMCSTEKKADRVFNSMKGFCKEVYKVRLLR

SEQ ID NO: 4643 - protein, 441 aa, Streptococcus agalactiae
ATGACAGTTTTAGAACAAAAATTAGACCATTTAGTGAGTCAAATCTTGCTTAAAGCAGAAAATCAACATGAATTATTGTTTGGTACTTGTCAAAGTGATGTAAAATTGACTAATACGCAAGAACACATTCTGATGCTTTTATCACAAGAGCAGTTGACAAATTCTGATTTAGCTAAGAAGTTAAATATTAGTCAGGCAGCTGTAACTAAAGCAGTAAAAAGTTTAATTTCTCAGGATATGTTGAAAGCGAATAAAGATTCTAAAGATGCTCGTATTACTTATTTTGAGTTATCTGAACTTGCTAAACCCATTGCAGATGAACACACACATCATCATGACAATACGTTAGGGGTTTACGGAAGATTAGTAAATCATTTTTCAAAGGACGAAAAGGTCGTTTTAGAACGTTTTCTTGATCTTTTCTCTAGAGAATTAGAAGGG

SEQ ID NO: 4644 - protein, 147 aa, Streptococcus agalactiae; identical to SEQ ID NO: 326

SEQ ID NO: 4645 - protein, 706 aa, Streptococcus agalactiae
ATGCGATATATTACAGTTAGTGGTCTTACTTTTCAGTATGATAGCGATCCTGTGCTGGAAGGGGTTAATTACCATTTAGACAGTGGGGAGTTTGTTACCTTAACAGGTGAAAATGGGGCTGCTAAATCAACTTTAATAAAGGCTACTTTAGGTATTTTAACGCCCAAAGTGGGTACAGTTAATATCTCTAAAGAAAACAAAGAAGGAAAAAAATTACGTATTGCCTATTTACCTCAACAGATTGCAAGTTTTAACGCTGGCTTTCCATCGTCAGTTTATGAATTTGTGAAATCTGGACGATACCCTAGAAATGGTTGGTTTAGAAGACTGACTAAACATGATGAAGAACATATTGGGTTAGTTTAGAAGCTGTTGGTATGTGGGATAATCGCCATAAAAAGATAGGAAGTTTATCTGGCGGTCAAAAGCAGAGGGCTGTCATTGCTAGGATGTTTGCTTCTGATCCAGATATTTTTGTATTGGATGAGCCAACAACTGGTATGGACGCAGGGACTACTGAGAAATTTTATGAGTTAATGCATCATAATGCTCATAAGCATGGTAAGTCTGTTTGATGATTACTCACGATCCTGATGAAGTAAAGGGGTATGCTGACCGAAATATTCATCTTGTTAGGAACCAATCTTTACCATGGCGTTGTTTCAATGTCCATACAAACGAAATGGAGGTTGAATCTGATGCTACT

SEQ ID NO: 4646 - protein, 236 aa, Streptococcus agalactiae
  VARIANT 192: Xaa = Any Amino Acid
MRYITVSGLTFQYDSDPVLEGVNYHLDSGEFVTLTGENGAAKSTLIKATLGILTPKVGTVNISKENKEGKKLRIAYLPQQIASFNAGFPSSVYEFVKSGRYPRNGWFRRLTKHDEEHIRVSLEAVGMWDNRHKKIGSLSGGQKQRAVIARMFASDPDIFVLDEPTTGMDAGTTEKFYELMHHNAHKHGKSVXMITHDPDEVKGYADRNIHLVRNQSLPWRCFNVHTNEMEVESDAT

SEQ ID NO: 4647 - protein, 810 aa, Streptococcus agalactiae
ATGCTACTTGATATGCTTTCCTATGATTTTATGCAACGAGCGCTCTTAGCAGTTGTGGCTATTAGTATTTTTGCTCCAATTTTAGGCATCTTCCTAATTTTACGTCGTCAGAGTTTGATGAGTGATACTTTGAGCCACGTTTCCTTAGCCGGTGTTGCATTAGGCGTTGTTTTAGGTATCTCGCCTACATGGTCAACTATTTTCGTTGTTACTTTGGCGGCAGTTGTATTAGAGTATTTGCGTACTGTATACAAACATTATATGGAAATATCAACTGCTATCCTGATGTCGATGGGGTTGGCTATATCTTTAATCGTTATGAGTAAAGCTCATAATGTTGGTAATGTCAGTCTTGAACAGTATTTATTTGGTTCTATTATCACTATTGGGAAGGAACAAGTGATTGCTTTGTTTGTTATTGCATTAATCACTTTTATTTTAACCATCCTGTTTATTAGACCAATGTATATATTAACGTTTGATGAGGATACAGCTTTTGTAGATGGATTGCCTGTGCGTACAATGTCTATTTTGTTCAATGTTGTTACAGGTATTGCTATTGCATTAACAATTCCTGCCGCAGGTGCTCTATTGGTGTCAACTATTATGGTTTTACCAGCTAGTATTGCTATGCGGTTAGGTCGAAATTTTAAAACTGTTATTTTTCTGGGTATGTTAATTGGATTTGTGGGAATGGTAGCTGGTATTTTCCTTTCGTATTATTGGGAGACACCTGCTAGTGCAACAATAACGATGATTTTTATTGGCATTTTCCTATTAGTTAGCTTAGTAGGCTTGCTTCGCAAACGT

SEQ ID NO: 4648 - protein, 270 aa, Streptococcus agalactiae
MLLDMLSYDFMQRALLAVVAISIFAPILGIFLILRRQSLMSDTLSHVSLAGVALGVVLGISPTWSTIFVVTLAAVVLEYLRTVYKHYMEISTAILMSMGLAISLIVMSKAHNVGNVSLEQYLFGSIITIGKEQVIALFVIALITFILTILFIRPMYILTFDEDTAFVDGLPVRTMSILFNVVTGIAIALTIPAAGALLVSTIMVLPASIAMRLGRNFKTVIFLGMLIGFVGMVAGIFLSYYWETPASATITMIFIGIFLLVSLVGLLRKR

SEQ ID NO: 4649 - protein, 1029 aa, Streptococcus agalactiae
ATGAAATTATCTAAACAATTATACAAATCACTCCCACTATTAACTGTCGTGCTATGCGTTGGGGCATTACAACAGAATGTTGAAGCTAAGGCTAAACATTATAAGACGACATCCCATGTTGAGACACAGTATGTAAGTACTTCTTCAAAAAAAATCTTACCATTTACTCATAATAAACAAATCAAGGTAGGTCCATTAGATAACTTAGGCAGAGCAACATATTCTCACATACAATTGAGGGATGCAGATGAGCCTAAGATAAAAAGAGAAAGACTGACGTATAATCCAACCGGTTGGCACAACTACAAATTTACTACTGAAAAGGGTAAAACAACTTGGCTTATGGACCGAGGTCACCTCGTTGGTTATCAATTTTCAGGAATGAACAATGTTCCTGAGAACCTAGTTACTATGACCAAATATCTAAATACAGGATTTAGCGAAAATAATCCTGATGGTATGTTATACTACGAAAATAGATTAGATAGTTGGTTGGCAAATCATAAAAATTTCTGGCTTGATTACAAAGTGACTCCAATATACGAAGGAAACAATTTAGTACCTAGCCGAGTTGAACTTCAGTATGTTGGAATTGATAAACAAGGAAAACTTCTAGAAATCAAATTAGGCGGCGGCAAAGAACAGACTGATGAATACGGCGTCACAACTGTTACATTAGAAAATACGTCTCCACTCGCAAAAATTGATTACAAAACTGGTATGCTAATCAAAGAAGATGGGAAACAGGCAGAAGAAGGTGAAGATCCAAATAGCGATGCTGATGAAAACGAAGCAGCTATTGAAAGTGCATCTGATATAGAAGAAAATACTAACACTAATACTTCTGAATCAGATACAAATAATGTAGCTCCCAAAAATAGAATCGTCTACGTTGCAAATAAGGGTCGTTCAAATACTTATTGGTATAGTTTAGAAAACATAAAAAATGCAAATACCGCTAATATCGTTCAAATGACTGAACAAGAAGCGTTAAATCAACACAAACATCACAGCACTACTGAAGCACAA

SEQ ID NO: 4650 - protein, 343 aa, Streptococcus agalactiae
MKLSKQLYKSLPLLTVVLCVGALQQNVEAKAKHYKTTSHVETQYVSTSSKKILPFTHNKQIKVGPLDNLGRATYSHIQLRDADEPKIKRERLTYNPTGWHNYKFTTEKGKTTWLMDRGHLVGYQFSGMNNVPENLVTMTKYLNTGFSENNPDGMLYYENRLDSWLANHKNFWLDYKVTPIYEGNNLVPSRVELQYVGIDKQGKLLEIKLGGGKEQTDEYGVTTVTLENTSPLAKIDYKTGMLIKEDGKQAEEGEDPNSDADENEAAIESASDIEENTNTNTSESDTNNVAPKNRIVYVANKGRSNTYWYSLENIKNANTANIVQMTEQEALNQHKHHSTTEAQ

SEQ ID NO: 4651 - protein, 1347 aa, Streptococcus agalactiae
ATGACACATATTACATTTGACTATTCAAAAGTCTTGGGTCAATTTGTAGGCGAACACGAGTTAGACTACCTACAACCACAAGTAAGTGCAGCAGATGCTTTCCTTCGTCAAGGGACTGGTCCTGGATCAGATTTTCTCGGATGGATGGACCTCCCAGAAAACTATGACAAAGAAGAATTTTCTCGCATTCAAAAAGCCGCTGAAAAGATTAAATCAGATAGCGAAGTACTCGTGGTTATTGGTATTGGTGGTTCGTACCTTGGTGCAAAAGCAGCAATTGACTTTTTGAATAATCATTTTGCTAATTTGCAAACCGCAGAAGAACGTAAAGCGCCTCAGATTCTTTATGCTGGAAATTCTATTTCATCTACTTACCTTGCCGATTTAGTTGAATACGTCCAAGATAAAGAATTCTCAGTAAATGTCATTTCAAAATCAGGTACAACAACTGAACCAGCGATTGCTTTCCGTGTATTTAAAGAACTTCTAGTTAAAAAGTACGGTCAAGAAGAAGCTAATAAACGTATCTACGCTACAACTGATAAAGTTAAAGGTGCCGTAAAAGTTGAAGCAGATGCTAACAATTGGGAAACATTTGTAGTTCCTGATAATGTTGGTGGTCGTTTCTCAGTACTGACAGCTGTAGGTCTTCTTCCAATTGCTGCTTCAGGAGCAGATATTACTGCTCTTATGGAAGGCGCAAATGCTGCTCGTAAAGATTTATCTTCAGATAAAATCTCTGAAAACATTGCTTATCAGTACGCTGCAGTTCGTAATGTTCTTTATCGCAAAGGTTATATCACAGAGATTTTAGCTAACTACGAACCATCATTACAATACTTTGGTGAATGGTGGAAACAATTAGCAGGTGAATCAGAAGGTAAAGATCAAAAAGGTATCTATCCTACATCAGCAAACTTCTCAACTGATCTTCACTCACTTGGTCAATTTATTCAAGAAGGTTACCGTAACCTCTTTGAGACAGTTGTTCGCGTTGAGAAACCTCGTAAAAATGTGACTATTCCTGAATTAACCGAAGATTTAGATGGTCTTGGTTATCTTCAAGGAAAAGATGTAGATTTTGTTAATAAAAAAGCAACAGATGGTGTGCTTCTTGCTCATACAGATGGTGGGGTTCCAAATATGTTTGTAACGCTTCCTACACAAGACGCTTACACTCTTGGTTACACTATTTACTTCTTTGAGTTAGCAATTGGCCTTTCAGGTTATCTTAACTCAGTAAATCCATTTGATCAACCGGGGGTAGAAGCATATAAACGTAATATGTTTGCTCTTCTAGGTAAACCTGGATTCGAAGAGCTTAGCGCTGAATTGAATGCACGTCTT

SEQ ID NO: 4652 - protein, 449 aa, Streptococcus agalactiae; identical to SEQ ID NO: 824

SEQ ID NO: 4653 - protein, 453 aa, Streptococcus agalactiae
ATGGAAAAGAAATTATTAAGAAAAGAAGTTTTGATAACCTTAAAATCTCAACCTCAAGCTTACAAATCAGAAGTTGACTCTAAACTTTTAGAGGCTTTTATAAAAACTAAAGCTTATCAAAATAGTTGTGTAATTGCTACTTACCTATCTTTTGACTACGAATACAATACACAACTTCTTATTAAACAAGCTTTATGTGATGGCAAACGTGTCCTTGTTCCCAAAACTTATCCAAAAGGTAAAATGATTTTTGTGGACTATCAAAAAGATAACTTGAGGGCAACACTGTTTGGCTTATTAGAACCTGTTAATGATAGAGCTGTTGAAAAAGCTAGTATAGACTTAATTCATGTGCCCGGACTTATCTTTAACAATAAAGGTTTTCGTATAGGTTATGGTGCAGGTTATTTTGATCGCTATTTGAGTGATTTTGATTACAAAGTTAAGGTATTC

SEQ ID NO: 4654 - protein, 151 aa, Streptococcus agalactiae
MEKKLLRKEVLITLKSQPQAYKSEVDSKLLEAFIKTKAYQNSCVIATYLSFDYEYNTQLLIKQALCDGKRVLVPKTYPKGKMIFVDYQKDNLRATLFGLLEPVNDRAVEKASIDLIHVPGLIFNNKGFRIGYGAGYFDRYLSDFDYKVKVF

SEQ ID NO: 4655 - protein, 900 aa, Streptococcus agalactiae
TTGGTAAATAATTATGATTGGTTCAGCAATATTAGTTTCATTGATTTCTTACGAGATGTTGGTAAATATTTTACTGTCAATTATATGATGAGTAAAGAATCTGTTAAAAAACGTATCGAAACAGGGATTTCCTATACTGAATTTGCTTATCAAATTATGCAAGGATATGACTTTTACGAATTAAATAAGAACTATAATGTCACTTTGCAAATTGGTGGTTCTGACCAATGGGGCAACATGACTGCTGGAACCGAACTTATTAGACGAAAATCAAATGGTGTATCTCATGTTATGACTGTTCCATTGATAACAGATTCTACAGGAAAAAAATTCGGAAAATCTGAAGGAAATGCTGTTTGGCTTGATGCTGACAAAACCTCTCCTTATGAAATGTACCAATTTTGGCTCAATGTTATGGATGCTGATGCCGTTCGCTTCCTTAAGATTTTTACATTCCTAAGCCTTAAAGAAATAGAAGATATACGTATTCAATTCGAGGAAGCACCTCACCAACGCTTAGCACAAAAAACACTAGCACGTGAAGTTGTAACTCTTGTTCATGGTGAAAAAGCTTATAAGGAGGCCGTTAATATCACGGAACAGCTATTTGCTGGCAATATAAAAGGATTGTCTGTTAAAGAGCTCAAACAAGGTTTACGTGGAGTACCAAATTATCACGTTCAGACGGAAGATAACCTCAATATCATAGACCTTCTAGTCACTTCAGGAGTTGTCAATTCTAAACGTCAAGCTCGAGAAGATGTCTCCAATGGAGCTATTTATATTAATGGAGATCGTATTCAAGATTTAGAATATACTATCTCAGAAAATGATAAGCTTGAAAATGAAATTACAGTCATTCGTCGTGGAAAGAAAAAATACTTTGTATTAAACTTTAAA

SEQ ID NO: 4656 - protein, 300 aa, Streptococcus agalactiae
MVNNYDWFSNISFIDFLRDVGKYFTVNYMMSKESVKKRIETGISYTEFAYQIMQGYDFYELNKNYNVTLQIGGSDQWGNMTAGTELIRRKSNGVSHVMTVPLITDSTGKKFGKSEGNAVWLDADKTSPYEMYQFWLNVMDADAVRFLKIFTFLSLKEIEDIRIQFEEAPHQRLAQKTLAREVVTLVHGEKAYKEAVNITEQLFAGNIKGLSVKELKQGLRGVPNYHVQTEDNLNIIDLLVTSGVVNSKRQAREDVSNGAIYINGDRIQDLEYTISENDKLENEITVIRRGKKKYFVLNFK

SEQ ID NO: 4657 - protein, 150 aa, Streptococcus agalactiae
ATGAATATTTTTGATGAACTCAAAGAACGTGGACTCGTTTTTCAGACAACTGACGAAGATGCTTTACGCAAAGCTCTTGAAGAAGGTTCTGTCTCTTACTATACTGGCTACGATCCTACGGCTGATAGCCTTCATCNNNNNTTAATTAAT

SEQ ID NO: 4658 - protein, 50 aa, Streptococcus agalactiae
  VARIANT 46, 47: Xaa = Any Amino Acid
MNIFDELKERGLVFQTTDEDALRKALEEGSVSYYTGYDPTADSLHXXLIN

SEQ ID NO: 4659 - protein, 2295 aa, Streptococcus agalactiae
ATGTTTAAAGGTAATAAGAAGTTGAATAGTTCTAAATTAGGTGATTACACACCACTTGAATTTGGTTCTATTTTTTTAAGAATTGTAAAGCTTTTATCAGATTTCATCTATGTTATTATTTTACTATTTGTTATGCTCGGAGTAGGACTTGCAGTAGGGTATCTTGCTAGTCAAGTTGACTCTGTTAAAGTACCTAGTAAAAATAGTTTAGTGACACAAGTTAATACACTTACTAGGGTGTCTAGGTTAACTTATTCTGATAAATCACAAATTTCAGAGATTGACACTGATTTACAACGTACACCAGTGGCAAAGGATGCTATATCTGATAATATTAAAAAGGCTATCATTGCAACAGAGGACGAAAATTTCAATGACCATAAAGGTGTAGTTCCCAAAGCCGTACTACGTGCTGCAGCAGGATCTGTTCTGGGGTTTGGAGAGAGTAGCGGTGGTTCAACGCTGACACAACAATTATTAAAGCAGCAAATTTTGGGAGATGATCCGTCATTTAAACGCAAATCAAAAGAAATTATTTATGCTCTAGCATTAGAGCGTTACATGGATAAGGATTCGATTTTATCAGATTATTTAAATGTATCACCGTTTGGTCGCAATAACAAAGGACAGAATATTGCAGGTATTGAAGAAGCAGCACAAGGGATTTTTGGAGTTTCCGCAAAAGATTTAACAATTCCTCAGGCAGCTTTCCTTGCAGGTTTACCGCAAAGTCCTATCGTATATTCTCCTTATACTGCAGATGCCCAGTTGAAATCAGATAAAGATCTTAGTTTTGGTATAAAGCGCCAAAAAAATGTGTTATACAATATGTATAGAACGAGAGCTTTAACCAAAGATGAGTACAAATCCTACAAAGATTATGACATCAAAAAAGATTTTATCAAACCTGCAGTGGCGACAACAAATCATCATGATTATCTCTACTACTCGGCATTATCTGAAGCTCAAAAAGTGATGTACAATTACCTCATTAAAAAGGATAATGTTTCAGAGCATGATTTAAAAAATGACGAGACTAGAGCGACGTACAGACATCGCGCTATTGAAGAGATTCAACAGGGAGGGTATACTATTAAAACTACTATCAATAAATCTGTTTATCAAGCCATGCAGGATGCTGCAGCTCAATACGGAGGGTTGTTAGATGATGGCACTGGCAAGGTTCAAATGGGAAATGTACTAACGGACAATTCTAGTGGTGCTATTATAGGATTTATTGGTGGTCGTAACTATAGTGAGAATCAAAATAACCATGCTTTTGATACGGCACGCTCTCCAGGGTCAAGTATTAAACCGATATTACCTTACGGAATTGCTATTGATCAAGGGATGTTAGGCAGCGGTAGTGTTCTTTCAAATTATCCAACGACATATTCAAGTGGCGAAAAGATTATGCATGCGGATGAAGAAGGTACTGCTATGGTTAACCTTCAAGAGTCATTGGACATTTCTTGGAACATTCCAGCTTTCTGGACTTACAAGATGCTACGAGATCGAGGCGTTGATGTAAAAAACTATATGGAGAAATTAGACTATCCAATTGAAAACTTTGGTATAGAAAGTTTACCACTTGGTGGTGGTATTGATACGTCAGTTGCTCAGCAAACAAACCTTTATCAAATGATTGCAAATGGTGGTGTTTATCATAAGCAGTATATGATAGAAAGTATAGAGGATAGTAATGGGAAAGTGATTTATAATCACGAAAGTAAACCTGTCCGTGTCTTTTCGAAAGCAACAGCTACTATCTTACAGCAGCTATTACATGGACCAATTAACTCCGGAAAGACTACAACCTTTAAAAATCGCTTACAAGGTTTAAATAGTGGTTTAGCTGGGGTAGATTGGATTGGAAAAACGGGTACTACTAACTCAACTTCTGATGTTTGGTTGATGCTTTCTACACCTAAAGTGACTTTAGGTGGATGGGCAGGACATGATAATAATGCCTCTTTAGCGAAATTGACAGGTTACAATAATAATGCTAATTATATGGCTCACTTGGTTAATGCTATTAATAATGCAGATGGCAATACTTTTGGTAAGTCAGAAAGGTTTAGACTTGATGATAGCGTTATAAAAGCTAAAGTTCTTAAGTCTACAGGTTTACAGCCAGGTGTAGTAACAGTAAACGGTCGTCGAATCACTGTTGGAGGTGAAAGCACAACAAGTTATTGGGCAAAAAATGGGCCTGGAACGATGACCTATCGTTTTGCTATTGGGGGAACTGATAGTGATTATCAAAAAGCTTGGTCTACTTTGGGTGGAAAACGA

SEQ ID NO: 4660 - protein, 765 aa, Streptococcus agalactiae
MFKGNKKLNSSKLGDYTPLEFGSIFLRIVKLLSDFIYVIILLFVMLGVGLAVGYLASQVDSVKVPSKNSLVTQVNTLTRVSRLTYSDKSQISEIDTDLQRTPVAKDAISDNIKKAIIATEDENFNDHKGVVPKAVLRAAAGSVLGFGESSGGSTLTQQLLKQQILGDDPSFKRKSKEIIYALALERYMDKDSILSDYLNVSPFGRNNKGQNIAGIEEAAQGIFGVSAKDLTIPQAAFLAGLPQSPIVYSPYTADAQLKSDKDLSFGIKRQKNVLYNMYRTRALTKDEYKSYKDYDIKKDFIKPAVATTNHHDYLYYSALSEAQKVMYNYLIKKDNVSEHDLKNDETRATYRHRAIEEIQQGGYTIKTTINKSVYQAMQDAAAQYGGLLDDGTGKVQMGNVLTDNSSGAIIGFIGGRNYSENQNNHAFDTARSPGSSIKPILPYGIAIDQGMLGSGSVLSNYPTTYSSGEKIMHADEEGTAMVNLQESLDISWNIPAFWTYKMLRDRGVDVKNYMEKLDYPIENFGIESLPLGGGIDTSVAQQTNLYQMIANGGVYHKQYMIESIEDSNGKVIYNHESKPVRVFSKATATILQQLLHGPINSGKTTTFKNRLQGLNSGLAGVDWIGKTGTTNSTSDVWLMLSTPKVTLGGWAGHDNNASLAKLTGYNNNANYMAHLVNAINNADGNTFGKSERFRLDDSVIKAKVLKSTGLQPGVVTVNGRRITVGGESTTSYWAKNGPGTMTYRFAIGGTDSDYQKAWSTLGGKR

SEQ ID NO: 4661 - protein, 3573 aa, Streptococcus agalactiae
TTGGCAGGACATGAAGTTCAGTACGGAAAACACCGTACACGTCGTAGCTTTTCAAGAATTAAGGAAGTTCTTGATTTACCAAACTTAATTGAAATTCAAACTGATTCATTCCAAGATTTTCTTGATGCTGGCTTGAAAGAAGTATTTGAGGATGTACTTCCAATTTCAAACTTTACAGATACTATGGTTCTTGAATTTGTTGGTTATGAATTAAAAGAACCTAAATATACTTTGGAAGAAGCTCGTATCCATGATGCTAGCTACTCAGCACCTATTTTTGTTACTTTCCGTTTAGTTAATAAAGAAACTGGTGAAATTAAAACTCAAGAAGTTTTCTTTGGTGATTTTCCAATTATGACTGAAATGGGTACTTTCATCATCAATGGTGGTGAACGTATCATTGTTTCACAATTAGTCCGTTCTCCTGGTGTTTACTTTAATGATAAGGTAGATAAAAATGGAAAAGTTGGTTATGGGTCAACTGTTATCCCTAACCGTGGAGCTTGGTTGGAACTTGAGACAGACGCAAAAGATATTGCTTATACACGTATCGACCGCACACGTAAAATTCCATTCACAACACTAGTCCGTGCACTTGGTTTCTCTGGAGACGATGAAATTGTTGACATCTTTGGTGACAGTGAACTTGTTCGCAATACTATTGAAAAAGACATTCATAAAAATCCAAGTGATTCTCGTACAGATGAAGCACTTAAAGAAATCTATGAACGTCTTCGTCCAGGTGAACCAAAAACTGCAGACAGCTCACGTAGTCTTTTAGTTGCACGTTTCTTTGATCCACGTCGTTATGACTTAGCGGCTGTTGGTCGTTATAAGATTAATAAAAAACTGAATCTTAAAACACGCCTATTGAACCAAACAATCGCTGAAAATTTAGTTGATGGTGAAACAGGAGAGATTCTTGTTGAAGCTGGCACTGTTATGACACGAGATGTCATTGATTCAATTGCAGAGCATATCGATGGAGACTTAAACAAGTTTGTCTACACACCAAATGATTATGCTGTAGTTACTGAACCAGTTATTCTTCAAAAATTCAAAGTTGTTGCTCCAACTGATCCAGACCGTGTTGTTACTATTGTTGGAAACTCAAATCCTGAAGATAAAGTTCGTGCCTTAACTCCTGCAGATATTTTAGCAGAGATGTCATACTTCTTAAACCTTGCAGAGGGTATCGGTAAGGTAGATGACATTGACCATTTAGGTAACCGTCGTATTCGTGCAGTTGGTGAATTGCTTGCGAACCAATTCCGTATTGGACTTGCTCGTATGGAACGCAATGTCCGCGAACGTATGTCTGTACAAGACAATGAAGTCTTGACACCTCAACAAATCATTAACATTCGTCCAGTGACTGCCGCTGTTAAAGAATTCTTTGGTTCATCACAGCTGTCACAATTCATGGACCAACACAACCCTCTATCAGAATTGTCGCACAAACGCCGTCTCTCTGCCTTAGGACCTGGTGGTTTGACACGTGACCGTGCTGGATATGAAGTTCGTGATGTGCACTATACCCACTATGGGCGCATGTGTCCGATTGAAACACCTGAAGGTCCAAACATTGGTTTGATTAATAACTTATCTTCATTTGGACACCTCAATAAATATGGATTTATTCAAACACCATATCGTAAAGTAGATCGTTCTACTGGTGCGGTAACGAACGAAATTGTTTGGTTGACTGCTGATGAAGAAGATGAATTTACAGTTGCACAAGCCAACTCTAAGCTTAACGAAGACGGTACATTTGCAGAAGAAATCGTTATGGGTCGTCATCAAGGTAATAACCAAGAGTTTCCTTCAAGCATTGTTGACTTTGTTGACGTGTCACCTAAGCAAGTAGTTGCTGTCGCAACAGCATGTATTCCTTTCTTGGAAAATGATGACTCTAACCGTGCCTTGATGGGTGCCAACATGCAACGTCAGGCTGTGCCATTGATTGATCCAAAAGCACCATATGTTGGTACTGGTATGGAGTATCAAGCAGCCCACGATTCAGGTGCAGCTGTGATTGCTAAACATGACGGTCGTGTTATTTTTTCAGATGCTGAAAAAGTTGAAGTGCGTCGCGAAGATGGTTCTCTTGATGTTTATCATGTTCAAAAATTCCGCCGTTCAAACTCAGGTACTGCTTATAACCAACGTACCTTAGTTAAAGTTGGTGATCTCGTTGAAAAAGGTGATTTTATCGCCGACGGACCATCTATGGAAAATGGTGAAATGGCTCTTGGACAAAACCCAGTTGTTGCTTATATGACTTGGGAAGGTTATAACTTCGAGGATGCCGTTATCATGAGTGAGCGCCTTGTGAAAGAAGATGTCTATACATCTGTTCACTTGGAAGAATTCGAATCTGAAACGCGTGATACAAAGCTTGGGCCTGAAGAAATTACTCGTGAAATTCCAAATGTTGGTGAAGATTCACTACGTGATCTCGATGAAATGGGAATTATCCGCATTGGTGCTGAGGTAAAAGAAGGTGACATTCTTGTTGGTAAGGTAACGCCTAAGGGTGAAAAGGACTTATCTGCTGAAGAACGTCTCTTGCATGCCATTTTTGGTGATAAATCACGTGAAGTTCGTGATACTTCGCTACGTGTACCTCACGGTGGCGATGGAGTAGTTCGTGACGTTAAAATCTTTACTCGTGCAAATGGTGATGAATTGCAATCAGGTGTTAATATGCTTGTCCGCGTTTATATCGCTCAAAAACGTAAAATCAAAGTCGGTGATAAGATGGCCGGTCGTCACGGAAACAAAGGTGTCGTCTCACGTATTGTTCCTGTTGAAGATATGCCTTATTTACCAGATGGAACGCCAGTTGATATCATGTTGAACCCACTTGGGGTGCCATCACGTATGAATATCGGACAAGTTATGGAGCTTCATTTAGGTATGGCTGCTCGTAATTTAGGTATTCATATTGCAACGCCAGTCTTTGATGGGGCTTCTTCAGAAGACCTTTGGGAAACTGTTCAAGAAGCAGGTATGGATTCAGATGCTAAGACTGTTCTTTATGATGGTCGTACTGGTGAACCATTCGATAACCGTGTGTCAGTTGGTGTCATGTACATGATCAAACTTCACCACATGGTTGATGATAAACTTCATGCCCGTTCAGTAGGACCATACTCACTTGTTACTCAACAACCACTTGGAGGTAAAGCTCAATTTGGTGGACAACGTTTTGGTGAGATGGAGGTTTGGGCGCTTGAAGCTTATGGTGCTTCAAATGTTCTTCAAGAAATTTTAACATACAAATCTGATGATGTTACAGGACGTCTTAAAGCTTATGAAGCTATCACAAAAGGTAAGCCAATTCCAAAACCAGGTGTTCCAGAATCATTCCGTGTTCTTGTAAAAGAATTGCAATCACTTGGTCTTGATATGCGTGTCCTTGATGAAGATGACAACGAAGTTGAACTCCGTGATCTTGATGAAGGTGAAGATGATGATGTGATGCACGTTGATGACCTTGAAAAAGCGCGAGTGAAACAAGAAACTGAAGAAAAACAAGCTGAACAAGTATCTGAAGTCGTTCAAGAAGAT

SEQ ID NO: 4662 - protein, 1191 aa, Streptococcus agalactiae
MAGHEVQYGKHRTRRSFSRIKEVLDLPNLIEIQTDSFQDFLDAGLKEVFEDVLPISNFTDTMVLEFVGYELKEPKYTLEEARIHDASYSAPIFVTFRLVNKETGEIKTQEVFFGDFPIMTEMGTFIINGGERIIVSQLVRSPGVYFNDKVDKNGKVGYGSTVIPNRGAWLELETDAKDIAYTRIDRTRKIPFTTLVRALGFSGDDEIVDIFGDSELVRNTIEKDIHKNPSDSRTDEALKEIYERLRPGEPKTADSSRSLLVARFFDPRRYDLAAVGRYKINKKLNLKTRLLNQTIAENLVDGETGEILVEAGTVMTRDVIDSIAEHIDGDLNKFVYTPNDYAVVTEPVILQKFKVVAPTDPDRVVTIVGNSNPEDKVRALTPADILAEMSYFLNLAEGIGKVDDIDHLGNRRIRAVGELLANQFRIGLARMERNVRERMSVQDNEVLTPQQIINIRPVTAAVKEFFGSSQLSQFMDQHNPLSELSHKRRLSALGPGGLTRDRAGYEVRDVHYTHYGRMCPIETPEGPNIGLINNLSSFGHLNKYGFIQTPYRKVDRSTGAVTNEIVWLTADEEDEFTVAQANSKLNEDGTFAEEIVMGRHQGNNQEFPSSIVDFVDVSPKQVVAVATACIPFLENDDSNRALMGANMQRQAVPLIDPKAPYVGTGMEYQAAHDSGAAVIAKHDGRVIFSDAEKVEVRREDGSLDVYHVQKFRRSNSGTAYNQRTLVKVGDLVEKGDFIADGPSMENGEMALGQNPVVAYMTWEGYNFEDAVIMSERLVKEDVYTSVHLEEFESETRDTKLGPEEITREIPNVGEDSLRDLDEMGIIRIGAEVKEGDILVGKVTPKGEKDLSAEERLLHAIFGDKSREVRDTSLRVPHGGDGVVRDVKIFTRANGDELQSGVNMLVRVYIAQKRKIKVGDKMAGRHGNKGVVSRIVPVEDMPYLPDGTPVDIMLNPLGVPSRMNIGQVMELHLGMAARNLGIHIATPVFDGASSEDLWETVQEAGMDSDAKTVLYDGRTGEPFDNRVSVGVMYMIKLHHMVDDKLHARSVGPYSLVTQQPLGGKAQFGGQRFGEMEVWALEAYGASNVLQEILTYKSDDVTGRLKAYEAITKGKPIPKPGVPESFRVLVKELQSLGLDMRVLDEDDNEVELRDLDEGEDDDVMHVDDLEKARVKQETEEKQAEQVSEVVQED

SEQ ID NO: 4663 - protein, 3678 aa, Streptococcus agalactiae
ATGATGATAAATCGAAGAAAGGTAAAACTAGTGGTTGACGTAAATCGTTTTAAAAGTATGCAAATCACATTAGCATCACCAAGTAAGGTCCGTTCATGGTCTTATGGTGAAGTTAAAAAACCTGAAACAATCAACTACCGCACATTGAAACCAGAACGTGAAGGACTTTTTGATGAAGTTATTTTTGGTCCAACAAAAGATTGGGAATGTGCGTGTGGAAAATACAAACGTATTCGTTACAAAGGAATCATTTGTGACCGTTGTGGCGTTGAAGTAACTCGTGCAAAAGTTCGTCGCGAACGTATGGGACATATCGAGTTAAAAGCACCAGTATCTCATATCTGGTATTTCAAAGGTATCCCATCGCGTATGGGACTCACGTTGGATATGAGTCCCCGTGCCCTTGAAGAAGTTATTTATTTTGCGGCTTATGTTGTTATCGATCCAATGGACACACCATTAGAACCGAAGTCACTCCTTACTGAGCGTGAATACCGTGAAAAACTTCAAGAGTACGGTTACGGTTCGTTTGTTGCTAAAATGGGTGCTGAAGCCATTCAAGATCTTCTTAAACGCGTTGATTTAGATGCAGAAATCGCAGTTCTTAAAGAGGAGTTGAAATCAGCGACAGGTCAAAAACGTGTGAAAGCAGTTCGTCGTCTGGATGTGTTAGATGCCTTTAAAAAATCTGGAAATAAACCAGAATGGATGGTTCTTAACATTTTACCGGTTATCCCACCGGATCTTCGTCCGATGGTTCAATTAGATGGTGGTCGTTTTGCGGCATCAGACTTGAATGACCTTTACCGCCGTGTTATTAACCGTAACAATCGTTTGGCACGTTTGTTGGAATTAAATGCTCCTGGCATCATCGTTCAAAATGAAAAACGTATGTTACAAGAAGCTGTTGATGCGCTTATCGACAATGGTCGTCGTGGTCGTCCAATTACCGGACCAGGTAGTCGTCCTTTGAAATCATTAAGCCATATGCTTAAAGGTAAACAAGGTCGTTTCCGCCAAAACTTACTTGGTAAACGTGTTGACTTCTCTGGACGTTCCGTTATTGCTGTTGGTCCAACACTTAAAATGTACCAATGTGGTGTACCACGTGAAATGGCTATTGAGCTCTTCAAACCTTTTGTAATGCGTGAAATCGTTGCTCGTGACCTCGCAGGGAACGTTAAAGCAGCTAAACGTATGGTTGAACGTGGGGACGAGCGTATTTGGGACATCTTAGAAGAAGTTATTAAAGAGCACCCAGTACTTCTAAACCGTGCACCTACTCTTCACAGATTAGGTATCCAAGCGTTTGAACCTGTCCTTATTGATGGTAAGGCGCTTCGTCTTCACCCACTTGTATGTGAGGCCTACAATGCTGACTTTGATGGAGACCAAATGGCCATCCACGTTCCATTGTCTGAAGAAGCCCAAGCAGAAGCTCGTCTTTTGATGCTTGCTGCAGAGCACATCCTTAACCCTAAAGATGGTAAGCCAGTCGTAACACCATCTCAGGACATGGTTTTAGGAAATTACTACCTGACTATGGAAGATGCTGGTCGTGAAGGTGAAGGCATGATTTTCAAAGATCATGACGAAGCAGTTATGGCATATCAAAATGGTTATGTTCATTTACATACACGTGTTGGTATCGCTGTTGATTCAATGCCGAATAAGCCTTGGACAGAAGAGCAAAAACATAAAATCATGGTTACAACAGTTGGTAAGATTCTCTTCAACGATATCATGCCTGAAGATTTACCGTACTTAATTGAACCTAATAATGCAAACTTGACAGAAAAAACTCCAGATAAATACTTCTTAGAGCCAGGTCAGGATATTCAAGCAGTTATTGATAACTTAGAGATTAATATTCCCTTTAAGAAGAAAAATCTTGGTAATATTATCGCAGAAACTTTTAAACGTTTCCGTACAACAGAAACTTCTGCTTTCCTTGACCGTTTGAAGGACCTTGGATATTATCATTCAACACTTGCTGGTTTGACTGTGGGTATTGCTGATATCCCAGTTATTGACAATAAAGCTGAGATTATTGATGCAGCTCACCACAGAGTTGAAGATATCAATAAAGCCTTCCGTCGAGGTTTGATGACTGAAGAAGATCGTTATGTTGCTGTTACAACAACATGGCGTGAAGCTAAAGAAGCACTTGAAAAACGTCTTATTGAGACACAAGATCCAAAGAACCCTATCGTTATGATGATGGACTCAGGAGCTCGTGGTAACATCTCAAACTTCTCACAACTTGCCGGTATGCGTGGTTTGATGGCTGCTCCTAATGGACGTATCATGGAATTGCCAATCTTATCAAACTTCCGTGAAGGTCTTAGTGTTTTGGAAATGTTCTTCTCAACTCACGGTGCGCGTAAAGGTATGACTGATACGGCCCTTAAGACAGCCGACTCAGGTTACCTTACTCGTCGTTTGGTTGACGTTGCCCAAGATGTTATTATTCGTGAAGATGACTGTGGAACAGACCGCGGTTTGACAATCACAGCAATTACAGATGGTAAAGAGGTTACTGAGACACTTGAAGAGCGTTTGATAGGACGTTATACTAAGAAGTCAATCAAACATCCTGAGACAGGTGAAATTCTCGTTGGTGCAGATACCTTAATTACTGAAGATATGGCTGCTAAAGTTGTTAAAGCGGGCGTTGAGGAAGTAACTATCCGATCAGTATTTACATGTAACACTCGCCATGGTGTTTGTCGTCACTGTTACGGTATTAACTTGGCAACAGGTGATGCTGTTGAGGTTGGTGAAGCAGTTGGTACTATTGCAGCTCAATCTATCGGTGAACCAGGGACACAGCTTACAATGCGTACCTTCCATACCGGTGGTGTTGCTTCAAATACTGATATTACACAAGGTCTCCCACGTATCCAAGAAATCTTTGAAGCACGTAACCCTAAAGGTGAGGCAGTTATTACTGAAGTTAAGGGTGAAGTCGTTGCAATTGAAGAAGACTCTTCAACACGTACTAAGAAAGTATTCGTTAAAGGTCAGACAGGTGAGGGAGAATACGTTGTTCCATTTACAGCACGTATGAAAGTTGAAGTTGGTGATGAAGTAGCTCGTGGTGCGGCCTTAACTGAAGGATCTATCCAACCAAAACGTCTCCTTGAAGTTCGTGATACTTTATCTGTTGAAACGTACCTACTTGCTGAAGTACAAAAAGTTTACCGTAGCCAAGGGGTAGAAATCGGAGATAAACACGTTGAGGTAATGGTTCGTCAAATGCTCCGTAAAGTTCGTGTCATGGATCCAGGAGATACAGATCTTCTTCCAGGTACACTTATGGATATTTCAGACTTTACAGATGCTAACAAAGATATTGTTATTTCTGGTGGAATCCCTGCGACAAGCCGTCCTGTCCTTATGGGTATTACTAAGGCTTCCCTTGAAACTAATTCATTCTTATCAGCTGCATCCTTCCAAGAAACAACACGTGTCCTTACAGATGCTGCTATCCGTGGTAAGAAAGATCACTTACTTGGTCTTAAAGAAAATGTTATTATCGGTAAAATCATTCCAGCGGGTACTGGTATGGCTCGTTACCGTAATATTGAACCACTTGCTGTTAATGAAGTTGAGATTATTGAAGGAACTCCTGTTGATGCAGAAGTTACGGAAGTATCAACACCTACAACAGAAGAT

SEQ ID NO: 4664 - protein, 1226 aa, Streptococcus agalactiae; identical to SEQ ID NO: 340

SEQ ID NO: 4665 - protein, 363 aa, Streptococcus agalactiae
ATGTATCAAGTTGTAAAAATGTTTGGTGATTGGGAACCATGGTGGTTTATTGAAGGTTGGGAGGAAGATATTACTGAAATTGCTGAGTATGATACCTTATCAGAAGCTTTGCTCTATTTTCAAGAGGAGTGGGATAGGGGACAGGAAAAGTGGCCTTATTTTCAAAGTAAGTCTAGTTTGTTGGCAACGTTTTGGAGTATAAAAGAAAAACGTTGGTGTGAAGAATGTGATGAGTACCTCCAACAGTATCATTCCTTAATGTTATTGAAAGAATGGCAAGAAATTCCTAAGGAAGAATCTATTGAGCGATTTGAAGTATTTAATAAGATAGCTGAGTTGCCATCGGCATGTTCTTTAAATTTG

SEQ ID NO: 4666 - protein, 121 aa, Streptococcus agalactiae; identical to SEQ ID NO: 346

SEQ ID NO: 4667 - protein, 969 aa, Streptococcus agalactiae
ATGGTTCAATCATTAGCAAAGCAAGTCATTCATCAGGCAGTAGAAGTAAATGCTCAAGATATTTATATCATTCCCAAAGGTGATTGTTATGAACTCTATATGCGTATTGATGATGAAAGGCGGTTTATTGATGTTTTTGAGTTTAATAGGATGGCTAGTCTTATTAGTCACTTTAAATTTGTGGCAGGCATGAACGTTGGAGAAAAAAGACGAAGTCAATTAGGTTCTTGTGACTATGAACTGTCAGAGGGAAGACTGGTTTCATTACGACTATCGAGTGTGGGAGATTATCGTGGTCAAGAATCTTTAGTTATTCGTATTTTGTATTCAGGTCATCAGGACTTAAAATATTGGTTTGATAATATAAAGCAAATGAAGGAAGTACTGGGTACAAGAGGGCTATATCTTTTTTCCGGCCCTGTGGGGAGTGGTAAAACAACTCTCATGTATCAATTAGCTTCAGAAGTATTTAAAAATAAGCAAATTATCACGATTGAAGATCCGGTAGAAATCAAGAATGACAAGATGTTACAACTCCAATTGAATGAGGATATTGGAATGACTTATGATGCTTTAATCAAACTGTCTTTACGGCATCGTCCAGATATTTTAATTATCGGAGAGATTAGAGATCAAGCGACGGCCCGTGCTGTTATTCGTGCAAGTTTAACGGGAGTGATGGTTTTTTCTACTATTCATGCTAAAAGTATTTCCGGAGTCTATGATAGGCTTATAGAATTAGGGGTTAACTATCAAGAGTTAGAAAATAGTCTAAAATTAATAGCATATCAACGTTTAATTGGAGGAGGAAGCCTAATTGACTTTGAGACAGGTAACTTTAAAAAACACTCATCAGACAAGTGGAATAGACAAGTGGATATCTTGGCTGAAGAAGGACATATCAGTAAGAAACAGGCACAAGTCGAAAAAATTATCCCTCAAGAAACAACGGAAAGTAGTCCAACTTTT

SEQ ID NO: 4668 - protein, 323 aa, Streptococcus agalactiae
MVQSLAKQVIHQAVEVNAQDIYIIPKGDCYELYMRIDDERRFIDVFEFNRMASLISHFKFVAGMNVGEKRRSQLGSCDYELSEGRLVSLRLSSVGDYRGQESLVIRILYSGHQDLKYWFDNIKQMKEVLGTRGLYLFSGPVGSGKTTLMYQLASEVFKNKQIITIEDPVEIKNDKMLQLQLNEDIGMTYDALIKLSLRHRPDILIIGEIRDQATARAVIRASLTGVMVFSTIHAKSISGVYDRLIELGVNYQELENSLKLIAYQRLIGGGSLIDFETGNFKKHSSDKWNRQVDILAEEGHISKKQAQVEKIIPQETTESSPTF

SEQ ID NO: 4669 - protein, 846 aa, Streptococcus agalactiae
ATGAATAAGGCATTATTAGAGGGAAAAGATTTATCAAAAATGTTAGGAGAGTTAGGTTTTTCTGACACTGTTATCACACAGGTTGCATTAGCTGATTTGCATGGTAACATTTCAAGGAGCCTACTAAAGATTGAGTCTTATTTAGCTAATCTTTTGTTAGTTAGAAAAAAAGTAATAGAAGTAGCTACTTACCCATTGATATTATTGACTTTTCTGGTGCTAATTATGATTGGTCTTAGGCATTATTTAATGCCCCAATTAGGAGAAAATAATTTTGCAACTAGCCTGATTACAAATGTGCCGAATATTTTCTTATTACTTTTAGCAGTTGTACTTATTTTTAGTTTAATATTTTATATTGTTCAAAAGCGATTGTCGCGTATTAAAGTAGCTTGTTTTTTAACAACAATTCCCTTAGTTGGATCATATGTTAAGCTTTATTTAACTGCTTACTATGCCCGTGAGTGGGGAAATTTATTAAGTCAAGGTGTTGAATTGGACCAAATTGTTAAAGTAATGCAAAATCAGAAATCCAAACTTTTTAGGGAAATAGGATATGACATGGAAGAAGGTTTTCTATCAGGTAAAGCATTTCACCAAAAAGTATTAGACTATCCGTTTTTCTTAACTGAGCTTAGTTTAATGATTGAATATGGCCAAGTTAAGGCGAAATTAGGAACAGAGTTAGATATATATGCTGATGAGAAGTGGGAGGATTTTTTTACAAAATTAGCTAGAGCGACCCAGTTAATCCAACCTGTTATTTTTATTTTTGTAGCTCTTATCATTGTTATGATTTATGCAGCAATGCTGTTACCAATGTATCAAAATATGGAGATATTATCA

SEQ ID NO: 4670 - protein, 282 aa, Streptococcus agalactiae
MNKALLEGKDLSKMLGELGFSDTVITQVALADLHGNISRSLLKIESYLANLLLVRKKVIEVATYPLILLTFLVLIMIGLRHYLMPQLGENNFATSLITNVPNIFLLLLAVVLIFSLIFYIVQKRLSRIKVACFLTTIPLVGSYVKLYLTAYYAREWGNLLSQGVELDQIVKVMQNQKSKLFREIGYDMEEGFLSGKAFHQKVLDYPFFLTELSLMIEYGQVKAKLGTELDIYADEKWEDFFTKLARATQLIQPVIFIFVALIIVMIYAAMLLPMYQNMEILS

SEQ ID NO: 4671 - protein, 426 aa, Streptococcus agalactiae
ATGAAAAATTTATTGTTAAAATGTAAGGATAAGAAGGTTAAAGCATTTACACTTTTAGAGAGCCTTATTGTATTATCAGTAGTGGCATTTATGACGTTAGTATTTTCAACATCATTTAATAATATTTTTAGGCAGGTTGAAGAAACAATTTTCTTCATATCCTTTGAACATCTTTATAGAGATACTCAGAAATTGAGTGCATTTGGTCAGAAGAAACAAACCCTTACAATCTCTCATAATTATCTCGAAAATACTTATGAGAGACTTTATTTACCTAAAACTGTAAAAGTAGTCAAAAGTGACACACTTGCATTTGACGCTAATGGAGGGAATTCAAGCTTGGCAAAAATTCAATTTGAATGTTATAGAAAAACTGTTACGTATCAATTATATATAGGAAGTGGTAATTATCGTAAGAAAGAAAAT

SEQ ID NO: 4672 - protein, 142 aa, Streptococcus agalactiae
MKNLLLKCKDKKVKAFTLLESLIVLSVVAFMTLVFSTSFNNIFRQVEETIFFISFEHLYRDTQKLSAFGQKKQTLTISHNYLENTYERLYLPKTVKVVKSDTLAFDANGGNSSLAKIQFECYRKTVTYQLYIGSGNYRKKEN

SEQ ID NO: 4673 - protein, 297 aa, Streptococcus agalactiae
GTGGTAATTATCGTAAGAAAGAAAATTAGAGCCTATATTTTACTGGAAAGCCTAGTGGGATTAGCTATTTTAGTTACTATTACAAGTTTAGTAATAAGTGAAATCAATCGTCAACAATCTCATATTGCAAGAAGGCAACATGAGCAAGAAGTATTGATATTAGCTAGAATGGCTGTGCAAACTGATCAAAAAATATTAGAAGCAAATGGTGTTAATATTCGCATTGAAGAAAGTAAAAATAAAATTGTGCTCTTTGAAGGTAATAAGGAAATTTTGCACGTATCAAAAGTTAAGGGT

SEQ ID NO: 4674 - protein, 99 aa, Streptococcus agalactiae
MVIIVRKKIRAYILLESLVGLAILVTITSLVISEINRQQSHIARRQHEQEVLILARMAVQTDQKILEANGVNIRIEESKNKIVLFEGNKEILHVSKVKG

SEQ ID NO: 4675 - protein, 330 aa, Streptococcus agalactiae
TTGGCTCAACAGATAGTAGTGATGTCTTCTTCCAGTCAGTCTGAATGGGTGTTATTAACTCAGCAACTAAATGCAGAATTCGAAGGCGCTCACTTGGAATATTTAAGACAGAACAAACTTTATTTACGTAAGCAAGATAAGATTGTAACCTTTGGCAAATCTAATAAAGATGATTTCCGTAAGACAGGTTATGATGGTCGAGGTTATCAACCAATGGTTTATGGGTTAGACAATTGTCAAATGAGTCAAACCAAAAGTATGGTAAAACTTGTTTTTTATTTTAAGGACGGGTTAAAAAGGACATTTTACTATGATTTTAAAGAAGAAACT

SEQ ID NO: 4676 - protein, 110 aa, Streptococcus agalactiae
MAQQIVVMSSSSQSEWVLLTQQLNAEFEGAHLEYLRQNKLYLRKQDKIVTFGKSNKDDFRKTGYDGRGYQPMVYGLDNCQMSQTKSMVKLVFYFKDGLKRTFYYDFKEET

SEQ ID NO: 4677 - protein, 369 aa, Streptococcus agalactiae
ATGATTTTAAAGAAGAAACTTAAAGCTGGCATCCTTTTGCAAGCTATTGTATTGGCTGCTGTATTTACACTCGTCTTACAGTTTTATCTAGCAAGAATATTGGCAACAGAAAGACAGTATCATAGCCAAATTGAAGCAAGTAAAGCTTATTTAACAGCGCAGTTAGCTTATAAAACAATAGAAGGTGACTCCATATCAGGAAAATGTTATTTTACAGGAGGATATGCTTCATACCTCCAAGAAGGGAACTATTTACAAGTTAAGGTTACATTGGATAAGGGAGGAAACTATAACCATAAGTTTTATCGTAAAACAGACACTCTCCAAGTACCTCTCAAGTCTAATGATAATAAAGCAAGCCATAAACAT

SEQ ID NO: 4678 - protein, 123 aa, Streptococcus agalactiae; identical to SEQ ID NO: 354

SEQ ID NO: 4679 - protein, 972 aa, Streptococcus agalactiae
ATGAATTTTGAAAAAATTGAGACAGCCTATGAGCTGATTTTAGAAAATATCCAAACGATTGAGAACCAATTAAAAACTCATATTTATGATGCCTTAATTGAACAGAACTCTTATTACCTTGGTTCAAGTTGTGATTTAGATATTGTTGTGGTGAATAACCAAAAATTACGTCAACTTGACTTAAGTCAAGAAGAATGGCGTCGCACTTTCCAGTTCATTTTTATCAAATCTGCGCAAACAGAGCAATTACAAGCTAATCATCAGTTTACGCCAGATAGTATTGGTTTTATCTTGTTATTTCTTTTGGAAGAATTAACGAGTCAAGAGACAGTGGATGTCTTGGAAATTGGAAGTGGAACTGGGAATTTAGCTCAGACTCTCCTCAATAACAGCTCGAAAGAGTTAAATTATATGGGCATTGAAGTTGATGATCTTTTGATTGATCTATCAGCAAGCATTGCTGAAATTATAGGTTCTAGTGCCCAATTTATCCAAGAGGATGCCGTTAGACCACAAATTTTGAAAGAAAGCGATGTAATCATTAGTGATTTACCAATTGGCTATTATCCTAATGATGATATTGCTAAACGATATGCTGTATCAAGTTCTAAAGAGCACACCTATGCTCACCATCTATTGATGGAGCAATCTCTTAAATATTTGAAAAAAGATGGAATCGCTATATTTTTAGCACCCGAAAACCTTTTAACAAGTCCACAAAGTGATTTGCTGAAGGAGTGGTTAAAAGGATATGCAGATGTCATTGCCGTTTTAACTCTACCAGAAACTATTTTTGGAAGTCGTCAAAATGCGAAATCTATATTTGTTCTCAAGAAGCAAGCAGAACAAAAACCAGAAACCTTTGTATATCCGCTGACAGATTTGCAAAATCGTGAGAATATGGCAAACTTCATTGAAAATTTTCAAAAATGGAGCAGAGAAAATAGTCATTACTCAAAAAATATGATAGAA

SEQ ID NO: 4680 - protein, 324 aa, Streptococcus agalactiae
MNFEKIETAYELILENIQTIENQLKTHIYDALIEQNSYYLGSSCDLDIVVVNNQKLRQLDLSQEEWRRTFQFIFIKSAQTEQLQANHQFTPDSIGFILLFLLEELTSQETVDVLEIGSGTGNLAQTLLNNSSKELNYMGIEVDDLLIDLSASIAEIIGSSAQFIQEDAVRPQILKESDVIISDLPIGYYPNDDIAKRYAVSSSKEHTYAHHLLMEQSLKYLKKDGIAIFLAPENLLTSPQSDLLKEWLKGYADVIAVLTLPETIFGSRQNAKSIFVLKKQAEQKPETFVYPLTDLQNRENMANFIENFQKWSRENSHYSKNMIE

SEQ ID NO: 4681 - protein, 1191 aa, Streptococcus agalactiae
ATGTCAAAAACAATAGCAATTAATGCTGGAAGTTCAAGTTTGAAATGGCAATTATATGAAATGCCAGAGGAGAAAGTAGTTGCCAAAGGGATTATCGAACGTATTGGTTTGAAAGATTCTATTTCGACTGTAAAATTTGACGATAAAAAAGATGAACAAATTTTAGATATCGTAGATCATACCCAAGCTGTTAAAATTCTTTTAGAAGATCTAACAAAACATGGTATTATCAAAGACTTTAATGAAATTACAGGTGTTGGTCATCGTGTCGTTGCTGGTGGTGAATATTTTAAAGAGTCTGCTTTAGTAGATGATAAAGTTGTAGAACAGGTTGAAGAATTATCAGCTTTAGCTCCACTCCACAACCCAGCAGCTGCAGCAGGGATTCGTGCGTTTAGAGAAATCTTACCAGATATCACGAGTGTATGTGTATTTGATACAGCCTTCCATACAACAATGCAACCTCATACCTACTTATATCCAATCCCACAAAAGTACTATACTGATTATAAAGTACGTAAATACGGTGCACACGGGACAAGCCACCAATACGTTGCACAAGAAGCAGCTAAGCAATTAGGACGTCCTTTAGAAGAATTAAAATTAATCACAGCACATGTGGGTAATGGTGTTTCTATTACAGCAAATTATCATGGACAGTCTATTGATACATCAATGGGATTCACACCACTTGCAGGACCAATGATGGGAACACGTTCAGGAGACATTGATCCTGCGATTATCCCTTATCTTGTAGCTAATGATTCAGAATTGGAAGATGCAGCAGCTGTTGTTAATATGCTTAACAAACAATCAGGATTGCTTGGAGTATCAGGAACTTCAAGTGATATGCGAGATATTGAAGCAGGTCTTCAAAGTAAAGATCCAAATGCAGTGTTAGCCTATAATGTCTTTATTGACCGTATTAAGAAATTTATTGGACAATACTTGGCAGTATTAAATGGCGCGGATGCTATTATTTTTACTGCAGGTATGGGAGAAAATGCGCCATTAATGCGTCAAGATGTTATCGCAGGATTATCATGGTTTGGCATTGAACTTGATCCAGAAAAAAATGTTTTTGGTTATTTTGGAGATATCACAAAACCAGATTCAAAAGTGAAGGTTTTAGTTATTCCTACTGATGAAGAATTAATGATTGCGCGTGACGTTGAGCGCCTTAAAGCTAAA

SEQ ID NO: 4682 - protein, 397 aa, Streptococcus agalactiae
MSKTIAINAGSSSLKWQLYEMPEEKVVAKGIIERIGLKDSISTVKFDDKKDEQILDIVDHTQAVKILLEDLTKHGIIKDFNEITGVGHRVVAGGEYFKESALVDDKVVEQVEELSALAPLHNPAAAAGIRAFREILPDITSVCVFDTAFHTTMQPHTYLYPIPQKYYTDYKVRKYGAHGTSHQYVAQEAAKQLGRPLEELKLITAHVGNGVSITANYHGQSIDTSMGFTPLAGPMMGTRSGDIDPAIIPYLVANDSELEDAAAVVNMLNKQSGLLGVSGTSSDMRDIEAGLQSKDPNAVLAYNVFIDRIKKFIGQYLAVLNGADAIIFTAGMGENAPLMRQDVIAGLSWFGIELDPEKNVFGYFGDITKPDSKVKVLVIPTDEELMIARDVERLKAK

SEQ ID NO: 4683 - protein, 204 aa, Streptococcus agalactiae
ATGAAAAATTCTCTACAAAAGTTACGAAAATCTAGGAAATTAAGTCAAGCAGAACTTGCAGTTGCACTTGGAGTTACTAGGCAAACTATTATTTCTCTAGAAAAAGAGAAATACACGGCATCTTTGGAGCTAGCATTTAAGATAGCGCGTTATTTTGATAAACAAATTGAGGAAGTTTTTATTTATACAGAAAGTGAAAGAGGA

SEQ ID NO: 4684 - protein, 68 aa, Streptococcus agalactiae
MKNSLQKLRKSRKLSQAELAVALGVTRQTIISLEKEKYTASLELAFKIARYFDKQIEEVFIYTESERG

SEQ ID NO: 4685 - protein, 135 aa, Streptococcus agalactiae
ATGTCAAGGATGTGGACTATTGATTTTTGTCCACCAAACGTTTACCAGCAATATGTTTTTATCATTACTATTAGTATTAGTATTGCGATGTCTATTTTTGCTATTTATCGCTATGCTTCATTGAAGAAAACGATA

SEQ ID NO: 4686 - protein, 45 aa, Streptococcus agalactiae
MSRMWTIDFCPPNVYQQYVFIITISISIAMSIFAIYRYASLKKTI

SEQ ID NO: 4687 - protein, 453 aa, Streptococcus agalactiae
ATGTTAATAAAAGGATTATTGTCACCCAATAGTAAAGTATCTCCGAAAGATTACAAAGTATATATGAGAGTTTTGTCTTTTGTTTTTAGTGTATGTAGTTTGATTATGATAGTATCATCATTTCTACATACCTTTGAATCTAATTTTACTAAAGGTTTTTCCTTTGGTTCAGGTATTGCCTTATTTGCAGGAAGTTTTTATTTTTTGGTGATAACATTTAGTGAAAAGCGATTTCAACATTACTATACCAAAGTTTTTGATGAGCGTAATCAATTTATTGCTAATATGTCTTGTCGACTCCTTTTCCTTTTATCTGTCCTTGTTTTAGTGGTATTGTGTCTGATTAATGTCTGGTTTGGTATAACTTTTTCCTATGCAAAGTTCTTGCTATTGATACTCTCTTTTGTTTTATATGGTTATTTATTAATTTACTTTATTTTACAGAAGTTATTG

SEQ ID NO: 4688 - protein, 151 aa, Streptococcus agalactiae
MLIKGLLSPNSKVSPKDYKVYMRVLSFVFSVCSLIMIVSSFLHTFESNFTKGFSFGSGIALFAGSFYFLVITFSEKRFQHYYTKVFDERNQFIANMSCRLLFLLSVLVLVVLCLINVWFGITFSYAKFLLLILSFVLYGYLLIYFILQKLL

SEQ ID NO: 4689 - protein, 663 aa, Streptococcus agalactiae
GTGTCATTTATTATTAGAAAAGGCAAAATTTTAGCTTTGCTAATAGCATTTTTAGTTATTAATCAACTTGTTCCTATATTGGCTGTGTGGCTCCTAAAGAATCACTATCAAACGCCTTTTACTAGTATATTGTTAATTGGCTTAGAATTACTTATTATTGCTCTTTTCCTTTATTATGCCAAGGTTAAACAAATAATTAGATGGAAAGCATTATTGACAAGGAAAGCATTAGTTACTATTTTCTTAGGTTGGTTATCATTGAGGGTTCCACAAATTATTGGTTACCTCATTATGACTATGCAAGGGGTTAAAGATACAGCAAATCAAACAGTAATTATGGAATTAACAAAGCAACTTCCACTAGCTTTGATGTTAATTTTTACCATAATTGGTGCCCCTATTATGGAAGAAATTATATTTCGCTATATTATCCCTAAAGAACTTTTTGCGAAACATCAAAAATGGGGTTTTGTCATCGGTACTTTAGCTTTTGCTCTTATTCATTCCCCTTCTGATATAGGTAGTTTTATTATTTATGCTGGGATGGGTGCTATTTTATCTTTTGTTTATTATAAAACTGAGCACTTAGAATATAGTATAATGGTTCATTTTATTAACAATGCTCTTGCTTATAGCGTGTTAATCAGTACAATGATGAATAAC

SEQ ID NO: 4690 - protein, 221 aa, Streptococcus agalactiae
MSFIIRKGKILALLIAFLVINQLVPILAVWLLKNHYQTPFTSILLIGLELLIIALFLYYAKVKQIIRWKALLTRKALVTIFLGWLSLRVPQIIGYLIMTMQGVKDTANQTVIMELTKQLPLALMLIFTIIGAPIMEEIIFRYIIPKELFAKHQKWGFVIGTLAFALIHSPSDIGSFIIYAGMGAILSFVYYKTEHLEYSIMVHFINNALAYSVLISTMMNN

SEQ ID NO: 4691 - protein, 768 aa, Streptococcus agalactiae
ATGAAAATTGGAATTATCGGCGTTGGAAAAATGGCCAGTGCAATTATTCAAGGCCTCAAACAAACCCAACATGACATTGTCATATCCGGATCTTGCTTAGAGCGTTCAAAAGAAATTGCAGAAAGACTTGATGTTACTTACGCCGAATCTCATCAGTCATTAATCAATCAAGCTGATATTATCATGTTAGGTATTAAACCTCAACTATTTGAAAAGGTTCTTCTTCCACTTGATATCACAAAACCAATCATCTCAATGGCAGCAGGAATCTCCTTAGCGCGTTTAAGCCAATTAACTCGTTCTGATTTACCATTGATTCGTATTATGCCAAATATTAACGCACAAATACTTCAAAGTTGCACAGCTATTTGTTACAACAATCATGTATCGGATGAGTTACGACAATTAACCAAAGAAATTACGGATAGTTTTGGAAGTAGCTTTGATATAGCAGAAACCAATTTTGATACCTTCACTGCTCTAGCAGGTTCTAGCCCTGCCTATATCTATCTATTTATAGAAGCCTTAGCTAAAGCAGGTGTAAAATATGGATTTCCAAAAGAACAAGCACTCTCTATTGTAGGACAGACTGTCTTAGCTTCTAGTCAAAACCTATTACAAGGACAAAATAGCACCTCTGACTTAATCGACAACATTTGTAGCCCAGGCGGAACTACTATTGCTGGCCTTTTAGACTTAGAAAAAAATGGTCTGACGCATAGTGTTATTTCTGCCATTGATGCTACTATTGAGAAAGCAAAAAAACTT

SEQ ID NO: 4692 - protein, 256 aa, Streptococcus agalactiae
MKIGIIGVGKMASAIIQGLKQTQHDIVISGSCLERSKEIAERLDVTYAESHQSLINQADIIMLGIKPQLFEKVLLPLDITKPIISMAAGISLARLSQLTRSDLPLIRIMPNINAQILQSCTAICYNNHVSDELRQLTKEITDSFGSSFDIAETNFDTFTALAGSSPAYIYLFIEALAKAGVKYGFPKEQALSIVGQTVLASSQNLLQGQNSTSDLIDNICSPGGTTIAGLLDLEKNGLTHSVISAIDATIEKAKKL

SEQ ID NO: 4693 - protein, 1065 aa, Streptococcus agalactiae
ATGTCAGATTTATTTAACAAAATTAAAACCGTAACTGAGCTTGATGGGATTGCTGGCTATGAACACAATATCCGCAACTTCCTTCGTCAAGAAATAACTCCTTTAGTTGATCAAGTTGAGACAGACGGACTTGGTGGAATTTTTGGAGTTAAAAATACTCATGAGACTAATGCTCCTAAAGTCATGGTTGCTGCCCATATGGATGAAGTCGGCTTTATGGTTAGTCATATTCAGCCAGATGGAACATTTCGTGTACTTGAGGTTGGAGGATGGAATCCCCTAGTAGTCAGCTCACAACGCTTTACCCTCTACACACGTTCTGGTGATGCTATTCCTGTTATATCAGGCTCAGTTCCTCCTCACTTTCTTCGTGGACAAAGCGGTGGAACGACATTACCCAAAATTAGTGACATTGTTTTTGATGGAGGATTCACAGATAAAAATGAAGCTGAAAGCTTTGGCATTGCTCCTGGCGATATCATTGTTCCTAAATCTGAAACCATTTTAACTGCAAATCAAAAACATATTATGTCAAAAGCTTGGGATAATCGCTATGGTGTGCTTATGGTGACCGAATTGCTAAAAAGCTTAAAAGATCAAAGTCTTAGCAACACACTTATTGCTGGGGCAAATGTTCAAGAAGAAGTCGGACTTCGTGGCGCACATGTTTCAACAACTAAATTCAACCCAGATATCTTCTTAGCTGTCGATTGTTCCCCAGCTGGAGATATTTATGGGGAACAAGGCAAAATAGGAGAGGGAACCTTAATCCGTTTTTATGATCCCGGACATATCATGCTTAAAGATATGAGAGATTTCTTGCTTACAACAGCTGAAGAAGCAGGTATAAAATACCAATATTATGCTGCAAAAGGTGGTACCGATGCTGGGGCTGCTCACCTAAAAAATAGTGGTATTCCTTCTACAACTATCGGTGTCTGTGCACGCTACATTCATTCTCATCAAACACTCTACGCTATGGATGATTTTCTACAAGCACAAGCTTACCTTCAGGCTATCGTTAACAAATTAGACCGCTCGACGGTGGATATTATTAAAGGTTAT

SEQ ID NO: 4694 - protein, 355 aa, Streptococcus agalactiae
MSDLFNKIKTVTELDGIAGYEHNIRNFLRQEITPLVDQVETDGLGGIFGVKNTHETNAPKVMVAAHMDEVGFMVSHIQPDGTFRVLEVGGWNPLVVSSQRFTLYTRSGDAIPVISGSVPPHFLRGQSGGTTLPKISDIVFDGGFTDKNEAESFGIAPGDIIVPKSETILTANQKHIMSKAWDNRYGVLMVTELLKSLKDQSLSNTLIAGANVQEEVGLRGAHVSTTKFNPDIFLAVDCSPAGDIYGEQGKIGEGTLIRFYDPGHIMLKDMRDFLLTTAEEAGIKYQYYAAKGGTDAGAAHLKNSGIPSTTIGVCARYIHSHQTLYAMDDFLQAQAYLQAIVNKLDRSTVDIIKGY

SEQ ID NO: 4695 - protein, 237 aa, Streptococcus agalactiae
ATGAAAGAAAAATTATTAGTACCTGCTTTAAATTGTTTGCTAGGTCTACTCTTCCTAGGTGATCACTGGTTTTTATTTCGTCTTCAAAATGGAGAACTTTTTGCTATTGTGACGCTAATACTGCTTTGCACAACTTCATTTTTAATCAATAAGAATCACCCCAAAAATTTGACTTTGATTTCTATGATTATCACTTTTCTAGCCGTATTATCTTTCCTATCTACCTTTTTACTAGCT

SEQ ID NO: 4696 - protein, 79 aa, Streptococcus agalactiae
MKEKLLVPALNCLLGLLFLGDHWFLFRLQNGELFAIVTLILLCTTSFLINKNHPKNLTLISMIITFLAVLSFLSTFLLA

SEQ ID NO: 4697 - protein, 318 aa, Streptococcus agalactiae
GTGTCTAATTCCGGGGGGTATGGTATAATAACAGTTATGAAAAATAAAAAAATCTTATTTGGGACTGGCCTTGCTGGTGTGGGTTTACTGGCAGCTGCTGGTTATACCCTAACTAAAAAAGTAACAGATTATAAACGTCAGCAAATCACTCAGACCTTAAGAGAATTTTTTAGTCAGATGGGTGATATTCAGGTATTTTATTTTAATGAATTTGAATCTGATATTAAAATGACCAGTGGTGGTCTTGTCTTGGAAGATGGCAGAATTTTCGAATTCATTTATCGTCAAGGTGTTCTTGATTATGTGGAGGTGAGTAAA

SEQ ID NO: 4698 - protein, 106 aa, Streptococcus agalactiae; identical to SEQ ID NO: 372

SEQ ID NO: 4699 - protein, 321 aa, Streptococcus agalactiae
ATGATTTTACTAGAATCTTATGAAGAAATAGCAGCCTATATTGATAGCACTAAGAAAGTTGTTTTCTTTTTTACAGCAGATTGGTGTCCAGATTGTCAATTTATATATCCAGTAATGCCATCAATTGAAAAAGATTTCTCAGATTTTGTCTTTGTACGTGTTAATCGTGATGACTATATAGAATTAGCTCAGCAGTGGAATATTTTTGGGATTCCGAGTTTCGTTGTTGTGGAAAATGGTCAGGAACTGGGTCGTTTGGTTAATAAGAATCGCAAAACAAAGGCTGAAATTACTAAATTTCTCGCTGAAATTAACCATAAA

SEQ ID NO: 4700 - protein, 107 aa, Streptococcus agalactiae
MILLESYEEIAAYIDSTKKVVFFFTADWCPDCQFIYPVMPSIEKDFSDFVFVRVNRDDYIELAQQWNIFGIPSFVVVENGQELGRLVNKNRKTKAEITKFLAEINHK

SEQ ID NO: 4701 - protein, 624 aa, Streptococcus agalactiae
ATGATTTTTACTTATAATAGAGAACATGTTGGTGATACCTTAATGGTTATTGTTAAGGATAGTCAAGGAGCTAAGCTAGATGTTGATCGTCGCGGACAAGTAGCACGCGTCTATCTGCAAGATAGTAAAGAAACAGTTGCTTGGAATATCTTTGAAGTGTCAAGTTTAATTGTTATTGAGGGAGCAGGTCAAATAACTTTATCTGATCAAGATATTAAAATCCTTAATGCAGAACTACTGAAAGAAGGATTCGAAGACTCTCTTGTTAATAATATTGAACCTACATTTGTTGTGGCACAAATTAAAGAAATGATTGATCATCCAGATAGTGACCATTTACACATCTGTCAAGTAGAAATCAACGATGGGAAGACGGTTCAAATCGTTTGTGGGGCACCTAATGCTTCAGTAGGTCTTAAAACAGTTGCAGCTCTTCCAGGAGCTATGATGCCAAATGGTAGCCTTATTTTCCCAGGAAAACTTCGTGGAGAAGATAGCTTTGGAATGTTATGTAGTGCTCGCGAGTTAGCTCTTCCAAATGCTCCTCAAGTCAGAGGTATCATTGAATTATCTGATCAGGTAATTGTTGGAGAGTCTTTCGACGCCAATAAACATTGGAAAAAT

SEQ ID NO: 4702 - protein, 208 aa, Streptococcus agalactiae
MIFTYNREHVGDTLMVIVKDSQGAKLDVDRRGQVARVYLQDSKETVAWNIFEVSSLIVIEGAGQITLSDQDIKILNAELLKEGFEDSLVNNIEPTFVVAQIKEMIDHPDSDHLHICQVEINDGKTVQIVCGAPNASVGLKTVAALPGAMMPNGSLIFPGKLRGEDSFGMLCSARELALPNAPQVRGIIELSDQVIVGESFDANKHWKN

SEQ ID NO: 4703 - protein, 714 aa, Streptococcus agalactiae
ATGACAAATGTAACTAGTTATAAAGAAATGCTGGCTAAACCTTGGGGAAAAATACAATATGAAATAACTTTTGCTCAATTAAGCCATATCAAAAATCAGAACGTTTTAGATTTTGGAGCTGGTTTTTGTCTCACCGCACAACATCTAGCAAAAGAAAACAATGTAACTGCTATTGAACCCAATCCTAAACTGCTTTACGATAATCAAAGTGACAATATTTATAAAATCCTAGGTTCCTACGAAGCATTAAGAGATTTGCCTAATCAAAGTTTTGATACTATTATTTGTCATAATGTTCTTGAATATATAGACAAACATAATCATCCTGCTTATTTTGACGAATTTTCTCGACTTCTAAAACCTAATGGAGAACTATCTCTCATCAAACATAATATAACCGGTAAAATATTACAATCAGTTATTTTTAGCAATGATACCTCCACTGCGATGGAACTCTTAACAGGAGAAGCAAACTTTAAAAGTGCCAGTTTTGACCAGGGAAATATTTATACCTTAGAAGAACTAAAACAAAATACAAATTTATTAGTTGAACGTTATCAGGGTATTCGTACCTTCTATTCATTACAACCAAACCATTTTAAAACTGAAACTGGTTGGCTAAACAAAATGCTTGCTATTGAGCTAAGTGTTGCTGACAAAGCTCCTTATAAAGATATTGCTTTTTTGCAACACATCACACTTAAAAAGTCATTG

SEQ ID NO: 4704 - protein, 238 aa, Streptococcus agalactiae
MTNVTSYKEMLAKPWGKIQYEITFAQLSHIKNQNVLDFGAGFCLTAQHLAKENNVTAIEPNPKLLYDNQSDNIYKILGSYEALRDLPNQSFDTIICHNVLEYIDKHNHPAYFDEFSRLLKPNGELSLIKHNITGKILQSVIFSNDTSTAMELLTGEANFKSASFDQGNIYTLEELKQNTNLLVERYQGIRTFYSLQPNHFKTETGWLNKMLAIELSVADKAPYKDIAFLQHITLKKSL

SEQ ID NO: 4705 - protein, 393 aa, Streptococcus agalactiae
ATGTATAATAAAGTTATTATGATTGGGCGTCTAACAGCAAAGCCTGAGATGGTAAAAACACCAACTGACAAGTCAGTAACGCGTGCAACTGTTGCTGTTAATAGACGCTTTAAAGGAAGTAATGGTGAGCGTGAAGCAGATTTTATTAATGTGGTTATGTGGGGTCGTCTAGCGGAAACCCTTGCGAGCTATGGGACAAAGGGCTCTTTAATTTCAGTAGATGGTGAATTGCGTACGCGCAAGTACGAAAAGGATGGTCAAACGCACTATATCACTGAAGTATTAGCATCATCATTTCAGTTGCTAGAAAGCCGTTCCCAACGTGCTATGCGTGAAAATAACATTTCTGGTGATTTGTCAGATTTAGTATTGGAAGAAGAGGAGCTCCCCTTT

SEQ ID NO: 4706 - protein, 131 aa, Streptococcus agalactiae
MYNKVIMIGRLTAKPEMVKTPTDKSVTRATVAVNRRFKGSNGEREADFINVVMWGRLAETLASYGTKGSLISVDGELRTRKYEKDGQTHYITEVLASSFQLLESRSQRAMRENNISGDLSDLVLEEEELPF

SEQ ID NO: 4707 - protein, 642 aa, Streptococcus agalactiae
ATGGAAAAAGTCATTATTTTTGATATGGACGGCGTTATTGTTGATTCCGAGTACACGTTTTTAGATAATAAGACAGAAATGTTACGTGAGGAGGGTATTGATACGGACGTCTCGTATCAATACCAGTACATGGGGACTACTTTTGAATTCATGTGGCAAGCTATGAAAGAGGAGTTTGGCTTACCGAAAACAGTAAAAGAGTATATTGCTGAGATGAACAGACGTCGACAAGCGATTGTGGCGCGTGATGGTGTTAGGCCCATCAAAGGAGCTCAGCGACTGATTCATTGGTTACACCAACATGGCTATCGCTTAGCAGTTGCGTCCTCATCTCCAATGGTAGATATTAAGCGTAATCTAAAAGAGTTGGGTGTGACAGAATGCTTTGAATACATGGTTACAGGAGAAGATGTATCGTCTTCTAAACCAGCACCAGATGTTTTTCTTAGAGCTGCAGAGCTTTTAGATGTAGACCCTAAAGTTTGTATAGTTATAGAAGATACAAGAAATGGGAGTTTAGCTGCTAAGGCAGCAGGAATGTATTGCTTTGGCTTTGCTAATCCTGATTATCCACCGCAAGATTTATCAATGGCAGACAAGGTTATTTCAGATTATCAAGATATCTATATTTATCTTCCGGAG

SEQ ID NO: 4708 - protein, 214 aa, Streptococcus agalactiae
MEKVIIFDMDGVIVDSEYTFLDNKTEMLREEGIDTDVSYQYQYMGTTFEFMWQAMKEEFGLPKTVKEYIAEMNRRRQAIVARDGVRPIKGAQRLIHWLHQHGYRLAVASSSPMVDIKRNLKELGVTECFEYMVTGEDVSSSKPAPDVFLRAAELLDVDPKVCIVIEDTRNGSLAAKAAGMYCFGFANPDYPPQDLSMADKVISDYQDIYIYLPE

SEQ ID NO: 4709 - protein, 1743 aa, Streptococcus agalactiae
ATGTTGATGGTGTTGTTATTCCAAAGGCTAGGAATTATTATGATTTTAGCCTTTTTATTGGTAAATAATAGTTATTTCAGACAGTTAATTGAAGAGCGGTCTAAACGTGAAACGGTAGTACTTGTCATCATTTTCGGCTTGTTTGTTATTATATCTAATATAACAGGAATTGAAATAAAAGGGGATCGAAGTTTGGTCGAGCGCCCTTTTCTAACAACGATTTCCCATTCTGACTCACTTGCTAATACAAGGACTTTAGTTATTACAACGGCAAGTTTGGTTGGTGGACCTCTGGTTGGATCAATTGTTGGTTTTATTGGAGGAGTTCATCGCTTTTTTCAAGGAAGCTTTTCAGGTTCTTTCTATATTGTCAGTTCAGTTCTAGTCGGCATTGTTAGCGGAAAGATTGGTGATAAGCTTAAGGAAAACCATCTCTACCCTTCAACAAGCCAAGTTATTTTAATTAGTATTATTGCCGAAAGTATCCAGATGCTATTTGTTGGTATTTTTACAGGATGGGAACTTGTCAAAATGATTGTCATTCCAATGATGATTTTAAATAGTTTAGGTTCCACACTTTTCCTTGCGATTTTGAAAACTTATTTGTCAAATGAAAGTCAGTTACGCGCAGTTCAAACGAGAGATGTTCTTGAATTGACTCGACAGACTCTGCCCTACCTCAGACAAGGTTTGACACCGCAATCTGCTAGGAGCGTTTGCGAAATTATAAAGAGGCATACTAACTTTGATGCTGTAGGATTAACAGATCGGTCAAACGTATTAGCTCATATTGGTGTTGGCCATGATCACCATATTGCAGGACAACCAGTCAAAACAGACCTATCTAAAAGTGTTATTTTTGATGGCGAACCAAGAATTGCGCAAGATAAAGCGGCGATTTCTTGTCCAGATCACAACTGTCAGTTAAATTCTGCTATTGTAGTTCCTCTAAAAATAAATGATAAAACTGTGGGTGCCTTAAAAATGTACTTTGCAGGAGATAAGACAATGTCTGAGGTGGAGGAAAACCTAGTCCTTGGTTTAGCGCAAATATTTTCAGGACAACTGGCAATGGGGATAACAGAGGAACAAAATAAGTTAGCCAGTATGGCAGAGATAAAGGCTTTACAAGCACAAATCAACCCTCATTTCTTCTTTAATGCCATTAACACAATTAGTGCATTAATCCGTATTGATTCTGATAAAGCACGTTATGCACTGATGCAGTTAAGTACTTTTTTTAGAACAAGTTTGCAAGGTGGTCAGGATCGTGAGGTAACGCTTGAGCAAGAAAAATCACATGTGGATGCTTATATGAATGTTGAAAAATTACGTTTCCCTGATAAATATCAGTTATCTTATGATATTAGTGCACCAGAAAAAATGAAGTTACCGCCTTTTGGTTTACAGGTACTGGTAGAGAATGCAGTTAGACATGCTTTCAAAGAACGTAAGACGGACAACCATATATTGGTTCAAATAAAGCCAGATGGTCATTATTATTGTGTTTCTGTTAGTGACAATGGACAAGGAATCTCAGATACTATCATTGATAAATTAGGTCAAGAAACAGTTGCAGAGAGTAAGGGTACAGGTACTGCTCTAGTTAATCTAAATAACAGGCTGAATTTATTATATGGTAGTGTAAGTTGCCTTCATTTTTCGAGCGACAAGAATGGTACAAAAGTTTGGTATCGAATACCTAATAGAATAAGGGAGGATGAGCATGAAAATTTTAATTCT

SEQ ID NO: 4710 - protein, 581 aa, Streptococcus agalactiae; identical to SEQ ID NO: 386

SEQ ID NO: 4711 - protein, 738 aa, Streptococcus agalactiae
ATGAAAATTTTAATTCTTGATGATGAAATGTTTGCCAGACAAGAATTATCGTTTTTAGTTGAACATAGCCAGGAGGTTGACAACCCTGAGATTTTTCAGGCTGAGGATATCAGTGAAGCTGAAAAAATCTTATTTAGACAGCAAATTGATTTAATTTTTTTAGATATTTCTCTTAGTGAAGAAAATGGCTTTACTTTGGCTAATCAGTTGAGCCAACTTGCACATCCCCCACTTGTTGTTTTTGCGACAGCTTATGATAACTACGCTGTGAAAGCTTTTGAAAGTAACGCTGTTGATTATATCATGAAACCGTTTGAACAACAGCGCGTTGATATGGCTCTATCAAAAGTGAAGAAATTGAGCCAACTCACCACTGCTTCAGATGTAGAGCAAGCAATACCTAAAAAAGCTAGTGTTGAATTGTTAACCTTGACATTATCAGATCGCAGTGTTGTTGTTAAAATGCAAGATATCGTTGCAGCTAGTGTTGAAGATGGCGAATTAACTGTTAGCACAGTTCAGAAAACTTACACTATTCGGAAAACACTCAATTGGTTTAAGTCACGCGCTGTAGCACCATATTTTCTCCAGATTCATCGAAACACAGTGATTAATCTAGAGATGATTGAGGAAATTCAACCTTGGTTTAATCATACTTTGTTACTAATTATGTCTAATGGAGAGAAATTTCCAGTAGGTCGATCGTATTTAAAAGACCTAAATGAGCATTTAACCATG

SEQ ID NO: 4712 - protein, 246 aa, Streptococcus agalactiae; identical to SEQ ID NO: 388

SEQ ID NO: 4713 - protein, 453 aa, Streptococcus agalactiae
ATGAAACACACCAGTAAAGAAACCAAAACAAAAGAAGCTCCAATGTTTATTCAAATGTCAATATATGCAGCTATTCTATTAGTTTCACAAATGATTTCAATGTTATTACCGAAATCACTACCAATCCCAACGACGGTTATTGGTTTGGTGCTAATGTACGTATTGCTAACTGCTAAAATTATCAAGGTAGAGTGGGTTGACTCTTTTGGGGCTTTGATGATAAGCATGATTGGTTTTATGTTTGTCCCCTCAGGAATATCAGTAGCAGCGAACCTTGATATCCTAAAAGCTGAAGGCTTGCAACTAGTTGCTGTTATTACAATCTCAACTGTTGTTATGTTAGTAGTGGTAGCATACGTTGCACGATTAATACTTGCTATCAGAGAACTCAGTGTCACAGATTTATTTAAAAAGATATTACCTAACCACTATAGTAAGAAAGTAGAGGAAAAA

SEQ ID NO: 4714 - protein, 151 aa, Streptococcus agalactiae; identical to SEQ ID NO: 390

SEQ ID NO: 4715 - protein, 726 aa, Streptococcus agalactiae
ATGGAACTCTTAAAAACACCCATCTTTGGTATTTGCTTTTCTTTAATACTCTATACGATAGGACAACATTTATTTAAGAAGAGTAAAGGTTTCTTCCTTTTGCAGCCTCTTTTCTTTGCAATGGTTAGTGGTATTGTCATTCTTTGGCTTATGTCAAAAGGTTTAGGAACCGATGTTAAGACATTTTATACACAAGCTTATAAACCAGGTGGCGATTTAATATTTTGGTTTTTAAATCCAGCAACAATTGCTTTTGCAGTTCCTCTCTATAAGAAAAATGACGTTGTTAAAAAATATTGGGTAGAAATTCTCAGCAGTTTAGTAATCGGTATGATTGTTTCCCTTATGCTTATCGTCGCTATTTCTAAAATGGTTGGGCTTAGTCAAGTCGGAATTGCTTCAATGTTGCCACAAGCAGCAACAACAGCAATTGCTCTTCCAATAACAGCAGCAATTGGAGGGAACACAGCTGTGACAGCAATGGCGTGTATCTTAAATGCAGTTATTATTTATGCATTAGGTAAAAAATTAGTGTCATTTTTCCATTTGAATGATAGTAAGATTGGTGCAGGATTAGGTCTAGGGACCTCTGGTCATACAGTCGGAGCAGCCTTTGCATTGGAATTGGGAGAACTGCAAGGTGCGATGGCAGCTATAGCGGTGGTGGTTATCGGTTTGGTAGTTGATTTGGTTATTCCTATCTTTAGTCATTTGATTGGTTTGCTA

SEQ ID NO: 4716 - protein, 242 aa, Streptococcus agalactiae
MELLKTPIFGICFSLILYTIGQHLFKKSKGFFLLQPLFFAMVSGIVILWLMSKGLGTDVKTFYTQAYKPGGDLIFWFLNPATIAFAVPLYKKNDVVKKYWVEILSSLVIGMIVSLMLIVAISKMVGLSQVGIASMLPQAATTAIALPITAAIGGNTAVTAMACILNAVIIYALGKKLVSFFHLNDSKIGAGLGLGTSGHTVGAAFALELGELQGAMAAIAVVVIGLVVDLVIPIFSHLIGLL

SEQ ID NO: 4717 - protein, 108 aa, Streptococcus agalactiae
TTGATAAATAATATTTTTGACAACTTTTTTCATTATAACAAGAAAAAAGTAGGAGAACAATTACTTAACTGGTTAATTAGAAAATTTGTTATTTTATCATTAATAACT

SEQ ID NO: 4718 - protein, 36 aa, Streptococcus agalactiae; identical to SEQ ID NO: 396

SEQ ID NO: 4719 - protein, 1488 aa, Streptococcus agalactiae
ATGGGGGCAAAGCTTCCTCATGAATTCGATCCAAAGGACCGTTATGGAATCCATAATGAAGGTAATATTACTCATAGTACCCTATTGAAACGTTCTCCTGAACTAGATATAAAAGGAGAGCTTGCTAAAAAATATAAAATCTCTAAGGATGGCTTAACGTGGTCGTTCGACTTAAATGATGATTTTAAATTCTCCAATGGTGAGCCTGTTACTGCTGACGATGTTAAGTTTACTTATGATATGTTGAAAGCAGATGGAAAAGCTTGGGATTTGACCTTTATTAAGAATGTTGAAGTAGTTGGGAAAAACCAGGTAAATATTCATTTGACTGAGGCGCATTCGACATTTACAGCACAGTTGACAGAAATCCCAATCGTCCCTAAAAAACATTACAATGATAAGTATAAGAGCAATCCTATCGGTTCAGGACCTTACATGGTAAAAGAATATAAGGCTGGAGAACAAGCAATCTTCGTTCGAAATCCATATTGGCACGGTAAAAAGCCTTATTTTAAAAAGTGGACTTGGGTATTACTTGATGAAAATACAGCACTAGCTGCTTTAGAATCTGGTGATGTTGACATGATTTACGCAACGCCAGAGCTTGCTAGCAAGAAAGTCAAAGGAACACGTCTTCTAGATATTGCTTCAAATGATGTTCGTGGGTTATCGCTACCTTATGTGAAGAAAGGTGTTGTGAAAAATTCACCAGACGGTTATCCAGTAGGAAATGATGTCACTAGTGATCCAGCAATCAGAAAAGCCTTGACTATTGGTTTAAATAGACAAAAAGTTCTGGATACTGTTTTAAATGGTTATGGTAAACCAGCTTATTCAATTATTGATAGAACACCATTCTGGAATCCAAAAACAGCAATTAAAGATAATAAAGTAGCTAAAGCTAAGCAACTTTTGACAAAAGCTGGATGGAAAGAACAAGCAGACGGTAGCCGCAAAAAAGGAAATCTTAAAGCGGAATTTGACCTTTACTACCCTACTAATGATCAATTACGAGCAAACTTAGCCGTTGAAGTAGCGGAGCAAGCTAAAGCCTTAGGTATTACTATTAAACTCAAGGCTAGTAACTGGGATGAAATGGCAACTAAGTCACATGATTCAGCCTTACTTTATGCGGGAGGACGTCATCATGCGCAGCAATTTTATGAATCACATTACCCAAGTTTAGCTGGTAAAGGTTGGACCAATATTACTTTTTATAACAATCCTACTGTGACTAAGTACCTTGACAAAGCAATGACATCTCCCGACCTTGATAAAGCTAACAAATATTGGAAGTTAGCTCAGTGGGATGGCAAAACAGGTGCTTCCACTCTTGGAGATTTACCAAATGTATGGTTGGTGAGTCTTAACCATACTTATATTGGTGATAAACGTATCAATGTAGGTAAACAAGGTGTCCATAGTCATGGTCATGATTGGTCATTATTGACTAACATTGCTGAATGGACTTGGGATGAATCTGCTAAG

SEQ ID NO: 4720 - protein, 496 aa, Streptococcus agalactiae; identical to SEQ ID NO: 398

SEQ ID NO: 4721 - protein, 975 aa, Streptococcus agalactiae
GTGAAACATATTACCACTGTAGTTATCTGGAAGATACTTAGGTGTTTGTCACTCGTTTTTGGAGTATCAATTTTGACCTTTATTTTACTAAAACAATCACCGGTTGATCCAGTCATGGCAAGTGTCAATTATGACACGTCACTAACCCCTGTTCAGTACAAAGCGATTGCTCACCACTATGGCTTGGATAAGCCAGCTCCGGTCCAGTATTTTATTTGGTTAAAAAATTTTATACAGGGACATTTAGGGACTTCACTAGTTTATCGGCAACCTGTTATTGATATTATTAGATCACGGGCAGGTGCCTCTTTCATACTTATGGGACTCTCCTGGGTCTTATCGGGTCTTATTGGATTTATCTTAGGAACTTTATCAGCTTTCCATCAAGGGAAATTGCTTGATCGAATTGTAAGGTGGTTTTCTTACCTTCAGATATCAGTACCAACTTTTTGGATTGGGCTCATTTTTTTATTAATCTTTTCTGTCCAGCTGGGGTGGTTCCCGATTGGTATTTCTTCTCCGATAGGTACTTTGAGTCAAGATATTACGTTAGCTGATCGTATTAAGCACCTTATTTTACCTGTTTTCACGCTAAGTATTCTAGGCATTGCCAATGTAACTCTTCATACTAGAACTAAAATGATGTCGGTACTTTCTAGTGAATATGTCTTATTTGCCAGAGCGCGTGGGGAAACGGAATGGCAAATTTTTAAAAATCATTGTCTTAGAAATGCTATCGTACCAGCTATTACACTGCATTTTTCCTATTTTGGAGAATTGTTTGGAGGATCCGTTCTTGCTGAGCAAGTTTTCTCATATCCAGGACTAGGGTCTACCCTAACTGAAGCAGGACTTAAAAGTGATACACCGCTACTTATAGCTATTGTGATGATAGGGACATTATTTGTTTTTGCGGGCAATCTTATTGCGGATATTTTAAATAGCATAATCAATCCACAGTTAAGGAGAAAAGTA

SEQ ID NO: 4722 - protein, 325 aa, Streptococcus agalactiae
MKHITTVVIWKILRCLSLVFGVSILTFILLKQSPVDPVMASVNYDTSLTPVQYKAIAHHYGLDKPAPVQYFIWLKNFIQGHLGTSLVYRQPVIDIIRSRAGASFILMGLSWVLSGLIGFILGTLSAFHQGKLLDRIVRWFSYLQISVPTFWIGLIFLLIFSVQLGWFPIGISSPIGTLSQDITLADRIKHLILPVFTLSILGIANVTLHTRTKMMSVLSSEYVLFARARGETEWQIFKNHCLRNAIVPAITLHFSYFGELFGGSVLAEQVFSYPGLGSTLTEAGLKSDTPLLIAIVMIGTLFVFAGNLIADILNSIINPQLRRKV

SEQ ID NO: 4723 - protein, 819 aa, Streptococcus agalactiae
ATGATATTGAGACGTCGAACTATTGTTTTATGGCAACTGGGTATCGCCATTTCTCTCATTCTTAGTATTCTAGCCTTAAATCTTTATTTCCATAGTACTCCCTTGCAAACCAATGCAGCTTTACGGAACCTTGCTCCTTCATTAAACCATCTTTTTGGGACAGATGGTTTAGGTAGGGATATGTTTGTCAGAACGATTAAAGGACTTTATTTCTCTCTACAAGTCGGCTTATTAGGTGCCCTTATGGGGGTCATTCTGGCGACAGTTTTTGGAGTGCTTGCAGGTTTAGGAAATAGCATTATTGATAAAATAATAGCATGGTTAGTTGATTTGTTTATTGGTATGCCTCATTTGATTTTTATGATTCTCATTTCTTTTGTTGTTGGGAAAGGTGCTCAAGGGGTCATCATTGCAACGGCTGTTACACATTGGCCTTCTTTAGCAAGGCTTATCCGCAATGAAGTCTATCATCTAAAGAATAAAGAATTTGTCCAACTTTCTAAAAGTATGGGAAAAACGCCTTATTATATTGTGAGGCATCATATCCTGCCTTTGATTGCTTCTCAAATTTTCATTGGTTTTATCCTCTTATTTCCACATGTCATCCTACATGAAGCATCAATGACTTTCTTAGGATTTGGGCTCTCTGCCGAACAACCTTCGGTTGGTATCATTCTGTCAGAGGCAGCTAAGCATATCTCTCTTGGAAATTGGTGGTTGGTTATCTTTCCAGGACTTTATCTTATTTTGGTTGTCAATGCATTTGATACTATCGGAGAATCTTTAAAGAAACTCTTTTACCCTCAAACTGATCATTTT

SEQ ID NO: 4724 - protein, 273 aa, Streptococcus agalactiae; identical to SEQ ID NO: 402

SEQ ID NO: 4725 - protein, 801 aa, Streptococcus agalactiae
ATGACAGAAACATTATTAAGCATTAAAGACCTCTCCATCACCTTCACTCAATACGGAAGATTTTTAAAACCATTTCAATCAACACCGATACAAGCGCTGAATTTAGAAATTAAAAAAGGTGAGTTATTAGCTATTATAGGTGCTAGTGGTTCGGGGAAGAGTTTATTAGCACATGCTATTATGGATATTCTTCCTAAAAATGCATCTGTAACAGGAGATATGATTTATCGTGGTCAATCACTAAATTCTAAACGCATTAAACAGTTGCGAGGAAAAGATATTACGTTGATTCCACAATCAGTTAATTATTTAGATCCATCTATGAAAGTCAAACATCAGGTGCGCTTAGGTATCTCAGAAAATTCAAAGGCTACTCAAGAAGGATTGTTTCAACAGTTTGGTTTAAAAGAAAGTGATGGTGACTTGTATCCTTTCCAACTTTCTGGCGGAATGCTCCGACGTGTTTTGTTTACAACGTGTATTAGTGATAAGGTTTCTTTGATTATTGCAGATGAGCCCACCCCTGGATTACATCCAGATGCTCTGCAAATGGTTTTAGACCAACTACGCTCCTTTGCAGATAAAGGAATAAGCGTTATATTTATCACTCATGATATTGTAGCAGCTAGTCAAATTGCTGATCGTATTACTATTTTTAAAGAGGGAAAAGCTATTGAAACAGCTCCAGCTAGTTTCTTTAGCGGAAATGGAGAGCAGTTACAAACAGAATTTGCTAGAAGTTTATTGCGCTCTCTCCCACAGCAAGAATTTTTGAAAGGAGTTACTCATGACCTTAGAGGC

SEQ ID NO: 4726 - protein, 267 aa, Streptococcus agalactiae
MTETLLSIKDLSITFTQYGRFLKPFQSTPIQALNLEIKKGELLAIIGASGSGKSLLAHAIMDILPKNASVTGDMIYRGQSLNSKRIKQLRGKDITLIPQSVNYLDPSMKVKHQVRLGISENSKATQEGLFQQFGLKESDGDLYPFQLSGGMLRRVLFTTCISDKVSLIIADEPTPGLHPDALQMVLDQLRSFADKGISVIFITHDIVAASQIADRITIFKEGKAIETAPASFFSGNGEQLQTEFARSLLRSLPQQEFLKGVTHDLRG

SEQ ID NO: 4727 - protein, 165 aa, Streptococcus agalactiae
ATGACCTTAGAGGCTAAAAAGCTTGGCTTTTATCATAAAAAAGATCAATGGCTTTTTAAGGAGATTAATTTAGAGGTAGCACCTGGTCAAGTTTTAGGTATATTTGGACAAAGTGGTTGTGGAAAAACTAGTTTATCCAAAGTGCTTGCAGGTTTTTTANNNNNT

SEQ ID NO: 4728 - protein, 55 aa, Streptococcus agalactiae
  VARIANT 54, 55: Xaa = Any Amino Acid
MTLEAKKLGFYHKKDQWLFKEINLEVAPGQVLGIFGQSGCGKTSLSKVLAGFLXX

SEQ ID NO: 4729 - protein, 645 aa, Streptococcus agalactiae
ATGAGTCCCCGTGCCCTTGAAGAAGTTATTTATTTTGCGGCTTATGTTGTTATCGATCCAATGGACACACCATTAGAACCGAAGTCACTCCTTACTGAGCGTGAATACCGTGAAAAACTTCAAGAGTACGGTTACGGTTCGTTTGTTGCTAAAATGGGTGCTGAAGCCATTCAAGATCTTCTTAAACGCGTTGATTTAGATGCAGAAATCGCAGTTCTTAAAGAGGAGTTGAAATCAGCGACAGGTCAAAAACGTGTGAAAGCAGTTCGTCGTCTGGATGTGTTAGATGCCTTTAAAAAATCTGGAAATAAACCAGAATGGATGGTTCTTAACATTTTACCGGTTATCCCACCGGATCTTCGTCCGATGGTTCAATTAGATGGTGGTCGTTTTGCGGCATCAGACTTGAATGACCTTTACCGCCGTGTTATTAACCGTAACAATCGTTTGGCACGTTTGTTGGAATTAAATGCTCCTGGCATCATCGTTCAAAATGAAAAACGTATGTTACAAGAAGCTGTTGATGCGCTTATCGACAATGGTCGTCGTGGTCGTCCAATTACCGGACCAGGTAGTCGTCCTTTGAAATCATTAAGCCATATGCTTAAAGGTAAACAAGGTCGTTTCCCGCCAAACTTACTTGGG

SEQ ID NO: 4730 - protein, 215 aa, Streptococcus agalactiae
MSPRALEEVIYFAAYVVIDPMDTPLEPKSLLTEREYREKLQEYGYGSFVAKMGAEAIQDLLKRVDLDAEIAVLKEELKSATGQKRVKAVRRLDVLDAFKKSGNKPEWMVLNILPVIPPDLRPMVQLDGGRFAASDLNDLYRRVINRNNRLARLLELNAPGIIVQNEKRMLQEAVDALIDNGRRGRPITGPGSRPLKSLSHMLKGKQGRFPPNLLG

SEQ ID NO: 4731 - protein, 286 aa, Streptococcus agalactiae
GTTGTTTAAAATGCAAGATATCGTTGCAGCTAGTGTGGAAGATGGCGAATTAACTGTTAGCACAGTTCAGAAAACTTACACTATTCGGAAAACACTCAATTGGTTTAAGTCACGCGCTGTAGCACCATATTTTCTCCAGATTCATCGAAACACAGTGATTAATCTAGAGATGATTGAGGAAATTCAACCTTGGTTTAATCATACTTTGTTACTAATTATGTCTAATGGAGAGAAATTTCCAGTAGGTCGATCGTATTTAAAAGACCTAAATGAGCATTTAACCATG

SEQ ID NO: 4732 - protein, 96 aa, Streptococcus agalactiae
VCVKMQDIVAASVEDGELTVSTVQKTYTIRKTLNWFKSRAVAPYFLQIHRNTVINLEMIEEIQPWFNHTLLLIMSNGEKFPVGRSYLKDLNEHLTM

SEQ ID NO: 4733 - protein, 285 aa, Streptococcus agalactiae
ATGAAACACACCAGTAAAGAAACCAAAACAAAAGAAGCTCCAATGTTTATTCAAATGTCAATATATGCAGCTATTCTATTAGTTTCACAAATGATTTCAATGTTATTACCGAAATCACTACCAATCCCAACGACGGTTATTGGTTTGGTGCTAATGTACGTATTGCTAACTGCTAAAATTATCAAGGTAGAGTGGGTTGACTCTTTTGGGGCTTTGATGATAAGCATGATTGGTTTTATGTTTGTCCCCTCAAGGAATATCAGTAGCAGAGAACCNNNNNTTAAT

SEQ ID NO: 4734 - protein, 95 aa, Streptococcus agalactiae
  VARIANT 93, 94: Xaa = Any Amino Acid
MKHTSKETKTKEAPMFIQMSIYAAILLVSQMISMLLPKSLPIPTTVIGLVLMYVLLTAKIIKVEWVDSFGALMISMIGFMFVPSRNISSREPXXN

SEQ ID NO: 4735 - protein, 520 aa, Streptococcus agalactiae
TTGGGACAAAGTGGTTGTGGAAAAACTAGTTTATCCAAAGTGCTTGCAGGTTTTTACATCCTAGATCTGGTGAAGTATTAGTTGATGGCAGTAATTTGCCTAACAAAGCATTTAGACCTGTACAACTTATTCAACAACATCCTGAAAAAACGATGAATCCTTTATGGCCTATGAAAAAAAGTTTAGAAGAAGCTTATTACCCAAGTCGAGATTTACTAGATGCTTTTGAATTCAAGAAAAATGGCTAAATCGTCGCCCTAGTGAACTCTCGGGAGGGGAATTACAACGCTTTTCGATTGTGCGTTCATTACATCCAGAGACTAAATACCTTATTGCAGATGAAATGACTACTATGTTGGATAGTATTACACAAGCTAGTGTATGGAAAAGCCTGTTGGAGATTGTAAAGGATAGAAATTTAGGTCTCATCGTTATTAGTCATGATTTCGCTATGTTAGAGAAACTTTGTAACCAATGCTATATGATTGAAGAGAATCGTATCGTATCTTTCAATGGAGAT

SEQ ID NO: 4736 - protein, 174 aa, Streptococcus agalactiae
MGQSGCGKTSLSKVLAGFLHPRSGEVLVDGSNLPNKAFRPVQLIQQHPEKTMNPLWPMKKSLEEAYYPSRDLLDAFGIQEKWLNRRPSELSGGELQRFSIVRSLHPETKYLIADEMTTMLDSITQASVWKSLLEIVKDRNLGLIVISHDFAMLEKLCNQCYMIEENRIVSFNGD

SEQ ID NO: 4737 - protein, 1284 aa, Streptococcus agalactiae
ATGGAACAATTTAAACATGATGCCAAAGCCTTGTTAGAGGCAATTGGGGGTAAAGAAAATATTAGTGCAGTGACACATTGTGCCACACGCATGAGATTTGTTTTGAATGACAGTAGTAAAGCTAAGGTAAAGGTAATTGAGGAGTTACCATCAGTCAAGGGTACCTTTACCAATGCTGGGCAATTTCAAGTCATTATTGGTAATGATGTCCCTATTTTTTATAATGCTTTTGTAGCCGTTTCTGGTATTGAGGGTGTGTCTAAAGAGGCGGCAAAATCGGCTGCCCAAAAAAATCAAAACCCTTTACAGCGTGTGTTGACAATGCTGGCTGAAATATTTACACCGATTATTCCAGCCATTATTGTTGGTGGTCTGATCCTTGGTTTTCGTAATATTTTAGATGCCGTTCCATTTGAATTTTTAGGTCAAAAAGTTGTTGATGGTGTCAGGCAAGTAGACTCTTCTGGGCATCCAATTTGGAATACTCTAGTAGATGTTTCAACGTTTTGGAGCGGAGTAGACTCTTTTTTATGGTTACCAGGTGAAGCTATATTTCATTTCTTACCAGTTGGTATTGTATGGTCTGTGACTCGTAAGATGGGGACTACTCAAATCCTCGGTATTGTTCTAGGTATCTGTCTAGTGTCGCCACAATTACTTAATGCTTATTCTGTAGCTAGTACTTCAGCAGCAGACATTGCTAAAAATTGGTCTTGGAATTTTGGTTACTTTACAGTACAAAAAATTGGTTATCAAGCTCAAGTTATTCCAGCTCTGTTAGCTGGTTTGAGCCTGTCTTACTTAGAAATCTTCTGGAGAAAACATATTCCTGAAGTTGTTTCAATGATTTTTGTGCCATTTCTATCCTTAGTTCCAGCTATTATCTTGGCTCATACTGTCCTTGGACCTATTGGTTGGACACTAGGTAAATGGATTTCTGCTATCGTTCTTATTGGATTGACTGGTCCTGTAAAATGGCTCTTTGGTGCTATTTTTGGTGCCCTGTATGCCCCATTTGTTATTGCTGGTTTGCACCACATGACAAATGCTATCGATACTCAACTCATAGCAGATACAAAAACACATACAACTGGCCTTTGGCCGATGATTGCTCTTTCAAATATTGCTCAGGGTTCAGCTGTACTAGCTTATTATTTTATGCATCGTCATGATGAAAAAGAGGCTCAAATATCACTTCCAGCTGCTATCTCAGCCTACCTTGGTGTTACAGAGCCGGCGCTTTTTGGTGTAACGTTAAATACATTTATCCATTTGTTGCTGGTA

SEQ ID NO: 4738 - protein, 428 aa, Streptococcus agalactiae
MEQFKHDAKALLEAIGGKENISAVTHCATRMRFVLNDSSKAKVKVIEELPSVKGTFTNAGQFQVIIGNDVPIFYNAFVAVSGIEGVSKEAAKSAAQKNQNPLQRVLTMLAEIFTPIIPAIIVGGLILGFRNILDAVPFEFLGQKVVDGVRQVDSSGHPIWNTLVDVSTFWSGVDSFLWLPGEAIFHFLPVGIVWSVTRKMGTTQILGIVLGICLVSPQLLNAYSVASTSAADIAKNWSWNFGYFTVQKIGYQAQVIPALLAGLSLSYLEIFWRKHIPEVVSMIFVPFLSLVPAIILAHTVLGPIGWTLGKWISAIVLIGLTGPVKWLFGAIFGALYAPFVIAGLHHMTNAIDTQLIADTKTHTTGLWPMIALSNIAQGSAVLAYYFMHRHDEKEAQISLPAAISAYLGVTEPALFGVTLNTFIHLLLV

SEQ ID NO: 4739 - protein, 1184 aa, Streptococcus agalactiae
ATGATTTTTGTGCCATTTCTATCCTTAGTTCCAGCTATTATCTTGGCTCATACTGTCCTTGGACCTATTGGTTGGACACTAGGTAAATGGATTTCTGCTATCGTTCTTATTGGATTGACTGGCCTGTAAAATGGCTCTTTGGTGCTATTTTTGGTGCCCTGTATGCCCCATTTGTTATTGCTGGTTTGCACCACATGACAAATGCTATCGATACTCAACTCATAGCAGATACAAAAACACATACAACTGGCCTTTGGCCGATGATTGCTCTTTCAAATATTGCTCAGGGTTCAGCTGTACTAGCTTATTATTTTATGCATCGTCATGATGAAAAAGAGGCTCAAATATCACTTCCAGCTGCTATCTCAGCCTACCTTGGTGTTACAGAGCCGGCGCTTTTTGGTGTAAACGTTAAATACATTTATCCATTTGTTGCTGGTATGATTGGTTCAAGTGTGGCAGGTCTTTTGGCGACAACTTTTAATGTCCAAGCTAACTCTATTGGTGTAGGCGGTCTTCCAGGCTTCCTGTCAATTAATGTTAAATATATGGGATATTTCTTTATCTGTATGGCAGTGGCTATCTTTATTCCTTTATTTTTGACACTATTCTTTAAAAAATCAGGTATTTTGACAAAAACTGAAGAGGAAAAATTAGTATCTGATGCTGTCATTGCTTCAACAACAGAAACAAAATCAGCAAAAGAAAAAGCTGTCGTCTCAGGTACAAAGCTTAGTGTAGTAAGCCCTTTATCAGGTTTAGCTAAACCACTGGATCAAGCTAGTGATCCTGTCTTTTCACAAGGAATTATGGGGAAGGGAGTGGTTATCGATCCAAGTGATGGAGAACTAGTTTCACCGGTCGATGCGACAGTTTCAGTTCTTTTCCCTACGAAACATGCTATTGGATTATTAACATCAGAGGGTGTTGAGTTTCTTATTCATATTGGTATGGATACTGTTAATTTAGAAGGAAAAGGGTTTACCTCTCATGTTGCCCAAGGTGACAATGTAAAAGTAGGAGATAAACTCATTACTTTCGATATTCCAATGATAAAAGAAGAAGGATACATTGTGGAAACTCCTATTCTGATTACTAATCAAGAAGAATTCCGACCAGAAGAATTGATAGATTTACCCAAACAGATAAAACGTGGACAAGCATTAATGGTTGCCAAGAAAATT

SEQ ID NO: 4740 - protein, 395 aa, Streptococcus agalactiae
MIFVPFLSLVPAIILAHTVLGPIGWTLGKWISAIVLIGLTGPVKWLFGAIFGALYAPFVIAGLHHMTNAIDTQLIADTKTHTTGLWPMIALSNIAQGSAVLAYYFMHRHDEKEAQISLPAAISAYLGVTEPALFGVNVKYIYPFVAGMIGSSVAGLLATTFNVQANSIGVGGLPGFLSINVKYMGYFFICMAVAIFIPLFLTLFFKKSGILTKTEEEKLVSDAVIASTTETKSAKEKAVVSGTKLSVVSPLSGLAKPLDQASDPVFSQGIMGKGVVIDPSDGELVSPVDATVSVLFPTKHAIGLLTSEGVEFLIHIGMDTVNLEGKGFTSHVAQGDNVKVGDKLITFDIPMIKEEGYIVETPILITNQEEFRPEELIDLPKQIKRGQALMVAKKI

SEQ ID NO: 4741 - protein, 1623 aa, Streptococcus agalactiae
ATGACGATTGATAAACGTAAAGTTGTCTATCAAATTTATCCAAAATCATACAAAGACACAACTGGTAATGGGGTTGGTGATCTTCGTGGTATTATCGAAAAATTACCCTATTTAGCAGAACTTGGTATTGATATGGTTTGGCTCAACCCATTTTATCCGAGTCCACAACGAGATAATGGATATGATATCTCTGATTATACAGCCATTAACCCTGATTTTGGAAAGATGGACGATTTTGAAGAAATGATTGAGGTGGGACGTCAATACCGTATAGATTTTATGCTTGATATGGTGCTTAATCATTGTTCAATAGAACATGAGTGGTTTAAAAAAGCACTTGCAGGAGATCGCTACTATCAAGATTTCTTTATCTTACGTGATAATCCAACAGATTGGGTATCTAAATTTGGTGGAAATGCTTGGTCACCATTTGGTGATACAGGGAAGTATTATCTTCATCTTTTTGATATCACTCAAGCTGACCTTAATTGGCGCAATGCCGATGTTCGCAAGGAACTTTTTAAAGTTGTCAATTTTTGGCGTGATAAAGGGGTTAAAGGTTTTCGATTTGATGTGATTAATTTAATTGGGAAAGATGAGATACTTGAGAACTGCCCAATTAATGATGGAAAACCAGCTTATACTGATCGTCCAATAACACATGATTATCTCAAGATGTTGAATAATGCTAGTTTTGGACAAGCTGATTCCTTCATGACAGTTGGTGAAATGTCTTCAACGACAATTGCAAATTGCATTCTTTACACTGCACCAGAACGTGAAGAGTTATCCATGGCTTTTAATTTTCACCACCTCAAAGTAGATTATAAAGATGGGCAAAAGTGGACCATTATGGCTTTTGATTTTCCTGCATTACGTGACCTTTTCCATAGTTGGGGCGAAGGAATGAGCGAAGGAAATGGTTGGAATGCTTTATTCTATAATAATCATGACCAACCGCGAGCATTAAATCGTTTTGTAGACGTGAAACGTTTTCGAAATGAAGGAGCAACCATGTTAGCAGCATCTATCCACTTATCGCGTGGTACTCCTTATATATATATGGGTGAAGAAATCGGAATGCTTGATCCCGATTACAGTTCTATGGATGATTATGTGGATATTGAGAGTTTGAATGCCTACCAAATAATGCTTGATGAAGGCAAGTCACAAGAAGAGGCATTTAGCATTATTCGAGCGAAATCTCGAGACAATTCTCGAGTACCAATGCAATGGGATGATAGTACGAATGCAGGTTTTTCTGAAGGCGCTCCATGGTTGAAAGTAGGAAAATCATATAAAGAAATCAATGTCGCAAAGGAGAAAACAGGGCTGATATTTACTTTCTATCAAGAGTTGATAAGGCTACGTAAACAACTGCCAATAATAGCTGACGGGAATTATAAAGCAGCTTTCAAAGATAACGAAAAAGTATATGCTTTTGAACGCCATCTTGATAAGCAAAAACTTCTTGTTTTAAATAATTTCTTTGCTGAGAAAGTTAAGATAAAATTACCGGAGAATTATCTCCAAGGACAAGTTCTTCTATCAAATTATAAGGATGTTACTCTTGATGAAACGGTTACTTTGCAACCTTATCAAACTTTAGCTATCTTAGTGTCA

SEQ ID NO: 4742 - protein, 541 aa, Streptococcus agalactiae
MTIDKRKVVYQIYPKSYKDTTGNGVGDLRGIIEKLPYLAELGIDMVWLNPFYPSPQRDNGYDISDYTAINPDFGKMDDFEEMIEVGRQYRIDFMLDMVLNHCSIEHEWFKKALAGDRYYQDFFILRDNPTDWVSKFGGNAWSPFGDTGKYYLHLFDITQADLNWRNADVRKELFKVVNFWRDKGVKGFRFDVINLIGKDEILENCPINDGKPAYTDRPITHDYLKMLNNASFGQADSFMTVGEMSSTTIANCILYTAPEREELSMAFNFHHLKVDYKDGQKWTIMAFDFPALRDLFHSWGEGMSEGNGWNALFYNNHDQPRALNRFVDVKRFRNEGATMLAASIHLSRGTPYIYMGEEIGMLDPDYSSMDDYVDIESLNAYQIMLDEGKSQEEAFSIIRAKSRDNSRVPMQWDDSTNAGFSEGAPWLKVGKSYKEINVAKEKTGLIFTFYQELIRLRKQLPIIADGNYKAAFKDNEKVYAFERHLDKQKLLVLNNFFAEKVKIKLPENYLQGQVLLSNYKDVTLDETVTLQPYQTLAILVS

SEQ ID NO: 4743 - protein, 108 aa, Streptococcus agalactiae
ATGAATTTGGGCTATTGTTATAGAGTAAAGAAAGAAAAAAGAAAGAAATTGCAAAATCTAGAGCAAGATTCCTTCCCACAAGCAGCACTTAAAAAACCTTTACTTAAT

SEQ ID NO: 4744 - protein, 36 aa, Streptococcus agalactiae
MNLGYCYRVKKEKRKKLQNLEQDSFPQAALKKPLLN

SEQ ID NO: 4745 - protein, 2034 aa, Streptococcus agalactiae
ATGGTTGATAATAAGACTGTTGTGATAATGTTGGTATTTTTAGCTCGGAAAAATCTTTCCTTGTATGAGTTAACAGTGCAAACAAAGTTTTCAATAAAAGTTATCATAGAGCAAATTAACTATCTCAATAGTTTTTTAGCAAAAAATCACCTACCAGCTATTGCTCACTCTGCTGGACGTTATCAGTTATTAGGAGATGAAAAAGAGCATGATAAAATTGTCTCCTTATTAGAAGCTGAGCAATTTTACCTAACTCAGGAAGAAAGGGTATGTCTGATTTACCTTTATAGCTTTTGCCGAAGAGAGTTTGTCTCCAATGTGCATTATCAAGATTTTTTGAAAGTAAGTAAGAATACTACTTTATCAGATATCAAGATGCTACGTTCTAAATTAGCAAAAAGAGGTATCTCACTCACTTATACAAGAGCAAAGGGATATAGTCTAGTAGGAGATGAGATGGATAAGCATCAAGTTGCTTTTCAGATGATAACTCAACTACTAGAATCTCCCATTGGTTTTTGGTCTTTGAATTATATCTTGTCTTCTTGGAAATTCGCTCTCTCATATGAGAAGTTAGAAAAGACGGTAGAATATTTCTATGAATCTTTTCAACTTTCTCCAATACAAGATAGGCTTGAGAAATCTTTATATTTTATCATTTTAATACTGTGTCGTTATCAAAGGTCAGTAGATCGTGTTTTGCAGGGTTCTCCTATTGTTTCTGAACAATTAAAAGAGTTAACGACTATTATTGTGACTAATTTAAGTCAGGATATTTCCTTATCTAAACCATTAGATCAGAAAGAAAAAGATTATATTACCTTGATCTTATCTGGCTGTTTTGAAGGTGAGGGAACTAAAGATGATGATTTCTTTGAAGCATTGGCAAAAGCAATCGTTGATGAGATGGAAACTGTTTCACTTCTTAATTTTTCCAATAAAGAAGAGTTATTACAAGGTCTGAAGCGTCATATTATTCCAGCTTATTTCCGATTGAAATATGGTTTAACTGGCGATAGTGGTTATACACAAAATATTAAAGAGCATTACAGTGATTTATTTCTATTGGTTAAAAAGGCACTACGTCCTTTGGAAGAGCAAGTAGGATTAATACCCGATAGTGAAATTTCTTACTTCGTGATTCACTTTGGAGGCTATCTTAGACAATCAGGTGATACACAATCAATGTCTTATAAAGCTTTGATACTCTGTCCAAACGGCGTTAGTTCATCCTTAGTGATTAAGGAAAAATTGCGTGGATTATTTCCTCAAATTCATTTTCATCGTGTCTCTAAAATTGAGCAGCTGAAACTGATTGACAATCAAACTTACGATATGGTCTTTTCTACTATATTTGTAGAAACAAAAAAACCTAATTATCTAGTTTCGCTGATGATGACAGCAGAGCAAGTACAACAGCTCAAAGAACTGGTTATTTCAGATTTTCCCAAAGCTTGCCTTGACGATTTCCAACTTGATCAATTAATAGCAACTATAAAAAAATACGCTCATGTTCATTGTGAAGAGGAATTAAAATTGGCTTTGAGGACAATGGTAAAACAAGATATATTTAGAAAGGATGTGAGGCCCTTGTTGCACCAACTTATAACAGAGGAAACTTATCAGACAAGTTCTGAACAAATGAATTGGAAAGAGGCAATTCGTTTAGCGGCAAAACCCTTGTTAGCTTCTGGAAAAATTACGGAAAGTTACCCAGAAGCTATGATTGAAAAGGTCGAAGAGTTTGGTCCTTTTATCAATCTTGGTAAAGGTATTGCTATTCCACATGCCAGACCAGAAGATGGGGTAAACTCTGTCGGTATGTCAATGCTTGTTTTGGAACAGCCTATTTATTTATTGGATGACCCCAAACAGGAAATTTATCTCTTATTATGCATAGCAGCTATTGATAATGAAACGCATTTGAAAGCTCTATCGCATTTGACAACAATACTTCGTGATAATAATAATGTTAAAGCTTTGTTAGCTTCACGTGGGTATCAAGATATTGAAATGATTATAAAACAGGAGGAT

SEQ ID NO: 4746 - protein, 678 aa, Streptococcus agalactiae
MVDNKTVVIMLVFLARKNLSLYELTVQTKFSIKVIIEQINYLNSFLAKNHLPAIAHSAGRYQLLGDEKEHDKIVSLLEAEQFYLTQEERVCLIYLYSFCRREFVSNVHYQDFLKVSKNTTLSDIKMLRSKLAKRGISLTYTRAKGYSLVGDEMDKHQVAFQMITQLLESPIGFWSLNYILSSWKFALSYEKLEKTVEYFYESFQLSPIQDRLEKSLYFIILILCRYQRSVDRVLQGSPIVSEQLKELTTIIVTNLSQDISLSKPLDQKEKDYITLILSGCFEGEGTKDDDFFEALAKAIVDEMETVSLLNFSNKEELLQGLKRHIIPAYFRLKYGLTGDSGYTQNIKEHYSDLFLLVKKALRPLEEQVGLIPDSEISYFVIHFGGYLRQSGDTQSMSYKALILCPNGVSSSLVIKEKLRGLFPQIHFHRVSKIEQLKLIDNQTYDMVFSTIFVETKKPNYLVSLMMTAEQVQQLKELVISDFPKACLDDFQLDQLIATIKKYAHVHCEEELKLALRTMVKQDIFRKDVRPLLHQLITEETYQTSSEQMNWKEAIRLAAKPLLASGKITESYPEAMIEKVEEFGPFINLGKGIAIPHARPEDGVNSVGMSMLVLEQPIYLLDDPKQEIYLLLCIAAIDNETHLKALSHLTTILRDNNNVKALLASRGYQDIEMIIKQED

SEQ ID NO: 4747 - protein, 280 aa, Streptococcus agalactiae
ATGTTAAGAATTGGAACAGCATGTGGATCAGGTCTAGGTTCAAGTTTTATGGTACAAATGAATATTGAGTCTATTTTGAAGGATTTGGGGGTTTCTGATGTTGAAGTTGAACATTATGATTTAGGTGGAGCAGATCCAAGCGCAGCAGATGTTTGGATTGTTGGTCGTGATTTGGAGGATCAGCTGGTCACCTGGGGGATGTTCGTATTTTAACAGTATCATTGATATGGATGAATTGAGAGAATTAGTGACAGGTATTTGCCAAGAAAAAGGCTTAATC

SEQ ID NO: 4748 - protein, 94 aa, Streptococcus agalactiae; identical to SEQ ID NO: 416

SEQ ID NO: 4749 - protein, 169 aa, Streptococcus agalactiae
ATGACCCAAAGGAATTTATCTCTTATTATGCATAGCAGCTATTGATAATGAAACGCATTTGAAAGCTCTATCGCATTTGACAACAATACTTCGTGATAATAATAATGTTAAAGCTTTGTTAGCTTCACGTGGGTATCAAGATATTGAAATGATTATAAAACAGGAGGAT

SEQ ID NO: 4750 - protein, 57 aa, Streptococcus agalactiae
MTQQEIYLLLCIAAIDNETHLKALSHLTTILRDNNNVKALLASRGYQDIEMIIKQED

SEQ ID NO: 4751 - protein, 282 aa, Streptococcus agalactiae
ATGTTAAGAATTGGAACAGCATGTGGATCAGGTCTAGGTTCAAGTTTTATGGTACAAATGAATATTGAGTCTATTTTGAAGGATTTGGGGGTTTCTGATGTTGAAGTTGAACATTATGATTTAGGTGGAGCAGATCCAAGCGCAGCAGATGTTTGGATTGTTGGTCGTGATTTGGAGGATTCAGCTGGTCACCTGGGGGATGTTCGTATTTTAAACAGTATCATTGATATGGATGAATTGAGAGAATTAGTGACAGGTATTTGCCAAGAAAAAGGCTTAATC

SEQ ID NO: 4752 - protein, 94 aa, Streptococcus agalactiae; identical to SEQ ID NO: 416

SEQ ID NO: 4753 - protein, 1353 aa, Streptococcus agalactiae
ATGAAAGGTCTATTGGATTTTTTAGTTAATATTGCCAGCACGCCAGCTATTTTAGTCGCCTTGATAGCCATTATCGGTTTAGTACTGCAGAAAAAAGGTGTTCCTGATATTGTAAAAGGTGGAATAAAAACATTTGTTGGCTTCTTAGTGGTTTCTGGAGGTGCAGGGATAGTCCAAAATTCCTTGAATCCATTTGGAAAAATGTTTGAGCATGCTTTTCATTTGGTGGGGGTAGTTCCTAATAATGAAGCCATTGTAGCAGTAGCTCTTACGAAGTATGGCTCAGCAACTGCTTTGATTATGTTAGCGGGAATGATTTTTAATATTTTAATTGCTCGTTTTACAAAATTTAAATATATTTTTCTGACAGGACATCATACATTGTATATGGCTTGTATGATTGCTGTTATTTTTGCCGTAGCAGGCTTTACTTCGTTCTCGCTCATCCTTTTTGGAGGTCTAGCGTTAGGGATTATTATGAGCGTATCTCCTGCATTTGTGCAAAAATACATGATTCAACTGACAGGTAATGATAAGGTGGCACTTGGGCACTTTGGTTCTTTAGGCTATTGGTTGAGTGGATTTATTGGTGGAATTGTTGGAGATAAATCAAAATCAACAGAAGATATTAAATTTCCAAAGAGTTTATCATTTTTACGTGACAGTACCGTAAGTATTACTATCTCAATGGCAATTATTTACCTTATCGTTGCAGTGTTTGCTGGTGAGGCTTATATTGCAAAAGAAATAAGTAACGGTGTCAATGGTCTTGTTTATGCCCTCCAACTAGCTGGGCAATTTGCAGCAGGTGTATTCGTTATTTTAGCAGGTGTACGCCTTATCCTAGGTGAAATTGTACCAGCCTTTAAGGGAATCTCAGAAAAATTGGTTCCAAATTCAAAACCAGCCTTGGATTGTCCAATTGTTTACCCTTATGCACCTAATGCAGTATTGATTGGTTTTATCTCAAGTTTTGTTGGTGGATTGGTTAGTATGATAGTTATGATTGTGACTGGCACTACTGTCATTTTACCAGGGGTCGTTCCTCATTTCTTCTGTGGGGCAACGGCAGGTGTTATCGGTAATGCTTCTGGTGGTGTGAGAGGAGCGACTATTGGTGCATTTGTTCAAGGTATCCTCATCAGTTTCTTGCCGATTTTCTTGATGCCTGTACTAAGTGGACTTGGTTTCAAAGGTTCAACATTCTCAGATGCTGATTTTGGTTTGACCGGTATCATTCTTGGCGCTCTTAATCATGTCGGCGGTGCGATAGCTATTGTTATTGGTATTGTAGTTATCTTAATTGGACTTTTTGGCATTTCATTTGTTGGAAAATCAACCCATAAGGAAGGT

SEQ ID NO: 4754 - protein, 451 aa, Streptococcus agalactiae
MKGLLDFLVNIASTPAILVALIAIIGLVLQKKGVPDIVKGGIKTFVGFLVVSGGAGIVQNSLNPFGKMFEHAFHLVGVVPNNEAIVAVALTKYGSATALIMLAGMIFNILIARFTKFKYIFLTGHHTLYMACMIAVIFAVAGFTSFSLILFGGLALGIIMSVSPAFVQKYMIQLTGNDKVALGHFGSLGYWLSGFIGGIVGDKSKSTEDIKFPKSLSFLRDSTVSITISMAIIYLIVAVFAGEAYIAKEISNGVNGLVYALQLAGQFAAGVFVILAGVRLILGEIVPAFKGISEKLVPNSKPALDCPIVYPYAPNAVLIGFISSFVGGLVSMIVMIVTGTTVILPGVVPHFFCGATAGVIGNASGGVRGATIGAFVQGILISFLPIFLMPVLSGLGFKGSTFSDADFGLTGIILGALNHVGGAIAIVIGIVVILIGLFGISFVGKSTHKEG

SEQ ID NO: 4755 - protein, 855 aa, Streptococcus agalactiae
ATGACATCACCAGAAGAAAGATATTCATCTCTAAGACGATTTGCAACGGAGATTCGTTTAAATACACTAGAAACGCTAAACCATTTAGGATTCGGTCACTATGGGGGTAGTTTATCAATTGTTGAGACTTTGGCTATTCTGTACGGTGATATTATGGATATAAACCCTGAAAAATTCAAAGAAAGTGATCGGAATTATATGGTCTTATCAAAAGGACATGCTGGTCCAGCCTTGTATAGTACACTCTATTTAAAAGGTTTTTTTGATAAAACATTCCTTCATTCGCTCAATACAAACGGTACCAAACTACCTTCGCATCCTGACCGCAATTTAACTCCTGGTATAGATGTAACGACAGGCTCATTAGGTCAAGGCATTAGTATTGCAACGGGAATTGCTTATGCTCAAAAGATTGAGAATTCAAGCTATTATACTTATACTATTGTAGGTGATGGTGAATTAAATGAAGGACAATGTTGGGAGGCTATACAATTTGCTGCGCATCATCAACTGCACCATTTAATTGTTTTTGTAGATGATAATAAAAAACAATTAGATGGTTTGACAGCTGATATTTGTAATCCTGGAGACTTTGTTGCTAAATTTGAAGCTTTTGGATTTGATGCAGTACGTGTAAAAGGAGATGACATTGAGGCAATTGACAAAGCTATTAAAACTTTTCAAGATTCAAATAGTGTCAAACCAAAATGCATTGTTTTAGATAGTATCAAGGGACAAGGTGTGAAAGAGTTGGAGGAGTTAGCTTCTAATCATCATTTACGACCAGATTTACAACAAAAAACAATGTTAGAGCGAGCGGTGATAAGCTTGAGAGAAAGTTTGGAGGTGGTAGAA

SEQ ID NO: 4756 - protein, 285 aa, Streptococcus agalactiae
MTSPEERYSSLRRFATEIRLNTLETLNHLGFGHYGGSLSIVETLAILYGDIMDINPEKFKESDRNYMVLSKGHAGPALYSTLYLKGFFDKTFLHSLNTNGTKLPSHPDRNLTPGIDVTTGSLGQGISIATGIAYAQKIENSSYYTYTIVGDGELNEGQCWEAIQFAAHHQLHHLIVFVDDNKKQLDGLTADICNPGDFVAKFEAFGFDAVRVKGDDIEAIDKAIKTFQDSNSVKPKCIVLDSIKGQGVKELEELASNHHLRPDLQQKTMLERAVISLRESLEVVE

SEQ ID NO: 4757 - protein, 927 aa, Streptococcus agalactiae
ATGAGATGTTCAACCAAAGAAATGAGGCTTGTCTATCGTGATTTCCTCCTTCAAGCTAATCAAGAAAATAAACAAATTACCGTTTTAGAAGCCGATTTGTCGAGTTCAATGTCAACAAATGTACTGGCATCAGAATTTGGAAAACGTTATATTAATCTAGGTATTATGGAGGCTGAGATGGTAGGTCTTGCAGCAGGGCTCGCCATTAAAGGTTACAAGCCATACCTTCATACTTTTGGTCCTTTCGCGTCAAGGCGTGTCTTTGATCAAGTATTTTTATCGTTAGGTTACTCACAATTATCAGCTACGATTATTGGCTCAGATGCAGGAGTTAGCGCAGAAATGAATGGCGGAACTCATATGCCTTTTGAAGAGTTAGGTCTACTAAGGTTAATTCCAAAGGCGACTATTTTTGAGGTTAGTGATGATATTCAGTTTGAAGCAATTTTAAAACAAACATTAAGTATTGATGGTCTAAAATACATTAGAACTATTCGTAAGGCCCCCACTGCAGTTTATGAGGGATGCGAAGATTTTTCAAAAGGTTTTATACAATTACGCCAGGGAAAAGATATTGCTCTTGTAGCAAGTGGTATTATGGTTTCTAGAGCGATAGAAGCAGCCGACTACCTCAAAGAACTAGGGATTGAGGCCTCAGTTATCGACCTTTTTAAAATTAAGCCCCTTCCAGAAGAACTGAAACCATTACTGATAGATCAATCCATTGTAACTATTGAGAATCATAACCGTATTGGCGGTATCGGAAGTGCATTATGCGAATGGCTTAGTATGGAGAAAAACACTACTGTTAGTCGTATGGGTATTGATGAGCGATTTGGTCAGGTAGGTCAGATGAAATATTTATTAGAGGAGTATGGACTCGCTGTTAAAGATATAGTAGAGCATTGCAAATCAATTTATAAATCA

SEQ ID NO: 4758 - protein, 309 aa, Streptococcus agalactiae
MRCSTKEMRLVYRDFLLQANQENKQITVLEADLSSSMSTNVLASEFGKRYINLGIMEAEMVGLAAGLAIKGYKPYLHTFGPFASRRVFDQVFLSLGYSQLSATIIGSDAGVSAEMNGGTHMPFEELGLLRLIPKATIFEVSDDIQFEAILKQTLSIDGLKYIRTIRKAPTAVYEGCEDFSKGFIQLRQGKDIALVASGIMVSRAIEAADYLKELGIEASVIDLFKIKPLPEELKPLLIDQSIVTIENHNRIGGIGSALCEWLSMEKNTTVSRMGIDERFGQVGQMKYLLEEYGLAVKDIVEHCKSIYKS

SEQ ID NO: 4759 - protein, 1257 aa, Streptococcus agalactiae
ATGCGAGCTTGGAAAGGTATTGTTTTAATTTTATCTAGCATAGTGGTGACACTAGTAGCATGGCAAAATGCAGGATTAAGTGAATTTGTTGTACCAGGATTAGCTTTGACAAGTTTATCGCTAACATTCCTCTTATCAACCAAATTTAGGATACTTGAAAGTTACTTTCAAGGTATTGAAAATATGTATTTTTACCACAAGGTAATGGCTGTATTTTCAATGATTTTGCTTCTATTGCACAAAATTGGTCTTGGACAAGGCGGACATGGAAGTGAGTTTGCAAAGACTATTGGCAGTGCGGGATTATATCTTTTTCTAAGTATTGTTTTTGTAGCTTATTTCGGAAATTTTTTAAAGTATGAAATTTGGCGTTTTATTCATCGCTTTGTTTATTTAGTCTATATTTTGGGATTGGTACATACTTTTCTGATTTTAGGAGATAGGATACTAGGGAATACTTTACTCAGTTTAATCGTATTAGGTTATGCTGTCATTGGGGTTATATCTGGATTTTATATTATTTTCCTATATTCTAGAATGCGTTTTCGTCGTGTAGGGTACGTTCAAAAGGTTACTCATCTTAACCATGATACAACTGAGATTGAAATAGCAATGAAGCGTCCTTATCGATATGACTATGGACAATTTACTTTTTTAAAAATTTATCAAGCCGGCTTTGAATCAGCAGCTCATCCTTTCTCGATATCGGGTGGTCATGATAGAGTGATATTTTTAACTGTTAAAGCTTCAGGAGATTATACGAAATCCATTTACAAACAGCTAAAAGTTGGGACAAAAATAGCCTTAGATAGAGCTTATGGTCATATGTTATTTGATAAAGACAAGAAAGAACAGGTTTGGATTGCAGGAGGTATCGGCATCACTCCCTTCATTTCATTTATTAGAGAAAATAGTATTTTGACTAAGAGAGTTGACTTCTTTTATACATTTTCAAATCAAGACAATTTGATTTATCAAGATATGTTAGAATCCTATGCTAAAGCCAATCCTAATTTTAAACTTCACTTAAATAATAGTAGCCTCCAAGGAAGACTTGATTTTAGTCAGTCTGTTTTTGAAGGACAACCAACGATATTTATGTGTGGGCCAACTAGTATGACATCTACTTATGCTAAGGTCTTTCGGCAAAAAGATGCAAAGTCTCGTTTAGTCTATGAAGGATTTTCCTTTAGAGACAGTTGGTTATCCATATTTCTATTAAAAACTTTTGACAAAGTTTATTCTAATTTGATAAAA

SEQ ID NO: 4760 - protein, 419 aa, Streptococcus agalactiae
MRAWKGIVLILSSIVVTLVAWQNAGLSEFVVPGLALTSLSLTFLLSTKFRILESYFQGIENMYFYHKVMAVFSMILLLLHKIGLGQGGHGSEFAKTIGSAGLYLFLSIVFVAYFGNFLKYEIWRFIHRFVYLVYILGLVHTFLILGDRILGNTLLSLIVLGYAVIGVISGFYIIFLYSRMRFRRVGYVQKVTHLNHDTTEIEIAMKRPYRYDYGQFTFLKIYQAGFESAAHPFSISGGHDRVIFLTVKASGDYTKSIYKQLKVGTKIALDRAYGHMLFDKDKKEQVWIAGGIGITPFISFIRENSILTKRVDFFYTFSNQDNLIYQDMLESYAKANPNFKLHLNNSSLQGRLDFSQSVFEGQPTIFMCGPTSMTSTYAKVFRQKDAKSRLVYEGFSFRDSWLSIFLLKTFDKVYSNLIK

SEQ ID NO: 4761 - protein, 267 aa, Streptococcus agalactiae
ATGGCAATCTCAAAAGAGAAAAAAAATGAAATCATTGCTCAATATGCACGTCACGAAGGTGATACAGGATCAGTTGAAGTTCAAGTAGCAGTTCTTACTTGGGAAATCAACCACCTTAATGACCACATCAAACAACACAAAAAAGACCACGCTACTTACCGTGGATTGATGAAAAAAATTGGTCACCGTCGTAACTTATTAGCATACCTACGTCGTACAGATGTTAACCGTTACCGTGAATTGATTCAATCACTTGGACTTCGTCGT

SEQ ID NO: 4762 - protein, 89 aa, Streptococcus agalactiae; identical to SEQ ID NO: 428

SEQ ID NO: 4763 - protein, 2127 aa, Streptococcus agalactiae
ATGTCAAAACAAGTCTTTGAAATGATTTTTGCTGGTAAAAAATTAGTTGTTGAAACTGGCCAAGTGGCTAAACAAGCAAATGGATCAGTTGTCGTTCGTTATGGAGATTCTACTGTACTTACAGCAGCAGTTATGTCTAAGAAAATGTCAACAGGTGATTTTTTCCCACTTCAAGTCAATTACGAAGAAAAAATGTATGCTGCTGGGAAATTTCCGGGTGGTTTTAACAAACGTGAAGGGCGTCCAAGTACGGATGCTACCTTAACAGCACGTCTTATTGATAGACCAATCCGTCCGATGTTTGCTGAGGGATTTCGTAACGAAGTCCAGGTCATCAATACTGTTCTTTCATTTGATGAAAATGCTAGCGCACCAATGGCTGCTATGTTTGGTTCATCATTAGCATTATCGATTTCCGATATTCCTTTCAATGGGCCAATTGCTGGAGTTCAAGTTGCTTATGTTGATGGCAATTTTATTATTAATCCGACAGCACAAGAACAAGAGGCTTCTGCGTTAGAATTAACGGTTGCAGGTACTAAAGAAGCGATTAACATGGTTGAATCTGGAGCGAAAGAACTTTCAGAAGAAATCATGCTAGAGGCTCTTCTTAAAGGACATGAGGCTGTCTGTGAATTAATCGCCTTTCAAGAAGAGATTGTAACTGCTATTGGTAAAGAAAAAGCCGAAGTAGAACTTCTTCAAGTTGATCCAGAACTTCAAGCAGAAATTATTGCTACTCATAACATAGCTTTACAGGCTGCAGTACAAGTTGAAGAGAAAAAGGCTAGAGAAGCAGCTACAGAAGCAGTTAAAGAAGTAGTTATAGGTGAATATGAGGCGCGTTACGCTGAACATGAAGAATATGATCGCATTATGCGTGATGTTGCTGAAATTTTAGAACAAATGGAACATGCAGAAGTTCGTCGCCTCATTACAGAAGATAAGGTTCGTCCTGATGGACGTCGTGTGGATGAGATTCGTCCATTAGATGCAGTGATTGATTTTTTACCACAAGTTCATGGATCAGGTCTCTTTACACGAGGACAAACCCAAGCATTATCAGTATTAACGTTAGCACCTATGGGTGAAGCACAAATCATTGATGGGCTAACACCAGAGTATAAGAAACGCTTTATGCACCACTATAACTTCCCACAATATTCAGTTGGTGAGACGGGACGTTATGGAGCTGCAGGGCGTCGTGAAATTGGTCACGGTGCTTTAGGAGAGCGTGCATTAGAACAAGTCCTTCCAAGCTTGGAGGAGTTTCCGTATGCTATCCGACTAGTTGCAGAAGTTTTAGAATCAAACGGTTCATCATCTCAGGCTTCTATATGTGCTGGAACGCTTGCTCTTATGGCAGGTGGTGTGCCTATAAAAGCTCCGGTTGCTGGTATTGCCATGGGACTCATATCAGATGGAACAAACTACACAGTCCTTACTGATATTCAAGGATTAGAAGACCATTTTGGCGATATGGACTTTAAGGTTGCGGGTACACGTGAAGGGATTACAGCACTTCAAATGGATATTAAAATTGAAGGTATTACCCCTCAAATTTTGGAAGAAGCTCTTGCGCAAGCTAAAAAAGCACGCTTTGAAATTCTTGATGTCCTTCATGGAGCTATCGCAGAGCCACGTCCACAATTAGCACCAACGGCACCTAAGATTGATATGATAAAAATCGATGTTGATAAGATTAAAGTTGTCATCGGTAAAGGCGGCGAAACTATCGATAAAATCATCGCTGAAACAGGTGTTAAGATTGATATTGATGAAGAAGGAAATGTATCTATCTTCTCTAGTGATCAGGCTGCTATTGATCGTACGAAAGACATTATTGCAAGTTTAGTACGTGAAGCAAAAGTGGGAGAAGTTTACCATGCTAAAGTAGTTCGTATCGAGAAATTCGGTGCCTTTGTCAACCTCTTTGATAAAACAGATGCATTGGTACATATTTCAGAAATTGCATGGACACGTACAGCAAATGTAGCTGATGTTCTTGAAATTGGTGAAGAAGTTGATGTGAAAGTCATCAAAATTGATGATAAAGGGCGAGTTGATGCCTCTATGAAAGCATTATTACCACGTCCTCCAAAAGCTGACAATCCTAAAAAGGAATCT

SEQ ID NO: 4764 - protein, 709 aa, Streptococcus agalactiae
MSKQVFEMIFAGKKLVVETGQVAKQANGSVVVRYGDSTVLTAAVMSKKMSTGDFFPLQVNYEEKMYAAGKFPGGFNKREGRPSTDATLTARLIDRPIRPMFAEGFRNEVQVINTVLSFDENASAPMAAMFGSSLALSISDIPFNGPIAGVQVAYVDGNFIINPTAQEQEASALELTVAGTKEAINMVESGAKELSEEIMLEALLKGHEAVCELIAFQEEIVTAIGKEKAEVELLQVDPELQAEIIATHNIALQAAVQVEEKKAREAATEAVKEVVIGEYEARYAEHEEYDRIMRDVAEILEQMEHAEVRRLITEDKVRPDGRRVDEIRPLDAVIDFLPQVHGSGLFTRGQTQALSVLTLAPMGEAQIIDGLTPEYKKRFMHHYNFPQYSVGETGRYGAAGRREIGHGALGERALEQVLPSLEEFPYAIRLVAEVLESNGSSSQASICAGTLALMAGGVPIKAPVAGIAMGLISDGTNYTVLTDIQGLEDHFGDMDFKVAGTREGITALQMDIKIEGITPQILEEALAQAKKARFEILDVLHGAIAEPRPQLAPTAPKIDMIKIDVDKIKVVIGKGGETIDKIIAETGVKIDIDEEGNVSIFSSDQAAIDRTKDIIASLVREAKVGEVYHAKVVRIEKFGAFVNLFDKTDALVHISEIAWTRTANVADVLEIGEEVDVKVIKIDDKGRVDASMKALLPRPPKADNPKKES

SEQ ID NO: 4765 - protein, 750 aa, Streptococcus agalactiae
ATGACAAGTACAAACGAGTTAGACATTAGATTGCGTGCTTTTATCAATGCACCGGATAATTTTTTAGATAGTATAGGTCTTGTGAATGCCTTGCACCACTCTACGGTTTGGGCAAGCAAGGAACCCTATGCTATTCAAGTAGATGGTCAAGAAGTTGTTCCTGTTTTTACGGATATTACTGACCTTAATCATTTCAAAGAGGAGCAAGAAAGTGCTCGAGATATGTTTTGGGAGAGTCGTCGTAGTTTAGACGTTCTTGATGAAGCTATTTCACATGGCTTAGCAGGATTGGTCTATAATTTAAAAAAAGAAGGCGATTTTGGGAACTCGACTATTTTCTACTGTGAAGATATGGTGCAATTTATGAACAATTACACCACAATCTTAAACCAGTTGTTAAATGAAGATAACATTGTTGCCGATATCATGGATAAAACCTACTTGGTACCTGCCTTTGTCCATCCACGTGAAGAAGGTAGTTTTGACCGTTTTTTCCCTACAATGTCTACCCCCGAAGGAAAAAGTTATGTTCCAGTATTCTCAAACCTTTTAAGTTTTGAAAAATGGTATAACCATAATGATTTTGGTGGTGCTTTTAGGAAAGCACAAGGAGTAATTTTAGCCTGGACGATTGACGATATTTATAAACCGCGTAATGGAGAAAATGAGATTGATGATACCTTTGGAGTAGCCATCAATCCATTTGATGAACAACAAGTTTTAGTTGATTGGTCTGATGTAGAAAACGAT

SEQ ID NO: 4766 - protein, 250 aa, Streptococcus agalactiae
MTSTNELDIRLRAFINAPDNFLDSIGLVNALHHSTVWASKEPYAIQVDGQEVVPVFTDITDLNHFKEEQESARDMFWESRRSLDVLDEAISHGLAGLVYNLKKEGDFGNSTIFYCEDMVQFMNNYTTILNQLLNEDNIVADIMDKTYLVPAFVHPREEGSFDRFFPTMSTPEGKSYVPVFSNLLSFEKWYNHNDFGGAFRKAQGVILAWTIDDIYKPRNGENEIDDTFGVAINPFDEQQVLVDWSDVEND

SEQ ID NO: 4767 - protein, 582 aa, Streptococcus agalactiae
ATGGGGTGGTGGAAAGAAAGTATAGCTATTGTCAAAGAACAAGATCCAGCTGCTCGTAGTTCTCTAGAAGTTATTTTAACTTATCCAGGAATAAAAGCTCTTGCAGCTCATAGGCTATCTCATTTTTTATGGAATCATAATTTTAAATTGTTAGCACGTATGCACAGTCAATTTTGGCGTTTCTGGACACAAATTGAAATTCATCCCGGAGCGACGATTTCGGAAGGGGTTTTTATTGACCACGGTTCAGGATTGGTCATTGGAGAAACTGCCATTGTAGAGAAAGGTGCTATGCTATACCATGGGGTTACATTGGGTGGCACAGGTAAAGACAAAGGCAAACGACACCCAACCATACGTAAAGGTGCGCTAATTTCAGCACATTCTCAAATCATCGGTCCAATTGAGGTTGGAGAAAATGCTAAAGTCGGTGCTGCAGCAGTTGTCCTTGCAGATGTGCCAGCAGACGTAACAGTAGTTGGTGTTCCAGCTAAAGTTGTCCGTGTCCATGGTCAAAAGGATGATCTTCAAATCCGAAGTATTGAACATGATCGAGAAGAAAGTTATTATTCGTCCAAACTT

SEQ ID NO: 4768 - protein, 194 aa, Streptococcus agalactiae; identical to SEQ ID NO: 434

SEQ ID NO: 4769 - protein, 180 aa, Streptococcus agalactiae
GTGAAGGATTATGTAACAACTCAAATATTATCAATTTTAGGTATACTAGCAGGAGCTTGTTTAAGCTATTTAAAGTTTGCACAAGGTAACTCTCTCTTAGGAATTATTTGGGCTGCCTTTGCTTTAATGTATATTGTTCGTTTGTATAAAGCTTATCAAAAACAGAAAAAGGAAAAACCA

SEQ ID NO: 4770 - protein, 60 aa, Streptococcus agalactiae
MKDYVTTQILSILGILAGACLSYLKFAQGNSLLGIIWAAFALMYIVRLYKAYQKQKKEKP

SEQ ID NO: 4771 - protein, 1341 aa, Streptococcus agalactiae
ATGATAAAAATTTACGACACTATGACTCGCAGTTTACAAGATTTTATACCTCTCAATGAAGGTAAAGTCAACATGTACGTCTGTGGGCCAACAGTTTATAACTATATACATATCGGAAATGCCCGCAGTGTAGTAGCTTTTGATACTATTCGTCGTTATTTTGAGTATTGTGGTTACCAAGTCAATTATATTTCTAACTTTACTGATGTTGATGATAAAATTATAAAAGGTGCAGCTGAAGCAGGTATGGATACAAAATCCTTTTCAGATAAGTTTATTTCAGCATTTATGGAAGATGTTGCTGCATTAGGTGTCAAACCTGCTACAAAAAATCCTCGAGTTATTGACTATATGGATGAGATTATTGATTTTGTTAAAGTTTTAGTTGATAAGGAATTTGCCTATGAAGCTAATGGAGATGTTTATTTTAGAGTAAGTAAATCACATCATTATGCAAAATTAGCCAATAAAACTTTGGAAGATTTAGAGATTGGTGCAAGTGGTCGTGTTGATGGGGAAGGAGAGATTAAAGAGAATCCTTTAGATTTTGCACTTTGGAAATCAGCTAAATCTGGGGAAGTCTCATGGGAAAGTCCTTGGGGGAAAGGGCGCCCAGGGTGGCATATTGAATGTTCTGTTATGGCAACTGAGATCCTTGGTGATACTATTGATATCCATGGTGGAGGAGCTGATTTAGAATTTCCACATCACACGAATGAGATTGCACAATCTGAAGCTAAAACAGGTAAGACCTTTGCAAATTACTGGATGCATAATGGTTTTGTTAACGTTGATAACGAGAAAATGTCTAAATCTCTTGGTAACTTTATTACTGTTCACGATATGTTGAAGATCGTTGACGGACAAGTAATACGTTTTTTCTTAGCGACACAACAGTATCGTAAACCCGTGAATTTCACTGAAAAGGCCGTTCATGATGCGGAAGTTAACCTTAAATATTTAAAAAATACTTTCAATTTACCAATCCAAGAGAATGCTAATGATGAAGAATTAGAGCAATTTGTGAAAGCATTTCAAGAAGCGATGGATGATGATTTTAATACAGCAAACGGTATTACTGTTATCTTTGAAATGGCAAAATGGATTAACTCAGGACACTATACTTCAAAAGTTAAGGAAACCCTTGCTGAATTATTAGAAATTTTTGGTATTGTATTCCAAGAGGAAGTGCTTGATGCTGATATTGAATCTTTAATAGAACAACGCCAAGAAGCACGAGCTAATCGTGATTTTGCAACTGCTGATCGTATTAGAGATGAATTAGCAAAACAAGGAATTAAATTGTTAGATACTAAGGATGGCGTGAGGTGGACTCGTGAT

SEQ ID NO: 4772 - protein, 447 aa, Streptococcus agalactiae
MIKIYDTMTRSLQDFIPLNEGKVNMYVCGPTVYNYIHIGNARSVVAFDTIRRYFEYCGYQVNYISNFTDVDDKIIKGAAEAGMDTKSFSDKFISAFMEDVAALGVKPATKNPRVIDYMDEIIDFVKVLVDKEFAYEANGDVYFRVSKSHHYAKLANKTLEDLEIGASGRVDGEGEIKENPLDFALWKSAKSGEVSWESPWGKGRPGWHIECSVMATEILGDTIDIHGGGADLEFPHHTNEIAQSEAKTGKTFANYWMHNGFVNVDNEKMSKSLGNFITVHDMLKIVDGQVIRFFLATQQYRKPVNFTEKAVHDAEVNLKYLKNTFNLPIQENANDEELEQFVKAFQEAMDDDFNTANGITVIFEMAKWINSGHYTSKVKETLAELLEIFGIVFQEEVLDADIESLIEQRQEARANRDFATADRIRDELAKQGIKLLDTKDGVRWTRD

SEQ ID NO: 4773 - protein, 384 aa, Streptococcus agalactiae
GTGATTGATGTTCGTTTGATTAATGGTATTGCTTTAGCTTTTGAAGGAGATGCAGTTTATTCTTTGTATATCCGACGCCATTTAATTATGCAGGGTTTTACCAAACCTAATCAGTTACATCGGAAAGCAACGCAATATGTTTCTGCTAATGCCCAAGCATTGTTAATTAATGCCATGTTAGAAGAAAATATTTTAACTGATGAAGAGCAGTTAATTTATAAACGAGGACGTAATGCGAATAGTCATACAAAAGCTAAAAATGCTGATATTATTACCTATCGTATGTCTACAGGTTTTGAGGCTCTTATGGGGTACTTGGATATGACTGGTCAGATAAAGCGCTTGGAAACTCTAATACAGTGGTGTATTGAAACCATTGAAAAA

SEQ ID NO: 4774 - protein, 128 aa, Streptococcus agalactiae; identical to SEQ ID NO: 442

SEQ ID NO: 4775 - protein, 753 aa, Streptococcus agalactiae
ATGACTATGAAAGATAAACAATTTAAAGAAGAATCAAGTGACCTTGTCTATGGCTTACATGCTGTGACAGAGAGTTTAAGAGCTAATACTGGTAATAAATTATACTTGCAAGATGACTTAAGAGGAAAGAACGTTGATAAAGTCAAAGCACTAGCGACTGAAAAAAAAGTATCCATTTCCTGGACTCCTAAAAAAATCTTATCAGACATGACAAATGGTGGAGTTCACCAAGGATTCGTTCTAAAAGTTTCGGAATTTGCCTATGCGGATTTATCAGAGATAATGACAAAGGCAGAGAATGAAGAAAATCCTCTCATTTTAATCCTTGATGGTCTGACCGACCCTCACAACCTAGGTTCTATTCTACGCACAGCTGATGCAACCAATGTAACAGGTATTATCATCCCCAAACATCGTTCTGTTGGAGTGACCCCAGTGGTTTCAAAGACATCTACAGGAGCTGTTGAACATGTTCCTATTGCAAGGGTAACTAATCTCAGTCAAACTTTGGATACTTTAAAAGATAAGGACTTCTGGATATTTGGCACTGATATGAATGGGACACCATCGCATAAGTGGAATACCAAAGGTAAATTAGCCCTAGTTATTGGTAATGAAGGAAAAGGTATTTCTCATAATATCAAAAAGCAAGTAGATGAAATGATTACAATTCCCATGAATGGTCATGTTCAGAGTTTAAATGCCAGTGTTGCAGCCGCTATTTTGATGTATGAAGTATTTAGAAACCGCCTA

SEQ ID NO: 4776 - protein, 251 aa, Streptococcus agalactiae
MTMKDKQFKEESSDLVYGLHAVTESLRANTGNKLYLQDDLRGKNVDKVKALATEKKVSISWTPKKILSDMTNGGVHQGFVLKVSEFAYADLSEIMTKAENEENPLILILDGLTDPHNLGSILRTADATNVTGIIIPKHRSVGVTPVVSKTSTGAVEHVPIARVTNLSQTLDTLKDKDFWIFGTDMNGTPSHKWNTKGKLALVIGNEGKGISHNIKKQVDEMITIPMNGHVQSLNASVAAAILMYEVFRNRL

SEQ ID NO: 4777 - protein, 516 aa, Streptococcus agalactiae
ATGAAAAAACATTCTATCTTACTCGTTGATGGCTACAATATGATTGCTTTTTGGAAAGATACTCGACAGCTTTTTAAAAGCAATCGTTTAGAAGAGGCAAGGGAAGTATTACTTAGAAAGCTAAATCATTACGCACATTTCGAACACATTGATATTATTTGTGTATTTGATGCCCAGTATGTTCCTGGTGTACGTCAGCGTTATGACCAATACAAAATATCCGTTATCTTTACTGAGGAGGACGAAACTGCGGATAGCTATATTGAACGAGCAGCGGCAGAACTTAATCAATCTGTGTTAAATTTAGTCTCCGTTGCTACCAGTGATTTAAATGAACAATGGACTATATTTTCTCAGGGTGCTTTACGTGTCTCAGCTAGAGAATTGGAACAGCGTGTAGCGACAGTAAAATCAGATTTGGATAAGATGTCCAGTCAAATCGATTTGAGTACGCCAAAGTTAAGGCCGTGGAATGATGAACAACTAGGAAAACTCAAGGATTTTTTAGATGGTATG

SEQ ID NO: 4778 - protein, 172 aa, Streptococcus agalactiae; identical to SEQ ID NO: 446

SEQ ID NO: 4779 - protein, 858 aa, Streptococcus agalactiae
ATGACTTTTAAAATACTAACGGATTCGACATCGGATTTAGATGAAAAGTGGGCTCAAGAGCACAATGTCGATATTATAGGTTTGACCATTGAACTTGATGGAAAGACTTATGAGACAGTCGGAGACGAAAAAATTACTAGTGACTTCTTGTTGGAGCGTATGCAAGAGGGAGCAAAGCCTACAACAAGCCAAATTAACGTTGGTCAGTTTGAAGAAGTTTTTTCAACCTATGCAGAAAATGACCATGCCTTGTTATATTTAGCGCTATCTTCACATTTATCAGGGACTTACCAGAGTGCAACTATTGCGCGTGAGATGGTCTTAGACAAATATCCTGATGCTCAAATTGAGATTGTGGATACAATGGCAGCTTCATGTGGTGAGGGTGTCTTAGCAATGTTAGCAACTAAAGAGCGACAAGAAGGTAAATCTTTAGAAGAAGTGAAACAAAAAATTGAATCACTTCTCCCTAAATTAAACACATACTTTTTAGTTGACGATCTCAACCATTTAATGCGTAGTGGTCGCTTATCAAAAGGTGCAGCTATTATTGGAAGTGTTGCTAAGATTAAACCATTGCTTAAGTTAGATAGCGAGGGTAAATTAGTACCATTTGCCAAGACAAGGGGCCGTAAAAAAGGTATTAAAGAGATTGTGACTCAGGCAACAAAAACACTATCTTATAGCACTTTAATTATTGCTTATAGTGGAGAGAAAGATTCAGCCCAAGTTATGAAAGAACAGTTATTAGCAGATGAGCGTATTGAAGAAGTTATTATTCGTCCATTAGGGCCAGTCATTTCAGCTCATGTGGGCTCAGGTGCTTTAGCTCTGTTCTCTTTAGGGGAAGAAAACCGA

SEQ ID NO: 4780 - protein, 286 aa, Streptococcus agalactiae; identical to SEQ ID NO: 448

SEQ ID NO: 4781 - protein, 117 aa, Streptococcus agalactiae
TTGGAAAATGTTTTTGTTGCTGGCGCATTTGCCCTCATAGGAATAACTATTTTATTGATGCTTTTACTAGGAAGGTTGATATTGCTACTTATTTTTCAAGGGGAGATGATGCAATTT

SEQ ID NO: 4782 - protein, 39 aa, Streptococcus agalactiae
MENVFVAGAFALIGITILLMLLLGRLILLLIFQGEMMQF

SEQ ID NO: 4783 - protein, 120 aa, Streptococcus agalactiae
ATGAAAAATTTACGCTTAAAGACAGCTAGAGCTAGTATGGATTTATTACAACAGTCTCTAGCTGAAAAGGTCGGTGTATCATGTCAGACAATAGCCGCCATTGAAAAAGGAGGCTATAAT

SEQ ID NO: 4784 - protein, 40 aa, Streptococcus agalactiae
MKNLRLKTARASMDLLQQSLAEKVGVSCQTIAAIEKGGYN

SEQ ID NO: 4785 - protein, 1163 aa, Streptococcus agalactiae
ATGACAAAACACAAACACCTAACTCTCTCAGACCGTAATGACATCCAATCTGGTTTGGATAGAGGAGAAACCTTTAAAGCCATCGGGCTTAATCTACTGAAACACCCTACTACTATCGCAAAAGAAGTCAAACGAAATAAGCAACTAAGAGAATCAACCAAAGACTGCCTAGACTGTCCGCTACTAAGAAAAGCTCCCTATGTTTGTAATGGGTGTCCAAAGAGGAGGATCAACTGTGGTTACAAGAAGACCTTCTATCTTGCTAAGCAAGCTCAAAGAAACTATGAAAAACTTTTAGTTGAATCTAGAGAAGGAATCCCTTTGAACAAAGAGACCTTCTGGAAAATAGATAGAGTGCTTTCTAATGGGGTCAAGAAGGGCCAACGTATCTATCATATCCTCAAAACCAACGATCTAGAAGTGAGTTCTTCAACCGTTTATCGACACATCAAGAAAGGCTACCTATCCATCACACCAATCGACCTACCCAGAGCTGTGAAGTTCAAAAAAAGGCGAAAGAGCACACTCCCTCCTATTCCAAAAGCGATTAAAGAAGGGCGACGGTACGAGGATTTTATAGAACACATGAACCAATCAGAGCTGAACTCCTGGCTTGAATGGACACGGTTATTGGACGGATTGGTGGAAAGGTCCTTCTCACCTTCAATGTCGCCTTCTGTAACTTCATCTTTGCCAAACTGATGGATTCTAAGACAGCTATCGAAACTGCTAAACACATACAGGTCATTAAGAGGACACTCTATGATAACAAGAGAGACTTCTTCGAACTCTTTCCTGTTATCCTAACGGATAATGGTGGGGAATTCGCTAGAGTGGATGATATTGAGATAGATGTTTGTGGACAGTCTCAACTCTTCTTTTGTGACCCTAATCGGTCTGACCAGAAAGCAAGAATCGAGAAGAATCATACCCTCGTGAGAGACATACTGCCTAAGGGGACTTCCTTCGACAACTTGACTCAAGAGGACATTAATCTGGCACTATCTCATATCAACAGCGTTAAGAGACAGGCTCTAAATGGTAAAACGGCTTATGAGCTATTCTCTTTTACTTACGGAAAAGACATCGCAAGTATACTCGGTATTGAGGAAATTACTGCGGAAGACGTCTGCCAATCTCCCAAACTATTAAAAGACAAAATC

SEQ ID NO: 4786 - protein, 388 aa, Streptococcus agalactiae
  VARIANT 206: Xaa = Any Amino Acid
MTKHKHLTLSDRNDIQSGLDRGETFKAIGLNLLKHPTTIAKEVKRNKQLRESTKDCLDCPLLRKAPYVCNGCPKRRINCGYKKTFYLAKQAQRNYEKLLVESREGIPLNKETFWKIDRVLSNGVKKGQRIYHILKTNDLEVSSSTVYRHIKKGYLSITPIDLPRAVKFKKRRKSTLPPIPKAIKEGRRYEDFIEHMNQSELNSWLXMDTVIGRIGGKVLLTFNVAFCNFIFAKLMDSKTAIETAKHIQVIKRTLYDNKRDFFELFPVILTDNGGEFARVDDIEIDVCGQSQLFFCDPNRSDQKARIEKNHTLVRDILPKGTSFDNLTQEDINLALSHINSVKRQALNGKTAYELFSFTYGKDIASILGIEEITAEDVCQSPKLLKDKI

SEQ ID NO: 4787 - protein, 444 aa, Streptococcus agalactiae
ATGAACAAAACAACTTTCATGGCTAAACCAGGCCAAGTTGAACGCAAATGGTACGTTGTTGACGCAACAGATGTACCTCTTGGACGTCTTTCTGCAGTAGTTGCTAGCGTACTTCGCGGAAAAAACAAACCAACTTTCACACCACACACTGATACAGGTGACTTTGTGATTGTTATCAATGCTGAAAAAGTTAAATTAACTGGTAAAAAAGCATCAGATAAAATCTACTACACTCACTCAATGTATCCAGGTGGTTTGAAACAAATCTCAGCAGGTGAACTTCGTTCTAAAAATGCTGTTCGTTTGATTGAAAAATCAGTTAAAGGCATGCTTCCACATAACACTCTTGGACGTGCACAAGGTATGAAATTGAAAGTATTTGTTGGCGGTGAGCATACACATGCTGCACAACAACCAGAAGTACTTGATATCTCAGGACTTATC

SEQ ID NO: 4788 - protein, 148 aa, Streptococcus agalactiae
MNKTTFMAKPGQVERKWYVVDATDVPLGRLSAVVASVLRGKNKPTFTPHTDTGDFVIVINAEKVKLTGKKASDKIYYTHSMYPGGLKQISAGELRSKNAVRLIEKSVKGMLPHNTLGRAQGMKLKVFVGGEHTHAAQQPEVLDISGLI

SEQ ID NO: 4789 - protein, 390 aa, Streptococcus agalactiae
ATGGCACAAGCACAATATGCAGGTACTGGTCGCCGTAAAAACGCTGTTGCACGCGTTCGTTTGGTTCCAGGTACTGGTAAAATTACAATCAATAAAAAAGATGTAGAAGAGTACATCCCACACGCAGACCTTCGTCTTGTTATCAACCAACCTTTCGCAGTTACTTCAACTCAAGGTTCATACGATGTTTTTGTTAACGTTGTAGGTGGTGGATATGCAGGTCAATCAGGTGCGATCCGTCATGGTATCTCACGTGCACTTTTAGAAGTTGACCCAGATTTCCGCGATTCATTGAAACGTGCTGGACTTCTTACACGTGACGCACGTATGGTTGAACGTAAAAAACCAGGTCTCAAAAAAGCCCGCAAGGCATCACAATTCTCAAAACGT

SEQ ID NO: 4790 - protein, 130 aa, Streptococcus agalactiae; identical to SEQ ID NO: 452

SEQ ID NO: 4791 - protein, 1152 aa, Streptococcus agalactiae
ATGTCTGTACACAAGTACCAATCTACAAAAGGAATCACCTATTTTGTTAAAGTTTACCTTGGTCTAAACGACTACGGTAAGAAAAAATATTATACTAAACGAGGGTTCAAGACGCGTAAAGCTGCCAAAGCTCATGAAACTGCTGTTAATCATCAGTTGAATAGTGGAACTTTTGTCCATATTACTGCTCAAACAACCTACACTTACCAAGAGCTTTATCAAAGGTGGTATGAAGCTTATAAAGATACTGTTGAAGCAACTACTGCAGTCAAAACTGCCGACCTCTATCGCCTACATATTCTTCCTGTTTTTGGAGAAAAGAAAATTTCAATAATCAGTCCTTTAGACTGTCAAACCTTCATCACTGACAAAGCCAAGACATTCAAAAACATGAAGCAAATCAAATCTTATACTTCTAAAATATTTGAATTTGCCATTAATATGAATTATATTGAACGAAATCCCATGAGCAAGGTTATTATGCCTAAACTCAAAAAAACTGTCAGTGAGAACTATTGGACAGTTAACGAGTTGCATCATTTTTTGACAATCATTTTAGAAAATGAACCTTATAAACATTATGCACTATTTCGATTACTAGCATACAGCGGGTTACGAAAAGGAGAGCTCTACGCCCTTAAATGGGAAGATTTTGATTCTGAGAATCAACTATTAACAGTTAGCAAAAGTTTAGGAAGAATAGATGGCCATGCCATTGAAAAAGGAACTAAAAATACATTCTCTGTGCGCTCTATCTATCTTGATGATGAAACCTGTTCTATCCTCAACAAATGGAAACAGGAAACTAGCAGAGAAAAGTGGCAATTATCAGTACAACCTCTTTCTCTCGACAAAGAATTTATGTTTACATACTGCAACCGAGATGGTGAGATAGAACCCTTACACGCTGACTATATCAACAATATTCTAAAACGTATTATACGTAAGCATAATCTTAAAAAGATTAGCCCACATGGGTTTAGACACACTCACGCAACCTTGATGATTGAAATGGGAATTGACCCAGTCAATACTGCTAAACGCTTAGGCCATGCAAGCAGCCAGATAACTTTAGACACTTATAGCCATGCTACAAAAGCTGGTGAAAAACAGTCAATTACAAAATTTGCAGAGTATCTTAATAAGGCTAAA

SEQ ID NO: 4792 - protein, 384 aa, Streptococcus agalactiae
MSVHKYQSTKGITYFVKVYLGLNDYGKKKYYTKRGFKTRKAAKAHETAVNHQLNSGTFVHITAQTTYTYQELYQRWYEAYKDTVEATTAVKTADLYRLHILPVFGEKKISIISPLDCQTFITDKAKTFKNMKQIKSYTSKIFEFAINMNYIERNPMSKVIMPKLKKTVSENYWTVNELHHFLTIILENEPYKHYALFRLLAYSGLRKGELYALKWEDFDSENQLLTVSKSLGRIDGHAIEKGTKNTFSVRSIYLDDETCSILNKWKQETSREKWQLSVQPLSLDKEFMFTYCNRDGEIEPLHADYINNILKRIIRKHNLKKISPHGFRHTHATLMIEMGIDPVNTAKRLGHASSQITLDTYSHATKAGEKQSITKFAEYLNKAK

SEQ ID NO: 4793 - protein, 516 aa, Streptococcus agalactiae
ATGACCAATCATATTGCAAAACTGATAGAAGAGAGCGGCAAAAAACTGACTGAGATTAGTTCTGCTACAAATATCGCTTATCCAACCTTATCAGGATACAATCAAGGCATTCGTCAACCGAAAAAAGGAAATGCTCAAAAATTAGCTGACTATTTCGGCGTATCCATGGCTTACATCTTAGGACTTGATGATAACAAACAAGCACCATCAACTATGAACATTATTTCGGACAGTTTTAAAATTTCCGAGATTAGTTCTGTAACACCTTTTAAAAGCGATATGGAAAAGCTGAAGAAAGGAATTGAACTAGGAGAAATCCATCTGTCTATGCCCTTAAATGACGGCTTCTCAGACGATTTTAGGCGCATTTTAGCTCGCTATTTGGTTAATAATGAAGAAGAATTCATGAAAACCTTCACTAAACACATGAATAGTTTAAAACGAGAATCAGAAATTTGGCAAACCTGGATTCAGACCGAAGAATACCGAATTAGACAAGAAGATCGACATAAAAAA

SEQ ID NO: 4794 - protein, 172 aa, Streptococcus agalactiae
MTNHIAKLIEESGKKLTEISSATNIAYPTLSGYNQGIRQPKKGNAQKLADYFGVSMAYILGLDDNKQAPSTMNIISDSFKISEISSVTPFKSDMEKLKKGIELGEIHLSMPLNDGFSDDFRRILARYLVNNEEEFMKTFTKHMNSLKRESEIWQTWIQTEEYRIRQEDRHKK

SEQ ID NO: 4795 - protein, 282 aa, Streptococcus agalactiae
ATGTCTGAAGAAGCGACTTTAGTTGTTCAACTTCCCAAAGTTTTGGAAAAACAGTTAAGGGCACATTATGATGAAATGGTCTCTACAGCTATTGAAAGAGCGCTAGAAGATAAAGAACTATACAAACCTATGGTTCGGATGGCAGCTCTTTCTAGGTGGCTTGATGTATCAACGACAACCCTTCAAAAATGGACACGAGAAGGAATGCCTACAATGGTCATTGATGGGGTGACTCTGTACGATAAACGAGCTGTCACTAGATGGCTAAAGCAATATGAAAGA

SEQ ID NO: 4796 - protein, 94 aa, Streptococcus agalactiae
MSEEATLVVQLPKVLEKQLRAHYDEMVSTAIERALEDKELYKPMVRMAALSRWLDVSTTTLQKWTREGMPTMVIDGVTLYDKRAVTRWLKQYER

SEQ ID NO: 4797 - protein, 852 aa, Streptococcus agalactiae
ATGAGTGAAGTACAATGGATTAAGATTACTACAGATATCTTTGATGATGAAAAAATACAGTTGATTGAGTCAATGCCCGAAGGAGATACTTTAATTGTCATCTGGTTTAAACTACTCGTTTTAGCAGGTAAACAGAATTACAGTGGAGTCTTAGCTCTAGGAGATAAGGTCTTTTATACAGAAGAGATGTTAACTACAGTCTTTAGGAGAAAGTCAACGACTGTGAAGCTGGCTCTGAAAACATTTGAACAATTTGGAATGATTGCTTTTGTGGATGGAGCAGTCACAATTCCTAAATGGGAGAAACATCAGAATATTGATGGTCTAGAAAAAATTCGTAAACAAACAAGAGAAAGAGTGGCTCGTCATCGTCAAAAGCAAAAAGCTCTAGTAAGTGGGCAAGATAGTTTATCAATAGAATGTAACGTTACAGAAACGTTACCTGTAACGGAAAGTAACGGTCAAGTAACGCAACAGATTAAGAACAAGAATCAGAAAGAGAATAAGAATGTACTAGATAATAGTTCTAGAGAGACAGAAGATCAGTCAACAACTTATCTCAAACCAGAGTATTATTTCCTTTTGCAAGTGATTGCGGATAGATATAACGATCGTTTTATTTACCCCTATAATTACACCCTAACGCATAAGCAAAAAATGGCGATTGGACAGTTTTTAAGTGAAGGCTATATGACTTCTGATGAAGTCTTGGGAATGATAGATCGTATTCCTAATGATGTAGAGTCACCATTAGCCTATTTAATGAGCTCTATGGAGCGCCTAAAAGATGAGCGATTATTGGAAGCTAAGGTAATTGCTCATGAAAATGCTAGAAAGTTTTACCAAAAGGGA

SEQ ID NO: 4798 - protein, 284 aa, Streptococcus agalactiae
MSEVQWIKITTDIFDDEKIQLIESMPEGDTLIVIWFKLLVLAGKQNYSGVLALGDKVFYTEEMLTTVFRRKSTTVKLALKTFEQFGMIAFVDGAVTIPKWEKHQNIDGLEKIRKQTRERVARHRQKQKALVSGQDSLSIECNVTETLPVTESNGQVTQQIKNKNQKENKNVLDNSSRETEDQSTTYLKPEYYFLLQVIADRYNDRFIYPYNYTLTHKQKMAIGQFLSEGYMTSDEVLGMIDRIPNDVESPLAYLMSSMERLKDERLLEAKVIAHENARKFYQKG

SEQ ID NO: 4799 - protein, 288 aa, Streptococcus agalactiae
ATGACAATTTATTATCAATTGGAGAATATGCTAGTCGCTGGTTTTAAATCAGAAGAAGAGTTACAACGGTATCAAGGGTTAAAAGCAGAGTATGAGGAAGAAACCCTGGATTATAGTTTCTCAATTAGAGAAATTGTCAATCAATTAGAAATTATTATCCAGAGTAGAGAAAATGACTTCCCAAATTTAGAAGAAGGGCTGTTGCAAGATTATCAGGAACTTGTAGAATATTTGAGGGAATACGATGTGTCTCAGGCAGAAAAATACACAAGGAGAATTTATTGTGGT

SEQ ID NO: 4800 - protein, 96 aa, Streptococcus agalactiae
MTIYYQLENMLVAGFKSEEELQRYQGLKAEYEEETLDYSFSIREIVNQLEIIIQSRENDFPNLEEGLLQDYQELVEYLREYDVSQAEKYTRRIYCG

SEQ ID NO: 4801 - protein, 363 aa, Streptococcus agalactiae
GTGGTTGAGCGTTATCGAACAGTTCTGAAAAAATTCTATATCACAAAATCGCAGAATCAAACGCTAAACTACCTTATCAGTTATACAGGTTTAAGGAATTTTTCTAACTATGCTAGGAAAATGTTATTTAAGAAATTCCCTATTGTTTTGGTATTTGATGAAACTTCATTTGAAGACTTGATATTTTCTTTGAGGCGAATTAAAAATAATATCAATCAGTTAGCAAGGATAGCTGAGCAATCTCAGGATCTTCAAGCATTACGAGCTATGACTTACAGTGTTCAAATGATTGAAAAATATGAAAAATCGTTCCTTAAATACCATAAAACGAAAAAGGCGAGGTTACTATCAAAAGTGGATGAA

SEQ ID NO: 4802 - protein, 121 aa, Streptococcus agalactiae
MVERYRTVLKKFYITKSQNQTLNYLISYTGLRNFSNYARKMLFKKFPIVLVFDETSFEDLIFSLRRIKNNINQLARIAEQSQDLQALRAMTYSVQMIEKYEKSFLKYHKTKKARLLSKVDE

SEQ ID NO: 4803 - protein, 354 aa, Streptococcus agalactiae
ATGAAAAATAGAATTAAAAATATCGTGAAGCAAGTCTTTTTGACTGAGGATGAGAATAAAAGATTGTTAGCATTAATGGCTAATGAAAAAGAGTCAAACTTTTCCGCTTTTGCCAGAAAGAAATTATTTAACCAAGAGATTGAATCATGGACGATTAATTTTCCAGAGTATGAGCAACTGACAGAGCGATTCATTCAGATTGGCAGATCAATTAATAGGATTGCCAAGTTGTCAACTCAGGTTGGAAATATTTCACAACAGAATTTTATAGAACTTGGTCAGTTGATAACTCAATTATTGGATGAATTGGAAAAGGGACTCTCAGTTAACCTGAAAAAGAAGTCTACTAAACAT

SEQ ID NO: 4804 - protein, 118 aa, Streptococcus agalactiae
MKNRIKNIVKQVFLTEDENKRLLALMANEKESNFSAFARKKLFNQEIESWTINFPEYEQLTERFIQIGRSINRIAKLSTQVGNISQQNFIELGQLITQLLDELEKGLSVNLKKKSTKH

SEQ ID NO: 4805 - protein, 2322 aa, Streptococcus agalactiae
ATGGCGACATTCATCAAAGACAAAAAGAGCATGAGCGAAGAAGATATTAAAGCGAATTTCATCACACCAGCCATTTTAGCTAAAGGTTGGAAAAATGGTGAGCATATTGCCTATGAGGAATATTTTACAGATGGGCGAATAGAGGTTCGAGGTGATAAGGCTCGTCGTAAAGAAGGGAAAAAATCAGACTATGCTCTCTACTATCAATTTGGGCAGCGTATTGCAATCGTTGAAGCTAAAGATAATAAGCATAGTTTACGAGCTGGATTACAGCAGGCGATTGAATATGGTGAGATTTTAGATGTTCCTTTTGTTTATTCCTCAAATGGTAATGGTTTTATTGAGCATGACCGTATCACGAGGCAAGAACGTGAGTTAACTTTAGAGGAGTTTCCTACTCGTGAAGAATTATTTGAGCGTTTGATTTCTGAAAAAGAGATAAGTTCTGAGGTTTCAAAGGCGATTTCAGTCCCTTACTATACTGATGCGTTCTCCAATAAAACACCACGTTATTACCAGCAAATCGCTATCAACCGTACCGTTGAGGCGGTTGCAAGAGGAGAAAATCGGGTCATGTTTGTTATGGCAACAGGGACAGGTAAGACCTTTATGGCTTTTCAAATTATCCATCGTTTGCGAAAAGCTGGTTTAGCCAAACGTGTTCTCTTTTTAGCCGACCGAAATATCTTAGTTGACCAAACAATGGCTGAAGATTTTAAGCCTTTTGAAAAGGTTATGACCAAAATCACAGCAAAGTTACTGAACTCTCCAGAAAAGTTAAATTCTTTTGAAATTTACTTAGGTTTGTATCAGCAATTAACAGGTGAAGACGGCGAAGAAACGCATTACCAAAAGTTTGATAAGGATTTCTTTGACCTGATTATTATTGATGAGGCTCACCGCGGTTCAGCTAAGGAGGACAGCAACTGGCGCCAAGTGATTGATTATTTTGCCTCAGCAACCCAGATTGGGATGACAGCGACACCAAAGGAGACAAAAGAGGTTTCCAATATAGATTATTTTGGTGAACCAATTTACACCTATAGTTTGAAACAGGGCATTGAGGATGGCTTCCTGGCTCCTTATCGCGTGATGCGGGTCAATTTGAATATTGATGTTGATGGCTATCGTCCAGAAAATGGGAAAACGGATGCCGCAGGAAAACTTATCGAAGATAGGTACTATGGTCGAAAAGATTTTGATAAGACTATTGTTATTGATGACCGTACTCAGAAGGTGGCCAAGTTTGTTTCTGATTACATGAAACAGAACAATGCTCGATTTGACAAAACCATTGTCTTTTGTGTTGATATTGACCATGCTGAGCGGATGCGAGCAGCTTTTGTCAAAGAAAACCCTGATTTGGTTCAGGAAGACTATCGCTATGTGATGCAGGTGACTGGCGACAATGCCGAGGGTAAAGCACAGCTAGATAACTTTATGGATGTTAATTCTAAGTTTCCAGCTATTGTCACAACATCAAAACTCTTGACAACGGGGGTCAATGCAAAAACTTGTCGTTTGATTGTGCTCGATTCCAATATTCAATCCATGACGGAGTTCAAACAGATTATTGGTCGTGGAACACGTTTGTACCCGCAGAAAGGGAAAGAATTTTTCACCATTATTGATTTTAGAAACGTGACCAATTTATTTGCAGATCCAGATTTTGATGGAGAGCCAGCGTATGTCTTTGACCCTAAAGGGCCAACTGGAGGTGGCGGCGAATCAACTGGAGGAGGAGAACCTATTGAAAAATATAGGGTCACTGATAAAAAAGTAGATGTTCTCAATTCAACCATTCAGGTTTTGGATGAAAATGGGAAGTTAGTGACAGAAAGTCTGACCGATTATACTCGGAAAAATATTCTAGGAGCTTACGCTACCTTGACCGAGTTTATTACTGCCTGGCAAGCAGCGGATAAGAAAAGAGTCATCTTAGAAGAACTCTATAAAAAAGGCGTTTATCTTGATGCTATTCGAGAAGCAGAAGGGATTTCTGAACAGGAGATTGATGACTTTGACTTGCTGTTAAAACTGGCTTATGGTCAAAAAGAGTTGACTAAGAGCCAGAGAATTAGCAGGGTTAAAAGTAGTGGTTATCTGCAAAAGTACAGTGAAGAGGCCCGAGCTGTTTTAGAGACGTTATTAGATAAGTACATGGATAAGGGGATTGGTGAACTGGAAAGCATTGAAACGCTAAAATTACCAGAGTTTCAAATTTACGGTGGAACCTTTAAGATTATCAATACCTATTTTGGAAATAAGCAAGCCTATCTAAGGGCCATTAAAGAATTGGAAGAAGAGCTATTTACAGTAGCT

SEQ ID NO: 4806 - protein, 774 aa, Streptococcus agalactiae
MATFIKDKKSMSEEDIKANFITPAILAKGWKNGEHIAYEEYFTDGRIEVRGDKARRKEGKKSDYALYYQFGQRIAIVEAKDNKHSLRAGLQQAIEYGEILDVPFVYSSNGNGFIEHDRITRQERELTLEEFPTREELFERLISEKEISSEVSKAISVPYYTDAFSNKTPRYYQQIAINRTVEAVARGENRVMFVMATGTGKTFMAFQIIHRLRKAGLAKRVLFLADRNILVDQTMAEDFKPFEKVMTKITAKLLNSPEKLNSFEIYLGLYQQLTGEDGEETHYQKFDKDFFDLIIIDEAHRGSAKEDSNWRQVIDYFASATQIGMTATPKETKEVSNIDYFGEPIYTYSLKQGIEDGFLAPYRVMRVNLNIDVDGYRPENGKTDAAGKLIEDRYYGRKDFDKTIVIDDRTQKVAKFVSDYMKQNNARFDKTIVFCVDIDHAERMRAAFVKENPDLVQEDYRYVMQVTGDNAEGKAQLDNFMDVNSKFPAIVTTSKLLTTGVNAKTCRLIVLDSNIQSMTEFKQIIGRGTRLYPQKGKEFFTIIDFRNVTNLFADPDFDGEPAYVFDPKGPTGGGGESTGGGEPIEKYRVTDKKVDVLNSTIQVLDENGKLVTESLTDYTRKNILGAYATLTEFITAWQAADKKRVILEELYKKGVYLDAIREAEGISEQEIDDFDLLLKLAYGQKELTKSQRISRVKSSGYLQKYSEEARAVLETLLDKYMDKGIGELESIETLKLPEFQIYGGTFKIINTYFGNKQAYLRAIKELEEELFTVA

SEQ ID NO: 4807 - protein, 1461 aa, Streptococcus agalactiae
ATGTCAATTACATCATTTGTGAAACGTATTCAAGATATTACACGCAATGACGCAGGTGTTAATGGAGACGCCCAACGTATTGAACAAATGTCTTGGTTACTCTTTTTGAAAATTTATGATAGCCGTGAGTTGGTTTGGGAGTTGGAGGAAGATGATTATGAGTCAATTATTCCTGAAGACTTAAAATGGCGAAATTGGGCTCACGCTGAAAAAGGTGAGCAAGTCTTGACAGGTGATGATTTGCTTGATTTTGTGAACAATAGGCTGTTTAAGGAATTAAAAGAGCTTGAAATCACACCCAATATGCCCATTCGGAAAAGCATTGTTAAATCAGCCTTTGAAGATGCTAATAACTACATGAAAAACGGTGTGCTCTTGCGTCAGGTTATCAATGTCATTGATGAGGTGGACTTTAATAGTCCAGAAGACCGACACTCCTTTAATGATATTTATGAGAAAATCCTCAAGGACATCCAAAGTGCAGGGAACTCTGGGGAATTTTATACCCCTCGTGCAGCGACCGATTTCATTGCTGAAATGCTTGACCCTAAATTAGGTGAAACAATGGCTGATCTTGCCTGTGGAACAGGTGGTTTCTTGACCTCGACTTTAAATTATTTAAGCAAACAGCGTAAGACTAGCGAGGATATTCAAAAATACAATCAGGCTGTCTTTGGGATTGAGAAAAAAGCCTTTCCTCACCTTTTAGCAGTGACGAACCTCTTTCTTCATGAAATTGATGACCCTAAAATCATTCATGGCAATACCTTGGAGAAAAATGTCCGAGAGTACACAGATGACGAGAAGTTTGACCTTATCATGATGAACCCACCTTTTGGTGGTTCCGAACTTGATACGATTAAAAATAATTTTCCGGCAGAGTTGCGGAGTTCGGAGACAGCGGACCTTTTTATGGCAGTTATCATGTATAGGCTGAAAGAAAACGGTCGTGTTGGGGTAATTTTACCAGATGGCTTTCTCTTTGGAGAGGGTGTTAAAACTCGTTTGAAAGAAAAATTGGTTGAGGAATTTAATCTTCATACGATTATCCGTTTGCCTCATAGTGTCTTTGCACCTTACACAGGTATTCACACCAATATCCTTTTCTTTGACAAGACTAAGAAGACGGAGCAGACTTGGTTTTATCGTTTGGATATGCCAGAGGGGTATAAAAACTTTTCTAAGACCAAACCGATGAAATCAGAGCATTTCAATCCTGTTCGTGAGTGGTGGACTAGCCGTGAGGAGATTTTAGAGGGAAATTTTTATAAAGCCAAATCTTTTACACCATCTGAGTTAGCTGATTTGAACTATAATTTTGATCAATGTGGCTTTCCCAAGGAAGAAGAAGAGATTTTGGAACCGCTGGAACTTATTCAAAACTATCAGCAAGAAAGAGCGGCTTTGAACCAAAAAATAGATGCTGTTTTGGCAGATATTTTAGAGCTTTTGGAGGAGAAC

SEQ ID NO: 4808 - protein, 487 aa, Streptococcus agalactiae
MSITSFVKRIQDITRNDAGVNGDAQRIEQMSWLLFLKIYDSRELVWELEEDDYESIIPEDLKWRNWAHAEKGEQVLTGDDLLDFVNNRLFKELKELEITPNMPIRKSIVKSAFEDANNYMKNGVLLRQVINVIDEVDFNSPEDRHSFNDIYEKILKDIQSAGNSGEFYTPRAATDFIAEMLDPKLGETMADLACGTGGFLTSTLNYLSKQRKTSEDIQKYNQAVFGIEKKAFPHLLAVTNLFLHEIDDPKIIHGNTLEKNVREYTDDEKFDLIMMNPPFGGSELDTIKNNFPAELRSSETADLFMAVIMYRLKENGRVGVILPDGFLFGEGVKTRLKEKLVEEFNLHTIIRLPHSVFAPYTGIHTNILFFDKTKKTEQTWFYRLDMPEGYKNFSKTKPMKSEHFNPVREWWTSREEILEGNFYKAKSFTPSELADLNYNFDQCGFPKEEEEILEPLELIQNYQQERAALNQKIDAVLADILELLEEN

SEQ ID NO: 4809 - protein, 561 aa, Streptococcus agalactiae
ATGACCCCAGAACAACTAAAAGCTAGTATCTTACAGAGAGCGATGGAGGGGAAATTGGTTCCTCAAGACCCAACTGACGAGCCAGCTAGTGAGCTTCTTAAACGTATCAAAGCGGAAAAAGAAAACCTCATTGCTGATGGCAAAATCAAGCGAGATAAAAAAGAAACAGAGCTTTTTCGAGGTGCTGACGGGAAACCTTATGAGAAGTTATCAGACGGGACGATTAAGGAAGTGGAAGTGCCCTATGATATTCCAGCTAGTTGGGAATGGGTGAGGTTGCGAAATATATCTTCGTTGAGTTTTTTCCCTAATATATCTGGAGATAAAATTCCGAATTATAGTTGGGTTTTAGATATGGAAGATATAGAAAAAGAAACTGGAAGATTAGTTCGAAAAAACTATAAAACAGAAAAATCATCTTATAAAAGCAATAAAGTATATTTTTCTAAGGATACTGTTTTATATGCTAAGCTACGCCCCAACCTAAAGAAAGTTATCATTTCTGACGAAGATGGTTTTGCAACAACCGAACTTATTCCGATTAAAATTTTNNNNNTTAAT

SEQ ID NO: 4810 - protein, 187 aa, Streptococcus agalactiae
  VARIANT 184, 185, 186: Xaa = Any Amino Acid
MTPEQLKASILQRAMEGKLVPQDPTDEPASELLKRIKAEKENLIADGKIKRDKKETELFRGADGKPYEKLSDGTIKEVEVPYDIPASWEWVRLRNISSLSFFPNISGDKIPNYSWVLDMEDIEKETGRLVRKNYKTEKSSYKSNKVYFSKDTVLYAKLRPNLKKVIISDEDGFATTELIPIKIXXXN

SEQ ID NO: 4811 - protein, 1569 aa, Streptococcus agalactiae
ATGGAAAAATTCAAACAAGAAATTAAGAATATTGGTTCAAATAAGTTAGCCTATTCAATAGACCTTAATAATCAAAAAATTACCAAATCAGAGATTGTAAAAAGCTGGGGCAAAGCGTATTCTGAGAAAGTTGCTAACGGTTCTTTAGGTAATGGATTGCGCCCTCCTCAATATGGTGCACTTTCTGCTATACGTTCTCATTGGGTTGTCTCTAATGAACCGGCCACAATAGTTTTACCGACAGGAACAGGAAAATCTGAAACAATTTTTTCGACAATAGTCTCAGAGCGTATTGCTACAACTTTGATTGTTGTTCCAAGTAATTTACTTAGAGAACAACTTTTTGATCAGGTTAAACATCTGGGGATTCTTCCTAAAATTTCAGTTGTATCTGATCAGGCAATTTTTCCTAATTGTCTATTATATAAATCTACTGTGAAAGATAGTGAAAAGGATATTTTATTTAATGAAATTGATAATATAAATATCATTATAACTACACCAGCGCTGATTAAAGCGTTACCGAATGATCTGTTTGAAAAAATCTATTCGAACGTTGAATTAGTTGTATTTGATGAAGCTCACCATCTTGCTGCAAATGATTGGAGAAAAGTAAGAGATAAGTTCTCAGGTAAAAAGATTTTACAATTTACAGCGACCCCATTTCGAAATGATGGTAAGAAAATTGATGGAAAAATAATTTTTAAATATAGTTTATCTCTTGCTCTGCAAAACAATTATTTTAAACCAATTGATTTTCATCCTATCCATGAGTATAATATTACAAAATCGGATGAAAAAATCGCAGATGTTGCAGTTAAACTTTTGCAAAGTGATTTGGATAAGGGATTAAATCACATTCTTTTGGCGAGAGCTAACTCTAAAAAAAGAGCTGATGAGTTATTCGATAAAATATATTCGAATTACAAAATATATAATCCAGTGATTATACATTCTGATAGAAAAAAGTCGCAAAACAGAGATTCGTTAGATCTACTAAAATCAGGAAAATCACAAATTGTTGTATGCGTGGACATGTTTGGTGAAGGTATTGATATTCCTTCACTTAAAGTTGCTGCAATTCACGACAAATATAAGTCATTACCAATTACTTTACAGTTTATGGGAAGGTTTGCAAGGTCTGGTAAAGAAAGGTTAGGCAGTGCTAAACTGATTACTAATATAGCATCAGAAGACTTAAAAGAAGATATCGATGAATTGTATAGACGTGATGCGGATTGGACTAAACTGCTTCAAATTAAGTCAGATAGAGCAATAGAAAAAGAAGTTCAGATAGAAGAATTTATTTCCCAATTTGAAAAAACAAGAGCAAGTAATATTGACTTATCTCAAATAAAGATGAAAATTAGTTCTCGAATATATAAAACGGATATGAAAGAGGTAAATATCAACGCCTGGAAAAATGTTCTGAGTGCAGAACATACTACTCACTTGATAAATGAAGAGAAGGGAATTTTAATATTTATTGAAGAAATAGAGAATACAGTTAACTGGTCTTATCAAAAAGATCTTGTCGAATATTTATATAATTTTTTTGTAATCTTTTTT

SEQ ID NO: 4812 - protein, 523 aa, Streptococcus agalactiae
MEKFKQEIKNIGSNKLAYSIDLNNQKITKSEIVKSWGKAYSEKVANGSLGNGLRPPQYGALSAIRSHWVVSNEPATIVLPTGTGKSETIFSTIVSERIATTLIVVPSNLLREQLFDQVKHLGILPKISVVSDQAIFPNCLLYKSTVKDSEKDILFNEIDNINIIITTPALIKALPNDLFEKIYSNVELVVFDEAHHLAANDWRKVRDKFSGKKILQFTATPFRNDGKKIDGKIIFKYSLSLALQNNYFKPIDFHPIHEYNITKSDEKIADVAVKLLQSDLDKGLNHILLARANSKKRADELFDKIYSNYKIYNPVIIHSDRKKSQNRDSLDLLKSGKSQIVVCVDMFGEGIDIPSLKVAAIHDKYKSLPITLQFMGRFARSGKERLGSAKLITNIASEDLKEDIDELYRRDADWTKLLQIKSDRAIEKEVQIEEFISQFEKTRASNIDLSQIKMKISSRIYKTDMKEVNINAWKNVLSAEHTTHLINEEKGILIFIEEIENTVNWSYQKDLVEYLYNFFVIFF

SEQ ID NO: 4813 - protein, 1341 aa, Streptococcus agalactiae
GTGCTTGACGGTATTAATCGACTAATGATTGGAACACTTGGTTTAAAACAAATACCTGGAGGAAATGTCAGTTTTCGGATGTTTGCTGGGGTTGATGTAAGAAAGGGAATAAGTGAAGCAACTTCATTGGGTTCAATCAAATCAAATATTTTTGGACATGGATACAGAGATGGAAATAAAATAAGTGTAGGTTGTTCTTATAAAGGAAAAGTTTGGATGAGGTGGGTTGAAAGTCTTAATTTTTGGGTAGATTGGTGCCAAAAAATTGGGGCAAAAATTTTAGATACTAATATTGATACAAGTATGATATTAGAAAACTCACTTACTTCAGAAGTTGTTACAGAATTTCCGGATGGGGTTCCTTATAAAATAACACCTGACAGTATAATTGAAACTAGTAATTCAACTGCAAGGGCATTCTATATTGAAAAAGAAGATAAGCTGTATCATTTTTTTGAATCAGACTTTAGGAACCCTCGTCTTGAAAAAGGCTTATTGATTTTTGAACTTTGGATTAGTGAAAGAAAATTTATTTTCCAACAACATATAGATAAAAAGGGGTTTGGTTTTTTGCAAATTTCTGGAGATGACTTATTTATAAAGAGATCAAATAATAAGATTTTATTTTCACAATATTTAAAAGATCATAGTCCAACTATTTCTTTCATACAGAAGGATGGGGTTCGGGTAATGTTAGAGGGTAATCTACAAATTGTAGATAAACCGAGGAGTAAGGCATCGTTGTCAAATGAGATGCTTGTTCCGATAGAATGGAAAAAATATGGAACAAATATACGAAAAGAGTCTCAAGGTGTTGCTAAGGATAGAGCATCCATTCAATATGTAACTATAAATAAATTGATAAATACTGATGAATTGATAGTTTTTGACGATGATGGTTCAGGAGAAATTGCAGACATTGTTACAATAAGTGCTAATGAAGCAGAGCGCAAAATACTCATAAATCTGTATCATTGTAAATATTCACATGGTGATGAACCAGGTGCTCGTGTATCAGATTTATACGAAGTGTGTGGTCAAGCAGAGAAATCAATTATTTGGAAAGATAATTTATTAGATTTCCTTGATAGAATGATAAAAAGAGAGTCAATACGGATTTCTAAAAGACAGAGTTCTCGGTTTGAAAAAGGAAATATTAATGATTGTCGGACAATCAAATCTATGATAAAAGATGGCTTTAGTACTGATATGAGAATAACCATTGTACAGCCAGGTGTGTCGATTTCGAAACTAAGTACTGAGATGAAGCAATTGTTATTATCAACTGAGTATTATTTAAGTGAGACATATAATATTCCTCTTAACTGTTATTTCAGTGAA

SEQ ID NO: 4814 - protein, 447 aa, Streptococcus agalactiae
MLDGINRLMIGTLGLKQIPGGNVSFRMFAGVDVRKGISEATSLGSIKSNIFGHGYRDGNKISVGCSYKGKVWMRWVESLNFWVDWCQKIGAKILDTNIDTSMILENSLTSEVVTEFPDGVPYKITPDSIIETSNSTARAFYIEKEDKLYHFFESDFRNPRLEKGLLIFELWISERKFIFQQHIDKKGFGFLQISGDDLFIKRSNNKILFSQYLKDHSPTISFIQKDGVRVMLEGNLQIVDKPRSKASLSNEMLVPIEWKKYGTNIRKESQGVAKDRASIQYVTINKLINTDELIVFDDDGSGEIADIVTISANEAERKILINLYHCKYSHGDEPGARVSDLYEVCGQAEKSIIWKDNLLDFLDRMIKRESIRISKRQSSRFEKGNINDCRTIKSMIKDGFSTDMRITIVQPGVSISKLSTEMKQLLLSTEYYLSETYNIPLNCYFSE

SEQ ID NO: 4815 - protein, 288 aa, Streptococcus agalactiae
ATGTCACAAATTAAACTAACACCTGAAGAACTCCGTATTTCAGCAAAAAAATATACAACAGGATCACAATCAATTACAGATGTGTTAACAGTTTTGACTCAAGAACAAGCTGTTATTGATGAAAATTGGGATGGTACAGCATTTGATAGCTTTGAAGCCCAATTCAATGAATTATCTCCCAAAATCACACAATTTGCACAATTATTAGAAGATATAAATCAACAATTATTGAAAGTTGCGGATGTTGTCGAACAAACAGACTCAGATATTGCCTCACAAATTAATAAA

SEQ ID NO: 4816 - protein, 96 aa, Streptococcus agalactiae
MSQIKLTPEELRISAKKYTTGSQSITDVLTVLTQEQAVIDENWDGTAFDSFEAQFNELSPKITQFAQLLEDINQQLLKVADVVEQTDSDIASQINK

SEQ ID NO: 4817 - protein, 405 aa, Streptococcus agalactiae
ATGAAAAAGAGTACCCAAATAATACTACTAATAGTTGCATTATTCATACTTGTTTTTAGCGGAGGATTTTATATGAAAGAACAACAAAGAAAAGAAGAACTAAAACGGAATCGAGAATATGAAGTTAGTCTAGTCAAAGCATTGAAAAATTCCTATGAGAATATAGAAGAAATAAAAATCACACATCCTGTTTCAACTGAAATTCCTGGAGATTGGCATTGTACTGTAAAGATTTCATTTAATGATAAAAAATCTATTGTTTATAATATTACACATAATTTGGAATCGAAAAAAAATTATAGCGGAAATTTTAATGAAAAAAATATGAATTTTTTTGATTCAAGAATTGGTAAAACAAAAAAAACTATAAAAATTATTTTTTCAGATGGTCAGGAGAAGATACAA

SEQ ID NO: 4818 - protein, 135 aa, Streptococcus agalactiae
MKKSTQIILLIVALFILVFSGGFYMKEQQRKEELKRNREYEVSLVKALKNSYENIEEIKITHPVSTEIPGDWHCTVKISFNDKKSIVYNITHNLESKKNYSGNFNEKNMNFFDSRIGKTKKTIKIIFSDGQEKIQ

SEQ ID NO: 4819 - protein, 585 aa, Streptococcus agalactiae
ATGGGATTTACATATACCGAGAAAGAACTTCGTGAATTCAATATTGGAGATAATGTATATTCAGTTAACCCCGATTATGCAGAAAAAAATTATTCAACTGTCATAACGGATTTACCCCAGAAAGATAACAAAACAAATATTATTACAACAGAAGATAGAAAAAAATTTAAAGTATTAAAAACTTCTCCTGACGATATGTCCGGCTATCAGAGTATGGCAGTTGCACCAATTATCAAGGGTAAAGTAGATTATAATAGTGTTGCTGTTATATCCGCCGCAACGGATTCAAGTAATTATAAAGATTTAATTGGCGCAGTTTCATCTGCTCAACCACATCAAAGTTCGACTCAGTTAAAATCAGCTGATAAATTTTTAAAAGATGTACAGTCACATGACAAATGGACTGTGACTCAGCTTTCAGGCTATTCTCAATCTGCATATATGCTAAAATTAGGTGCTAAATATCATATCCCGACTACAGTATTTAATGGATGGTTTAGGTATAGCACTTTAAATGAAGATGAAAAAAAATCATGGCTAAGCATCCTGAATATTTTGCTAATTTTCGACATAAAAAGGATAACG

SEQ ID NO: 4820 - protein, 195 aa, Streptococcus agalactiae
MGFTYTEKELREFNIGDNVYSVNPDYAEKNYSTVITDLPQKDNKTNIITTEDRKKFKVLKTSPDDMSGYQSMAVAPIIKGKVDYNSVAVISAATDSSNYKDLIGAVSSAQPHQSSTQLKSADKFLKDVQSHDKWTVTQLSGYSQSAYMLKLGAKYHIPTTVFNGWFRYSTLNEDEKKSWLSILNILLIFDIKRIT

SEQ ID NO: 4821 - protein, 165 aa, Streptococcus agalactiae
ATGGCTAAGCATCCTGAATATTTTGCTAATTTTCGACATAAAAAGGATAACGTAACTTGGTGGAACGATTTTAATAAACTAGATGATAAAGATTATGGTACCGTGAAATGGGTAAATGGTAAAAGTCATAAAATAGGAGTTGGAAATTTACTGATGATGGTAAGT

SEQ ID NO: 4822 - protein, 55 aa, Streptococcus agalactiae
MAKHPEYFANFRHKKDNVTWWNDFNKLDDKDYGTVKWVNGKSHKIGVGNLLMMVS

SEQ ID NO: 4823 - protein, 243 aa, Streptococcus agalactiae
GTGATGCCTCCTGGTATAACAGATTTAAGTCCGGAAGAATTAGCTGATGCATATAGTGCGGGTGGAGTTAGAGAGGACACCATAGTAACACCAATTGAAACTTTCTTTGATGAAAAAGTTACTAATGCACAAGAGATCACAACTTCATATACTAATCTTCAAAAACAAATTGAATCTGGTGTCCAAAAATTGCTAGAAGAGGATTCCAAATTAGCAGGAGAATTTAAGGAATGGTCACAGTAC

SEQ ID NO: 4824 - protein, 81 aa, Streptococcus agalactiae
MMPPGITDLSPEELADAYSAGGVREDTIVTPIETFFDEKVTNAQEITTSYTNLQKQIESGVQKLLEEDSKLAGEFKEWSQY

SEQ ID NO: 4825 - protein, 384 aa, Streptococcus agalactiae
ATGGTCACAGTACTAGATCAAAATGAAAACAAAATTAATAGTCTAAAATTAAACCTAGAGAAATTGGAAGATAATTATCATCGCGAAAATATGGAGATAGAAGATAAATTATATAGCCTTGAGGATAAAAAGAATGAGTTAGAGACTTATTTACAAGAAGTCTATGAAGAGACAAGTCACTTTTTGAGACAAAATGATTCAGATGGTTCGACTTTTATGAGTTTAAATCGAATAATTGAAAGTTATCAAATGGAATTAATTGATGAATATGAAAACTATAAACAGACTATCATTGTCCAAGAGGAAAATAGTCGGACACAGTTTCTAAAAGACCGAGTAAAATTAGAAAATGACATTTCTAGTTTAGAAGGAAGAAAATACTAC

SEQ ID NO: 4826 - protein, 128 aa, Streptococcus agalactiae
MVTVLDQNENKINSLKLNLEKLEDNYHRENMEIEDKLYSLEDKKNELETYLQEVYEETSHFLRQNDSDGSTFMSLNRIIESYQMELIDEYENYKQTIIVQEENSRTQFLKDRVKLENDISSLEGRKYY

SEQ ID NO: 4827 - protein, 279 aa, Streptococcus agalactiae
ATGAGTTTAATAGGCGCTGTATTGAAAGGAACCAAAGAAGACAAAGAATTCAAAAAGCAAATTCAAAAAGCTTTAGTAAGGTTTGTCCATGCCCCGGAAATAGTAGAAGAAGCTGATTCTATTAAGACGACTTATAGTGAAAAGATTGATGATATTTCTGAGACTGCTAAATCATCAATAAAAACGATAAAAAACCAAATTGACACTGGACTTGTAGGACAATTTGGGGAAAAAGTAAAGGCACAGGTAGATTTAAATAAAGGTAGTTATGATGATTTA

SEQ ID NO: 4828 - protein, 93 aa, Streptococcus agalactiae
MSLIGAVLKGTKEDKEFKKQIQKALVRFVHAPEIVEEADSIKTTYSEKIDDISETAKSSIKTIKNQIDTGLVGQFGEKVKAQVDLNKGSYDDL

SEQ ID NO: 4829 - protein, 96 aa, Streptococcus agalactiae
ATGAAGGATAACAAAGTTTATTATTTACATTTTGGTAAAGCAATAGATAAAAATGAAGCTAAAAATGATAAGTATCTCAATCAAATTATAAATAAT

SEQ ID NO: 4830 - protein, 32 aa, Streptococcus agalactiae; identical to SEQ ID NO: 488

SEQ ID NO: 4831 - protein, 102 aa, Streptococcus agalactiae
ATGGAGGAATTTTGTATGGTAAGTACTCAATATATGAAAGTAACCTTACGAGAAAAATTCCCAGATAAATTAACATATGTTGATTTAGAAGAACTTGTGATA

SEQ ID NO: 4832 - protein, 34 aa, Streptococcus agalactiae; identical to SEQ ID NO: 490

SEQ ID NO: 4833 - protein, 123 aa, Streptococcus agalactiae
ATGATATTACAAATAAAAGAAAATGACTATATATCAGCTCATATATTGGTTAAAGTTGGTAAATATAAATTATTGAAATTACCTCATAAGTTTACCAATGAGATTACGGTTAGAAAGGAATAC

SEQ ID NO: 4834 - protein, 41 aa, Streptococcus agalactiae
MILQIKENDYISAHILVKVGKYKLLKLPHKFTNEITVRKEY

SEQ ID NO: 4835 - protein, 858 aa, Streptococcus agalactiae
ATGTTTATATATGGCCCTATTTTTAGGGAATTTCGACTTAATCGACAGTTTTCTCTTAAACAGGTTGCTTCAAATGAACTTTCTGTTTCTCAGTTATCACGATTTGAGAGGGGTGAATCAGATTTATCATTAACAAAATTTTTAGGGGCTTTAGAGGCAATTGATTTATCAATTAGCGAATTTATGTATAGAGTAAATAAATATCAAAAATCTGATCAGATATCTTTAATGTCTCAGATGGCTCAATATCATTATCAAAGAGACGTAGCTGGGTTAGAAAAGATGATTTCTGTGGAAGAAGGTAAACTAAAAAAGGATAGTTCAGATATACGTTGTCGTTTAAACATAGTTCTTTTTAGAGGAATGATATGTGAATGTGACTCCTCGAGAAAAATGTCGGAAGAAGACCTTTGCTTTTTGTCGGATTACCTCTTTCAAAAAGATAGTTGGGAAATTAGTGACTATATTTTGATTGGAAATCTTTACCGGTATTACAACACAAGGTATATTTGCCAACTTGTTAAAGAGGTTATCAATCAAAAGGAATATTATCGAGATATTTATACAAACCGCAATGTTGTCGAAGCAACCCTCCTAAATGTGGTAGAGACACTAATAGAACGGCGCGCTCTAGAAGAAGCAACATTTTTTGTAGAGAAAGTTGAAGCACTTTTAAATAATGAGCGGAATGCTTATCACCGTATTATTTTACTCTATGAAAAAGGATTTCTTGCCTATGCTAAAGGGGATAGTCGAGGAATACAAAGCATGAAGCAAGCTATTTTTTGCTTCCAAGCAATTGGTTCTAAACATCATGTTGAAAATTTTCAGGAACACTTTAATAGGGTAACAAGATTA

SEQ ID NO: 4836 - protein, 286 aa, Streptococcus agalactiae
MFIYGPIFREFRLNRQFSLKQVASNELSVSQLSRFERGESDLSLTKFLGALEAIDLSISEFMYRVNKYQKSDQISLMSQMAQYHYQRDVAGLEKMISVEEGKLKKDSSDIRCRLNIVLFRGMICECDSSRKMSEEDLCFLSDYLFQKDSWEISDYILIGNLYRYYNTRYICQLVKEVINQKEYYRDIYTNRNVVEATLLNVVETLIERRALEEATFFVEKVEALLNNERNAYHRIILLYEKGFLAYAKGDSRGIQSMKQAIFCFQAIGSKHHVENFQEHFNRVTRL

SEQ ID NO: 4837 - protein, 582 aa, Streptococcus agalactiae
ATGAATATTAATGGTATAAAATTACTATCTAGTCGAGCAGTCAGTAAACTTGGTGATGTGCTTTATGATTATGGAAATAGTACTTGGATTGCTTCGATGGGTGGTCTAGGACAAAAGATTTTAGGTATTTATCAGATAGTAGAGTTGTTGGTTTCTATTGTCCTCAACCCTTTTGGAGGCGCCTTAGCTGATCGCTTTCAACGAAGAAAAATTTTACTAATAACAGATGCTATCTGTGCTATCATGTGTTTCTTACTTTCTTTTATTGGAGATGATAAAGTAATGGTGTATGGTCTAATAGTTGCTAATGCTATCTTAGCGGTTTCCAATGCTTTTTCTTCTCCGGCTTATAAATCTTATATTCCTGAAATAGTAGATAAAGCTGATATCATTACCTATAATGCTAATCTGGAAACCATTGTGCAAATTATTAGTGTAAGTTCCCCTGTTTTAGGTTTCCTTATTTTTAATAATTTTGGTATTAGGATTACTTTAATTGTTGATGCGATTACTTTTTTGATCTCTTTCCTGTTTCTTTATGCTATTAAAGTGGAAGGGTACAGCTTTCAAAACAAGAAAAGG

SEQ ID NO: 4838 - protein, 194 aa, Streptococcus agalactiae
MNINGIKLLSSRAVSKLGDVLYDYGNSTWIASMGGLGQKILGIYQIVELLVSIVLNPFGGALADRFQRRKILLITDAICAIMCFLLSFIGDDKVMVYGLIVANAILAVSNAFSSPAYKSYIPEIVDKADIITYNANLETIVQIISVSSPVLGFLIFNNFGIRITLIVDAITFLISFLFLYAIKVEGYSFQNKKR

SEQ ID NO: 4839 - protein, 333 aa, Streptococcus agalactiae
ATGTTTTTTCTAATTATTGCTGCTTTATTAAACACTTTCCTAGCAATGTTCAATTATCTTTTACCTTTTACTAACTCCCTATTGAAAACTTCAGGTGCTTATGCAACAATACTTAGTATATCAGCTATCGGATCAATTATTGGAGCGCTTATTGCTAGAAAAATTAAATCTAGTATTAATTCTATGCTATCTATGCTAGTATTCAGTAGTTTGGGAGTCATAGTTATGGGATTCCCATCTCTATTTGAATTACCGATATGGATATCTTACAGTGGTAGTTTTCTTTTTAATAGTCTTCTGACAATGTTTAATATTCATTTTTTCAGTCAGGTA

SEQ ID NO: 4840 - protein, 111 aa, Streptococcus agalactiae
MFFLIIAALLNTFLAMFNYLLPFTNSLLKTSGAYATILSISAIGSIIGALIARKIKSSINSMLSMLVFSSLGVIVMGFPSLFELPIWISYSGSFLFNSLLTMFNIHFFSQV

SEQ ID NO: 4841 - protein, 171 aa, Streptococcus agalactiae
ATGGGGCGTGTGATGTCGACTATATTTACTATTGCTATTATGTTTATGCCTATAGGAACACTATTTATGACTATCTTTTCATTTGCCTTATCAAATGTTAGCTTTATTGTTATAGGATGTGCCATTGCTATATTGGGAGGATTAGGATTTAGCTATAGTAAAAAACAATTT

SEQ ID NO: 4842 - protein, 57 aa, Streptococcus agalactiae
MGRVMSTIFTIAIMFMPIGTLFMTIFSFALSNVSFIVIGCAIAILGGLGFSYSKKQF

SEQ ID NO: 4843 - protein, 648 aa, Streptococcus agalactiae
ATGAAACAAATGAATACTTTCCAACAATTTATCTACTACTTCCAACATAATGGTAGTTATATCTTAGAACAATTTATCCACCACTTTTTAATTTCAATTTACGGCGTTATTTTAGCTGCAATTGTTGGTATCCCTCTAGGTATCTTCATCGCTAGACGTGGTAAAATTAAAACCTTTGTTATGGGAATCGCAAATGTCATCCAAACCATTCCTTCTTTAGCTATGATCTCTATCATTATGTTAGGTCTAGGGCTAGGTATTAAAACAGTAGTTGCAACTGTCTTTCTTTATTCTCTTCTGCCAATCATCACAAATACTTACACTGGTATTAGAAATGTTGACTCCGACTTACTAGATGCTGCTAAAGGAATGGGCATGACTAAGCGTCAACGTTTATTTATGGTTGAGTTACCACTATCTATTTCTGTTATCATGGCTGGACTTAGAAATGCCCTTGTTGTAGCAATTGGTATTACAGCCATTGGTGCTTTCGTCGGTGGAGGCGGACTTGGAGATATCATCATAAGAGGAACTAATGCAACAAATGGTGGTGCTATTATCTTAGCAGGATCTCTTCCAACAGCCCTTATGGCAATTTTCTCTGATTTAATCCTAGGCGGTATCCAACGCATGCTTGAACCAAGAAAA

SEQ ID NO: 4844 - protein, 216 aa, Streptococcus agalactiae
MKQMNTFQQFIYYFQHNGSYILEQFIHHFLISIYGVILAAIVGIPLGIFIARRGKIKTFVMGIANVIQTIPSLAMISIIMLGLGLGIKTVVATVFLYSLLPIITNTYTGIRNVDSDLLDAAKGMGMTKRQRLFMVELPLSISVIMAGLRNALVVAIGITAIGAFVGGGGLGDIIIRGTNATNGGAIILAGSLPTALMAIFSDLILGGIQRMLEPRK

SEQ ID NO: 4845 - protein, 924 aa, Streptococcus agalactiae
ATGCTTAAAAAATCGCACTTTTTACAGATATTTACACTTTGCTTAGCCCTCTTAACGATTTCTGGTTGTCAATTAACCGATACTAAAAAACCTGGTCATACCACAATTAAGGTTGCTGCCCAAAGTTCTACAGAGTCTAGTATCATGGCAAATATTGTCACCGAATTAATTCATCACGAATTAGGATACAACACAACTTTAATAAGCAATCTTGGTTCCTCTACGGTTACTCACCAAGCTTTGCTCCGTGGTGATGCTGACATTGCTGCCACACGTTATACAGGAACAGACATCACAGGAACTCTTGGCTTAAAAGCTGTTAAAGACCCTAAAGAAGCTTCTAAGATTGTAAAAACTGAATTCCAAAAACGCTACAATCAAACTTGGTATCCTACTTATGGTTTTTCTGATACTTATGCATTCATGGTTACTAAAGAGTTTGCCAGACAGAATAAAATCACCAAGATCTCTGATCTCAAAAAGTTATCAACAACTATGAAGGCAGGGGTTGATAGTTCATGGATGAATCGCGAGGGAGATGGATACACTGATTTCGCTAAAACATACGGTTTTGAATTTTCACATATTTACCCTATGCAAATTGGCTTAGTCTATGATGCAGTTGAAAGTAACAAAATGCAATCTGTATTAGGCTACTCCACTGACGGTCGTATTTCGAGCTATGATTTAGAAATTTTAAGGGATGATAAAAAATTCTTTCCTCCTTATGAAGCCTCTATGGTTGTCAACAATTCTATCATCAAAAAAGATCCTAAACTAAAAAAATTACTCCATCGACTCGATGGTAAAATCAATTTAAAAACGATGCAAAACCTTAATTATATGGTAGATGATAAACTTTTAGAACCTTCAGTTGTTGCCAAACAATTTTTAGAAAAAAACCATTATTTTAGAGGAGATAAA

SEQ ID NO: 4846 - protein, 308 aa, Streptococcus agalactiae
MLKKSHFLQIFTLCLALLTISGCQLTDTKKPGHTTIKVAAQSSTESSIMANIVTELIHHELGYNTTLISNLGSSTVTHQALLRGDADIAATRYTGTDITGTLGLKAVKDPKEASKIVKTEFQKRYNQTWYPTYGFSDTYAFMVTKEFARQNKITKISDLKKLSTTMKAGVDSSWMNREGDGYTDFAKTYGFEFSHIYPMQIGLVYDAVESNKMQSVLGYSTDGRISSYDLEILRDDKKFFPPYEASMVVNNSIIKKDPKLKKLLHRLDGKINLKTMQNLNYMVDDKLLEPSVVAKQFLEKNHYFRGDK

SEQ ID NO: 4847 - protein, 633 aa, Streptococcus agalactiae
ATGGTCAATTTCTTATCACAGTATGGCATGCAAATATTAGTAAAAACATGGGAACAAGTCTATATCTCATTTTTTGCTATAGCACTTGGGATTGCAATTGCTGTTCCATTGGGTGTGGTCTTAACACGTTTTCCCAAAGTAGCCAAAATTATCATTGCTATAGCTAGCATGCTACAAACTATACCAAGTTTAGCCTTATTAGCTTTAATGATTCCATTGTTTGGAATTGGAAAAGTCCCAGCTATCGTTGCTTTATTTATTTATTCCTTGCTTCCTATACTAAGGAATACTTATATAGGTATGAATAATGTCAATCCAACACTTAAAGATTGTGCTAAAGGGATGGGAATGAAACCTATTCAATCTATATTTCAAGTTGAGTTACCTTTAGCTACTCCAATTATTATGGCTGGTATTCGCTTGTCTACTATTTATGTTATTGCTTGGGCTACATTAGCTTCTTATATAGGTGCAGGTGGACTTGGTGATCTCATTTTTAGCGGGTTAAATCTTTTTCAGCCCAAATTAATTCTAGGGGGCACAATTCCTGTTATTATCCTGTCACTTATTATAGATTATCTTTTAGGATTACTGGAAACAGCTCTAACGCCCAGAACAACAAGAAGGGAGGCT

SEQ ID NO: 4848 - protein, 211 aa, Streptococcus agalactiae
MVNFLSQYGMQILVKTWEQVYISFFAIALGIAIAVPLGVVLTRFPKVAKIIIAIASMLQTIPSLALLALMIPLFGIGKVPAIVALFIYSLLPILRNTYIGMNNVNPTLKDCAKGMGMKPIQSIFQVELPLATPIIMAGIRLSTIYVIAWATLASYIGAGGLGDLIFSGLNLFQPKLILGGTIPVIILSLIIDYLLGLLETALTPRTTRREA

SEQ ID NO: 4849 - protein, 1143 aa, Streptococcus agalactiae
ATGGGCCAAGAACCTATCATCGAATATCAAAATATCAATAAAGTGTATGGGGAAAATGTTGCGGTTGAAGATATTAACCTTAAAATTTACCCTGGTGATTTCGTTTGTTTCATCGGTACGAGTGGATCAGGTAAAACAACATTAATGCGTATGGTTAACCATATGTTAAAACCAACAAATGGTACTCTATTATTTAAGGGAAAAGATATTTCTACTATTAACCCCATTGAATTAAGACGCAGAATTGGATATGTTATCCAAAACATTGGTTTAATGCCTCATATGACCATTTACGAAAATATAGTTCTTGTACCAAAATTATTGAAATGGTCAGAAGAAGCTAAAAGAGCTAAAGCAAGGGAACTTATTAAATTAGTTGAATTACCCGAAGAATATTTGGATCGCTACCCTAGTGAGTTGTCTGGCGGTCAGCAACAACGTATCGGTGTCATTCGCGCTCTTGCAGCAGACCAAGATATTATTTTAATGGATGAGCCTTTTGGAGCTCTGGATCCTATTACTAGAGAAGGTATTCAAGACTTAGTCAAGTCTCTTCAGGAAGAAATGGGGAAAACTATCATCTTAGTTACTCATGATATGGATGAAGCCCTCAAGTTAGCAACAAAAATTATTGTTATGGACAATGGTAAAATGGTCCAAGAAGGGACACCCAATGATCTCTTACATCATCCTGCTACCAGTTTCGTTGAACAAATGATTGGGGAAGAGCGTCTTCTTCATGCGCAGGCTGATATTACCCCTGTTAAACAGATAATGTTAAATAATCCTGTTTCAATAACTGCTGAAAAAACACTAACTGAAGCTATTACACTAATGCGCCAAAAACGCGTTGACTCACTTCTAGTAACCGATAACGGTAAATTAATTGGTTTTATTGACTTAGAATCTCTAAGCAGTAAATATAAGAAAGACCGACTTGTTTCTGATATCTTAAAACATACTGATTTTTATGTTATGGAAGACGACTTACTTAGAAATACTGCTGAGCGTATTTTAAAACGTGGTTTAAAATACGCTCCAGTTGTTGACCATGAGAATAACCTAAAGGGCATTGTTACTCGTGCATCCCTAGTTGATATGTTATACGATATTATTTGGGGCGATACTGAAACGGAGGATCAA

SEQ ID NO: 4850 - protein, 381 aa, Streptococcus agalactiae
MGQEPIIEYQNINKVYGENVAVEDINLKIYPGDFVCFIGTSGSGKTTLMRMVNHMLKPTNGTLLFKGKDISTINPIELRRRIGYVIQNIGLMPHMTIYENIVLVPKLLKWSEEAKRAKARELIKLVELPEEYLDRYPSELSGGQQQRIGVIRALAADQDIILMDEPFGALDPITREGIQDLVKSLQEEMGKTIILVTHDMDEALKLATKIIVMDNGKMVQEGTPNDLLHHPATSFVEQMIGEERLLHAQADITPVKQIMLNNPVSITAEKTLTEAITLMRQKRVDSLLVTDNGKLIGFIDLESLSSKYKKDRLVSDILKHTDFYVMEDDLLRNTAERILKRGLKYAPVVDHENNLKGIVTRASLVDMLYDIIWGDTETEDQ

SEQ ID NO: 4851 - protein, 531 aa, Streptococcus agalactiae
ATGAGATTACCTAAAGAAGGCGACTTTATTACAATTCAAAGTTACAAACATGATGGTAGTTTACACCGGACTTGGCGTGACACCATGGTATTAAAAACAACCGAAAATGCCCTCATTGGTGTTAATGATCATACTTTAGTAACAGAAAATGATGGTCGACGCTGGGTGACACGAGAGCCTGCAATAGTATACTTTCATAAAAAATACTGGTTTAACATTATCGCTATGATACGTGAAACTGGTGTCTCCTACTATTGTAATCTAGCAAGTCCGTATATCTTAGACCCTGAAGCACTCAAGTATATTGACTATGACCTTGATGTCAAAGTATTTGCTGATGGTGAAAAAAGACTACTAGATGTGGACGAATATGAACAGCATAAAGCTCAGATGAACTATCCTACCGATATTGATTATATATTAAAGGAAAATGTAAAAATATTGGTAGAATGGATAAATGAGAATAAAGGCCCCTTTTCATCATCATATATCAATATCTGGTATAAACGGTACCTTGAATTGAAAAAGCGC

SEQ ID NO: 4852 - protein, 177 aa, Streptococcus agalactiae; identical to SEQ ID NO: 838

SEQ ID NO: 4853 - protein, 774 aa, Streptococcus agalactiae
ATGAAAATAACCAAAATCGAAAAGAAAAAAAGACTTTACACTCTAGAGCTAGACAATACCGAAAATTTATATATAACAGAAGATACTATCGTTCATTTTATGTTAAGTAAAGGGATGGTAATTAATGCCGAGAAACTTGAAAATATTAAAAAATTTGCCCAACTATCATACGGTAAAAATCTAGGTCTTTATTATATTTCTTTCAAGCAGAGAACCGAGAAAGAAGTTATTAAATATCTTCAACAACATGATATTGATTCTAAAATTATTCCACAAATTATTGATAATCTAAAAAGTGAGAATTGGATAAACGATAAAAACTACGTGCAATCTTTCATACAGCAAAATCTAAATACTGGCGATAAGGGGCCATACGTGATAAAACAAAAATTATTGCAAAAAGGTATCAAAAGTAAAATAATTGAATCTGAACTTCAAGCTATAAACTTTCAAGACTTAGCCTCCAAAATAAGCCAAAAACTCTATAAAAAATATCAAAGCAAACTTCCACTAAAAGCATTAAAAGATAAATTGATGCAGAGCTTAACTACAAAAGGATTTGATTATCAGATAGCGCACACCGTAATTCAAAACCTTGAAATTGAAAAAGATCAAGAACTTGAAGAAGACCTCATTTATAAAGAATTAGATAAACAATACCAAAAATTATCAAAAAAATATGACCAGTATGAATTAAAGCAACGTATAATCAATGCCTTAATGCGTAAAGGATACCAGTACGAAGATATCAAAAGTGCTTTAAGAGAATATTTA

SEQ ID NO: 4854 - protein, 258 aa, Streptococcus agalactiae
MKITKIEKKKRLYTLELDNTENLYITEDTIVHFMLSKGMVINAEKLENIKKFAQLSYGKNLGLYYISFKQRTEKEVIKYLQQHDIDSKIIPQIIDNLKSENWINDKNYVQSFIQQNLNTGDKGPYVIKQKLLQKGIKSKIIESELQAINFQDLASKISQKLYKKYQSKLPLKALKDKLMQSLTTKGFDYQIAHTVIQNLEIEKDQELEEDLIYKELDKQYQKLSKKYDQYELKQRIINALMRKGYQYEDIKSALREYL

SEQ ID NO: 4855 - protein, 1353 aa, Streptococcus agalactiae
ATGAATGTGGTTTTAAAACAGCGAATTCCTTTAAAAATTAAACGAATGGGAATTAATGGTGAAGGAATAGGTTTTTATAAAAAAACACTAATCTTTGTTCCAGGGGCTCTTAAGGGAGAAGAGGTGTTTTGTCAGATTTCTTCTGTTAGACGTAATTTTGCAGAAGCTAAACTGTTAAAGATAAATAAAAAGTCTAAAAATAGGGTAGATCCCGCTTGTTCTATTTATAAAGAATGTGGGGGATGCCAAATAATGCACCTTCAATATGATAAGCAGCTAGAGTTTAAAACGGATGTTATTCGACAGGCTCTAATGAAATTTAAACCAGAGGGATATGAGAATTATGAAATCCGTAAAACGATAGGTATGCCGGAACCTGAACACTATCGTGCTAAATTACAATTTCAAGTGCGTTCGTTTGGAGGGAATGTGAGGGCAGGTTTATATGCACAAGGGACACATCGATTGATTGATATCAAAGATTGTTTAGTGCAAGATAGGCTTACTCAGGAAATGATAAATCGAGTTGCAGAACTTTTAGGAAAATATAAATTGCCTATTTATAATGAACGTAAAATAGCTGGTGTCCGTACTGTTATGATTCGACGAGCACAAGCGAGTGGAGAGATTCAACTGATCTTTATCACAAGTAAAAGACTTGATTTTGATGATGTTGTTATTGAATTAGTTCGAGAGTTTCCTGAGTTAAAGACAGTTGCTGTAAATATCAACGCTAGTAAAACAAGTGATATCTATGGTCAAATAACAGAAGTTATTTGGGGTCAAGAATCTATCAATGAAGAAGTATTAGATTATGGTTTTTCGTTATCACCACGTGCTTTTTATCAACTTAATCCTAAACAAACACAAATTTTATATAGTGAGGCAGTTAATGCCTTAGATGTGAAGGAAGATGATGATTTAATTGACGCTTATTGTGGAGTAGGAACGATTGGACTTGCTTTTGCTGGAAAAGTTAAAAGTGTTCGTGGAATGGATATTATCCCTGAGGCTATTCAGGATGCTAAAGAGAACGCACTTCATATGGGTTTTACTAATACACATTACGAAGCTGGAAAGGCAGAGGATATTATCCCTAGGTGGTATAGTGAGGGATTTCGCGCTAATGCGTTAATCGTGGATCCTCCTCGCACAGGTTTAGATGATAAATTGCTAAATACTATACTAAAAATGCCTCCAGAAAAAATGGTTTACGTTTCTTGTAATACATCCACGCTTGCTAGAGACTTAGTAACATTAACAAAAGTATACCATGTCCACTACATCCAATCCGTTGACATGTTTCCACATACAGCAAGGACCGAGGCTGTAGTGAAACTACAACGTAAGGAA

SEQ ID NO: 4856 - protein, 451 aa, Streptococcus agalactiae
MNVVLKQRIPLKIKRMGINGEGIGFYKKTLIFVPGALKGEEVFCQISSVRRNFAEAKLLKINKKSKNRVDPACSIYKECGGCQIMHLQYDKQLEFKTDVIRQALMKFKPEGYENYEIRKTIGMPEPEHYRAKLQFQVRSFGGNVRAGLYAQGTHRLIDIKDCLVQDRLTQEMINRVAELLGKYKLPIYNERKIAGVRTVMIRRAQASGEIQLIFITSKRLDFDDVVIELVREFPELKTVAVNINASKTSDIYGQITEVIWGQESINEEVLDYGFSLSPRAFYQLNPKQTQILYSEAVNALDVKEDDDLIDAYCGVGTIGLAFAGKVKSVRGMDIIPEAIQDAKENALHMGFTNTHYEAGKAEDIIPRWYSEGFRANALIVDPPRTGLDDKLLNTILKMPPEKMVYVSCNTSTLARDLVTLTKVYHVHYIQSVDMFPHTARTEAVVKLQRKE

SEQ ID NO: 4857 - protein, 762 aa, Streptococcus agalactiae
ATGATAATAAATTCATTCGATAATAGTAGAAAAGCGATTATTAATCCTGAAGATATTAATTCACCAATAAAAGGTTTTCCAAAGACTGTTATTACCTGTTTTGCGCGGGAGACTTTCAATCGTATTTTAGAAGAATTGCCTCATCGTGAAATTGCTAGAACTAGTGTAGCAAACTTAGAAATTCCCATTTATGAATTAGAATTTAAAGGACAAAAGATTGGCTTTTTCAATGCTTATGTTGGTGCTTCAGCTTGCGTAGCAATCTTGGAAGATATTATAGTGTTTGGAATGGAAAATTTAATTGTTTTTGGAACATGTGGCGTCCTTGATTCGTCAATTGAGGAGACATCCATTATTATTCCAAGAAGTGCTATTAGGGATGAAGGGACATCATTTCATTATTCGGAAGCAAGTTCTGAAATTGCAGTAAACACAAAATTTCATGAAGAGTTTAAATCTTTTTTAGATCGTCAAGCTGTTTCTTACACTGAAGGAAAAGTTTGGACAACGGATGGTATTTACCGTGAGACAGTTGATAAAATGTTGGAACATAAACGGAATGGAGCAATCTGTGTGGATATGGAATGTTCAGCAATTGCAGCTTTATCTAAGTTTCGAAATATTAATCATTTTCAATTTTTTTACTCTGCGGATAATTTAGATGCAGAAGTATGGGAAGCAAGATCTTTAGGAAATAGCGAGGATTTAGAAAAGAAAGATAAAATTGCTTATATTGCCATGGAGTTTGCTATAGAGACTTTT

SEQ ID NO: 4858 - protein, 254 aa, Streptococcus agalactiae
MIINSFDNSRKAIINPEDINSPIKGFPKTVITCFARETFNRILEELPHREIARTSVANLEIPIYELEFKGQKIGFFNAYVGASACVAILEDIIVFGMENLIVFGTCGVLDSSIEETSIIIPRSAIRDEGTSFHYSEASSEIAVNTKFHEEFKSFLDRQAVSYTEGKVWTTDGIYRETVDKMLEHKRNGAICVDMECSAIAALSKFRNINHFQFFYSADNLDAEVWEARSLGNSEDLEKKDKIAYIAMEFAIETF

SEQ ID NO: 4859 - protein, 327 aa, Streptococcus agalactiae
ATGTGGAATGTAAAAACTTTTAATAATTTAACTACACATGAGTTGTTTCAAATATATAAATTAAGAGTATCTGTATTTGTGGTTGAACAAGATTGTCCTTATCAAGAGGTTGATGATGAAGATTTGATTTGTCTGCATGGGATGAATTGGGTAGATGGTCAATTGGCGGCTTATTATAGATTGATACCAGAAGATGATAAGGTGCATTTGGGACGTGTGATTGTTAATCCAGACTTTAGAAAAAAGGGATTAGGAAATCAATTAGTGGAATATGCGATTAAATTTAGTGAGGCAAATTACCCTAATAAACCTAATATGGTTTTATCA

SEQ ID NO: 4860 - protein, 109 aa, Streptococcus agalactiae
MWNVKTFNNLTTHELFQIYKLRVSVFVVEQDCPYQEVDDEDLICLHGMNWVDGQLAAYYRLIPEDDKVHLGRVIVNPDFRKKGLGNQLVEYAIKFSEANYPNKPNMVLS

SEQ ID NO: 4861 - protein, 2013 aa, Streptococcus agalactiae
GTGGATAAACATCACTCAAGAAAGGCTATTTTAAAGTTAACACTTATAACAACTAGTATTTTATTAATGCATAGCAATCAAGTGAATGCAGAGGAGCAAGAATTAAAAAACCAAGAGCAATCACCTGTAATTGCTAATGTTGCTCAACAGCCATCGCCATCAGTAACTACTAATATTGTTGAAAAAACATCTGTAACAGCTGCTTCTGCTAGTAATACAGCGAAAGAAATGGGTGATACATCTGTAAAAAATGATAAAACAGAAGATGAATTATTAGAAGAGTTATCTAAAAACCTTGATACGTCTAATTGGGGGGCTGATCTTGAAGAAGAATATCCCTCTAAACCAGAGACAACCAACAATAAAGAAAACAATGTAGTAACAAATGCTTCAACTGCAATAGCACAGAAAGTTCCCTCAGCGTATGAAGAGGTGAAGCCAGAAAGCAAGTCATCGCTTGCTGTTCTTGATACATCTAAAATAACAAAATTACAAGCCACAACCCAAAGAGGAAAGGGAAATGTAGTAGCTATTATTGATACTGGCTTTGATATTAACCATGATATTTTTCGTTTAGATAGCCCAAAAGATGATAAGCACAGCTTTAAAACTAAGGCAGAATTTGAGGAATTAAAAGCAAAACATAATATCACTTATGGGAAATGGGTTAACGATAAGATTGTTTTTGCACATAACTACGCCAACAATACAGAAACGGTGGCTGATATTGCAGCAGCTATGAAAGATGGTTATGGTTCAGAAGCAAAGAATATTTCGCATGGTACACACGTTGCTGGTATTTTTGTAGGTAATAGTAAACGTCCAGCAATCAATGGTCTTCTTTTAGAAGGTGCAGCGCCAAATGCTCAAGTCTTATTAATGCGTATTCCAGATAAAATTGATTCGGACAAATTTGGAGAAGCATATGCTAAAGCAATCACAGACGCTGTTAATCTAGGAGCAAAAACGATTAATATGAGCCTTGGAAAAACAGCAGATTCTTTAATTGCTCTCAATGATAAAGTTAAATTAGCACTTAAATTAGCTTCTGAGAAGGGCGTTGCAGTTGTTGTGGCTGCCGGAAATGAAGGTGCATTTGGTATGGATTATAGCAAACCATTATCAACTAATCCTGACTACGGTACGGTTAATAGTCCAGCTATTTCTGAAGATACTTTGAGTGTTGCTAGCTATGAATCACATAAAACTATCAGTGAGGTCGTTGAAACAACTATTGAAGGTAAGTTAGTTAAGTTGCCGATTGTGACTTCTAAACCTTTTGACAAAGGTAAGGCCTACGATGTGGTTTATGCCAATTATGGTGCAAAAAAAGACTTTGAAGGTAAGGACTTTAAAGGTAAGATTGCATTAATTGAGCGTGGTGGTGGACTTGATTTTATGACTAAAATCACTCATGCTACAAATGCAGGTGTTATTGGTATCGTTATTTTTAACGATCAAGAAAAACGTGGAAATTTTCTAATTCCTTACCGTGAATTACCTGTGGGGGTTATTAGTAAAGTAGATGGCGAGCGTATAAAAAATACTTCAAGTCAGTTAACATTTAACCAGAGTTTTGAAGTAGTTGATAGCCAAGGTGGCAATCGTATACTGGAACAATCAAGTTGGGGCGTGACAGCTGAAGGAGCAATCAAGCCTGATGTAACAGCTTCTGGCTTTGAAATTTATTCTTTAACCTATAATAATCAATACCAAACAATGTCTGGTACAAGTATGGCTTCACCACATGTTGCAGGATTAATGACAATGCTTCAAAGTCATTTGGCTGAGAAATATAAAGGGATGAATTTAGATTCTAAAAAATTGCTAGAATTGTCTAAAAACATCCTCATGAGCTCAGCAACAGCATTATATAGTGAAGAGGATAAGGCGTTTTATTCACCACGTCAGCAAGGTGCAGGTGTAGTTGATGCTGAAAAAGCTATCCAAGCTCAATATTATGTTACTGGAAACGATGGCAAAGCTAAAATTAATCTCAAACGAGTGGGAGAT

SEQ ID NO: 4862 - protein, 671 aa, Streptococcus agalactiae
MDKHHSRKAILKLTLITTSILLMHSNQVNAEEQELKNQEQSPVIANVAQQPSPSVTTNIVEKTSVTAASASNTAKEMGDTSVKNDKTEDELLEELSKNLDTSNWGADLEEEYPSKPETTNNKENNVVTNASTAIAQKVPSAYEEVKPESKSSLAVLDTSKITKLQATTQRGKGNVVAIIDTGFDINHDIFRLDSPKDDKHSFKTKAEFEELKAKHNITYGKWVNDKIVFAHNYANNTETVADIAAAMKDGYGSEAKNISHGTHVAGIFVGNSKRPAINGLLLEGAAPNAQVLLMRIPDKIDSDKFGEAYAKAITDAVNLGAKTINMSLGKTADSLIALNDKVKLALKLASEKGVAVVVAAGNEGAFGMDYSKPLSTNPDYGTVNSPAISEDTLSVASYESHKTISEVVETTIEGKLVKLPIVTSKPFDKGKAYDVVYANYGAKKDFEGKDFKGKIALIERGGGLDFMTKITHATNAGVIGIVIFNDQEKRGNFLIPYRELPVGVISKVDGERIKNTSSQLTFNQSFEVVDSQGGNRILEQSSWGVTAEGAIKPDVTASGFEIYSLTYNNQYQTMSGTSMASPHVAGLMTMLQSHLAEKYKGMNLDSKKLLELSKNILMSSATALYSEEDKAFYSPRQQGAGVVDAEKAIQAQYYVTGNDGKAKINLKRVGD

SEQ ID NO: 4863 - protein, 800 aa, Streptococcus agalactiae
TTGTATTATCAAGTTAATGTAGCAACAGAACAAGTAAATAAAGGTAAATTTGCCCTTAAACCACAAGCTTTGCTAGATACTAATTGGCAGAAAGTAATTCTTCGTGATAAAGAAACACAAGTTCGATTTACTATTGATGCTAGTCAATTTAGTCAGAAATTAAAAGAACAGATGGCAAATGGTTATTTCTTAGAAGGCTTTGTACGTTTTAAAGAAGCCAAGGATAGTAATCAGGAGTTAATGAGTATTCCTTTTGTAGGATTTAATGGTGATTTTGCGAACTTACAAGCACTTGAAACACCGATTTATAAGACGCTTTCTAAAGGTAGTTTCTACTATAAACCAAATGATACAACTCATAAAGACCAATTGGAGTACAATGAATCAGCTCCTTTTGAAAGCAACAACTATACTGCCTTGTTAACACAATCAGCGTCTTGGGGTTATGTTGATTATGTCAAAAATGGTGGGGAGTTAGAATTAGCACCGGAGAGTCCAAAAAGAATTATTTTAGGAACTTTTGAGAATAAGGTTGAGGATAAAACAATTCATCTTTTGGAAAGAGATGCAGCGAATAATCCATATTTTGCCATTTCTCCAAATAAAGATGGAAATAGGGACGAAATCACTCCCCAAGCAACTTTCTTAAGAAATGTAAGGATATTTCTGCTCAAGTTCTAGATCAAAATGGAAATGTTATTTGGCAAAGTAAGTTTTTACCATCTTATCGTAAAAATTTCCATAATAATCCAAAGCAAGGTGATGGTCATTATCGTATGGATGCCCTTCAGTGGAGTGGT

SEQ ID NO: 4864 - protein, 267 aa, Streptococcus agalactiae
MYYQVNVATEQVNKGKFALKPQALLDTNWQKVILRDKETQVRFTIDASQFSQKLKEQMANGYFLEGFVRFKEAKDSNQELMSIPFVGFNGDFANLQALETPIYKTLSKGSFYYKPNDTTHKDQLEYNESAPFESNNYTALLTQSASWGYVDYVKNGGELELAPESPKRIILGTFENKVEDKTIHLLERDAANNPYFAISPNKDGNRDEITPQATFLRNVKDISAQVLDQNGNVIWQSKFLPSYRKNFHNNPKQGDGHYRMDALQWSG

SEQ ID NO: 4865 - protein, 558 aa, Streptococcus agalactiae
TTGAATAAATTTTTTTTAGAATCAGAGAGACTTATTATAAGGCCACTAGAAGAAAGTGATTATGATAGTTGGTATACTAGTTTTATGAATCGTGGACCATCTTTAACTCCATTTGATGATGGGATACTTGATATGTCTATGTGTGACATTAATTGGTTTAAAAATTTAGTAAATTTACAAAGGAAAGAATGGGAAAGTGACATAGTATATATATTTGGTGTTTTTCTAAAAAGCGGTGAGCACGTAGGAATGTTAAATATTGTTACCCTTGCAAGAGCAGATATGCAATGGGGAGAATTGGGATATGTTTTTCATAATCAATTTTGGAGTAATGGCTATGCATTTGAGTCAATCTTGGCATTACTTAATAGTACTTATGAAAAATTAGGTTTTCATCATATTGAAGCACAGATTACTCCTGGGAATGAACGATCGGAAAATTTGGTTAGAAGATTGGGATTAACCTATGAGACAACTCGAAAAGATTTTTCATTTGAGAATGGAAAATGGACAGATAAACTGATTTATAGTATAAATTTACATAATAATAATTTAGAA

SEQ ID NO: 4866 - protein, 186 aa, Streptococcus agalactiae
MNKFFLESERLIIRPLEESDYDSWYTSFMNRGPSLTPFDDGILDMSMCDINWFKNLVNLQRKEWESDIVYIFGVFLKSGEHVGMLNIVTLARADMQWGELGYVFHNQFWSNGYAFESILALLNSTYEKLGFHHIEAQITPGNERSENLVRRLGLTYETTRKDFSFENGKWTDKLIYSINLHNNNLE

SEQ ID NO: 4867 - protein, 576 aa, Streptococcus agalactiae
ATGAGTAATTTGGATATACTATATTGTAAGTTAGCAATGTGCACTACATTACTAACGGAAAGACTACGACTTCAGCCTGTTGATTTATCTAATATAAATGACTTTTTAGAATTTTCATCTGATTCTGAAACCGTATTTTATATGCAACGATATAAAGCCAATACCACAGAAGAAGCACAAATGGTTTTGGCGAATGTCTGTATGAAATCACCATTAGGAATCTATGCGATGATTGAGACAGAATCAAATAAAATGATTGGTATTATAGAATTAGAAATTAGAGATGAGTTTTCAGCAGAATTCGGTTATATATTAAATAAAAATTATAGTGGTAAAGGTTATATGACAGAAGCTTGTTCAAAATTAATGTCAGTTGGTTTTGAATATCTAGACTTGGAAAGAATTTATGCTCGTTTCGACATTAATAATAAAAAGTCTGGAAATGTTATGGAACGTTTAGGTATGAAAAAAGAGGGCGAACTTCGTCATCTTGCAAAAAATCCAAAAGGTGAGTGGAAAACAAGAGCGTATTATTCTATTTTAAAAGAAGAATATTTTAATAAAGTTAATACTAAA

SEQ ID NO: 4868 - protein, 192 aa, Streptococcus agalactiae
MSNLDILYCKLAMCTTLLTERLRLQPVDLSNINDFLEFSSDSETVFYMQRYKANTTEEAQMVLANVCMKSPLGIYAMIETESNKMIGIIELEIRDEFSAEFGYILNKNYSGKGYMTEACSKLMSVGFEYLDLERIYARFDINNKKSGNVMERLGMKKEGELRHLAKNPKGEWKTRAYYSILKEEYFNKVNTK

SEQ ID NO: 4869 - protein, 678 aa, Streptococcus agalactiae
GTGGGTGATGTCGTTGAAAATTTTACGGAAGGTAAAAATCCGAAGATTGATACACTTAATGGGAAAACAGTTAGAATAGAAAAAATAAATCCAGATCATTTTGAAGACTTATTTCAAGTTTATGGAGAATTGTCTACTGAAGATAGTTTAACTTATATATCTTTTAGCAAATTTAATAGTAAGAATGAATTTGATGTCTTTTTCCAAACTCTATTAAAATCAGAAGATCCTTATTATTTAGCTATTGTTGATAATAATACTGGTAAAGCATTAGGGACTTTTTCATTAATGCGTATTGATACAAAAAATAGAGTTGTTGAAATGGGATGGGTGGTTTATTCATCAAAACTAAAACAAACAAGGATAGCAACAGAAGCTCAATATTTGGTTATGAAATATGTTTTTGAAGAACTCTGTTACCGCCGTTATGAGTGGAAATGTGATAGTTTGAATGCACCATCTAATAATTCTGCAAAACGACTTGGTTTTACTTTTGAAGGAACTTTTAGACAAGCTGTCGTATATAAGGGTCGTAACAGAGATACAAATTGGTATTCTATTTTAGATAAAGAGTGGCCAGAGAAAAAAACACGGTTTGAAAAATGGCTAGATGATTCAAACTTTGATGTAAATGGGTATCAAATCAGATCACTATCAAGCATTGAGCAGAAGACAAAA

SEQ ID NO: 4870 - protein, 226 aa, Streptococcus agalactiae
MGDVVENFTEGKNPKIDTLNGKTVRIEKINPDHFEDLFQVYGELSTEDSLTYISFSKFNSKNEFDVFFQTLLKSEDPYYLAIVDNNTGKALGTFSLMRIDTKNRVVEMGWVVYSSKLKQTRIATEAQYLVMKYVFEELCYRRYEWKCDSLNAPSNNSAKRLGFTFEGTFRQAVVYKGRNRDTNWYSILDKEWPEKKTRFEKWLDDSNFDVNGYQIRSLSSIEQKTK

SEQ ID NO: 4871 - protein, 945 aa, Streptococcus agalactiae
ATGATAAAAACAAAGTTTAGTGATCCACTGGAACAATTAGCCAAAAAAAGGAAAAGGAAAACATTATTCAAGACAGTAGTATTGGCATTAATAACTGTACTATTAGTAGTTGGAATAGCTTTTAAAGGATTTACATATTTAACTTCAAAAAATGGTCAAAAAACATATCATAACTTTGAACTACTTTCTGAAATAGCATATCCAAATATTTCCTATGATAGTCTCTATTACCAGCCAAGCGGTCAGTTTACTGGTAAAGTACATGCTGATAGATTTAAAGATATCGATGGGGTTCAAATTCCATATTCTAGTTTTGAAGAAAATTATAGTATCTCAGGTACTTTTGGCACAAATGCTGATGAAAAATCAGAAAAGAATGGCTTGTATGATCGAGGTACTAGACAAAAAGTTCCACAATTTTTCAATAAAAATGTTAAGTATAAAAAAGGAGAAGCCAAAACAACTCCAACAAATGATTTAAAATATGTAAATAAATTGAATAATGATCTTATTGAAATTGCAATAACTTTTGATAAGTCCTATAGTTACAAAGAAATAAAAACAATGATACCAAATAATATAAAACAAAATTGGTTATGGATAGGTACAAGCACAGAATTAGATACATCATATTGGCCAACAAAGTATCAATTCGGTACAGATCCTGAAACTTTGAATACACCACAAATATTCATAGATAAAATAAAAGAAAACTTAAAAGGTAACTCAAAAGTATACTTTAATAATATAAATATCTACTCAGATTTAGAAAAGTATGCCAAAAAATACGACAAGGTAAATAATAGCGACAAATTAAAATTTTCGGGAATAATATTAACAGGCAAAGCCGAAAACTTTAAACAACTTAAAGAAAAAGAATGGGTACATGCTTCAAGTATAGGGGCAAACATAGAATATAAGCCCTATTATAAATTAGATAAAGAA

SEQ ID NO: 4872 - protein, 315 aa, Streptococcus agalactiae; identical to SEQ ID NO: 524

SEQ ID NO: 4873 - protein, 489 aa, Streptococcus agalactiae
ATGTCAATTTTAGATGACTATAAAAAAGAATTACTAGTTATTTCACATCAAATAATAGCTTACCTTATTAAGTCAGGTGTTAATCCTAGTCAAGCACAGGATGTTACTCAAGACGTCTTTTTACAAATACTAGAATCTGATTTCTCCCTTCCACTTGACAAAATAAAAGCTTGGATGTATCGTACTACAATTAGGAGGTATATTGATCTTTATCGAAGAAATAAACGCTATAACGAAATCCTGCAAAAAGAATTCTTTATAGAAAATAATTTGTATTACACCGAATCAGAGAAGTTTTTTGAATTACATGAAGCAATATTACACTTGAAAAAAGATTATCAAACTTTAATAGATTTATATTATTTTAATGATTTTTCAATTAAAGAAATATCTGAAATTACTGGACAATCACAAAGTACAATTAAAATAAGACTTATGCGAGCTAGAAGAGAAGTTAAAAAATATTTAGAAAAGGATAATTTTAAAATA

SEQ ID NO: 4874 - protein, 163 aa, Streptococcus agalactiae
MSILDDYKKELLVISHQIIAYLIKSGVNPSQAQDVTQDVFLQILESDFSLPLDKIKAWMYRTTIRRYIDLYRRNKRYNEILQKEFFIENNLYYTESEKFFELHEAILHLKKDYQTLIDLYYFNDFSIKEISEITGQSQSTIKIRLMRARREVKKYLEKDNFKI

SEQ ID NO: 4875 - protein, 159 aa, Streptococcus agalactiae
ATGAAAAAATATATAAAATGGTTAATTCCCATATCTATTATTGGGATGTTACTAGTAGGCTGTCAAATGAATAGGGGACCTAAAAGTCAGTCAAACGAAGTAAAAAATAGCAAGCAATCAGAAGTGAAGAAAGGTAAAAATATGATAAAAAAGAACAGT

SEQ ID NO: 4876 - protein, 53 aa, Streptococcus agalactiae
MKKYIKWLIPISIIGMLLVGCQMNRGPKSQSNEVKNSKQSEVKKGKNMIKKNS

SEQ ID NO: 4877 - protein, 606 aa, Streptococcus agalactiae
ATGAAAAATAATATTATTTTTTCTATTGAACAATATATTAATGACCAAGAGATGCCAAAAGGAAAACAAAAAGTTATTTTATCCGCTATAGAGCTCTTTGCCTCACAAGGCTTCCATGGAACTTCCACTGCTCAACTAGCTAAAAATGCAGAAGTTAGCCAAGCAACTATATATAAATATTTTGAAACTAAAGACAAGCTTTTGGTCTTTATTCTCGAGTTAATCGTACAAACTATTGGACGCCCCTTCTTTACAGAATTATCTACATTTTCTACTAAAGAGGAACTAATTCATTTCTTTGTACAGGACCGTTTTAAATTTATTGAAAAAAATAATGATCTCATTAAAATATTGATGCAAGAATTATTAATCAATAGTGAAACATCAACTATTTTTACTAAGCTGATAAATTCAACTGATCCAAACATTACTAAAATTTTCAACTGTTTAAGTGAAGGAAATTCGTTGAATAAAATGGAAATACTTCGAGCAGTCATCGGACAGTTCATTACTTTCTTTATTCAATTATATATCCTTAATATAAAGCCTGAAAATCTAGAGGAAGAACTAAAACAAATAGAAAAACAAATATTAAAATTACTGAGC

SEQ ID NO: 4878 - protein, 202 aa, Streptococcus agalactiae; identical to SEQ ID NO: 528

SEQ ID NO: 4879 - protein, 723 aa, Streptococcus agalactiae
ATGAACAGTAAGGAACTGATTTCGCAAGTTAAAATTTTAGCTAATAAGAATCCGAAACTAGCACAATCCTTACAAACTCGCTCCAAATATATCAAAGAAAAATATAATTACGGAAATAAAAATACAGGCTTTTTTGCAAAAATGATACCAATACTAATGGGATTTATGGTCTTCTTCTTTGTTTTTTTAATTTCTGGAATGGCTTTATTAAAAGAGCGTACTTCTGGTACACTTGATCGACTCCTTGCAACTCCTGTTAAACGTAGTGATATTGTATTTGGATATATGTTATCATACGGCATTCTAGCAATTATTCAAACGGTAGTTATCGTTTTATCAACTATTTGGCTACTAGATATTCAAGTTGTAGGTAGTATTTTTAGTGTCATCATTGTCAATTTTATTTTGGCTCTGGTTGCCTTATCATTAGGAATCTTAATGTCTACTCTAGCAAAATCAGAATTTCAAATGATGCAATTTATTCCCTTAATTATAATGCCTCAATTATTCTTTTCAGGAATAATCCCTCTAGAAAATATGGCAAGTTGGGCTCAGACAGTCGGTAAAATTCTACCGCTATCCTACTCTGGTGATGCACTTACAAAAATAATTATGTACGGTCAAGGATTACCTAACGTTTCTTCAAATCTTCTGGTACTTCTTCTATTTTTAATTATTTTAACCATCGCAAATATCTTTGGACTAAAACGATACCGTAAAGTA

SEQ ID NO: 4880 - protein, 241 aa, Streptococcus agalactiae
MNSKELISQVKILANKNPKLAQSLQTRSKYIKEKYNYGNKNTGFFAKMIPILMGFMVFFFVFLISGMALLKERTSGTLDRLLATPVKRSDIVFGYMLSYGILAIIQTVVIVLSTIWLLDIQVVGSIFSVIIVNFILALVALSLGILMSTLAKSEFQMMQFIPLIIMPQLFFSGIIPLENMASWAQTVGKILPLSYSGDALTKIIMYGQGLPNVSSNLLVLLLFLIILTIANIFGLKRYRKV

SEQ ID NO: 4881 - protein, 216 aa, Streptococcus agalactiae
ATGAGAATTATTGCAATAACTGAAAAGGTTATAAAAGAACTGTTTCGTGATAAAAGAACACTTGCTATGATGTTTTTAGCACCTATTTTAATTATGTTTTTGATGAATGTTATGTTTTCTGCGAATAGTAATACAAAAGTTAAGATTGGAACTATTAACGTTAACACGAAGGTCGTTTTCAATTTAGATAATATTAAGCATANNNNNTTAATTAAT

SEQ ID NO: 4882 - protein, 72 aa, Streptococcus agalactiae
  VARIANT 68, 69: Xaa = Any Amino Acid
MRIIAITEKVIKELFRDKRTLAMMFLAPILIMFLMNVMFSANSNTKVKIGTINVNTKVVFNLDNIKHXXLIN

SEQ ID NO: 4883 - protein, 714 aa, Streptococcus agalactiae
ATGAAAAAAGTCATCGATTTAAAAAAACTACAAAAAGCATATGCCTCAGAAACTGTTTTAAATAATATTAATTTGGAGGTGTTTAAAGGCGAAATAATTGGATTAATAGGACCCTCTGGAGCAGGGAAATCTACCTTGATTAAAACTATGCTTGGCATGGAAAAAGCAGATAAGGGAACAGCTCTTGTTCTTGATACTCAAATGCCAGATCGTAATATTTTAAATCAAATTGGCTATATGGCTCAATCTGATGCCTTATACGAATCTTTAACTGCCTTAGAAAATTTATTATTCTTTGGAAAAATGAAAGGTATTCAAAAAACTGAATTAAAACAGCAGATAACTCATATTTCTAAAGTAGTAGATCTAGAAAACCAACTTGATAAATTTGTCTCAGGTTACTCAGGAGGTATGAAAAGACGGCTTTCTCTAGCCATCGCCCTACTTGGAAACCCCACAGTTTTAATCCTAGATGAACCTACCGTTGGAATTGATCCATCCTTGAGGAGAAAAATCTGGCAAGAGCTAATTAATATTAAGGATGAAGGACGTTCTATCTTTATTACAACCCACGTTATGGATGAAGCAGAATTAACAAGTAAGGTTGCACTACTATTACGTGGAAACATTATTGCCTTTGATACTCCATTACATTTAAAAAAACAATTTAATGTGAGTACTATTGAGGAAGTTTTCTTAAAAGCTGAAGGAGAA

SEQ ID NO: 4884 - protein, 238 aa, Streptococcus agalactiae
MKKVIDLKKLQKAYASETVLNNINLEVFKGEIIGLIGPSGAGKSTLIKTMLGMEKADKGTALVLDTQMPDRNILNQIGYMAQSDALYESLTALENLLFFGKMKGIQKTELKQQITHISKVVDLENQLDKFVSGYSGGMKRRLSLAIALLGNPTVLILDEPTVGIDPSLRRKIWQELINIKDEGRSIFITTHVMDEAELTSKVALLLRGNIIAFDTPLHLKKQFNVSTIEEVFLKAEGE

SEQ ID NO: 4885 - protein, 681 aa, Streptococcus agalactiae
ATGGATAAATTGAAAAAATTACAAAAAGAAAATACACTATTAGAAGGAAGAATTGATAACTCTAATAACCAAACCTATACAGATATGATTGTCTATTTGCGAGGTGCTAGCATTAGCCCCTACCACCAGGAGCTCATTCGAAATGATATTGTCAATATGTTATTAGAAGCACAAGAGCGACAAGCAAGTTTAGTTAGTGTATTTGGAGAAGATAGGCACGACTTTATAAACCAAGTTATTAAATCTACACCTAAAATCTCTAAGAAAGAAGAAACATTACAACGTTGGGATTTAGCCATTTTACTACTAACTATCCAAATGATTATCTTTTTAGGAGGATATCTCATTACTGAAGCACTTCAACAGTCAGTACCAGATCTAATCCCTATTACTCTATTAGATGTTCTTTTTGCAATCTTTATCAGTATTATTGCTGTCAAGATAGCTGATACCATAATATATGCTACATATAACTTCGATAAATCGAAAGAAAAGAAATATTTCTTTCGATATATGTTTCTAATTCTTTCGCTTATCATAGCTTATATCCTTATAGGAAAATATTGTCATCTTCCTTTCATTAATATCCCCCTTTGGATTTATTTAATTATACTGGGACTTAGCTTCTCTCTTCATATCATTGTTAAAAAATACCTGAATAAACATTATTATATTGAATTT

SEQ ID NO: 4886 - protein, 227 aa, Streptococcus agalactiae
MDKLKKLQKENTLLEGRIDNSNNQTYTDMIVYLRGASISPYHQELIRNDIVNMLLEAQERQASLVSVFGEDRHDFINQVIKSTPKISKKEETLQRWDLAILLLTIQMIIFLGGYLITEALQQSVPDLIPITLLDVLFAIFISIIAVKIADTIIYATYNFDKSKEKKYFFRYMFLILSLIIAYILIGKYCHLPFINIPLWIYLIILGLSFSLHIIVKKYLNKHYYIEF

SEQ ID NO: 4887 - protein, 309 aa, Streptococcus agalactiae
ATGATTCCATCACAAATGCTAAAAGGATTACTTGAAGGAGCTATCCTAAAAATCATACAGCAAGAGGAGACTTATGCTTATGAAATCTCAAAAAAATTAAATTCTTATGGTTTTGGGGAAATTTCCGAAGGGACAATCTACCCCATTATCTTAAGGCTACAAAACAATAAATATATAAAAGGACAACAAAAGCCTTCCCCTCAAGGACCTAAACGTAAATATTATACGTTAACCAATGAAGGCGTGGAGCAATTAGTCCAATTTAAACAGAATTGGGAGTCACTTAGTAAAGCATTAAACAAACTACTC

SEQ ID NO: 4888 - protein, 103 aa, Streptococcus agalactiae
MIPSQMLKGLLEGAILKIIQQEETYAYEISKKLNSYGFGEISEGTIYPIILRLQNNKYIKGQQKPSPQGPKRKYYTLTNEGVEQLVQFKQNWESLSKALNKLL

SEQ ID NO: 4889 - protein, 705 aa, Streptococcus agalactiae
ATGAAAATAGATAAAAAAGAATTTTTAGCACTTATTGCTAGTATTATTTTATTAATTTTTGCTTCTGTTACGTTTTTCTTATTTAAAGATCATGGCACTACTCAAATGGATACTGTAGAAAGCAGTGTTAACCATGTCAGTGATTCTCAATTAACTGAGGCACAAGATATGTTAGATAAATTTGAGAAGAAACCTTCAGAAAAATTATTGAAGGATGTCGAACTTGCTTTAAATAAATTGTCCAATTCTTCTAAAAAAGAAGCTTTGCAAAAACGTTTTAAGAAAGCAAAAGATAAGTATCTTAAAGACGAAGCAGATAAGAAAGCTACCAAAGATGCTACAGATTTAGTAGAAATTCTAGAACAAGCCCCTTCAGAAGAAAATGTGTTAAAAGCTGAAGCAGCAGTCAATAAGTTAACTGTCAAAGAATCTAAAGAAGCTTTACAAAAACGTATTGATACTGTTAAGACACAATATGGTTTGATTGGGAATCAAACTCCCTCTAGTTCAGTAGCTGAAACTACAGAACAAGGGACAGCTAATCCTGCTAGTCAGGATACTTCTAGTTACGTTAATCAGAATGTAGCACCAACTTATGAGCAACCGCAAACGAATAATACACCAGTTACTCCAGGGGTTAACAATACTGTTCCGACTCCAGGAACTGGTACTGCACCTGCTACTAATGGGACGGGTGTTGCTCAG

SEQ ID NO: 4890 - protein, 235 aa, Streptococcus agalactiae
MKIDKKEFLALIASIILLIFASVTFFLFKDHGTTQMDTVESSVNHVSDSQLTEAQDMLDKFEKKPSEKLLKDVELALNKLSNSSKKEALQKRFKKAKDKYLKDEADKKATKDATDLVEILEQAPSEENVLKAEAAVNKLTVKESKEALQKRIDTVKTQYGLIGNQTPSSSVAETTEQGTANPASQDTSSYVNQNVAPTYEQPQTNNTPVTPGVNNTVPTPGTGTAPATNGTGVAQ

SEQ ID NO: 4891 - protein, 1158 aa, Streptococcus agalactiae
ATGACGAAGTACATCAAGGCTGACCGATTCTTTTATGCTGATCATGTAAAGGAAAACGGTTATTTAGAAATAAAAGATAATCACTTTGGTAAATGGATAGAAAATATTTCTGGACAAGAGGAGATTTTAGATTATTCAGGTTACCAAATAGCACCTGGTTTAGTTGATACACATATTCATGGTTTTGCTGGCGCTGATGTTATGGATTGTGATTCAGAAGGAATTTTGCGAATGAGTGCTGGCTTGCTATCTACTGGAGTCACATCTTTCTTGCCGACAACCCTAACTTCAGATACAAAGCGACTAGAAGAGGCATCTAAATCAGTTGCGGCAGTAGCGGGCAAAGAACAAGGAGCAAAAATTCAAGGCATCTATTTTGAGGGACCATATTTTACTGAGGAATATAAAGGAGCTCAAAATCCGATTTATATGAGAAATCCAAACTTGGAAGAGTTTGCTCAATGGCAGAAGGCTGCAAAAGGCTTGATTACAAAAATTGCTTTGGCACCAGAACGTGAGGGAGTTGAGGAATTTGTCTCAGCAATCACAAAGCAAGGTGTTACGGTAGCTTTAGGTCATTCTAATGGAACATATAAAGAAGCTAAAAAGGCAGTGAAGGCGGGTGCCTCAGTTTGGGTACATGCGTATAATGGTATGCGTGGTTTGACACACCGAGAACCAGGTATGGTTGGTGCGGTTTATAATTTACCTAATACTTATGCCGAACTCATTTGCGATGGTCATCACGTTGATCCTGTTGCTTGTGACATTTTAATGACACAAAAAGGCCATAATCATGTGGCATTAATAACAGATTGTATGGCAGCTGGAGGTGCCCCTGATGGAGATTATATGTTAGGGGAATTGCCCGTGGTTGTGTCTAATGGAACTGCGCGTTTGAAAGATGGAGGGAATTTAGCTGGTTCTATCCTTAAGCTCAAAGATGGATTAAAAAATGTTGTAGAATGGGGAATTGCTACTCCGGAAGAGGCAGTGCGTATGGCGAGTTATGTTCCAGCAGTGTCTGTAGGCATTGATAATGTCTGTGGACAGATAAAAGAAGGCTATGCAGCGGATTTTATTGTATTAGATAAACATCTAGATTTAGTTGCAACATACCTTGATGGAGAAAAACGTTGGCAATNNNNNTTAATTAAT

SEQ ID NO: 4892 - protein, 386 aa, Streptococcus agalactiae
  VARIANT 382, 383: Xaa = Any Amino Acid
MTKYIKADRFFYADHVKENGYLEIKDNHFGKWIENISGQEEILDYSGYQIAPGLVDTHIHGFAGADVMDCDSEGILRMSAGLLSTGVTSFLPTTLTSDTKRLEEASKSVAAVAGKEQGAKIQGIYFEGPYFTEEYKGAQNPIYMRNPNLEEFAQWQKAAKGLITKIALAPEREGVEEFVSAITKQGVTVALGHSNGTYKEAKKAVKAGASVWVHAYNGMRGLTHREPGMVGAVYNLPNTYAELICDGHHVDPVACDILMTQKGHNHVALITDCMAAGGAPDGDYMLGELPVVVSNGTARLKDGGNLAGSILKLKDGLKNVVEWGIATPEEAVRMASYVPAVSVGIDNVCGQIKEGYAADFIVLDKHLDLVATYLDGEKRWQXXLIN

SEQ ID NO: 4893 - protein, 539 aa, Streptococcus agalactiae
ATGTCAATTATTATTGGGTTAATGGCCGCTATGTTTATCATTCGTTTAGCTTATTTAAAGCTATCTATAGCTAATGAAAGGCCTTAAGAAAAAATGGTGCTAAAGAATATGGTGTAGGTGTTTCAAAAGCAATCACAGTTCTTCATATTATCATTTATTTTTCATCTGTAACTGAGGCTATTCTAACAAAAGCAAGTTTTAATTTTGTTAGCGTAATCGGGCTTAGCTTGATGATTTTTTCTGTGTTTATGTTACATACAGTAACACGTTTACTTGGTCGTATTTGGACAGTGAAATTAATGGTAGATAAAAATCATCAATTTGTAGATCACTGGCTATTTAGGGTTGTTAAGCATCCTAACTATTTCTTAAATATTGCTCCTGAACTTTTAGGTGTAACTTTATTGTGTCATGCTAAATACACAGCATTATTTGTCTTGCCAATTTATGCTTTTGTTATTTATTTAAGAATTCGTGAAGAAAACTTATTATTAAAAACGATCATTATTCCAAATGGAATCAAAAAGTCTAGGGTATCT

SEQ ID NO: 4894 - protein, 180 aa, Streptococcus agalactiae
MSIIIGLMAAMFIIRLAYLKLSIANEKALRKNGAKEYGVGVSKAITVLHIIIYFSSVTEAILTKASFNFVSVIGLSLMIFSVFMLHTVTRLLGRIWTVKLMVDKNHQFVDHWLFRVVKHPNYFLNIAPELLGVTLLCHAKYTALFVLPIYAFVIYLRIREENLLLKTIIIPNGIKKSRVS

SEQ ID NO: 4895 - protein, 801 aa, Streptococcus agalactiae
ATGAGCCCTTATACTTTCTTACGTGCTATAGGCCCTGAGCCTTGGAATGCTGCATACGTTGAACCATCACGTCGTCCAGCTGACGGCCGCTATGGTGAAAATCCAAACCGTCTTTACCAACATCATCAATTTCAAGTGGTAATGAAGCCTTCGCCGTCAAATGTTCAAGAACTTTATTTGAAGTCTTTGGAATTACTAGGTATCAATCCACTTGAGCATGATATCCGTTTTGTTGAAGATAACTGGGAAAATCCATCTACAGGTTCAGCTGGATTAGGTTGGGAAGTTTGGCTTGATGGAATGGAAATAACACAATTTACTTATTTCCAACAAGTAGGTGGACTTCAAACAGGTCCTGTAACTTCTGAAGTTACTTATGGACTAGAGCGTTTAGCCTCTTATATTCAAGAGGTAGATTCTGTTTATGATATTGAGTGGGCACCAGGTGTTAAATATGGTGAAATCTTTACTCAGCCAGAGTATGAGCATTCAAAATATTCATTTGAGATATCAGACCAAGTAATGTTACTTGAAAACTTTGAGAAGTTTGAAAGAGAAGCAAAACGTGCTTTAGAAGAAGGACTTGTTCATCCAGCTTATGACTACGTCCTTAAATGTTCACACACCTTTAATTTATTAGATGCACGTGGAGCAGTATCTGTTACTGAGCGTGCAGGCTATATTGCACGTATCCGGAATTTAGCACGTGTTGTTGCTAAAACCTTTGTTGCCGAACGTAAAAAACTTGGTTTCCCACTTTTGGATGAGGAAACTCGTATCAAATTACTTGCTGAGGAAGAC

SEQ ID NO: 4896 - protein, 267 aa, Streptococcus agalactiae
MSPYTFLRAIGPEPWNAAYVEPSRRPADGRYGENPNRLYQHHQFQVVMKPSPSNVQELYLKSLELLGINPLEHDIRFVEDNWENPSTGSAGLGWEVWLDGMEITQFTYFQQVGGLQTGPVTSEVTYGLERLASYIQEVDSVYDIEWAPGVKYGEIFTQPEYEHSKYSFEISDQVMLLENFEKFEREAKRALEEGLVHPAYDYVLKCSHTFNLLDARGAVSVTERAGYIARIRNLARVVAKTFVAERKKLGFPLLDEETRIKLLAEED

SEQ ID NO: 4897 - protein, 639 aa, Streptococcus agalactiae
ATGAACACACTCATTGTTAATAGTCATCCTGATTTTTCGAATCCGTACTCATTTACAACTATTCTACAAGAAAAGTTTATTGAACTTTATAATGAGCATTTTCCTAACCATCAGTTATCTATTTTAAATTTATATGATTGTGTTTTGCCAGAAATTACGAAAGAAGTACTACTTTCGATTTGGTCTAAACAAAGAAAGGGTTTGGAATTAACAGCCGATGAGATTGTTCAAGCTAAAATCTCTAAAGATTTACTTGAACAGTTTAAGTCACATCACCGTATTGTCTTTGTTTCTCCAATGCACAATTACAATGTGACTGCTAGAGCAAAAACTTATATTGATAATATTTTTATTGCAGGTGAGACTTTCAAGTACACTGAAAATGGTTCGGTCGGATTAATGACAGATGACTATCGTCTGCTTATGTTAGAATCTGCGGGTTCTATTTATTCTAAAGGACAATATAGTCCATATGAATTTCCTGTTCATTATTTAAAAGCTATCTTTAAAGATTTTATGGCTTTTGATGATTTCTGTGTTGTTCGTGCAGAAGGTACCGATATTTTAGATAGGCAGGTTGTTCTTGATAAGATGAATCAGGATTTAAGAGAAGCATTTGAAGCGTTTTACAGTAAGGAG

SEQ ID NO: 4898 - protein, 213 aa, Streptococcus agalactiae; identical to SEQ ID NO: 544

SEQ ID NO: 4899 - protein, 2037 aa, Streptococcus agalactiae
ATGACTAAAGATTTATTATTGGAGCTTGGCCTTGAAGAGTTGCCAGCTTATGTTGTGACACCGAGTGAGAAGCAATTGGGCCAAAAAATGGTCAAGTTTTTAGAGGATCATCGTTTATCATTTGAAACTGTTCAAACTTTTTCAACTCCACGTCGTTTGGCTGTTCGTGTTAAAGGATTGGCAGACCAGCAGACAGATTTAACAGAAGATTTCAAGGGTCCTTCTAAGAAAATTGCTTTGGATGCAGAAGGGAATTTTTCTAAAGCAGCCCAAGGTTTTGTTCGCGGAAAAGGTTTAAGTGTTGATGATATCGAATTTCGTGAAGTTAAGGGAGAAGAATATGTTTATGTCACTAAGCATGAAACTGGAAAAAGTGCGATTGATGTTTTAGCAAGTGTGACAGAGGTATTAACAGAATTGACTTTCCCAGTGAACATGCATTGGGCAAATAATAGTTTTGAATATATTCGTCCAGTTCACACTTTAGTGGTATTATTAGATGATCAAGCCTTAGAGCTAGACTTCCTTGATATTCATTCAGGGCGTATTAGTCGAGGGCACCGTTTCTTGGGTTCTGACACTGAAATTTTATCTGCTAGTTCGTATGAAGATGACTTGCGACAACAATTTGTTATTGCTGATGCAAAAGAACGCCAGCAAATGATCGTTGATCAAATTCATGCTATCGAAGAAAAGGAAAATATTTCAGTTGAAATTGACGAAGATTTACTAAATGAAGTGCTTAATTTAGTTGAGTATCCGACAGCATTCTTGGGTTCTTTTGACGAGAAATACCTTGATGTACCTGAAGAAGTTTTAGTCACTTCAATGAAAAATCATCAACGCTATTTTGTTGTTCGCGACAGGGATGGAAAATTGTTACCAAACTTTATTTCTGTGCGTAATGGAAATGCTGAGCATATCGAAAATGTTATAAAAGGTAATGAAAAAGTTTTAGTGGCTCGTCTCGAAGATGGTGAATTCTTCTGGCAAGAAGATCAGAAACTTAATATTGCAGATTTAGTTGAGAAATTAAAACAAGTAACTTTCCATGAAAAAATTGGTTCACTTTATGAACATATGGATCGTGTAAAAGTTATTTCACAATATTTGGCTGAGAAGGCAGATCTTTCTGATGAAGAAAAATTAGCTGTGCTTCGAGCTGCAAGTATTTATAAATTTGACCTCTTAACTGGAATGGTTGATGAGTTTGATGAATTACAAGGTATTATGGGTGAGAAATATGCCTTACTTGCAGGGGAACAGCCCGCAGTAGCAGCAGCGATACGTGAACATTATATGCCGACATCGGCCGATGGAGAGCTTCCAGAAACCAGAGTTGGTGCAATTCTAGCGTTAGCTGATAAATTTGACACCTTACTTTCATTCTTCTCAGTTGGTTTGATTCCAAGCGGTTCAAATGATCCATATGCTCTTCGTCGAGCTACTCAGGGGATTGTCCGTATTTTGGAAGCTTTTGGTTGGGATATCCCACTTGATGAATTAGTAACTAACCTTTATGGTCTATCGTTTGCTAGTTTAGATTATGCTAATCAAAAAGAGGTCATGGCCTTTATTTCAGCTCGTATTGAAAAGATGATTGGCTCTAAGGTCCCTAAAGATATTCGAGAAGCCGTTTTAGAATCAGACACTTATATTGTTAGCCTTATTCTAGAAGCTAGCCAAGCATTGGTGCAAAAGAGCAAGGATGCTCAATATAAAGTTTCCGTTGAAAGTTTGTCACGTGCATTTAATTTAGCTGAAAAAGTTACTCATTCTGTATCGGTGGACTATTCATTGTTTGAAAATAATCAGGAGAAGGCGCTATATCAAGCTATTTTGTCACTTGAACTGACTGAGGATATGCATGACAACTTAGATAAGCTTTTCGCACTTAGTCCAATTATTAATGATTTCTTTGATAATACAATGGTAATGACAGATGATGAAAAAATGAAACAAAATCGTCTGGCTTTACTCAATAGCCTTGTTGCAAAAGCAAGAACAGTCGCTGCTTTTAACTTATTAAACACAAAA

SEQ ID NO: 4900 - protein, 679 aa, Streptococcus agalactiae
MTKDLLLELGLEELPAYVVTPSEKQLGQKMVKFLEDHRLSFETVQTFSTPRRLAVRVKGLADQQTDLTEDFKGPSKKIALDAEGNFSKAAQGFVRGKGLSVDDIEFREVKGEEYVYVTKHETGKSAIDVLASVTEVLTELTFPVNMHWANNSFEYIRPVHTLVVLLDDQALELDFLDIHSGRISRGHRFLGSDTEILSASSYEDDLRQQFVIADAKERQQMIVDQIHAIEEKENISVEIDEDLLNEVLNLVEYPTAFLGSFDEKYLDVPEEVLVTSMKNHQRYFVVRDRDGKLLPNFISVRNGNAEHIENVIKGNEKVLVARLEDGEFFWQEDQKLNIADLVEKLKQVTFHEKIGSLYEHMDRVKVISQYLAEKADLSDEEKLAVLRAASIYKFDLLTGMVDEFDELQGIMGEKYALLAGEQPAVAAAIREHYMPTSADGELPETRVGAILALADKFDTLLSFFSVGLIPSGSNDPYALRRATQGIVRILEAFGWDIPLDELVTNLYGLSFASLDYANQKEVMAFISARIEKMIGSKVPKDIREAVLESDTYIVSLILEASQALVQKSKDAQYKVSVESLSRAFNLAEKVTHSVSVDYSLFENNQEKALYQAILSLELTEDMHDNLDKLFALSPIINDFFDNTMVMTDDEKMKQNRLALLNSLVAKARTVAAFNLLNTK

SEQ ID NO: 4901 - protein, 255 aa, Streptococcus agalactiae
ATGGATCCTAAAAAAATTGCTCGTATTAACGAGCTTTCAAAAAAGAAAAAAACAGTTGGATTGACCGGAGAAGAGAAGGTTGAACAAGCAAAGCTCCGTGAAGAATATATTGAAGGTTTCCGCCGATCAGTCCGTCACCACGTTGAAGGAATTAAATTAGTGGATGATGAGGGCAATGATGTTACCCCGGAAAAACTTCGTCAAGTCCAGAGAGAAAAAGGACTACATGGTCGTAGTTTGGATGATCCAAATTCT

SEQ ID NO: 4902 - protein, 85 aa, Streptococcus agalactiae; identical to SEQ ID NO: 548

SEQ ID NO: 4903 - protein, 318 aa, Streptococcus agalactiae
TTGGGTGGGGCAAAAGATAATCTTTGTCTCGCCTTTTTTATTAGGAAGGAAAAAATAATGATTGAATTACTATTAGCATTACTGTTATGGAATATTTTAGTATTTGCAACCTATGCTATTGATAAAAGGCGTGCAATTAGAGGGGCATGGCGTATTAGTGAGAAAACATTGTTAATAGAGAGTTTATTATTAGGAGGATTTGGTGCATTCCTAGGTGGAGAAGTTTTTCGTCATAAAACGACTAAATGGTATTTCAGACTAGTTTGGTATATCGGAATGATTATTGATTTAGCTATTATTTGGCTAATTTGGTGTTAT

SEQ ID NO: 4904 - protein, 106 aa, Streptococcus agalactiae
MGGAKDNLCLAFFIRKEKIMIELLLALLLWNILVFATYAIDKRRAIRGAWRISEKTLLIESLLLGGFGAFLGGEVFRHKTTKWYFRLVWYIGMIIDLAIIWLIWCY

SEQ ID NO: 4905 - protein, 1506 aa, Streptococcus agalactiae
ATGTCTTCAGAAGAAAAATACATTATGGCGATTGACCAGGGAACAACAAGTTCTCGAGCAATTATTTTTAATAAAAAAGGTGAAAAAATTGCGAGTAGCCAAAAAGAATTTCCCCAAATTTTTCCTCAAGCAGGCTGGGTAGAGCATAATGCTAATCAGATTTGGAATTCTGTTCAATCTGTCATTGCTGGAGCTTTTATTGAATCAAGCATCAAACCTGGACAGATAGAGGCTATTGGGATTACCAATCAACGTGAAACAACTGTTGTTTGGGATAAAAAAACAGGTCTTCCAATTTATAATGCTATTGTATGGCAATCGCGACAAACAGCCCCGATTGCTGATCAATTGAAGCAAGAAGGTCATACTAATATGATTCATGAGAAAACAGGTCTTGTCATTGATGCTTACTTCTCGGCAACAAAAGTTCGTTGGATTTTAGACCATGTTCCTGGAGCACAGGAACGTGCTGAAAAAGGAGAGTTGCTTTTTGGAACAATTGATACTTGGTTAGTTTGGAAGTTAACTGATGGTCTCGTCCATGTTACAGACTATTCAAATGCTGCTCGTACGATGCTTTATAATATTAAAGAACTTAAATGGGATGATGAAATTTTAGAGTTACTGAATATTCCTAAAGCAATGTTACCAGAAGTAAAATCTAATTCTGAAGTTTATGGGAAAACTACTCCATTCCATTTTTACGGTGGAGAGGTGCCAATTTCTGGTATGGCTGGTGACCAACAGGCAGCATTATTTGGACAGTTGGCCTTTGAACCTGGTATGGTAAAAAACACTTATGGTACAGGTTCCTTCATTATCATGAATACGGGCGAAGAGATGCAACTGTCTCAAAATAATCTATTAACAACGATTGGTTACGGCATTAATGGTAAGGTTCATTATGCACTTGAAGGATCAATCTTCATTGCAGGAAGCGCTATTCAATGGTTACGTGATGGTCTTAGAATGATTGAAACGTCAAGTGAGTCAGAAGGCCTTGCTCAATCATCAACAAGTGACGATGAGGTTTATGTGGTTCCAGCTTTTACAGGTTTGGGTGCACCGTATTGGGATTCAAATGCTAGAGGGTCAGTATTTGGATTAACTCGTGGGACAAGTAAAGAAGATTTTGTTAAAGCTACACTTCAGTCAATTGCTTATCAAGTACGAGACGTTATTGACACTATGCAAGTTGATTCAGGAATTGATATCCAACAACTTCGTGTAGATGGTGGAGCTGCAATGAATAATTTATTAATGCAATTCCAAGCGGATATTTTAGGGATTGATATTGCTCGTGCGAAGAACCTTGAAACTACTGCCTTGGGTGCAGCTTTCTTAGCCGGACTTTCAGTTGGCTATTGGGAAAGTATGGATGAACTAAAAGAACTAAACGCAACAGGACAACTTTTCCAAGCAACAATGAATGAGTCTCGAAAAGAAAAACTGTATAAAGGGTGGAGAAAAGCTGTCAAAGCGACACAAGTATTTGCTCAAGAGGAT

SEQ ID NO: 4906 - protein, 502 aa, Streptococcus agalactiae; identical to SEQ ID NO: 552

SEQ ID NO: 4907 - protein, 1827 aa, Streptococcus agalactiae
ATGGAATTTTCACGAGAAACACGACGTTTAGCCTTACAAAGAATGCAAGATCGTACTCTGGATTTACTTATCATAGGTGGGGGTATCACAGGCGCTGGTGTCGCTTTACAAGCAGCAGCTAGTGGATTAGATACTGGACTTATTGAAATGCAAGATTTTGCAGAAGGGACAAGTAGTCGCTCAACAAAATTGGTCCATGGTGGTCTTCGTTACTTGAAGCAATTTGATGTAGAAGTTGTTTCTGATACAGTATCAGAGCGTGCAGTCGTGCAGCAAATTGCACCACACATTCCTAAGCCAGATCCAATGCTTTTACCGGTTTACGATGAGCCGGGTTCTACTTTTAGTATGTTTCGCCTTAAAGTGGCTATGGATTTATATGATTTATTAGCAGGTGTGACAAATACACCCGCAGCCAATAAAGTTTTGAGCGCAGAAGATGTTCTTAAGCGTGAGCCTGATTTACAAAAAGAAGGTTTGCTAGGCGGAGGGATCTATTTAGATTTCCGTAATAACGATGCACGTCTAGTGATTGAAAATATTAAACGTGCTAATAGGGATGGAGCTTATATTGCTAGTCATGTCAAAGCTGAGGACTTCTTATTTGATGACAACAATCAAATTATAGGAGTACGTGCGCGTGATTTGTTGACTGACCAAGTTATCGATATAAAAGCTAGACTTGTTATTAATACAACTGGACCTTGGAGTGACACCGTTCGCAACTTCTCCAATGAAGGTAAGCAAATTCATCAATTACGTCCAACTAAGGGAGTTCACTTAGTTGTAGATCGCCAAAAATTAAATGTTTCTCAACCTGTTTATGTTGATACAGGTCTAAATGATGGTCGCATGATTTTTGTTTTGCCACGTGAAGATAAGACTTATTTTGGAACTACAGATACCGATTACCATGGAGACTTAGAACATCCTACGGTAACTAAAGAAGATGTTGACTACCTCCTTAATATTGTAAACAAACGTTTCCCAGAAGCAGAGCTTACTATTGATGATATTGAGAGTTCATGGGCAGGTCTGCGTCCACTACTATCAGGGAATAGTGCCTCTGACTATAATGGAGGCAATAGTGGAAAACTAAGCGATGAAAGTTTTGAAGAATTAATTGATTCCGTTAAAGATTATATTGCACATAAAAATCATCGTGAGGATGTTGAAAAAGCTATTTCTCATGTTGAATCTAGTACTTCTGAAAAAGAATTGGACCCATCAGCTGTTTCTCGAGGATCAAGTTTTGAGCGTGATGATAATGGTCTATTAACACTTGCTGGTGGTAAAATTACTGATTATCGAAAAATGGCAGAAGGTGCCATGGAAACTATTATTAACATTTTGGATAAAGAATATAATCGCAAGTTTAAACTAATCAATTCTAAAACCTATCCTGTTTCAGGAGGAGAGATTAACCCATCTAATGTTGATTCTGAAATTGAAGCTTATGCTCAATTGGGCACACTAAGTGGTTTAAGTATTGAGGATGCACGTTATATTGCTAACCTTTATGGGTCAAATGCACCAAAATTATTTGCATTGACACGCCAAATTACAGAAGCAGAAGGTCTGAGCTTGGTAGAAACGTTGTCACTTCACTATGCTATGGATTATGAAATGGCGCTTAGCCCAACGGATTTCTTCTTAAGACGTACGAATCATATGCTTTTCATGAGAGATAATTTAGATTCTTTGATTCAGCCTGTTATTGATGAGATGGCTAAACATTATCAATGGTCTGATCAAGACAAAACCTTCTATGAAGAAGAATTACATGAGACTCTAAAAGACAATGACTTGGCAGCTTTGAAGGATAAT

SEQ ID NO: 4908 - protein, 609 aa, Streptococcus agalactiae
MEFSRETRRLALQRMQDRTLDLLIIGGGITGAGVALQAAASGLDTGLIEMQDFAEGTSSRSTKLVHGGLRYLKQFDVEVVSDTVSERAVVQQIAPHIPKPDPMLLPVYDEPGSTFSMFRLKVAMDLYDLLAGVTNTPAANKVLSAEDVLKREPDLQKEGLLGGGIYLDFRNNDARLVIENIKRANRDGAYIASHVKAEDFLFDDNNQIIGVRARDLLTDQVIDIKARLVINTTGPWSDTVRNFSNEGKQIHQLRPTKGVHLVVDRQKLNVSQPVYVDTGLNDGRMIFVLPREDKTYFGTTDTDYHGDLEHPTVTKEDVDYLLNIVNKRFPEAELTIDDIESSWAGLRPLLSGNSASDYNGGNSGKLSDESFEELIDSVKDYIAHKNHREDVEKAISHVESSTSEKELDPSAVSRGSSFERDDNGLLTLAGGKITDYRKMAEGAMETIINILDKEYNRKFKLINSKTYPVSGGEINPSNVDSEIEAYAQLGTLSGLSIEDARYIANLYGSNAPKLFALTRQITEAEGLSLVETLSLHYAMDYEMALSPTDFFLRRTNHMLFMRDNLDSLIQPVIDEMAKHYQWSDQDKTFYEEELHETLKDNDLAALKDN

SEQ ID NO: 4909 - protein, 696 aa, Streptococcus agalactiae
ATGGATATTTTTGGAGAATTCTTAGGAACAGCTCTCTTAGTCTTACTTGGTAATGGTGTTGTAGCAGGTGTTGTTTTGCCTAAAACGAAGAATCATAATTCTGGATGGATTGTTATCACATTTGGATGGGGGCTTGCTGTAGCTATTGCAGTGTTGGTATCTGGCAATATTAGCCCTGCCCACTTGAATCCAGCTGTGTCATTAGCTTTTGCAATCAAAGGTGATTTAGCTTGGGGAACAGCTATTCTTTATATGATTGCACAGATTATTGGTGCAATGCTAGGTTCACTTCTTGTTTATTTGCAATTTAGACCCCATTATGAGGCTGCAGAAAATAAAGCAGACATCCTTGGAACTTTTGCAACTGGTCCGGCTTTGAAGGATAATTTTTCCAATTTTTTAAGTGAAGTATTGGGAACACTTGTTCTTGTACTTACTATTTTTGCCATCGGAAAATACAATATGCCTCCAGGAGTTGGTACGATGAGTGTTGGTATGTTAGTGGTTGGGATTGGTCTATCGCTCGGTGGAACAACAGGTTATGCTATTAATCCTGCACGTGATTTTGGTCCTCGTTTATTGCATGCCTTGTTACCGATGAAGAACAAAGGTGATTCTGATTGGACTTATTCATGGATTCCGATAGTAGGACCTATGGTAGGAGCTATTTTAGCAGCCTTAATATTTGCTATGATG

SEQ ID NO: 4910 - protein, 232 aa, Streptococcus agalactiae
MDIFGEFLGTALLVLLGNGVVAGVVLPKTKNHNSGWIVITFGWGLAVAIAVLVSGNISPAHLNPAVSLAFAIKGDLAWGTAILYMIAQIIGAMLGSLLVYLQFRPHYEAAENKADILGTFATGPALKDNFSNFLSEVLGTLVLVLTIFAIGKYNMPPGVGTMSVGMLVVGIGLSLGGTTGYAINPARDFGPRLLHALLPMKNKGDSDWTYSWIPIVGPMVGAILAALIFAMM

SEQ ID NO: 4911 - protein, 1278 aa, Streptococcus agalactiae
ATGACTTGTGCGCAGAAATTACGCCAATTAAATCCTAATTGGGATATCGTTTTGATTGATAAAGAAATTCATCCAGATTATGTTCCAAATGGCTTAAATTGGTATTATCGTCACGAAATTAGTGGTTTAAATCAGGCCATGTGGCAGACAGAAGAAGAGCAACGGTTGCAGAATATACGCTGTCTATTTGGTCTAAAAGTTGAGAAAATTAATAAAGAAGATAGGGAATTAATGTTATCAGATGGTTCTTCTGTCTATTATGATCAATTGATTTGTGCCATGGGCTCCCAAGCAGAATCAACTTATATTGATGGGGCTGATGCGCAAGGTGTTTTAACAACAAAAACTTATGCAACTAGTCAAAATGCTAAGCAGGTATTAGATAAAAGTCATAAGGTAGCAGTTGTTGGGGCAGGTATCATCGGTTTAGATATTGCTTATAGTTTACATGAATCAGGGAAGGCGGTCACTTTGTTAGAAGCTCAAGAAAGACCAGACTTCAGGCATACAGATCCTGATATGTCCCTTCCTTTACTTGATGCGATGGCTGAATCAAAACTACATTTTTTCCAAAATCAAAAGGTTGAGAAAATTACTGTAACCCGAGAAGAAAAACTTTGTTTGCGAACGCTAACAGGAGACACCTTTACAGTTGATGCTGTCATATTAGCTGTTAATTTTCGTCCGGATAGTCGTCTTTTAACTGGGTTGGTTGATTTAAGTGTTGATAATAGTGTTGTTGTAAATGATTATTTCCAAACGAGTGACCCTAATATCTATGCTATTGGCGATTTGATTTGGTCGTATTTTAAAGGTCTTAATAGTGCTTATTATATGCCCTTAATTAACCAAGCAATCCGTTCGGCACAAATGTTGGCATACCATTTATCGGGACATGCTGTTCCAAAATTAAAAATAACACGCGCTACAGGATCTAAACACTTTGGCTATTATAGAGCTAACATTGGATTAACTGAGCTGGAAGCTGGTCTTTACGAGGATACCGTTAGTGTTACTTATTTCCCTAAAGAACAGTATGATTTAAGGATAAAATTGATTGCTAATCAAAAAACGGGCCATTTATTGGGGGCTCAATTAATCTCAAAGGAAAATTGTTTGGCTACTGCCAATCAGCTTGTTCAAGCTATATCGTGTGACATGACAGATTTTGATTTGGCTTTTCAAGATTTCATTTATACAGCTAGAGAATCTGAGATGGCTTATATGTTACATCAAGCAGCTATCAACCTTTATGAAAAGAGGATTGGGCTATGCGAA

SEQ ID NO: 4912 - protein, 426 aa, Streptococcus agalactiae
MTCAQKLRQLNPNWDIVLIDKEIHPDYVPNGLNWYYRHEISGLNQAMWQTEEEQRLQNIRCLFGLKVEKINKEDRELMLSDGSSVYYDQLICAMGSQAESTYIDGADAQGVLTTKTYATSQNAKQVLDKSHKVAVVGAGIIGLDIAYSLHESGKAVTLLEAQERPDFRHTDPDMSLPLLDAMAESKLHFFQNQKVEKITVTREEKLCLRTLTGDTFTVDAVILAVNFRPDSRLLTGLVDLSVDNSVVVNDYFQTSDPNIYAIGDLIWSYFKGLNSAYYMPLINQAIRSAQMLAYHLSGHAVPKLKITRATGSKHFGYYRANIGLTELEAGLYEDTVSVTYFPKEQYDLRIKLIANQKTGHLLGAQLISKENCLATANQLVQAISCDMTDFDLAFQDFIYTARESEMAYMLHQAAINLYEKRIGLCE

SEQ ID NO: 4913 - protein, 1410 aa, Streptococcus agalactiae
ATGGAAAAAGAAAGGCGTGTTCAATATCGGCTACTTTCTTTTTTAAGAGGCTCTCCTCAGGCAATAGCACTGAAGTTAGCTTTATTAGAAACTGGTTTAAGTCGAGCAACTTTGCTTAAATATATCAATAATCTTAATAGCTACTTTGAACAAGAAAAAGTTAATTGTCGAATCGTTTATTATAAGGATAAGTTATTTTTAGAAGAGGATTATAACTTATCCAATCAAGAAGTGTTGAAAGCTCTGATGAAAGATAGTATTAAATACACTATCTTAATATCTTTATTTAATCAGCGTCAGTTCACAATCGTTGGTCTTTCTCAAGAATTGATGGTTAGTGAGGCTACTTTAAATCGTCATCTTGCTCATCTCAATGAATTGTTAGCGGAATTTGATATTGCTATTTCACAAGGAAAACAGATTGGTGATGAATTGCAATGGCGTTATTTTTATTATGAATTATTCAAGCAACTATGGTCTTATGACAAGTGCCAAAATATGATAAAGAAATTAGACTTAGACTCATTAATTCTATTAATAGAGCGCTTGGCTCAACATACTTTAACTCGAGAAGCTCAGCAAAATCTGGGGCTTTGGTTTAGTATTTGTCATCATCGTCTCCTTGCTATGGAAAAAATATCTGATAATCTCAAGCCCATTGTGGAACATTATCAATGTAATGCTTTTTATAAACGGTTAGACGCAGCCTTAGTTTTGTATATGAGTCGTTTTGCTCTTGAGTATAGGGAAGGAGAAGTTCTGGCAACTTTTGCTTTTCTACATTCACAAAATATTTTACCAATCAATACAATGGAATACATCATGGGGTTTGGAGGTCCGATTATTGATTGTGTAACCGAAACAATCATCTACTTTAAAAAGGAGAGTATTTTAGCTGACGAGACATCAGATCAGGTTATTTACCAACTTGGTCAGTTATATAGCCATTATTATTTCTTTAAAGGTCATATTTTAGTTGAACAACCTGATTTAGAACAAACGTATCGACTTATTGATCATAATATGAGGGATAAGTTGCATCATATTTCAAAGAAGATTATTGCAAATGTTAATCGAATTAGACCTTTAACAGAAGATGGTTGTTCTTTGCTGACTTTACATTTGTTGGAATTGCTTATTTTCTCGAAAAATAGTCAAAAAATGCCCTTTAGGATTGGCCTAGATATGACAGGTAATGCTGTGGAACAGTCATTGTTGGAATATCGCATTCGACAACATTTCTCTGGTAATAATTCTATTCAAGTCGAACCTTATGACGAAGGAAAGGGATTTGATATGGTTATTTATCAGAGTCGCTCAAGACCTTATAAAGCCAAACTAACCTATTGCCTTAATAAAGGTGCTTCAGAGCGAGAACTACAGGAAATAGATTCACTTATTTATGACAAT

SEQ ID NO: 4914 - protein, 470 aa, Streptococcus agalactiae
MEKERRVQYRLLSFLRGSPQAIALKLALLETGLSRATLLKYINNLNSYFEQEKVNCRIVYYKDKLFLEEDYNLSNQEVLKALMKDSIKYTILISLFNQRQFTIVGLSQELMVSEATLNRHLAHLNELLAEFDIAISQGKQIGDELQWRYFYYELFKQLWSYDKCQNMIKKLDLDSLILLIERLAQHTLTREAQQNLGLWFSICHHRLLAMEKISDNLKPIVEHYQCNAFYKRLDAALVLYMSRFALEYREGEVLATFAFLHSQNILPINTMEYIMGFGGPIIDCVTETIIYFKKESILADETSDQVIYQLGQLYSHYYFFKGHILVEQPDLEQTYRLIDHNMRDKLHHISKKIIANVNRIRPLTEDGCSLLTLHLLELLIFSKNSQKMPFRIGLDMTGNAVEQSLLEYRIRQHFSGNNSIQVEPYDEGKGFDMVIYQSRSRPYKAKLTYCLNKGASERELQEIDSLIYDN

SEQ ID NO: 4915 - protein, 1869 aa, Streptococcus agalactiae
ATGGCTTATGTGCTTTGGAATAAATTCTTAAATGTAAACCCAAAAACAAGTCGCAATTGGACAAACCGTGACCGTTTTGTGCTATCAGCTGGGCATGGTTCAGCTCTTCTTTATAGCCTACTTCATTTAGCTGGCTATGATTTATCAATTGATGATTTAAAACAATTCCGCCAATGGGGATCAAAAACACCTGGACATCCAGAAGTTAACCATACTGATGGTGTAGAAGCAACAACTGGACCTTTAGGGCAAGGTATTGCTAATGCTGTTGGTATGGCAATGGCTGAAGCTCATTTGGCTGCTAAATTTAATAAACCAGGCTTTGATTTAGTTGATCATTACACTTATACACTTCATGGTGATGGTTGTTTGATGGAGGGTGTTAGCCAAGAAGCTGCCAGTCTTGCTGGACACTTAAAACTTGGTAAATTGGTCCTTCTTTATGATTCAAATGATATCTCACTTGATGGTCCAACGTCTCAATCATTTACAGAAGATGTTAAAGGGCGTTTTGAATCATATGGTTGGCAACATATCTTAGTTAAAGATGGTAATGATTTAGAAGCGATTGCTGCAGCAATTGAAGCTGCTAAAGCTGAAACTGATAAACCAACCATTATTGAAGTTAAAACTATTATTGGATTTGGCGCAGAGAAACAGGGAACATCTTCAGTTCATGGAGCGCCACTTGGTGCAGAAGGTATTACTTTTGCCAAGAAGGCTTATGGATGGGAATATCCAGACTTTACTGTTCCTGCTGAAGTTGTAGCTCGATTTGCCTCAGATCTTCAAGCGCGTGGTGCGAAGGCAGAAGAGGCATGGAATGATCTTTTTGCTAAATATGAAGTTGAGTATCCAGAATTAGCAGCTGAATACAAAGAAGCTTTTGCTGGCCAAGCTGAGACAGTTGAATTGAAAGCTCATGACCTAGGTTCATCAGTGGCTAGTCGTGTTTCAAGCCAACAAGCTATTCAACAATTATCGACTCAATTACCGAACCTCTGGGGAGGGTCAGCAGACCTCTCAGCTTCTAATAACACAATGGTAGCAGCAGAAACAGATTTCCAAGCAAGTAATTACGCTGGGCGTAACATTTGGTTTGGTGTACGTGAATTTGCAATGGCTGCTGCAATGAATGGAATTGCGCTTCACGGTGGGACTCGTGTTTATGGGGGTACATTCTTTGTCTTCTCAAACTACTTGTTACCAGCAGTACGTATGGCTGCACTTCAAAACTTGCCAACTGTCTATGTTATGACACATGATTCTATTGCTGTTGGAGAAGATGGGCCAACTCATGAGCCAATAGAACAATTAGCATCAGTGCGCTCAATGCCTAATTTGAACGTTATCCGTCCCGCAGACGGTAATGAAACAAACGCTGCATGGCAACGAGCTGTATCAGAGACAGATCGACCAACGATGCTTGTTTTAACACGTCAAAACTTACCAGTTCTTGAAGGAACATCAGAATTAGCCCAAGAAGGGGTTAATAAAGGTGCTTATATTTTATCAGAAGCTAAAGGTGAACTTGATGGTATCATCATTGCAACAGGTTCAGAAGTTAAATTAGCTTTAGATACTCAAGACAAACTTGAGTCAGAGGGCATCCATGTTCGCGTCGTATCTATGCCAGCACAAAACATTTTTGATGAACAAGAGGCTTCATATCAAGAGCAAGTGCTTCCATCAGCTGTTACAAAACGTCTTGCTATTGAGGCAGGATCAAGCTTCGGTTGGGGTAAATATGTTGGTTTAAATGGGCTAACACTTACTATTGATACTTGGGGAGCATCAGCACCAGGTAACAGAATTTTCGAAGAGTATGGCTTTACAGTTGAGAATGCTGTATCGCTATATAAAGAACTT

SEQ ID NO: 4916 - protein, 623 aa, Streptococcus agalactiae
MAYVLWNKFLNVNPKTSRNWTNRDRFVLSAGHGSALLYSLLHLAGYDLSIDDLKQFRQWGSKTPGHPEVNHTDGVEATTGPLGQGIANAVGMAMAEAHLAAKFNKPGFDLVDHYTYTLHGDGCLMEGVSQEAASLAGHLKLGKLVLLYDSNDISLDGPTSQSFTEDVKGRFESYGWQHILVKDGNDLEAIAAAIEAAKAETDKPTIIEVKTIIGFGAEKQGTSSVHGAPLGAEGITFAKKAYGWEYPDFTVPAEVVARFASDLQARGAKAEEAWNDLFAKYEVEYPELAAEYKEAFAGQAETVELKAHDLGSSVASRVSSQQAIQQLSTQLPNLWGGSADLSASNNTMVAAETDFQASNYAGRNIWFGVREFAMAAAMNGIALHGGTRVYGGTFFVFSNYLLPAVRMAALQNLPTVYVMTHDSIAVGEDGPTHEPIEQLASVRSMPNLNVIRPADGNETNAAWQRAVSETDRPTMLVLTRQNLPVLEGTSELAQEGVNKGAYILSEAKGELDGIIIATGSEVKLALDTQDKLESEGIHVRVVSMPAQNIFDEQEASYQEQVLPSAVTKRLAIEAGSSFGWGKYVGLNGLTLTIDTWGASAPGNRIFEEYGFTVENAVSLYKEL

SEQ ID NO: 4917 - protein, 309 aa, Streptococcus agalactiae
TTGTTTATGAAGAAGGAGTGTCGTGATTTTTATCGGCAGATACAGCATACTTACAATGATATAGCTGTCCGTGAAGATGCAGTGCTATCATCAATACTATTATCAGCATCGAATGGTTTGATAAAAACTAGCGATGTACCTCGTGTTGCTTATGAGTTAACTCAGCAATTGGAAAATAATGAGATAGAAAAATCTTTCGAGTCATTAGCTACAGTTAAGGAATTGAAAAAATCTGCTAAAAAATTGTCTGAGAGATATGAGCAAAATAAGGTAACAACGGGATTGCTTTCTAAAGTATTTGGAAATCAT

SEQ ID NO: 4918 - protein, 103 aa, Streptococcus agalactiae
MFMKKECRDFYRQIQHTYNDIAVREDAVLSSILLSASNGLIKTSDVPRVAYELTQQLENNEIEKSFESLATVKELKKSAKKLSERYEQNKVTTGLLSKVFGNH

SEQ ID NO: 4919 - protein, 732 aa, Streptococcus agalactiae
ATGATTAAGTTTGAACATGTTTCGAAAGTATACGGGGAAAAAGAAGCTCTCAGTGATTTAACCCTCTCTATTAAAGATGGTGAGATTTTTGGATTAATAGGTCACAATGGAGCAGGAAAAACAACGACAATTAGTATTCTAACATCTATTATTGATGCAACTTATGGCCAAGTCTATATTGATGACCTACTTTTGACAGAACATCGTGACCAAATTAAGAAAAAAATAGGTTATGTACCGGACTCGCCAGATATTTTCTTAAATTTAACCGCAGAGGAATACTGGTACTTTTTAGCTAAAATTTATGACGTTGCCCCAGAAGATATTGAAGCACGTATCACAAAATTGGTAGACATATTTGAACTAGAGGAGCAACGCTATAATCCTATTGAAAGTTTTTCACATGGTATGCGTCAAAAAGTCATTGTTATAGGTGCCCTTCTTCCAAATCCTGACATTTGGATTCTAGATGAGCCGTTAACTGGTTTAGACCCTCAAGCTTCTTTTGATTTGAAAGAAATGATGAAAGAACATGCTAAAAATGGAAAAACAGTTATTTTTTCAACACATGTTTTAGCAGTTGCAGAACAGTTATGCGACAGAATAGGTATTTTGAAACAAGGGAAATTAATCTTTGTCGGTAGCTTAGGTGAGTTAAAAATGCAATATCCAGATAAAGATTTGGAAACTATCTATTTGGAATTAGCAGGACGTCAAGCTAATAGGGAGGGA

SEQ ID NO: 4920 - protein, 244 aa, Streptococcus agalactiae
MIKFEHVSKVYGEKEALSDLTLSIKDGEIFGLIGHNGAGKTTTISILTSIIDATYGQVYIDDLLLTEHRDQIKKKIGYVPDSPDIFLNLTAEEYWYFLAKIYDVAPEDIEARITKLVDIFELEEQRYNPIESFSHGMRQKVIVIGALLPNPDIWILDEPLTGLDPQASFDLKEMMKEHAKNGKTVIFSTHVLAVAEQLCDRIGILKQGKLIFVGSLGELKMQYPDKDLETIYLELAGRQANREG

SEQ ID NO: 4921 - protein, 1602 aa, Streptococcus agalactiae
ATGAATTGGTCACGTATCTGGGAACTCGTAAAAATTAATATCCTTTATTCAAACCCTCAGACTCTATCGGCACTAAGAAAAAAGCAAGAAAAGCATCCTAAAAAAGAATTTTCAGCTTATAAATCCATGTTTAGAAATCAGTTATTTCAGATTTTGCTCTTTTCAATAATTTATGTATTTCTCTTTGTATCACTTGATTTTAAAGAATATCCGGGCTATTTCACGTTCTACATTGGTATCTTTACACTAGTATCCATTATCTACTCTTTTATTGCGATGTACAGTGTTTTCTATGAGAGTGACGATGTTAAACAATATGCTTATTTGCCTATTAAATCTGAAGAGCTCTATGTTGCTAAAATTTTTGCAACATTTGGGATGTCTGTAACTTTTCTAATGCCAATCCTAACCTTAATGATTGTGGCTTATTGGCGTATAATAGGTGGCCCACTTGCGGTCCTCCTAGCAATCATAAATTTTGCTATTTTATTTTTATCGGTAACGGTAATTTCATTGTATATTAATAGTTTAATAGGCCGTGCCATTATTCGAAGTGCTAATCGGAAACTTATTTCTACTATATTAATTTCACTAGCTACATTTGGAGCAATAGTTCCCTTATTATTTGTGAATATGACTAGTCAAAAGATGGTACAAGGGAAATTACAAGATATCGCTCCAATTCCTTATGTCAGAGGTTATTATGATATTGTTACAGCGCCGTTTAGTATGGAGAGTCTCCTCAACTATTATCTTCCGCTCTTAATCATTTTATTCTTGATAGGTGCTATTTATAAATGGGTTATGCCACGCTACTATCAGGAGTTGTTGTATGGACAGGTCAAGCAGAGAAAAGTCCATCGTCAAATCGATTTTAGTAAACGTGAGTCAATTAATAAAACTCTTGTTAAACACCATTTATCAAGTTTACAAAATGCGACATTATTGACAAATACATTTTTAATGCCACTATTATATCTAGCAATGTTCATTGTTCCAATTTTGAATAATGGTAAAGAGATTGGTCGATTTTTTAATGAAAATTATTTTGGGATAGCTTTTCTAGCAGGAATATTAATAGGTAGTTTATGTGTGATGCCAGCTAGCATTGTAGGGGTAGGTATTTCTTTAGAAAAAAGTAATTTCTACTTTATAAAAAGTTTGCCTATATCATTTTCGTATTTCTTGAAGCATAAATTTGTAACTTTGATAACCTTACAACTTGCAGTTCCTACTTTTATTTATTTCTTGGTAGGATTCTTTCTACTTAAGCTATCAATCCTCGTTTTATTGAGCTTCATTTTAGGTCTAGTCTTCATGGGACTTATCGAAGGCCAGTTTATTTATAGACGTGACTATAAACATCTGTTCTTGAATTGGCAAGAGGTTACGCAACTATTTAATAGAGGGGTAGGCCAATGGCTGTTAGTTGGTTCATTGTTTGGAATGATGATAATAGGTAGTTTTCTTATTGGAATAAGTATTTTTTGGTCAATGGTATGGAATACTGTAGCTGTCAATATCATAATCCTTATTACTGGGTTGCTCATATTATCAATTTGTCAATATCTACTGCTAAAAAATTTTTGGAAGAAGCTTGTT

SEQ ID NO: 4922 - protein, 534 aa, Streptococcus agalactiae
MNWSRIWELVKINILYSNPQTLSALRKKQEKHPKKEFSAYKSMFRNQLFQILLFSIIYVFLFVSLDFKEYPGYFTFYIGIFTLVSIIYSFIAMYSVFYESDDVKQYAYLPIKSEELYVAKIFATFGMSVTFLMPILTLMIVAYWRIIGGPLAVLLAIINFAILFLSVTVISLYINSLIGRAIIRSANRKLISTILISLATFGAIVPLLFVNMTSQKMVQGKLQDIAPIPYVRGYYDIVTAPFSMESLLNYYLPLLIILFLIGAIYKWVMPRYYQELLYGQVKQRKVHRQIDFSKRESINKTLVKHHLSSLQNATLLTNTFLMPLLYLAMFIVPILNNGKEIGRFFNENYFGIAFLAGILIGSLCVMPASIVGVGISLEKSNFYFIKSLPISFSYFLKHKFVTLITLQLAVPTFIYFLVGFFLLKLSILVLLSFILGLVFMGLIEGQFIYRRDYKHLFLNWQEVTQLFNRGVGQWLLVGSLFGMMIIGSFLIGISIFWSMVWNTVAVNIIILITGLLILSICQYLLLKNFWKKLV

SEQ ID NO: 4923 - protein, 1383 aa, Streptococcus agalactiae
ATGTCTAGAGAATACATCGCCTTGTCAAAAAATATCATCAAACACCTTGGTGGGCAAAATAATATTAACAATGTTTACCATTGTCAAACACGCCTTCGCTTTAGTCTCAATGATCCGACGAAAGTAAACCTTGAGCAATTAAAAACTTTAAAAGAGGTAAAAACTGTCGTTATCAGCGGAGGGCAACATCAGATAGTGATCGGGACTCATGTCGCAAAAGTGTTTGAAGAAATTAACTCCCTCATTGAAACTAACTCAACGACTAAAACAGAACAAACTAAAAAAGCCAAAGCAGTTAGTCGAATTATTGATTTTGTTTCTGGGACTTTCCAACCGATTTTACCAGCTTTATCAGGCGCTGGTATGATTAAGGCATTGCTAGCTTTATTACTAGTATTCAAAATCTTGACACCGTTATCTCAAACATATATATTACTAAATCTTTTTGCAGATGGTGTTTTCTATTTTTTACCTATCTTAATCGCTATCACAGCTGCTCAAAAATTGAAAGCTAATCCTATTTTAGCTTTGGGAACTGTTGTCATGCTCCTTCACCCTAATTGGGCTAATTTAGTAGCTTCTGGTAAACCAGTATCCTTATTCCATACGATCCCATTCACACTTACTAACTATGCATCAAGTGTCATTCCCATTATTCTAATTATTTGTGTTCAGGCTTATATAGAAAAATATTTAAATCAAATTATTCCTAAATCACTACGTTTAGTGCTTGTTCCTATGTTAATATTTCTCAGCATGGGAATTTTGTCGTTCTCTATATTGGGACCAATGGGTACTATCGCTGGCCAATATTTAGCTGTTATTTTTACTTTTTTATCCAAATACGCCAGTTGGGCACCTGCTTTTCTAGTAGGAGCATTTGCTCCTATCCTAATCATGTTTGGTGTTCATAGTGGAATTGCTGCATTAGGAATCACACAACTAACGAAATTAGGGTTTGATTCTATTTTTGGACCAGGCATGCTCTGCTCAAATATCGCACAAGCAACTGCAGGTACAGTGGTGACTCTTATAACAAAAGAAAAAAAGCTTAAAGAAATTGCTGGACCTGCTGCCATAACAGCTTATATGGGAATCACCGAACCTATCTTATATGGTGTCAACCTTCCGAAACGTTATCCTCTAATAGCCTCACTTATTGGTGGTGGTCTTGGAGGACTATATGCCGGTATAATGAACGCTCACCGCTTTGCTGTAGGCTCTTCTGGTCTACCAGGTCTGTTTCTTTATATCAGTCATACTTCAACACATCTTTTTATTACCATGCTTATTGCAGTTATCATTACTGTAAGCACAACTGCTATATTGACATTCATTCTAGCACAATATTACGAAAAACAAGTTAGCATCAGACAAAGAGAC

SEQ ID NO: 4924 - protein, 461 aa, Streptococcus agalactiae
MSREYIALSKNIIKHLGGQNNINNVYHCQTRLRFSLNDPTKVNLEQLKTLKEVKTVVISGGQHQIVIGTHVAKVFEEINSLIETNSTTKTEQTKKAKAVSRIIDFVSGTFQPILPALSGAGMIKALLALLLVFKILTPLSQTYILLNLFADGVFYFLPILIAITAAQKLKANPILALGTVVMLLHPNWANLVASGKPVSLFHTIPFTLTNYASSVIPIILIICVQAYIEKYLNQIIPKSLRLVLVPMLIFLSMGILSFSILGPMGTIAGQYLAVIFTFLSKYASWAPAFLVGAFAPILIMFGVHSGIAALGITQLTKLGFDSIFGPGMLCSNIAQATAGTVVTLITKEKKLKEIAGPAAITAYMGITEPILYGVNLPKRYPLIASLIGGGLGGLYAGIMNAHRFAVGSSGLPGLFLYISHTSTHLFITMLIAVIITVSTTAILTFILAQYYEKQVSIRQRD

SEQ ID NO: 4925 - protein, 801 aa, Streptococcus agalactiae
ATGAAAAGACATTTTGAGACAACTAGAAGAATTGTTATTAAAGTAGGAACCAGTTCCCTCGTACAGACAAGCGGGAAAATTAATTTAAGTAAAATAGACCATTTAGCATTTGTTATTTCTAGTCTTATGAATAGAGGCATGGAGGTGATTTTAGTATCATCTGGAGCTATGGGGTTTGGTTTAGACATTTTGAAAATGGATAAGCGTCCTCAAGAAATATCACAACAACAAGCAGTTTCTAGCGTAGGACAAGTAGCCATGATGAGTCTTTATTCTCAGATATTTTCGCACTATCAAACTCATGTTTCCCAAATTTTATTAACACGTGACGTTGTGGTTTTTCCAGAGAGTTTGCAAAATGTAACAAACTCTTTTGAGAGTCTGCTCTCTATGGGAATTTTGCCAATCGTCAATGAGAATGATGCTGTCAGCGTGGATGAGATGGATCATAAAACGAAGTTTGGGGATAATGACCGTCTCTCTGCTGTCGTTGCTAAAATTACTAAAGCAGATTTATTAATTATGCTGTCAGATATTGATGGTCTTTTTGATAAAAATCCTAATATTTATGATGATGCTGTTTTACGTAGTCATGTTTCTGAGATCACCGATGACATCATTAAGTCAGCTGGAGGAGCAGGAAGTAAGTTTGGTACTGGTGGCATGCTTAGTAAAATTAAAAGTGCACAAATGGTGTTTGATAACAATGGACAAATGATATTGATGAATGGCGCCAATCCTCGTGATATTTTAAAGGTGTTAGATGGGCATAATATTGGAACTTATTTTGCTCAAGGAAAG

SEQ ID NO: 4926 - protein, 267 aa, Streptococcus agalactiae; identical to SEQ ID NO: 578

SEQ ID NO: 4927 - protein, 1192 aa, Streptococcus agalactiae
ATGACGTATATTGAAATATTAGGGCAAAATGCTAAAAAAGCTAGTCAATCAGTAGCACGATTAAGTACAGCTAGTAAAAATGAGATACTCAGGGACTTAGCGAGAAACATAGTGGCTGATACTGAAACCATTTTGACTGAGAATGCTCGCGATGTTGCTAAGGCAAAAGATAATGGTATCTCAGAAATTATGGTGGACCGTCTACGACTAAACAAAGACCGCATACAGGCGATAGCAAACGGTATTTATCAGGTAGCAGATTTGGCAGATCCGATTGGTCAAGTTGTTAGTGGTTATACAAATTTAGATGGTTTAAAAATCCTTAAAAAAAGAGTGCCTTTAGGGGTTATTGCAATGATATTTGAAAGTCGTCCCAATGTATCGGTGGATGCCTTTAGTTTAGCTTTTAAAACAGGGAACGCTATTATTTTACGTGGTGGTAAAGATGCTATTTTTTCAAATACTGCCTTGGTTAATTGTATGCGCCAAACATTGCAAGATACAGGCCACAACCCAGATATAGTACAATTAGTTGAAGATACTAGTCACGTTGTAGCAGAGGAGTTAATGCAGGCAACAGACTACGTGGACGTCTTAATTCCAAGAGGTGGTGCAAAATTAATTCAAACGGTGAAGGAAAAGTCAAAGATTCCTGTTATCGAAACAGGTGTTGGAAATGTTCATATCTATATTGATGAATTTGCAGATTTAGATATGGCAGCTAAGATTGTTATTAATGCTAAAACCCAACGCCCTAGTGTCTGTAATGCTGCTGAAGGGTTAGTTGTTCATCAAGCTATTGCTAAGGGATTTTTATCTCAATTGGAGAAAATGCTCAAAGAATCGAACCAGTCAGTTGAATTTCGTGCCGATGAGGAAGCTTTACAACTTTTAGAAAATGCTGTTGCTGCAAGTGAGTCTGATTATGCTACTGAATTTTTAGACTATATTATGTCAGTGAAAGTAGTAGATTCTTTTGAACAAGCAATTAGCTGGATTAATAAATACAGTAGTCATCACTCAGAAGCTATCATTACTAATAATATCAGTAGAGCAGAAATTTTTCAGGATATGGTAGATGCAGCGGCAGTTTATGTTAATGCTTCAACACGTTTTACAGATGGTTTCGTTTTTGGACTCGAGCAGAGATTGGTATTTCGACTCAAAATACACGCGCGTGGACCGATGGGAT

SEQ ID NO: 4928 - protein, 398 aa, Streptococcus agalactiae
  VARIANT 390: Xaa = Any Amino Acid
MTYIEILGQNAKKASQSVARLSTASKNEILRDLARNIVADTETILTENARDVAKAKDNGISEIMVDRLRLNKDRIQAIANGIYQVADLADPIGQVVSGYTNLDGLKILKKRVPLGVIAMIFESRPNVSVDAFSLAFKTGNAIILRGGKDAIFSNTALVNCMRQTLQDTGHNPDIVQLVEDTSHVVAEELMQATDYVDVLIPRGGAKLIQTVKEKSKIPVIETGVGNVHIYIDEFADLDMAAKIVINAKTQRPSVCNAAEGLVVHQAIAKGFLSQLEKMLKESNQSVEFRADEEALQLLENAVAASESDYATEFLDYIMSVKVVDSFEQAISWINKYSSHHSEAIITNNISRAEIFQDMVDAAAVYVNASTRFTDGFVFGLGAEIGISTQXYTRVDRWD

SEQ ID NO: 4929 - protein, 669 aa, Streptococcus agalactiae
GTGTTTGAAGAAATTAACTCCCTCATTGAACCTAACTCACCGGCTAAACCAGACCAACCTAAAAAAGCCAAAGCAGTTAGTCGAATTATTGATTTGTTTTCTGGGACTTTCCAACCGATTTTACCAGCTTTATCAGGCGCTGGTATGATTAAGGCATTGCTAGCTTTATTACTAGTATTCAAAATCTTGACACCGTTATCTCAAACATATATATTACTAAATCTTTTTGCAGATGGTGTTTTCTATTTTTTACCTATCTTAATCGCTATCACAGCTGCTCAAAAATTGAAAGCTAATCCTATTTTAGCTTTGGGAACTGTTGTCATGCTCCTTCACCCTAATTGGGCTAATTTAGTAGCTTCTGGTAAACCAGTATCCTTATTCCATACGATCCCATTCACACTTACTAACTATGCATCAAGTGTCATTCCCATTATTCTAATTATTTGTGTTCAGGCTTATATAGAAAAATATTTAAATCAAATTATTCCTAAATCACTACGTTTAGTGCTTGTTCCTATGTTAATATTTCTCAGCATGGGAATTTTGTCGTTCTCTATATTGGGACCAATGGGTACTATCGCTGGCCAATATTTAGCTGTTATTTTTACTTTTTTATCCAAATACGCCAGAAGGGCACCTGCTTTTCTAGTAGGAGCNNNNNTTAAT

SEQ ID NO: 4930 - protein, 223 aa, Streptococcus agalactiae
  VARIANT 221, 222: Xaa = Any Amino Acid
MFEEINSLIEPNSPAKPDQPKKAKAVSRIIDLFSGTFQPILPALSGAGMIKALLALLLVFKILTPLSQTYILLNLFADGVFYFLPILIAITAAQKLKANPILALGTVVMLLHPNWANLVASGKPVSLFHTIPFTLTNYASSVIPIILIICVQAYIEKYLNQIIPKSLRLVLVPMLIFLSMGILSFSILGPMGTIAGQYLAVIFTFLSKYARRAPAFLVGAXXN

SEQ ID NO: 4931 - protein, 603 aa, Streptococcus agalactiae
ATGGGGTTTGGTTTAGACATTTTGAAAATGGATAAGCGTCCTCAAGAAATATCACAACAACAAGCAGTTTCTAGCGTAGGACAAGTAGCCATGATGAGTCTTTATTCTCAGATATTTTCGCACTATCAAACTCATGTTTCCCAAATTTTATTAACACGTGACGTTGTGGTTTTTCCAGAGAGTTTGCAAAATGTAACAAACTCTTTTGAGAGTCTGCTCTCTATGGGAATTTTGCCAATCGTCAATGAGAATGATGCTGTCAGCGTGGATGAGATGGATCATAAAACGAAGTTTGGGGATAATGACCGTCTCTCTGCTGTCGTTGCTAAAATTACTAAAGCAGATTTATTAATTATGCTGTCAGATATTGATGGTCTTTTTGATAAAAATCCTAATATTTATGATGATGCTGTTTTACGTAGTCATGTTTCTGAGATCACCGATGACATCATTAAGTCAGCTGGAGGAGCAGGAAGTAAGTTTGGTACTGGTGGCATGCTTAGTAAAATTAAAAGTGCACAAATGGTGTTTGATAACAATGGACAAATGATATTGATGAATGGCGCCAATCCTCGTGATATTTTAAAGGTGTTAGATNNNNNT

SEQ ID NO: 4932 - protein, 201 aa, Streptococcus agalactiae
  VARIANT 200, 201: Xaa = Any Amino Acid
MGFGLDILKMDKRPQEISQQQAVSSVGQVAMMSLYSQIFSHYQTHVSQILLTRDVVVFPESLQNVTNSFESLLSMGILPIVNENDAVSVDEMDHKTKFGDNDRLSAVVAKITKADLLIMLSDIDGLFDKNPNIYDDAVLRSHVSEITDDIIKSAGGAGSKFGTGGMLSKIKSAQMVFDNNGQMILMNGANPRDILKVLDXX

SEQ ID NO: 4933 - protein, 684 aa, Streptococcus agalactiae
ATGCAGGCAACAGACTACGTGGACGTCTTAATTCCAAGAGGTGGTGCAAAATTAATTCAAACGGTGAAGGAAAAGTCAAAGATTCCTGTTATCGAAACAGGTGTTGGAAATGTTCATATCTATATTGATGAATTTGCAGATTTAGATATGGCAGCTAAGATTGTTATTAATGCTAAAACCCAACGCCCTAGTGTCTGTAATGCTGCTGAAGGGTTAGTTGTTCATCAAGCTATTGCTAAGGGATTTTTATCTCAATTGGAGAAAATGCTCAAAGAATCGAACCAGTCAGTTGAATTTCGTGCCGATGAGGAAGCTTTACAACTTTTAGAAAATGCTGTTGCTGCAAGTGAGTCTGATTATGCTACTGAATTTTTAGACTATATTATGTCAGTGAAAGTAGTAGATTCTTTTGAACAAGCAATTAGCTGGATTAATAAATACAGTAGTCATCACTCAGAAGCTATCATTACTAATAATATCAGTAGAGCAGAAATTTTTCAGGATATGGTAGATGCAGCGGCAGTTTATGTTAATGCTTCAACACGTTTTACAGATGGTTTCGTTTTTGGACTCGGAGCAGAGATTGGTATTTCGACTCAAAAATTACACGCGCGTGGACCGATGGGATTAGAAGCTTTAACAAGTACAAAATACTATATTAATGGAACTGGTCAAGTAAGGGAA

SEQ ID NO: 4934 - protein, 228 aa, Streptococcus agalactiae
MQATDYVDVLIPRGGAKLIQTVKEKSKIPVIETGVGNVHIYIDEFADLDMAAKIVINAKTQRPSVCNAAEGLVVHQAIAKGFLSQLEKMLKESNQSVEFRADEEALQLLENAVAASESDYATEFLDYIMSVKVVDSFEQAISWINKYSSHHSEAIITNNISRAEIFQDMVDAAAVYVNASTRFTDGFVFGLGAEIGISTQKLHARGPMGLEALTSTKYYINGTGQVRE

SEQ ID NO: 4935 - protein, 894 aa, Streptococcus agalactiae
ATGCTTGATATTAAGCCAGATGGTATCTATGTAGATGCTACTTTAGGTGGGGCAGGACACAGCGAATATCTTCTTTCACAATTAGGCCCAGATGGGCACCTTTACGCATTTGACCAAGACCAGAAGGCTATTGACAATGCTCATATACGTTTAAAGAAATATGTGGATACCGGTCAAGTAACCTTTATCAAAGATAATTTCAGAAATCTATCTTCTAACTTAAAAGCATTAGGAGTGTCGGAAATTAATGGTATTTGCTATGATTTAGGTGTATCAAGCCCACAGCTGGACGAGCGTGAACGCGGTTTCTCATATAAACAAGATGCCCCCCTTGATATGCGAATGAATAGAGAGCAGAGCCTTACAGCTTATGACGTTGTGAACACTTATAGTTATCATGATTTAGTAAGGATTTTCTTTAAGTATGGCGAAGATAAATTTTCAAAACAAATTGCTCGAAAAATTGAGCAAGTACGAGCTGAAAAACCAATATCTACAACAACAGAATTGGCTGAGATTATCAAATCGTCTAAATCTGCCAAAGAACTGAAGAAAAAAGGTCACCCAGCTAAACAAATTTTTCAAGCTATTCGTATTGAAGTCAATGACGAACTAGGAGCTGCAGATGAATCTATACAACAAGCAATGGACTTATTAGCTGTTGATGGTCGTATATCTGTCATCACTTTTCATTCTTTAGAAGATCGTCTTACTAAGCAACTTTTTAAAGAAGCATCAACAGTAGAAGTACCTAAAGGTCTTCCTTTTATACCAGATGATTTACAACCTAAGATGGAGCTCGTTAATCGTAAACCCATCTTACCAAGTCAAGAAGAACTAGAAGCGAACAATCGTGCCCATTCAGCGAAATTGAGAGTAGCGCGTCGTATTCGA

SEQ ID NO: 4936 - protein, 298 aa, Streptococcus agalactiae
MLDIKPDGIYVDATLGGAGHSEYLLSQLGPDGHLYAFDQDQKAIDNAHIRLKKYVDTGQVTFIKDNFRNLSSNLKALGVSEINGICYDLGVSSPQLDERERGFSYKQDAPLDMRMNREQSLTAYDVVNTYSYHDLVRIFFKYGEDKFSKQIARKIEQVRAEKPISTTTELAEIIKSSKSAKELKKKGHPAKQIFQAIRIEVNDELGAADESIQQAMDLLAVDGRISVITFHSLEDRLTKQLFKEASTVEVPKGLPFIPDDLQPKMELVNRKPILPSQEELEANNRAHSAKLRVARRIR

SEQ ID NO: 4937 - protein, 324 aa, Streptococcus agalactiae
ATGACAAATGAAAAACGAACTGAAGCAGTAACACAAACTTTACAACGTCACATCAAGACTTTCTCTCGCATTGAGAAAGCTTTTTATGGCGCTATTGTAATTACTGCTATTATCATGGCAGTCGGTATTATTTACTTGCAAAGTAATAGTTTACAAGTTAAACAAGAAGTAAATCAATTAAATAGTAAAATCAACGATAAACAGACAGAATTTGACAATGCTAAACAAGAAGTAAATGAGCTTTCTAATCGTGATCGAATTACTAAAATTGCTAAAGATGCTGGTTTAACAATTCAAAACGACAATATTTATCGGAAGGTGGAC

SEQ ID NO: 4938 - protein, 108 aa, Streptococcus agalactiae; identical to SEQ ID NO: 584

SEQ ID NO: 4939 - protein, 2256 aa, Streptococcus agalactiae
GTGACTTTTTTTAAAAAGCTAAAAAAAATCTTCCTTGATTATGTGATCCATATAAGAGATAGGCGTTCGCCACAGAAAAATAGGGAAAGAGTAGGTCAAAATTTGATGATTTTAACCATTTTCCTATTTTTCATTTTTATCATTAACTTTGTCATCATCGTTGGTACAGATAGTAAATTTGGGGTTAATTTATCCAAGGAAGCCAAGAAAGTCTATCAACAAAGTATGACAGTACAGGCGAAGCGTGGGACAATTTACGACCGTAATGGAAATCCTATCGCTGAGGATGCTACGACCTATAGTCTCTATGCTATTATCTCAAAGAACTATACGACAGCTACAGGTCAAAAACTATATGTACAACCTTCTCAGTATGAAAAAGTAGCTAGTATCTTAGAGAATAAATTGGGCATGAAGAAAAATCTTGTCCTAAAACAACTCAATCAAAAAAAATTGTTTCAAGTTTCCTTTGGAAGTTCAGGTTCAGGATTGTCTTATACCAAGATGGCTGACATCAAGAAAACGATGGAAAAGTCAGATATCAAAGGAATTGGTTTTTCTACCAGTCCGGGGCGTATTTATCCAAATGGGATATTTGCTTCACAATTTATAGGATTTACTCTTCCTCAGGATGATGGAGATGGAAAAAAATTAGTTGGTAATACAGGCCTTGAAGCGGCACTTAACAAGGTATTATCAGGTACTGATGGTAAAGTAACATACGAAAAAGACCGTAGTGGGAATGTTCTTTTAGGTACTGCAACAACAGAACGTAGGGCGGTTAATGGTAAGGATATCTACACAACTTTATCAGAGCCTATTCAGACTGTTTTAGAGACTCAGATGGATGTTTTCGCAGAAAAAACCAAAGGAAAATTTGCGAGTGCTACAGTTGTCAACGCTAAAACAGGAGAAATTCTAGCAACGAGTCAGCGTCCTACTTATAATCCTTCTACCCTTAAAGGTTACGATAAGAAAAATTTGGGTACCTATAACACACTACTATATGATAATTTTTTTGAACCTGGTTCAACAATGAAGGTAATGACTCTAGCTTCTGCAATTGATTCTAAGCATTTTAACTCTACTGAAGTGTATAACAGTGCACAATATAAAATCGCAGATGCGGTTATTCGAGATTGGGATGTCAATGAAGGGTTATCATCTGGTAGTTATATGACTTTTCCACAAGGGTTTGCACATTCCAGTAACGTTGGTATGGTAACCTTGGAACAAAAAATGGGACGAGATAAATGGTTAAACTATCTTTCTAAGTTTAAATTTGGTTACCCAACACGTTTTGGGATGCTTCATGAAAGTGGAGGTTTGTTCCCATCTGACAATGAAGTAACTATCGCTATGAGCTCATTTGGTCAAGGTATTGGTGTAACGCAAGTTCAAATGTTGCGCGCATTTACGTCTATCTCGAATGATGGTGTTATGTTACAACCACAGTTTATTAGCAGTATTTATGATCCAAATACAGGGACTTCTCGTACAGCACGAAAAGAAGTTGTTGGAAAACCAATTTCCAAAGAAGCAGCTAGTAAAACACGTGATTATATGGTTACTGTTGGGACAGATCCTTATTATGGTACATTATATGCAGCAGGTGCCCCAGTTATTCAGGTGGGCAATCAATCAGTTGCAGTAAAATCTGGTACTGCCCAAATAGCTCAGGAAGGTGGTGGTGGTTATCTGCAAGGAAAGAATGATACTATTAACTCAGTTGTGGCTATGGTGCCATCGGAAAATCCTGACTTCATCATGTATGTTACCATCCAACAACCCGAAAAATTTAGTATCACATTCTGGAAAGATGTTGTTAATCCTGTTTTAGAACAAGCAACAGCAATGAAAGAAACGATATTAAAACCGGGATTGAATGACTCAGAACATCAGACAAAATATAAACTATCAAAAATAGTTGGTGAAAATCCAGGTCATGTAGCGGAAGAATTACGTCGTAATCTGGTTCAGCCAATTATTTTAGGAAATGGTAGTAAAGTTTCTAAAGTATCTAAAAGACCAGGAGCTAATCTTGCTGAGAATGAACAGCTACTAGTATTAACAAATAAACTGACTGAATTACCTGATATGTATGGTTGGTCTAAAGCAAACGTTGAACAGTTTGCTAAATGGACAGGTATAAAAGTGACCTATAAAGGTTCAACCTCAGGTAAAGTAAGAAAACAAAGTATTGATGTTGGAAAATCCATCAATAAAATTAAAAAAATCAAAATTACAATAGGAGAT

SEQ ID NO: 4940 - protein, 752 aa, Streptococcus agalactiae
MTFFKKLKKIFLDYVIHIRDRRSPQKNRERVGQNLMILTIFLFFIFIINFVIIVGTDSKFGVNLSKEAKKVYQQSMTVQAKRGTIYDRNGNPIAEDATTYSLYAIISKNYTTATGQKLYVQPSQYEKVASILENKLGMKKNLVLKQLNQKKLFQVSFGSSGSGLSYTKMADIKKTMEKSDIKGIGFSTSPGRIYPNGIFASQFIGFTLPQDDGDGKKLVGNTGLEAALNKVLSGTDGKVTYEKDRSGNVLLGTATTERRAVNGKDIYTTLSEPIQTVLETQMDVFAEKTKGKFASATVVNAKTGEILATSQRPTYNPSTLKGYDKKNLGTYNTLLYDNFFEPGSTMKVMTLASAIDSKHFNSTEVYNSAQYKIADAVIRDWDVNEGLSSGSYMTFPQGFAHSSNVGMVTLEQKMGRDKWLNYLSKFKFGYPTRFGMLHESGGLFPSDNEVTIAMSSFGQGIGVTQVQMLRAFTSISNDGVMLQPQFISSIYDPNTGTSRTARKEVVGKPISKEAASKTRDYMVTVGTDPYYGTLYAAGAPVIQVGNQSVAVKSGTAQIAQEGGGGYLQGKNDTINSVVAMVPSENPDFIMYVTIQQPEKFSITFWKDVVNPVLEQATAMKETILKPGLNDSEHQTKYKLSKIVGENPGHVAEELRRNLVQPIILGNGSKVSKVSKRPGANLAENEQLLVLTNKLTELPDMYGWSKANVEQFAKWTGIKVTYKGSTSGKVRKQSIDVGKSINKIKKIKITIGD

SEQ ID NO: 4941 - protein, 1008 aa, Streptococcus agalactiae
ATGTTTTTAAGTATAATGGCAGGTGTCATAGCATTTGTCCTGACAGTTATTGCCATTCCACGCTTCATTAAGTTTTACCAATTGAAGAAAATTGGCGGGCAACAAATGCATGAAGATGTCAAACAACATCTAGCCAAAGCAGGTACGCCGACAATGGGAGGAACGGTATTTTTGATTGTTGCTCTTCTTGTCTCACTTATTTTTAGTATTATTTTATCTAAAGAAAATAGTGGTAATTTAGGTGCAACTTTTGGTATTTTATCTGTTGTTCTTATCTATGGAATTATTGGTTTTTTAGATGATTTTTTGAAAATTTTTAAACAAATCAATGAGGGCTTGACTCCAAAGCAAAAAATGTCGCTCCAACTAATTGCGGGTCTAATTTTTTATTTTGTCCATGTGTTACCAAGTGGCACATCTGCGATAAATATTTTTGGTTTTAACCTTGAAGTAGGATACTTATATGCTTTTTTTGTTCTTTTCTGGGTTGTTGGTTTTTCAAACGCTGTGAACCTAACAGATGGAATTGATGGTCTAGCTTCTATTTCGGTTGTTATCAGTTTGATTACTTATGGAATCATTGCTTATAATCAAACGCAATTTGATATTTTATTGATTATCGTTATCATGATTGGTGCTTTACTTGGCTTTTTTGTCTTTAATCATAAACCAGCTAAAGTCTTTATGGGAGATGTTGGTTCACTTGCATTGGGTGCTATGTTAGCAGCCATTTCAATTGCCTTACGTCAGGAATGGACCTTGCTTTTTATCGGCTTTGTCTATGTTTTTGAGACGTCTTCAGTGATGTTGCAAGTAGCATACTTTAAGTATACTAAGAAGAAAACTGGTGTTGGGAAACGTATCTTCCGCATGACACCATTTCATCACCATTTAGAATTAGGTGGTGTGTCTGGCAAAGGTAATAAATGGAGCGAATGGAAAGTAGATGCTTTTTTATGGGCTATTGGTATTTTCATGAGCGCTATTACACTTGCTATTTTATATCTT

SEQ ID NO: 4942 - protein, 336 aa, Streptococcus agalactiae
MFLSIMAGVIAFVLTVIAIPRFIKFYQLKKIGGQQMHEDVKQHLAKAGTPTMGGTVFLIVALLVSLIFSIILSKENSGNLGATFGILSVVLIYGIIGFLDDFLKIFKQINEGLTPKQKMSLQLIAGLIFYFVHVLPSGTSAINIFGFNLEVGYLYAFFVLFWVVGFSNAVNLTDGIDGLASISVVISLITYGIIAYNQTQFDILLIIVIMIGALLGFFVFNHKPAKVFMGDVGSLALGAMLAAISIALRQEWTLLFIGFVYVFETSSVMLQVAYFKYTKKKTGVGKRIFRMTPFHHHLELGGVSGKGNKWSEWKVDAFLWAIGIFMSAITLAILYL

SEQ ID NO: 4943 - protein, 920 aa, Streptococcus agalactiae
ATGTCATTTAAAGATTTTAATTTTAAACCATACATTCAGAGGGCTCTCGATGAGTTAAAATTCGTCGATCCAACTGATGTTCAAGCTAAATTGATTCCAGTTGTTCGTTCAGGCCGCGATCTTGTGGGGGAATCGAAAACTGGTTCTGGTAAAACCCACACCTTTTTACTTCCTATTTTTGAGAAGCTAGATGAAAGTAGTAATGATGTTCAAGTTGTTATTACTGCACCAAGTAGAGAGTTGGCAACACAAATTTATCAGGCAACTAAACAAATTGCTGAGCATTCAGAGCAAGAAATACGGGTGGTTAACTATGTTGGTGGTACTGACAAATTACGTCAAATTGAAAAGTTGAAAGTAAGCCAACCTCATATTGTCATTGGAACCCCAGGACGTATTTATGATTTGGTGAAGTCAGGTGATTTAGCTATTCATAAGGCGCATACTTTTGTGGTTGATGAAGCAGATATGACTCTGGATATGGGATTCCTTGATACCGTTGATAAGATTGCAGGGTCTTTACCCAAGGATGTCCAAATTTTAGTCTTTTCAGCAACGATTCCACAAAAATTACAGCCATTTTTAAAGAAATATTTGACCAATCCTGTAATGGAAAAAATCAAAACAGCAACAGTTATCACTGATACCATCGATAACTGGCTTTTGTCCACTAAAGGACGTGATAAAAATGCACAAATTTTGGAACTCTCTAAACTAATGCAGCCTTACCTTGCAATGATATTTGTTAATACGAAAGAGCGTGCAGACGAATTACACTCGTATCTTTCTAGTAATGGCTTAAAAGTAGCTAAAATTCAGGTGGGATTGCACCTCGTGAACGTAAACGTATTATGAATCAGGTTAAAAACCTCGAATTTGAATATATCGTTGCAACAATTTTAGCAGCGCGNNNNNTTAAT

SEQ ID NO: 4944 - protein, 307 aa, Streptococcus agalactiae
  VARIANT 305, 306: Xaa = Any Amino Acid
MSFKDFNFKPYIQRALDELKFVDPTDVQAKLIPVVRSGRDLVGESKTGSGKTHTFLLPIFEKLDESSNDVQVVITAPSRELATQIYQATKQIAEHSEQEIRVVNYVGGTDKLRQIEKLKVSQPHIVIGTPGRIYDLVKSGDLAIHKAHTFVVDEADMTLDMGFLDTVDKIAGSLPKDVQILVFSATIPQKLQPFLKKYLTNPVMEKIKTATVITDTIDNWLLSTKGRDKNAQILELSKLMQPYLAMIFVNTKERADELHSYLSSNGLKVAKIHGGIAPRERKRIMNQVKNLEFEYIVATILAARXXN

SEQ ID NO: 4945 - protein, 1038 aa, Streptococcus agalactiae
GTGGTTAACTATGTTGGTGGTACTGACAAATTACGTCAAATTGAAAAGTTGAAAGTAAGCCAACCTCATATTGTCATTGGAACCCCAGGACGTATTTATGATTTGGTGAAGTCAGGTGATTTAGCTATTCATAAGGCGCATACTTTTGTGGTTGATGAAGCAGATATGACTCTGGATATGGGATTCCTTGATACCGTTGATAAGATTGCAGGGTCTTTACCCAAGGATGTCCAAATTTTAGTCTTTTCAGCAACGATTCCACAAAAATTACAGCCATTTTTAAAGAAATATTTGACCAATCCTGTAATGGAAAAAATCAAAACAGCAACAGTTATCACTGATACCATCGATAACTGGCTTTTGTCCACTAAAGGACGTGATAAAAATGCACAAATTTTGGAACTCTCTAAACTAATGCAGCCTTACCTTGCAATGATATTTGTTAATACGAAAGAGCGTGCAGACGAATTACACTCGTATCTTTCTAGTAATGGCTTAAAAGTAGCTAAAATTCATGGTGGGATTGCACCTCGTGAACGTAAACGTATTATGAATCAGGTTAAAAACCTCGAATTTGAATATATCGTTGCAACAGATTTAGCAGCGCGTGGTATTGATATTGAAGGTGTTAGCCATGTTATCAATGATGCCATACCTCAAGACCTATCTTTCTTTGTCCACCGTGTCGGTCGCACAGGCCGTAATGGCTTATCTGGTACTGCTATAACTTTATATCAGCCAAGTGACGATTCTGATATTCGTGAACTTGAAAAACTAGGTATTAATTTTATTCCTAAAGTCATTAAGAACGGTGAATTTCAAGATACATACGACCGTGATCGTCGTAATAACCGTGAAAAGTCCTATCAAAAATTAGATACAGAAATGATTGGACTTGTGAAAAAGAAAAAGAAAAAAATAAAACCAGGTTACAAGAAAAAAATTCAATGGAAAGTTGATGAAAAGCGTCGCAAAGAGCGTAGAGCAAGTAATCGTGCTAAGGGGCGTGCGGAGCGCAAAGCTAAAAAACAAAGTTTT

SEQ ID NO: 4946 - protein, 346 aa, Streptococcus agalactiae
MVNYVGGTDKLRQIEKLKVSQPHIVIGTPGRIYDLVKSGDLAIHKAHTFVVDEADMTLDMGFLDTVDKIAGSLPKDVQILVFSATIPQKLQPFLKKYLTNPVMEKIKTATVITDTIDNWLLSTKGRDKNAQILELSKLMQPYLAMIFVNTKERADELHSYLSSNGLKVAKIHGGIAPRERKRIMNQVKNLEFEYIVATDLAARGIDIEGVSHVINDAIPQDLSFFVHRVGRTGRNGLSGTAITLYQPSDDSDIRELEKLGINFIPKVIKNGEFQDTYDRDRRNNREKSYQKLDTEMIGLVKKKKKKIKPGYKKKIQWKVDEKRRKERRASNRAKGRAERKAKKQSF

SEQ ID NO: 4947 - protein, 810 aa, Streptococcus agalactiae
ATGTTTAAAAAAATAATATTATCTATTGCAACTATAGTCGCAACCGCCAGCCTAGCAGTATCAGTTCAGGCGTCAGAGAAAGTAGAACTTAAAGTAGCTACAGATTCTGACACGGCACCATTTACTTATCAAAAAGACGGGAAATTCAAAGGTTATGATGTTGATGTTGTCAAAGCTGTTTTTAAAGGTAGTAAGTACAAAGTAACCTTCAAGACAGTTCCTTTTGATACTATTTCAACAGGTATTGATGCAGGGAAATTTGATTTATCAGCTAATGATTTTTCATACAATAAAGAAAGAGCAGAAAAATATCTCTTCTCAGAGCCTATATCCCGTTCAAATTATGCCGTAGTAGGGAAGAAGGGGAGCCATTACAAATCATTAAGTGACCTCTCTGGAAAATCAACCGAAGTTTTATCTGGCGTTAACTATGCACAGGTTCTAGAAAATTGGAATAAAAATCATCCTAATAAAAAACCAATAAAAATCAAATATGTTTCTGGGACAACTGGTGTTACTAGCAGATTAAAAAATATTGAGAGTGGGAAAATTGACTTTATCCTATATGATGCCATTTCATCTGACTATATTGTAAAAGATCAATCATTAAACTTAAGCGTTTCTCCTTTGAAAGGTAAAATTGGTAATAATAAGGATGGATTAGAATACCTCCTTTTACCAAAAGATAAAAAAGGTAAAACTCTACAGAAATTTATAAATAAGCGTATTAAAGTTTTGAAAGAAGATGGTACTTTGGCGCGTTTAAGTAAACAATATTTCGGTGGAGATTACGTTTCAAACATTGATAAG

SEQ ID NO: 4948 - protein, 270 aa, Streptococcus agalactiae
MFKKIILSIATIVATASLAVSVQASEKVELKVATDSDTAPFTYQKDGKFKGYDVDVVKAVFKGSKYKVTFKTVPFDTISTGIDAGKFDLSANDFSYNKERAEKYLFSEPISRSNYAVVGKKGSHYKSLSDLSGKSTEVLSGVNYAQVLENWNKNHPNKKPIKIKYVSGTTGVTSRLKNIESGKIDFILYDAISSDYIVKDQSLNLSVSPLKGKIGNNKDGLEYLLLPKDKKGKTLQKFINKRIKVLKEDGTLARLSKQYFGGDYVSNIDK

SEQ ID NO: 4949 - protein, 801 aa, Streptococcus agalactiae
ATGAATCAATTTATCTTGACGGGTGGATGGTCTTGGTATAATAATTTGGTTAGTCAGGTTCCAGCGGGGAAATTATTTAGTTGGAAGGCTGTTTTAGATGCAATACCCTCAATTTTAGAGCGATTACCCATAACACTATTATTGACAGTAGCAGGAGCCTTATTTGGACTCATTTTAGCTTTGATTTTTGCAATAGTGAAAATTAACCGTGTCAAAATTTTATATCCGATTCAAGCTTTATTTGTTAGTTTTTTACGTGGGACTCCAATACTTGTTCAATTAATGCTGAGTTATTATGGAATTCCACTTTTCTTGAAATTTTTAAACCAAAAATATGGTTTTGATTGGAACATTAATGCTATACCGGCTTCTGTATTTGCTATTACTGCATTTGCTTTTAATGAAGCGGCTTATACAAGTGAAACTATACGAGCGGCGATTTTGTCGGTTGATCAAGGTGAAATTGAGGCAGCACGTAGTTTAGGGATGACCTCAGCGCAAGTTTATCGTCGTGTTATTATTCCAAACGCAGCAGTAGTCGCAACACCTACTTTGATAAATACGTTAATTGGTCTAACTAAGGGAACCTCTTTAGCTTTTAATGCTGGTATTGTTGAAATGTTTGCCCAAGCACAAATTATGGGTGGTAGCGATTATCGCTATTTTGAACGTTATATCTCTGTGGCACTTGTTTACTGGGCGGTTAGTTTCTTAATTGAACAATTGGGAAATGCTATTGAACGAAAAATGGCAATTAAGGCTCCACGCCATTTAACTGATGAGATTCCAGGAGGAGTACGC

SEQ ID NO: 4950 - protein, 267 aa, Streptococcus agalactiae
MNQFILTGGWSWYNNLVSQVPAGKLFSWKAVLDAIPSILERLPITLLLTVAGALFGLILALIFAIVKINRVKILYPIQALFVSFLRGTPILVQLMLSYYGIPLFLKFLNQKYGFDWNINAIPASVFAITAFAFNEAAYTSETIRAAILSVDQGEIEAARSLGMTSAQVYRRVIIPNAAVVATPTLINTLIGLTKGTSLAFNAGIVEMFAQAQIMGGSDYRYFERYISVALVYWAVSFLIEQLGNAIERKMAIKAPRHLTDEIPGGVR

SEQ ID NO: 4951 - protein, 741 aa, Streptococcus agalactiae
ATGATAAAATTGAGACAATTGACTAAATCATTTTCTGGTCAAAAAGTGTTAGACAAACTTGATTTAGATATTGAAAAAGGTCAAGTTGTTGCTCTAGTAGGTGCTTCAGGTGCAGGAAAATCAACCTTTCTTCGTAGTATGAATTATTTAGAAGAGCCTGATTATGGAACAATTGAAATTGATGATTTTAAAGTTGATTTTAAATCAATCAGTAAAGATGACATACTAACATTACGCCGTAAGTTAGCCATGGTTTTTCAACAATTCAATCTATTTGAGCGTCGTACAGCTTTGGATAATGTAAAAGAAGGTTTGAAAATTGTCAAAAAGATGTCAGATCAAGAGGCAACACGGATTGCAAGAGACGAACTGGCAAAGGTCGGACTTGCAGATCGTGAAAAATATTATCCAAGACATTTATCAGGTGGACAGAAACAACGTGTTGCTTTGGCACGCGCATTAGCCATGAAACCTGATGTTCTTCTTTTAGACGAACCGACATCAGCACTTGATCCAGAATTAGTTGGAGAAGTTGAAAAATCTATTGCAGATGCTGCTAAGCAGGGGCAAACCATGGTACTTGTTAGTCATGATATGAATTTTGTTTACCAAGTAGCAGATAAAGTTTTATTTTTGGAAAAAGGTCGTATTTTAGAGTCTGGGACGCCTGAACAATTATTTAACCATCCTTTAGAAGAACGTACAAAAGAATTCTTCGCTAGTTATAACAAATCGTACCTA

SEQ ID NO: 4952 - protein, 247 aa, Streptococcus agalactiae; identical to SEQ ID NO: 598

SEQ ID NO: 4953 - protein, 246 aa, Streptococcus agalactiae
TTGACAATCGCTTGTTGGATAGAGATGTTTTTAGAAATAGCAAAAGTTTATTTACAAGGTTTAGGGCTTGCCAGCATAACTGTTATTTTAGTTGGTATAATTTGGGTCTTTTGGCGTGCCAAGAAAAACATAGATAAAACAGCTAGAGAACGCCAATCTGTTCTTTATGATGTCCTTCTGATAGCTCTTATGACAGCTCCAATACTTGCCTTTGCATTTGTAGCTATCATTTTAATGATAAAAGCT

SEQ ID NO: 4954 - protein, 82 aa, Streptococcus agalactiae; identical to SEQ ID NO: 600

SEQ ID NO: 4955 - protein, 912 aa, Streptococcus agalactiae
ATGTATGATACTTTAATAATAGGTTCAGGTCCTGGTGGTATGACAGCAGCGCTTTACGCTGCACGTTCAAACCTTAAAGTTGGGTTAATTGAACAAGGTGCTCCAGGTGGACAGATGAATAATACTGCTGAAATTGAGAACTATCCAGGCTACGATCATATCTCAGGTCCAGAATTATCAATGAAGATGTATGAGCCGTTGGAAAAATTTGAAGTAGAGCATATTTATGGTATAGTTCAAAGAGTTGAGAACGATGGTGATGTAAAGCGTGTTATCACCGAAGATGAATCGTATGAAGCCAAAACAGTAATCCTTGCTACCGGAGCTAAAAACAGCCTTTTAGGAGTTCCGGGTGAAGAGGAATATACTAGTCGTGGCGTTTCTTACTGTGCGGTTTGTGATGGTGCATTTTTCCGTGATCAGGATCTTTTAGTTGTGGGTGGCGGTGATTCTGCTGTTGAAGAAGCTGTCTTCTTAACTCAATTTGCTAAAAGTGTTACTATTATTCACCGACGTGATCAATTGAGAGCTCAAAAAGTACTTCAAGACCGAGCTTTTGCTAACGAAAAAATAAAATTTGTATGGGATTCAGTGGTCAAAGAGATTAAAGGAAATGAGATTAAAGTATCTGGTGTAACTGTTGAAAATCTAAAGACTGGAGAAATCTCAGAGATGCCTTTCGGAGGTGTTTTCATTTACGTTGGTTTGAAACCACATTCTAGCATGGTATCAGAATTAGGTATTACGGATGAGACTGGCTGGGTCTTAACTGATACAAATATGAAAACATCAATTCCAGGACTATATGCTATTGGGGATGTTCGTCAAAAAGACCTACGTCAGATTGCGACTGCTGTTGGTGAAGGTGCTATCGCTGGACAGGGTGTCTATAACTATATAACTGAGCATTTC

SEQ ID NO: 4956 - protein, 304 aa, Streptococcus agalactiae
MYDTLIIGSGPGGMTAALYAARSNLKVGLIEQGAPGGQMNNTAEIENYPGYDHISGPELSMKMYEPLEKFEVEHIYGIVQRVENDGDVKRVITEDESYEAKTVILATGAKNSLLGVPGEEEYTSRGVSYCAVCDGAFFRDQDLLVVGGGDSAVEEAVFLTQFAKSVTIIHRRDQLRAQKVLQDRAFANEKIKFVWDSVVKEIKGNEIKVSGVTVENLKTGEISEMPFGGVFIYVGLKPHSSMVSELGITDETGWVLTDTNMKTSIPGLYAIGDVRQKDLRQIATAVGEGAIAGQGVYNYITEHF

SEQ ID NO: 4957 - protein, 1458 aa, Streptococcus agalactiae
ATGTATAAAGACGATAGTTTAACACTACATACTGATTTATATCAAATCAATATGATGCAAGTTTATTTTAATAAAGGTATTCACAATAAAAAAGCGGTGTTTGAAGCTTACTTTCGCAAGGTTCCATTTGAAAATGGTTATGCTGTTTTTGCAGGTTTAGAGCGTATTGTTCGTTATTTAGAAAATCTGAGTTTTTCTGATAGTGATTTATCCTATTTAGAAGAGTTAGGTTATCCTGAAGAATTTTTAGATTACTTAAAAAATTTAAAAATGGAACTGACTGTCAAATCAGCCAAGGAAGGTGACCTTGTATTTGCTAATGAACCATTAGTTCAAATTGAAGGTCCTTTAGCACAATGTCAGTTAGTAGAGACAGCGATTTTAAATATCATCAACTACCAGACACTTGTTGCTACAAAAGCAGCTCGTATTCGTTCTGTTATTGAAGATGAACCGCTATTAGAGTTTGGGACACGACGTGCTCAAGAAATGGATGCAGCCATTTGGGGTACTAGGGCAGCGATTATTGGTGGTGCTAACGCAACAAGCAATGTTCGTGCTGGTAAAATCTTTAATATTCCAGTATCAGGAACGCATGCACATGCTTTAGTTCAAACTTATGGCGATGATTACCAGGCATTTAAAGCTTACGCAGAAACTCATAAAGATTGCGTCTTTTTAGTGGATACTTATGATACCCTTCGTGTAGGGGTGCCTAATGCTATTCGAGTTGCAAAAGAGATGGGCGAAAAGATTAACTTCTTGGGAGTTCGCCTTGATTCAGGTGATTTAGCTTATTTGTCTAAGAAAGTTCGTCAGCAGTTAGATGACGCCGGTTTTCCTAATGCAAAGATTTATGCTTCGAATGATCTAGATGAAAATACAATCCTCAACCTAAAAATGCAAAAAGCTAAAATTGATGTTTGGGGTGTCGGGACAAAATTAATTACAGCCTATGATCAGCCTGCGCTAGGTGCTGTTTATAAAATTGTTTCTATTGAGACTGACGCCGGTAGTATGCGAGATACAATTAAACTATCAAACAATGCTGAAAAAGTATCAACACCTGGGAAAAAGCAAGTTTGGCGTATCACCAGTCGAGCTAAAGGGAAATCTGAGGGTGATTACATCACATTTGCAGACACTGATGTGACACAATTAGATGAAATTGACATGTTTCATCCAACTTATACTTATATCAATAAAACAGTCCGTGATTTTGACGCAGTACCCTTACTGGTAGATATCTTTGACAAAGGGAAATTAGTTTATCAATTACCAAGTCTTCAAGAAATTCAAGAGTACGGACGCAAAGAATTTGATCAGCTTTGGGATGAGTATAAACGTGTTCTGAATCCACAGGATTACCCAGTTGATTTGGCACGCGATGTTTGGCAAAATAAAATGGACCTGATTGATCGTATCCGTAAAGAAGCTTTGGCAAAAGGAGAAGTAAGA

SEQ ID NO: 4958 - protein, 486 aa, Streptococcus agalactiae
MYKDDSLTLHTDLYQINMMQVYFNKGIHNKKAVFEAYFRKVPFENGYAVFAGLERIVRYLENLSFSDSDLSYLEELGYPEEFLDYLKNLKMELTVKSAKEGDLVFANEPLVQIEGPLAQCQLVETAILNIINYQTLVATKAARIRSVIEDEPLLEFGTRRAQEMDAAIWGTRAAIIGGANATSNVRAGKIFNIPVSGTHAHALVQTYGDDYQAFKAYAETHKDCVFLVDTYDTLRVGVPNAIRVAKEMGEKINFLGVRLDSGDLAYLSKKVRQQLDDAGFPNAKIYASNDLDENTILNLKMQKAKIDVWGVGTKLITAYDQPALGAVYKIVSIETDAGSMRDTIKLSNNAEKVSTPGKKQVWRITSRAKGKSEGDYITFADTDVTQLDEIDMFHPTYTYINKTVRDFDAVPLLVDIFDKGKLVYQLPSLQEIQEYGRKEFDQLWDEYKRVLNPQDYPVDLARDVWQNKMDLIDRIRKEALAKGEVR

SEQ ID NO: 4959 - protein, 819 aa, Streptococcus agalactiae
ATGACTTTGCAAGATCAAATTATCAAAGAACTCGGTGTAAAACCTGTTATTAATCCAAGTCAAGAAATCCGTCGTTCCGTAGAATTTTTAAAAGACTATCTATTAAAACATAGTTTTCTAAAGACCTATGTACTGGGTATTTCAGGGGGGCAAGATTCAACTTTAGCAGGACGTCTAGCTCAACTAGCAGTTGAAGAGTTGCGTGCTGATACAGGGGAAAACTATCAATTTATAGCTATTCGTTTACCATATGGTATTCAGGCCGATGAAGAAGATGCACAAAAAGCATTAGATTTTATCAAGCCAGATATTGCTTTGACCATTAATATTAAAGAAGCTGTTGATGGCCAAGTTAGAGCTCTTAATGCAGCAGGAGTAGAGATTACAGACTTTAATAAAGGAAATATTAAAGCTCGTCAAAGAATGATTAGTCAATATGCAGTTGCAGGTCAATATGCTGGAGCGGTTATTGGTACTGATCATGCTGCAGAAAATATTACAGGTTTTTTCACCAAATTTGGTGATGGAGGTGCTGATTTATTACCCCTCTTTAGACTTAATAAAAGTCAGGGAAAACAGTTATTAGCTGAACTTGGTGCTGATAAAGCCTTGTACGAAAAGATTCCAACCGCAGATTTAGAAGAAAATAAACCAGGAATCGCTGATGAAATAGCACTTGGAGTAACCTACCAAGAAATTGATGCTTATCTTGAAGGGAAGGTAGTTTCGGACAAGTCTCGAGATATCATTGAAAATTGGTGGTATAAGGGTCAACATAAACGTCATCTTCCAATCACAATTTTTGATGATTTCTGGAAA

SEQ ID NO: 4960 - protein, 273 aa, Streptococcus agalactiae
MTLQDQIIKELGVKPVINPSQEIRRSVEFLKDYLLKHSFLKTYVLGISGGQDSTLAGRLAQLAVEELRADTGENYQFIAIRLPYGIQADEEDAQKALDFIKPDIALTINIKEAVDGQVRALNAAGVEITDFNKGNIKARQRMISQYAVAGQYAGAVIGTDHAAENITGFFTKFGDGGADLLPLFRLNKSQGKQLLAELGADKALYEKIPTADLEENKPGIADEIALGVTYQEIDAYLEGKVVSDKSRDIIENWWYKGQHKRHLPITIFDDFWK

SEQ ID NO: 4961 - protein, 1332 aa, Streptococcus agalactiae
ATGTCAGAATTAACTCAAACATTTACAGATAAGTTATTTGCTGATTACCAAGCAAATACAAAATTTAGCGCTATTGAAAATGCAGTAACTCACAATGGTTTATTGAAGTCTCTAGAGACACGTCAAAGTGAGATTGAGAACGACTATGTCTTTTCAATTGATTTGACCAAAGATGAAGTCTCTAATCAGAAACAATCAGGACGTTGCTGGATGTTTGCTGCACTGAACACATTTCGTCATAAACTGATTTCAGATTTTAAACTCGAGAACTTTGAATTATCTCAGGCACATACATTTTTCTGGGATAAGTATGAAAAATCAAATTGGTTTATGGAACAAATTATTGCGACTGCAAATCAGGAATTGAGTAGTCGTAAGGTGAAATTCCTATTAGATGTACCTCAACAAGATGGCGGACAATGGGACATGGTGGTTGCTCTGTTTGAGAAATATGGTGTCGTTCCTAAAACAGTTTATCCTGAATCTGTTTCATCAAGTGCTAGTCGTGAACTAAATCAATATTTGAATAAACTCTTACGCCAAGATGCACAGATTCTACGAGAATTAATAGCACAGGGAGCAGATGGGGCAACTGTTCAAAATAAAAAGGAAGAATTGCTTCAAGAAATTTTTAACTTTTTAGCAATGAACCTTGGCTTGCCACCGCAATCTTTTGATTTTGCTTATCGTGATAAAGACAATCATTATCAGTCTGATAAAAATATTACACCGAAAGCATTTTATCAAAAATATGTTAATCTTGACCTATCAGATTATGTTTCTATTATCAATGCTCCAACTGTAGATAAGCCTTATGGACAATCCTATACAGTTGAGATGCTTGGAAATGTTGTCGGAGGGCCAGCTGTTAAATATTTAAACCTTGATATGAAACGGTTTAAAGAGTTAGCGATTGCGCAAATGAAATCAGGAGAAACTGTGTGGTTTGGTTCAGACGTAGGTCAAGTATCAAATCGTCAAAAGGGTATCCTAGCAACTACGACTTATGATTTTAATTCATCTATGGATATTAAACTTAGCCAAGACAAAGCGGGCCGCCTAGATTATAGTGAAAGTTTAATGACACATGCTATGGTCTTAACGGGAGTAGACCTTGATGAATCTGGACAACCTTTAAAATGGAAAGTTGAGAACTCTTGGGGAGAGAAAGTTGGTAAGGATGGTTATTTTGTAGCTTCAGATGCTTGGATGGATGAATATACTTACCAAATAGTCGTTCGTAAAGAATTGCTTACTAAAGAAGAATTAGAGGCTTACAACGCAGAGCCAATTACTTTAGCGCCGTGGGATCCGATGGGAGCACTAGCTAAT

SEQ ID NO: 4962 - protein, 444 aa, Streptococcus agalactiae
MSELTQTFTDKLFADYQANTKFSAIENAVTHNGLLKSLETRQSEIENDYVFSIDLTKDEVSNQKQSGRCWMFAALNTFRHKLISDFKLENFELSQAHTFFWDKYEKSNWFMEQIIATANQELSSRKVKFLLDVPQQDGGQWDMVVALFEKYGVVPKTVYPESVSSSASRELNQYLNKLLRQDAQILRELIAQGADGATVQNKKEELLQEIFNFLAMNLGLPPQSFDFAYRDKDNHYQSDKNITPKAFYQKYVNLDLSDYVSIINAPTVDKPYGQSYTVEMLGNVVGGPAVKYLNLDMKRFKELAIAQMKSGETVWFGSDVGQVSNRQKGILATTTYDFNSSMDIKLSQDKAGRLDYSESLMTHAMVLTGVDLDESGQPLKWKVENSWGEKVGKDGYFVASDAWMDEYTYQIVVRKELLTKEELEAYNAEPITLAPWDPMGALAN

SEQ ID NO: 4963 - protein, 2178 aa, Streptococcus agalactiae
ATGGGATTTATTATCTTAACTATTGTAATAGGTGGGCTCCTATTTGCATACTACGTTAGTCGTTCTCCGAAATTAACCGATCAAGCTTTAAAATCCGTTAACTCTAGTTTGGTTTATGATGGTAATAATAAACTTATTGCCGATTTAGGCTCAGAAAAGCGTGAAAGTGTTAGTGCGGATAGCATTCCACTAAATTTGGTTAACGCTATCACTTCTATCGAAGATAAACGTTTCTTTAAACATAGAGGTGTCGATATTTATCGTATTTTAGGTGCAGCTTGGCATAATCTTGTTAGTAGTAATACGCAAGGTGGTTCAACCCTTGATCAACAGTTGATTAAACTGGCTTACTTTTCTACCAATAAATCTGACCAAACGTTAAAACGTAAATCACAGGAAGTTTGGCTTGCGCTTCAAATGGAGCGTAAATACACCAAAGAAGAAATTCTTACTTTCTATATTAATAAAGTTTATATGGGAAATGGTAATTATGGTATGAGAACGACAGCTAAATCATACTTTGGTAAAGACCTAAAGGAATTATCTATTGCACAACTTGCTTTGCTCGCTGGTATTCCTCAAGCACCTACACAATATGACCCTTATAAAAACCCAGAATCTGCTCAAACAAGACGTAATACCGTTCTTCAGCAGATGTATCAAGATAAAAACATTTCTAAAAAGGAATACGACCAAGCTGTTGCAACTCCAGTAACTGATGGCTTAAAAGAATTAAAGCAAAAATCTACTTATCCAAAATATATGGATAACTACTTAAAACAAGTTATTAGTGAAGTTAAACAAAAAACTGGTAAAGATATCTTTACTGCTGGGCTAAAAGTGTATACTAATATCAACACTGATGCACAAAAACAACTATATGACATCTACAACAGTGACACTTACATCGCTTATCCAAACAATGAATTACAAATAGCATCTACCATCATGGATGCGACTAATGGTAAAGTCATTGCACAATTAGGCGGGCGTCATCAGAATGAAAATATTTCATTTGGGACAAATCAATCTGTCTTAACAGACCGCGATTGGGGTTCTACAATGAAACCTATCTCAGCTTATGCACCTGCTATTGATAGTGGTGTCTATAATTCAACAGGTCAATCATTAAACGACTCAGTTTATTACTGGCCTGGTACTTCTACTCAACTATATGACTGGGATCGTCAATATATGGGTTGGATGAGTATGCAGACCGCTATTCAACAATCACGTAACGTGCCTGCTGTCAGAGCGCTTGAAGCCGCTGGATTAGACGAAGCAAAATCTTTCCTTGAAAAATTAGGCATATACTATCCAGAAATGAACTATTCAAATGCTATTTCAAGTAACAACAGTAGCAGTGATGCAAAATATGGTGCAAGTAGTGAGAAAATGGCAGCGGCTTACTCGGCTTTTGCAAACGGCGGAACTTACTATAAGCCGCAATATGTTAATAAAATTGAATTTAGCGATGGAACCAATGATACTTATGCAGCGTCTGGTAGCCGTGCGATGAAAGAGACTACTGCCTACATGATGACGGATATGCTGAAAACAGTACTAACATTTGGTACTGGTACTAAAGCAGCTATCCCTGGTGTTGCACAAGCTGGTAAGACTGGTACTTCCAACTATACGGAAGATGAGTTAGCTAAAATTGAAGCAACTACTGGTATCTACAATAGCGCCGTTGGTACAATGGCTCCTGATGAAAACTTTGTCGGCTATACTTCTAAGTACACAATGGCAATTTGGACTGGTTATAAAAATCGCCTTACACCACTTTATGGTAGCCAACTGGATATTGCTACTGAGGTTTATCGTGCAATGATGTCCTACCTAACTGGCGGATACAGTGCAGATTGGACAATGCCAGAAGGGCTCTATCGAAGCGGAAGCTACTTGTATATCAATGGGACAACTACAACCGGCACTTACTCTTCTTCTGTCTATAAGAATATCTATCAAAATTCTGGACAGTCAAGTCAAAGCAGTAGTTCAACATCCTCTGAGAAACAAAAAGAGGATAAGAATACAGCAAATGATGCCAATTCATCATCCCCACAAGTCGAAACACCTAATAATGGTAATGCTACTACCCCTAATAATTCTAATCAAACTGTGCCAGGAACTGGACATGGTAATGGTAACAGCAATACAGCACCTAACGGTAAT

SEQ ID NO: 4964 - protein, 726 aa, Streptococcus agalactiae
MGFIILTIVIGGLLFAYYVSRSPKLTDQALKSVNSSLVYDGNNKLIADLGSEKRESVSADSIPLNLVNAITSIEDKRFFKHRGVDIYRILGAAWHNLVSSNTQGGSTLDQQLIKLAYFSTNKSDQTLKRKSQEVWLALQMERKYTKEEILTFYINKVYMGNGNYGMRTTAKSYFGKDLKELSIAQLALLAGIPQAPTQYDPYKNPESAQTRRNTVLQQMYQDKNISKKEYDQAVATPVTDGLKELKQKSTYPKYMDNYLKQVISEVKQKTGKDIFTAGLKVYTNINTDAQKQLYDIYNSDTYIAYPNNELQIASTIMDATNGKVIAQLGGRHQNENISFGTNQSVLTDRDWGSTMKPISAYAPAIDSGVYNSTGQSLNDSVYYWPGTSTQLYDWDRQYMGWMSMQTAIQQSRNVPAVRALEAAGLDEAKSFLEKLGIYYPEMNYSNAISSNNSSSDAKYGASSEKMAAAYSAFANGGTYYKPQYVNKIEFSDGTNDTYAASGSRAMKETTAYMMTDMLKTVLTFGTGTKAAIPGVAQAGKTGTSNYTEDELAKIEATTGIYNSAVGTMAPDENFVGYTSKYTMAIWTGYKNRLTPLYGSQLDIATEVYRAMMSYLTGGYSADWTMPEGLYRSGSYLYINGTTTTGTYSSSVYKNIYQNSGQSSQSSSSTSSEKQKEDKNTANDANSSSPQVETPNNGNATTPNNSNQTVPGTGHGNGNSNTAPNGN

SEQ ID NO: 4965 - protein, 597 aa, Streptococcus agalactiae
ATGGTTAACTATCCACATCAGCTTATTCGGAAAACAACAGTTACAAAATCAAAGAAAAAGAAAATCGATTTTGCCAACCGTGGTATGTCATTTGAAGCTGCTATCAATGCAACCAATGACTACTATTTGTCTCACGAATTAGCTGTCATTCATAAGAAACCAACGCCAGTACAAATCGTCAAGGTAGATTATCCTAAACGTAGTCGTGCTAAGATTGTAGAAGCTTATTTTAGACAAGCTTCTACTACTGATTATTCTGGTGTTTACAAAGGTTACTATATTGACTTTGAAGCCAAAGAAACCCGGCAGAAAACTGCTATGCCTATGAAAAATTTTCATGCTCACCAAATAGAGCACATGGCAAATGTATTACAGCAAAAAGGGATTTGCTTTGTCTTGCTTCATTTTTCCACACTTAAGGAAACCTATCTACTCCCTGCTCATGAGTTAATTTCATTTTATCAGATTGATAAAGGCAATAAATCAATGCCTATTGATTATATCAGAAAAAATGGATTTTTCGTAAAGGAGAGTGCCTTTCCTCAAGTCCCTTACTTAGATATTATTGAAGAAAAATTATTAGGCGGTGATTACAAT

SEQ ID NO: 4966 - protein, 199 aa, Streptococcus agalactiae
MVNYPHQLIRKTTVTKSKKKKIDFANRGMSFEAAINATNDYYLSHELAVIHKKPTPVQIVKVDYPKRSRAKIVEAYFRQASTTDYSGVYKGYYIDFEAKETRQKTAMPMKNFHAHQIEHMANVLQQKGICFVLLHFSTLKETYLLPAHELISFYQIDKGNKSMPIDYIRKNGFFVKESAFPQVPYLDIIEEKLLGGDYN

SEQ ID NO: 4967 - protein, 516 aa, Streptococcus agalactiae
ATGAAGTCAACTATTCTTGTAACAGGTTACAAAAATTTTGAATTAGGGATTTTCCAGGATAAGGATCCTCGGATTACTATTATAAAAAAGGCTATTGATAAGGATTTTAGACGCTTCTTGGAAAATGGGGCAGACTGGTTTATTTTTATGGGAAATTTAGGGTTTGAGTACTGGGCTTTGGAAGTTGCTCTTGATTTACAAAAAGAATATGATTTTCAAATTGCGACAATTTTTACCTTTGAGAACCATGGCCAAAATTGGAATGAGGCTAATAAAGCTAAGTTGGCACTCTTTAAGCAAGTTGACTTTGTTAAATATACTTTCCCAAGCTATGAAAACCCGGGTCAATTTAAACAATACAATCATTTTCTCATTAACAACACACAAGGTGCATATCTTTTTTATGATTCTGAAAATGAAACTAATTTAAAATTTTTGCTAGAAATGATGAAAAAAAAGGAAGCTTATGATATTTCTTTCCTAACTTTTGATCGCTTAAATGAAATATATGAGGAA

SEQ ID NO: 4968 - protein, 172 aa, Streptococcus agalactiae
MKSTILVTGYKNFELGIFQDKDPRITIIKKAIDKDFRRFLENGADWFIFMGNLGFEYWALEVALDLQKEYDFQIATIFTFENHGQNWNEANKAKLALFKQVDFVKYTFPSYENPGQFKQYNHFLINNTQGAYLFYDSENETNLKFLLEMMKKKEAYDISFLTFDRLNEIYEE

SEQ ID NO: 4969 - protein, 120 aa, Streptococcus agalactiae
ATGAAATATATGAGGAATGATCGTTTTTTCGGATATGAGAACGTTTTACGCTTGATTTTTCCATTTAATTTAGGTATTATTTACTTTGATATAAAGGATAGGACTTATATTAAAACGATT

SEQ ID NO: 4970 - protein, 40 aa, Streptococcus agalactiae
MKYMRNDRFFGYENVLRLIFPFNLGIIYFDIKDRTYIKTI

SEQ ID NO: 4971 - protein, 175 aa, Streptococcus agalactiae
TTGACTGGTTTGGAGAATAGAATGGCAAGTATTATTTATAGCCCAAAAGATATTTTTGAGCAAGATTTTAAAGTTAGTATGCGGGGATATGACAAGAAAGAAGTCGATGTTTCTGGATGAGTCATCAAAGATTACGAAAATTATCTTGAGCAAATTGAGAAGCTCCAAANNNNNT

SEQ ID NO: 4972 - protein, 59 aa, Streptococcus agalactiae
  VARIANT 58, 59: Xaa = Any Amino Acid
MTGLENRMASIIYSPKDIFEQDFKVSMRGYDKKEVDVFWMMSSKITKIILSKLRSSKXX

SEQ ID NO: 4973 - protein, 1152 aa, Streptococcus agalactiae
ATGAAAGAATCATTCAAATTAATAGCAACTGCTGCTGCTGGTTTAGAAGCCATTGTTGGTAGAGAAATCAGAAACCTAGGAATTGACTGCCAAGTTGAGAACGGTAGAGTCCGTTTCCACGGAGATATCAAAACAATCATTGAAACGAACCTATGGCTACGAGCTGCCGATCGTATAAAGATTATTGTAGGAGAGTTTCCAGCACGTACTTTTGAGGAACTTTTTCAGGGTGTATATGGCCTTGACTGGGAAAATTATTTACCGTTAGGGGCAAAATTTCCTATTGCTAAAGCAAAGTGTGTCAAGTCAAAATTGCACAATGAACCTAGTGTACAAGCCATTTCTAAAAAAGCTGTTGCTAAGAAACTTCAAAAAGTCTTTCACCGTCCTGAAGGAGTTCCCTTACAAGAAAATGGAGCTGAATTTAAAATAGAAGTTTCTATTTTAAAAGATAAAGCGACTGTCATGATTGATACGACTGGATCAAGTCTCTTCAAACGTGGCTACCGTGCAGAAAAAGGTGGTGCACCAATTAAAGAAAACATGGCAGCAGCTATTATTCAATTATCTAATTGGTTCCCTGATAAGCCATTGATTGATCCAACTTGTGGTTCAGGTACTTTTTGTATTGAAGCTGCTATGATTGGAATGAATATAGCTCCTGGTTTTCATCGTGATTTTGCCTTTGAGGCGTGGCCATGGGTAGATCAAAGTCAAGTACAAAAGGTTCGTGATGAAGCTGAGAGTAAAGCAAACTATGATATTGATTTAGATATTTCAGGTTTTGATTTAGACGGTCGTATGGTAGAAATTGCTAGAAAAAATGCAGAAGAAGCAGGACTTGGAGATGTTATCAAATTGAAACAAATGCGTCTTCAAGATTTAAAAACAGATAAAATTAACGGTGTTATTATCTCCAACCCACCATATGGTGAACGACTCCTGGATGACAAAGCAGTGGACATTTTGTATAATGAGATGGGACAAACATTTGCGCCTTTAAAAACTTGGAGCAAGTTTATCCTAACTAGTGACGAAGGATTTGAAAAAAAATACGGCTCACAAGCTGATAAAAAACGTAAGCTTTACAATGGTACTTTAAAAGTTGATTTGTACCAATATTACGGTGAACGTGTGAGACGTCAAGTAAAA

SEQ ID NO: 4974 - protein, 384 aa, Streptococcus agalactiae
MKESFKLIATAAAGLEAIVGREIRNLGIDCQVENGRVRFHGDIKTIIETNLWLRAADRIKIIVGEFPARTFEELFQGVYGLDWENYLPLGAKFPIAKAKCVKSKLHNEPSVQAISKKAVAKKLQKVFHRPEGVPLQENGAEFKIEVSILKDKATVMIDTTGSSLFKRGYRAEKGGAPIKENMAAAIIQLSNWFPDKPLIDPTCGSGTFCIEAAMIGMNIAPGFHRDFAFEAWPWVDQSQVQKVRDEAESKANYDIDLDISGFDLDGRMVEIARKNAEEAGLGDVIKLKQMRLQDLKTDKINGVIISNPPYGERLLDDKAVDILYNEMGQTFAPLKTWSKFILTSDEGFEKKYGSQADKKRKLYNGTLKVDLYQYYGERVRRQVK

SEQ ID NO: 4975 - protein, 1461 aa, Streptococcus agalactiae
ATGTCAGAAGATCAAAAACACCCATTTTTTGAACCAGAAAAAGAAACTGATGGTCTTGAATTTAAAGATGCTAAAGAAATGACAGTAGAAGAGGCTGTTAGAAAAGATTCTGAAATTAAGGCTGGTATTACCGAAGAAGATAGTATTCTTGATAAATACATCAAACAACATCGTGATGAAGTAGCTTCACAAAAATTTGAGACAAAATCAAGCGATTTTGCAAACCTCGATACGGCATCTTTAGATGATTTTATCAAGAAACAGCGCGAAGAATTATCAGCGATGTTAGCTGCAGAAGAGCTTTCTAAAAAGTTGGATAATTCAGTCTCTCAAGAACAAGATACAGAAGCTAATGCTGTCTCACCTAAAGAAGAATCTTCACAAGAACAAGAAAATAGTGTAACCCCAGTTCCCCCTCTGATTACGGAAGCAGAACCAACTGCAACAGAACCAGATTCGACTATTGCTGATTCAGAGGAGTATAAATCCTCTTCTAGGAAGCGTGGAGGTATCGTAGGAACATTGATTGCTCTTATTTTACTTCTAATAGTAGCAATCTTTGGTTACAACTATTTCAAGAATAATAATTCGACAAATTCTCAAACTGCAACAAGTCAAAGTTCTAGTTCTAAGGCTACGACGACTTCATCAGAAGAAGATAAAAAAGCTAGTCAGAACTTAGATAATTTCAACAAAGCTTATGCTAACTTTTTTGTTGATGATAAGAAAACCCAACTCAAAAATAGCGAATTTGATAAATTGTCAGAATTAGAAAAGAAAGTTGATGCTTTAAAAGGAACTAAATACTACGGTAAAGTAAAAGTTAAATTTGATAGTCTAAAACGTCAAATTGATGCTGTTAAAGCTGTTAACGACAAGTTTAAGTCGCCTGCTGTAGTTGATGGTAAGAAGAGTGAAAAATTAGAAGTAAAAGATGGAGCGAATTTTGACTCTTTAGATAGTAAAACTCTTAATACTGGTAATGCTAGTCTAGATAGTTTACTTCACTCCATCGTTTCAACTGGTCGTAATCAGGTAAAACAATCCGAAGAACAGGCTTCGTCTAATAAGGTTTCAGACACTCAAACAACTGAACAACCAAACGTAACTAACGGTCAATCTTCCTCATCAGCTGCTACAATAAATAATCAGGCAGCTGGCACTGCATCAGGTAATTTGGAACGTAACCGTAGCCGAGTACCGTATAATAATGCTGCTATTGCGGATACAGGAAATCCTGCCTGGATATTTAACCCAGGAGTATTAGAGAAAATCGTGGCCACTTCACAGGCGCGAGGCTATTTCTCTGGAAATAACTATATTCTTGAACCTGTAAATATTATCAATGGTAATGGTTATTACAATATGTTTAAATCAGATGGCACTTATTTGTTCTCTATCAATGCCAAGACAGGTTACTTTGTAGGTAACGCTCCTGGAAGAGCTGATAGTTTAGATTAT

SEQ ID NO: 4976 - protein, 487 aa, Streptococcus agalactiae
MSEDQKHPFFEPEKETDGLEFKDAKEMTVEEAVRKDSEIKAGITEEDSILDKYIKQHRDEVASQKFETKSSDFANLDTASLDDFIKKQREELSAMLAAEELSKKLDNSVSQEQDTEANAVSPKEESSQEQENSVTPVPPLITEAEPTATEPDSTIADSEEYKSSSRKRGGIVGTLIALILLLIVAIFGYNYFKNNNSTNSQTATSQSSSSKATTTSSEEDKKASQNLDNFNKAYANFFVDDKKTQLKNSEFDKLSELEKKVDALKGTKYYGKVKVKFDSLKRQIDAVKAVNDKFKSPAVVDGKKSEKLEVKDGANFDSLDSKTLNTGNASLDSLLHSIVSTGRNQVKQSEEQASSNKVSDTQTTEQPNVTNGQSSSSAATINNQAAGTASGNLERNRSRVPYNNAAIADTGNPAWIFNPGVLEKIVATSQARGYFSGNNYILEPVNIINGNGYYNMFKSDGTYLFSINAKTGYFVGNAPGRADSLDY

SEQ ID NO: 4977 - protein, 480 aa, Streptococcus agalactiae
ATGACAAAAGAAGTTGTCGTAGAGAGTTTTGAATTAGATCACACCATCGTTAAAGCACCCTACGTTCGTTTAATTTCAGAAGAAGTTGGACCGGTCGGAGACATCATTACTAACTTTGATATCCGCCTTATTCAGCCTAATGAAAATGCTATTGATACTGCTGGTTTACATACTATCGAGCACCTTCTGGCGAAGTTAATCCGCCAACGAATTAATGGTTTGATTGATTGTTCTCCTTTTGGTTGTAGAACTGGTTTTCACATGATTATGTGGGGAAAACAGGATGCTACTGAAATTGCTAAAGTCATCAAATCTAGTCTAGAGGCTATTGCTGGTGGGGTCACTTGGGAAGACGTTCCTGGAACAACCATTGAATCTTGTGGAAATTATAAAGACCACAGTCTCCACTCTGCTCAAGAATGGGCGAAATTAATTCTTTCCCAAGGAATTTCTGACAATGCTTTTGAGCGCCACATTGTC

SEQ ID NO: 4978 - protein, 160 aa, Streptococcus agalactiae; identical to SEQ ID NO: 624

SEQ ID NO: 4979 - protein, 1605 aa, Streptococcus agalactiae
ATGTTTAATATTATATTAGCAATGGTTTGTGCACTCATTGGTTTGATTATTGGTTATGTGGCTATCTCAATGAAAATGAAATCATCAAAAGAAGCTGCAGAACTAACTCTTTTAAATGCAGAACAAGATGCCGTTGATTTACGTGGTAAAGCAGAAATTGAAGCAGAACACATCCGTAAAGCAGCGGAACGTGAAAGTAAAGCTCACCAAAAAGAATTACTTTTAGAAGCAAAAGAAGAGGCTAGAAAATATCGTGAAGAGATCGAAAAGGAATTTAAATCTGATAGACAAGAGTTGAAACAGATGGAGGCACGTTTAACAGATCGTGCATCATCTCTTGATCGTAAAGATGAAAATCTATCTAACAAAGAAAAAATGTTAGATAGCAAAGAACAAAGTCTAACCGATAAATCTAGACATATTAATGAGCGCGAACAGGAAATTGCTACTTTAGAAACAAAAAAAGTAGAAGAATTGTCACGCATCGCAGAGCTTAGTCAAGAAGAAGCTAAAGATATCATTTTAGCTGATACCGAAAAAGATTTAGCTCATGATATTGCGACACGTATTAAAGAAGCAGAACGTGAAGTAAAAGATCGATCAAATAAGATCGCAAAAGACTTGCTAGCCCAAGCTATGCAACGTTTAGCTGGTGAATATGTTACTGAACAAACAATTACAACTGTTCATCTCCCTGATGATAATATGAAGGGACGTATCATTGGTCGTGAAGGACGTAATATTCGTACTCTGGAAAGTTTGACAGGTATTGATGTTATCATAGATGATACGCCAGAAGTCGTTGTCTTATCAGGTTTCGACCCCATTCGTCGTGAAATTGCTCGTATGACTTTAGAATCTTTGATTCAAGATGGACGTATCCATCCAGCTCGTATTGAAGAGTTGGTTGAAAAAAATCGTTTGGAAATGGATCAACGTATCCGTGAGTATGGTGAGGCAGCAGCTTATGAGATTGGTGCACCAAATCTGCATCCTGATTTGATAAAAATTATGGGACGTTTGCAGTTCCGTACATCATATGGTCAAAATGTACTTCGTCATTCAGTTGAAGTTGGTAAACTTGCAGGTATTTTGGCTGGAGAACTAGGAGAAAATGTTGATTTAGCTCGTCGGGCTGGATTCCTCCATGATATGGGGAAAGCTATTGATCGCGAAGTTGAAGGCAGTCACGTTGAAATTGGTATGGAATTTGCTCGTAAGTACAAAGAGCATCCGATTGTTGTTAATACTATTGCAAGCCACCATGGTGATGTAGAACCTGACAGCGTTATTGCAGTAATTGTTGCTGCTGCAGACGCTCTTAGTTCAGCACGACCAGGTGCGCGTAATGAGTCAATGGAAAATTATATCAAACGTCTGCGTGATTTAGAAGAAATTGCTAATGGCTTTGAGGGAGTGCAAAATGCCTTTGCACTTCAAGCCGGACGTGAAATTCGTATCATGGTACAACCTGGTAAAGTTTCTGATGATCAAGTAGTTATTATGTCGCATAAGGTACGTGAAAAAATCGAACAAAACTTGGATTATCCAGGTAATATTAAGGTAACAGTTATTCGTGAAATGCGAGCTGTTGATTTTGCAAAA

SEQ ID NO: 4980 - protein, 535 aa, Streptococcus agalactiae; identical to SEQ ID NO: 626

SEQ ID NO: 4981 - protein, 99 aa, Streptococcus agalactiae
TTGTCATATTTTGAAATGACAAAAATATCTAAAAAGTTTAGTTCTGATTTTTTATACTATGATTATAGTAAAGGAGAACCAAATGGCAAAAGATATAAT

SEQ ID NO: 4982 - protein, 33 aa, Streptococcus agalactiae
MSYFEMTKISKKFSSDFLYYDYSKGEPNGKRYN

SEQ ID NO: 4983 - protein, 480 aa, Streptococcus agalactiae
ATGGCAAAAGATATAATTAAGGTTGATCATATATTTAAAAGCATCGGGCAAAAAACGATTTTAGAAGATATATCATTTAGTATAGCTTCTAACCAATGTGTAGCATTGATTGGACCTAATGGTGCAGGGAAAACAACTCTGATGTCAACTTTATTAGGTGATATTAGTATTTCTTCAGGAGCATTGACGATTTTTAATCTGCCTGCACACCACAATAGGTTAAAATATAAGATGGCCATCTTACCGCAAGAAAATGTATTGCCCTCAAAGTTTACAGTGAGAGAACTCATTGATTTCCAAAGGTGTTTATTTCCAGAAGTGCTGCCAATGTCTTTGATTTTAGACTATCTACAGTGGAGTGATGCGCACTTGCAACAATTTACAGAGACTTTATCTGGAGGGCAAAAACGACTTTTAGCTTTTGTTTTAACTTTGGTTGGTAAGCCCCAATTACTATTTTTAGATGAACCTACTTCCGGA

SEQ ID NO: 4984 - protein, 160 aa, Streptococcus agalactiae
MAKDIIKVDHIFKSIGQKTILEDISFSIASNQCVALIGPNGAGKTTLMSTLLGDISISSGALTIFNLPAHHNRLKYKMAILPQENVLPSKFTVRELIDFQRCLFPEVLPMSLILDYLQWSDAHLQQFTETLSGGQKRLLAFVLTLVGKPQLLFLDEPTSG

SEQ ID NO: 4985 - protein, 738 aa, Streptococcus agalactiae
ATGAACCTACTTCCGGATAAGTTATCAGACTTTGGTGATAGAATCACGTTTCTAATTGTTCCTATTTTTTGTATCGGTTACATGTGGATTGCTATTGAAAATAGAAATAGTGAAGAACAAAGAGAAAAAATTGCAGAGCAAAATCAGTATATCAATATTTTGTCAGCTGAAAATGAACGTAACCGTATAGGGCGTGATTTGCATGATAGTTTAGGACATACATTTGCTATGATGACACTAAAGACAGAACTAGCGTTAAAGTTGTTAGAAAAAAGGAACTATGATAAGGTACAAAAAGAACTATCAGAATTAAATCATATTAGTCATCAATCGATGAGTGAGGTCCGTCAAATTGTTTCTAACCTCAAGTATCGTACAGTAGTGGAAGAAATTGATGAGTTGTACCGCTTGTTTCAATTATCTAACATCAAGTTAACAGTTGTTAATAAGTTAGAGACGTCACAACTAAGTCCAGTAACACAATCTACAATCACAATGATATTAAAGGAATTATCCAATAATATTGTTAAGCATGCTGAAGCTGATAGCGTGGAGTTGAGTTTAGTAAGGCAAGGTGCTACTATAAATATTGAGATGATTGATAATGGTTGTGGTTTTACAAACCTTGACGGAGATGAGTTGCATAGTATTCAAGAGAGATTAACTATCGTTGAAGGGACACTAACGATTTTGTCTCGAAGTAAACCAACTCATATTCAGGTGGTATTGAAAGAGGTA

SEQ ID NO: 4986 - protein, 246 aa, Streptococcus agalactiae
MNLLPDKLSDFGDRITFLIVPIFCIGYMWIAIENRNSEEQREKIAEQNQYINILSAENERNRIGRDLHDSLGHTFAMMTLKTELALKLLEKRNYDKVQKELSELNHISHQSMSEVRQIVSNLKYRTVVEEIDELYRLFQLSNIKLTVVNKLETSQLSPVTQSTITMILKELSNNIVKHAEADSVELSLVRQGATINIEMIDNGCGFTNLDGDELHSIQERLTIVEGTLTILSRSKPTHIQVVLKEV

SEQ ID NO: 4987 - protein, 588 aa, Streptococcus agalactiae
ATGAAATTACTTGTTGCTGAGGATCAGTCCATGCTACGAGACGCTATGTGCCAATTACTTTTGATGGAAGAAAGTGTTTCTACTATTGATCAAGCTGGAAATGGTGAAGAAGCTATTGCCATTTTATCCAATAAAGCCATAGATGTTGCAATATTGGATGTTGAGATGCCGATATTATCAGGTTTAGATGTCTTAGAGTGGGTTAGAAAATACCAGAATGTTAAGGTCATAATTGTAACAACCTTTAAGCGGTCAGGTTATTTCCAAAGGGCTATTCGTTCAAATGTAGATGCTTATGTTTTGAAAGACCGCTCAGTAGCTGATTTGATGAAAACGATTCAAAAAGTTTTATCTGGGGGTAAAGAATATTCGCCTGAATTAATGGAAAACGTTATATCTAATCCTTTGAGTGAGCAAGAAATAAAAATTCTTTCCCTAATTGCTCAAGGGAAGACCAGCAAAGAAATTGCATGCACTTTATTTTTATCGAATGGTACAGTTCGTAATTACACGTCAAATATTTTTGATAAATTAGGAGTTAATAATCGTTTGGAGGCACTTAAAATAGCACGAGAAAAGGATTGGCTG

SEQ ID NO: 4988 - protein, 196 aa, Streptococcus agalactiae
MKLLVAEDQSMLRDAMCQLLLMEESVSTIDQAGNGEEAIAILSNKAIDVAILDVEMPILSGLDVLEWVRKYQNVKVIIVTTFKRSGYFQRAIRSNVDAYVLKDRSVADLMKTIQKVLSGGKEYSPELMENVISNPLSEQEIKILSLIAQGKTSKEIACTLFLSNGTVRNYTSNIFDKLGVNNRLEALKIAREKDWL

SEQ ID NO: 4989 - protein, 702 aa, Streptococcus agalactiae
ATGCAAAAATTTAAAGAACGTTTTGATACGCTTAGTGATGCAATTTTGGCCATTGCTATGACGATTTTAGTTTTGGAGATAAAAACTCCGGCTACGATGGGTGATATTGGTGACTTTACACGGAACATAGGTTTATTTATTGTTAGCTTTGTTGTTGTTTTTAATTTTTGGTACGAAAGGGCACAAAATAGCCTAGATGCTCAAAAGACTAATGATGAAATTATAGCTCTTGATATCATTGAACACCTAGGTATTTGTTTGATTCCTCTCTTTACTAAATTTATGATTTCTTTTGAGAATCATAATTTTGCTGTTATGGCTTATGGACTCTTAACGTTATTAGTTGGTCTCACATCAGACATTATTCGGATTCATTTGGCAAGTTATGATTTAGTGACCATTCCTAGTGAATTGAAAGAGCGGGTTATAAAAGTCATGACAACTTTTGCCATTCGTTCAGTTGTGGTTCGCTTTATCATTATTATCCTTGCTTATTTTCTACCTGAGGTAGGGATATTTGCATATTTAGTCATACCGCTCTTTATGTTTTGGCGTCGCTCTAGAGCAGGAAAATACTATGCTAAAAAGGGCATTGAGGCACCCTCTTATATCAAGCTTTTTATCCAAATTGGAGAGAGAGTTCCTGAGGATTTTACTAATTCAAGTAGTGGAATAGGTGGGGTAAAAAGACTCTATAAAAAA

SEQ ID NO: 4990 - protein, 234 aa, Streptococcus agalactiae
MQKFKERFDTLSDAILAIAMTILVLEIKTPATMGDIGDFTRNIGLFIVSFVVVFNFWYERAQNSLDAQKTNDEIIALDIIEHLGICLIPLFTKFMISFENHNFAVMAYGLLTLLVGLTSDIIRIHLASYDLVTIPSELKERVIKVMTTFAIRSVVVRFIIIILAYFLPEVGIFAYLVIPLFMFWRRSRAGKYYAKKGIEAPSYIKLFIQIGERVPEDFTNSSSGIGGVKRLYKK

SEQ ID NO: 4991 - protein, 627 aa, Streptococcus agalactiae
ATGTCTGAACGTGGTTTGCTAATTGTTTTCTCAGGACCATCTGGTGTTGGTAAGGGGACAGTTAGGCAAGAAATTTTTTCAACCCCTGACCATAAATTTGATTATTCCGTTTCAATGACTACTCGTCCACAACGCCCAGGCGAAGTTGATGGAGTTGATTATTTCTTCCGTACACGTGAAGAGTTTGAAGCGTTGATTAAAGAAGGTCAAATGCTTGAGTATGCGGAGTATGTTGGTAACTACTATGGAACTCCTTTAAGTTATGTCAACGAGACTTTAGACAAAGGGATTGATGTTTTTCTTGAAATAGAAGTTCAGGGAGCGCTTCAAGTTAAATCGAAGGTTCCGGACGGTGTTTTCATTTTCTTAACACCACCAGATTTAGAGGAATTAGAAGAGCGTTTAGTAGGACGTGGGACAGATAGTCCAGAAGTGATTGCCCAACGTATTGAACGTGCCAAAGAAGAAATTGCTTTGATGAGGGAGTATGACTATGCTGTTGTCAATGATCAAGTGTCATTAGCAGCAGAACGTGTTAAACGTGTCATTGAAGCAGAACATTATCGTGTGGATCGTGTTATTGGGCGTTATACCAACATGGTCAAAGAAACTGATAAAAAATTAAGT

SEQ ID NO: 4992 - protein, 209 aa, Streptococcus agalactiae [sequence omitted]

SEQ ID NO: 4993 - protein, 312 aa, Streptococcus agalactiae
ATGATGTTAAAACCTTCTATCGACACTTTGTTGGACAAAGTTCCTTCAAAATATTCTTTAGTTATTTTACAAGCTAAGCGTGCTCATGAATTGGAAGCTGGTGAGAAAGCCACTCAAGATTTTAAATCCGTGAAATCAACACTTCGCGCTTTAGAAGAAATCGAGTCAGGTAATGTTGTAATTCACCCAGATCCATCAGCAAAACGTGCCTCAGTTCGCGCTCGTATCGAAGCTGAACGCCTTGCTAAAGAAGAAGAAGAACGTAAAATCAAAGAGCAAATTGCTAAAGAAAAAGAAGACGGCGAAAAAATT

SEQ ID NO: 4994 - protein, 104 aa, Streptococcus agalactiae; identical to SEQ ID NO: 640

SEQ ID NO: 4995 - protein, 2387 aa, Streptococcus agalactiae
ATGGCAAGAAAATTAGCACAGGTTATTGTTGATATTCCTCTGATGCAGACAGATAAACCATTTTCGTATGCCATTCCTAAAGATTTGGAAGATTTGGTACAAGTAGGAGCACGCGTTCATGTTCCTTTTGGAAGAGGGAATCGTCTTTTGCAAGGCTTTGTTGTCGGTTTCAGAGATGATGATGAATTAGAGACTAAGGATATTGCGGGGGTCCTAGATTTTGAACCTGTTTTAAATCAGGAACAACTAGACTTAGCTGATCAGATGCGCCATACTGTCTTTTCTTATAAAATATCTATTTTGAAATCAATGTTACCAAGTCTTTTGAATTCGCAATATGATAAACTCTTGTTAGCAACGGACACATTACCATCAGAAGATAGAGAAGATCTATTTGGTCATAAAACGGAAATCGTCTTTTCAAGTTTGTCTTCTCAAGATGCCAAAAAAGCAGGCAGATTAATTCAAAAAGGTTTCATAGAAGTTCAATATTTAGCCAAAGATAAGAAAACAATAAAAACAGAAAAGATTTACAAAATCAACAGAACTCTGTTAGAAAAGAGCCAAATAGCAGCAAGAGCGAAAAAGAGACTGGAGTTGAAAGAATTCCTGTTAGAAAATCCTCAACCAGGGCGCCTCACAGCTTTAAACAAACAATTTTCATCTCCTGTGGTTAATTTTTTCAGAGAAGAAGGAATCATTGAGGTCATTGAAAAAGAAGCTAGTAGATCTGATAATTATTTTAAAGGAATCCTAAAAACGGATTTTTGGATTTAAATCAGGAACAAGCTAAAGTAGTTAAAATAGTTGTTGACCGAATTGGTAAGGATCAGAATAAACCCTTCTTGTTGGAGGGGATTACAGGGTCTGGTAAGACAGAGGTATATCTTCATATCATTGATAACGTTTTAAAGTTGGGAAAAACAGCGATTGTTCTCGTTCCAGAAATTTCTTTAACTCCCCAGATGACGAATCGTTTTATTTCTCGTTTTGGAAAGCGAGTTGCTATTATGCACTCGGGCTTGTCAGATGGTGAAAAATTTGATGAGTGGCGAAAGATAAAATCAGGTCAAGCTAAAGTTGTCGTTGGAGCTCGTTCAGCAATTTTTGCTCCTTTGGAAAATATCGGAGCCATCATTATAGATGAAGAACATGAATCAACTTATAAGCAAGAATCTAACCCAAGGTATCATGCGCGCGATGTGGCCTTGCTACGTGCAGAATATCATAAAGCTGTGTTACTAATGGGATCAGCAACTCCAAGTATCGAAAGCCGAGCTAGAGCTAGTCGGGATGTTTATAAATTTTTAGAATTAAAACATCGTGCTAATCCTAAAGCACGTATTCCTCAGGTTGAAATTATTGATTTTAGAAATTTTATTGGTCAACAAGAAGTTAGTAATTTCACACCATATTTACTAGATAAAATCCGAGATAGATTAGATAAGAAAGAGCAAGTGGTTCTTATGCTCAATCGTAGAGGTTATTCTAGTTTTATTATGTGTCGAGACTGCGGCTACGTTGATCAATGTCCTAATTGTGACATTTCTCTGACTTTACATATGGCTACAAAGACCATGAATTGTCATTATTGTGGGTTTGAAAAGCCTATTCCAAGAACATGTCCAAATTGTAATAGTAAAAGTATCTCTTACTATGGTACTGGAACCCAAAAAGCTTATGAAGAACTTTTGAAAGTTATCCCAGACGCAAAGATTTTACGGATGGATGTTGATACGACAAGGCAAAAAGGCGGTCATGAGTCTATTTTGAAGCGTTTTGGAAATCATGAAGCTGATATTTTATTGGGAACACAGATGATTGCTAAGGGATTGGATTTTCCAAATGTTACTTTAGTTGGAGTACTAAATGCAGATACTTCTCTGAATTTACCTGATTTTCGATCATCAGAGCGAACTTTTCAACTATTAACTCAAGTGGCTGGACGTGCTGGGCGTGCTGAAAAAGAAGGAGAGGTTGTCATTCAAACTTATAATCCTAATCATTATGCTATTCAATTAGCCCAAAAGCAAGATTTTGAAGCTTTTTATCAATATGAAATGAATATCCGTCGACAACTTGGTTATCCTCCTTATTATTTTACAGTTGGTTTAACATTATCGCATAAAGATGAAGAGTGGTTAATACGAAAATCTTATGAAGTATTAAGTTTATTGAAGCAAGGCTTTAGTGATAAAGTAAAGTTGTTAGGTCCAACGCCAAAACCAATTGCAAGAACACATAACCTTTATCACTACCAAATTATTATCAAGTATCGATTTGAGGACAACCTTGAACTTGTTTTGAATCGCTTATTAGACATGACTCAAGACAAGGAGAATAGAGATCTTCGCTTAGCAATAGACCACGAACCGCAAAATATGATG

SEQ ID NO: 4996 - protein, 796 aa, Streptococcus agalactiae
MARKLAQVIVDIPLMQTDKPFSYAIPKDLEDLVQVGARVHVPFGRGNRLLQGFVVGFRDDDELETKDIAGVLDFEPVLNQEQLDLADQMRHTVFSYKISILKSMLPSLLNSQYDKLLLATDTLPSEDREDLFGHKTEIVFSSLSSQDAKKAGRLIQKGFIEVQYLAKDKKTIKTEKIYKINRTLLEKSQIAARAKKRLELKEFLLENPQPGRLTALNKQFSSPVVNFFREEGIIEVIEKEASRSDNYFKGILKTDFLDLNQEQAKVVKIVVDRIGKDQNKPFLLEGITGSGKTEVYLHIIDNVLKLGKTAIVLVPEISLTPQMTNRFISRFGKRVAIMHSGLSDGEKFDEWRKIKSGQAKVVVGARSAIFAPLENIGAIIIDEEHESTYKQESNPRYHARDVALLRAEYHKAVLLMGSATPSIESRARASRDVYKFLELKHRANPKARIPQVEIIDFRNFIGQQEVSNFTPYLLDKIRDRLDKKEQVVLMLNRRGYSSFIMCRDCGYVDQCPNCDISLTLHMATKTMNCHYCGFEKPIPRTCPNCNSKSISYYGTGTQKAYEELLKVIPDAKILRMDVDTTRQKGGHESILKRFGNHEADILLGTQMIAKGLDFPNVTLVGVLNADTSLNLPDFRSSERTFQLLTQVAGRAGRAEKEGEVVIQTYNPNHYAIQLAQKQDFEAFYQYEMNIRRQLGYPPYYFTVGLTLSHKDEEWLIRKSYEVLSLLKQGFSDKVKLLGPTPKPIARTHNLYHYQIIIKYRFEDNLELVLNRLLDMTQDKENRDLRLAIDHEPQNMM

SEQ ID NO: 4997 - protein, 933 aa, Streptococcus agalactiae
ATGACAAAATTATTATTCATGGGTACCCCTGATTTTTCAGCGACGGTTTTAAAAGGTATTTTAGCAGATGGTAAATATGATGTTTTAGCTGTTGTGACGCAACCAGATCGTGCTGTAGGTCGTAAAAAAGAAATTAAAATGACCCCTGTAAAAGAAGTGGCCTTGGAAAACAACATTCCTGTGTATCAGCCGGAAAAACTATCTGGAAGTCCAGAATTAGAGCAACTAATGACCCTAGGTGCAGATGGTATTGTAACAGCTGCTTTTGGTCAATTCTTACCAACAAAGCTTTTGGAATCGGTAGGTTTTGCAATTAATGTACATGCTTCTCTATTGCCAAAATATCGTGGTGGGGCACCAATTCATTATGCCATTATTAATGGCGAAAAAGAAGCTGGGGTTACCATCATGGAAATGGTTGCAAAGATGGATGCAGGGGATATGGTATCAAAAGCTTCCGTTGAGATAACTGATGAAGACAATGTAGGGACAATGTTTGATAGACTCGCCGTTGTTGGTCGTGACCTTTTATTAGATACGCTTCCAGGTTATCTATCAGGTGATATTAAGCCGATACCACAAAATGAAGAAGAGGTAAGTTTTTCTCCTAATATTAGTCCAGATGAAGAGAGAATTGATTGGAATAAATCATCGCGCGACATTTTTAACCATGTTCGAGGGATGTATCCATGGCCAGTTGCACATACTCTTTTGGAAGGAAATCGTTTTAAACTTTATGAAGTAACAATGTCAGAAGGAAAGGGCTCACCGGGTCAAGTGATCGCTAAGACAAAGAACTCATTGACAGTAGCAACTGGTGACGGAGCTATTGAACTCAAATCAGTTCAACCAGCAGGGAAACCTCGTATGGATATAAAAGACTTTTTAAATGGTGTTGGTCGTAATTTAGAAATAGGAGATAAATTTGGCGAA

SEQ ID NO: 4998 - protein, 311 aa, Streptococcus agalactiae; identical to SEQ ID NO: 644

SEQ ID NO: 4999 - protein, 1278 aa, Streptococcus agalactiae
ATGACTTTAGAGGAAGTTTTTGATAAAGGAGCTTATTCTAATATCGCACTTAATAAGAGTTTAAAAAAATCTAGACTATCAGATAAAGATCGTGCCTTAGTAACAGAAATTGTCTATGGAACTGTGGCTAGAAAAATAACGCTAGAATGGTATCTATCACACTTTATAGTTGATCGTGATAAGCTTGAATTATGGGTATATCATCTCTTGCTACTGAGTCTTTATCAACTACTCTATCTGGACAACATCCCAGATCACGCTATTGTTAATGATGCTGTCACTATTGCTAAGAATCGAGGCAATAAAAAGGGTGCTGAAAAGTTAATTAATGCCGTTTTACGAAGAGTAAGTTCGGAGACGCTCCCTGAAATTGCATCAATAAAACGCCAAAACAAACGTTACTCTGTTGCTTATTCCATGCCAGTGTGGCTCGTAAAAAAATTAATTGACCAATATGGTGAGACAAGAGCTTTAGCTATTATGGAGAGTTTATTTGAGCGAAATAAAGCCAGTCTTCGTGTGACTGACTTATCGCAAAAACAAACTATCAAAGAAACTTTAAATGTTAGAGATTCACATATTGCAGAGACAGCTTTAGTTGCAGACTCAGGAAATTTTGCATCGACATCATTTTTCCAAGATGGCCTCATTACTATCCAAGATGAATCTAGTCAATTAGTTGCTCCAACACTCAAAGTCTCAGGTAATGACCAAGTATTGGATGCATGTAGTGCACCAGGAGGAAAAACAAGTCATATCGCCTCATATTTGACTACAGGGGCAGTAACTGCTTTAGATTTGTATGATCATAAATTGGAATTGGTTATGGAAAATGCAAAACGCCTAGGTCTGTCAGATAAGATAAAAACTAAAAAGTTAGACGCAAGTAAAGCTCATGAGTATTTTCCTGAGGATACTTTTGACAAAATTTTAGTAGACGCACCTTGTTCAGGTATCGGGCTAATTCGCCGTAAACCAGATATTAAGTACAATAAAGCTAATCAAGACTTTGAAGCCCTCCAAGAGATTCAATTGTCTATCCTATCTAGCGTTTGTCAAACGCTACGTAAAGGTGGTATAATAACCTATAGCACTTGTACCATTTTTGAGGAAGAAAATTTTCAAGTTATTGAAAAATTCTTAGCAAACCACCCCAATTTTGAGCAAGTAGAACTGAGTCATACACAAGAGGATATTGTAAAGAGAGGCTGTATTAGTATAAGCCCTGAACAATATCATACAGATGGCTTTTTTATTGGACAAGTCAAACGTATCTTG

SEQ ID NO: 5000 - protein, 426 aa, Streptococcus agalactiae
MTLEEVFDKGAYSNIALNKSLKKSRLSDKDRALVTEIVYGTVARKITLEWYLSHFIVDRDKLELWVYHLLLLSLYQLLYLDNIPDHAIVNDAVTIAKNRGNKKGAEKLINAVLRRVSSETLPEIASIKRQNKRYSVAYSMPVWLVKKLIDQYGETRALAIMESLFERNKASLRVTDLSQKQTIKETLNVRDSHIAETALVADSGNFASTSFFQDGLITIQDESSQLVAPTLKVSGNDQVLDACSAPGGKTSHIASYLTTGAVTALDLYDHKLELVMENAKRLGLSDKIKTKKLDASKAHEYFPEDTFDKILVDAPCSGIGLIRRKPDIKYNKANQDFEALQEIQLSILSSVCQTLRKGGIITYSTCTIFEEENFQVIEKFLANHPNFEQVELSHTQEDIVKRGCISISPEQYHTDGFFIGQVKRIL

SEQ ID NO: 5001 - protein, 735 aa, Streptococcus agalactiae
ATGGAAATATCTCTTTTAACAGATATTGGGCAACGTCGTTCCAATAATCAAGATTTTATTAATCAATTTGAAAATAAAGCCGGCGTCCCACTAATCATCTTAGCAGATGGTATGGGAGGACATCGTGCAGGAAATATTGCTAGCGAGATGACTGTAACTGATCTAGGAAGTGATTGGGCGGAGACAGATTTTTCTGAGTTATCAGAAATTCGTGATTGGATGCTTGTCTCTATTGAAACTGAGAATCGCAAAATATATGAATTAGGTCAGTCAGATGATTACAAAGGTATGGGAACTACCATTGAAGCAGTTGCTATTGTAGGAGATAATATTATTTTCGCACATGTAGGAGATTCACGTATCGGTATCGTTCGTCAAGGAGAGTATCATTTATTGACGAGTGATCATTCTCTTGTTAATGAATTGGTAAAAGCTGGCCAATTAACAGAAGAAGAAGCTGCTAGTCATCCTCAAAAAAATATTATTACGCAATCAATTGGTCAAGCCAATCCAGTCGAACCTGATTTAGGAGTTCATCTACTTGAAGAAGGTGACTACCTTGTAGTTAATAGTGATGGACTAACTAATATGTTGAGTAATGCCGATATTGCTACAGTACTAACACAAGAAAAAAACTTAGATGATAAGAATCAAGATTTAATCACTCTAGCAAACCATAGAGGAGGTCTTGATAATATCACTGTGGCACTAGTTTACGTTGAAAGTGAGGCGGTT

SEQ ID NO: 5002 - protein, 245 aa, Streptococcus agalactiae
MEISLLTDIGQRRSNNQDFINQFENKAGVPLIILADGMGGHRAGNIASEMTVTDLGSDWAETDFSELSEIRDWMLVSIETENRKIYELGQSDDYKGMGTTIEAVAIVGDNIIFAHVGDSRIGIVRQGEYHLLTSDHSLVNELVKAGQLTEEEAASHPQKNIITQSIGQANPVEPDLGVHLLEEGDYLVVNSDGLTNMLSNADIATVLTQEKNLDDKNQDLITLANHRGGLDNITVALVYVESEAV

SEQ ID NO: 5003 - protein, 1887 aa, Streptococcus agalactiae
ATGGCGGATGTTTATCTAGCTCGAGATCTAATTTTAGATAATGAAGAGGTCGCAATAAAAGTATTGCGAACCAATTATCAAACAGATCAGATTGCGGTTGCTCGCTTCCAGAGAGAAGCACGAGCAATGGCTGAGCTGACACATCCTAATATTGTCGCTATTCGTGATATAGGTGAAGAAGACGGACAGCAGTTCTTAGTAATGGAATATGTTGATGGATTCGATTTAAAAAAGTATATTCAAGACAATGCACCCCTATCAAATAATGAAGTTGTTCGAATCATGAATGAAGTCCTTTCAGCCATGTCACTGGCACATCAGAAAGGTATCGTACACCGTGATTTAAAACCTCAAAATATTTTATTAACTAAAAAAGGGACTGTAAAAGTTACAGATTTCGGTATTGCGGTAGCGTTTGCTGAAACTAGTTTAACGCAAACGAATTCTATGTTAGGTAGTGTTCATTATTTATCGCCAGAGCAGGCGCGTGGTTCAAAAGCGACTGTTCAGAGTGATATTTATGCCATGGGAATCATGCTTTTTGAAATGTTAACTGGCCATATTCCTTATGATGGGGATAGTGCAGTTACTATTGCCCTACAGCACTTCCAAAAACCACTACCATCAATCCTTGCAGAAAATAAAAGCGTTCCACAAGCTTTGGAAAACATTGTCATTAAAGCAACAGCTAAAAAGCTAACAGATCGCTATAAGACAACTTATGAGATGGGACGTGATTTATCAACTGCTCTAAGCTCGACACGTCACCGTGAACCAAAACTTGTTTTTAATGATACTGAGAGTACTAAGACACTACCAAAAGTAACATCTACAGTATCATCTTTAACGACAGAACAACTGTTGCGTAATCAAAAACAGGCCAAAACAACAGAAAAAATAACTCCTGATTCTGCGAGTAACGATAAAACGAAGTCTAAAAAGAAGGCTTCTCATCGACTTCTTGGTACAATCATGAAATTATTCTTTGCACTCTGTGTTGTAGGAATAATTGTATTTGCTTATAAAATTTTAGTAAGTCCTACGACTATTCGTGTTCCAGATGTTAGCAACAAAACAGTAGCTCAAGCAAAAATGACATTGGAAAATTCTGGATTGAAAGTAGGAGCTATTCGTAATATTGAGAGTGATAGTGTTTCAGAAGGCCTTGTCGTAAAAACAGACCCTGCTGCAGGACGTTCTCGTAGAGAAGGGGCTAAAGTTAATCTTTATATTGCCACTCCAAACAAGAGTTTCACTCTAGGTAATTATAAGGAACATAATTACAAAGATATCCTCAAAGATCTTCAAGGCAAAGGTGTTAAAAAATCTTTAATCAAGGTTAGGCGTAAAATTAATAATGATTATACTACTGGTACAATCTTAGCACAGTCGCTTCCAGAAGGAACATCTTTTAATCCTGATGGTAATAAGAAATTAACACTTACGGTTGCTGTTAATGATCCAATGATTATGCCTGATGTAACAGGTATGACAGTTGGAGAAGTAATAGAAACCTTGACAGACCTCGGATTAGATGCAGATAATCTTGTCTTCTATCAAATGCAAAATGGCGTTTATCAAGCAGTAGTAACACCTCCATCTTCAAGTAAGATAGCAAGTCAGGATCCTTATTACGGAGGAGAAGTTGGATTAAGGAGAGGAGATAAAGTTAAGCTGTATCTTCTTGGTTCTAAAACAACAAATAACTCATCATCTACGCCAATAGATTCTTCGGCTTCAAGCTCAACAGGAACAACTACCTCGGATTCTGTAAGCTCATCAACGGATGCTAGCACTTCTGATAGTAGTAGCACTTCTACAAGTAGTTCAACACTACCAAGTGATAGTACAACTAATACAGGAACAGCTAACAATCCATTAACTCAA

SEQ ID NO: 5004 - protein, 629 aa, Streptococcus agalactiae
MADVYLARDLILDNEEVAIKVLRTNYQTDQIAVARFQREARAMAELTHPNIVAIRDIGEEDGQQFLVMEYVDGFDLKKYIQDNAPLSNNEVVRIMNEVLSAMSLAHQKGIVHRDLKPQNILLTKKGTVKVTDFGIAVAFAETSLTQTNSMLGSVHYLSPEQARGSKATVQSDIYAMGIMLFEMLTGHIPYDGDSAVTIALQHFQKPLPSILAENKSVPQALENIVIKATAKKLTDRYKTTYEMGRDLSTALSSTRHREPKLVFNDTESTKTLPKVTSTVSSLTTEQLLRNQKQAKTTEKITPDSASNDKTKSKKKASHRLLGTIMKLFFALCVVGIIVFAYKILVSPTTIRVPDVSNKTVAQAKMTLENSGLKVGAIRNIESDSVSEGLVVKTDPAAGRSRREGAKVNLYIATPNKSFTLGNYKEHNYKDILKDLQGKGVKKSLIKVRRKINNDYTTGTILAQSLPEGTSFNPDGNKKLTLTVAVNDPMIMPDVTGMTVGEVIETLTDLGLDADNLVFYQMQNGVYQAVVTPPSSSKIASQDPYYGGEVGLRRGDKVKLYLLGSKTTNNSSSTPIDSSASSSTGTTTSDSVSSSTDASTSDSSSTSTSSSTLPSDSTTNTGTANNPLTQ

SEQ ID NO: 5005 - protein, 693 aa, Streptococcus agalactiae
ATGAAAAAATTTCAGTTTTTTCTACTTGTTGAAGCCGTTGTCTTAGTTATGGGATTAATGAAAATTTTATCAGATGACTGGACAAGTTTTATTTTTATTCTCGCTTTGATTCTTTTAGCCTTAAGATTTTATAACAACGATAGTCGTCATAATTTTCTGTTAACGACAAGTTTGTTATTACTATTTTTAATCTTTATGCTTAACCCTTACATTATTGCAGCCGTTGTTTTTGCAGTTTTGTATGTTCTAATCAATCATTTCTCGCAAGTTAAGAAAAAAAATCGTTATGCTTTGATTCAATTTAAGAACCATCAATTAGATGTTAAGACAACACGAAACCAATGGTTAGGTACTGATCAGCACGAAAGTGACTTTTATGCTTTTGAAGATATTAATATTATAAGAATCTCTGGGACTGATACAATTGATTTAACAAATGTTATTGTATCTGGGCAGGATAATGTTATTATAATTCAAAAAGTTTTTGGTGATACTAAAGTATTGGTTCCTTTAGACGTTGCCGTAAAGGCTGATATTAGTTCTGTTTACGGTAGTGTACAGTACTTTGATTTTGAGGAGTATGATCTAAGAAATGAATCTATAAAATTGTCACAAGAGGAAGAATATTACCTTTTGAAACGTGTCAAATTAGTTGTAAACACTATCGCTGGGAAAGTTGAGGTTAGTCGTAAA

SEQ ID NO: 5006 - protein, 231 aa, Streptococcus agalactiae; identical to SEQ ID NO: 652

SEQ ID NO: 5007 - protein, 1017 aa, Streptococcus agalactiae
ATGAAAAAGCACCACTACTTTTTAGCTTTCTTCTATGGAAGTGTCATTATATTTGCCATTTGTTTTGTCATTATTGATAGTCTGGGTGTTAATTTGGTGCACCTCTATCAAACGTCTCGTTTGTGGCTGATTGAACAATTGATTTTCTCTATTTTCTTTCTATCTTTAGCGGTAACTATCCTTTTATTGCTAACTTGGTTTTTATTAGATGATAATAGTAAACGTCAAATTAACCATAATTTACGTCGCATTTTAAATAACCAATCAATAAATGTTACCGATGATGGTACTGAAATATCGACCAATATTCAACGGCTCTCTAAAAAAATGAATTTAATGACAGCAAGTCTACAATCTAAGGAAAATAGTCGTATTTTAAAAAGCCAAGAAATTGTGAAACAAGAACGTAAGCGTATTGCACGTGATTTACACGACACAGTTAGTCAGGATTTGTTCGCAGCTTCCATGGTTTTGTCAGGGATTGCACAGAATGTTTCTCAGCTAGACGTTGATCAGGTTGGCTCGCAATTATTAGCAGTAGAGGAAATGCTTCAGCATGCACAAAATGATTTGAGAATTCTGCTACTTCATTTGAGGCCAGTTGAATTAGAAAATAAGACCCTATCTGAAGGATTCAGAATGATATTGAAAGAATTGACCGATAAGAGCGACATTGAAGTTGTTTATCATGAATCAATTCTAACCTTACCCAAAAAGATTGAAGACAATATTTTTAGAATTGGTCAAGAATTTATCAGTAATACTTTAAAGCATTCACAAGCCAGTCGTCTCGAAGTTTACCTTAATCAAACAGAGAATGAATTGCAGTTAAAAATGATTGATAATGGTATTGGATTTGATATGGATTCTGTCTATGATTTAAGTTATGGGTTAAAAAATATTGAAGATCGAGTAGAAGATTTAGCAGGAAATTTACAGCTTCTCAGTCAGCCTGGTAAAGGAGTTGCTATGGATATAAGATTACCTTTAGTAAATCAGAGTGAGGATAAAAATGGA

SEQ ID NO: 5008 - protein, 339 aa, Streptococcus agalactiae; identical to SEQ ID NO: 654

SEQ ID NO: 5009 - protein, 639 aa, Streptococcus agalactiae
ATGGATAAAATAAAAATTGTACTTGTTGATGACCATGAGATGGTTCGTCTCGGTTTAAAAAGTTTTTTAAACTTACAAGCTGATGTTGAAGTAATAGGTGAGGCCTCAAATGGTTTAGAAGGCATAAAAAAAGCACTGGAGTTACGTCCAGACGTTGTTGTTATGGACTTAGTAATGCCTGAAATGGACGGTGTAGAAGCAACCTTAGCATTATTGAAGGATTGGCCAGAAGCTGCTATTTTAGTCTTAACATCTTACTTGGACAATGAAAAAATTTACCCTGTTATTGAAGCAGGTGCCAAAGGCTATATGTTAAAGACCTCAAGTGCAGCAGAGATTCTTAATGCCATTCGTAAAGTTGCAAGGGGAGAACAAGCTATTGAAAATGAAGTAGATAAGAAAATTAAGGCTCATGATAAATGTCCAGCTTTACATGAGGGCTTAACAGCAAGGGAACGTGATATCCTTAATTTATTAGCCAAAGGTTATGACAATCAAAGGATTGCTGATGAATTATTTATCTCGTTAAAGACTGTTAAAACTCATGTTTCTAATATTTTGGGAAAACTAAATGTAGCAGATCGAACTCAAGCGGTTGTCTATGCTTTCCAACACCATTTGGTACCACAAGATGATGAA

SEQ ID NO: 5010 - protein, 213 aa, Streptococcus agalactiae
MDKIKIVLVDDHEMVRLGLKSFLNLQADVEVIGEASNGLEGIKKALELRPDVVVMDLVMPEMDGVEATLALLKDWPEAAILVLTSYLDNEKIYPVIEAGAKGYMLKTSSAAEILNAIRKVARGEQAIENEVDKKIKAHDKCPALHEGLTARERDILNLLAKGYDNQRIADELFISLKTVKTHVSNILGKLNVADRTQAVVYAFQHHLVPQDDE

SEQ ID NO: 5011 - protein, 1398 aa, Streptococcus agalactiae
ATGGACGCAAAAACTAAATATAAAGCAAAAAAAATAAAGGCAGTGTTTTTTGATATTGATGACACGCTTCGTGTTAAAGATACAGGTTATATGCCACCATCAATCTTAAAAGTTTTTAAAGCTTTGAAAGATAAAGGAATTGTTGTAGGTATTGCTTCAGGAAGGGCACGATATGGCGTTCCAAAAGAAGTTCAAGATTTAAATGCCGATTATTGTGTAAAATTAAATGGAGCTTATGTTAAGGACAAGGATAAGAATATCATCTTCCATCGTCCTATTCCTGCTGAATATGTAGAGCAATATAAGAAATGGGCAGACACTGTTGGTATTAAGTACGGTTTAGCTGGTCGTCATGAGGCAGTTTTATCAGATCGTGATGATTTGGTAAATGATGCGATTGATATTGTGTATTCTGATCTCGAAGTTAATCCAGATTTCAATAAAGAACATGATATTTATCAGATGTGGACGTTTGAAGATAAAGGAGATAGCCTTCATCTACCTGAACCGTTAGATGAACATCTTCGCTTGATACGTTGGCATGATCATTCTTCAGATGTTGTGTTAAAAGGAACATCGAAGGCTTTAGGTGTTTCTAAAGTTGTTGAACATTTGGGCTTAAAGCCAGAGAATATCTTGGTTTTCGGAGATGAGCTCAATGATTTAGAACTCTTTGATTATGCTGGACTAGCTGTGGCGATGGGAGTGTCACACCCAGAAGCTCAAAAAAAAGCAGATTTTATCACAAAAAAAGTAGAAGAAGATGGCATCTTGTATGCCCTGGAGGAACTAGGTTTGATAGAAAAAGAATTAACATTTCCACAAGTAGATATTGAAAATACAGAAGGTCCTGTGGCTGTCATTAAAACAAATCACGGGGATATGACTGTAAAACTCTTCCCGGATCATGCTCCTAAAACGGTAGCAAACTTTATTGGTTTAGCTAAACAAGGTTATTATGATGGTATTATCTTCCATCGTATTATTCCAGATTTTATGATTCAGGGTGGTGATCCAACTGGTACAGGTATGGGTGGTGAATCTATCTATGGGGAAAGTTTTGAAGACGAATTTTCCGAGGAATTATATAATGTTCGCGGAGCTCTTTCAATGGCTAATGCTGGACCAAATACGAATGGCAGCCAATTTTTCATCGTCCAAAATACAAAAATTCCTTATGCGAAAAAGGAATTAGAGCGAGGTGGTTGGCCAACACCAATTGCTGAGTTGTATGCTGGACAAGGTGGTACACCGCATCTAGATCGTCGCCACAGTGTATTTGGACAATTAGTAAACCAAAGTTCTTTTGAGGTACTTGATGAGATTGCGGCAGTAGAGACTGGTTCTCAAGACAAACCATTGGAAGATGTTGTTATTTTAACGATTGAGGTTAAAGAA

SEQ ID NO: 5012 - protein, 466 aa, Streptococcus agalactiae
MDAKTKYKAKKIKAVFFDIDDTLRVKDTGYMPPSILKVFKALKDKGIVVGIASGRARYGVPKEVQDLNADYCVKLNGAYVKDKDKNIIFHRPIPAEYVEQYKKWADTVGIKYGLAGRHEAVLSDRDDLVNDAIDIVYSDLEVNPDFNKEHDIYQMWTFEDKGDSLHLPEPLDEHLRLIRWHDHSSDVVLKGTSKALGVSKVVEHLGLKPENILVFGDELNDLELFDYAGLAVAMGVSHPEAQKKADFITKKVEEDGILYALEELGLIEKELTFPQVDIENTEGPVAVIKTNHGDMTVKLFPDHAPKTVANFIGLAKQGYYDGIIFHRIIPDFMIQGGDPTGTGMGGESIYGESFEDEFSEELYNVRGALSMANAGPNTNGSQFFIVQNTKIPYAKKELERGGWPTPIAELYAGQGGTPHLDRRHSVFGQLVNQSSFEVLDEIAAVETGSQDKPLEDVVILTIEVKE

SEQ ID NO: 5013 - protein, 372 aa, Streptococcus agalactiae
TTGAGGTTAAAGAATAAAATGAAGATTGGCGATAAGTTAAAGGGAACAGTCACTGGCATTAGGCCTTATGGAGCCTTTGTTTCTCTTGAGGATGGTAGGACTGGACTTATCCATATTTCTGAAATTAAAACAGGTTACATTGATAATATTTATGATGTTCTTAGTGTAGGTGATGAAGTCTATGTTCAGGTTATAGATGTAGATGAATTTACACAAAAAGCAAGTTTATCGCTTCGGACCCTTGAAGAAGAAAGACATCATATTCAGCATCGTCATCGATTTTCTAACAATCGTCTTAAGATAGGTTTCAAACCACTTGAGGAAAATTTACCTAGTTGGGTTGAGGAAGGTCTAGCCTACTTGAATAATAAA

SEQ ID NO: 5014 - protein, 124 aa, Streptococcus agalactiae; identical to SEQ ID NO: 660

SEQ ID NO: 5015 - protein, 774 aa, Streptococcus agalactiae
ATGACAAATGAAAAAGGTATTGTATTCAACATTCAACATTTTAGTATTCACGATGGTCCAGGTATTCGAACAACCGTTTTCTTAAAGGGTTGTCCTCTTAGATGTCCTTGGTGTGCTAATCCCGAGTCGCAAAAAATGGTTCCAGAAACAATGAGAGATGCCATTACTAATGAAAGCGTCATCGTGGGCGAAGAAAAATCGGTTGATGATATTATTGAAGAGGTTTTAAAAGATATTGATTTTTACGAAGAATCTGGTGGGGGCATAACGCTATCTGGCGGTGAAATATTTGCACAATTTGAATTTGCCAAGGCAATTTTAAAACGTGCTAAATCACTGGGAATCCACACGGCTATTGAAACAACTGCTTATACTAGACATGAACAATTCATAGATCTTATCCAATACGTTGATTTTATTTACACCGATTTAAAACATTACAATAGCCTCAAACACCAAGAAAAGACGATGGTTAAGAATGCTTCAATCATCAAAAACATTCATTATGCTTTTGCCAACGGTAAAACTATTGTGCTACGTATTCCTGTCATACCTAATTTTAACGATTCATTAGAAGATGCTGAAGAATTTGCTTGTTTATTTGATCGCCTAGATATCCGTCAAGTGCAACTCTTACCTTTCCACCAATTTGGACAAAACAAATATCAATTACTTAATCGTCAATATGAAATGGAAGAGATCGCTGCACTACACCCAGAGGATCTACTCGATTATCAAGCTATTTTTAGCAAGTATAATATTCACTGCTACTTT

SEQ ID NO: 5016 - protein, 258 aa, Streptococcus agalactiae; identical to SEQ ID NO: 662

SEQ ID NO: 5017 - protein, 753 aa, Streptococcus agalactiae
ATGAATAGATTAGAAAATATTATTAGTTTAGTATCTCAGTACCAAAAAATAGACGTTAATACACTCTCGGAGTTGTTACAAGTTTCTAAAGTAACGATACGTAAAGATTTAGATAAACTAGAAGGCAAAGGGCTTTTGCATAGAGAGCACGGTTATGCAGTTTTAAACAGTGGGGATGATCTTAATGTTAGGTTATCTTTTAACCATAAAACTAAAAAAGAAATTGCTGCCTTAGCTGCGAATATGGTGTCTGACAATGACACTATCTTAATAGAATCAGGCTCTACTTGTGCTCTTTTAGCGGAAAATATCTGTCAGACAAAGCGAAATGTCACTATTTTGACCAACTCTTGCTTTATTGCTAACTATTTACGAGAATATGATTCATGCCAAATTGTCTTACTTGGTGGTGAGTATCAATCAAGTTCACAGGTTACGGTAGGTCCTCTCTTGAAAAAGATGATTTCACTTTTTCATGTCTCGTTAGCTTTTGTTGGGACTGATGGTTTTGATCCAAAACTAGGATTTATGGGTAGAGATTTAATGCGTTCTGAAGTTGCACAAGAGATGGCGAATGCTGCCGATGAAGTCATTATTTTAACAGATTCTAGTAAGTTTAATCAGACTGCATTGGTGGAACAGCTTCCGTTGTCAACTGTATCACAAGTTATTACAGATAAACATCCAAATTCGGAAATTGCTAATTTGTTCCAAGAAGCAGAGATTACCATTCAATCTTTATTACAAGTGCCA

SEQ ID NO: 5018 - protein, 251 aa, Streptococcus agalactiae; identical to SEQ ID NO: 664

SEQ ID NO: 5019 - protein, 930 aa, Streptococcus agalactiae
ATGGAAGGGAAAAGCCAATCTGAGATTGCCAATGAATTAGGAATTTATCGTACAACAATAAGTCGTATGTTAGCCAAAGCGAGAGAAGAAGGTCTTGTTAGAATCGAAATTTCAGATTTTAATCCAGAAATTTTTCAGTTAGAATCCTATTTTAAAAGTAAATATCACCTTAAAGATATTGAGATTGTTTCTTCGCGAAAAGATAGCGATACTTCAGAGATAGAGAAGGATTTAGCACATGTAGCTGCGGCTATGATTCGAAAAAAAATTAAAGAGAATGACAAGGTGGGGATTGCTTGGGGGAGGACACTTAGTAAAGTAGTTGAAGCAATGCGTCCTCATCCGGTTTCTCAAGTTTCTTTTGTTCCTTTAGCTGGAGGTCCAAGTCATATTAATGCACGCTATCACGTTAATACTCTGGTTTACGAAATGTCAAGGCGTTTCCAAGGAAGTTGTACTTTCATTAATGCAACTCTAGTTCAAGAAAACGCTAATTTAGCGAAAGGAATATTAACTTCAAAATATTTTGAGGGGCTAATGGATAATTGGGAAAAACTTGATGTGGCAATTGTGGGCGTTGGTGGTAAACCTAAAAGCAATGAACAACAGTGGCTTGATCTTTTAAATCAAGATGATTTTCAATGCTTGGATGAAGAAGCAGCTGTAGGTGAAATTACTTGTCGTTTTTTTAATCATTCAGGTGATCCTGTGAATCAACATTTAGCTAAAAGGACAATAGGAATTACCTTAGAACAACTACAGAAAGTTCCTAATAGAATAGCGGTTGCTCATGGCAATTATAAGGCTGCGGCACTCTTAGCCGTTTTAAAAAAGGGGTATATTAATCATTTAGTTACTGATTTTTCCACAGCCTTAAATATTTTAAGATTAGATAAAGACACCTTTGTGGATACTATATATCAAAAGAGC

SEQ ID NO: 5020 - protein, 310 aa, Streptococcus agalactiae
MEGKSQSEIANELGIYRTTISRMLAKAREEGLVRIEISDFNPEIFQLESYFKSKYHLKDIEIVSSRKDSDTSEIEKDLAHVAAAMIRKKIKENDKVGIAWGRTLSKVVEAMRPHPVSQVSFVPLAGGPSHINARYHVNTLVYEMSRRFQGSCTFINATLVQENANLAKGILTSKYFEGLMDNWEKLDVAIVGVGGKPKSNEQQWLDLLNQDDFQCLDEEAAVGEITCRFFNHSGDPVNQHLAKRTIGITLEQLQKVPNRIAVAHGNYKAAALLAVLKKGYINHLVTDFSTALNILRLDKDTFVDTIYQKS

SEQ ID NO: 5021 - protein, 321 aa, Streptococcus agalactiae
ATGGAAATCATAGTCGCAGACCAAATTATTATGGGGCTCATTTTGAATGCTGGGGATGCTAAACAACATATCTATCAAGCCTTAAAACTTGCAAAAGAAGGAAATTTTGCAGAAAGTAAAATTGAAATAGAACTAGCAGATAGTGCACTCCTAGAAGCTCATAATCTTCAAACACAATTCCTTGCACAAGAAGCAGGAGGGACAAGGACAGATATCTCAGCACTCTTTATTCATTCTCAGGATCATTTGATGACAAGTATTACTGAGATTAACTTGATTAAAGAAATTATTGATTTACGCCAGGAATTACATATTCAAAAA

SEQ ID NO: 5022 - protein, 107 aa, Streptococcus agalactiae; identical to SEQ ID NO: 668

SEQ ID NO: 5023 - protein, 318 aa, Streptococcus agalactiae
ATGATAAAAATTGGTTTATTCTGTGCAGCAGGTTTTTCAACAGGTATGTTAGTAAACAATATGAAAATCGCAGCGGATAAAGAAGGGATAGAGGCACATATTGAAGCTTATTCACAAGGAAAAATTGCAGATTATGCTAAAGATTTAGATGTTGCATTACTTGGTCCACAAGTTAGCTATACTCTAGATAAATCAAAATCAATCTGTGATGAATACGGTGTACCGATAGCAGTTATTCCAATGGCAGATTATGGTATGTTGGATGGTGTAAAAGTTTTGAAACTTGCTTTGAGTTTATTGGAAACAAGAAAAGAGGCT

SEQ ID NO: 5024 - protein, 106 aa, Streptococcus agalactiae; identical to SEQ ID NO: 670

SEQ ID NO: 5025 - protein, 1298 aa, Streptococcus agalactiae
ATGTCAAAGTTTGATAGTCAGAAAATAATTACTCCGATTATGAAGTTTGTCAATATGCGAGGGATTATTGCACTCAAAGATGGCATGCTAGCAATTCTACCACTAACAGTTGTTGGGAGTCTCTTTTTAATATTAGGGCAGCTTCCATTTAAAGGTCTTAATCAAGCCATAGCTAATGTTTTTGGACCAGAATGGAAGAACCATTTATGCAAGTTTATTCAGGAACTTTTGCGATTATGGGCTTGATTTCCTGTTTTGCAATTGCTTATGCTTATGCTAAAAATAGTAGTGTAGAACCGTTACCTGCTGGCGTTTTATCACTTTCGTCTTTCTTTATTTTAATGAAATCATCTTATATTCCTGTAAAAGGAGAAGCAATAGCGGATGCTATTTCTAAGGTTTGGTTTGGCGGTCAGGGGATTATTGGAGCAATTATTATTGGGTTAGTAGTTGGTGCTATCTATACATGGTTTATCCAACATCATATTGTTATAAAAATGCCAGAGCAAGTACCACAGGCAATAGCAAAACAATTTGAAGCTATGATTCCAGCTTTTGTTATCTTTCTTTTATCGATGATTGTTTATTTGATTGCTAAGGTAACAACTGGAGGTACCTTTATTGAGATGATTTATGATATCATTCAAGTACCGTTGCAAGGCTTAACAGGCTCACTTTATGGAGCAATTGGGATTGCTTTCTTTATTTCATTCTTATGGTGGTTTGGTGTCCATGGCCAATCTGTGGTGAATGGTATTGTGACTGCTTTGTTACTATCCAATTTAGATGCCAATAAGTCTTTATTAGCAGCAAATCGCTTAACATTAGATAATGGCGCTCACATTGTAACACAGCAGTTTTTGGATAGTTTCTTGATTTTATCGGGCTCAGGAATAACTTTTGGACTAGTTATTGCGATGCTTTTTGCAGCAAAATCAAAACAATACAAGGCACTTGGGAAAGTGGCCGCTTTTCCCGCGATTTTCAATGTTAACGAGCCAATCGTCTTTGGCTTTCCAATCGTAATGAATCCTGTGATGTTTCTGCCTTTTATTTTAGTACCAGTTTTGGCAGCTTTAATTGTTTATGGAGCTATTGCGGTTGGTTTTATGCAACCATTCTCAGGTGTTACTTTACCATGGAGTACTCCAGCAATTATTTCTGGATTCATGGTAGGTGGTTGGCAAGGTGCACTCGTCCAAATAGTCATTTTAGCTATCTCAACTGCTGTTTACTTCCCATTCTTTAAAATCCAAGATAATATTACTTACAAAAATGAATGTGAAATGGAAAGGGTA

SEQ ID NO: 5026 - protein, 433 aa, Streptococcus agalactiae
  VARIANT 66: Xaa = Any Amino Acid
MSKFDSQKIITPIMKFVNMRGIIALKDGMLAILPLTVVGSLFLILGQLPFKGLNQAIANVFGPEWXEPFMQVYSGTFAIMGLISCFAIAYAYAKNSSVEPLPAGVLSLSSFFILMKSSYIPVKGEAIADAISKVWFGGQGIIGAIIIGLVVGAIYTWFIQHHIVIKMPEQVPQAIAKQFEAMIPAFVIFLLSMIVYLIAKVTTGGTFIEMIYDIIQVPLQGLTGSLYGAIGIAFFISFLWWFGVHGQSVVNGIVTALLLSNLDANKSLLAANRLTLDNGAHIVTQQFLDSFLILSGSGITFGLVIAMLFAAKSKQYKALGKVAAFPAIFNVNEPIVFGFPIVMNPVMFLPFILVPVLAALIVYGAIAVGFMQPFSGVTLPWSTPAIISGFMVGGWQGALVQIVILAISTAVYFPFFKIQDNITYKNECEMERV

SEQ ID NO: 5027 - protein, 2454 aa, Streptococcus agalactiae
ATGACCAAACAATTACTCACTCAAAAATATACAAATGATGTTCAACAAAATTCTCAAAAGCATTTTGGCTATTTGACAGAGCGCATGTATTCTTATCGTGATAAGGTTCTTGATAAGAAACCATTCATAGATGCAGAACGTGCTATCTTGGTAACTGAAGCCTATCAAAAACATCAGGAAAAACCTAATGTTTTAAAGAGAGCTTACATGTTGCAAAATATTTTGGAAAAAATGACAATCTATATTGACGATGAGACAATGATTGTCGGTAACCAAGCTTCATCTGATAAAGATGCTCCTATTTTTCCAGAATACACTCTAGAATTTGTTGTAAATGAACTAGACCTTTTTGAAAAACGAGATGGTGACGTCTTTTACATTACAGAAGAAACCAAAGAACAAATTAGAAATATTGCACCTTTCTGGGAAAATAATAATTTACGGGCTCGTGCGGGCGTTATGCTTCCAGAAGAAGTTCAAGTTTATATGGAAACAGGCTTCTTTGGGATGGAAGGTAAGATGAATTCTGGGGATGCTCACTTAGCTGTTAACTATCAGAAGTTACTAGAAGAAGGGCTTATTGGCTTTGAAAAAAAAGCAAGAAAAGCTAAAGCTGACTTAGATTTAACAAAGCCTGAGAGTATTGACAAATATCATTTCTATGATTCTATTTTAATTACAATAGAAGCTGTTAAAACTTATGCAGAGCGTTTTGCTATCCTAGCAAAAAAACAAGCTAAAACAGCAAATGCTAAGAGACGTCAGGAATTGTTAGATATCGCTAGTATTTGTGAACGAGTGCCATATTACCCAGCTAAAACGTTTGCAGAAGCTGTTCAATCGGTTTGGTTTATTCAGTGTATTCTTCAAATAGAATCAAACGGTCATTCTCTATCTTATGGACGCTTTGATCAATACATGTATCCATATGTTAAAGCTGACTTAGAAGCTGGACGTGAGACTGAGGATTCGATTGTTGAGCGCCTAACTAACCTATGGATTAAAACAATAACTATTAATAAGGTTCGTAGCCAAGCTCATACGTTTTCGTCTGCTGGTAGTCCTCTTTACCAAAATGTAACGATTGGAGGACAAACCCGACATAAGGAAGATGCTGTTAATCCTTTATCATTTCTAGTACTAAAATCAGTCGCTCAGACACACTTACCACAGCCTAATCTAACGGTTCGTTATCATGCTAACCTAGACAAGTCATTCATGAATGAAGCTATTGAAGTTATGAAATTAGGCTTTGGTATGCCAGCTTTTAATAATGATGAAATTATTATTCCATCATTTATTAAAAAAGGAGTTTCCGAAGAAGATGCCTATGATTATTCAGCGATTGGTTGTGTTGAAACAGCAGTTCCTGGGAAATGGGGTTATCGTTGTACCGGCATGAGCTATATCAACTTCCCTAAAGTGTTATTAATTACAATGAATAATGGCATTGACCCGGCTTCTGGGAAGAGATTTGCGCCTTCTTATGGGCATTTCACCCAGATGACCTCATATAAAGAACTTAAAGAAGCTTGGGACAAAACACTTCGTTACTTAACTCGAATGAGCGTTATTGTTGAGAATGCTATTGATATTAGTCTCGAAAGAGAAGTACCTGATATTCTTTGTTCAGCTTTAACTGATAATTGTATTGGACGAGGTAAGCACTTAAAAGAAGGTGGTGCAGTATATGACTACATATCTGGTCTACAAGTTGGAATCGCTAATCTTTCAGACTCACTTGCTGCGCTTAAAAAATTAGTATTTGAAGAAAAACGCCTAACCACATTAGAAGTATGGCAAGCATTACAGAGTGATTACGCAGGTCCGCGTGGTGAAGAAATTCGTCAAATGTTGATCAATGAAGCACCAAAATATGGAAATGATGATGATTACGCGGATAGTTTAGTACGTGAGTGTTATGATGTTTATGTTGAAGAAATTGCTAAATATCCCAACACACGCTATGGACGTGGACCAATCGGTGGTATTCGCTATTCAGGAACGTCCTCTATTTCAGCAAATGTAGGCCAAGGACGAGGTACTTTAGCAACTCCAGATGGTAGGCATGCAGGAACTCCATTAGCTGAAGGTTGTTCACCATCTCATAATATGGACAAAAAGGGACCTACCTCTGTTTTGAAATCAGTTTCGAAGTTACCAACTGATGAGATTGTCGGCGGTGTACTCCTTAACCAAAAAGTCAACCCTCAAACCTTGGCAAAAGAAGAAGATAAACAAAAATTAATTGCCTTACTTAGAACATTCTTCAATCGCCTTCATGGTTACCATATCCAGTATAATGTTGTCTCACGTGAGACTTTGATTGATGCTCAGAAGCACCCTGAAAAACACCGCGATTTGATTGTGCGTGTAGCAGGTTATTCTGCATTCTTTAATGTCCTATCTAAGGCAACTCAAGATGATATTATTGCACGTACAGAACATGCTCTT

SEQ ID NO: 5028 - protein, 818 aa, Streptococcus agalactiae
MTKQLLTQKYTNDVQQNSQKHFGYLTERMYSYRDKVLDKKPFIDAERAILVTEAYQKHQEKPNVLKRAYMLQNILEKMTIYIDDETMIVGNQASSDKDAPIFPEYTLEFVVNELDLFEKRDGDVFYITEETKEQIRNIAPFWENNNLRARAGVMLPEEVQVYMETGFFGMEGKMNSGDAHLAVNYQKLLEEGLIGFEKKARKAKADLDLTKPESIDKYHFYDSILITIEAVKTYAERFAILAKKQAKTANAKRRQELLDIASICERVPYYPAKTFAEAVQSVWFIQCILQIESNGHSLSYGRFDQYMYPYVKADLEAGRETEDSIVERLTNLWIKTITINKVRSQAHTFSSAGSPLYQNVTIGGQTRHKEDAVNPLSFLVLKSVAQTHLPQPNLTVRYHANLDKSFMNEAIEVMKLGFGMPAFNNDEIIIPSFIKKGVSEEDAYDYSAIGCVETAVPGKWGYRCTGMSYINFPKVLLITMNNGIDPASGKRFAPSYGHFTQMTSYKELKEAWDKTLRYLTRMSVIVENAIDISLEREVPDILCSALTDNCIGRGKHLKEGGAVYDYISGLQVGIANLSDSLAALKKLVFEEKRLTTLEVWQALQSDYAGPRGEEIRQMLINEAPKYGNDDDYADSLVRECYDVYVEEIAKYPNTRYGRGPIGGIRYSGTSSISANVGQGRGTLATPDGRHAGTPLAEGCSPSHNMDKKGPTSVLKSVSKLPTDEIVGGVLLNQKVNPQTLAKEEDKQKLIALLRTFFNRLHGYHIQYNVVSRETLIDAQKHPEKHRDLIVRVAGYSAFFNVLSKATQDDIIARTEHAL

SEQ ID NO: 5029 - protein, 666 aa, Streptococcus agalactiae
ATGGAATTTTTACTTGACACTTTAAATTTAGAAGCTATAAAAAAATGGCATCATATACTGCCACTAGCAGGTGTAACTTCAAATCCCACCATTGCTAAGAAAGAAGGAGATATACATTTTTTCCAACGCATTCGTGATGTTCGAGAAATTATTGGACGTGAAGCAAGTTTGCATGTTCAAGTAGTGGCCAAAGATTATCAAGGGATACTGGATGATGCTGCTAAAATACGCCAAGAAACGGATGATGACATTTATATCAAAGTCCCAGTTACGCCAGATGGATTAGCAGCAATTAAAACGTTAAAAGCAGAAGGTTATAATATTACAGCCACAGCAATATACACCAGTATGCAAGGTCTTTTGGCTATATCAGCTGGAGCAGACTACCTAGCACCTTACTTTAACCGAATGGAGAACCTTGATATTGATGCGACACAAGTTATTAAGGAATTAGCGCAAGCAATAGAGCGGACAGGTTCTTCTAGCAAAATTTTAGCGGCTAGTTTTAAAAACGCTTCACAAGTAACGAAGGCCTTATCACAGGGTGCTCAATCAATCACCGCGGGACCAGATATTTTTGAATCAGTCTTTGCGATGCCATCTATTGCAAAAGCTGTTAACGACTTTGCAGATGATTGGAAAGCCAGTCAACACTCAGAACATATT

SEQ ID NO: 5030 - protein, 222 aa, Streptococcus agalactiae; identical to SEQ ID NO: 676

SEQ ID NO: 5031 - protein, 1086 aa, Streptococcus agalactiae
ATGAAAGTTTTCGCAAGTCCATCGCGCTATATACAAGGAAAGGATGCTTTATTCCAAAGTATTGAACATATCAAATCTTTAGGTCAGACTCCACTTATCCTTTGTGATGATGTTGTTTATAATATCGTTGGAGAAAGTTTTTTATCTTATCTACAAGACGATTTGTTACCACATCGTGTCTCCTTTAACGGAGAAGCATCTGATAATGAAATCAATCGTGTCGTTGCTGTTGCGAAAGAAAAGAATAGTGACCTTATTATTGGACTTGGTGGTGGAAAAACTATTGACTCTGCAAAGGCAATTGCAGATAAAGTTAATTTACCAGTGGTCATTGCACCAACAGTAGCTTCAACAGATGCCCCAACATCAGCGTTATCAGTAATCTATACAGATGAAGGAGCTTTTGAAAAATATATTTTTTATTCAAAGAATCCAGACTTAGTTTTGGTCGATACTCAAGTAATTGCTCAAGCGCCAAAACGTTTACTAGCTTCTGGGATTGCAGATGGCTTAGCTACTTGGGTTGAAGCGAGAGCAGTCTTACAAAAAAATGGAATAGCGATGGCTGGCGGTAGACAGACTTTAGCGGGCGTGGCAATTGCCCAAGCATGTGAGCGTACTTTATTTAATGATAGTTTACAAGCTTTAGCGGCTTGTGATGCCAAAGTGGTTACAAAAGCTTTAGAAAATGTTATTGAAGCTAATACCTTACTTAGTGGTTTAGGTTTTGAAAGTGCAGGATTAGCTGCAGCTCATGCTATTCATAATGGTTTTACTGCCTTGAGTGGAGATATTCATCACTTAACCCATGGTGAAAAAGTTGCCTATGGAACGTTGACGCAACTTTTCCTCGAAAATAGACCAAAGGAAGAAATTGATCGCTACATTAATCTTTACCAAGCGATTGGAATGCCAACTACACTTGCAGAACTCCATTTGGGTGATGCAACATATGAAGAACTTTTAAAAGTTGGTCAGCAAGCAACAATTGAAGGTGAAACAATACATGAAATGCCATTCAAAATTAGTGCAGAGGATGTCGCTGCAGCCCTGTTAGCAGTTGACCGCTATGTTTCAAATCATCAA

SEQ ID NO: 5032 - protein, 362 aa, Streptococcus agalactiae
MKVFASPSRYIQGKDALFQSIEHIKSLGQTPLILCDDVVYNIVGESFLSYLQDDLLPHRVSFNGEASDNEINRVVAVAKEKNSDLIIGLGGGKTIDSAKAIADKVNLPVVIAPTVASTDAPTSALSVIYTDEGAFEKYIFYSKNPDLVLVDTQVIAQAPKRLLASGIADGLATWVEARAVLQKNGIAMAGGRQTLAGVAIAQACERTLFNDSLQALAACDAKVVTKALENVIEANTLLSGLGFESAGLAAAHAIHNGFTALSGDIHHLTHGEKVAYGTLTQLFLENRPKEEIDRYINLYQAIGMPTTLAELHLGDATYEELLKVGQQATIEGETIHEMPFKISAEDVAAALLAVDRYVSNHQ

SEQ ID NO: 5033 - protein, 924 aa, Streptococcus agalactiae
ATGTCAAAAATTTATAATTCTATTACAGACTTAATCGGAAATACACCCATTATTCAATTACATCATATTGTTCCAGAAGGAGCTGCAGATGTGTACGTTAAGTTAGAATCCTTTAACCCAGGTTCATCTGTCAAAGATCGTATTGCTCTAGCTATGATTGAAGATGCAGAGCAAAAAGGGATTCTTAAAGCCGGAGATACAATCGTAGAACCTACATCTGGTAATACAGGTATCGGTTTGGCTTGGGTAGGAAAAGCTAAAGGGTATAATGTTATTATTGTTATGCCAGAAACCATGTCAATTGAACGTCGTAAAATCATTCAAGCCTATGGTGCTCAATTAGTACTAACACCTGGTAGTGAAGGGATGAAGGGAGCTATTGCTAAGGCAAAAGAAATTTCTGTAGAGCAAAATGCTTGGTTACCCTTGCAATTTAATAATCAAGCCAATCCAGAAATCCACGAAAAAACGACTGGTAGGGAAATTATCGAGACTTTTGGTGAAAAAGGTTTAGATGCTTTTATCGCAGGTGTGGGAACTGGTGGGACAATTACTGGTGTCTCTCGTGCATTAAAAAAAGTCAATCCTGATGTCGCTATTTATGCTGTAGAAGCTGATGAATCTGCAATCCTTTCTGGTGAGCAACCTGGGCCTCATAAAATACAAGGGATTTCTGCAGGTTTCATCCCAGAAACATTGGCTACAGATTCTTATGATCATATCATTCGCGTTACATCTGACGATGCTATTGAAACAGGACGTATCATCGGCGGACTAGAAGGTTTCCTCGCAGGAATTTCTGCTTCAGCTGCTATTTATGCTGCTATTGAAGTGGCCAAACAAGTAGGAAAAGGGAAAAAGGTTTTAGCTCTTCTCCCTGATAATGGCGAACGTTACTTATCAACTAGCCTGTATGATTTTGAA

SEQ ID NO: 5034 - protein, 308 aa, Streptococcus agalactiae
MSKIYNSITDLIGNTPIIQLHHIVPEGAADVYVKLESFNPGSSVKDRIALAMIEDAEQKGILKAGDTIVEPTSGNTGIGLAWVGKAKGYNVIIVMPETMSIERRKIIQAYGAQLVLTPGSEGMKGAIAKAKEISVEQNAWLPLQFNNQANPEIHEKTTGREIIETFGEKGLDAFIAGVGTGGTITGVSRALKKVNPDVAIYAVEADESAILSGEQPGPHKIQGISAGFIPETLATDSYDHIIRVTSDDAIETGRIIGGLEGFLAGISASAAIYAAIEVAKQVGKGKKVLALLPDNGERYLSTSLYDFE

SEQ ID NO: 5035 - protein, 642 aa, Streptococcus agalactiae
ATGAACTATAAAACGATAAAATCAGACGGAATTGTCGAAGAAGAAATTAAAAAATCGCTATTTATTTGTCATCTAAAGCGAGTAGAGTCCGAAGAGGAGGGGCGTAATTATATTACGCAAATCAAGAAAGCGCACTACAAAGCCAATCATTCGTGTTCAGCTATGGTTATTGGCGAAAAAGGGGATATAAAACGATCTAGTGATGATGGAGAACCTAGTGGTACAGCAGGTATCCCTATGCTAACCGTACTTGAAAAGCAAGGCCTGACAAATGTTGTTGCCGTCGTTACACGGTATTTTGGAGGTATCAAATTAGGCACAGGGGGGCTTATTCGTGCCTACTCTGGTAGCGTAGCTAATGCCATCAAAGAGATCGAGGTAGTAGAAGTTAAAGAACAAATTGGTATTCGTATTCAATTAACCTATCCTCAATATCAAACTTTTGACAACTTCCTAAAAGAGCACCACCTTCAGGAGTTTGAAACAGAATTTTTAGAAGCTGTAACCTGTAAAATATACGTTGACCCTAAGGAATTTGAACACACAATAACTAATTTGACAGAGTTCTACCAAGGAAAAGCTTTGTTAACTGAAGAAGGGAGTCAAATTGTTGAAATTCCCTTTAAGGATGAAACCGATAAA

SEQ ID NO: 5036 - protein, 214 aa, Streptococcus agalactiae
MNYKTIKSDGIVEEEIKKSLFICHLKRVESEEEGRNYITQIKKAHYKANHSCSAMVIGEKGDIKRSSDDGEPSGTAGIPMLTVLEKQGLTNVVAVVTRYFGGIKLGTGGLIRAYSGSVANAIKEIEVVEVKEQIGIRIQLTYPQYQTFDNFLKEHHLQEFETEFLEAVTCKIYVDPKEFEHTITNLTEFYQGKALLTEEGSQIVEIPFKDETDK

SEQ ID NO: 5037 - protein, 1287 aa, Streptococcus agalactiae
ATGGAAAATTATTTAGGTAGACTTTGGACAAAAGCACAATTATCTGAGCAACTTAGAAAAATTGCAATTAACTTGCCATCTTTTATAAAGAAAGGAAGCGACTATATTTGTACTCGATGCTCTAGTTCTGTTGCCAAAAATTGCCAATTACCAACTGGAAATTATTATTGTAGAGAATGTATAGTTTTTGGAAGAGTTACTAGTAATGAAAATTTATATTATTTCCCACAAAAAACATTTTCTAAAACGAATTCTTTAAAATGGAAAGGGGGACTGACACCTTATCAAAATGAGGTTTCAGAAGAGTTGTTGAAAGGTATTTCAAGTAAGGAAAATCTTCTTGTTCATGCTGTGACAGGGGCTGGTAAAACAGAAATGATATACCACTCTATCGCCAAAGTAATTGATACTGGAGGAAGCGTTTGTATTGCCAGTCCTAGAATTGATGTTTGTTTAGAATTGCATAAGCGACTTTCAAACGATTTTAGATGTGCCATAACATTAATGCATGGAGAATCTCCTTCTTATCAGAGATCCCCTTTAACTATTGCCACAACACATCAATTGTTAAAATTTTATCATGCTTTTGATTTGCTAATTGTTGATGAAGTTGATGCTTTTCCATATGTCGACAACCCGATACTATACCATGGTGTAAAACAGGCCTTAAAGGAAAACGGAACAAGTATTTTTCTGACTGCAACTTCAACGACTGAGTTAGAAAGAAAAGTTGCAAGAAAAGAACTAAAAAAATTACATCTAGCTAGGAGATTTCATGCCAATCCGTTAGTGATACCCGAGATGGTTTGGGTAAGTGGTATCCAGAAAAGCTTGCAGACACAAAAACTACCTCCCAAATTATATCAGCTGATAAATAAACAGCGACAAACGAGATATCCTTTGTTATTATTTTTCCCCCATATTTCAGAAGGTCAGGTATTCACCGAAATGTTAAGACAAGCCTTTCCTATGGAAAAAATTGGTTTTGTTTCAAGTAAGAGCACATCTAGGTTAAAGTTAGTGCAAGATTTTCGAGATAATAAATTGTCTATCCTAGTGTCAACTACCATTCTAGAGAGAGGAGTAACTTTCCCTAGCGTCGACGTTTTTGTTATACAAGCAAATCATCATTTGTTTACGAAAAGTTCCTTGGTACAAATTTCAGGAAGAGTTGGAAGAGCATTAGAAAGGCCCGAAGGGCTCCTTTACTTCCTTCATGATGGGAAAAGTAAATCGATGCACCAAGCTATAAAGGAGATTAAAAACATGAATCATATAGGAGGATTT

SEQ ID NO: 5038 - protein, 429 aa, Streptococcus agalactiae
MENYLGRLWTKAQLSEQLRKIAINLPSFIKKGSDYICTRCSSSVAKNCQLPTGNYYCRECIVFGRVTSNENLYYFPQKTFSKTNSLKWKGGLTPYQNEVSEELLKGISSKENLLVHAVTGAGKTEMIYHSIAKVIDTGGSVCIASPRIDVCLELHKRLSNDFRCAITLMHGESPSYQRSPLTIATTHQLLKFYHAFDLLIVDEVDAFPYVDNPILYHGVKQALKENGTSIFLTATSTTELERKVARKELKKLHLARRFHANPLVIPEMVWVSGIQKSLQTQKLPPKLYQLINKQRQTRYPLLLFFPHISEGQVFTEMLRQAFPMEKIGFVSSKSTSRLKLVQDFRDNKLSILVSTTILERGVTFPSVDVFVIQANHHLFTKSSLVQISGRVGRALERPEGLLYFLHDGKSKSMHQAIKEIKNMNHIGGF

SEQ ID NO: 5039 - protein, 663 aa, Streptococcus agalactiae
ATGACTTGTTTGTTATGTCATGAAATAGATTTATCGCAATTAACTTTTGTGGAACTTATGCTTCTAAAACCAAAGCAAAACGTAATTTGTCAAACGTGCAAGGGTAGTTTTGAAGCACTTAGTAGGGAGATGGGTTGCCAAACATGTTGCAAGCAAATTCCCCAAAAACAATGTCAAGATTGTATTTATTGGGGTAAAAAAGGTATAGAGGTAAATCATTTTTCCCTTTATAGATACAATGAAGCAATGAAAAAATATTTTTCTCTTTTTAAATTTCAAGGGGATTATTTGTTGAAAGATGTTTTTACAAAAGAAATAAAAGCTGCTCTAAAAAGGTATAAGGGCTACACTATAGTGCCAGTTCCCTTGAGTCATGAAGGATACCAAAATAGGCAATTTAATCAAGTGATTGCTTTTCTACAATCGGCAAATATACCTTATAAAAATATTCTTTCTAAAAAAGATAGAGGTAAGCAATCGGCTAATAATAAAGAAGAAAGACTCAAACAAGTTCAGCAATTTACATTAAAAAATGAGGCTGAGTTAAGGGATAACCTTTTAATTGTTGATGATATTTATACAACAGGCGCAACAATAGCACAAATCAGGAAACTATTAGAAGAAAAAGGTATAAAAAATATAAAAAGTTTTTCATTAGCACGC

SEQ ID NO: 5040 - protein, 221 aa, Streptococcus agalactiae
MTCLLCHEIDLSQLTFVELMLLKPKQNVICQTCKGSFEALSREMGCQTCCKQIPQKQCQDCIYWGKKGIEVNHFSLYRYNEAMKKYFSLFKFQGDYLLKDVFTKEIKAALKRYKGYTIVPVPLSHEGYQNRQFNQVIAFLQSANIPYKNILSKKDRGKQSANNKEERLKQVQQFTLKNEAELRDNLLIVDDIYTTGATIAQIRKLLEEKGIKNIKSFSLAR

SEQ ID NO: 5041 - protein, 552 aa, Streptococcus agalactiae
ATGATTAAATACAGTATTCGTGGTGAAAACATCGAAGTAACAGAAGCTATTCGTGAGTATGTTGAGACCAAACTCTCTAAAGTTGAAAAATACTTTAATGAAGAACAAGAATTAGATACTAGAGTCAACCTCAAAGTATACAGAGAGAAGACCGCAAAAGTTGAAGTAACAATCTTAATAGATTCTATTACTTTACGAGCAGAAGATGTTTCACAAGATATGTATGGGTCAATTGACTTAGTTGTTGATAAAATTGAGCGTCAAATTCGTAAAAATAAAACTAAAATTGCGAAAAAATATCGTGAAAAAATTCCAGCAAGTCAAGTTTTCACAACAGAATTTGAGGCTGAGCCAGATGAAGAAGCAGTAAGCCAAAGAATTGTACGTACTAAGAATGTTAATCTAAAACCAATGGATGTTGAGGAAGCATTGTTGCAAATGGAACTTTTAGGTCATGATTTCTTTATCTATACAGATGCAGAAGATAATACGACAAATGTCCTTTACAAGCGTGAAGATGGCGAACTAGGTTTAATTGAAGCTAAAGGAAAT

SEQ ID NO: 5042 - protein, 184 aa, Streptococcus agalactiae
MIKYSIRGENIEVTEAIREYVETKLSKVEKYFNEEQELDTRVNLKVYREKTAKVEVTILIDSITLRAEDVSQDMYGSIDLVVDKIERQIRKNKTKIAKKYREKIPASQVFTTEFEAEPDEEAVSQRIVRTKNVNLKPMDVEEALLQMELLGHDFFIYTDAEDNTTNVLYKREDGELGLIEAKGN

SEQ ID NO: 5043 - protein, 273 aa, Streptococcus agalactiae
ATGGACTTAGTAATGCCTGAAATGGACGGTGTAGAAGCAACCTTAGCATTATTGAAGGATTGGCCAGAAGCTGCTATTTTAGTCTTAACATCTTACTTGGACAATGAAAAAATTTACCCTGTTATTGAAGCAGGTGCCAAAGGCTATATGTTAAAGACCTCAAGTGCAGCAGAGATTCTTAATGCCATTCGTAAAGTTGCAAGGGGAGAACAAGCTATTGAAAATGAAGTAGATAAGAAAATTAAGGCTCATGATAAATGTCCAGCTNNNNNT

SEQ ID NO: 5044 - protein, 91 aa, Streptococcus agalactiae
  VARIANT 90, 91: Xaa = Any Amino Acid
MDLVMPEMDGVEATLALLKDWPEAAILVLTSYLDNEKIYPVIEAGAKGYMLKTSSAAEILNAIRKVARGEQAIENEVDKKIKAHDKCPAXX

SEQ ID NO: 5045 - protein, 1350 aa, Streptococcus agalactiae
ATGAAAGTAGTCAAATTTGGAGGAAGTTCTTTAGCATCTTCCCAACAATTATACAAAGTACTAAATATTATCAAATCAGACTACACTAGACGGTTTGTTGTCGTTTCAGCTCCAGGGAAACGCTACGAAGAAGACTTAAAAATGACAGATGCTTTGATACAATATTATCAAAATTATATTAACGGTAAAGATATTGTTAAAGACCAAACTTGGATTATCAATCGTTATCAAGAAATTATTAGTGATTTGTCTTTAGGAAGCACTATTGCAGAAGAAATTACTCGCTCTATAGAGCAGCTAGCTTCACTTCCCATAGAAAATAATCAGTTTTTATATGATTGTTTTTTAGCAGCCGGTGAAGATAACAACGCAAAGTTAGTTGCAACGTTTTTTAATCAAAATGACATTCCTGCAAGATATGTTCATCCAAACGAAGCAGGAATTATTGTAACTAAAGAACCATGTAATGCACGAATTATTCCAGGAAGTTATGATAAGATTGAGAACTTATGTCTATACAATGAGGTTCTTGTTATCCCTGGATTTTTTGGAGTCACAGAAGATAACCAAATTTGTACCTTTTCAAGAGGGGGATCTGACATTACTGGATCCCTAATTGCAGCAGGCATAAAAGCAGACCTTTATGAGAACTTCACAGATGTTGATGGTATATTTGCAGCACATCCAGGTGTAGTTAAGAACCCTCACGCTATCCCTGAGCTTACTTATAAAGAAATGCGTGAATTAGCCTATGCGGGTTTTTCGGTTTTACATGATGAAGCTTTACTTCCTGCCTATCGTGGCAGAATCCCTCTTGTTATTAAAAATACAAATAATCCCCAACAGCCTGGTACAAAAATAGTTTTAAAGCATACTCGTAGTAACATAGCAGTAACTGGGATCGCTTCTGATAGCCGTTTTGCTAGCATAAACGTATCTAAATACTTAATGAATAGAGAAGTAGGTTTCGGCCGAAAAGTACTACAAATTTTAGAGGATTTAAATATTAGTTTTGAACATATGCCAACTGGCATAGATGATCTATCCATTGTCTTACGTGAAAAAGAATTGACACCAATCAAAGAACAAGAAATCTTAAATTACCTAACTCGTAAACTAGAAGTAGATTACGTTGACATCCAACACAATTTATCTACAATCGTAATTGTAGGTGAAAATATGAAAAGTCAGATTGGAGTCACTGCAACAGCGACACAAGCCTTATCAAGAGAAAAAATCAATATCACCATGATATCACAAGGTTCAAGCGAAGTCTCCATTATGTTCGTTATAGACAGTAAGGATGAAAAAAGAGCTATTAAAGCACTATATGAAACATTCTTCCAAAAA

SEQ ID NO: 5046 - protein, 450 aa, Streptococcus agalactiae
MKVVKFGGSSLASSQQLYKVLNIIKSDYTRRFVVVSAPGKRYEEDLKMTDALIQYYQNYINGKDIVKDQTWIINRYQEIISDLSLGSTIAEEITRSIEQLASLPIENNQFLYDCFLAAGEDNNAKLVATFFNQNDIPARYVHPNEAGIIVTKEPCNARIIPGSYDKIENLCLYNEVLVIPGFFGVTEDNQICTFSRGGSDITGSLIAAGIKADLYENFTDVDGIFAAHPGVVKNPHAIPELTYKEMRELAYAGFSVLHDEALLPAYRGRIPLVIKNTNNPQQPGTKIVLKHTRSNIAVTGIASDSRFASINVSKYLMNREVGFGRKVLQILEDLNISFEHMPTGIDDLSIVLREKELTPIKEQEILNYLTRKLEVDYVDIQHNLSTIVIVGENMKSQIGVTATATQALSREKINITMISQGSSEVSIMFVIDSKDEKRAIKALYETFFQK

SEQ ID NO: 5047 - protein, 648 aa, Streptococcus agalactiae
ATGTGTAAATATAAAGCAATAATATTTGATATGGATGGTGTTCTATTTGACACTGAATTATTTTATTATAAAAGGCGAGAGCGTTTTTTAAAACAACATGGAATTACAATTGACCATTTACCAATGAATTTTTTTATTGGAGGAAATATGAAGCAGGTTTGGAAATCTGTTTTAGGTGATCAATATGATACCTGGGATATTGATAAGCTCCAACAAGATTATAGTCGCTATAAAGAGGATAATCCCTTGCCATACAAAGATTTAATTTTTCAGGATTGTAAAAGAGTCATTGAAAAGCTTCATCACAAAGGCTATCTTTTGGGTCTAGCTTCAAGTTCTACTAGACATGATATCATGTTAGCATTAGAAAGTTTTAATCTGGATACATATTTTAAGGTAATTCTGTCTGGTGAGGAATTTTCAGAAAGTAAACCTAATCCAGCTATTTATAATAGAGCAGCAGAACTTTTAGATATTCCTAAACAGCAAATTCTTATTGTAGAAGACAGTGAGAAGGGTATTACAGCTGGTATTGCATCCGGTATTGATGTGTGGGCTATTGAAGATAAATACTTTGGAATGAATCAGTCGCAGGCTAATGTATTAGTGAGCGATCTGAGTCAATTTTTTGTGAAATTAGATAACTAT

SEQ ID NO: 5048 - protein, 216 aa, Streptococcus agalactiae
MCKYKAIIFDMDGVLFDTELFYYKRRERFLKQHGITIDHLPMNFFIGGNMKQVWKSVLGDQYDTWDIDKLQQDYSRYKEDNPLPYKDLIFQDCKRVIEKLHHKGYLLGLASSSTRHDIMLALESFNLDTYFKVILSGEEFSESKPNPAIYNRAAELLDIPKQQILIVEDSEKGITAGIASGIDVWAIEDKYFGMNQSQANVLVSDLSQFFVKLDNY

SEQ ID NO: 5049 - protein, 750 aa, Streptococcus agalactiae
GTGGCCACTATTATGCTTAATCGACCAGATATTTCAAATGGTTTTAACATCCCAATGTGTCAAGAAATTATTGATGCAATAAGGCTTGTGTCTGAAAATAAAGATGTCATGTTTTTAGTGATTGAAGCACAAGGACCAATCTTTTCAATCGGAGGAGATTTAAAAGTGATGAAAGCTGCTGTTGAGAGCGATGATATTAGCTCATTAACTAAAATTGCTGAGTTAGTTAATCAGATATCGTATGATTTACTACAGCTAGAGAAACCTGTTGTTATGTGTGTAGATGGGGCTGTAGCTGGTGCCGCAGCTAATATTGCATTAGCAGCTGATTTTGTTATCGCAAGCAAGAAGAGTAAATTTATCCAGGCTTTTGTGGGTGTCGGTTTAGCTCCAGATGCAGGAGGTTTATTGTTACTTAGTAAATCAATCGGTATAACTCGTGCAGTGCAACTAGCTTTAACTGGAGAAAGCTTATCTGCTGAAAAAGCTGAAGCTTTGGGAATTGTTTATAAACTTTGTGAATCAGATAAAATAGGTAAAATTAAGGATCAACTATTAAAGCGTTTAAGTAGACATTCTATAAACTCATATCAAGCCATAAAATCATTAGCTTGGGAAGCTGCTTTTAAAGATTGGGAACAATATAAAAAGCTTGAATTACAGTTACAAGAATCATTAGCCTTTAAGCAAGATTTTAAAGAAGGTGTTCGGGCACACGCTGATAGAAGGCGTCCTAATTTTTTAGGTAAA

SEQ ID NO: 5050 - protein, 250 aa, Streptococcus agalactiae; identical to SEQ ID NO: 694

SEQ ID NO: 5051 - protein, 432 aa, Streptococcus agalactiae
TTGGAATATGATCAGATTAATAGTTATTTAGTTGACATTTTTAATAGAATCATGATTATTGAGGAAATGAGTTTAAAGACTAGCCAATTTAGCGATGTATCTTTAAAAGAAATGCATACTATTGAAATTATTGGGAAACATTCTGAGGTAACTCCTAGCGATGTCGCTCGAGAATTAATGTTAACTTTGGGAACTGTAACAACCAGCCTTAATAAGTTAGAAAAAAAAGGCTACATTGAGCGTAAACGGTCAAGTATTGATCGTCGAGTTGTTCACTTGAGTCTTACTAAGAGAGGTAGGTTATTAGATCGATTGCATAGTAAATTTCATAAATCTATGGTATCTCATATTATTGAAGACCTAGGTGAAGAAGACATAAAAATGTTGACGAGCGCTTTAGGGAATCTTCATAAATTTTTGGAGGACTTAGTC

SEQ ID NO: 5052 - protein, 144 aa, Streptococcus agalactiae; identical to SEQ ID NO: 696

SEQ ID NO: 5053 - protein, 969 aa, Streptococcus agalactiae
GTGGTTTTTGCTAAAATTAGTCAACTTGCACATTATGCACCTTCTCAAATTATTAAAAATGAGGATTTATCATTAATCATGGATACCAGTGATGACTGGATTTCGTCACGTACTGGTATAAAACAACGTCATATTAGTAAAAATGAAACAACAGCTGATTTGGCAAATAAGGTCGCAGAACAACTTATTGAAAAATCCGGTTATTCCGCTAGTCAAATTGACTTTATTATTGTTGCAACGATGACACCAGACTCTATGATGCCTTCTACTGCCGCAAGAGTGCAAGCTCATATTGGAGCGAGTAATGCTTTTGCCTTTGACTTGAGTGCAGCATGTAGTGGTTTTGTTTTTGCCTTGTCTACCGCCGAAAAATTGATATCATCAGGTAGCTATCAAAAAGGTTTAGTAATAGGAGCAGAAACTGTTTCTAAAGTATTAGACTGGACTGATAGAGGGACAGCAGTTTTATTTGGAGATGGAGCTGGAGGTGTCTTGCTAGAAGCTTCTAAGGAAAAACATTTTCTTGCAGAGTCTCTCAATACAGATGGTAGTCGTCAGGGACTTCAATCTAGTCAAGTCGGGTTAAATTCACCTTTCTCAGATGAAGTACTTGATGATAAATTTTTGAAAATGGATGGTAGAGCAATCTTTGATTTTGCTATCAAAGAAGTTTCAAAAAGTATCAATCATCTTATAGAAACATCCCATTTGGAAAAAGAAGATATTGATTATCTTTTCTTACACCAAGCGAATCGAAGGATTTTAGATAAGATGTCTCGAAAAATTGATATAGCACGTGATAAATTTCCAGAGAATATGATGGATTATGGTAATACTAGTGCAGCTAGTATCCCTATTTTACTTTCAGAATCTTATGAGAACGGTTTGTTGAAACTAGATGGTAACCAAACAATCCTCTTATCGGGTTTCGGTGGAGGTTTGACATGGGGAAGTCTAATTGTTAAAATT

SEQ ID NO: 5054 - protein, 323 aa, Streptococcus agalactiae
MVFAKISQLAHYAPSQIIKNEDLSLIMDTSDDWISSRTGIKQRHISKNETTADLANKVAEQLIEKSGYSASQIDFIIVATMTPDSMMPSTAARVQAHIGASNAFAFDLSAACSGFVFALSTAEKLISSGSYQKGLVIGAETVSKVLDWTDRGTAVLFGDGAGGVLLEASKEKHFLAESLNTDGSRQGLQSSQVGLNSPFSDEVLDDKFLKMDGRAIFDFAIKEVSKSINHLIETSHLEKEDIDYLFLHQANRRILDKMSRKIDIARDKFPENMMDYGNTSAASIPILLSESYENGLLKLDGNQTILLSGFGGGLTWGSLIVKI

SEQ ID NO: 5055 - protein, 270 aa, Streptococcus agalactiae
GTGCATAGCACATTTATAAAAGATTATTTAAAATTTAAGGAGCTAAAAATGGCAGTATTTGAAAAAGTACAAGAAATTATTGTTGAAGAACTTGGTAAAGATGCAGAAGAAGTAACGTTGAACACTACTTTTGACGATCTTGATGCTGATTCGCTTGATGTTTTCCAAGTGATTTCAGAAATTGAAGATGCATTTGATATCCAAATTGAGACAGAAGAAGGACTAAATACTGTTGGTGATTTAGTTGCTTATGTTGAAGAAAAAGTAAAA

SEQ ID NO: 5056 - protein, 90 aa, Streptococcus agalactiae; identical to SEQ ID NO: 700

SEQ ID NO: 5057 - protein, 957 aa, Streptococcus agalactiae
ATGAAAACACGTATAACAGAATTACTAAATATAAAATATCCAATTTTTCAAGGGGGTATGGCGTGGGTCGCTGATGGAGACCTTGCAGGAGCAGTTTCTAAGGCAGGTGGTCTAGGTATTATTGGTGGAGGAAATGCCCCTAAAGAGGTTGTCAAAGCAAATATTGATAAAATAAAATCTATGACTGATAAACCCTTTGGTGTGAATATTATGCTTTTATCACCTTTTGTAGATGATATTGTTGATTTGGTTATTGAAGAAGGTGTAAAAGTTGTAACGACGGGTGCAGGTAATCCTGGTAAGTACATGGAGCGCTTTCATGAAGCAGGTATAACAGTAATCCCTGTTGTTCCTAGTGTTGCATTAGCAAAACGTATGGAGAAATTAGGGGCTGATGCTATCATTACAGAAGGAATGGAAGCGGGAGGTCACATCGGGAAACTGACCACGATGACATTAGTGCGGCAGGTTGTTGATGCTGTTACAATTCCAGTCATTGCCGCAGGTGGTATAGCAGATGGACGTGGGGCTGCTGCGGGTTTCATGTTAGGAGCTGATGCTGTTCAGATAGGAACTCGTTTTGTTGTTGCTAAAGAATCTAATGCTCACCCTAATTACAAAGCAAAAATCTTAAAAGCAAAAGATATCGACACTGCTGTTTCTGCTCAGGTAGTAGGTCACCCAGTTCGTGCCTTAAAAAATAAACTAGTAACAACCTATAGCCAAGCAGAAAAAGATTATTTAGCTGGCCGTATTTCAATCAATGAGATTGAAGAATTAGGAGCAGGAGCTCTTCGCAATGCAGTTGTTGATGGGGATGTTATTAATGGTTCAGTTATGGCAGGACAAATTGCCGGATTAATTAAATCAGAAGAGACTTGTCAAGAGATTCTTGAAGATATTTATTCAGGAGCGCGTCAAGTTATTCTTTCTGAGGCAAACCGCTGGTCAGATTTA

SEQ ID NO: 5058 - protein, 319 aa, Streptococcus agalactiae
MKTRITELLNIKYPIFQGGMAWVADGDLAGAVSKAGGLGIIGGGNAPKEVVKANIDKIKSMTDKPFGVNIMLLSPFVDDIVDLVIEEGVKVVTTGAGNPGKYMERFHEAGITVIPVVPSVALAKRMEKLGADAIITEGMEAGGHIGKLTTMTLVRQVVDAVTIPVIAAGGIADGRGAAAGFMLGADAVQIGTRFVVAKESNAHPNYKAKILKAKDIDTAVSAQVVGHPVRALKNKLVTTYSQAEKDYLAGRISINEIEELGAGALRNAVVDGDVINGSVMAGQIAGLIKSEETCQEILEDIYSGARQVILSEANRWSDL

SEQ ID NO: 5059 - protein, 924 aa, Streptococcus agalactiae
ATGAATAAAGTCGCATTTCTATTTGCTGGTCAAGGTGCTCAAAAGTTGGGAATGGCTAGAGATTTATATGAAACTTTCCCGATTGTTAAAGAAACTTTTGATAAGGCAAGTCATGTTTTAGGATACGATTTGAGAGAATTGATTGATAAAGACTTAGACAAATTAAATCAGACGAAATATACTCAACCAGCTATTTTAACGACTTCGACTGCTATTTATCGTTTAATTCTTAAAGAAATTGGACTTAGACCAGATATGGTTGCAGGACTTTCTTTGGGAGAATACAGTGCTTTAGTTGCTTCAGGTGCTATAAGATTTGAAGATGCTGTAGTACTTGTTGCTAGACGAGGTCAACTAATGGAAGCAGCAGCACCTGCTGGTAGTGGCAAAATGGTAGCGGTTTTAAATGCTGATCGTCAAATAATTGAAGATGCTTGTAAGAAGGCTTCTCAGTTTGGTATTGTTAGTCCTGCAAATTATAATACTCCAAAGCAAATTGTTATAGGGGGAGAGTCAATCGCTGTAAATGCAGCTGTAGAAGAACTAAAACAACAAGGAGTAAAACGTTTAATTCCTCTGAATGTTTCAGGTCCTTTTCACACTGCTTTATTGAAACCTGCAAGTCAGAAATTGAGCGATGTTTTAGATAAAGTTCATTTTTCAGTTTCTGAAATCCCTGTAATTGGAAATACAGAGGCGCAGATAATGAAAAAAGACGATATCAAATCTTTATTGGCACGCCAAGTTATGGAACCTGTACGCTTTGATGAGTCTATTGAAACCATGAAAAAAATGGGAATGACACAGGTTGTTGAAATTGGTCCAGGGAAGGTACTCTCAGGTTTCTTGAAAAAAATAGATAGCTCATTATCAGTATATTCTGTTGAAGATAAAATTGGATTTAATAATCTTAAGGAATTAAAC

SEQ ID NO: 5060 - protein, 308 aa, Streptococcus agalactiae
MNKVAFLFAGQGAQKLGMARDLYETFPIVKETFDKASHVLGYDLRELIDKDLDKLNQTKYTQPAILTTSTAIYRLILKEIGLRPDMVAGLSLGEYSALVASGAIRFEDAVVLVARRGQLMEAAAPAGSGKMVAVLNADRQIIEDACKKASQFGIVSPANYNTPKQIVIGGESIAVNAAVEELKQQGVKRLIPLNVSGPFHTALLKPASQKLSDVLDKVHFSVSEIPVIGNTEAQIMKKDDIKSLLARQVMEPVRFDESIETMKKMGMTQVVEIGPGKVLSGFLKKIDSSLSVYSVEDKIGFNNLKELN

SEQ ID NO: 5061 - protein, 732 aa, Streptococcus agalactiae
ATGCAATTAAAAGATAAGAACATTTTTATTACGGGTTCAAGTAGAGGAATCGGCCTTGCAATTGCCCATCAATTTGCACAATTAGGTGCTAATATTGTTTTAAATGGACGTTCTGAAATATCAGAAGACTTAATAGCTGAATTTGCTGATTATGGTGTAAAAGTTATTGCTATTTCAGGAGATGTTTCTTCTTTTGAAGATGCTAATCGCATGATTAAAGAAGCTATTGCAAGTCTAGGTAGCGTGGATGTGCTCGTTAACAACGCTGGTATTACTAATGATAAATTGATGCTTAAAATGACTGTTGAAGATTTTGAGAGCGTTCTTAAAATTAATTTAACAGGTGCATTTAATATGACACAATCAGTCTTGAAACCGATGACAAAAGCGCGTCAAGGTGCTATTATTAATATCTCTAGCGTCGTTGGATTAACTGGAAATGTAGGGCAAGCTAATTACGCAGCCTCTAAAGCAGGTTTAATTGGCTTTACAAAATCAGTTGCCAGAGAAGTAGCAGCACGAGGCATTCGTGTCAATGCCATTGCTCCAGGCTTTATCGAATCTGATATGACAGATGTTATCCCAGAAAAAATGCAAGAAGCTATTTTAGCTCAAATTCCAATGAAACGTATTGGAAAAGGTAAAGAAGTAGCGCAGGTAGCGTCTTTCTTAGCAGAACAAGAATACCTTACAGGACAAGTTATTGCCATTGATGGCGGTATGACGATGCAA

SEQ ID NO: 5062 - protein, 244 aa, Streptococcus agalactiae; identical to SEQ ID NO: 706

SEQ ID NO: 5063 - protein, 1230 aa, Streptococcus agalactiae
ATGACATTACAGCGAGTAGTAGTAACAGGTTACGGTGTAACCTCACCTATTGGAAACACACCAGAAGAATTTTGGAATAGCCTTAAAGAAGGAAATGTTGGTATTGGACCTATCACTAAATTTGATTCAAGTGATTTCATGGTCAAAAATGCTGCTGAAATTCATGATTTTCCATTTGATAAATATTTTGTCAAAAAAGATCTGAACAGATTTGATATGTATTCCCTTTATGCCTTATATGCTTCAAGTGAAGCTATTCAACATGCTAATTTAAATTTAGATGAAATTGATGCAGATCGATTTGGTGTCATCGTTGCATCAGGTATTGGAGGGATTCAAGAGATTGAAGAACAAGTGATTCGTCTTCATGAAAAAGGGCCAAAACGCGTAAAACCAATGACGCTTCCAAAAGCTCTACCAAATATGGCAGCTGGAAATGTTGCGATGAGGTTAGGCGCTCATGGTGTATGTAAATCAATTAATACAGCTTGTGCTTCTTCTAATGATGCTATTGGAGATGCTTTCCGTAATATAAAATTTGGTATTCAAGATATTATGGTAGTCGGTGGTGCAGAAGCTGCTATTACAAAATTTGCCATTGCTGGATTCCAAAGTCTTACAGCATTATCAACAACTGAAGATCCATCAAGAGCATCTATTCCATTTGATAAAGATCGCAATGGATTTATCATGGGAGAAGGTTCTGGAATGTTGGTCTTAGAAAGTTTAGGACACGCTGAAAAACGAGGAGCTACTATTCTTGCAGAAGTTGTTGGTTATGGTAACACTTGTGACGCATATCATATGACTTCACCACATCCAGAAGGTTTAGGAGCCACTAAAGCTATTCAACTTGCACTGGCTGAAGCTAATATTAAACCTGAAGAAGTTAACTATGTAAATGCTCATGGAACTTCAACACCTGCTAACGAAAAAGGAGAGAGTCAAGCTGTTGTTGCTGCACTTGGGACAGACGTTCCAGTTTCTTCGACTAAATCTTTTACTGGTCATCTTTTGGGTGCCGCAGGAGCTGTTGAGGCAATTGCAACTATTGAAGCGATACGTCATAGTTATGTTCCAATGACTGCTGGAACAACAGAATTATCAGAAGATATTACAGCGAATGTTATTTTTGGTCAAGGGCAAGACGCTGATATTCGTTATGCCATTTCAAATACATTTGGTTTTGGAGGACACAATGCAGTTCTGGCCTTCAAACGCTGGGAGGAT

SEQ ID NO: 5064 - protein, 410 aa, Streptococcus agalactiae
MTLQRVVVTGYGVTSPIGNTPEEFWNSLKEGNVGIGPITKFDSSDFMVKNAAEIHDFPFDKYFVKKDLNRFDMYSLYALYASSEAIQHANLNLDEIDADRFGVIVASGIGGIQEIEEQVIRLHEKGPKRVKPMTLPKALPNMAAGNVAMRLGAHGVCKSINTACASSNDAIGDAFRNIKFGIQDIMVVGGAEAAITKFAIAGFQSLTALSTTEDPSRASIPFDKDRNGFIMGEGSGMLVLESLGHAEKRGATILAEVVGYGNTCDAYHMTSPHPEGLGATKAIQLALAEANIKPEEVNYVNAHGTSTPANEKGESQAVVAALGTDVPVSSTKSFTGHLLGAAGAVEAIATIEAIRHSYVPMTAGTTELSEDITANVIFGQGQDADIRYAISNTFGFGGHNAVLAFKRWED

SEQ ID NO: 5065 - protein, 534 aa, Streptococcus agalactiae
ATGCAGTTCTGGCCTTCAAACGCTGGGAGGATTAAATTGGATATTCAAGAGATTAAGGATTTAATGACTCAATTTGATGAGTCAAGTCTGAGAGAATTTTCATTCAAAACAAGTGACGGTGAGCTGTCTTTTAGTAAAAATGAGGGAAAAGCTCCACTTGTCCCAACTATGTCTCATATGAGTCATCAACCTGAAGCAACTCCAACTATAGCAACTCCTGTCTCTAATGAAGCAGGTGAGCAAACGAAACAAGCTACTGAAGTAGTTTCAGAAATCCCAGAGTCGACTGTGACTGTTGCAGAAGGTGACGTTGTCGAAAGTCCTTTAGTTGGGGTTGCTTATTTAGCTTCTGGACCAGATAAACCTAACTTTGTTTCAGTAGGTGATAGCGTGAAGAAGGGACAAACTTTGATGATTATTGAGGCGATGAAGGTGATGAATGAAGTGCCTGCTCCTCATGATGGTGTAGTTACTGAAATTCTTGTAGCCAATGAAGAAGTTATTGAATTTGGTAAAGGATTGGTACGAATCAAA

SEQ ID NO: 5066 - protein, 178 aa, Streptococcus agalactiae
MQFWPSNAGRIKLDIQEIKDLMTQFDESSLREFSFKTSDGELSFSKNEGKAPLVPTMSHMSHQPEATPTIATPVSNEAGEQTKQATEVVSEIPESTVTVAEGDVVESPLVGVAYLASGPDKPNFVSVGDSVKKGQTLMIIEAMKVMNEVPAPHDGVVTEILVANEEVIEFGKGLVRIK

SEQ ID NO: 5067 - protein, 420 aa, Streptococcus agalactiae
ATGATTGATATAAAAGAAATTCGTGAGGCTTTACCTCACCGCTATCCAATGTTATTAGTGGATCGTGTTTTAGAGGTATCAGAAGATGAGATAGTCGCTATCAAAAATGTTAGTATCAATGAGCCTTTTTTCAATGGTCATTTTCCAGAATATCCTGTAATGCCAGGCGTTTTAATTATGGAAGCTTTGGCTCAAACTGCAGGTGTTTTAGAATTATCTAAAGAAGAAAACAAAGGAAAGCTTGTTTTTTATGCAGGTATGGATAAAGTGAAATTTAAAAAGCAAGTTGTTCCAGGAGATCAATTAGTTATGACTGCTAAGTTTGTCAAACGTAGAGGAACTATAGCCGTTGTTGAAGCAGTAGCAGAAGTTGATGGGAAATTAGCTGCCAGTGGAACGTTAACATTTGCAATAGGCAAT

SEQ ID NO: 5068 - protein, 140 aa, Streptococcus agalactiae
MIDIKEIREALPHRYPMLLVDRVLEVSEDEIVAIKNVSINEPFFNGHFPEYPVMPGVLIMEALAQTAGVLELSKEENKGKLVFYAGMDKVKFKKQVVPGDQLVMTAKFVKRRGTIAVVEAVAEVDGKLAASGTLTFAIGN

SEQ ID NO: 5069 - protein, 1368 aa, Streptococcus agalactiae
ATGTTTAAGAAAATATTGATTGCTAATCGCGGAGAAATTGCAGTACGTATCATTCGTGCAGCCCGTGAAATGGGAATTTCGACAGTTGCTATCTATTCGGAGGCTGACAAGGAATCATTGCACACAATTTTAGCAGATGAAGCTATTTGTGTTGGACCAGCCAAATCAGCAGAATCTTATTTAAACGTTAATGCTATATTATCTGCTGCTATTGTGACTGGAGCGGAAGCTGTTCATCCAGGTTTTGGGTTTTTAAGTGAAAATTCTAAATTTGCTACTATGTGTGAAGAGATGAATTTAAAATTCATTGGTCCATCTGGAGAAGTTATGGATAAAATGGGTGATAAAATCAATGCTCGTGCAGAGATGATAAAAGCTGATGTTCCGGTTATCCCAGGATCAGATGGTCAAGTTACAAGTGTAGAAGAAGCTGTATCAATTGCTGAGGAAATCGGCTATCCATTGATGTTAAAAGCCTCAGCTGGTGGCGGTGGAAAAGGAATTAGGAAGGTCAAATCAGCAGATGAATTGAAGCCTGCTTTTGAGTCTGCTTCACAGGAGGCTTTGGCTGCGTTCGGTAATGGTGCTATGTATATTGAAAAAGTTATATACCCAGCTAGACATATTGAAGTACAAATACTTGGAGATAGCTTTGGTAAGATAGTTCACCTAGGAGAACGTGATTGTTCTCTGCAGCGTAACAATCAGAAGGTATTGGAAGAAAGTCCGTCTGTGGCAATAGGTAACACTCTGCGTCAACAAATTGGTGAAGCAGCTGTTCGTGCAGCTGAGGCTGTATCCTATGAAAATGCAGGAACAATTGAGTTTTTGTTAGATGAGAATAGCGGACAGTTCTATTTCATGGAAATGAATACTCGTGTTCAAGTAGAACACCCTGTTACAGAATTTGTAACGGGTGTTGACATCGTTAAAGAGCAGATTCGTATCGCTGCTGGAATTCCTTTATCAGTTTCTCAAAATGATATTAAGTTAACTGGTCATGCGATTGAATGTCGTATTAACGCAGAGAATCCACAATTTAATTTTGCGCCATGTCCAGGTACCATTAATGGGTTACATCTACCTGCTGGCGGTATGGGCTTACGTGTCGATTCAGCGGTTTACACAGGCTACACTATTCCTCCTTATTATGATAGTATGATTGCGAAAGTAATTGTTCACGGAGAAAATCGTTTTGATGCACTTATGAAAATGCAACGTGCCTTATATGAGCTTGAAATTGATGGTATTGTAACAAATACAGAATTTCAAATGGATCTCATTTCTGATAAAAAAGTCTTGGCTGGGGATTATGATACTTCATTCCTGATGGAAGACTTTTTACCAAGGTATTATGGTAACAATCAA

SEQ ID NO: 5070 - protein, 456 aa, Streptococcus agalactiae
MFKKILIANRGEIAVRIIRAAREMGISTVAIYSEADKESLHTILADEAICVGPAKSAESYLNVNAILSAAIVTGAEAVHPGFGFLSENSKFATMCEEMNLKFIGPSGEVMDKMGDKINARAEMIKADVPVIPGSDGQVTSVEEAVSIAEEIGYPLMLKASAGGGGKGIRKVKSADELKPAFESASQEALAAFGNGAMYIEKVIYPARHIEVQILGDSFGKIVHLGERDCSLQRNNQKVLEESPSVAIGNTLRQQIGEAAVRAAEAVSYENAGTIEFLLDENSGQFYFMEMNTRVQVEHPVTEFVTGVDIVKEQIRIAAGIPLSVSQNDIKLTGHAIECRINAENPQFNFAPCPGTINGLHLPAGGMGLRVDSAVYTGYTIPPYYDSMIAKVIVHGENRFDALMKMQRALYELEIDGIVTNTEFQMDLISDKKVLAGDYDTSFLMEDFLPRYYGNNQ

SEQ ID NO: 5071 - protein, 873 aa, Streptococcus agalactiae
ATGGCTTTATTTAGTAAAAAGGATAAATATATCCGTATTAGTCCAAACAAAGCATTGGGGTCTTCTGATAAACGTAGTCTTCCTGAGGTTCCTGATGAACTCTTTGCTAAGTGTCCTTCTTGTAAACATATGATTTATCAGAAAGATTTAGGATTAGCAAAGATTTGTCCAGCTTGTTCTTACAACTTTAGAATTTCAGCGCAAGAACGTCTGTTGCTAACAGTTGACGAAGATAGTTTTGAGGAATTATTTACAGGGATTGAAACTAAGGATCCTTTGAATTTTCCAAACTACCGTGAAAAACTGGCTGCTACACGTCAAAAGACTAACTTAGATGAAGCGGTGGTGACAGGTTTAGCTAAAATAAAAGGACAAACTACGGCCTTAGCTATTATGGATTCTCATTTTATAATGGCGTCTATGGGAACGGTCGTAGGCGAAAAGTTGACAAGATTATTTGAGCTAGCAACTGAAAAGAAATTACCTATTGTTATTTTTACAGCGTCAGGAGGCGCCAGAATGCAAGAAGGTATTATGAGTTTGATGCAAATGGCAAAAGTATCGGCAGCAGTTAAACGCCATTCTAACCAGGGATTGTTTTATTTAACAATTTTAACAGACCCAACAACCGGCGGCGTTACTGCGAGTTTTGCTATGGAAGGTGATATTATTCTGGCTGAGCCGCAAGCGTTGGTTGGTTTTGCTGGTCGTCGTGTTATCGAAACAACGGTGAGAGAAGATTTACCTGAAGACTTTCAAAAGGCAGAATTTTTGTTAGAACATGGTTTTGTCGATGCTATTATAAATCGAACAGAATTACGCGACTGCATTGCTCAACTAATTGCTTTCCATGGAAATGAGGTTGGTCATGAA

SEQ ID NO: 5072 - protein, 291 aa, Streptococcus agalactiae
MALFSKKDKYIRISPNKALGSSDKRSLPEVPDELFAKCPSCKHMIYQKDLGLAKICPACSYNFRISAQERLLLTVDEDSFEELFTGIETKDPLNFPNYREKLAATRQKTNLDEAVVTGLAKIKGQTTALAIMDSHFIMASMGTVVGEKLTRLFELATEKKLPIVIFTASGGARMQEGIMSLMQMAKVSAAVKRHSNQGLFYLTILTDPTTGGVTASFAMEGDIILAEPQALVGFAGRRVIETTVREDLPEDFQKAEFLLEHGFVDAIINRTELRDCIAQLIAFHGNEVGHE

SEQ ID NO: 5073 - protein, 771 aa, Streptococcus agalactiae
ATGAATAATGATGTGACAAGAATTTTAAAAGATGCGCGTGATCAAGGGAGGCTAACTGCTCTTGACTACGCTGAATTGATTTTTGATAATTTTATGGAACTTCATGGTGATCGCCAGTTTGCAGATGACAAATCAATTATAGGAGGTTTGGGGTACTTGGCAGGGCGTCCTGTGACGATTGTCGGTATTCAAAAAGGTAAGAACCTTCAAGATAATTTAGACCGTCATTTTGGTCAACCACATCCTGAAGGTTATCGTAAGGCTTTACGTTTAATGAAACAAGCTGAGAAGTTTGGAAGACCTGTTATAACCTTCATCAATACTGCTGGAGCATATCCTGGGGTAGGTGCTGAGGAGCGAGGTCAGGGTGAAGCAATTGCTAGAAACCTCTTAGAAATGAGTGATTTAAAAGTCCCTATTATAGCTATTATTATTGGTGAAGGGGGTTCTGGAGGAGCATTAGCTTTAGCTGTTGCCGATAAGGTTTGGATGTTGGAACATACTGTTTATTCTATTTTAAGTCCTGAGGGCTTTGCTTCTATTTTATGGAAAGATGGCACAAGAACAACAGAAGCAGCACAATTAATGAAGATGACTGCTGGAGAACTTTACCATATGGAAGTTGTAGACAAAGTAATCCCTGAACATGGTTATTTTTCAAGTGAGATTGTCGATATGATTAAGACAAGTTTAATTTCAGAGTTAGAAATGCTCTCACAATTATCTCTTGAGGATTTATTGGAACAACGTTACCAACGTTTTAGAAAATAT

SEQ ID NO: 5074 - protein, 257 aa, Streptococcus agalactiae
MNNDVTRILKDARDQGRLTALDYAELIFDNFMELHGDRQFADDKSIIGGLGYLAGRPVTIVGIQKGKNLQDNLDRHFGQPHPEGYRKALRLMKQAEKFGRPVITFINTAGAYPGVGAEERGQGEAIARNLLEMSDLKVPIIAIIIGEGGSGGALALAVADKVWMLEHTVYSILSPEGFASILWKDGTRTTEAAQLMKMTAGELYHMEVVDKVIPEHGYFSSEIVDMIKTSLISELEMLSQLSLEDLLEQRYQRFRKY

SEQ ID NO: 5075 - protein, 462 aa, Streptococcus agalactiae
ATGTATCAAGAATTAAATGATTATTTAGAATTCCAATCAATGAAGTATATTATGCCTGAGAAGGCAGGCCCTTTAAAGGACGATATGCAAACTTTTAAGGCAAAGGGCCAACTTGCTAGGAATAGTTTTACAGAGTTATCAAGAGCCTTAGAACAACGTATGGATGGCTTTAAAATGCAAAGAGTGAGTAATTGGGCTAATCAAGCTCAAGTAGGGCGTCCACATTTTTGGGTTTATTATCGAAAGGATACAGACCAATTAGATGATGTGGCTGTTGCGCTAAGGGTTTATGGTGTAAAAGATAGTTTTGGGGTTAGTCTTGAGGTAAGCTTTGTAGAGAGGCAAAAATCTGATAAGACACTCGAGAAGCAGGCTAGAGTGTTATCGATTCCGATTGCCTCTCATTGTATTTTATGGTCCAAAGGCAAGTGAAACTCATCGAGAAGAGGCATNNNNNTTAAT

SEQ ID NO: 5076 - protein, 155 aa, Streptococcus agalactiae
  VARIANT 152, 153, 154: Xaa = Any Amino Acid
MYQELNDYLEFQSMKYIMPEKAGPLKDDMQTFKAKGQLARNSFTELSRALEQRMDGFKMQRVSNWANQAQVGRPHFWVYYRKDTDQLDDVAVALRVYGVKDSFGVSLEVSFVERQKSDKTLEKQARVLSIPIASPLYFMVQRQGETHREEGXXXN

SEQ ID NO: 5077 - protein, 270 aa, Streptococcus agalactiae
ATGTGGGATGTCCTGACTGGTAAGGAGTCAGTAAGGACTTTAAAAAAACAATTGGATAAAGAACTGATACATAGCGTGTACGCGCCACGCAAGAGATCTAAGTTTCACGATATTATTACGTCGCATCATAAAGAAATAGACGAAGTAGCCATCAACACAAAGACAGCTATTCATAAAGTTGCTAATCAATTGGACGAGGCAATAAAAGGAGAATTTCGTTCAAAGGTTGAGGAGTCTATGAAAGCAATCAGCCTTCNNNNNTTAATTAAT

SEQ ID NO: 5078 - protein, 90 aa, Streptococcus agalactiae
  VARIANT 86, 87: Xaa = Any Amino Acid
MWDVLTGKESVRTLKKQLDKELIHSVYAPRKRSKFHDIITSHHKEIDEVAINTKTAIHKVANQLDEAIKGEFRSKVEESMKAISLXXLIN

SEQ ID NO: 5079 - protein, 468 aa, Streptococcus agalactiae
ATGAAAGCTGCTGTTGAGAGCGATGATATTAGCTCATTAACTAAAATTGCTGAGTTAGTTAATCAGATATCGTATGATTTACTACAGCTAGAGAAACCTGTTGTTATGTGTGTAGATGGGGCTGTAGCTGGTGCCGCAGCTAATATTGCATTAGCAGCTGATTTTGTTATCGCAAGCAAGAAGAGTAAATTTATCCAGGCTTTTGTGGGTGTCGGTTTAGCTCCAGATGCAGGAGGTTTATTGTTACTTAGTAAATCAATCGGTATAACTCGTGCAGTGCAACTAGCTTTAACTGGAGAAAGCTTATCTGCTGAAAAAGCTGAAGCTTTGGGAATTGTTTATAAACTTTGTGAATCAGATAAAATAGGTAAAATTAAGGATCAACTATTAAAGCGTTTAAGTAGACATTCTATAAACTCATATCAAGCCATAAAATCATTAGCTTGGGAAGCTGCTTTNNNNNTTAAT

SEQ ID NO: 5080 - protein, 156 aa, Streptococcus agalactiae
  VARIANT 153, 154, 155: Xaa = Any Amino Acid
MKAAVESDDISSLTKIAELVNQISYDLLQLEKPVVMCVDGAVAGAAANIALAADFVIASKKSKFIQAFVGVGLAPDAGGLLLLSKSIGITRAVQLALTGESLSAEKAEALGIVYKLCESDKIGKIKDQLLKRLSRHSINSYQAIKSLAWEAAXXXN

SEQ ID NO: 5081 - protein, 141 aa, Streptococcus agalactiae
ATGAAAAAAATGGGAATGACACAGGTTGTTGAAATTGGTCCAGGGAAGGTACTCTCAGGTTTCTTGAAAAAAATAGATAGCTCATTATCAGTATATTCTGTTGAAGATAAAATTGGATTTAATAATCTTAAGGAATTAAAC

SEQ ID NO: 5082 - protein, 47 aa, Streptococcus agalactiae
MKKMGMTQVVEIGPGKVLSGFLKKIDSSLSVYSVEDKIGFNNLKELN

SEQ ID NO: 5083 - protein, 402 aa, Streptococcus agalactiae
ATGCAATTAAAAGATAAGAACATTTTTATTACGGGTTCAAGTAGAGGAATCGGCCTTGCAATTGCCCATCAATTTGCACAATTAGGTGCTAATATTGTTTTAAATGGACGTTCTGAAATATCAGAAGACTTAATAGCTGAATTTGCTGATTATGGTGTAAAAGTTATTGCTATTTCAGGAGATGTTTCTTCTTTTGAAGATGCTAATCGCATGATTAAAGAAGCTATTGCAAGTCTAGGTAGCGTGGATGTGCTCGTTAACAACGCTGGTATTACTAATGATAAATTGATGCTTAAAATGACTGTTGAAGATTTTGAGAGCGTTCTTAAAATTAATTTAACAGGTGCATTTAAGACTCTATTATTTTTTACATCAATTTCAGATACTCTCAGAAGAGATTTA

SEQ ID NO: 5084 - protein, 134 aa, Streptococcus agalactiae
MQLKDKNIFITGSSRGIGLAIAHQFAQLGANIVLNGRSEISEDLIAEFADYGVKVIAISGDVSSFEDANRMIKEAIASLGSVDVLVNNAGITNDKLMLKMTVEDFESVLKINLTGAFKTLLFFTSISDTLRRDL

SEQ ID NO: 5085 - protein, 342 aa, Streptococcus agalactiae
ATGATTAGTTTACTCTCAGAATTCGATAGCACATTAGTAGGTGTCGCTGTATTTGCAGAAAATGCTCAGGAACAACGTGAGAAGATGGCCTATAAATCTCTTCTGAGAGTATCTGAAATTGATGTAAAAAATAATAGAGTCTTAAATGCACCTGTTAAATTAATTTTAAGAACGCTCTCAAAATCTTCAACAGTCATTTTAAGCATCAATTTATCATTAGTAATACCAGCGTTGTTAACGAGCACATCCACGCTACCTAGACTTGCAATAGCTTCTTTAATCATGCGATTAGCATCTTCAAAAGAAGAAACATCTCCTGAAATAGCAATAACTTTTACACCA

SEQ ID NO: 5086 - protein, 114 aa, Streptococcus agalactiae
MISLLSEFDSTLVGVAVFAENAQEQREKMAYKSLLRVSEIDVKNNRVLNAPVKLILRTLSKSSTVILSINLSLVIPALLTSTSTLPRLAIASLIMRLASSKEETSPEIAITFTP

SEQ ID NO: 5087 - protein, 234 aa, Streptococcus agalactiae
ATGTGTTACAATAACAGTATGAATGAAAGATATCTGGCTGAGCCGCAAGCGTTGGTTGGTTTTGCTGGTCGTCGTGTTATCGAAACAACGGTGAGAGAAGATTTACCTGAAGACTTTCAAAAGGCAGAATTTTTGTTAGAACATGGTTTTGTCGATGCTATTATAAATCGAACAGAATTACGCGACTGCATTGCTCAACTAATTGCTTTCCATGGAAATGAGGTTGGTCATGAA

SEQ ID NO: 5088 - protein, 78 aa, Streptococcus agalactiae
MCYNNSMNERYLAEPQALVGFAGRRVIETTVREDLPEDFQKAEFLLEHGFVDAIINRTELRDCIAQLIAFHGNEVGHE

SEQ ID NO: 5089 - protein, 438 aa, Streptococcus agalactiae
ATGAATAATGATGTGACAAGAATTTTAAAAGATGCGCGTGATCAAGGGAGGCTAACTGCTCTTGACTACGCTGAATTGATTTTTGATAATTTTATGGAACTTCATGGTGATCGCCAGTTTGCAGATGACAAATCAATTATAGGAGGTTTGGGGTACTTGGCAGGGCGTCCTGTGACGATTGTCGGTATTCAAAAAGGTAAGAACCTTCAAGATAATTTAGACCGTCATTTTGGTCAACCACATCCTGAAGGTTATCGTAAGGCTTTACGTTTAATGAAACAAGCTGAGAAGTTTGGAAGACCTGTTATAACCTTCATCAATACTGCTGGAGCATATCCTGGGGTAAGTGCTGAGGAGCGAGGTCAGGGTGAAGCAATTGCTAGAAACCTCTTAGAAATGAGTGATTTAAAAGTCCCTATTATAGCTATTATTATTGGG

SEQ ID NO: 5090 - protein, 146 aa, Streptococcus agalactiae
MNNDVTRILKDARDQGRLTALDYAELIFDNFMELHGDRQFADDKSIIGGLGYLAGRPVTIVGIQKGKNLQDNLDRHFGQPHPEGYRKALRLMKQAEKFGRPVITFINTAGAYPGVSAEERGQGEAIARNLLEMSDLKVPIIAIIIG

SEQ ID NO: 5091 - protein, 141 aa, Streptococcus agalactiae
TTGGGTGAAGGGGGTTCTGGAGGAGCATTAGCTTTAGCTGTTGCCGATAAAGGTTGGATGTTGGAACATACTGGTTATTCTATTTTAAGTCCTGAGGGCTTTGCTTCTATTTTATGGAAAGATGGCANNNNNTTAATTAAT

SEQ ID NO: 5092 - protein, 47 aa, Streptococcus agalactiae
  VARIANT 43, 44: Xaa = Any Amino Acid
MGEGGSGGALALAVADKGWMLEHTGYSILSPEGFASILWKDGXXLIN

SEQ ID NO: 5093 - protein, 630 aa, Streptococcus agalactiae
ATGTATCAAGAATTAAATGATTATTTAGAATTCCAATCAATGAAGTATATTATGCCTGAGAAGGCAGGCCCTTTAAAGGACGATATGCAAACTTTTAAGGCAAAGGGCCAACTTGCTAGGAATAGTTTTACAGAGTTATCAAGAGCCTTAGAACAACGTATGGATGGCTTTAAAATGCAAAGAGTGAGTAATTGGGCTAATCAAGCTCAAGTAGGGCGTCCACATTTTTGGGTTTATTATCGAAAGGATACAGACCAATTAGATGATGTGGCTGTTGCGCTAAGGGTTTATGGTGTAAAAGATAGTTTTGGGGTTAGTCTTGAGGTAAGCTTTGTAGAGAGGCAAAAATCTGATAAGACACTCGAGAAGCAGGCTAGAGTGTTATCGATTCCGATTGCCTCTCCATTGTATTTTATGGTCCAAAGGCAAGGTGAAACTCATCGAGAAGAAGGCAATGAGGAAAATCGTCAACGTTTAATGCAAGAAATTAAGTCAGGGAAGGTAAGGAAAGTATTGGTAAAATATGACGTTCTTTTGACTGAAAACCAGAGCTTAGAAAATATTCTGCAACGATTGTTAGAAGGCTTTGAGAAAGTGTTACCTTACTATCAAGTTTGTCAAACTATTAGC

SEQ ID NO: 5094 - protein, 210 aa, Streptococcus agalactiae; identical to SEQ ID NO: 720

SEQ ID NO: 5095 - protein, 1275 aa, Streptococcus agalactiae
ATGTTAGACTTAAAACGTATTCGTACAGATTTTGATGCTGTCGCTAAAAAATTGGCCATGCGTGGTGTTGACCAAGAAACATTAACAACCCTTAAAGAACTTGATATAAAACGCCGTGAACTACTTATCAAAGCTGAAGAGGCGAAAGCGCAACGTAATGTTGCTTCTGCTGCCATTGCTCAAGCAAAACGAAATAAAGAGAATGCAGACGAGCAAATCGCAGCTATGCAAACACTTTCCGCTGATATCAAAGCAATTGATGCGGAATTGGCAGATGTGGATGCTAATTTACAATCAATGGTGACCGTACTTCCTAATACACCAGCTGATGATGTGCCGCTTGGAGCAGACGAGGATGAAAATGTTGAAGTTCGTCGCTGGGGAACTCCTCGTGAATTTGATTTTGAGACCAAAGCTCACTGGGATTTAGGTGAAAGCCTTGGAATTCTCGATTGGGAACGTGGTGCAAAAGTTACTGGTTCTCGCTTCCTCTTCTACAAAGGTCTAGGTGCTCGTTTAGAGCGTGCTATCTACAGCTTCATGCTGGATGAACACGCTAAGGAAGGGTACACTGAAGTGATCCCTCCTTATATGGTTAACCACGATTCAATGTTCGGTACGGGACAATATCCAAAGTTCAAGGAAGATACTTTCGAATTAGCAGATAGCCCATTCGTACTTATCCCAACTGCTGAAGTTCCTTTAACAAACTATTATCGTGATGAAATTATCGATGGGAAAGAATTACCTATATACTTTACTGCCATGAGTCCATCATTCCGTTCAGAAGCAGGCTCTGCAGGACGTGACACACGTGGATTAATTCGCCTTCATCAATTCCATAAAGTAGAAATGGTGAAATTTGCCAAACCTGAGGAATCGTACCAAGAATTAGAAAAAATGACAGCAAATGCTGAAAATATTCTTCAAAAACTTAATCTCCCATACCGTGTCATTACCTTGTGTACAGGAGATATGGGATTCTCAGCAGCTAAAACGTATGACTTAGAGGTATGGATTCCCGCTCAAAATACTTATCGAGAAATTTCTTCATGTTCTAATACTGAAGATTTCCAAGCACGTCGTGCTCAAATTCGTTACCGTGACGAAGTTGATGGCAAAGTTAGGTTGCTTCATACTTTAAATGGTTCAGGACTTGCAGTTGGACGTACTGTAGCAGCAATCCTCGAAAATTATCAAAATGAAGATGGTTCTGTGACTATCCCAGAAGTTCTTCGTCCATATATGGGTAATATCGATATTATTAAACCAAAT

SEQ ID NO: 5096 - protein, 425 aa, Streptococcus agalactiae
MLDLKRIRTDFDAVAKKLAMRGVDQETLTTLKELDIKRRELLIKAEEAKAQRNVASAAIAQAKRNKENADEQIAAMQTLSADIKAIDAELADVDANLQSMVTVLPNTPADDVPLGADEDENVEVRRWGTPREFDFETKAHWDLGESLGILDWERGAKVTGSRFLFYKGLGARLERAIYSFMLDEHAKEGYTEVIPPYMVNHDSMFGTGQYPKFKEDTFELADSPFVLIPTAEVPLTNYYRDEIIDGKELPIYFTAMSPSFRSEAGSAGRDTRGLIRLHQFHKVEMVKFAKPEESYQELEKMTANAENILQKLNLPYRVITLCTGDMGFSAAKTYDLEVWIPAQNTYREISSCSNTEDFQARRAQIRYRDEVDGKVRLLHTLNGSGLAVGRTVAAILENYQNEDGSVTIPEVLRPYMGNIDIIKPN

SEQ ID NO: 5097 - protein, 990 aa, Streptococcus agalactiae
ATGTTCATGATTGTTATTACGCATATTCTTGGAAAAGGTGGTCTGAGATCTTCGGTTGAGGGACACGCAGACTCCTATTTTATAGTAACGTGGATTATCCAAGTCTTAGTTTATGGGGCCGTTAACTGTTACGCACTAATAAGTGGTTATGTGGGAATTAATTCGCGTTATCGTTACTCAAAATTACTGTCTATCTGGGCACAGGTTTTTTTCTACACCTTTACAATAACGGCACTTTTTGAAATCACAGGTCATGAAGTGACCTTGCTTAATTGGAGAGATGCTTTTTTCCCTATTGTCAGTGGGCAGTATTGGTATATTACTGCTTACTTTGGTCTATTGGTTTTTATGCCTGTTATTAATAATGGATTAAATGCCTTGACTGATAAACAATTAAAACAATTGGTTTTGTTAATGTTTATTATTTTTTCAATTTTACCAGCTGTTTTAAACAATCGTGTTCCAGAATTTTCATTGAGCAAGGGTTTTGAAATGACTTGGCTACTGATTTTATATATTATTGGTGCCTATTTGAAACGTATTGATTTAAATATATTTAAAACGTCATACTTACTTATAGTTTATCTATTATCATTGGTTGCTACTTATGTCATGAAGTTTAGTGTTGGTGATATTTGGTATTGGTATGTTTCGCCTACTTTAACTTTAGGGGCGGTAAGTTTGTTTATATTATTTGCTAGAGCAAGCATTAAGCCCTCGGGATTCTTAAAGAAAATAATTGTTGTATTAGCCCCTTCAACCTTGGGAGTTTATCTCTGTCATCTCCACCCACTAATAGTAAAATATTTTGTAAGAGATTTTGCAGAGACGTTTGTTTATGAGTCCATTTATCTTTACCCATTTTTAATTTTAGGAGCAGGGATTTTAATTTATTTGTTGGCTTTTATTGTAGAACGTATTAGATTACGAATATTTAAAGCAATCCATTTTTCTAACTTTTTGAGATGGTTTGATGACAAGTTCCCATAT

SEQ ID NO: 5098 - protein, 330 aa, Streptococcus agalactiae
MFMIVITHILGKGGLRSSVEGHADSYFIVTWIIQVLVYGAVNCYALISGYVGINSRYRYSKLLSIWAQVFFYTFTITALFEITGHEVTLLNWRDAFFPIVSGQYWYITAYFGLLVFMPVINNGLNALTDKQLKQLVLLMFIIFSILPAVLNNRVPEFSLSKGFEMTWLLILYIIGAYLKRIDLNIFKTSYLLIVYLLSLVATYVMKFSVGDIWYWYVSPTLTLGAVSLFILFARASIKPSGFLKKIIVVLAPSTLGVYLCHLHPLIVKYFVRDFAETFVYESIYLYPFLILGAGILIYLLAFIVERIRLRIFKAIHFSNFLRWFDDKFPY

SEQ ID NO: 5099 - protein, 300 aa, Streptococcus agalactiae
ATGGGGAATAAAGTTGGAAAATTTTTAGTTGGTGACCAGGCATTAGAATTCTATAACGATAAAAATGTCAACGACTATATTCAAATTCCATGGACATCAATCAATCAAATTGGAGCTAATGTTAGTCGAAAAAAAATTAGTCGTCACTTTGAGGTCTTTACAGACCAAGGAAAATTTTTATTCGCTTCTAAAGACTCTGGAACGATATTAAAGCATGCGAGACGACATATTGGAGACGATAAAGTTGTTAAGCTTCCTACCCTCATCCAGACCATTTTAAAAATATTCAAGTTTAAAAAA

SEQ ID NO: 5100 - protein, 100 aa, Streptococcus agalactiae; identical to SEQ ID NO: 738

SEQ ID NO: 5101 - protein, 270 aa, Streptococcus agalactiae
TTGTCAGAAGGGGCATACATCAATTTCCCTAAAGACCATGTTAGTGGACAACAATTGCATGATATCCTAGGACAAGTTCAGAGTGGCTTAAGCCTTGATAAAATGCAACCACAAACACTTCAAGGACAACTTGACTCACTTATTCCTGGTTTAGCTGGATTACTTCTTACATTCTTCTGTATGTGGTTACTTAAGAAGAAAGTATCACCAATTACAATTATCATCGGTTTGTTTATCGTTGGTATTCTAGCTCGCCTTGCAGGTGTGATG

SEQ ID NO: 5102 - protein, 90 aa, Streptococcus agalactiae
MSEGAYINFPKDHVSGQQLHDILGQVQSGLSLDKMQPQTLQGQLDSLIPGLAGLLLTFFCMWLLKKKVSPITIIIGLFIVGILARLAGVM

SEQ ID NO: 5103 - protein, 147 aa, Streptococcus agalactiae
ATGACAGGGCATTGGGAGATCATGGGCTTAAATATTACAGAGCCATTTGATACTTTCTGGAATGGTTTTCCAGAAGATATTATCACAAAGATTCTTTATCGTCTCCAATATGTCGTCTCGCATGCTTTAATATCGTTCCAGAGTCTT

SEQ ID NO: 5104 - protein, 49 aa, Streptococcus agalactiae
MTGHWEIMGLNITEPFDTFWNGFPEDIITKILYRLQYVVSHALISFQSL

SEQ ID NO: 5105 - protein, 252 aa, Streptococcus agalactiae
ATGGGGAATAAAGTTGGAAAATTTTTAGTTGGTGACCAGGCATTAGAATTCTATAACGATAAAAATGTCAACGACTATATTCAAATTCCATGGACATCAATCAATCAAATTGGAGCTAATGTTAGTCGAAAAAAAATTAGTCGTCACTTTGAGGTCTTTACAGACCAAGGAAAATTTTTATTCGCTTCTAAAGACTCTGGAACGATATTAAAGCATGCGAGACGACATATTGGAGACGATAAAGAATCTTTG

SEQ ID NO: 5106 - protein, 84 aa, Streptococcus agalactiae
MGNKVGKFLVGDQALEFYNDKNVNDYIQIPWTSINQIGANVSRKKISRHFEVFTDQGKFLFASKDSGTILKHARRHIGDDKESL

SEQ ID NO: 5107 - protein, 90 aa, Streptococcus agalactiae
ATGTGGTTACTTAAGAAGAAAGTATCACCAATTACAATTATCATCGGTTTGTTTATCGTTGGTATTCTAGCTCGCCTTGCAGGTGTGATG

SEQ ID NO: 5108 - protein, 30 aa, Streptococcus agalactiae
MWLLKKKVSPITIIIGLFIVGILARLAGVM

SEQ ID NO: 5109 - protein, 668 aa, Streptococcus agalactiae
ATGACTGAACAAATTAATTATCAAAATCAGATCGTCAAAAAGTTTGGTGGCGTTCACAATTCCTTCAAGGTTCTTGGAACTATGAGCGTATGCAAAATATGGGGTGGGCCTATGCTCTTATCCCAGCATTGAAAAAACTTTACACTACTAAAGAAGATCGTGCTGCTGCGCTTGAGCGCCATATGGAATTCTTTAACACACATCCATACGTTGCTGCTCCAATTATTGGTGTAACCCTTGCTCTTGAGGAAGAAAAAGCAAGCGGTACACCTGTCGAAGACAAAGCAATTCAAGGGGTTAAAATCGGTATGATGGGACCTCTTGCTGGTATTGGTGATCCAGTGTTCTGGTTTACTGTACGTCCTATCTTAGGTGCTCTTGGTGCTTCACTTGCCTCTGCTGGTAATATCCTCGGACCAATCATCTTCTTTGTTGGTTGGAACCTCATTCGTATGTCATTCTTATGGTACACACAAGAGTTAGGTTACAAATCAGGTAAAGAAATTACTAAAGATATGTCTGGCGGTATCCTCCAAGATATTACTAAAGGTGCTTCAATCCTTGGTATGTTCATCCTCGCTGTCCTTGTTAAGCGTTGGGTAGCAATTAACTTTACTGTAGACCTTCCTAAAAAGACATTGTCAGAAGGGGCATACATCAATTTTCCC

SEQ ID NO: 5110 - protein, 223 aa, Streptococcus agalactiae
MTEQIKLSKSDRQKVWWRSQFLQGSWNYERMQNMGWAYALIPALKKLYTTKEDRAAALERHMEFFNTHPYVAAPIIGVTLALEEEKASGTPVEDKAIQGVKIGMMGPLAGIGDPVFWFTVRPILGALGASLASAGNILGPIIFFVGWNLIRMSFLWYTQELGYKSGKEITKDMSGGILQDITKGASILGMFILAVLVKRWVAINFTVDLPKKTLSEGAYINFP

SEQ ID NO: 5111 - DNA, 786 bp, Streptococcus agalactiae
atgattttggtcgttatcgttgccttctttgctggtcttgaaggtatcctcgaccaattccaaatccatcaacctcttgttgcttgtactttaatcggtcttgtaactggtcacctcgaagcgggtattattcttggtggtagtctccaaatggttgctcttgcttgggcaaatatcggagctgccgtagcaccagacgctgcacttgcctctgttgctgctgctattattttggttaaaagtggcgacttcactcaaaaaggtatcaactttgccttctctactgctgtacctctagctattgctggacttttccttacaatgattgttcgtacaatctcaactgcacttgttcacgctggtgacaaagctgcttctgaaggaaacttcgcagcaattgaacgttttcactttattgccctccttctccaaggattacgtattgcattcccagctgcgcttcttttagctattccatcttcttcagtacaaagtattcttgaagcaatgcctgattggttaaatggtggtatgcaagttggtggtgccatggttgttgccgttggttacgctatggttatcaatatgatggctactcgcgaagtttggcctttctttgctcttggatttgctctagcagctttgaaccagttaactcttattgcaatgggtactattggtgttgctatcgccctcatctacatcagtttatcaaaaatgggtggaagcaaaggtacttctaacgcaggttctaacgatcctatcggcgatatcttagaggactac

SEQ ID NO: 5112 - protein, 262 aa, Streptococcus agalactiae
MILVVIVAFFAGLEGILDQFQIHQPLVACTLIGLVTGHLEAGIILGGSLQMVALAWANIGAAVAPDAALASVAAAIILVKSGDFTQKGINFAFSTAVPLAIAGLFLTMIVRTISTALVHAGDKAASEGNFAAIERFHFIALLLQGLRIAFPAALLLAIPSSSVQSILEAMPDWLNGGMQVGGAMVVAVGYAMVINMMATREVWPFFALGFALAALNQLTLIAMGTIGVAIALIYISLSKMGGSKGTSNAGSNDPIGDILEDY

SEQ ID NO: 5113 - DNA, 855 bp, Streptococcus agalactiae
  misc_feature 850, 851, 852, 853, 854: n = A,T,C or G
atgggtatcggtattattattgccagccatggtaaatttgctgaaggtattcatcaatcaggttcaatgatctttggtgaacaagaaaaagttcaagttgtaactttcatgccaaatgaaggaccagatgatttgtatggacacttcaacaatgctatcgcacaatttgatgctgatgatgaggtgcttgtgttagctgacctttggagtgggtcaccatttaaccaagcaagccgtgttatgggagaaaatcctgaacgtaaaatggctatcatcactggtctcaatttgccaatgcttatccaagcctatactgagcgtatgatggacgctaatgcaggtgttgaacaagttgccgcaaatattattaaagagtctaaggaaggtatcaaagcccttccagaagaacttaatcctgttgtagaagctactcctgtagcaggtgttcctgcagatgttcctgcggaagttaaacaaagtggatctatccctgaaggaactgttattggagatggcaagcttaaaattaatcttgctcgtattgacacacgtcttttacatggtcaagttgcaactgcatggactccagcatcaaaagcaaaccgtattatcgttgcttctgatgaagtttctaaagatgaacttcgtaaacaattgattaagcaagctgctcctggaggagtcaaagcaaacgttgtcccaattagtaaattaattgaagtagctaaagacccacgtttcggaaacacacgtgccttgatcttatttgaaactgtacaagatgcactccgtgcagttgaaggtggtgtggaaatccctgaattgaacgttggttcaatggctcactcannnnnt

SEQ ID NO: 5114 - protein, 285 aa, Streptococcus agalactiae
  VARIANT 284, 285: Xaa = Any Amino Acid
MGIGIIIASHGKFAEGIHQSGSMIFGEQEKVQVVTFMPNEGPDDLYGHFNNAIAQFDADDEVLVLADLWSGSPFNQASRVMGENPERKMAIITGLNLPMLIQAYTERMMDANAGVEQVAANIIKESKEGIKALPEELNPVVEATPVAGVPADVPAEVKQSGSIPEGTVIGDGKLKINLARIDTRLLHGQVATAWTPASKANRIIVASDEVSKDELRKQLIKQAAPGGVKANVVPISKLIEVAKDPRFGNTRALILFETVQDALRAVEGGVEIPELNVGSMAHSXX

SEQ ID NO: 5115 - DNA, 810 bp, Streptococcus agalactiae
atgacaaagaaaattatcgccgtagatttagacggtactctattacataataataacactatttctgactacaccgctgatacacttcgaaaagttcaagctcaaggacacaaagtaattattacaaccggacgcccataccgtatggcactcgctcattatttacgcctagatttaaaaacaccaatgataaattttaacggtgctttaactcatatccccgaaaaaaagtgggcgtttgagcatagtgcaacgattgataaaaaattactccttgaaaccttaaatttatcagatgctatccaagccgattttattgctagcgagtaccgtaaaaatttttacattactatggataatcgtgataaaattaacccacaattattcggtgtcaatgaaattactgataaaatggcattagatgttactaaaatcacacgcaatccaaatgctctattgatgcaaacacgtcataaagataagtatgagttagctaaagagttacgacaacattttaatcacgaactagaagtagattcttggggtggtccattgaatatactcgaattttcacctaaaggtgttaacaaagcttatgctctcaaacatttattaaaatcactcaatctttcacaagaaaatttgattgcctttggagatgaacacaatgacaccgagatgctggcctttgcacatacaggatatgctatgaaaaatgctagtccaactctacttccatatgccgaccaacaaatccaatggacaaacgaagaagatggtgttgctaaaactctagaaaaattattattg

SEQ ID NO: 5116 - protein, 270 aa, Streptococcus agalactiae
MTKKIIAVDLDGTLLHNNNTISDYTADTLRKVQAQGHKVIITTGRPYRMALAHYLRLDLKTPMINFNGALTHIPEKKWAFEHSATIDKKLLLETLNLSDAIQADFIASEYRKNFYITMDNRDKINPQLFGVNEITDKMALDVTKITRNPNALLMQTRHKDKYELAKELRQHFNHELEVDSWGGPLNILEFSPKGVNKAYALKHLLKSLNLSQENLIAFGDEHNDTEMLAFAHTGYAMKNASPTLLPYADQQIQWTNEEDGVAKTLEKLLL

SEQ ID NO: 5117 - DNA, 582 bp, Streptococcus agalactiae
atgaaaaagttaatttggagtcatctttttgccatagtcagtattttagggatatggtattatcatgtaaaaattgatcatttgatggtaattctattggcatcagtcttgtcgttagagatgggattcattgcttattatagtcgtaatatttttattcgtcttttagcaagtttaggccttttatttttttacccacagagtttagggatttttcttagtttagtgagcttagagtggtcaacaaaagacatttggcagtctaatcactttatgcaatatatggcataccttcttgcaattctttttattatctcttcagctttactaagtttgaagctattggtaaatgcatatgatattagtaaaaggtatcaattagcaactgttatacctgtaatgctttttagtagttttgccttttgcttagaaaaatcaggatcattaggtttagaaggaatcattttaaatccgtcagcattttttaatggaatacagactaatatggctaaccttgattttaaagccttgtcttgcctttttttagtacaattattactttggggaatattaatggaagac

SEQ ID NO: 5118 - protein, 194 aa, Streptococcus agalactiae; identical to SEQ ID NO: 746

SEQ ID NO: 5119 - DNA, 609 bp, Streptococcus agalactiae
atgaaagtaaaactatttgcgatacatttattttttattgttatttcttttgggattaaatattatcatttgcagggaccaaatttgatttggaatatgactctagccctaatagcgttagattttgcataccttactagtttatttaagaaaaaaattcttatcggtctttttgcacttgcttggttttttttctatcctaataccttttatatgttgacggatatcattcatatgcattttgtcggagacgttctttataataagacaaatttaatactttatatcttgtatgtatctagtatcttgtttggttttttatcaggtatcgaaagtttttctgtgattatgcgtaaatttagaattagcaatatatttttaagatggggaattattggaattgtatcatttgtttcaagttttggtattcatattggtcgttatgcccgtctaaattcatgggatatcttaacgaagccacaagtggtaattaacgaacttttagcggttccgagtagggattcattccactttattttaggatttacatttttacaggtattgtgtcttatttttatggattattctgcagggaaaaagcttgaaaag

SEQ ID NO: 5120 - protein, 203 aa, Streptococcus agalactiae; identical to SEQ ID NO: 748

SEQ ID NO: 5121 - protein, 1419 aa, Streptococcus agalactiae
ATGGAAAAGTTTTTTAAGCTAAAGGAACACGGGACGACAATTCGGACTGAAATCACTGCTGGTCTAACGACTTTCTTTGCAATGTCGTACATTTTGTTTGTAAATCCAGCTATTTTATCTCAGACTGGGATGCCAGCACAAGGAGTTTTCTTAGCGACGATTATTGGTGCCGTTGTAGCTACATCTGTTATGGCTTTCTATGCTAACCTTCCCTATGCACAAGCTCCTGGGATGGGATTAAATGCTTTCTTTACATATACAGTTGTCTTTGCATTGGGATATACATGGCAAGAAGCCTTAGCTATGGTATTTATTTGTGGTTTGATTTCTCTGATTATTACTTTAACGAAAGTTAGAAAGATGATTATTGAGTCTATCCCAACAACTTTAAAATCAGCCATTACAGCAGGAATCGGAACTTTTTTAGCATACGTTGGGATTAAAAATGCTGGTTTTTTGAAATTTTCAATTGATCCTGGGACGTATGATGTTGTTGGAAAGGGTGCTGCGAAAGGATTGGCTACTATTACAGCAAATTCTTCAGCAACGCCAGGGCTAGTGTCGTTTGATAATCCAGCAATTTTATTATCTTTGATTGGTTTAAGCATTACCATCTTCTTTATTGTAAAGGGTATCCGTGGAGGGATTATTCTATCGATATTAACAACGACCCTCTTAGGTATTTTAATGGGAGTGGTTAAGTTAGATGCTATTAATTGGGAAGCAACTAACCTCTCGGCCTCTTTTAGAGATTTGAAGCAAGTATTTGGAGTTGCATTAGGAGAGAAAGGATTAATTTCTTTATTTTCTAATCCTTCACGTCTACCAAGTGTATTAATGGCCATTCTTGCTTTTTCACTGACTGATATTTTTGATACCATTGGAACGCTCATTGGTACCGGAGAAAAAGTTGGTATCTTAGCAACGACTGGTGATAATCATGAATCTAAGAGTTTAGACAAAGCACTCTATTCAGACTTAATTGGGACAACTTTTGGTGCTATTTGTGGAACATCTAACGTTACAACCTATGTTGAGTCAGCAGCAGGAATCGGAGCTGGTGGTCGTACAGGATTGACAGCCTTAGTAGTTGCTGGTTTGTTTGCTATATCTAGTTTTTTTAGTCCACTAGTATCTATCGTTCCGAGTCAAGCTACTGCACCAATATTGGTTATTGTTGGTATTATGATGCTTTCAAATTTAAAAGATATCAAATGGGATGATATGTCAGAAGCTATCCCAGCTTTCTTTACTTCTCTTTTTATGGGGTTTACTTATAGCATTACTTATGGTATTGCAGCTGGTTTCTTGACCTATACACTAGCTAAAGTCATCAAAGGACAAGCAAAAGATATTCATGTGGTACTGTGGATTTTAGATATATTATTTATTCTAAACTTTATCAGCTTGGCTATTTTG

SEQ ID NO: 5122 - protein, 473 aa, Streptococcus agalactiae; identical to SEQ ID NO: 750

SEQ ID NO: 5123 - protein, 507 aa, Streptococcus agalactiae
ATGCTATGGGGCTGTCAGAATCAGCAAACTGTTGGAAGACAGAGATATTTCTGGTATAATATCTCTATGTTTTATACTCAAAATGAAGAAGAGCTTATTGCCCTAGGGCAAAAACTGGGTACTGTTTTAAAGTCAGGAGATATCGTATTATTGACTGGTAATTTAGGTGCAGGCAAAACAACTCTTACAAAAGGTATTGCAAAGGGATTAGACATAAAACAAATGATTAAGAGCCCAACTTACACTATTGTTAGAGAATATGAAGGGCGTGTACCACTTTACCATTTGGATGTTTATCGTATTGGAGATGATCCTGATTCTATTGACTTAGATGACTTCTTGTTTGGTCAAGGAGTAACAGTTATTGAATGGGGAGAGTTGCTTAGTGATAACCTTATCAATAACTACTTAGAAATTGTTATTACGAGGAGCAATCAAGGACGTCAAGTTCAGTTAGAAGCTTATGGGCATCGCGCAAGAGAAATTATTGAGGCGATTCAAGATGTC

SEQ ID NO: 5124 - protein, 169 aa, Streptococcus agalactiae; identical to SEQ ID NO: 752

SEQ ID NO: 5125 - protein, 558 aa, Streptococcus agalactiae
ATGGGCATCGCGCAAGAGAAATTATTGAGGCGATTCAAGATGTCTAAACAATTTGCTGTTGATTTTATAGAAGCTTCGAGAGAGGAAGCATCTGCGCTTCTTGAATTTTTAAATACTGTTACTGAGGAAACAGATTTTATTTTGCATACGGTGAGCAATCAACTATCTTTGCCAGAAATGGAAACGTTTATTGAAAATACCTTAATAACGAAAAATTGCATTTGTTTGATTGCTAAATTAAAAAATAAAGTGATCGGCTTGATAACAATCATTAGTCAGTCTGATATTGAAATTGAACACATTGGGGATCTTTTTATTGCTGTTCAGAAGGATTATTGGGGGTATGGTATTGGTCATATTCTCATGGAAGAAGCAATAGAATGGGCGTCAGATAACGATATTACACGCCGCTTAGAACTATCAGTCCAAGGACGTAATGAACGTGCTATTCACCTCTACCAAAAATTCAGTTTTGAAATAGATGGGCTTCAAACAAGAGGTATTAAAAGAGAAAATGGAGAATTTCTAGACATTTACAGAATGAGTAAGTTGATAGAT

SEQ ID NO: 5126 - protein, 186 aa, Streptococcus agalactiae
MGIAQEKLLRRFKMSKQFAVDFIEASREEASALLEFLNTVTEETDFILHTVSNQLSLPEMETFIENTLITKNCICLIAKLKNKVIGLITIISQSDIEIEHIGDLFIAVQKDYWGYGIGHILMEEAIEWASDNDITRRLELSVQGRNERAIHLYQKFSFEIDGLQTRGIKRENGEFLDIYRMSKLID

SEQ ID NO: 5127 - protein, 1305 aa, Streptococcus agalactiae
ATGAAAATTTGGAAAAAAATAACCTTAATGTTTTCTGCAATTATTTTAACAACAGTAATTGCATTGGGAGTCTATGTTGCCTCAGCTTATAATTTTTCGACTAATGAATTGTCTAAGACTTTTAAAGATTTTAAGCTAGCTAAATCAAAAAGTCATGCTATTGAAGAAACAAAGCCGTTTTCAATACTATTAATGGGTGTGGACACAGGTTCAGAGCATCGAAAATCTAAGTGGTCAGGAAATAGCGATTCTATGATCTTAGTCACTATAAATCCTAAAACTAATAAAACAACGATGACAAGCTTAGAACGTGACGTATTGATTAAATTGAGTGGTCCCAAAAATAATGGACAGACTGGCGTAGAAGCAAAGCTAAATGCAGCCTATGCTTCTGGTGGTGCGGAAATGGCATTGATGACTGTTCAAGACTTATTAGATATTAATGTTGATTACTTTATGCAAATTAATATGCAAGGATTAGTTGATTTGGTCAATGCTGTTGGTGGTATAACAGTAACTAATAAATTTGACTTTCCAATATCAATTGCTGCCAATGAACCAGAGTACAAGGCTGTTGTTGAACCAGGGACACATAAAATAAATGGAGAACAAGCACTTGTTTATTCTCGTATGCGCTATGATGATCCAGAGGGAGATTATGGGCGTCAAAAAAGACAACGTGAAGTAATTCAAAAAGTCCTTAAAAAAATATTGGCGTTAAATAGTATTAGTTCATACAAAAAAATTCTTTCCGCAGTAAGTAATAACATGCAAACTAATATTGAGATATCATCAAAAACGATTCCTAATTTGTTAGCTTATAAAGATTCATTGGAACATATTAAATCTTATCAGTTGAAGGGTGAAGACGCTACTCTATCAGATGGTGGCTCTTATCAAATTTTAACTAAGAAACATCTACTTGCAGTTCAAAATAGAATTAAGAAAGAGCTGGATAAAAAGCGTAGTAAAACTCTGAAGACAAGCGCGATTCTATATGAAGATTACTATGGTACTACTGCTAGTAATGATTCTTCTACTTATTCATCAACACAAGAGAATAATTATAATACAACACCTTATTCAGAAGCACCACCAAGTTACAGTGGTAATACTACTTATAGTTCTGAGACTAATCAAACAACTCATCAAAGTTACTATAATAGTAGCACTCCTGCTAGTAACTATAGCAGTAACACTAACACAGGTCAGGCTGATTCAAGTGGAAGTGTTAATAATTATAACGGGGCTGCAACGCCTAATCCAAACACAGGAACGCAACCAGTACCAAGTCAAACTAATCCA

SEQ ID NO: 5128 - protein, 435 aa, Streptococcus agalactiae
MKIWKKITLMFSAIILTTVIALGVYVASAYNFSTNELSKTFKDFKLAKSKSHAIEETKPFSILLMGVDTGSEHRKSKWSGNSDSMILVTINPKTNKTTMTSLERDVLIKLSGPKNNGQTGVEAKLNAAYASGGAEMALMTVQDLLDINVDYFMQINMQGLVDLVNAVGGITVTNKFDFPISIAANEPEYKAVVEPGTHKINGEQALVYSRMRYDDPEGDYGRQKRQREVIQKVLKKILALNSISSYKKILSAVSNNMQTNIEISSKTIPNLLAYKDSLEHIKSYQLKGEDATLSDGGSYQILTKKHLLAVQNRIKKELDKKRSKTLKTSAILYEDYYGTTASNDSSTYSSTQENNYNTTPYSEAPPSYSGNTTYSSETNQTTHQSYYNSSTPASNYSSNTNTGQADSSGSVNNYNGAATPNPNTGTQPVPSQTNP

SEQ ID NO: 5129 - protein, 294 aa, Streptococcus agalactiae
ATGAAAATAGGTCGTTTAATTGCACTAGGTTTAGTTAGTTTAGGAGCGCTTGAACTTTACAAAAATAGAAAAACTATCAAGGATTCCTATCAAAATACAAAAAATGAGACAGATTCAGCTAAATTAAAATTAGAACGTATCAAAAATGATCTTGCTATTATTAGTCAGGAAAAAGAAAAAATCAGATTAATTTCTCAAGAACTCAATCATAAATTCCAAGTGTTTAATAAAGATATTCAACCTCGTTTAGAAGAAATTAATCAACGCATGGCTAAATATCAAGAGAAAGACGAA

SEQ ID NO: 5130 - protein, 98 aa, Streptococcus agalactiae; identical to SEQ ID NO: 758

SEQ ID NO: 5131 - DNA, 417 bp, Streptococcus agalactiae
atggataattgtattttttgtaaaatcatcagtggagaaatctcttcatcaaaagtttatgaagatgatgaagtattagcttttctcgacattacacaaactacgactgggcacacccttcttattcctaaaaaacatgttcgaaatgtgttagagatggatgaaaaaactgcacagataacctttgaacgcttgcctaaagtggcgcgtgctgtccaagctgctacaaaagccaaaggaatgaatattattaacaacaatgaggaaattgctggacaaactgtttttcatgcacacgtccaccttgttccccgctttgatgaatcagacggtatcaaaattcactacactactcatgaacccgactttgaggcacttgcaaaattagccaaagaaattagaaaagagattcaatta

SEQ ID NO: 5132 - protein, 139 aa, Streptococcus agalactiae
MDNCIFCKIISGEISSSKVYEDDEVLAFLDITQTTTGHTLLIPKKHVRNVLEMDEKTAQITFERLPKVARAVQAATKAKGMNIINNNEEIAGQTVFHAHVHLVPRFDESDGIKIHYTTHEPDFEALAKLAKEIRKEIQL

SEQ ID NO: 5133 - DNA, 501 bp, Streptococcus agalactiae
ttgaaattaaataaaatcatattatctactgcagctcttactgctctctttttaggatataatagcgttactgcggatacatataataactatcagccacatagatcaaataatatggatttaactgaggaatataactataataaccagatagaacttcaggagcgtataaaaaacctaaatataccttttaaagaaaaacttgccttactcagaaaggttaaatcaagacaagattcttatgtattagacacattaagaaaagaagttgaaaataaaaacagtgagtattcagaactagagcaagaataccaaagaatttcggctcttattaatgctaagtttccgcaagggaaatctagtttagcagaaaaattacataaagaactaatttgggacttggatggtgtcaaatatgatgaggggatttctaagagaactgctctaaaaaaattagaaggtaaactcaacgaatatactaaaaaatacagttatttattc

SEQ ID NO: 5134 - protein, 167 aa, Streptococcus agalactiae
MKLNKIILSTAALTALFLGYNSVTADTYNNYQPHRSNNMDLTEEYNYNNQIELQERIKNLNIPFKEKLALLRKVKSRQDSYVLDTLRKEVENKNSEYSELEQEYQRISALINAKFPQGKSSLAEKLHKELIWDLDGVKYDEGISKRTALKKLEGKLNEYTKKYSYLF

SEQ ID NO: 5135 - DNA, 150 bp, Streptococcus agalactiae
ttgaaaataactttaaacctattttgtccgcttttacatctaattgaaatgccaagctaccccatgctcccattatgtttacaaaaagcacctccatcactcatcggacaaaaaaagacacctcaaaaaggtgtctttttagtatcaata

SEQ ID NO: 5136 - protein, 50 aa, Streptococcus agalactiae
MKITLNLFCPLLHLIEMPSYPMLPLCLQKAPPSLIGQKKTPQKGVFLVSI

SEQ ID NO: 5137 - DNA, 723 bp, Streptococcus agalactiae
atgttaaaaattgaaaatgttacaggggggtatgttaatatcccagttttaaaaaatatttcttttgaagtaaatgatggagagttagttggattaattgggcttaatggtgcaggaaaatcaaccactattaacgagattattggtattttgagaccctatcaaggagatattaccattgatggcattagtcttgaagccaaccaagaactttatagaaagaaaataggctttattcctgagacaccaagtctctatgaggaactaactctcagggaacatttagaaacggtagctatggcgtatgatattgccaccgatgaagttatggcacgtgcgcaaaaactattagagatgtttcgtctaacagataaattagactggtttccaatgcatttttcaaagggaatgaaacaaaaggttatgattatttgtgcttttgttgtatctccaagtttatttattgttgatgaaccatttttaggtttggatccactagctatttcagatttgattaatcttctagcagaagaaaaagctaaagggaaatctattttgatgtcaacacacgtattagattctgccgaaaaaatgtgtgatcgttttgttattttacataaaggagaaatacgggcagttggaaccctagaggaattacgggctatttttggagacagtaatgctaatttaaatgacatctacatagctctgacaaaagaggtg

SEQ ID NO: 5138 - protein, 241 aa, Streptococcus agalactiae
MLKIENVTGGYVNIPVLKNISFEVNDGELVGLIGLNGAGKSTTINEIIGILRPYQGDITIDGISLEANQELYRKKIGFIPETPSLYEELTLREHLETVAMAYDIATDEVMARAQKLLEMFRLTDKLDWFPMHFSKGMKQKVMIICAFVVSPSLFIVDEPFLGLDPLAISDLINLLAEEKAKGKSILMSTHVLDSAEKMCDRFVILHKGEIRAVGTLEELRAIFGDSNANLNDIYIALTKEV

SEQ ID NO: 5139 - DNA, 1032 bp, Streptococcus agalactiae
atgaaaaagttatttaataaacgtcgaagtctctttttaactcaaaatagtaaatatttgagatacgtctttaatgatcattttgtattagtattaatgtttttgtcaggttttttgttatatcagtatagccaattactaaaagactttccaaaaacacattggccaattatcgtgattgtgtcaatcattatcttaatgttactagcgatggggggaatagccagctatttagaaccggctgataaacaatttttacttataaaagaagaagcaataaaggaaattataaattctgctaaaaaacggacttatatcttttggttggttattcaaaccttatttttagtattaatatcaccaattttgataaagttaggcttgtcagtttttatgattacattgttaatttttggtctaggaataatcaaatggttggtgataacttacaaggtaaaggtcttttataacaatcaaaatttgaactgggatgcagctataaatcatgagcaggaaagaaaacagagtatattaaaatttttctctttgtttacaaatgttaagggaatttcgacaagtgtaaaacgtcgttcatttttagatgttattttaaaacttatttctaaaacgccatcgcgtttatggactaacttatttgtgagggcatttctaagaagctcagattatcttggtttaacaataaggttggtaactttaaatatcttatcagtcatctttgttaacgaaacctacctcgcccttgctctggcatttgtatttaactacttattattgttccaattattagctttaggtcaccattttgattatcaatacatgaatcagctctatccagttagattaaatgctaaagcaagtcagctaaaaggttttctcagagtattatcatatgctgtgacagtaattgatatcatacttataagagaattggaacctgttatattattgatagttttgatgttaattgtgacggaatattacatcccttacaaaataaagaagatgattgac

SEQ ID NO: 5140 - protein, 344 aa, Streptococcus agalactiae
MKKLFNKRRSLFLTQNSKYLRYVFNDHFVLVLMFLSGFLLYQYSQLLKDFPKTHWPIIVIVSIIILMLLAMGGIASYLEPADKQFLLIKEEAIKEIINSAKKRTYIFWLVIQTLFLVLISPILIKLGLSVFMITLLIFGLGIIKWLVITYKVKVFYNNQNLNWDAAINHEQERKQSILKFFSLFTNVKGISTSVKRRSFLDVILKLISKTPSRLWTNLFVRAFLRSSDYLGLTIRLVTLNILSVIFVNETYLALALAFVFNYLLLFQLLALGHHFDYQYMNQLYPVRLNAKASQLKGFLRVLSYAVTVIDIILIRELEPVILLIVLMLIVTEYYIPYKIKKMID

SEQ ID NO: 5141 - protein, 798 aa, Streptococcus agalactiae
GTGACAATATCAAATCAAGAATTGACGCTTACTCCCTTAAGAGGAAAAAGTGGCAAAGCCTATATTGGTACTTATCCAAATGGTGAACGTGTCTTTGTCAAATATAATACGACACCTATTTTGCCAGCCTTAGCTAAGGAACAGATTGCGCCACAACTACTGTGGGCACGCCGTACAAGTAATGGCGATATGATGAGTGCTCAAGAATGGTTAGATGGTCGAACATTGACTAAAGAAGATATGGGTAGTAAACAGATTATTCATATTTTATTGCGCCTGCACAAGTCTCGTCCCTTAGTAAATCAACTGTTACAGTTAGGGTATAAAATTGAAAACCCTTATGATTTGTTGATGGATTGGGAAAAACAAACTCCTATTCAAATCCGAGAAAACACTTATTTGCAATCTATTGTGACTGAGTTAAAGCGTAGTTTACCTGAGTTTCGAACAGAGGTTGCAACAATCGTTCACGGAGATATCAAACATAGCAACTGGGTTATTACAACAAGTGGTTTAATTTATTTAGTTGATTGGGATTCTGTTCGTTTAACAGATCGCATGTATGACGTTGCATATATTTTAAGTCATTATATTCCACAAAAACATTGGAAAGATTGGCTGTCTTACTACGGTTATAAAGATAATGAGAAAGTCTGGAGCAAAATTATTTGGTATGGGCAATTTTCATATTTATCACAGATAATCAAATGTTTTGATAAACGAGATATGGAGCATGTCAATCAAGAAATTTATGAATTACGAAAGTTTAGAGAGTTAATTAAAAAGCATAATGCGAGT

SEQ ID NO: 5142 - protein, 266 aa, Streptococcus agalactiae; identical to SEQ ID NO: 768

SEQ ID NO: 5143 - protein, 631 aa, Streptococcus agalactiae
ATGCGAGTTAGAAAACGTAAGGGTGCAGAGGAACACTTAGAAAATAATCCTCACTATGTTATTTCAAATCCAGAAGAAGCCAAAGGGCGTTGGCATGAGATTTTTGGAAATAATAACCCTATTCACATAGAAGTTGGTTCCGAAAAGGGGCTTTTATCACTGGTATGGCAGAGCAAAATCCAGATATCAATTATATTGGAATGATATTCAATTGTCAGTGCTTTCCTATGCTCTGGATAAAGTTCTAGATAGCGGTGCTAAGAATATCAAATTACTATTAGTTGATGGTTCTAGTCTATCAAACTACTTTGATACTGGCGAAGTTGATTTGATGTATCTTAACTTTAGTGATCCATGGCCTAAGAAAAAGCATGAGAAACGTCGATTGACCTATAAGACTTTCTTGGATACCTATAAAGACATACTTCCTGAGCAGGGGGAAATTCATTTTAAAACAGATAATAGAGGTTTATTTGAATATAGTCTTGCTAGCTTTTCTCAATACGGTATGACTTTAAAACAAGTTTGGTTAGATTTACATGCAAGTGATTACCAGCAAAATATCATGACTGAGTACGAACGCAAATTTTCAAATAAAGGACAGGTTATCTATCGTGTAGAAGCACGATTT

SEQ ID NO: 5144 - protein, 211 aa, Streptococcus agalactiae; identical to SEQ ID NO: 770

SEQ ID NO: 5145 - protein, 381 aa, Streptococcus agalactiae
ATGGGTGGCGACTATGTGCTCAGTATTTTAATTGATAAACCCGGAGGCATTACGGTTGAAGATACAGCACAATTGACAGACGTTGTAAGTCCCTTACTTGACACAATTCAACCAGATCCATTTCCAGAACAGTATATGCTTGAAGTCTCAAGTCCTGGGTTGGAAAGGCCACTTAAAACAGCAGAAGCATTATCAAATGCTGTTGGGTCTTATATCAATGTAAGTCTGTATAAATCCATTGATAAAGTTAAAATATTTGAAGGTGACTTATTATCATTTGATGGTGAAACCTTGACAATTGATTATATGGACAAAACACGTCATAAAACTGTAGATATTCCCTATCAGACGGTTGCAAAAGCCCGTCTTGCGGTTAAACTT

SEQ ID NO: 5146 - protein, 127 aa, Streptococcus agalactiae; identical to SEQ ID NO: 772

SEQ ID NO: 5147 - protein, 1154 aa, Streptococcus agalactiae
ATGCTAGAAGCCTTCCGTATTTTGGAAGAAGAAAAACACATTAATAAAGAAGATATTATTGATGCAGTTACTGAGTCACTAAAATCTGCCTATAAGCGTCGTTATGGTCAATCAGAATCATGCGTTATTGAATTTAACGAGAAGAAAGCAGACTTTACCGTCTATACTGTTCGTGAAGTTGTTGATGAAGTTTTTGATAGCCGTTTGGAAATTAGCCTAAAAGACGCACTTGCTATTAGCTCAGCGTATGAACTTGGTGATAAGATTCGCTTTGAGGAATCTGTTACAGAATTTGGACGCGTGGCAGCTCAGTCAGCAAAACAAACTATTATGGAAAAAATGCGTCGTCAAATGCGTGAAGTAACCTTCAATGAATACAAACAACACGAAGGTGAAATTATGACTGGTACTGTTGAACGATTTGACCAACGTTTTATCTATGTCAATCTCGGTTCACTTGAGGCGCAATTATCGCATCAAGATCAGATTCCTGGAGAGAGCTTTAAATCTCATGATATGATTGACGTTTATGTCTATAAAGTGGAGAATAATCCTAAAGGAGTCAACGTTTTTGTTAGCCGTAGTCATCCAGAGTTTATCAAACGCATTATGGAGCGAGAAATTCCAGAAGTATTTGATGGAACTGTTGAGATTATGAGCGTCTCTCGTGAGGCTGGAGATCGTACTAAAGTTGCTGTACGCAGTCATAATTCAAATGTTGATGCGATTGGAACAATTGTTGGACGCGGTGGAAGTAACATTAAAAAAGTTATCAGTAATTTCCATCCTAAACGCGTTGATGCTAAAACAGGATTGGAGATCCCGGTTGAAGAAAACATTGATGTTATTCAATGGGTTGAAGATCCAGCGGAATTCATTTACAATGCTATTGCACCAGCCGAAGTTGATATGGTACTTTTTGATGATGAAGATACAAAACGTGCTACTGTAGTTGTTCCAGATAGCAAGTTATCGCTAGCTATTGGTCGCCGAGGACAAAATGTGCGTTTAGCAGCTCATTTGACTGGCTATCGTATTGATATTAAATCTGCAAGTGAATACGAAAAAATGGAAGCGCAAGAACTTCAAACTGAGGAAGTAGCTCAAGAATCTGAAGTTTTCAGATAAGGCAGAATAATATAAANNNNNTTAAT

SEQ ID NO: 5148 - protein, 385 aa, Streptococcus agalactiae
  VARIANT 382, 383, 384: Xaa = Any Amino Acid
MLEAFRILEEEKHINKEDIIDAVTESLKSAYKRRYGQSESCVIEFNEKKADFTVYTVREVVDEVFDSRLEISLKDALAISSAYELGDKIRFEESVTEFGRVAAQSAKQTIMEKMRRQMREVTFNEYKQHEGEIMTGTVERFDQRFIYVNLGSLEAQLSHQDQIPGESFKSHDMIDVYVYKVENNPKGVNVFVSRSHPEFIKRIMEREIPEVFDGTVEIMSVSREAGDRTKVAVRSHNSNVDAIGTIVGRGGSNIKKVISNFHPKRVDAKTGLEIPVEENIDVIQWVEDPAEFIYNAIAPAEVDMVLFDDEDTKRATVVVPDSKLSLAIGRRGQNVRLAAHLTGYRIDIKSASEYEKMEAQELQTEEVAQESEVIQIRQNNIXXXN

SEQ ID NO: 5149 - protein, 345 aa, Streptococcus agalactiae
GTGTCAACAAAAGACATTTGGCAGTCTAATCACTTTATGCAATATATGGCATACCTTCTTGCAATTCTTTTTATTATCTCTTCAGCTTTACTAAGTTTGAAGCTATTGGTAAATGCATATGATATTAGTAAAAGGTATCAATTAGCAACTGTTATACCTGTAATGCTTTTTAGTAGTTTTGCCTTTTGCTTAGAAAAATCAGGATCATTAGGTTTAGAAGGAATCATTTTAAATCCGTCAGCATTTTTTAATGGAATACAGACTAATATGGCTAACCTTGATTTTAAAGCCTTGTCTTGCCTTTTTTTAGTACAATTATTACTTTGGGGAATATTAATGGAAGAC

SEQ ID NO: 5150 - protein, 115 aa, Streptococcus agalactiae
MSTKDIWQSNHFMQYMAYLLAILFIISSALLSLKLLVNAYDISKRYQLATVIPVMLFSSFAFCLEKSGSLGLEGIILNPSAFFNGIQTNMANLDFKALSCLFLVQLLLWGILMED

SEQ ID NO: 5151 - DNA, 315 bp, Streptococcus agalactiae
atgaaagtaaaactatttgcgatacatttattttttattgttatttcttttgggattaaatattatcatttgcagggaccaaatttgatttggaatatgactctagccctaatagcgttagattttgcataccttactagtttatttaagaaaaaaattcttatcggtctttttgcacttgcttggttttttttctatcctaataccttttatatgttgacggatatcattcatacgctgagggaactttctgtgctattgcagttgaagcatttgttactacattgttttctttattgttggttgtctctggtt

SEQ ID NO: 5152 - protein, 105 aa, Streptococcus agalactiae
MKVKLFAIHLFFIVISFGIKYYHLQGPNLIWNMTLALIALDFAYLTSLFKKKILIGLFALAWFFFYPNTFYMLTDIIHTLRELSVLLQLKHLLLHCFLYCWLSLV

SEQ ID NO: 5153 - DNA, 294 bp, Streptococcus agalactiae
atggctaaaacaaaaaaaatacctttaagaaaatcagttgtttctggtgaagtgatcgataagcgagatcttttacgaattgttaaaaataaagaaggacaggtttttatagatcctaccggaaagcaaaatggtcgaggtgcctacataaaattggacaatgatgaagctatcctagcgaaaaagaaacgagtgtttgatcgcagtttttcaatggaagtttctgatgaattctatgatgaactattggcatatgtcgaccataaggtcaaaagaagagagttaggccttgaa

SEQ ID NO: 5154 - protein, 98 aa, Streptococcus agalactiae; identical to SEQ ID NO: 776

SEQ ID NO: 5155 - DNA, 300 bp, Streptococcus agalactiae
ttgaataattcagaaaaagtattaaatctcattgggttagcacagcgtgcggggcgccttattacaggtgaagaattggttattaaagcaattcaaaatcaacaagtatcgctaatctttctagcaaatgatgctggcccaaatttgacgaaaaaagtaactgataaaagtaattactacaaaacagaagtctccacagtgttttcaacactggaattaagtgatgcgttaggcaaaccaagaaaagtggttgctgtcgcagacgctggattttcaaagaaaatgaggactcttatggca

SEQ ID NO: 5156 - protein, 100 aa, Streptococcus agalactiae; identical to SEQ ID NO: 778

SEQ ID NO: 5157 - DNA, 1440 bp, Streptococcus agalactiae
gtggttgagcaagctcaatcgcttggcttacctgtaaaaagtcatgcttctagcgttgaagaaaatgatgctacacgtattgttgagagttttagctcttctaaaactaaagctccaacaaattctgttcaaactaatcaaggtgtgaaaacagaatctaaaactgttgaaaccaaacaaggcttgtccgatgataaaccttcaactcaacctgtagctaaaccgaaaccacaaagtcgtaactttaaggcggagcgcgaggctcgtgctaaagctgaagcggagaagcgtcaacataatggggatcaccgtaagaataatcgccataatgatacacgctctgacgacagacgccatcaaggtcaaaagcgttcaaatggtaatcgtaatgataaccgacaaggtcagcaaaataaccgtaataaaaatgatgggcgttatgctgatcataaacagaaaccccaaacgcgtcctcagcaacctgcaggcaatcgcattgactttaaagctcgagcagcagctttgaaagctgagcaaaatgctgaatactcacgtcatagtgagcagcgtttccgtgaagagcaagaagccaaacgtcaagcagctaaggagcaagaactagctaaagcagcagcgttaaaagcgcaagaagaagctcaaaaagctaaggaaaaacttgcttctaaacctgttgctaaggtaaaagaaattgtcaataaagtagccgctacgccatcacagacagcagatagtcgtcgtaaaaaacaaactcgttctgataagtctcgtcaattttcaaatgaaaatgaagatggtcaaaagcaaacaaaaaataagaaaaactggaataatcaaaaccaagtgagaaatcaaagaaatagtaactggaatcataataagaaaaataaaaaaggtaagactaatggagctccaaaaccagtaacagagcgtaaattccatgaattaccaaaagaatttgaatatactgagggcatgaccgttgcggaaattgcaaaacgtattaaacgcgaaccagcagaaattgttaaaaaactctttatgatgggagttatggcaacgcagaatcaatcattagatggagacactattgagctattgatggttgactacgggattgaagcacatgctaaggttgaagttgatgaagctgatattgaacgcttctttgcagatgaggattaccttaatcctgataacttaacggaacgtccgcctgttgttactatcatgggacacgttgatcatggtaaaacaactcttcttgatactctacgtaattcacgtgtcgctactggcgaagctggtggaattactcaacatattggtgcttatcagatgaagaagctgscaagaaaattactttcttggatacaccagggcatgcggcctttacttctatgcgtgcgcgtggtgcatcag

SEQ ID NO: 5158 - protein, 480 aa, Streptococcus agalactiae
  VARIANT 457: Xaa = Any Amino Acid
MVEQAQSLGLPVKSHASSVEENDATRIVESFSSSKTKAPTNSVQTNQGVKTESKTVETKQGLSDDKPSTQPVAKPKPQSRNFKAEREARAKAEAEKRQHNGDHRKNNRHNDTRSDDRRHQGQKRSNGNRNDNRQGQQNNRNKNDGRYADHKQKPQTRPQQPAGNRIDFKARAAALKAEQNAEYSRHSEQRFREEQEAKRQAAKEQELAKAAALKAQEEAQKAKEKLASKPVAKVKEIVNKVAATPSQTADSRRKKQTRSDKSRQFSNENEDGQKQTKNKKNWNNQNQVRNQRNSNWNHNKKNKKGKTNGAPKPVTERKFHELPKEFEYTEGMTVAEIAKRIKREPAEIVKKLFMMGVMATQNQSLDGDTIELLMVDYGIEAHAKVEVDEADIERFFADEDYLNPDNLTERPPVVTIMGHVDHGKTTLLDTLRNSRVATGEAGGITQHIGAYQMKKLXRKLLSWIHQGMRPLLLCVRVVHQ

SEQ ID NO: 5159 - DNA, 213 bp, Streptococcus agalactiae
ttggatacaccagggcatgcggcctttacttctatgcgtgcgcgtggtgcatcagtaactgatattactatccttatcgttgccgctgatgatggtgttatgccgcagacagtgaggcaattaatcactctaaagctgcgggtgtcccaattattgttgctatcaacaaaattgataaacctggtgcaaatccagaacgcgttatcagtgaat

SEQ ID NO: 5160 - protein, 71 aa, Streptococcus agalactiae
MDTPGHAAFTSMRARGASVTDITILIVAADDGVMPQTVRQLITLKLRVSQLLLLSTKLINLVQIQNALSVN

SEQ ID NO: 5161 - protein, 1005 aa, Streptococcus agalactiae
ATGGAAGAATTAAAAGCAGATGCAGATGTTCGTGCTATTGGTACTGTTATTGAAGCCCGTCTTGATAAAGGTAAGGGAGCCGTTGCAACGCTTCTTGTCCAACAAGGTACTTTAAATGTACAAGATCCAATCGTTGTTGGTAATACATTTGGACGTGTTCGTGCGATGACTAATGATCTTGGGCGTCGTGTCAAAGTTGCGGGTCCATCTACACCAGTTTCTATTACTGGTTTGAACGAAGCTCCAATGGCTGGTGATCATTTTGCTGTTTATGCAGATGAGAAAGCTGCGCGTGCTGCAGGTGAAGAACGTGCAAAACGTGCTCTCTTAAAACAACGCCAAAACACGCAACGTGTTAGCCTCGAGAACTTATTTGATACCCTTAAAGCTGGTGAAGTTAAGTCAGTTAATGTTATTATCAAAGCTGATGTGCAAGGTTCTGTAGAAGCACTTGTAGCTTCTCTCCTTAAGATTGATGTTGAAGGAGTAAAAGTTAATGTTGTTCACTCAGCAGTTGGTGCTATTAATGAGTCTGATGTAACTCTTGCTGAAGCATCAAATGCTGTTATTATAGGATTTAACGTACGCCCTACTCCACAAGCTCGTCAACAAGCCGATGCTGATGATGTCGAAATTCGTCAACATAGCATTATCTATAAAGTTATCGAAGAAGTTGAAGAAGCGATGAAAGGTAAACTTGATCCTGAATACCAAGAAAAAATCCTTGGTGAAGCCATTATTCGTGAGACCTTTAAAGTTTCAAAAGTGGGAACTATTGGTGGATTTATGGTTATCAATGGTAAAGTTACTCGTGATTCAAGTGTTCGTGTTATCCGTGATGGTGTTGTCATTTTTGATGGTAAATTAGCAAGTCTTAAACACTATAAAGATGATGTTAAAGAAGTCGGCAATGCTCAAGAAGGTGGTCTAATGATTGAGAATTATAACGATCTCAAAGAAGATGACACTATTGAAGCATACATTATGGAAGAAATTAAACGTAAA

SEQ ID NO: 5162 - protein, 335 aa, Streptococcus agalactiae
MEELKADADVRAIGTVIEARLDKGKGAVATLLVQQGTLNVQDPIVVGNTFGRVRAMTNDLGRRVKVAGPSTPVSITGLNEAPMAGDHFAVYADEKAARAAGEERAKRALLKQRQNTQRVSLENLFDTLKAGEVKSVNVIIKADVQGSVEALVASLLKIDVEGVKVNVVHSAVGAINESDVTLAEASNAVIIGFNVRPTPQARQQADADDVEIRQHSIIYKVIEEVEEAMKGKLDPEYQEKILGEAIIRETFKVSKVGTIGGFMVINGKVTRDSSVRVIRDGVVIFDGKLASLKHYKDDVKEVGNAQEGGLMIENYNDLKEDDTIEAYIMEEIKRK

SEQ ID NO: 5163 - protein, 348 aa, Streptococcus agalactiae
ATGGCTAATCATCGTATTGATCGCGTTGGAATGGAAATTAAACGTGAAGTCAATGAGATTTTGCGTTTCCGAGTTAATGATCCACGTGTACAAGATGTCACAATTACTGATGTTCAGATGTTGGGTGACCTTTCAATGGCTAAAGTATTTTATACTATTCATTCGACACTTGCTTCTGATAATCAAAAAGCACAAATTGGTTTAGAAAAAGCAACTGGTACTATTAAGCGTGAACTTGGCAAAAACCTTACTATGTATAAAATACCAGATTTACAATTTGTTAAAGATGAATCTATTGAATACGGAAATAAGATTGATGAAATGTTGCGCAATCTAGATAAAAAAGAT

SEQ ID NO: 5164 - protein, 116 aa, Streptococcus agalactiae
MANHRIDRVGMEIKREVNEILRFRVNDPRVQDVTITDVQMLGDLSMAKVFYTIHSTLASDNQKAQIGLEKATGTIKRELGKNLTMYKIPDLQFVKDESIEYGNKIDEMLRNLDKKD

SEQ ID NO: 5165 - protein, 1002 aa, Streptococcus agalactiae
TTGAAACCGTCCTTCAAAAAACTATTGCTACTATTTAGTATTATCACCATTTTATCCATCGCCTGTACACCACATGCAAAAGCAAGTGGGCGTTCATGGAAAAGTTGGTTTATCGAACAATACTTTTGGCTAAAGCGCGATAAAAGTTATTATAAAGTTCAAGATGAAAGCTCATTTCAAAAGTACTTAAATGCTAGCCGTGAACAATCTGATAAGGGTTATTACTTAGACCCAAACTCTGTTAATGGAGGGCTTGTTCAAGAGAGACTTTTTGATATGCAAGTCTATTCTTGGAATGACAACGGTAAAGCTAATCAAAAGACCATTTTCTATTTAGCTGGTGGCTCTTACTTAAATAATCCAACGCCTTACCATATCAGCATGCTTAAGACGCTCTCAACTAGTCTTGATGCAAAAATTATTTTACCAATTTATCCAAAAACTCCTCGTTATACCTATGATTATGCTATCCCTAGATTGGTTAACCCTTATAGACACTTTCATGAAAAAAACGCTAATCTCACTTTGATGGGTGATTCAGCTGGCGGAGGATTAGCACTAGGATTAGCGCATGCATTGTCTCACCAATCAGGGCAAGAGGCTATTCCTCAACCTAAAAATATTATCCTCTTATCTCCATGGCTAGATGTGACAATGAAACATCCAGAAATTCCCAAATACGAAGATACCGATCCTATCCTATCTGCTTGGGGTCTCGCACGTGTAGGTGAAATTTGGGCAAATGGTTCTAATAATACTAACCATACATATGTTAGTCCTAAAAATGCCCCTGCTACTAAACTCGCTCCTATTACGTTATTTACTGGAACACGAGAAATATTCTTCCCAGATATTCGCGATTATGCTGCACAACTCCAAGCAGCTAATCACCCCGTTAACTATATTGCACAAGAGGGAATGAATCATGTTTATCCAATTTACCCTATTGAAGAAGCTAAAACAGCACAGTATCAAATGATTGATATCATCAATAAAACTCCT

SEQ ID NO: 5166 - protein, 334 aa, Streptococcus agalactiae
MKPSFKKLLLLFSIITILSIACTPHAKASGRSWKSWFIEQYFWLKRDKSYYKVQDESSFQKYLNASREQSDKGYYLDPNSVNGGLVQERLFDMQVYSWNDNGKANQKTIFYLAGGSYLNNPTPYHISMLKTLSTSLDAKIILPIYPKTPRYTYDYAIPRLVNPYRHFHEKNANLTLMGDSAGGGLALGLAHALSHQSGQEAIPQPKNIILLSPWLDVTMKHPEIPKYEDTDPILSAWGLARVGEIWANGSNNTNHTYVSPKNAPATKLAPITLFTGTREIFFPDIRDYAAQLQAANHPVNYIAQEGMNHVYPIYPIEEAKTAQYQMIDIINKTP

SEQ ID NO: 5167 - protein, 414 aa, Streptococcus agalactiae
ATGACTATTTCAAACGCAGAATGGGAAATTATGAGAGTGGTTTGGGCACAGCAGAATACAACCAGTAATGAGATACTAGCAGTTTTACTAGAGAAGTATGATTGGACTCCTTCAACTGTCAAAACCTTATTAAGAAGGCTCTTAGATAAAGGCTACGTGAGCAGAGAAAAAATGGGAAAAGGATTTAGCTATTCTCCTTTAATTGATGAAGATTTAGCTATGATGTCAGAGGTAGATAGTGTATTGCAGAAAGTTTGCCAGACCAAACATGTTGCTATTGTTAGACACTTATTGGAAAGTATACCAATGACAGAGAAGGATCGATTAAATTTGCAAGCATCACTAGAAGCTAAGAAAGGCAAAACACTTGAACGTGTAGCTTGTAATTGCATTCCTGGTCAGTGTCAATGCCAT

SEQ ID NO: 5168 - protein, 138 aa, Streptococcus agalactiae
MTISNAEWEIMRVVWAQQNTTSNEILAVLLEKYDWTPSTVKTLLRRLLDKGYVSREKMGKGFSYSPLIDEDLAMMSEVDSVLQKVCQTKHVAIVRHLLESIPMTEKDRLNLQASLEAKKGKTLERVACNCIPGQCQCH

SEQ ID NO: 5169 - protein, 2232 aa, Streptococcus agalactiae
ATGGCTAATAGAAAAGAAACATTTTTGATTGATGGGATGACTTGTGCATCTTGTGCTTTAACGATAGAAAAAGCTGTCAACAAGTTAGACCATGTGGATAGTGCAGTAGTAAATTTAGCAACAGAGAAAATGACAGTTACGTTTGATGATACAACCTTATCGCCAAACGTGATTGAAGAGTGTGTTTCTGAGACTGGATACGAAGCATCGCTTTTCAAAGAGGAAACTTCTAAAAGCCAATCTGAACGGCACCAATTAGCAATTGAAAAGATGTGGCATCGCTTTTGGATGTCAGCAGTTGCAACTATACCTCTTCTCTATATTTCCATGGGGCCAATGATTAACTTATGGTTACCATCATTTTTGATGCCAGATAAGGGACCTCTAAACTATGGTGTGATACAATTATTGTTAACACTACCGGTGATGTATTTTGGGCGTATCTTTTACCAAAATGGTTTTAAAGCACTTTTTAAAAGGCATCCCAATATGGATTCATTAGTTGCTATAGCCACAACAGCGGCTTTCATTTATAGCTTATATGGATTGTACGAAATATTACAGGGTGACATACACTACGCTCACCAGCTTTATTTCGAATCTGTTGCAGTTATTTTAACACTTATTACTCTAGGAAAATATTTTGAAATATTATCCAAAGGGCGTACTTCGGCCTCAATTGAAAAATTATTAACTTTATCAGCAAAAGAAGCAAGAGTTATCAAAGATGGTGAAGACTATATGGTTCCTTTGGATAAAGTTAAAATAGGTGAAACAATTCTTGTCAAACCTGGAGAAAAAATTCCTCTTGATGGCCATGTTGTAGCAGGAGAATCAAGTATTGATGAATCCATGTTAACAGGTGAAAGTATTCCAGTTGAAAAAAAGGTTGGTAGTAAGGTTTACGGTGCCAGCATTAATGGGCAAGGTAGCTTAACGATTTTCGTTGAAAAAGAAGCTGGCGGTTCCCTTCTATCACAAATTATTAACTTAGTAGAAGTTGCACAGGCAAGTAAGGCTCCAATTGCTAACTTAGCAGACAAAGTATCAGGAGTCTTTGTCCCTTTTGTTATTGTCATTGCAATTTTATCAGGTTTGAGTTGGTACTTAATTCTGGGGCAAAGTTTTGCCTTCTCTCTGAAGATTATGATTGCAGTCTTAGTGATTGCTTGTCCATGTGCTTTAGGGTTAGCAACTCCTACAGCTATTATGGTGGCTAGTGGTAAAGCAGCTGAGAATGGTATTTTATTTAAAGGTGGTGAAGTGTTGGAAAAGGCTCACCACATTGATACAATAGTTTTTGATAAAACAGGAACCTTGACCAAAGGGAAACCAGAAGTAGTTGCTATCAAAACATATGGGGTAGATAAAGAGGAGTTTTTAGGTCAAGTAGCATCAGTAGAAAAACTTTCAAATCATCCACTTAGCCAAACAATTGTTAACAAAGCAAAAGAGAAAGAACTTCCCTTAAGGGAAGTCATGGCTTTTAAAAATATTTTGGGTTACGGTTTGAGTGCAATTATTAATGGTAAAACTATGCTTGTAGGTAATGCTAACTTAATGACTAAGAACGATGTTAATTTAGATTTAGCAAAGGCTGATATAGAAATAGCTCAAGAAGAAGCACAAACTGTGGTTTACGTTTCCGAAAATGGAGTGTTGAGCGGTTTAATAACTTTAACGGACCAGCTAAAGACAGATAGCCAAGAAACAGTTAAGCAGTTACAAAGATTAGGATTTAATTTAGTTTTACTTACTGGTGATAATAAGGCTAGTGCAGATGCCATAGCACAAAAATTGGGTATCACGACAGTTGTTTCAGAAGTTTTACCTGATCAGAAAGCAAACGTTATTTTAGAACTTAAAGAAAAAGGCGGACAGATTGCGATGGTTGGTGATGGCATCAATGATGCTCCTGCGCTAGCTAGCAGTGATGTAGGTATCTCTATGAGTTCTGGAACAGATATTGCTATTGAATCAGCAGATATCGTGTTGATGAAACCTGAGTTAACAGATCTCTTAAAAGCAATGACTATCAGTAAACAAACGATTCAAATTATTAAGGAAAATTTATTTTGGGCTTTCTTTTATAACGTTTTAGCGATTCCAGTGGCAATGGGTGTTTTACATCTTTTTGGTGGTCCCTTACTCAATCCTATGTTGGCAGGCTTAGCTATGGCGTTTAGTTCAGTTTCAGTAGTTTTAAACGCACTTCGCTTAAAAGTCTTAAAA

SEQ ID NO: 5170 - protein, 744 aa, Streptococcus agalactiae
MANRKETFLIDGMTCASCALTIEKAVNKLDHVDSAVVNLATEKMTVTFDDTTLSPNVIEECVSETGYEASLFKEETSKSQSERHQLAIEKMWHRFWMSAVATIPLLYISMGPMINLWLPSFLMPDKGPLNYGVIQLLLTLPVMYFGRIFYQNGFKALFKRHPNMDSLVAIATTAAFIYSLYGLYEILQGDIHYAHQLYFESVAVILTLITLGKYFEILSKGRTSASIEKLLTLSAKEARVIKDGEDYMVPLDKVKIGETILVKPGEKIPLDGHVVAGESSIDESMLTGESIPVEKKVGSKVYGASINGQGSLTIFVEKEAGGSLLSQIINLVEVAQASKAPIANLADKVSGVFVPFVIVIAILSGLSWYLILGQSFAFSLKIMIAVLVIACPCALGLATPTAIMVASGKAAENGILFKGGEVLEKAHHIDTIVFDKTGTLTKGKPEVVAIKTYGVDKEEFLGQVASVEKLSNHPLSQTIVNKAKEKELPLREVMAFKNILGYGLSAIINGKTMLVGNANLMTKNDVNLDLAKADIEIAQEEAQTVVYVSENGVLSGLITLTDQLKTDSQETVKQLQRLGFNLVLLTGDNKASADAIAQKLGITTVVSEVLPDQKANVILELKEKGGQIAMVGDGINDAPALASSDVGISMSSGTDIAIESADIVLMKPELTDLLKAMTISKQTIQIIKENLFWAFFYNVLAIPVAMGVLHLFGGPLLNPMLAGLAMAFSSVSVVLNALRLKVLK

SEQ ID NO: 5171 - DNA, 204 bp, Streptococcus agalactiae
atgaaacatacctatcgagttagtggcatgaaatgtgatggttgtgccaaaacagtttctgataagttatcaagtgtgatgggtgttgacgaggttaatgttgatttgactaaaaatcaagttgtcgtaagtggaaaaacattcaaatgtcttttaaaacgttctttaaaagacacaaagtattcactagaagaggacataaat

SEQ ID NO: 5172 - protein, 68 aa, Streptococcus agalactiae
MKHTYRVSGMKCDGCAKTVSDKLSSVMGVDEVNVDLTKNQVVVSGKTFKCLLKRSLKDTKYSLEEDIN

SEQ ID NO: 5173 - DNA, 612 bp, Streptococcus agalactiae
atgtcaatcgatatttggaacattttaagtttggttggaaccgtagcttttgcaagttcgggagctattgtggcgattgaggaagaatttgatgttctagggctttttatcttaggttttgtaacggcatttggtggtggagctattagaaatgtactaattggcttgcctattgaaacactttggagtcaaggaattgctttttatgcagcagcagcagctattttgtttattatgattttccctaacttgttgagtggtaagggacgggatgccgaagttgtatcagatgctattgggttagcagcgtttagtgttcaaggagcactatatgcgactcaatctcatcaacctcttagtgctgtcattgtcgcagcagtactaactggtgcaggtggtggtattgtcagagatgttctggctggccgaaaacctggggtactaagaagtgaaatatatgcaggttggtcaatattagtggggatcattttatattttaaaattgctaaaacaacaactgactattatttgttagtgttagttgtaactagcctaaggatgttggggtataagaaacaatggcacttgccagttgtcagaccacgtaagaaa

SEQ ID NO: 5174 - protein, 204 aa, Streptococcus agalactiae
MSIDIWNILSLVGTVAFASSGAIVAIEEEFDVLGLFILGFVTAFGGGAIRNVLIGLPIETLWSQGIAFYAAAAAILFIMIFPNLLSGKGRDAEVVSDAIGLAAFSVQGALYATQSHQPLSAVIVAAVLTGAGGGIVRDVLAGRKPGVLRSEIYAGWSILVGIILYFKIAKTTTDYYLLVLVVTSLRMLGYKKQWHLPVVRPRKK

SEQ ID NO: 5175 - DNA, 810 bp, Streptococcus agalactiae
atgataaaattaattgctattgatatggatggaacgcttttaaatgatgaaaagaaaattccaaaggaaaatatccaagctattaaagaagcaactcaagcaggtattaaaattgtactgtgtactgggcgaccgatgtcaggtatacttccttattttaatgaactaggtttaacaaaagaggagtatattatcatgaataatggttgtagcacttatagcacgaaagattggcaattgattgattctgcaactttaacacatgatgaactcatctttcttgaggaggttgttaaagaatttcccaacgtttgtttaacgttaacagctgaaaatacattttacgctgttggtgaggaagttcctgaaattgttgcttatgatgctgatttagtttttacaaaagcaaagtcaataagtttagatgctcttcgcaatcaagaagaaattgtctttcaagcaatgtacatgggattagatgcagatgtaactgcttttcaagaagctgttgaagaagccttaatctcgaaatttagtggagttcgaagccaagactatatttatgagattatgcctcaaggagtaacaaaagcaagaggcttaaaatccttgatagcaaaattaggactggatattaatcaagttatggctattggtgatgctcctaacgatattgaattattagatttagttcccaatagcgttgctatggggaatgcatcagatgagattaaatctagatgtaaatatataacggtggataataaccaagccggggttgctaaagctatttatgactatgctttacgt

SEQ ID NO: 5176 - protein, 270 aa, Streptococcus agalactiae
MIKLIAIDMDGTLLNDEKKIPKENIQAIKEATQAGIKIVLCTGRPMSGILPYFNELGLTKEEYIIMNNGCSTYSTKDWQLIDSATLTHDELIFLEEVVKEFPNVCLTLTAENTFYAVGEEVPEIVAYDADLVFTKAKSISLDALRNQEEIVFQAMYMGLDADVTAFQEAVEEALISKFSGVRSQDYIYEIMPQGVTKARGLKSLIAKLGLDINQVMAIGDAPNDIELLDLVPNSVAMGNASDEIKSRCKYITVDNNQAGVAKAIYDYALR

SEQ ID NO: 5177 - DNA, 2640 bp, Streptococcus agalactiae
atgacaaacaagaataaattacttttaattgatggctcatctgtagcctttcgtgctttttttgctctttataatcaaattgaccgctttaaaaacaattctggacttcatactaatgccatatatggtttccatttgatgttgaatcatattttaggtcgtgtccagcctagtcatattttagtggcttttgatgctggaaaaactactttccgtacggaaatgtatgcagattataaaggtgggcgtgctaaaactccggatgaatttcgtgaacaatttccttatattcgtcaacaattagatgtcttaggcatcaaacattatgaattggaacattatgaagccgatgatatcattggtactcttgcaaaacaagccgaagctagtaaagagcattttgatataacggtggtttctggggataaagatttaattcaattaacagacactaacacggtagtagaaatctctaaaaagggagttgctgagtttgaagaattcacgccagcttaccttatggaaaaaatgggaattacgccgagtcaatttattgatttaaaagctttgatgggagataaatcagataatattcctggggttactaaaatcggtgaaaaaactggcttgaagttgctatcagaatatggttccttagaagggatctatgaaaatattgaggctatgaaacagtctaagatgaaagaaaaccttatcaatgataaggagcaagctttcttatcaaagaccctagctacaatcaacatagcatcacctataacaatcggcttagaagatatcctttatagtggaccgcaagatataaaagccttgtctcaattttatgatgagatggattttaaacagtttaaagcagctctgggtgaggagacaagtcaggaagattttgaggttgactttactgaagtggagcaattaaaaccagaaatgttctccgataatgatttttattactttgagatgttaggtgataactaccacgtagaagatttaattgggatagcttggggaaatagcgatacaatctacgctactagtgatgtatcgttattgcaagaagctttatttaaaaaagctttatcaaaacctatcaaaacttatgattttaaaagaagtaaggtccttttaaatcgttttaatattgatttaccagagccagcctttgatactagattggccaagtaccttttgtctactactgaggataatctagtatcaacaattgctaggttatatacaaatctgccactggatactgatgatgctgtttatgggaaaggtgctaaacgcgctataccagaaaaaacacgatttcttgagcatctagctaaaaaagtaaaagttttagtggattctgaggctaatattatgcaacagcttaaagctaatgagcaagaagaattgctgtttgaaatggagcaacctttagcgaatgttttagctaaaatggaaattcgaggtattaaggttaagaaaaataccttgaatgaaatggctattgaaaatcaaaaagtcatcgaaaccttaacacaagagatctatgaattggctgggcaagagtttaatattaattctccaaaacagttaggaaagttgttgtttgaaacgttaggtcttcctgtagaaatgactaaaaaaacaaaaacaggttattcaactgcagtagatgtattagagcgcttagctccgatttctcctcttgtaactaaaattttagagtaccgtcaaatcactaaattgcaatcaacctatattattggtttacaagattatattttagaagatggtaaaattcatacacgttatgttcaagatttgactcagacaggtcgtctttcaagttctgacccaaaccttcaaaatataccagttagactagagcaaggacggcttatccgaaaggcttttgttccatcagaagacaatgctgttttattgagttcagattattctcaaatagaattgcgcgtgttagcacatatttcaaaagacgaacatttgatcgctgcctttaaagagggagcagatattcatacttcaacagctatgcgtgtttttggtatcgaaaaacctgagaatgtcactcccaatgatcgtcgaaatgctaaggctgttaactttggaattgtttatggtatttcagattttggtctatcgcataatttaggaatacctcgtaaactagcgaagcaatatattgacacctattttgagcgttatcctggaataaaaaactatatggaaacagttgttcgtgaagcaaaagataagggttacgttgaaacacttttccatcgtcgtcgttcactaccagatattaattctcgtaattttaacattcgccaatttgcagagcgcacagcaatcaattcaccaatccaaggaagtgcagctgatattcttaaaattgcaatgataaatttagatagggtactttataaaggtggttataaatcaaaaatgctgttgcaagttcatgatgaaattgtacttgaagtccctaacgaggagataggagcaatcaaggagttggttacaaaaacaatggagtcagcaattagtttatcggtacctttgattgcagatgagaacgcaggtgagacttggtatgaagcgaag

SEQ ID NO: 5178 - protein, 880 aa, Streptococcus agalactiae
MTNKNKLLLIDGSSVAFRAFFALYNQIDRFKNNSGLHTNAIYGFHLMLNHILGRVQPSHILVAFDAGKTTFRTEMYADYKGGRAKTPDEFREQFPYIRQQLDVLGIKHYELEHYEADDIIGTLAKQAEASKEHFDITVVSGDKDLIQLTDTNTVVEISKKGVAEFEEFTPAYLMEKMGITPSQFIDLKALMGDKSDNIPGVTKIGEKTGLKLLSEYGSLEGIYENIEAMKQSKMKENLINDKEQAFLSKTLATINIASPITIGLEDILYSGPQDIKALSQFYDEMDFKQFKAALGEETSQEDFEVDFTEVEQLKPEMFSDNDFYYFEMLGDNYHVEDLIGIAWGNSDTIYATSDVSLLQEALFKKALSKPIKTYDFKRSKVLLNRFNIDLPEPAFDTRLAKYLLSTTEDNLVSTIARLYTNLPLDTDDAVYGKGAKRAIPEKTRFLEHLAKKVKVLVDSEANIMQQLKANEQEELLFEMEQPLANVLAKMEIRGIKVKKNTLNEMAIENQKVIETLTQEIYELAGQEFNINSPKQLGKLLFETLGLPVEMTKKTKTGYSTAVDVLERLAPISPLVTKILEYRQITKLQSTYIIGLQDYILEDGKIHTRYVQDLTQTGRLSSSDPNLQNIPVRLEQGRLIRKAFVPSEDNAVLLSSDYSQIELRVLAHISKDEHLIAAFKEGADIHTSTAMRVFGIEKPENVTPNDRRNAKAVNFGIVYGISDFGLSHNLGIPRKLAKQYIDTYFERYPGIKNYMETVVREAKDKGYVETLFHRRRSLPDINSRNFNIRQFAERTAINSPIQGSAADILKIAMINLDRVLYKGGYKSKMLLQVHDEIVLEVPNEEIGAIKELVTKTMESAISLSVPLIADENAGETWYEAK

SEQ ID NO: 5179 - DNA, 438 bp, Streptococcus agalactiae
atggtttatcattttcaaaatccaagtgattttatgttaaaaaattatttaacaaaagcaaagaccatcgcagttgtaggattgtcagaccgtcaagaaactgcagcttatcaagtatcaaaaataatgcaagaagcaggttatcaaattattccagttaatcctaaaaatgcaggacagaaaatacttgggcaaatgacatatgcctcacttaaggatgtcactgaacatattgatattgttaatatttttcgacgtagcgagtatttacctgatattgcaagagaatttttagaagtagacgctgatattttctgggctcagcttggacttgaaagtcaagaagcagagacaattctaaagcaagcaggacacaaacagattgtcatgaataaatgtctgaaagttgaataccaaaaattacactcagaaactaac

SEQ ID NO: 5180 - protein, 146 aa, Streptococcus agalactiae
MVYHFQNPSDFMLKNYLTKAKTIAVVGLSDRQETAAYQVSKIMQEAGYQIIPVNPKNAGQKILGQMTYASLKDVTEHIDIVNIFRRSEYLPDIAREFLEVDADIFWAQLGLESQEAETILKQAGHKQIVMNKCLKVEYQKLHSETN

SEQ ID NO: 5181 - protein, 477 aa, Streptococcus agalactiae
ATGGACAGTCATTCACATGGTCATAGACCTCTCGATGCTTATGAAAACGTCCTAGAGCATCTCCGTGAAAAACGTATTCGAATTACTGAGACTCGAAAAGCTATTATTTCCTATATGGTTAATAGTCGTGAGCATCCGAGTGCAGAAAAGATTTACAATGATTTATTACCAGAATATCCTAACATGAGCTTGGCAACAGTTTACAATAACCTTAAGGTCCTTGTGGATGAGGGGTTTGTGACAGAGCTAAAACTTTGCAATTATAGTACAACTTATTATGATTTTATGGGGCATCAGCACCTAAACATTGCCTGTGAAGATTGTGGGAAAATCGTTGATTTTGTCGATGTTGACTTATTGGATATTTCTAGAGAAGCACACCAACAAACAGGTTTTGAAGTGACTAGAGTTCAGTTAGTAGCTTATGGTATCTGTCCGGAGTGTCAGAGGAAGCGTAAGGATAAATATAAAAAAGAT

SEQ ID NO: 5182 - protein, 159 aa, Streptococcus agalactiae; identical to SEQ ID NO: 804

SEQ ID NO: 5183 - protein, 1563 aa, Streptococcus agalactiae
ATGAAAATATCACAATACAATAAATGGTCAATTCGCCGATTGAAAGTTGGAGCTGCATCTGTAATGATTGCTAGTGGAAGCATTGTTGCTTTAGGGCAATCTCATATTGTTTCAGCAGATGAGATGTCCCAACCTAAAACAACCATTACAGCCCCAACAGCTAACACTTCTACAAATGTAGAAAGTAGTACTGATAAGGCATTATCAAAAGTTACTACGATGGAGACAAGTTCAGAAATGCCTAAAATGCAAAATATGGCAAAAGTTGAAAAAACGAGTGACAAACCTATGATGGTGGCTACCTCTGTTAGAAAAATGATGGCAACGCCGACACCTGTAGCGATGACCAAAACGACTAGTGTAGATGAGGTAAAGAAATCAACTGATACTGCTTTTAAACAGACAGTAGACGTTCCGGCTCATTATGTTAATGCAGCAAAAGGGAATGGCCCATTTCTAGCAGGTGTAAATCAAACGATTCCATATGAAGCGTTTGGTGGAGACGGCATGTTAACGCGTTTAATCCTTAAAGCTTCAGAGGGAGCAAAATGGTCAGACAATGGTGTTGATAAAAATAGTCCATTATTACCATTGAAAGGCTTAACTAAAGGTAAATATTTCTATCAAGTTTCTTTAAATGGTAATACGACAGGTAAAGAGGGGCAAGCTCTCTTAGATCAAATTAAAGCTAATGATAAACATAGCTACCAAGCCACAATTAGAGTTTATGGTGCTAAAGATGGTAAAGTTGATTTAAAAAACATGATTAGCCAAAAAATGGTAACCATTAACATTCCTCACATTACAACTGATATGGAAGTAAAAAATTCTCTAAAGATGGCCTTTAAAGAAAAAGTAGACGTCCCAGCAAAATATGTTAGTGCTGCAAAAGCTAAAGGTCCATTTTTAGCAGGTGTTAACGAAACGATTCCATATGAAGCGTTTGGTGGAGATGGCATGTTAACGCGTTTAATCCTTAAAGCTTCAGAGGGAGCAAAATGGTCAGACAATGGTGTTGATAAAAATAGTCCATTATTACCGTTAAAAGATTTAACTAAGGGTAAATACTTCTACCAAGTCTCTCTTAATGGCAATACAGCCGGTAAAAAAGGCCAAGCTCTCTTAGATCAAATTAAGGCAAATGGAAGCCATACTTATCAAGCAACTATCACTATTTATGGTACGAAAGATGGCAAAGTTGATATGAATACTATTTTAGGACAAAAGACAGTGATGATTCATATTAATGTCGCTAAAAAAGATATGAATAGCACATCAATGATGATGAAAAAAGATAAGATGACAATGCCTATGAAGAAAGAAATGACTTCATCTAAAATAAATACCGGTATGATGATGTCTAACAACAAGATGTCAGCTAATATGCAAATGTCATCACAAGCCAAATCAAATGATAAAGCTGGTAAAAAAATGTCTATGATGTCTAAAAATTTACCTAATACAGGTGAAACAAAGCAACAAAATGTAGGTGTGCTAGGTATGCTTAGTCTAGCCTTTGCGACAGGTCTAACTGCGCTAGGCCTTAAAAAATCTAAACAAAGA

SEQ ID NO: 5184 - protein, 521 aa, Streptococcus agalactiae
MKISQYNKWSIRRLKVGAASVMIASGSIVALGQSHIVSADEMSQPKTTITAPTANTSTNVESSTDKALSKVTTMETSSEMPKMQNMAKVEKTSDKPMMVATSVRKMMATPTPVAMTKTTSVDEVKKSTDTAFKQTVDVPAHYVNAAKGNGPFLAGVNQTIPYEAFGGDGMLTRLILKASEGAKWSDNGVDKNSPLLPLKGLTKGKYFYQVSLNGNTTGKEGQALLDQIKANDKHSYQATIRVYGAKDGKVDLKNMISQKMVTINIPHITTDMEVKNSLKMAFKEKVDVPAKYVSAAKAKGPFLAGVNETIPYEAFGGDGMLTRLILKASEGAKWSDNGVDKNSPLLPLKDLTKGKYFYQVSLNGNTAGKKGQALLDQIKANGSHTYQATITIYGTKDGKVDMNTILGQKTVMIHINVAKKDMNSTSMMMKKDKMTMPMKKEMTSSKINTGMMMSNNKMSANMQMSSQAKSNDKAGKKMSMMSKNLPNTGETKQQNVGVLGMLSLAFATGLTALGLKKSKQR

SEQ ID NO: 5185 - protein, 684 aa, Streptococcus agalactiae
ATGACACAAAAATTATTATTAGTTGACGATGAATTTGAAATTATTGATATTAATAGACGTTATCTAGAGCAAGCAGGATATGAAGTGTCAGTAGCTGCGGATGGCATAGAAGCACTCAAAGAGGTAGATGAGAATCGTTTTGACCTAATTATTAGTGATATTATGATGCCTAAAATGGATGGCTATGATTTTATTAGTGAAGTTCTAGTTCGAGAACCCAACCAACCTTTTCTCTTTATAACCGCTAAAGTATCTGAACCAGATAAAATTTACTCTTTGAGTATGGGTGCAGATGACTTTATTTCCAAGCCTTTCAGTCCTAGGGAATTAGTTTTACGTGTTAAAAATATTCTAAGACGTATCTATGGGAATCATCAACAATCTGAAGTATTGACGATTGGTGATTTGGTTATCGACCAAAAACAACGTTTGGTAATGGTAGACTGCAATACAATTTCCTTAACCAATAAATCATTTGACTTGCTTTGGATATTAGCAAATCATTTGAATCGTGTTTTTTCAAAAACAGAGCTTTATGAACGTGTCTGGGGCGAAGAATTTTTAGATGACACTAATACTTTGAATGTTCATATCCATGCCTTACGCAATGACCTTGCTAAATTTAGTACAGACAATACCCCAACTATCAAAACAGTTTGGGGATTAGGGTATAAATTAGAGGAA

SEQ ID NO: 5186 - protein, 228 aa, Streptococcus agalactiae; identical to SEQ ID NO: 808

SEQ ID NO: 5187 - protein, 1035 aa, Streptococcus agalactiae
ATGAAATTAAAATATTATATTGTTATTGGTTACCTTATTTCTATGTTAATAACTGTAGCAGGTGTTTTCTTTGGGCTTAATCATATGCTGATTGAGACTCGAGGTGTTTACTACATCCTTTCAGTTACAATTATTGCCTGTATCGTAGGTGGTATAGTTAATTTGTTCTTATTATCAAGTGTATTTACATCTTTGAAAAAGTTAAAACAAAAAATGAAGGATATTTCTCAAAGACGTTTTGATACAAAAGCACAAATTTGTTCACCACAAGAATTCAAGGATTTAGAGACAGCCTTTAACCAAATGTCTTCAGAGTTAGAGTCAACGTTTAAATCTCTAAACGAGAGTGAACGCGAAAAAACAATGATGATTGCACAACTTTCACATGATATCAAGACTCCAATTACCTCTATACAATCAACAGTAGAAGGTATTTTAGATGGTATTATATCTGAAGAAGAAGTTAACTATTATCTCAATACCATTTCTCGTCAAACAAACCGTCTTAACCATCTAGTTGAAGAATTAAGTTTTATTACATTAGAGACTATGTCAGACACGGCTGAACCTCATAAAGAAGAAACAATTTATCTGGATAAACTACTGATTGATATTTTATCTGAATTTCAATTGGTGTTTGAAAAAGAAAATCGGCAAGTAATGATTGATGTTGCGCCAGATGTTTCGAAATTATCTAGTCAATATGATAAATTATCACGAATTTTATTGAATTTGATTAGCAATGCAGTCAAATATTCTGATCCTGGAAGTCCCTTGACTATCAAGGCCTATTCAAATCGTCAAGATATCGTTATCGATATTATTGACCAAGGCTATGGGATAAAAGATGAAGATCTTGCTTCTATTTTTAATCGTTTTTATCGTGTAGAATCTTCACGAAATATGAAGACAGGAGGACATGGCCTAGGTCTTTATATTGCGCGACAACTTGCACATCAACTGAATGGTGATATTTTGGTCGAAAGTCAGTATCAAAAAGGCAGTAAGTTCTCTTTAGTACTTAAATTACAAAAA

SEQ ID NO: 5188 - protein, 345 aa, Streptococcus agalactiae
MKLKYYIVIGYLISMLITVAGVFFGLNHMLIETRGVYYILSVTIIACIVGGIVNLFLLSSVFTSLKKLKQKMKDISQRRFDTKAQICSPQEFKDLETAFNQMSSELESTFKSLNESEREKTMMIAQLSHDIKTPITSIQSTVEGILDGIISEEEVNYYLNTISRQTNRLNHLVEELSFITLETMSDTAEPHKEETIYLDKLLIDILSEFQLVFEKENRQVMIDVAPDVSKLSSQYDKLSRILLNLISNAVKYSDPGSPLTIKAYSNRQDIVIDIIDQGYGIKDEDLASIFNRFYRVESSRNMKTGGHGLGLYIARQLAHQLNGDILVESQYQKGSKFSLVLKLQK

SEQ ID NO: 5189 - protein, 738 aa, Streptococcus agalactiae
ATGACGAATTCAGAAATTAAAAATGAGGCAAAAACTATATTAAGCAATCTTCAAGGTAAGAATCAACTTTTTTTACTCCCGATTCTTCTTAGTATTATTACGTTATATATATCATTTTATTATCAATATAATAATATGACACTACTTGATTTTTTTGTACCTCTTCCAGTTTATTTCTTTTACACACTTTTTATTATTTCAGTCAGTTTTGTAATGTTAGATGTCGTCAAAAATCAGAAACTAAACGTTAGATTCTCGGACAATACTTATGTATTTTCAAGCCATATTTTCTGGAAATTACTCTCAGTACTTGTTCTAAAAGGACTAATTTTATCTTTCTTTTATCTACTAAGTACTTTTGGTCTACTAATCATCATTTCAAGTTTTAGGCTACTTTTGAGTGGTAACCTTATCCTTGCCCCTGTTTTAATAGTTGTTAGTAGCCTAATTACTACTAAGGCAGTTATAAAACTCGTTCAACAATATTACTCCTATAGTATCTCAACTTTAGTATTTTACACTCAATTAGAAAGTGGAAACTATGAGGGACCATCTAAAGTACTAGTTGCTAGTCGAGAACTAATGAATGGTAATAAACTTAGACTCTTCCTTTTAGACTTAAGTTTTATTGGTTGGCATTTCCTTACAATCTTCAGTTTCGGATTAGTCTATATCTATCTCCTTCCTTACCAAACTACTGCGCGCTTAATCTTTTATAGAAACATTACAAAAAATAGC

SEQ ID NO: 5190 - protein, 246 aa, Streptococcus agalactiae
MTNSEIKNEAKTILSNLQGKNQLFLLPILLSIITLYISFYYQYNNMTLLDFFVPLPVYFFYTLFIISVSFVMLDVVKNQKLNVRFSDNTYVFSSHIFWKLLSVLVLKGLILSFFYLLSTFGLLIIISSFRLLLSGNLILAPVLIVVSSLITTKAVIKLVQQYYSYSISTLVFYTQLESGNYEGPSKVLVASRELMNGNKLRLFLLDLSFIGWHFLTIFSFGLVYIYLLPYQTTARLIFYRNITKNS

SEQ ID NO: 5191 - DNA, 1140 bp, Streptococcus agalactiae
atgactgatcatccaataaaatatcgattaattaaacaggaaaaacacacaggagccagacttggtgaaataatcacaccacatggtacatttccgacaccaatgtttatgcctgttgggacacaagcaactgttaagacacaatctcctgaagaactaaaagaaatgggttcaggaattattctatcaaatacctaccatttatggttacgtccaggtgatgaattgattgctaaagctggaggtttacataaattcatgaactgggatcaggctattctaacagacagtggaggctttcaggtttattctttggctgatagtcgaaacatcactgaagaaggagtaacctttaaaaaccatttaaatggtgcgaaaatgtttttatcaccagaaaaagctatttcaattcaaaataaccttggttctgatattatgatgagttttgatgagtgtccacaattttaccagccttatgattatgtaaaaaaatcaattgagcgaacaagccgttgggcagaacgtggattaaatgcccaccgccgtcctcatgatcaaggactatttggtattgttcaaggggcagggtttgaggatttacgtcgtcaatcagcacgagatttagtatcgatggattttccaggttattcaattggagggcttgcggtcggagaaacacatgatgagatgaatgcagttcttgattttactgttccaatgcttccgaatgataagcctcgttatttgatgggagttggtgcaccagatagtttaatagacgccgttatccgaggagtagatatgtttgactgcgtcttacctactcgtattgctcgaaatgggacatgtatgacaagtcaaggtcgtttagttgttaagaatgctaaatttgcagaagattttacgcctcttgatccaaattgtgattgctatacttgtaaaaattatacacgcgcttatatccgtcacttattgaaagcagatgaaacttttggtattcgtttgactagttaccataatctttatttccttgtcaatcttatgaaagatgtcagacaagctattatggatgataatcttctagagttccgtcaagattttatggagcgctatggttatggcacgaataaccgtaatttt

SEQ ID NO: 5192 - protein, 380 aa, Streptococcus agalactiae
MTDHPIKYRLIKQEKHTGARLGEIITPHGTFPTPMFMPVGTQATVKTQSPEELKEMGSGIILSNTYHLWLRPGDELIAKAGGLHKFMNWDQAILTDSGGFQVYSLADSRNITEEGVTFKNHLNGAKMFLSPEKAISIQNNLGSDIMMSFDECPQFYQPYDYVKKSIERTSRWAERGLNAHRRPHDQGLFGIVQGAGFEDLRRQSARDLVSMDFPGYSIGGLAVGETHDEMNAVLDFTVPMLPNDKPRYLMGVGAPDSLIDAVIRGVDMFDCVLPTRIARNGTCMTSQGRLVVKNAKFAEDFTPLDPNCDCYTCKNYTRAYIRHLLKADETFGIRLTSYHNLYFLVNLMKDVRQAIMDDNLLEFRQDFMERYGYGTNNRNF

SEQ ID NO: 5193 - DNA, 309 bp, Streptococcus agalactiae
atgatgcaagagtactttggtattggtcttgatagtagcagccgctgttaccactatcatactaaattggatattgtcgctttaaaatgtgctgtttgtcaaaaatattatgcttgttataaatgtcatgatgcactcgaggagcattgttttgcagcaacaaaatctgatgaaatgtttcctgtcttatgcggttcttgtcgtcagatgttgacattaaaagagtataaaactggtttttgtccttattgtcgtatgctttttaatccaaattgtcaacgccatgattctatttatttttcgaaggag

SEQ ID NO: 5194 - protein, 103 aa, Streptococcus agalactiae
MMQEYFGIGLDSSSRCYHYHTKLDIVALKCAVCQKYYACYKCHDALEEHCFAATKSDEMFPVLCGSCRQMLTLKEYKTGFCPYCRMLFNPNCQRHDSIYFSKE

SEQ ID NO: 5195 - DNA, 537 bp, Streptococcus agalactiae
atgtttcacacaaaaagcctaatccagatggctatgatggctactttattggtggtacttggtttcattcctgctctaccacttggtttcattccggtccctatcgtcttacaaaacctaggggttatgatggctggtgttattttgggcggaagaaaagggagtttatctattttgctcttctttcttgtcggtttagttattcctgtattctcaggtttacgttcgactatacctgtattgacaggaccaacagctggttatgttattgcttggttgtttgttcctttgcttatctcatatggtgtaaaattagtaaataaaaagaattttatagctattttccttattgtatggctagcaggggtcctttttgtagatgtagcaggagcagtttggctggcatcttatacgaacatcccattagataaatcacttcttcaaaacttagtatttctcccaggagatacaataaaagccattatagctgctgttgttgctgttaaatataaagatagttttttcttgactgaaaaa

SEQ ID NO: 5196 - protein, 179 aa, Streptococcus agalactiae
MFHTKSLIQMAMMATLLVVLGFIPALPLGFIPVPIVLQNLGVMMAGVILGGRKGSLSILLFFLVGLVIPVFSGLRSTIPVLTGPTAGYVIAWLFVPLLISYGVKLVNKKNFIAIFLIVWLAGVLFVDVAGAVWLASYTNIPLDKSLLQNLVFLPGDTIKAIIAAVVAVKYKDSFFLTEK

SEQ ID NO: 5197 - DNA, 774 bp, Streptococcus agalactiae
atgaaattaacaacgttaggttkttggggtggttatccttataaagatggaggaaccacaagttttctattaactggagaaaataattttcacttattaatagatgcgggaagtcgttcaatcaatgagttagaaaaagaaataagcccgttggatttggatgcagttatcatcagtcattatcatccagatcatgtagcagatttgggtgtgttgtatcattatcgtttgctataccctaaagataaatgggaacccaaagtattgccagtttatggacataatgaggatgattatgagttttctaaattgacattacctaacgttgctcaaggaattgcttatcataccaatggagttgagcaagttggtcccttcaatattacgtttatcaaaacagtccacccagtcgtctgctatgccatgaggattacagaaagagaaactggtcaagtattagtctttacaggagattctgggtattttgctgaccttgtaccttttacaaaaggcgcagatttatttttagcagacgtttatctttacgagggaaatgaaaatcatattgcacatttgactagtaaagaagcaggtgagattgcttataacgctaaagttaagaaattagttttaacacatgttccgcagtttccgggagaaggaataaaccccgaaaatcatttggaagaacttcgactacagtctgaaaagtatgcaggtggcatctctgttgatttagctcagccacataaatcttgggacttaggaaaacta

SEQ ID NO: 5198 - protein, 258 aa, Streptococcus agalactiae
  VARIANT 8: Xaa = Any Amino Acid
MKLTTLGXWGGYPYKDGGTTSFLLTGENNFHLLIDAGSRSINELEKEISPLDLDAVIISHYHPDHVADLGVLYHYRLLYPKDKWEPKVLPVYGHNEDDYEFSKLTLPNVAQGIAYHTNGVEQVGPFNITFIKTVHPVVCYAMRITERETGQVLVFTGDSGYFADLVPFTKGADLFLADVYLYEGNENHIAHLTSKEAGEIAYNAKVKKLVLTHVPQFPGEGINPENHLEELRLQSEKYAGGISVDLAQPHKSWDLGKL

SEQ ID NO: 5199 - DNA, 504 bp, Streptococcus agalactiae
atgcagaaatttacccaagaagaaaaagaatggtttatgacagaagctctaaaggaggcaaaatcctccttagagaaagaagaaattcctataggttgtgtcattgtaaaagatggtcatattattggaagaggacataatgctcgtgaagagtttaataaagctattttacatgctgaaatcatggctattaacaatgcaaatgagaaggtagggaattggcgcttattagatactactttatttgttactgtagaaccttgtgtaatgtgtagtggagctattggcttagctagaattccccacgttatatatggcgctaagaatacgaaatttggagcagcgggaagtctctatgatattttaagtgatagccgacttaatcatagagttgaagttgaaaccggcattttagaagatcaatgcgctaaaataatgcaggatttctttcgaaaaggacgacaacgcaagaaagaagctaaactaagtgaaaaaactaagatt

SEQ ID NO: 5200 - protein, 168 aa, Streptococcus agalactiae
MQKFTQEEKEWFMTEALKEAKSSLEKEEIPIGCVIVKDGHIIGRGHNAREEFNKAILHAEIMAINNANEKVGNWRLLDTTLFVTVEPCVMCSGAIGLARIPHVIYGAKNTKFGAAGSLYDILSDSRLNHRVEVETGILEDQCAKIMQDFFRKGRQRKKEAKLSEKTKI

SEQ ID NO: 5201 - protein, 429 aa, Streptococcus agalactiae
ATGACTATTTCAAACGCAGAATGGGAAATTATGAGAGTGGTTTGGGCACAGCAGAATACAACCAGTAATGAGATACTAGCAGTTTTACTAGAGAAGTATGATTGGACTCCTTCAACTGTCAAAACCTTATTAAGAAGGCTCTTAGATAAAGGCTACGTGAGCAGAGAAAAAATGGGAAAAGGATTTAGCTATTCTCCTTTAATTGATGAAGATTTAGCTATGATGTCAGAGGTAGATAGTGTATTGCAGAAAGTTTGCCAGACCAAACATGTTGCTATTGTTAGACACTTATTGGAAAGTATACCAATGACAGAGAAGGATCGATTAAATTTGCAAGCATCACTAGAAGCTAAGAAAGGCAAAACACTTGAACGTGTAGCTTGTAATTCTTCAACAAATAAACCCTTAACCAAAAGAAGATCTCATTGT

SEQ ID NO: 5202 - protein, 143 aa, Streptococcus agalactiae
MTISNAEWEIMRVVWAQQNTTSNEILAVLLEKYDWTPSTVKTLLRRLLDKGYVSREKMGKGFSYSPLIDEDLAMMSEVDSVLQKVCQTKHVAIVRHLLESIPMTEKDRLNLQASLEAKKGKTLERVACNSSTNKPLTKRRSHC

SEQ ID NO: 5203 - protein, 99 aa, Streptococcus agalactiae
ATGTTAACGCGTTTAATCCTTAAGGCTTCAGAGGGAGCAAAATGGTCAGACAATGGTGTTGATAAAAATAGTCCCATTATTACCATGAAAAGGCTTAAC

SEQ ID NO: 5204 - protein, 33 aa, Streptococcus agalactiae
MLTRLILKASEGAKWSDNGVDKNSPIITMKRLN

SEQ ID NO: 5205 - protein, 801 aa, Streptococcus agalactiae
ATGATTAGCCAAAAAATGGTAACCATTAACATTCCTCACATTACAACTGATATGGAAGTAAAAAATTCTCTAAAGATGGCCTTTAAAGAAAAAGTAGACGTCCCAGCAAAATATGTTAGTGCTGCAAAAGCTAAAGGTCCATTTTTAGCAGGTGTTAACGAAACGATTCCATATGAAGCGTTTGGTGGAGATGGCATGTTAACGCGTTTAATCCTTAAAGCTTCAGAGGGAGCAAAATGGTCAGACAATGGTGTTGATAAAAATAGTCCATTATTACCGTTAAAAGATTTAACTAAGGGTAAATACTTCTACCAAGTCTCTCTTAATGGCAATACAGCCGGTAAAAAAGGCCAAGCTCTCTTAGATCAAATTAAGGCAAATGGAAGCCATACTTATCAAGCAACTATCACTATTTATGGTACGAAAGATGGCAAAGTTGATATGAATACTATTTTAGGACAAAAGACAGTGATGATTCATATTAATGTCGCTAAAAAAGATATGAATAGCACATCAATGATGATGAAAAAAGATAAGATGACAATGCCTATGAAGAAAGAAATGACTTCATCTAAAATAAATACCGGTATGATGATGTCTAACAACAAGATGTCAGCTAATATGCAAATGTCATCACAAGCCAAATCAAATGATAAAGCTGGTAAAAAAATGTCTATGATGTCTAAAAATTTACCTAATACAGGTGAAACAAAGCAACAAAATGTAGGTGTGCTAGGTATGCTTAGTCTAGCCTTTGCGACAGGTCTAACTGCGCTAGGCCTTAAAAAATCTAAACAAAGA

SEQ ID NO: 5206 - protein, 267 aa, Streptococcus agalactiae
MISQKMVTINIPHITTDMEVKNSLKMAFKEKVDVPAKYVSAAKAKGPFLAGVNETIPYEAFGGDGMLTRLILKASEGAKWSDNGVDKNSPLLPLKDLTKGKYFYQVSLNGNTAGKKGQALLDQIKANGSHTYQATITIYGTKDGKVDMNTILGQKTVMIHINVAKKDMNSTSMMMKKDKMTMPMKKEMTSSKINTGMMMSNNKMSANMQMSSQAKSNDKAGKKMSMMSKNLPNTGETKQQNVGVLGMLSLAFATGLTALGLKKSKQR

SEQ ID NO: 5207 - protein, 96 aa, Streptococcus agalactiae
TTGGCTTGTGATGACATTCGCATATTAGCTGACATGTTGTTGTTAGACATCATCATACCGGTATTTATTTTAGATGCAAGTCATTTCTTTNNNNNT

SEQ ID NO: 5208 - protein, 32 aa, Streptococcus agalactiae
  VARIANT 31, 32: Xaa = Any Amino Acid
MACDDIRILADMLLLDIIIPVFILDASHFFXX

SEQ ID NO: 5209 - protein, 525 aa, Streptococcus agalactiae
ATGGAAAAGAAATTATTAAGAAAAGAAGTTTTGATAACCTTAAAATCTCAACCTCAAGCTTACAAATCAGAAGTTGACTCTAAACTTTTAGAGGCTTTTATAAAAACTAAAGCTTATCAAAATAGTTGTGTAATTGCTACTTACCTATCTTTTGACTACGAATACAATACACAACTTCTTATTAAACAAGCTTTATGTGATGGCAAACGTGTCCTTGTTCCCAAAACTTATCCAAAAGGTAAAATGATTTTTGTGGACTATCAAAAAGATAACTTGAGGGCAACACTGTTTGGCTTATTAGAACCTGTTAATGATAGAGCTGTTGAAAAAGCTAGTATAGACTTAATTCATGTGCCCGGACTTATCTTTAACAATAAAGGTTTTCGTATAGGTTATGGTGCAGGTTATTTTGATCGCTATTTGAGTGATTTTGAAGGTGATACTATTAGTACTATTTATAGGTGTCAGAGACAGGATTTTGTAGAAGAGAAGCATGATGTAGCGGTTAAGGAGGTATTATGTCTA

SEQ ID NO: 5210 - protein, 175 aa, Streptococcus agalactiae
MEKKLLRKEVLITLKSQPQAYKSEVDSKLLEAFIKTKAYQNSCVIATYLSFDYEYNTQLLIKQALCDGKRVLVPKTYPKGKMIFVDYQKDNLRATLFGLLEPVNDRAVEKASIDLIHVPGLIFNNKGFRIGYGAGYFDRYLSDFEGDTISTIYRCQRQDFVEEKHDVAVKEVLCL

SEQ ID NO: 5211 - protein, 675 aa, Streptococcus agalactiae
ATGTCTATGAAGAAGTTCGCTAAAGAGTATCCGACGACAGTACTCTTGGTCGGTCTGACAACCCTTGTTTTTTTATTGATGCAACTAACTTATGGAAGTCAAGCAGAGTCTAGCCAAGTTATTTTTCAATTTGGTGGAATACAAGGTGATTATCTAAAAGCATATCCAACAAATCTATGGAGACTAATAAGTCCTATCTTTGTTCATATTGGTTGGGAACATTTTTTATTAAATGGTTTAGCTCTATATTTCGTAGGACAAATGGGGGAAAGTATTTGGGGAAGTTTGAGATTTCTAATTCTCTATATTTTATCTGGCTTAATGGGTAATATTTTTACGCTATTTTTTACTCCACACGTGGTGGCAGCAGGAGCCTCAACGTCTTTATTTGGTGTTTTTTCTGCTATAGCAATCGCAGGTTATTTTGGAAAAAATCCTTATTTAAAACAAGTTGGAAAATCATATCAAGTGATGATCTTGTTAAATTTATTTTTTAATATCTTCACACCCGGAGTGAGTTTAGCAGGCCATGTTGGTGGTTTAGTTGGTGGAGTATTGGTGGCTATTTTTTTGACAAAACAAAACGGTTCTTTATTATTTAAAACTTGGCAAAGTATTTTAGCTTTAATGATATTTATTATTGTATCGATCAGCTTAATAGGTCTATCGTTGGTA

SEQ ID NO: 5212 - protein, 225 aa, Streptococcus agalactiae
MSMKKFAKEYPTTVLLVGLTTLVFLLMQLTYGSQAESSQVIFQFGGIQGDYLKAYPTNLWRLISPIFVHIGWEHFLLNGLALYFVGQMGESIWGSLRFLILYILSGLMGNIFTLFFTPHVVAAGASTSLFGVFSAIAIAGYFGKNPYLKQVGKSYQVMILLNLFFNIFTPGVSLAGHVGGLVGGVLVAIFLTKQNGSLLFKTWQSILALMIFIIVSISLIGLSLV

SEQ ID NO: 5213 - protein, 1041 aa, Streptococcus agalactiae
GTGAACAGAAAAATTATTGGCTTAACTCTACTATCTTTATCTGTACTAACATTAACAGCATGTGGTAATCGTTCAGATAAGTCTGCAAATAAATCAGATATCAAAGTTGCGATGGTAACTAATCAAGGTGGAGTAGACGATAAATCGTTTAATCAATCAGCTTGGGAAGGGCTACAAAAGTGGGGAAAAAAGAAGGGGTTGACAAAAGGTAATGGCTTTGATTATTTCCAGTCATCTAATGAATCAGATCATGCTAATAACCTTGATACGGCAGCCTCTAGTGGCTATAATTTAATTTTTGGTATTGGATTTGGTCTTCATGATACTATTGAAAAAGTATCAGAAAATAATAAAGATGTTAAATACGTTATTGTAGATGATATCATTAAAGGTAAAGAAAATGTAGCTAGTGTTACTTTTGCAGACAATGAAGCTGCTTACTTAGCTGGAATTGCTGCAGCTAAGACAACTAAGACAAAAACAGTTGGTTTTATCGGAGGGATGGAAGGCGTCGTTGTTAAGCGATTTGAAGCAGGATTTAAGGCTGGAGTAAAATCAATTGATCCGGCTATTAAAGTTGCGGTATCTTATGCAGGCTCATTTACAGATGCAGCTAAAGGTAAAACGATTGCTGCCACACAGTATGCAACAGGTGTTGATGTTATTTACCAGGCTGCTGGTGGTACAGGAGCAGGAATTTTTAGTGAGGCTAAAACTGAAAATGAGACCCGCAAGGAATCTAACAAAGTCTGGGTAATTGGTGTTGACAGAGATCAAAGTCAAGAAGGCAATTATGTTTCAAAAGATGGTAAGAAAGCAAACTTTGTTCTGGCATCTACTATAAAAGAGGTGGGGAAATCTCTCCAATCTGTAGCAGAATTAACAGAGAAAAAACAATATCCAGGAGGGAAAGTAACAGTTTTTGGTCTAAAGGATAGTGGTGTAGATATTAAAGAGCATCAATTGTCTAGTGAGGGATCTGTTGCTGTCAAAAAAGCTAAAGAGGATATTGTTTCAGGGAAAATACAAGTTCCTATGAAA

SEQ ID NO: 5214 - protein, 347 aa, Streptococcus agalactiae
MNRKIIGLTLLSLSVLTLTACGNRSDKSANKSDIKVAMVTNQGGVDDKSFNQSAWEGLQKWGKKKGLTKGNGFDYFQSSNESDHANNLDTAASSGYNLIFGIGFGLHDTIEKVSENNKDVKYVIVDDIIKGKENVASVTFADNEAAYLAGIAAAKTTKTKTVGFIGGMEGVVVKRFEAGFKAGVKSIDPAIKVAVSYAGSFTDAAKGKTIAATQYATGVDVIYQAAGGTGAGIFSEAKTENETRKESNKVWVIGVDRDQSQEGNYVSKDGKKANFVLASTIKEVGKSLQSVAELTEKKQYPGGKVTVFGLKDSGVDIKEHQLSSEGSVAVKKAKEDIVSGKIQVPMK

SEQ ID NO: 5215 - protein, 897 aa, Streptococcus agalactiae
ATGAAAGTCAGAAAAGCAGTTATCCCTGCCGCTGGTTTAGGAACACGTTTTTTACCTGCTACTAAAGCTTTAGCTAAAGAAATGCTTCCAATCGTTGATAAACCAACTATTCAATTTATTGTTGAAGAAGCACTAAAATCTGGAATTGAAGATATTTTAGTTGTAACTGGTAAATCAAAACGTTCTATAGAAGACCACTTTGATTCAAATTTTGAATTAGAATATAACCTAAAAGAGAAAGGGAAAAACGAACTTCTCAAACTTGTTGATGAAACAACTGGCATTCGACTCCATTTTATTCGACAAAGTCATCCTCGTGGGCTTGGAGATGCTGTGCTACAAGCAAAAGCCTTCGTTGGTAATGAACCTTTTGTTGTTATGCTAGGTGATGATCTAATGGATATTACCAATAATAAAGTTATTCCTCTCACCAAACAATTAATTAATGACTTTGAAGCTACTCATGCATCAACAATTGCTGTTATGGAAGTTCCACATGAAGATGTTTCTGCTTATGGTGTTATCGCTCCACAAGGAGAAGGAGTTAATGGTCTATATAGCGTTAACACTTTCGTTGAAAAACCTTCTCCCGAAGAGGCTCCAAGTAATTTGGCAATCATTGGTCGCTACTTGTTAACTCCAGAAATTTTTAATATTTTAGAAACTCAAAAACCTGGTGCAGGAAATGAGATTCAACTAACCGATGCTATCGATACTTTAAATAAAACGCAACGTGTTTTTGCTAGAAAATTTACAGGGGACCGTTATGACGTTGGTGACAAGTTTGGTTTTATGAAAACATCTATTGATTATGCTCTTCAACACCCACAAGTTAAAGATGACTTGAAGAAATATATCATTGATTTAGGAAAATCTCTAGAAAAAACATCTAAGAAG

SEQ ID NO: 5216 - protein, 299 aa, Streptococcus agalactiae
MKVRKAVIPAAGLGTRFLPATKALAKEMLPIVDKPTIQFIVEEALKSGIEDILVVTGKSKRSIEDHFDSNFELEYNLKEKGKNELLKLVDETTGIRLHFIRQSHPRGLGDAVLQAKAFVGNEPFVVMLGDDLMDITNNKVIPLTKQLINDFEATHASTIAVMEVPHEDVSAYGVIAPQGEGVNGLYSVNTFVEKPSPEEAPSNLAIIGRYLLTPEIFNILETQKPGAGNEIQLTDAIDTLNKTQRVFARKFTGDRYDVGDKFGFMKTSIDYALQHPQVKDDLKKYIIDLGKSLEKTSKK

SEQ ID NO: 5217 - protein, 1014 aa, Streptococcus agalactiae
ATGACAAAACAAAAAATTGCCGTTCTTGGACCTGGTTCATGGGGGACTGCTCTTGCACAAGTATTAAATGACAATGGACATGAGGTACGCTTATGGGGGAACGTGGTTGAACAAATAGAAGAGATTAATACTAGCCATACTAATCAACGTTACTTCAAAGATATTACCTTAGATTCCAAAATAAAAGCCTACACTAATCTTGAGGAAGCGATTAATAATGTTGACAGCATTCTATTCGTCGTCCCAACTAAAGTTACAAGACTTGTTGCTAAACAAGTGGCTAATCTTTTAAAGCATAAAGTTGTTATTATGCATGCTTCTAAGGGACTAGAACCTGGCACTCATGAACGACTTTCTACAATTTTAGAAGAAGAAATCTCTGAACAATATCGTAGTGATATCGTTGTTGTTTCAGGTCCCAGTCACGCTGAAGAAGCCATCGTTCGTGATATTACTTTGATTACTGCTGCTTCAAAAGATATTGAAGCAGCTAAGTATGTCCAAAAATTGTTTAGTAATCACTATTTTAGACTTTATACTAACACTGATGTCGTAGGAGTGGAAACAGCTGGTGCTCTAAAAAATATTATTGCTGTTGGTGCTGGAGCACTACACGGTCTTGGTTATGGTGATAATGCTAAAGCAGCTATTATTACGCGTGGTTTAGCTGAGATAACACGCCTTGGTGTACAATTAGGAGCCGACCCTCTCACTTTCAGTGGTTTATCCGGAGTTGGAGATTTAATTGTGACTGGTACATCTGTTCATTCTCGCAACTGGAGAGCGGGAGATGCTTTAGGACGTGGTGAGAAACTTGAAGATATTGAAAAAAATATGGGGATGGTTATTGAAGGTATCTCAACAACTAAGGTTGCTTACGAAATCGCCCAAAACTTAAATGTTTACATGCCCATTACAGAAGCTATTTATAAATCAATATATGAAGGGGCTAATATCAAAGATAGCATTTTAGATATGATGTCCAATGAATTTCGTTCAGAGAATGAATGGCAC

SEQ ID NO: 5218 - protein, 338 aa, Streptococcus agalactiae
MTKQKIAVLGPGSWGTALAQVLNDNGHEVRLWGNVVEQIEEINTSHTNQRYFKDITLDSKIKAYTNLEEAINNVDSILFVVPTKVTRLVAKQVANLLKHKVVIMHASKGLEPGTHERLSTILEEEISEQYRSDIVVVSGPSHAEEAIVRDITLITAASKDIEAAKYVQKLFSNHYFRLYTNTDVVGVETAGALKNIIAVGAGALHGLGYGDNAKAAIITRGLAEITRLGVQLGADPLTFSGLSGVGDLIVTGTSVHSRNWRAGDALGRGEKLEDIEKNMGMVIEGISTTKVAYEIAQNLNVYMPITEAIYKSIYEGANIKDSILDMMSNEFRSENEWH

SEQ ID NO: 5219 - protein, 327 aa, Streptococcus agalactiae
TTGAAAAAAACCTATCGGGTAAAAAGTGATAAGGATTTTCAAATGATTTTCAGCAGAGGTAAAAATGTTGCTAATCGAAAATTTGTTATCTACTATTTAGAAAAAGAACAAAAACACTTTCGTGTGGGAATCTCTGTTAGTAAGAAATTAGGAAATGCTGTTGTTCGTAACGCTATTAAAAGAAAAATTAGGCATGTTTTACTCTCTCAGAAAACAGCGCTGCAAGATTATGATTTTGTCGTGATTGCGCGTAAAGGTGTAGAGGAATTAGACTATCAAGCATTAGAAAAAAATCTTATACACGTTTTAAAAATAGCAGGACTCATC

SEQ ID NO: 5220 - protein, 109 aa, Streptococcus agalactiae; identical to SEQ ID NO: 832

SEQ ID NO: 5221 - protein, 813 aa, Streptococcus agalactiae
TTGAAGAAAAAACTTAAAACATTTAGCTTAATATTGCTGACAGGTTCTTTATTGGTTGCTTGCGGACGAGGAGAAGTATCTAGTCATTCAGCCACATTATGGGAGCAAATAGTTTATGCATTTGCTAAATCAATACAATGGCTCTCCTTTAACCATTCAATTGGTTTGGGAATAATCTTATTCACCCTAATAATCAGAGCGATTATGATGCCGCTTTATAATATGCAAATGAAATCCAGCCAAAAGATGCAGGAAATTCAGCCAAGGCTCAAGGAATTACAAAAAAAATATCCAGGGAAAGATCCTGATAGCCGTTTAAAGCTAAATGATGAAATGCAATCTATGTATAAAGCTGAGGGAGTTAACCCATATGCAAGTGTATTACCTCTTCTAATTCAGTTACCTGTCCTATGGGCTCTTTTCCAAGCTTTGACTAGGGTTTCTTTCTTAAAAGTAGGAACATTTTTGAGCCTAGAATTATCACAGCCGGACCCATATTATATTTTACCTGTACTGGCGGCCTTATTTACCTTTTTATCAACTTGGTTAACTAACAAAGCAGCTGTTGAAAAAAATATTGCTTTAACTCTTATGACTTATGTTATGCCGTTTATCATATTGGTAACAAGTTTTAACTTTGCTAGTGGTGTTGTTTTATACTGGACGGTGTCTAATGCTTTTCAAGTATTTCAAATTCTATTATTGAACAACCCATACAAGATTATAAAGGTTCGAGAAGAAGCAGTAAGAGTGGCACACGAAAAAGAACAAAGAGTTAAACGTGCTAAGAGAAAAGCAAGTAAGAAAAGAAAG

SEQ ID NO: 5222 - protein, 271 aa, Streptococcus agalactiae
MKKKLKTFSLILLTGSLLVACGRGEVSSHSATLWEQIVYAFAKSIQWLSFNHSIGLGIILFTLIIRAIMMPLYNMQMKSSQKMQEIQPRLKELQKKYPGKDPDSRLKLNDEMQSMYKAEGVNPYASVLPLLIQLPVLWALFQALTRVSFLKVGTFLSLELSQPDPYYILPVLAALFTFLSTWLTNKAAVEKNIALTLMTYVMPFIILVTSFNFASGVVLYWTVSNAFQVFQILLLNNPYKIIKVREEAVRVAHEKEQRVKRAKRKASKKRK

SEQ ID NO: 5223 - protein, 819 aa, Streptococcus agalactiae
ATGGTATTATTTACAGGAGCGACTGTAGAAGAAGCTATTGAAAAAGGACTACAAGAGTTAAACATTTCACGATTGAGGGCACATATAAAAGTTGTATCACGTGAGAAAAAAGGTTTTTTGGGCTTTGGTAAAAAGCCAGCAAAAGTTGAAATAGAAGGTATCACCGACGAAGTAACTGATATTAATGAATCGGTAGTGTTAAAAAATATTAAGAATGTACCGTCTAGCGTAGATGTGGTGGAAGAATATATAGAGGAGGTTGATGAAACGCTTGAAAAAGAAGACGTATCACAACCAGAACTTCCAAAAATTGATGATAAAAACGTTGTAACTACAAGTGAAGCTATTGAAAAAATTGACCTACTTCCTAATATTGAAGTAGCAGCTGCTCAGGTGACTAAATACGTTGAAAATATCATCTATGAGATGGATTTAGATGCAACAATAGAAACTACGACAAGTAAGCGACAAATAAGTCTCCAAATAGAAACGCCAGAAGCTGGGCGCATCATTGGTTATCATGGGAAAGTATTAAAATCGTTGCAGTTGTTAGCACAAAATTATCTTCATGACCGCTTTTCTAAGAGTTTTTCAGTATCCATTAATGTCCATGACTACGTTGAGCATCGTACAGAAACTTTAATTGATTTTTCTAAAAAAATAGCTAGACGTGTTTTAGAGACAAATGAACCTTACCATATGGATCCTATGAGTAACAGTGAGCGAAAAACTGTTCATAAAACAATTGCAACTATAGAGGGTGTTGAAAGTTATTCTGAAGGTAACGATCCTAATAGATTTGTAGTAGTTACTAAGAAG

SEQ ID NO: 5224 - protein, 273 aa, Streptococcus agalactiae
MVLFTGATVEEAIEKGLQELNISRLRAHIKVVSREKKGFLGFGKKPAKVEIEGITDEVTDINESVVLKNIKNVPSSVDVVEEYIEEVDETLEKEDVSQPELPKIDDKNVVTTSEAIEKIDLLPNIEVAAAQVTKYVENIIYEMDLDATIETTTSKRQISLQIETPEAGRIIGYHGKVLKSLQLLAQNYLHDRFSKSFSVSINVHDYVEHRTETLIDFSKKIARRVLETNEPYHMDPMSNSERKTVHKTIATIEGVESYSEGNDPNRFVVVTKK

SEQ ID NO: 5225 - protein, 1395 aa, Streptococcus agalactiae
ATGAGTATTCCTTTTGTAGGATTTAATGGTGATTTTGCGAACTTACAAGCACTTGAAACACCGATTTATAAGACGCTTTCTAAAGGTAGTTTCTACTATAAACCAAATGATACAACTCATAAAGACCAATTGGAGTACAATGAATCAGCTCCTTTTGAAAGCAACAACTATACTGCCTTGTTAACACAATCAGCGTCTTGGGGTTATGTTGATTATGTCAAAAATGGTGGGGAGTTAGAATTAGCACCGGAGAGTCCAAAAAGAATTATTTTAGGAACTTTTGAGAATAAGGTTGAGGATAAAACAATTCATCTTTTGGAAAGAGATGCAGCGAATAATCCATATTTTGCCATTTCTCCAAATAAAGATGGAAATAGGGACGAAATCACTCCCCAAGCAACTTTCTTAAGAAATGTTAAGGATATTTCTGCTCAAGTTCTAGATCAAAATGGAAATGTTATTTGGCAAAGTAAGTTTTTACCATCTTATCGTAAAAATTTCCATAATAATCCAAAGCAAGGTGATGGTCATTATCGTATGGATGCCCTTCAGTGGAGTGGTTTAGATAAGGATGGCAAAGTTGTAGCAGATGGTTTTTATACTTATCGCTTACGTTACACACCAGTAGCAGAAGGAGCAAATAGTCAGGAGTCAGACTTTAAAGTTCAAGTAAGTACTAAGTCACCAAATCTTCCTTCACGAGCTCAGTTTGATGAAACTAATCGAACATTAAGCTTAGCCATGCCTAAGGAAAGTAGTTATATTCCTACATATCGTCTACAATTAGTTTTATCTCATGTTGTAAAAGATGAAGAATATGGGGATGAGACTTCTTACCATTATTTCCATATAGATCAAGAAGGTAAAGTGACACTTCCTAAAACGGTTAAGATAGGAGAGAGTGAGGTTGCAGTAGCCCCTAAGGCCTTGACACTTGTTGTGGAAGATAAAGCTGGTAATTTCGCAACGGTAAAATTGTCTGACCTCTTGAATAAGGCAGTAGTATCAGAGAAAGAAAACGCTATAGTAATTTCTAACAGTTTCAAATATTTTGATAACTTGAAAAAAGAACCTATGTTTATTTCTAAAGAAGGAAAAGTAGTAAACAAGAATCTAGAAGAAACAACATTAGTTAAGCCCAAAACTACAGTTACTACTCAATCATTGTCTAAAGAAATAACTAAATCAGGAAATGAGAAAGTCCTCACTTCTACAAACAATAATAGTAGTAGAGTAGCTAAAATCATATCAGCTAAACATAATGGGGATTCTGTTAACCATACCTTACCTAGTACATCAGATAGAGCAACGAATGGTCTATTTGTTGGTACTTTGGCATTGTTATCTAGTTTACTTCTTTACTTGAAACCCAAAAAGACTAAAAATAATAGTAAA

SEQ ID NO: 5226 - protein, 465 aa, Streptococcus agalactiae
MSIPFVGFNGDFANLQALETPIYKTLSKGSFYYKPNDTTHKDQLEYNESAPFESNNYTALLTQSASWGYVDYVKNGGELELAPESPKRIILGTFENKVEDKTIHLLERDAANNPYFAISPNKDGNRDEITPQATFLRNVKDISAQVLDQNGNVIWQSKFLPSYRKNFHNNPKQGDGHYRMDALQWSGLDKDGKVVADGFYTYRLRYTPVAEGANSQESDFKVQVSTKSPNLPSRAQFDETNRTLSLAMPKESSYIPTYRLQLVLSHVVKDEEYGDETSYHYFHIDQEGKVTLPKTVKIGESEVAVAPKALTLVVEDKAGNFATVKLSDLLNKAVVSEKENAIVISNSFKYFDNLKKEPMFISKEGKVVNKNLEETTLVKPKTTVTTQSLSKEITKSGNEKVLTSTNNNSSRVAKIISAKHNGDSVNHTLPSTSDRATNGLFVGTLALLSSLLLYLKPKKTKNNSK

SEQ ID NO: 5227 - protein, 906 aa, Streptococcus agalactiae
ATGAAAACGATAAAAGATTGGCAAATAAATATTTGCTTAGCGACCTATAATGGTCAAAAATACCTTCGCCAGCAATTAGATAGCATAATACAACAAGGTTATACTGACTGGATTTGTTTAATAAAGGACGATGGATCTACTGATGATACAGTAGCTATTATTAAAGAGTATGTTAATAGAGATTCACGTTTTATATTTATTAATTCTAACGATGACAGAAAGTTAGGAAGTCACCGCAGTTTTTACGAGTTGGTTAACTATAAAAAAGCAGATTTTTATGTTTTCTCAGACCAGGATGATGTTTGGAAAGAAAATCGTTTAGAACGTTACCTTGAAGAAGCAGAGAAATTTAACCAAGAATTACCATTGCTTATTTATTCGAACTGGACTTCTGTAGATGAAAAATTAACAGTATTGAAAGAACATAATTCAGCAACAGTTATTCAAGAACAAATTGCCTTTAACCAAATAAATGGTATGGTTATTATGATGAATCATGAGTTAGCAAAGCTTTGGGAATATCGTCAAATTGGCGCCCATGATTCTTATGTTGGAACTCTAGCTTACGCCGTTGGAAATGTGGCTTATATTTCTGACAGTACAGTCCTTTGGCGTAGACAAGTAGGGGCAGAGTCGCTAAACAATTACGGGAGACAATATGGGGTGGCTACGTTTTGGCAGATGATAAATACTTCTTTTGATCGTGCTTCGCTTATTTTTGCTCAAGTATCCGATAAAATGTCCCTGGAGCGTAAACTCTTCTTTAGTCGTTTTATAGAATTAAAAAATGCCAATCTAATAAGAAGGATTTATCTTTTATCAAAATTAAAACTCCGTCGGAAATCATTGAAAGAAACAGTTGCTATGACTATCCTACTTTTAACAGGTTACGGTAAACCAAAAGCA

SEQ ID NO: 5228 - protein, 302 aa, Streptococcus agalactiae
MKTIKDWQINICLATYNGQKYLRQQLDSIIQQGYTDWICLIKDDGSTDDTVAIIKEYVNRDSRFIFINSNDDRKLGSHRSFYELVNYKKADFYVFSDQDDVWKENRLERYLEEAEKFNQELPLLIYSNWTSVDEKLTVLKEHNSATVIQEQIAFNQINGMVIMMNHELAKLWEYRQIGAHDSYVGTLAYAVGNVAYISDSTVLWRRQVGAESLNNYGRQYGVATFWQMINTSFDRASLIFAQVSDKMSLERKLFFSRFIELKNANLIRRIYLLSKLKLRRKSLKETVAMTILLLTGYGKPKA

SEQ ID NO: 5229 - protein, 1008 aa, Streptococcus agalactiae
ATGCAATCATACTATGATCGTTCTCAATCGCCACTTGACTATGCCTTGTCAGAAAAAGCTTTTCCTATGCGTTCTGTTAATTGGAATAAGCTAAACGATGACAAAGACTTAGAGGTATGGAACAGAGTAACTCAAAATTTCTGGTTACCTGAAAAGATCCCAGTTTCTAATGACCTTAATTCTTGGAGAACATTGGATGCTGATTGGCAGCAATTAATTACTCGGACTTTTACTGGTCTAACTTTATTAGATTCTGTGCAGGCTACTGTTGGTGATATTGCTCAGATTAAGCATTCTCAGACAGATCATGAACAAGTTATTTATGCTAACTTTGCCTTTATGGTAGCTATTCATGCGCGATCGTATGGAACGATTTTTTCAACCTTATGCACTAGCCAACAAATTGAGGAAGCACATGAATGGGTAGTGGATACTGAAAGCCTACAAGCTCGATCACGTATACTTATTCCTTTTTATACTGGTGACGATCCTTTGAAATCTAAGGTTGCTGCAGCCATGATGCCAGGATTTTTGTTATATGGTGGCTTTTACCTTCCTTTTTACCTTTCAGCCAGAGGAAAATTACCAAATACGTCTGATATTATTCGTTTAATTTTACGAGATAAGGTAATTCATAACTATTACAGTGGCTATAAGTATCAACAGAAAGTTGCTAAATTATCTGTAGAAAAGCAAGCCGAAATGAAGACATTTGTCTTTGACCTCCTCTATCAGTTGATTGATTTAGAAAAAGCCTATCTTTACGAACTATATGATGGTTTTGATTTGGCTGAAGATGCAATCAGGTTTAGCATTTACAATGCTGGTAAATTTTTACAAAATTTAGGATATGATTCTCCATTTACAGAAGAAGAGACTCGTATATCTCCTGAGGTTTTTGCACAACTTTCGGCGCGTGCAGATGAAAATCATGATTTCTTCTCAGGAAACGGATCTTCATATATTATGGGGATTACAGAAGAAACATTGGATGAAGATTGGGAGTTT

SEQ ID NO: 5230 - protein, 336 aa, Streptococcus agalactiae; identical to SEQ ID NO: 854

SEQ ID NO: 5231 - protein, 411 aa, Streptococcus agalactiae
ATGGATAGTACAGTGAAGGTTGTCTATTTTTCATCGAAATCTAACAATACCCATCGTTTTGTTCAAAAGTTGGCTTGTTCTAACCAGCGTATTCCATCAGATGGTAGCAGTATATTGGTTACTGAGGATTATATTTTGATTGTGCCTACTTACGCTGGAGGAGGAGATGATACCAAAGGCGCAGTTCCAAAACAGGTTGTACAGTTTTTAAATGTTAGACAAAATCGGGAACATTGCCAAGGGGTTATTTCTTCTGGAAATACCAATTTTGGTGACACTTATGCCATTGCTGGACCTATTATTGCTCGAAAATTAAATGTTCCTTTGCTTCATCAATTTGAATTACTGGGAACACAAGAAGATGTTACAAGGGTAAAGGAGTTACTTTGCCAATTCACTAGAAAGGATAAA

SEQ ID NO: 5232 - protein, 137 aa, Streptococcus agalactiae; identical to SEQ ID NO: 856

SEQ ID NO: 5233 - protein, 2166 aa, Streptococcus agalactiae
ATGACACAATCAGATGCATATCTCTCGTTGAACGCGAAGACACGCTTTAGAGATCGCACAGGTAATTATCATTTTGCTTCGGATAAAGAGGCTGTTGAACAATATATGATAGAACATGTTGAACCTAATACAATGGCGTTCACATCACTAATTGAAAAGCTAGATTATTTGGTTTCTAATAACTACTATGAATCGGACCTTCTAAAACAATATAACCTTGAGTTTATTTGCCAAATTTTTGAGCATGCATACGCTAAGAAATTTACTTTTCTAAATTTTATGGGGGCTTTAAAATTTTATAATGCTTATGCTCTTAAAACAGAAGACAATCGTTATTATTTGGAACACTATGAAGATCGTGTTGTAATGAATGCCCTGTTTTTAGCTGCTGGTGATGAAAAAGCTGCCTATGATCTAGTAGATGACATGCTAGCAAATCGCTTTCAACCAGCAACACCTACCTTTTTAAATGCAGGGAAAAAACGTCGTGGTGAATATATATCTTGCTATTTGTTGCGCATTGAAGACAATATGGAATCTATTTCTCGTGCTATTAGTACAAGCCTTCAGTTATCAAAACGAGGTGGTGGGGTAGCACTTTGCTTAACCAACTTACGGGAATTTGGTGCTCCAATAAAAGGTATTAAAAATCAAGCTACTGGTATTGTACCTGTCATGAAATTACTAGAAGATTCGTTTTCTTACGCCAATCAATTAGGACAAAGACAAGGAGCTGGTGCAGTTTACTTACATGCTCATCACCCTGAAGTGTTAACATTTTTAGATACTAAACGTGAGAATGCCGATGAGAAAATTCGAATTAAATCTCTTTCCCTGGGACTTGTTATTCCTGATATTACTTTTGAATTGGCTAAGGCAAATAAAGATATGGCCTTGTTTTCACCGTATGACATTGAGCGAGTATATGGTAAACCAATGTCTGATATCTCTATCACAGAAGAATATGAAACTTTATTAGCCAATGCGGATATTCGTAAAACCTTTATTAGTGCACGAAAACTATTTCAAACGATAGCAGAGCTTCATTTTGAATCTGGTTATCCTTATATTTTATTTGAAGATACTGTAAATGCTAAAAACCCTCACAAAAAAGAGGGACGAATTGTTATGTCTAATTTATGTTCTGAGATTGCACAAGTTAATACAGGCAGTCAATTTTCAGAAGACCTGACTTTCACTAAGGTTGGACATGATGTTTGTTGTAATTTAGGTTCTATTAATATTGCGCGTGCTATGGATCAAGCGGCGGATTTTGAAAAATTAATTGCTAATAGCATTAGAGCCCTTGATCGTGTATCTCGAACTTCTGATTTAGATAGTGCTCCATCTATTAAAAAAAGTAATGCAGCTAATCATGCTGTTGGTTTAGGTGTTATGAATTTACATGGATTTTTGGCGACTAACCATATTTATTACGATTCTCAAGAGGCTATTGATTTTACAGATTGCTTCTTTTACGCTATGGCTTATTATGCCTTTAAAGCTTCTAACCATTTAGCAAAAGAAAAAGGAACCTTTGAGGGCTTCTCGGAATCAAGTTATGCTGATGGCAGTTATTTCTATCAATATACCGAACAAAACTTTGAGCCAAAAACACAGCGTGTTAAAAATCTACTAGCTGAGTATGGCCTGACTCTACCAAGCCAAGAGGATTGGAGAAAGCTTGTGCAAAGTATTAAAGAGATAGGATTAGCTAATGCGCATTTATTAGCTGTTGCTCCGACAGGGTCAATCAGTTATCTTTCTTCTTGTACTCCGAGCCTCCAACCAGTTGTATCACCTGTCGAAGTACGCAAGGAAGGAGCACTGGGGAGGGTTTACGTACCTGCTTATAAGATTGATGCAGATAATTATGTCTACTACAAAAAAGGAGCTTATGAAGTGGGACCTGAGGCGATTATCAATATTGCAGCTGCCGCTCAAAAACACGTTGATCAAGCTATTTCGCTAACGCTTTTCATGACAGATCAAGCAACTACGCGAGATTTAAATAAAGCCTATATTCAAGCATTTAAACAAAAATGTGCCTCTATTTATTATGTACGAGTGAGACAGGACATCTTAGAAGGTAGCGAGAGTTATGATGATGATATGCTGGATGATTTCACTTCATCAGACTTAGAAGACTGTCAGTCCTGCATGATT

SEQ ID NO: 5234 - protein, 722 aa, Streptococcus agalactiae
MTQSDAYLSLNAKTRFRDRTGNYHFASDKEAVEQYMIEHVEPNTMAFTSLIEKLDYLVSNNYYESDLLKQYNLEFICQIFEHAYAKKFTFLNFMGALKFYNAYALKTEDNRYYLEHYEDRVVMNALFLAAGDEKAAYDLVDDMLANRFQPATPTFLNAGKKRRGEYISCYLLRIEDNMESISRAISTSLQLSKRGGGVALCLTNLREFGAPIKGIKNQATGIVPVMKLLEDSFSYANQLGQRQGAGAVYLHAHHPEVLTFLDTKRENADEKIRIKSLSLGLVIPDITFELAKANKDMALFSPYDIERVYGKPMSDISITEEYETLLANADIRKTFISARKLFQTIAELHFESGYPYILFEDTVNAKNPHKKEGRIVMSNLCSEIAQVNTGSQFSEDLTFTKVGHDVCCNLGSINIARAMDQAADFEKLIANSIRALDRVSRTSDLDSAPSIKKSNAANHAVGLGVMNLHGFLATNHIYYDSQEAIDFTDCFFYAMAYYAFKASNHLAKEKGTFEGFSESSYADGSYFYQYTEQNFEPKTQRVKNLLAEYGLTLPSQEDWRKLVQSIKEIGLANAHLLAVAPTGSISYLSSCTPSLQPVVSPVEVRKEGALGRVYVPAYKIDADNYVYYKKGAYEVGPEAIINIAAAAQKHVDQAISLTLFMTDQATTRDLNKAYIQAFKQKCASIYYVRVRQDILEGSESYDDDMLDDFTSSDLEDCQSCMI

SEQ ID NO: 5235 - protein, 3165 aa, Streptococcus agalactiae
ATGACAAAAAAACATCTTAAAACGCTTGCCTTGGCACTTACTACAGTATCAGTAGTGACATACAGCCAGGAGGTATATGGATTAGAAAGAGAGGAATCGGTCAAACAAGGACAAACCCAGTCAGCTTCAGAAGATGATTGGTTCGAAGAAGATAATGAGAGGAAAACAAATGTTTCTAAAGAGAATTCTACTGTTGATGAAACAGTTAGTGATTTATTTTCTGATGGAAATAGTAATAACTCTAGTTCTAAAACCGAGTCAGTGGTAAGTGACCATAAACAAGTCCCCAAAGCAAAACCAGAGGTTACACAGGAAGCAAGCAATTCTAGTAATGATGCTAGCAAAGTAGAAGTACCAAAACAGGATACAGCTTCAAAAAAGGAAACCATAGAAACATCAACTTGGGAGGCAAAAGATTTCGTAACTAGAGGGGATACTTTAGTAGGTTTTTCAAAATCTGGAATTAATAAGTTATCTCAAACATCACACTTAGTTTTACCAAGTCATGCAGCAAATGGAACTCAATTGACACAAGTAGCTAGCTTTGCTTTTACTCCAGATAAAAAGACGGCCATTGCAGAATATACAAGTAGACTAGGAGAAAATGGGAAACCGAGTCGTTTAGATATTGATCAGAAGGAAATTATTGATGAGGGAGAAATATTTAATGCTTACCAGTTGACTAAGCTTACTATTCCAAATGGTTATAAGTCTATTGGTCAAGATGCTTTTGTGGACAATAAGAATATTGCTGAGGTTAACCTTCCTGAAAGTCTCGAGACTATTTCAGACTATGCTTTTGCTCACATGTCTTTAAAACAAGTAAAGTTACCAGATAACCTGAAGGTCATTGGAGAATTAGCTTTTTTTGATAACCAGATTGGTGGTAAGCTTTACTTGCCACGTCACTTGATAAAATTAGCAGAACGCGCTTTCAAATCTAATCGTATTCAAACAGTTGAATTTTTGGGAAGTAAGCTTAAGGTTATAGGAGAAGCAAGTTTTCAAGATAATAATCTGAGTAATGTTATGCTTCCGGATGGACTTGAAAAAATAGAATCAGAAGCTTTTACAGGAAATCCAGGAGATGAACATTACAACAATCAGGTCGTATTGCGCACACGGACAGGCCAAAATCCACATCAACTTGCAACTGAGAATACTTACGTCAATCCGGACAAATCATTGTGGCGTGCAACGCCTGATATGGATTATACCAAATGGTTAGAGGAAGATTTTACCTATCAAAAAAATAGTATTACAGGTTTTTCAAATAAAGGCTTACAAAAGGTAAGACGTAATAAAAACTTAGAAATTCCAAAACAACACAATGGTATTACTATTACTGAAATTGGTGATAACGCTTTTCGCAATGTTGATTTTCAAAGTAAAACTTTACGTAAATATGATTTGGAAGAAATAAAGCTCTCCTCAACTATTCGGAAAATAGGTGCTTTTGCTTTTCAATCTAATAACTTGAAATCCTTTGAAGCAAGTGAAGATTTAGAAGAGATTAAAGAGGGAGCCTTTATGAATAATCGTATTGGAACTCTAGACTTGAAAGACAAACTTATCAAAATAGGTGATGCTGCTTTCCATATTAATCATATTTACGCCATTGTTCTTCCAGAATCTGTACAAGAAATAGGACGTTCAGCTTTTCGACAAAATGGTGCACTTCACCTTATGTTTATCGGAAATAAGGTTAAAACAATTGGTGAAATGGCTTTTTTATCCAATAAACTGGAAAGTGTAAATCTCTCTGAGCAAAAACAATTAAAGACAATTGAGGTCCAAGCTTTTTCGGATAATGCCCTTAGTGAAGTAGTCTTACCGCCAAATTTACAGACTATTCGTGAAGAGGCTTTCAAAAGGAATCATTTGAAAGAAGTGAAGGGTTCATCTACATTATCTCAGATTGCTTTTAATGCTTTTGATCAAAATGATGGGGACAAACGCTTTGATAAGAAAGTGGTTGTTAGGACACATAATAATTCTCATATGTTAGCAGATGGTGAGCGTTTTATCATTGATCCAGATAAGCTATCTTCTACAATGGTAGACCTTGAAAAGGTTTTAAAAACACTAGAAGGTTTAGATTACTCTACATTACGTCAGACTACTCAAACTCAGTTTAGAGAAATGACTACTGCAGGTAAAGCGTTGTTATCAAAATCTAACCTCCGACAAGGAGAAAAACAAAAATTCCTTCAAGAAGCACAATTTTTCCTTGATCGCGTTGATTTGGATAAAGCCATAGCTAAAGCTGAGAAGGCTTTAGTGACCAAGAAGGCAACAAAGAATGGTCATTTGCTTGAGAGGAGTATTAACAAAGCGGTATTAGCTTATAATAATAGTGCTATTAAAAAAGCTAATGTTAAGCGCTTGGAAAAAGAGTTAGATTTGCTGACAGATTTAGTCGAGGGAAAAGGACCATTAGCGCAAGCTACAATGGTACAAGGAGTTTATTTATTAAAGACGCCTTTACCATTGCCAGAATATTATATCGGATTGAACGTTTATTTTGACAAGTCTGGAAAATTGATTTATGCACTTGATATAAGTGATACTATTGGCGAGGGACAAAAAGATGCATATGGTAATCCTATATTAAATGTTGACGAGGATAATGAAGGTTATCATGCCTTGGCAGTTGCCACTTTAGCTGATTATGAAGGTCTTTATATCAAAGATATTTTAAATAGTTCCCTTGATAAGATTAAAGCAATACATCAGATTCCTTTGGCAAAATATCATAGATTAGGATTTTTCCAAGCTATCCGAAATGCAGCGGCAGAAGCAGACCGATTGATTCCTAAGACACCTAAGGGGGACCTAAATGCAGTCCCAAATTATCGTAAAAAACAAGTGGAGAAAAATTCAAAACCAGTTGATTATAAAACGCCGATTTTTGATAAGGCTTTACCTAATGAAAAGGTAGACGGCGATAGAGTGTCTAAAGGTCATAATATAAATGCGGAGACTAATAATTCTGTAGCTGTAACACCAACAAGGTCCGAGCAGCAATTACATAAGTCACAGTCTGATGTAAATTTACCTCAAACAAGTTCTAAAAATAATTTTATATACGAGATTCTAGGATACGTTAGTTTATGTTTGCTTTTTCTAGTAACTGCTGGAAAAAAAGGAAAACGAGCAAGAAAA

SEQ ID NO: 5236 - protein, 1055 aa, Streptococcus agalactiae
MTKKHLKTLALALTTVSVVTYSQEVYGLEREESVKQGQTQSASEDDWFEEDNERKTNVSKENSTVDETVSDLFSDGNSNNSSSKTESVVSDHKQVPKAKPEVTQEASNSSNDASKVEVPKQDTASKKETIETSTWEAKDFVTRGDTLVGFSKSGINKLSQTSHLVLPSHAANGTQLTQVASFAFTPDKKTAIAEYTSRLGENGKPSRLDIDQKEIIDEGEIFNAYQLTKLTIPNGYKSIGQDAFVDNKNIAEVNLPESLETISDYAFAHMSLKQVKLPDNLKVIGELAFFDNQIGGKLYLPRHLIKLAERAFKSNRIQTVEFLGSKLKVIGEASFQDNNLSNVMLPDGLEKIESEAFTGNPGDEHYNNQVVLRTRTGQNPHQLATENTYVNPDKSLWRATPDMDYTKWLEEDFTYQKNSITGFSNKGLQKVRRNKNLEIPKQHNGITITEIGDNAFRNVDFQSKTLRKYDLEEIKLSSTIRKIGAFAFQSNNLKSFEASEDLEEIKEGAFMNNRIGTLDLKDKLIKIGDAAFHINHIYAIVLPESVQEIGRSAFRQNGALHLMFIGNKVKTIGEMAFLSNKLESVNLSEQKQLKTIEVQAFSDNALSEVVLPPNLQTIREEAFKRNHLKEVKGSSTLSQIAFNAFDQNDGDKRFDKKVVVRTHNNSHMLADGERFIIDPDKLSSTMVDLEKVLKTLEGLDYSTLRQTTQTQFREMTTAGKALLSKSNLRQGEKQKFLQEAQFFLDRVDLDKAIAKAEKALVTKKATKNGHLLERSINKAVLAYNNSAIKKANVKRLEKELDLLTDLVEGKGPLAQATMVQGVYLLKTPLPLPEYYIGLNVYFDKSGKLIYALDISDTIGEGQKDAYGNPILNVDEDNEGYHALAVATLADYEGLYIKDILNSSLDKIKAIHQIPLAKYHRLGFFQAIRNAAAEADRLIPKTPKGDLNAVPNYRKKQVEKNSKPVDYKTPIFDKALPNEKVDGDRVSKGHNINAETNNSVAVTPTRSEQQLHKSQSDVNLPQTSSKNNFIYEILGYVSLCLLFLVTAGKKGKRARK

SEQ ID NO: 5237 - protein, 387 aa, Streptococcus agalactiae
ATGATTACACAAGAAATGAAAGAGATTATTAATAGTCAGTTAGCAATGGTCGCGACGGTTGATGCTAAAGGTCAACCCAATATTGGTCCAAAACGTTCTATGCGTCTCTGGGATGATAAAACGTTTATTTATAATGAAAATACAGATGGTCAAACTCGTATTAACATTGAAGATAATGGGAAAATTGAAATTGCCTTTGTTGATCGTGAACGTCTTTTAGGTTACAGGTTTGTGGGAACTGCTGAAATTCAAACAGAAGGTGCTTATTACGAAGCAGCTAAAAAATGGGCAGAAGGACGCATGGGGGTTCCGAAAGCAGTTGGTATTATTCATGTCGAACGTATTTTTAATTTACAATCTGGTGCTAATGCAGGTAAAGAAATCACT

SEQ ID NO: 5238 - protein, 129 aa, Streptococcus agalactiae
MITQEMKEIINSQLAMVATVDAKGQPNIGPKRSMRLWDDKTFIYNENTDGQTRINIEDNGKIEIAFVDRERLLGYRFVGTAEIQTEGAYYEAAKKWAEGRMGVPKAVGIIHVERIFNLQSGANAGKEIT

SEQ ID NO: 5239 - protein, 489 aa, Streptococcus agalactiae
ATGCTATCATTTCAAATTGTTGAAAAGCCAGCAATGATACTTGCTGGAGTAACTTTAGAAAATGTAAAGTCAAATCAAGAATGTCCTAAACTTTGGGAAAAGTTACATAAACAATATAATCCAGCAAAACTAAAAGAAAAAGGTATCCAGCAAGCCATTGGCATTTGTAAAACACAACCTGATTTTCGTTTCGATTACAGCGCCACTTATCGAGTAGAGACAAGTGTCCAAGCCCCAAAAGGGTTAGAAATTATTAGGATCCCAAGCGCTACCTATGCAGTCATTTCTGTTAAAGGTCCAATGCCATCGAGTCTTCAAGAAACATGGCGAAAAATAATACAAGGATTTTTTCAAGAGAATAATCTAAAACCAGCTAACTCGCCAAACTTAGAAATTTATTCATCTCAACATCCACAAGATACTGATTATCAAATGGAAATTTGGCTTGCTATCGCAGATATTACTAATAACTCGAAAACAAACTTAATC

SEQ ID NO: 5240 - protein, 163 aa, Streptococcus agalactiae
MLSFQIVEKPAMILAGVTLENVKSNQECPKLWEKLHKQYNPAKLKEKGIQQAIGICKTQPDFRFDYSATYRVETSVQAPKGLEIIRIPSATYAVISVKGPMPSSLQETWRKIIQGFFQENNLKPANSPNLEIYSSQHPQDTDYQMEIWLAIADITNNSKTNLI

SEQ ID NO: 5241 - protein, 282 aa, Streptococcus agalactiae
ATGCTTACTATTCAAGAAATAAAAGATACAACCTTTGAATTACAAGAAAATTTTAGAAGGTTAAATTATCCTATTAAACAAGTTACTAAAGACTTGCAACTTAATATCAGTGAAGTTGAATCTCTTTTAAGTCTTGATATTACTTATCCTGGAGATGTTTGGATGCTGAGAGATTATCTAGAAGATATGTTGAAAAAAGAGGGTAAAGAAGTTTATCCATTTTCTAGATTAGCATCTCATTCAGCAAATCGTTGGTACCCTTATGAGACACCATGGCGTTAT

SEQ ID NO: 5242 - protein, 94 aa, Streptococcus agalactiae
MLTIQEIKDTTFELQENFRRLNYPIKQVTKDLQLNISEVESLLSLDITYPGDVWMLRDYLEDMLKKEGKEVYPFSRLASHSANRWYPYETPWRY

SEQ ID NO: 5243 - protein, 315 aa, Streptococcus agalactiae
ATGAAAGAAAAACAAACAGCCGGACGTCGTCAATTAGAAGAATTTGCACCTGAATTTGCCAGATATAATGATGATATTTTATTTGGTGAGGTTTGGGCAAAAGAGGATCATTTAACAGATAAAACACGTTCTATTATTACTATATCTGCCTTAATTAGCGCAGGAAATCTTGAACAGTTAGAGCATCATCTTCAATTTGCCAAACAAAACGGAGTTACTAAAGAAGAAATTGCTGACATTATCACTCACCTTGCTTTTTATGTTGGATGGCCAAAAGCTTGGTCAGCCTTTAATAAAGCTAAGGAAATTTGGATA

SEQ ID NO: 5244 - protein, 105 aa, Streptococcus agalactiae
MKEKQTAGRRQLEEFAPEFARYNDDILFGEVWAKEDHLTDKTRSIITISALISAGNLEQLEHHLQFAKQNGVTKEEIADIITHLAFYVGWPKAWSAFNKAKEIWI

SEQ ID NO: 5245 - protein, 393 aa, Streptococcus agalactiae
ATGCAAGAAACAACTAAGTCTATCTTTCCTAAGGGTGAAAAAAATCCATATGGTGAATTCTTTATTGGGCAATCCTATCTCGCAGCATTAGCAAAATCTCCAGATGGGAATGTTTCAGTTGGAAATGTAACCTTTGAAGCAGGCTGTCGTAATAATTGGCATGTTCATTTGGACGGTTATCAAATCCTTCTCGTTACAGAAGGTTCAGGTTGGTACCAAGAAGAAGGAAAAGAAGCAGTGTCATTAAAACCAGGCGACGTTATCGTTACAGATAAAGGTGTTAGACATTGGCATGGTGCTAAAAAAGATTCTGAATTTGCACATATTGCGATTACAGCTGGTAAGAGTGAGTTTTATGAAGCTGTTAGTGATGAAGAATATTCAAGACTAGGT

SEQ ID NO: 5246 - protein, 131 aa, Streptococcus agalactiae; identical to SEQ ID NO: 870

SEQ ID NO: 5247 - protein, 387 aa, Streptococcus agalactiae
ATGCATATCAAAGAAGTTAGTAAAAAGACTGGCATTACGTCAGATACCATCAGGTATTATGAGAGAATTAATCTTATTCCCCCTATTCATCGGAGTGAATCAGGAATTCGTGAGTTCACACAAAACGATATTGATATTTTAGAATTTGTCCGCTATTTTAGAGGCGCAGGTGTTTCCGTTGAAAGTCTCATTGATTATATTCATTTGGTTGAAAAAGGCGATTCCACTATCCCAGCTAGGCTAGAAATTTTAAAAGATGAACGCGACAATCTTGAAGATAGGCTTCAAGGCCTCCAAGAAGCACTTAATCGTCTAAATCACAAAATAGACAATTATCAAAATAAAGTTGTTCCTAGAGAACAAGAACTTTTTGATCCAACAACGAAA

SEQ ID NO: 5248 - protein, 129 aa, Streptococcus agalactiae; identical to SEQ ID NO: 872

SEQ ID NO: 5249 - protein, 729 aa, Streptococcus agalactiae
TTGTACAAATCATCAAGCTGCAAAAAATGTAGATACCAAGGTCAATATCTACGTTATACTAATGCAAACTGGGCATTGGTTAAGATCCCAGGACAACCTTCTGATTATGATAATGAGACTCTTAACTCTCTGCTCACCTTATCAGATGTAATGGCAACTGGTTATCATGCTGCAGTAACTGCAGAAGTTAAAGAAGGTGATACGGTAGTTGTCATGGGAGATGGTGCTGTTGGACTCTGTGGTGTTATCGCTGCTAAAATGTTAGGTGCTAACCGTATCATTGCAATGAGTCGTCACAAAGATAGGCAAGAACTAGCATTGACTTTTGGTGCAACGGATATTGTCGAAGAACGGGGTGACGAAGCCGTTAAACGTGTTTTAGATTTAACCAATCAAGCAGGTGCCGATGCTATTTTAGAATGTGTTGGTACAGAGCAGTCTGTTGATACAGCTACCCAAATTGCTAGGCCTGGTGCTGTCATAGGACGTGTTGGTATCCCACAAAATCCAGACATGAATACCAATAATTTATTCTGGAAAAATATCGGCCTTAGAGGTGGCATTGCTTCTGTAACAACATTTGATAAATCTGTCCTTTTAGATGCTGTTCTAACTCATAAAATTAACCCAGGCTTAGTTTTTACAAAATCCTTTGTATTAGATGATATTCAAAAGGCTTATGAAGCAATGGATAAACGTGACGCTATCAAATCCTTAGTGATTGTTGAC

SEQ ID NO: 5250 - protein, 243 aa, Streptococcus agalactiae
MYKSSSCKKCRYQGQYLRYTNANWALVKIPGQPSDYDNETLNSLLTLSDVMATGYHAAVTAEVKEGDTVVVMGDGAVGLCGVIAAKMLGANRIIAMSRHKDRQELALTFGATDIVEERGDEAVKRVLDLTNQAGADAILECVGTEQSVDTATQIARPGAVIGRVGIPQNPDMNTNNLFWKNIGLRGGIASVTTFDKSVLLDAVLTHKINPGLVFTKSFVLDDIQKAYEAMDKRDAIKSLVIVD

SEQ ID NO: 5251 - protein, 453 aa, Streptococcus agalactiae
ATGAAAGTTGCTACATTTATTGAACCTGGCAAAATGGTTATAACTGATACACCAAAACCAGTCATTGAACAAGAGACAGATGCTGTTATCAAAATTGTTAGAGCCTGTGTTTGTGGTTCAGACTTGTGGTGGTATCGTGGTATTTCAAAACGTGAAAGTGGCTCTTTTGCAGGTCATGAGGCTATTGGTATCGTTGAGGAAGTTGGTACTAAAGTAACTGACGTGTCAAAAGGTGATTTTGTTATTGTTCCCTTTACACATGGCTGTGGCCAATGTCCGTCTTGTAAGGCTGGATTTGATGGAAATTGTACAAATCATCAAGCTGCAAAAAATGTAGATACCAAGGTCAATATCTACGTTATACTAATGCAAACTGGGCATTGGTTAAGATCCCAGGACAACCTTCTGATTATGATAATGAGACTCTTAACTCTCTGCTCACCTTATCAGATG

SEQ ID NO: 5252 - protein, 151 aa, Streptococcus agalactiae
MKVATFIEPGKMVITDTPKPVIEQETDAVIKIVRACVCGSDLWWYRGISKRESGSFAGHEAIGIVEEVGTKVTDVSKGDFVIVPFTHGCGQCPSCKAGFDGNCTNHQAAKNVDTKVNIYVILMQTGHWLRSQDNLLIMIMRLLTLCSPYQM

SEQ ID NO: 5253 - protein, 309 aa, Streptococcus agalactiae
TTGATTGATTACTGTCAAAGTAAAGGTATTCAAGTTGAAGCTTATTCACCAATTGCACATGGACAAGCATTGAAATCTGATGGTATTCAAAAAATGGCTGAAAAATATGGGGTTAGTGTTGCTCAATTATGTATTCAATATTTACTACAATTAAACCTGATCGTTTTACCAAAGGCTTCTAGTAAAGAACATTTACAGTCTAATCTAGACTTTGACTTTGTAATTAGTGACGAAGATATGTCGATATTAAAATCACTTATGTTTGACGATTATGGGGAATTTTCTAACTTCCCTGTTTTTAGTGAAAAA

SEQ ID NO: 5254 - protein, 103 aa, Streptococcus agalactiae
MIDYCQSKGIQVEAYSPIAHGQALKSDGIQKMAEKYGVSVAQLCIQYLLQLNLIVLPKASSKEHLQSNLDFDFVISDEDMSILKSLMFDDYGEFSNFPVFSEK

SEQ ID NO: 5255 - protein, 381 aa, Streptococcus agalactiae
ATGACAGATACAATGATATTAAATGACAATCATAAAATACCAACTTTAGGTTTAGGTACGTGGATGATAGATAATGATAGGGTAGCTCAAGTTGTTAAAGATGCTATCGAATTAGGTTACCGCCACATTAATACTGCACAAGCATACAACAATGAAAAAGGTGTCGGTGTAGGGATTAAAGAATCTGGTATTACACGTGAATCTTTATTTGTTACGACTAAAATTGCCGCTGAACATAAAAATTATGAAAGTGCTACAAAATCAATTGATCAATCACTAGAAGCTTTAGGGCTTGATTGTATTGATTTAATGATTATTCATAGTCCACAGCCTTGGAAGGAATGGCGTGAAACAGATAAACATTTTGACCAAGGAAATTTA

SEQ ID NO: 5256 - protein, 127 aa, Streptococcus agalactiae
MTDTMILNDNHKIPTLGLGTWMIDNDRVAQVVKDAIELGYRHINTAQAYNNEKGVGVGIKESGITRESLFVTTKIAAEHKNYESATKSIDQSLEALGLDCIDLMIIHSPQPWKEWRETDKHFDQGNL

SEQ ID NO: 5257 - protein, 859 aa, Streptococcus agalactiae
ATGACATCAAACAAAAAAGTGGCTATCGCTTTTATATTAAATATCAGCTTTTCCGTCCTTGAATTCATCTTTGGAAGTCTATTCTTCTCAGGAGCTATCTTAGCCGATGCTGTTCATGATTTTGGTGATGCAATAGCTATTGGCATCTCAGCTACTTTAGAAAAAAAATCTAAGAAAGATGAAGATACGATATTTTCATTAGGTTATAAACGTTTTAGCCTTTTAGGAGCTCTTATCACAAGTCTAATTCTTATAAGTGGATCTATCTTAGTCATGATAGAAAATATTCCAAAATTGTGGCATCCTACTCCTGTTAATTATCACGGCATGTTTATTCTAGCTGTCATCGCTATTATCATTAATGGTCTAGCTAGTTTTATTCTCCATTCTGGTCAAAGTAAACATGAGGAAATATTAAGCCTTCATTTTTTGGAAGATATTCTAGGGTGGTTAGCTATTATTGTTATATCTCTTATCTTAAATTGGAAACCGTTGTATATCCTTGATCCATTATTATCAGTTGCCATATCTACTTTCATCTTATCTAAAGCACTTCCTAAATTACTATCAACCCTGAAACTTTTTTTAGATGGTGTTCCAGATTCCATAGATTACGCTGCATTACATGATGAACTTAAGGGACTTTCGCAAGTAAGATCTATCAATCAACTCAATATCTGGTCAATGGATGGTATTGATAATCGAGCAATCATTCACTGTTGCTTAATCAATTGATATCTGAAAAAGATGTAAAAGAGCTATTCGAACGATTTGCCAACATTATAAGATAAACGATGTTACTGTTGAAATCGATTATTCTTTAAGAGAACATCAAAATCATTGCAAACCATTAAAAAAC

SEQ ID NO: 5258 - protein, 287 aa, Streptococcus agalactiae
  VARIANT 243, 251: Xaa = Any Amino Acid
MTSNKKVAIAFILNISFSVLEFIFGSLFFSGAILADAVHDFGDAIAIGISATLEKKSKKDEDTIFSLGYKRFSLLGALITSLILISGSILVMIENIPKLWHPTPVNYHGMFILAVIAIIINGLASFILHSGQSKHEEILSLHFLEDILGWLAIIVISLILNWKPLYILDPLLSVAISTFILSKALPKLLSTLKLFLDGVPDSIDYAALHDELKGLSQVRSINQLNIWSMDGIDNRAIIHCCLXQLISEKDXKRAIRTICQHYKINDVTVEIDYSLREHQNHCKPLKN

SEQ ID NO: 5259 - protein, 522 aa, Streptococcus agalactiae
ATGGTAAAAGATAGACAAATTCAGAAAACAAAAGTAGCGATTTATAATGCTTTTATAAGCTTGCTACAGGAAAATGATTATTCTAAAATAACGGTTCAAGATGTAATCGGACTTGCAAATGTAGGAAGATCAACTTTTTACTCTCACTATGAAAGCAAAGAAGTGTTACTCAAGGAGCTCTGTGAAGACCTTTTTCACCACTTATTTAAGCAGGGTAGAGATGTTACGTTTGAAGAGTATTTAGTTCATATCTTAAAACATTTTGAACAAAATCAAGATAGTATCGCTACGTTATTATTATCTGACGATCCCTATTTTTTATTACGCTTTAGAAGTGAATTAGAACACGATGTTTACCCTAGATTGCGTGAGGAGTATATTACAAAGGTGGACATTCCTGAAGATTTCTTAAAACAATTTCTTTTATCCAGTTTTATCGAGACCTTAAAGTGGTGGCTTCATCAAAGACAGAAAATGACTGTTGAAGATTTACTAAAATATTATTTAACTATGGTAGAGAGG

SEQ ID NO: 5260 - protein, 174 aa, Streptococcus agalactiae; identical to SEQ ID NO: 886

SEQ ID NO: 5261 - protein, 1191 aa, Streptococcus agalactiae
ATGATTGATTTTCTACTGTTGAAATCATTACACAGTCTTCTAGGTCTAACTATTACTGTTTGTGATCAAAATTTTTCTGTTATCAGAGAGTATAAATCCGAGAAAACTATTTCACTTTTTTACAATCATTACCTTATTTTAAGTAACTTTAGTAAAACTCAACATGATTTTTTATTTCATTATGGCTCTTTAGGAGAACTTTTTCTTGTCCACCATATTCAACAATATTATATTATCATCGGTCCCTGGCGTAGCAATGTTATTGACCCTTTACTTCTTAAGAAAAAGCTGACTGAAACACAAATCAATGCTAGTGAACAAAACTACTTTATTGATAGACTATCCCAATTACCTTTCTTCTCACTTAGTCAAATCCGAGAATTACTAATAGTAACCAATTATTGTCTAACTGGGGTTGTGAAAGATAAATTATCAGAGCCCTTACATTACTACACGAAAGGGTGGAGCAACTCCTTTGATCTAGATAAAATTAAGCAATTTTCTAAACAGAATATGAGTTCTTACAAATATCAGTATCATTTTGAAAATAATATTCTCAAAGCTGTTAAATCAGGTAGTGAATTTCTTTTGAAAGAAACAGTGGAACAATTTAGCAATTCTATCGTACCTATAATCAGTGGAGATGAATTGCGATCTGAAAAAAACTACTCCATCATGATTTATGATCGTCTCTCACAGGCTACCATCCAAGCAGGACTTGATATCGAAACAGCTTATCGAGCACGAGATCGTTTTATAAAAGAAAACGAGTCAACTATAAGTCTAAATGAAGTTTTAAAATTACGTGATACTGCTATCTTATTCTATACTCAACAAGTTCATTCTTTAAAAAAACATCTCGAAACCCCTCATTCTCAAACTATTGTCGCAGTTATTCGATATCTTGAAAATAATCTAAATCGCTTTATTAAAACAGAAGAAATAGCTAAAGAATGTCACATGAGTGAATCGAAGTTACGAAAACTATTTAAGCAAGAAAAACACATCACTATTCAACAATATTTTCTAAACTTAAAAATCGAAGCTGCTAAGCAATTACTAGATGAAAATAAGAAAGTAGAAGAAGTTTCCAATTTACTTGGATTTTCCACTTCTTCTAATTTTTCAAGGACATTTAAAAAAATAGTGGGAATTAGCCCACTAGAATATAAGCAAAAGCCTAAGACAATA

SEQ ID NO: 5262 - protein, 397 aa, Streptococcus agalactiae
MIDFLLLKSLHSLLGLTITVCDQNFSVIREYKSEKTISLFYNHYLILSNFSKTQHDFLFHYGSLGELFLVHHIQQYYIIIGPWRSNVIDPLLLKKKLTETQINASEQNYFIDRLSQLPFFSLSQIRELLIVTNYCLTGVVKDKLSEPLHYYTKGWSNSFDLDKIKQFSKQNMSSYKYQYHFENNILKAVKSGSEFLLKETVEQFSNSIVPIISGDELRSEKNYSIMIYDRLSQATIQAGLDIETAYRARDRFIKENESTISLNEVLKLRDTAILFYTQQVHSLKKHLETPHSQTIVAVIRYLENNLNRFIKTEEIAKECHMSESKLRKLFKQEKHITIQQYFLNLKIEAAKQLLDENKKVEEVSNLLGFSTSSNFSRTFKKIVGISPLEYKQKPKTI

SEQ ID NO: 5263 - protein, 1410 aa, Streptococcus agalactiae
ATGTTTAGAAGGTCTAAAAATAACAGTTATGATACTTCACAGACGAAACAACGGTTTTCAATTAAGAAGTTCAAGTTTGGTGCAGCTTCTGTACTAATTGGTATTAGTTTTTTAGGAGGTTTTACTCAAGGGCAATTTAATATTTCTACAGATACTGTGTTTGCAGCTGAGGTGATTTCAGGAAGTGCTGCTACATTAAATTCCGCTTTAGTAAAAAATGTATCTGGTGGAAAAGCGTATATAGATATATATGATGTTAAAAATGGAAAAATAGATCCTTTAAACTTAATTGTTTTAACCCCTTCTAATTATTCAGCAAACTATTATATAAAACAAGGTGGAAGGATTTTCACGAGTGTTAATCAACTTCAAACACCAGGTACAGCTACTATTACGTACAACATCCTTGATGAAAATGGAAATCCTTATACTAAAAGTGATGGTCAAATAGATATTGTAAGTCTTGTAACAACAGTATATGATACTACAGAATTAAGGAATAATATCAACAAAGTAATTGAAAATGCAAATGATCCTAAATGGAGCGATGATAGTCGAAAAGATGTACTGAGCAAGATAGAAGTTATAAAAAATGATATTGATAATAATCCAAAAACTCAATCTGATATTGATAATAAAATTGTTGAGGTTAATGAATTAGAGAAATTGTTAGTATTACCAGTACCGGATAAAGATAAATATGATCCAACAGGAGGGGAAACAACAGTACCCCAAGGGACACCAGTTTCAGATAAAGAAATCACAGACTTAGTTAAGATTCCAGATGGCTCAAAAGGGGTTCCGACAGTTGTTGGTGATCGTCCAGATACTAACGTTCCTGGAGATCATAAAGTAACGGTTGATGTAACTTATCCAGATGGAACAAAGGATACAGTAGAAGTAACGGTTCATGTGACACCAAAACCAGTACCGGATAAAGATAAATATGATCCAACAGGAGGGGAAACAACAGTACCCCAAGGGACACCAGTTTCAGATAAAGAAATCACAGACTTAGTTAAGATTCCAGATGGCTCAAAAGGGGTTCCGACAGTTGTTGGTGATCGTCCAGATACTAACGTTCCTGGAGATCATAAAGTAACGGTTGATGTAACTTATCCAGATGGAACAAAGGATACAGTAGAAGTAACGGTTCATGTGACACCAAAACCAGTACCGGATAAAGATAAATATGATCCAACAGGAGGGGAAACAACAGTACCCCAAGGGACACCAGTTTCAGATAAAGAAATCACAGACTTAGTTAAGATTCCAGATGGCTCAAAAGGGGTTCCGACAGTTGTTGGTGATCGTCCAGATACTAACGTTCCTGGAGATCATAAAGTAACGGTTGATGTAACTTATCCAGATGGAACAAAGGATACAGTAGAAGTAACGGTCATCNNNNNT

SEQ ID NO: 5264 - protein, 470 aa, Streptococcus agalactiae
  VARIANT 469, 470: Xaa = Any Amino Acid
MFRRSKNNSYDTSQTKQRFSIKKFKFGAASVLIGISFLGGFTQGQFNISTDTVFAAEVISGSAATLNSALVKNVSGGKAYIDIYDVKNGKIDPLNLIVLTPSNYSANYYIKQGGRIFTSVNQLQTPGTATITYNILDENGNPYTKSDGQIDIVSLVTTVYDTTELRNNINKVIENANDPKWSDDSRKDVLSKIEVIKNDIDNNPKTQSDIDNKIVEVNELEKLLVLPVPDKDKYDPTGGETTVPQGTPVSDKEITDLVKIPDGSKGVPTVVGDRPDTNVPGDHKVTVDVTYPDGTKDTVEVTVHVTPKPVPDKDKYDPTGGETTVPQGTPVSDKEITDLVKIPDGSKGVPTVVGDRPDTNVPGDHKVTVDVTYPDGTKDTVEVTVHVTPKPVPDKDKYDPTGGETTVPQGTPVSDKEITDLVKIPDGSKGVPTVVGDRPDTNVPGDHKVTVDVTYPDGTKDTVEVTVIXX

SEQ ID NO: 5265 - protein, 489 aa, Streptococcus agalactiae
GTGAAAGATAAATTATCAGAGCCCTTACATTACTACACGAAAGGGTGGAGCAACTCCTTTGATCTAGATAAAATTAAGCAATTTTCTAAACAGAATATGAGTTCTTACAAATATCAGTATCATTTTGAAAATAATATTCTCAAAGCTGTTAAATCAGGTAGTGAATTTCTTTTGAAAGAAACAGTGGAACAATTTAGCAATTCTATCGTACCTATAATCAGTGGAGATGAATTGCGATCTGAAAAAAACTACTCCATCATGATTTATGATCGTCTCTCACAGGCTACCATCCAAGCAGGACTTGATATCGAAACAGCTTATCGAGCACGAGATCGTTTTATAAAAGAAAACGAGTCAACTATAAGTCTAAATGAAGTTTTAAAATTACGTGATACTGCTATCTTATTCTATACTCAACAAGTTCATTCTTTAAAAAAACATCTCGAAACCCCTCATTCTCAAACTATTGTCGCAGTTATTCGATATCTT

SEQ ID NO: 5266 - protein, 163 aa, Streptococcus agalactiae
MKDKLSEPLHYYTKGWSNSFDLDKIKQFSKQNMSSYKYQYHFENNILKAVKSGSEFLLKETVEQFSNSIVPIISGDELRSEKNYSIMIYDRLSQATIQAGLDIETAYRARDRFIKENESTISLNEVLKLRDTAILFYTQQVHSLKKHLETPHSQTIVAVIRYL

SEQ ID NO: 5267 - protein, 914 aa, Streptococcus agalactiae
GTGACACCAAAACCAGTACCGGATAAAGATAAATATGATCCAACAGGAGGGGAAACACAGTACCCCAAGGGACACCAGTTTCAGATAAAGAAATCACAGACTTAGTTAAGATTCCAGATGGCTCAAAAGGGGTTCCGACAGTTGTTGGTGATCGTCCAGATACTAACGTTCCTGGAGATCATAAAGTAACGGTTGATGTAACTTATCCAGATGGAACAAAGGATACAGTAGAAGTAACGGTTCATGTGACACCAAAACCAGTACCGGATAAAGATAAATATGATCCAACAGGAGGGGAAACAACAGTACCCCAAGGGACACCAGTTTCAGATAAAGAAATCACAGACTTAGTTAAGATTCCAGATGGCTCAAAAGGGGTTCCGACAGTTGTTGGTGATCGTCCAGATACTAACGTTCCTGGAGATCATAAAGTAACGGTTGATGTAACTTATCCAGATGGAACAAAGGATACAGTAGAAGTAACGGTTCATGTGACACCAAAACCAGTACCGGATAAAGATAAATATGATCCAACAGGAGGGGAAACAACAGTACCCCAAGGGACACCAGTTTCAGATAAAGAAATCACAGACTTAGTTAAGATTCCAGATGGCTCAAAAGGGGTTCCGACAGTTGTTGGTGATCGTCCAGATACTAACGTTCCTGGAGATCATAAAGTAACGGTTGATGTAACTTATCCAGATGGCTCAAAAGATACTGTAACAGTAACTATCCATGTGACACCAACACCAGATAAGGATAGATATGATCCAACAGGTAAAGCTCAGCAAGTCAACGGTAAAGGAAATAAACTACCAGCAACAGGTGAGAATGCAACTCCATTCTTTAATGTTGCAGCTTTGACAATTATATCATCAGTTGGTTTATTATCTGTTTCTAAGAAAAAAGAGGAT

SEQ ID NO: 5268 - protein, 305 aa, Streptococcus agalactiae
  VARIANT 20: Xaa = Any Amino Acid
MTPKPVPDKDKYDPTGGETXVPQGTPVSDKEITDLVKIPDGSKGVPTVVGDRPDTNVPGDHKVTVDVTYPDGTKDTVEVTVHVTPKPVPDKDKYDPTGGETTVPQGTPVSDKEITDLVKIPDGSKGVPTVVGDRPDTNVPGDHKVTVDVTYPDGTKDTVEVTVHVTPKPVPDKDKYDPTGGETTVPQGTPVSDKEITDLVKIPDGSKGVPTVVGDRPDTNVPGDHKVTVDVTYPDGSKDTVTVTIHVTPTPDKDRYDPTGKAQQVNGKGNKLPATGENATPFFNVAALTIISSVGLLSVSKKKED

SEQ ID NO: 5269 - protein, 93 aa, Streptococcus agalactiae
ATGTTACAAACTGGTTTTAGGTTTGGTGAAGCAATGGCAATAACTTGGGATGATATTGATTTTGAAAGAAATAGTATTTATACATATCGAAGA

SEQ ID NO: 5270 - protein, 31 aa, Streptococcus agalactiae
MLQTGFRFGEAMAITWDDIDFERNSIYTYRR

SEQ ID NO: 5271 - protein, 144 aa, Streptococcus agalactiae
TTGCTTGAACTAAAATTTCAACAAGAAAGAATGCTGAAAGCTTTGCATATAAAAAATACAGATCAATTGATTTTTTATGACTATAGGTTTGGTATGATATCAAATAATGCTGTTAACAAATTCTTGGCAAGCTCATTGGAAAAT

SEQ ID NO: 5272 - protein, 48 aa, Streptococcus agalactiae
MLELKFQQERMLKALHIKNTDQLIFYDYRFGMISNNAVNKFLASSLEN

SEQ ID NO: 5273 - protein, 135 aa, Streptococcus agalactiae
ATGTCATCAACAGGTGCTAGACATACTTATAGAAGTTATTTGTTGGCTAACGGAGTAGATATTTGGGCAGTTGCAAAATTAATGGGGCATAAAGATATCAAACAATTAATAGAAACATATGGTCATTTGCTTCTG

SEQ ID NO: 5274 - protein, 45 aa, Streptococcus agalactiae
MSSTGARHTYRSYLLANGVDIWAVAKLMGHKDIKQLIETYGHLLL

SEQ ID NO: 5275 - protein, 246 aa, Streptococcus agalactiae
ATGTCCCCGTTAGGAATGATTAAAGATGAAGGTTTATTCAATACCATTAAAATCATCAGCCGGGGACTGAAAAATGAACGATGCCCTCATCCAAAATTAATAAATGTTTTGGAAAGAAAACTTGAAATTATCCTTGGTGATCAGAAACATATCCTTGAAAAAGATAGCCTTATTAGCCTCTCTCCACAAGAAACACACCATTTAAGAGCTATTGAAAATAGTAAATTTCTCCAAATAGAATTAGAC

SEQ ID NO: 5276 - protein, 82 aa, Streptococcus agalactiae; identical to SEQ ID NO: 900

SEQ ID NO: 5277 - protein, 213 aa, Streptococcus agalactiae
ATGTTAACGATGCTTAACAATTCAGCTAAGGAGAAAGCCATAAAAGAGTACTTACGTGTCCTAAAACCTGGTGGACGTTTACTCACACATGATGTTTCTTATCAAGATGAAGACACTGCCAAGCTGATCGATCAACTTAGACATACTATGAATGTTAACGTTGCTCCTCTAAAAATAGATGATTGGCAAAATTTATTCTTACAAAATGGTTTT

SEQ ID NO: 5278 - protein, 71 aa, Streptococcus agalactiae; identical to SEQ ID NO: 902

SEQ ID NO: 5279 - protein, 251 aa, Streptococcus agalactiae
ATGTCATACGAACAAGAATTTTTAAAAGACTTTGAAGAGTGGTTACAATCGCAAATAAGTATCAACCAAATGGCAATGGACAGTGCAAAGAAAGTTTTAGAGGAAGATAAGGATGAGCGAGCAGCAGATGCGTATATTCGTTATGAGAGTAAGTTAGACGCTTATCGCTTTTTGCAAGGGAAATTTAATAACTATCATAACCAAAATCTTTCCATGATTTGCCTGATGGTCTTTTTGGACAACGTCATTAT

SEQ ID NO: 5280 - protein, 84 aa, Streptococcus agalactiae; identical to SEQ ID NO: 904

SEQ ID NO: 5281 - protein, 330 aa, Streptococcus agalactiae
ATGAGGAGAAAGCATTATACAATGGCAAAGCGTATTAAACCGAATAAAAAAAGAGAGCTTTTGAAAGCTAAAGGGATCAATTGGAAGGATGTTCGACTATCTCAAACTTTACAAGAAGTCGTATCACCGAAAAAAAAGGCTCCTGAAGCGCCAAAGGTAGTCGATCTTTTAGAAGGTTTAACTGCTAATAAACAAGATGTTTTAAAAGAAGCTGGCCTTGTCAGCCTTGAAGCGTTTGCGAAAGTAAGTGAAGCAGATGTTTTAGCACTAAAAGGTATTGGTCCAGCAGCTATTAAACAGTTAGTTGATAATGGTGCTGTTTTTGCAAAA

SEQ ID NO: 5282 - protein, 110 aa, Streptococcus agalactiae
MRRKHYTMAKRIKPNKKRELLKAKGINWKDVRLSQTLQEVVSPKKKAPEAPKVVDLLEGLTANKQDVLKEAGLVSLEAFAKVSEADVLALKGIGPAAIKQLVDNGAVFAK

SEQ ID NO: 5283 - protein, 576 aa, Streptococcus agalactiae
ATGCAGATTCTAGAAGATTTCGATGGCAAAGCATTACCAAAACTAGAAACGGATCGGCTTATCTTGCGTCAGCGAACGGTGGGGGATGTCCCAGCCATGTTTGATTACGTTTGCTTGGAAGAGGTTGCCTATCCAGCAGGACTCAGCCCAATAGCTTCTTTAGAAGATGAGTACGATTATTTTGAAAATCGCTACTATCAAAATCTGGAAAAGGCAAAATTACCATCTGGTTATGGTATTACCGTTAAAGGAAGTGATCGGATTATCGGATCTTGCGCCTTTAACCATCGCCATGAAGACGATGTTTTCGAGATTTGCTATCTGCTTCATCCTGACTACTGGGGTCATGGCTACATGACAGAAGCTGTCGCCGCTTTGATTGAAGTCGGTTTTACCCTCCTCAATCTCCACAAAATCGAAATCCGCTGCTATGATTACAATAAGCAAAGCCGGCGCGTGGCAGAAAAACTAGGCTTCACCCTTGAAGCAACCATCCGTGATCGTAAGGATAATCAAGGCAATCGCTGTGTCAATTTGATATATGGTTTGCTGAGGAGTGAGTGGGAGGGGAGAAAA

SEQ ID NO: 5284 - protein, 192 aa, Streptococcus agalactiae
MQILEDFDGKALPKLETDRLILRQRTVGDVPAMFDYVCLEEVAYPAGLSPIASLEDEYDYFENRYYQNLEKAKLPSGYGITVKGSDRIIGSCAFNHRHEDDVFEICYLLHPDYWGHGYMTEAVAALIEVGFTLLNLHKIEIRCYDYNKQSRRVAEKLGFTLEATIRDRKDNQGNRCVNLIYGLLRSEWEGRK

SEQ ID NO: 5285 - protein, 690 aa, Streptococcus agalactiae
ATGAATGATTTTTTTAATTGGTTAATTACACTATATAATGATGATAAAGTTGCTTTTGTATCACTTTGTCTAACTTTAGTGTTTGGATTTTTTTCATGGTTAGCCCAATTAAAAAGAAACAAACAAGATGATATTCGACAAGCTGAACAGGATGAATTTAACAGACTAGCTCAAGATGAGTTAAAAGAATTTCAGAGTTTTCAAAAAAAGTTTGCAGAGTATCAACAAAAAGTGAGTGAATTGCAGTTTAATTTTGAAAGTCAAGAAAATTTCAAACCCTATTTTGAATTTAGCAAAACTAAATCAAGTACTTACGTTGAAGGAGGAAAATTGATTGCTAGAATATGTCTGACAAATGTAGGGAGAGGCACAGCTACAAAGATTATGACCAATCCTATTGACTCCGACCAAGATGGAAATCCAATGTATTTTAGAACAATACCTACTAAACAGACACATGCTATATATGATTATTTTAGTGAGACTTTTGCTATTCCAAATGATTCTATATTTTTGAGTACAACTGCACTAGAACAGACAGAGAATCAGAATCATTGTATAGAGTTTAAAATTAAATTTTGTGATTCATCAGGCAGAACTTATGAACAAAAATTTGAATTCGGTTATGATAATTTTTTAGTAAGGGGAATAAATCTGAAATCAGTAACTTATGAGCCAACCTTGATTAAA

SEQ ID NO: 5286 - protein, 230 aa, Streptococcus agalactiae
MNDFFNWLITLYNDDKVAFVSLCLTLVFGFFSWLAQLKRNKQDDIRQAEQDEFNRLAQDELKEFQSFQKKFAEYQQKVSELQFNFESQENFKPYFEFSKTKSSTYVEGGKLIARICLTNVGRGTATKIMTNPIDSDQDGNPMYFRTIPTKQTHAIYDYFSETFAIPNDSIFLSTTALEQTENQNHCIEFKIKFCDSSGRTYEQKFEFGYDNFLVRGINLKSVTYEPTLIK

SEQ ID NO: 5287 - protein, 2649 aa, Streptococcus agalactiae
ATGTCAAAAGAACTGTCACCAAAATACAATCCTGCCGAGGTTGAGGCAGGCCGTTATCAAACTTGGCTTGACCAAGATGTTTTCAAGCCATCAGGGGATACTGAGGCTAAGCCTTATTCTATCGTGATTCCACCACCAAACGTTACGGGTAAATTGCACTTGGGTCACGCTTGGGATACAACTCTACAAGATATCATTATTCGTCAAAAGCGTATGCAGGGCTTTGATACACTATGGCTTCCAGGTATGGACCACGCTGGTATAGCCACTCAAGCTAAGGTTGAGGAGCGCCTTCGTGAGCAAGGCATTTCACGTTATGATCTTGGTCGTGAAAAATTCCTAGATAAAGTTTGGGAATGGAAAGACGAGTATGCAGCAACTATTAAATCTCAGTGGGGAAAAATGGGTCTTTCGGTTGATTATAGCCGTGAGCGTTTTACCCTTGATGAGGGACTTTCAAAAGCGGTAAGAAAAGTCTTTGTTGATTTGTACAATAAAGGTTGGATCTATCGTGGGGAGTTCATCATTAACTGGGATCCAGCAGCTCGCACAGCCCTTTCAGATATTGAAGTTATTCACAAGGATGTTGAGGGTGCTTTCTATCATATGAATTATCTGCTGGAAGATGGCTCACGCGCCCTAGAAGTAGCAACAACTCGTCCTGAGACTATGTTTGGAGATGTGGCTGTAGCGGTAAATCCAGAAGATCCACGTTACAAAGATTTGATTGGTCAAAATGTTATCCTTCCTATCATCAATAAACCTATTCCAATCATCGCTGATGAACACGCTGATCCAGAATTTGGAACAGGTGTGGTTAAGATTACGCCGGCTCACGACCCTAATGACTTTGCTGTAGGTCAACGCCACAACTTACCACAAGTTAACGTTATGAACGATGATGGGACTATGAATGAACTTGCGGATGAATTTAATGGTATGGATCGTTTCGAAGCTCGTAAGGCAGTAGTCGCTAAATTAGAATCGTTAGGAAACTTAGTAAAAATTGAAAAAATGACTCATTCTGTTGGTCATTCAGAACGAACAGGCGTTGTGGTTGAACCACGTTTATCTACTCAATGGTTCGTCAAGATGGATCAATTGGCTAAGAATGCCATTGCCAACCAAGATACAGAAGACAAGGTAGAGTTTTATCCACCACGATTTAACGATACTTTTATGAGCTGGATGGAAAATGTCCATGACTGGGTTATCTCTCGTCAATTATGGTGGGGACACCAAATTCCTGCATGGTACAACGTCAATGGTGAGATGTATGTTGGAGAAGAAGCTCCAGAGGGTGACGGATGGACACAGGATGAAGACGTTCTAGACACATGGTTTAGTTCTGCTTTATGGCCGTTTTCAACAATGGGATGGCCAGACACCGAAGCAGCTGACTTCAAACGCTACTTCCCAACGTCAACCTTGGTAACTGGATACGATATCATCTTCTTCTGGGTATCGCGCATGATTTTCCAATCTCTTGAATTTACAGGACGCCAACCATTCTCAAATGTTCTTATTCATGGACTCATCCGTGATGAAGAAGGACGTAAAATGTCTAAATCACTTGGCAATGGGATTGATCCGATGGATGTCATTGAGAAATATGGTGCGGATGCCCTTCGTTGGTTCCTCTCAAATGGTTCAGCCCCTGGTCAAGATGTACGTTTTTCATACGAAAAAATGGATGCTTCGTGGAATTTCATTAATAAGATTTGGAACATTTCACGCTATATCCTTATGAATAACGAAGGTTTAACGTTGGATCAAGCCAGAGAAAATGTGGAAAAAGTTGTTAATAGTCAAGTTGGAAATGTAACAGACCGTTGGATTCTCCACAATTTAAATGAGACTGTGGGTAAAGTTACTGAAAGCTTTGACAAGTTTGAATTTGGTGTTGCTGGTCACATCCTTTACAACTTTATCTGGGAAGAATTTGCTAATTGGTACGTTGAGTTAACAAAAGAGGTTCTTTATAGTGACAATGAAGATGAGAAAGTTGTTACACGTTCTGTTCTTCTTTACACTTTGGACAAGATTTTGCGCCTTCTCCACCCAATCATGCCATTCGTGACAGAAGAAATCTTTGGTCAGTATGCAGATAGCTCAATCGTAACAGCTGCTTACCCTACGGTTAACCCAGCCTTTGAAAATGCTGCTGCCCACAAGGGAGTTGAAAGCTTGAAGGACTTGATTCGTTCCGTGCGTAATAGCCGAGCAGAGGTCAATGTTGCTCCATCTAAACCAATCACTATCTTGGTTAAGACAAGTGACAGCGAACTCGAAAGCTTCTTCAAAGACAATAGTAACTACATCAAACGTTTCACAAACCCAGAAACACTTGAAATCAGCTCAGCTATTGCCACACCAGAACTTGCCATGTCATCAGTCATCACAGGAGCTGAAATCTTCCTCCCACTTGCTGACCTCCTCAACGTAGAAGAAGAGTTAGCACGACTTGAAAAAGAACTAGCCAAATGGCAGAAAGAACTGGACATGGTAGGCAAAAAACTCAGCAACGAACGCTTCGTAGCCAACGCCAAACCTGAAGTCGTCCAAAAAGAAAAAGATAAACAGACCGACTACCAAACTAAATACGACGCAACCATAGCACGTATTGAAGAAATGAAGAAGTTGGTGAAA

SEQ ID NO: 5288 - protein, 883 aa, Streptococcus agalactiae
MSKELSPKYNPAEVEAGRYQTWLDQDVFKPSGDTEAKPYSIVIPPPNVTGKLHLGHAWDTTLQDIIIRQKRMQGFDTLWLPGMDHAGIATQAKVEERLREQGISRYDLGREKFLDKVWEWKDEYAATIKSQWGKMGLSVDYSRERFTLDEGLSKAVRKVFVDLYNKGWIYRGEFIINWDPAARTALSDIEVIHKDVEGAFYHMNYLLEDGSRALEVATTRPETMFGDVAVAVNPEDPRYKDLIGQNVILPIINKPIPIIADEHADPEFGTGVVKITPAHDPNDFAVGQRHNLPQVNVMNDDGTMNELADEFNGMDRFEARKAVVAKLESLGNLVKIEKMTHSVGHSERTGVVVEPRLSTQWFVKMDQLAKNAIANQDTEDKVEFYPPRFNDTFMSWMENVHDWVISRQLWWGHQIPAWYNVNGEMYVGEEAPEGDGWTQDEDVLDTWFSSALWPFSTMGWPDTEAADFKRYFPTSTLVTGYDIIFFWVSRMIFQSLEFTGRQPFSNVLIHGLIRDEEGRKMSKSLGNGIDPMDVIEKYGADALRWFLSNGSAPGQDVRFSYEKMDASWNFINKIWNISRYILMNNEGLTLDQARENVEKVVNSQVGNVTDRWILHNLNETVGKVTESFDKFEFGVAGHILYNFIWEEFANWYVELTKEVLYSDNEDEKVVTRSVLLYTLDKILRLLHPIMPFVTEEIFGQYADSSIVTAAYPTVNPAFENAAAHKGVESLKDLIRSVRNSRAEVNVAPSKPITILVKTSDSELESFFKDNSNYIKRFTNPETLEISSAIATPELAMSSVITGAEIFLPLADLLNVEEELARLEKELAKWQKELDMVGKKLSNERFVANAKPEVVQKEKDKQTDYQTKYDATIARIEEMKKLVK

SEQ ID NO: 5289 - protein, 702 aa, Streptococcus agalactiae
ATGCAAACAACTTACAACATTGATAGTCCCAATCTACCATATGAAACGAAAAGAGACCTTTGGCAGACTGGTTTTGATCTGCAAAAAGTTGATGGATTAGTTCCCTCATTCTATGTGGTTGCTTTGGCAGAGAAACAGAAATGTGGGGACTATTCTTATATGGAAGTTTTAGAAGAAATCACTCATTACCATGAGACGGTAGGTGCCTCAACTAAAGAAGCTGATTTGGTTGCCTTACGAATAGTCAACCTATTATCACGTACTGGTTTTTCATTCAGTCCGGCAACCATATTGTCCACTCACAAAGAACTATTTACGGGTGTTTTTGACCAATTGATTCCGGTTGGGAAATTTAGAAAAACGAATATTACCAAAGATGAGCCAGTTCTTTTTGGAGCTACCGTTATCTATTCAGACTATACCATGATTCAAACAACACTTGACTATGATTTTCAACCAGAGAAGCAATTCTCTTATCAAGGCTTGGCTAAAGAAGAAATGATTTCTCACATCCAAAGTTTTATTTTTAGTATTTGGCAAATCCATCCCTTCCATGAAGGAAATACCAGGACAGTAACGTTTTTTCTAAATAAGTATCTAAGAGAATCTAGTTTCACTATTGATAATCAGCCATTTCATGAAAGTGTTCTCTATTTACGTGACGCCTTAGTTCTTGATAATTGCCAAAATCTTATCCCAAAA

SEQ ID NO: 5290 - protein, 234 aa, Streptococcus agalactiae
MQTTYNIDSPNLPYETKRDLWQTGFDLQKVDGLVPSFYVVALAEKQKCGDYSYMEVLEEITHYHETVGASTKEADLVALRIVNLLSRTGFSFSPATILSTHKELFTGVFDQLIPVGKFRKTNITKDEPVLFGATVIYSDYTMIQTTLDYDFQPEKQFSYQGLAKEEMISHIQSFIFSIWQIHPFHEGNTRTVTFFLNKYLRESSFTIDNQPFHESVLYLRDALVLDNCQNLIPK

SEQ ID NO: 5291 - protein, 168 aa, Streptococcus agalactiae
ATGGATGAGAGAGAGAGGTTGATGATGACTAAGGAAACGTTGGCACATTATCAAAAGAAAATAGAACAAGAATCTGAAAAAAAGCAGTCTTTAGATGAGCACTTATGGCATGTGGCCTGTTTTAGTCGACAGGAAGCATCTATAATTGGTCAAGGAGATGTGCTTTTT

SEQ ID NO: 5292 - protein, 56 aa, Streptococcus agalactiae
MDERERLMMTKETLAHYQKKIEQESEKKQSLDEHLWHVACFSRQEASIIGQGDVLF

SEQ ID NO: 5293 - protein, 2094 aa, Streptococcus agalactiae
ATGGTGGGTTATGTTATCTCGGCTCATCATGGGATGTATGATTTTTGCTACTGTTCTGACGATGCTGAATATTATAGCTTTAATAAATTTAAAAAACGTATCAGCAGAGACTTAGATGATTATCACTATCACGAAGATATTAAAGGGTATGCTATAAAATTAGAAGAAAAATTGTGTGATTACGGCTACAAAGATTTAGGGGAGCTTATTGATAAAGCTTTTGATAATTACCAACAAGCTATGTCTTCCTTAAACTGGCAAGATAATAGTGAGTGGGATTATTATCAGTCTTGTATGGTGAGACTTTACTTGTCGCTCTTAAAAAACGCTGATATTTTGGACACAGTAAATGCCTATGGTCTTAAAATAAGTCCTATGGATAAAACAGAGCGATCCTCTCTAAAACATTCTTATTTAGCAGCCATTGAACAAAAATATGCTAGCTTTGGACGACCAAACAATCAGTTGAATACTATTCGGACAGAAATTGCTGAGCGTGTTAAAGAAAGAGGTAAACGGGATTCCAAAGGGATCTATCGCTTAGATTTACCGACAGGATCTGGCAAGACTAATCTTAGTATGCGCTATGCGTTTCACCAATTAGTTCATCAAGACAAATCAAGATTTTTTTACATAACGCCCTTTCTTTCGGTTCTTGAGCAAAATGCTTCCGAAATTAGAAAAGTTACGGGTGACCTTGGCGTTTTAGAACACCATTCCAATATGGTTAAACAGGCTAATGAAGATGATGACAAGGACAGTTTATTGTCAGCTTATCTTATTGATAGCTGGGACAGTCAAGTAGTCTTGACTTCTATGGTTAAATTTTTCCAAACGCTTTTTAAAACAAAATCGGCTAATTTGAGACGTTTTTCAAGTTTGATTAATAGTGTTGTGATTCTAGATGAAGTTCAGTCACTGCCTATTGAAGTCACCACTTTGTTTAATTTAACGATGAATTTTTTTAATAAAGTTATGGATACAACCATCGTTCTTTGTACAGCAATACAACCTGCTTATGATTCTTCAGAGATTGACCATCGTATCTGTTATGGAGGGAATTTGGGAGAATTAGCTGAAATAGTTGAGTTAACGATTGAAGAAAAACAGATTTTTTCAAGGACAGAGCTTAGAAAATTTGATGATAGTGATCAGAAAGTTTACTTGACTGATGTTATTAATCTTATTTTAGGAGAGGAAAACTCAGTTCTTGCTATTTTTAACACGAAAAAAACGGTTCATAACTGCTATACTATGCTCAAAGACATGACTGATAGACCGATCTATCAGCTTTCGACGAATATGTGTGCGCAGCATAGGCTTGACTTGGTCGCTAAGATCAAAACGGAGTTACAAAATAATACCCCTATTATTTGTATTAGCACACAATTAATAGAAGCAGGTGTAGATGTTGACTTTCATTGTGTCATTCGTTCCTATTCAGGGATTGATTCTATTGTTCAGGCTGCTGGACGATGTAATCGAGAAGGCAAACGAGATAAAGGTCAGGTCACTCTTGTCAATCTGACCAATGAAGAGGAAAATATTTCTAGGCTGACAGAAATAAAAGCTAAAAAAGAAGCCACAGAATCTATTCTTTATAAGATTGGGTCTCCAATCAATATCTCAACTTTAAACCGTGACTTTTTTGAGTATTATTATGCCAATAATCAAGGGCTGATGGATTATCCTTTGGAAGACAACATATCAATCTACGACTATTTAAGCCTTAATACTTATCAGACGGCAAATAAAAAGTTCAAAGGTAAGTTAAAACAAGCTTTTAAAACAGCAGGAGCCAAAATGAACCTCATCAATAATGATATGATAGGAATTCTCGTACCTTATGGCGATGCTGAGAAAAAATTGGCTTATTTAGAAGAATTAGGTACGTCACATTTTTTATCAGCAGAAGATTATCAAACGATAAAATCATTACTAAAAGAGTTACAACCTTTTACGGTTAATGTCCGCGAGAACGATCCTCTCCTTGAGGCAACAAAATCTTATCTAAATGGTCAGATTCTGGTTTTGACGTCGGAGTATTATGACACGGAAAGAGGAGTTAAATACGATTCAGCTAGCTTTTACTTC

SEQ ID NO: 5294 - protein, 698 aa, Streptococcus agalactiae
MVGYVISAHHGMYDFCYCSDDAEYYSFNKFKKRISRDLDDYHYHEDIKGYAIKLEEKLCDYGYKDLGELIDKAFDNYQQAMSSLNWQDNSEWDYYQSCMVRLYLSLLKNADILDTVNAYGLKISPMDKTERSSLKHSYLAAIEQKYASFGRPNNQLNTIRTEIAERVKERGKRDSKGIYRLDLPTGSGKTNLSMRYAFHQLVHQDKSRFFYITPFLSVLEQNASEIRKVTGDLGVLEHHSNMVKQANEDDDKDSLLSAYLIDSWDSQVVLTSMVKFFQTLFKTKSANLRRFSSLINSVVILDEVQSLPIEVTTLFNLTMNFFNKVMDTTIVLCTAIQPAYDSSEIDHRICYGGNLGELAEIVELTIEEKQIFSRTELRKFDDSDQKVYLTDVINLILGEENSVLAIFNTKKTVHNCYTMLKDMTDRPIYQLSTNMCAQHRLDLVAKIKTELQNNTPIICISTQLIEAGVDVDFHCVIRSYSGIDSIVQAAGRCNREGKRDKGQVTLVNLTNEEENISRLTEIKAKKEATESILYKIGSPINISTLNRDFFEYYYANNQGLMDYPLEDNISIYDYLSLNTYQTANKKFKGKLKQAFKTAGAKMNLINNDMIGILVPYGDAEKKLAYLEELGTSHFLSAEDYQTIKSLLKELQPFTVNVRENDPLLEATKSYLNGQILVLTSEYYDTERGVKYDSASFYF

SEQ ID NO: 5295 - protein, 648 aa, Streptococcus agalactiae
TTGGAACGTGCATCCTATTCGGTTCCAACTAGACAGGCGCTGAATGGTATAGTTGATGCCATCTATTATAAGCCGACCTTTACTAATATTGTCACAGAGGTTAAGGTTATTAACCAGATTCAAACCGAATTACAGGGTGTCAGGGCTCTGTTACATGATTATAGTGCAGATTTAAGTTATGTATCCTATTTGAGTGATGTTGTTTATCTAATCAAATTTCATTTTATTTGGAATGAAGATAGAAAAGATTTGAACTCAGACAGACTTCCAGCTAAACATGAAGCCATTATGGAGCGTTCTATTCGTAAAGGTGGACGTCGTGATGTGTTTTTGGGTACAAGAGAGAGTGTAGGTCTTGTAGATGATATTAGCCAAGAAGAGTATGAGGCTGCTGTGTCGTATTATAATGGTGTCAATATCGACTTGGGAATCATGTTCCATTCCTTTGCCTATCCGAAAGACAAAAAGACACCATTGAAATCATACTTTACAAAGACTGTGATGGAAAATGGAGTCATTACCTTTAAAACACAGTCTGATTGTGATATTGTTAACACACTTTCTAGTTATGTTTTTAAAGTGCCAGGGGAGATAAAATCGGTTAACGATGAATACATGGAGTATGATGCTATTCGGTATTTATTCCGA

SEQ ID NO: 5296 - protein, 216 aa, Streptococcus agalactiae
MERASYSVPTRQALNGIVDAIYYKPTFTNIVTEVKVINQIQTELQGVRALLHDYSADLSYVSYLSDVVYLIKFHFIWNEDRKDLNSDRLPAKHEAIMERSIRKGGRRDVFLGTRESVGLVDDISQEEYEAAVSYYNGVNIDLGIMFHSFAYPKDKKTPLKSYFTKTVMENGVITFKTQSDCDIVNTLSSYVFKVPGEIKSVNDEYMEYDAIRYLFR

SEQ ID NO: 5297 - protein, 570 aa, Streptococcus agalactiae
ATGACACAAGTGATTAAAAAATTACTTGCCTCTGGTGAAATAGGAGAAGTGATCTCCATCTCATCTACAACAGCCTACCCAAACATTGACCATGTAACATGGTTTAGAGAACTTGAGTTAGGTGGAGGAACAGTGCATTTTATGGCGCCCTATGCCCTGTCTTATTTACAATATCTATTTGATGCGACTATAACTCATGCTAGTGGGACTGCGACTTTTCCAAAAGGTCAAAGCGATAGTCAATCCAAACTACTCTTGCAATTATCAAATGGGGTCCTCGTAGATATCTTCTTGACAACACGTTTAAATTTACCGCATGAAATGATTATTTATGGAACTGAAGGTCGTCTAATCATTCCACATTTTTGGAAAACTACTCATGCAAAATTGGTGAGAAATGATACTAGTGCGCAAACGATTCAAGTTGACATGGTTAGTGATTTTGAGAAAGAAGCTTATCATGTTAGTCAAATGATTTTAGAAGGGCAAAGGGTAAGTCATATCATGACGCCTCAGTTGACGCTGTCAGGTGTTAAGATTATAGAAGACTTATACCGTTCATGGGGGAAA

SEQ ID NO: 5298 - protein, 190 aa, Streptococcus agalactiae
MTQVIKKLLASGEIGEVISISSTTAYPNIDHVTWFRELELGGGTVHFMAPYALSYLQYLFDATITHASGTATFPKGQSDSQSKLLLQLSNGVLVDIFLTTRLNLPHEMIIYGTEGRLIIPHFWKTTHAKLVRNDTSAQTIQVDMVSDFEKEAYHVSQMILEGQRVSHIMTPQLTLSGVKIIEDLYRSWGK

SEQ ID NO: 5299 - protein, 900 aa, Streptococcus agalactiae
ATGGTTTCGAGCGATTTTGGATTTGAGATAATTAATGTTGACGAACTATCCTTGCAAGAGGAGAGATTTTTACCTTCAGAATTGCTGGCTTATGCACGTGATGAAAATGAGTCTTCTTTCGTACGTGATATTGAGGAGCATTTGACACTTGTTTACCAGCTTTTGGATACGCAAGGTCACGTTGATGATGTTCGTCATGTGCCGATAGTGATACCAGTGACTCTATTTTTGAAAGAAGATGGCTTGTTTGTATTAGCTAATCATAAAAATATTAACCTTGTAAAAAAAGCACTTAATCGCGTTGAAAAGGTAGATTCGCCGAAACACCTCTTATTATCATTAGTGACTGTTTTCTCAAAGCAATATTTTGATGTTTTAGATACTATTTCTGAAGAAAGAGATAAACTAATCAATGATTTGCGTAAAAGACCAAACAAATCGAACTTGGCAAGGCTGGCAAATTTACAAAGTGGAACTGTACACTTGATGATGGGAACTAAGCAAAATTTTGAAATGCTGACCGATTTACAAAACATTGAGCAAGATAAAGAGAATACTAGAAATGAAAAGATACAACTTCAAGATGCTATTATTGAAGCAAGACAATTATCTAACATGTGTTCCTTAAATTCACAGGTTTTCCAAGAACTTTCTTCTTCTTATAATAATGTCCTCAGCAATAACCTTAACGACAATGTAACTACCTTAACAATTATTTCCATTGGTATTTCCATTATTGCTATGGTTACCAGCTTTTATGGAATGAATGTTAAGTTGCCTTTTGACAGTGTTGATGCTGTCTGGGTATTGATTAATTTAATTACGACTATCATTACTATTATGCTCTCTATTGTTATGTACATTTATGTCCATAAAGAGGATAATCATCCCAAACATAAA

SEQ ID NO: 5300 - protein, 300 aa, Streptococcus agalactiae
MVSSDFGFEIINVDELSLQEERFLPSELLAYARDENESSFVRDIEEHLTLVYQLLDTQGHVDDVRHVPIVIPVTLFLKEDGLFVLANHKNINLVKKALNRVEKVDSPKHLLLSLVTVFSKQYFDVLDTISEERDKLINDLRKRPNKSNLARLANLQSGTVHLMMGTKQNFEMLTDLQNIEQDKENTRNEKIQLQDAIIEARQLSNMCSLNSQVFQELSSSYNNVLSNNLNDNVTTLTIISIGISIIAMVTSFYGMNVKLPFDSVDAVWVLINLITTIITIMLSIVMYIYVHKEDNHPKHK

SEQ ID NO: 5301 - protein, 1062 aa, Streptococcus agalactiae
ATGTCAATAGAATCAGATTTTTTCCGGAAAAAACGTTTTATTTTTTCATCGCTTGAGGAGTTTGGATTTATCAAATCTGACCAAGAGTATATCTATTGTCAAACATTTATGGATAATGACTTTAAAGCTATTATCACGATTTCATTGGATGGAAAGATAGCTGGTAAGGTTATTGATTCGGCACTTGAAGAAGAATATTTACCGCTTCGAGCAGCAAATTATAATGGTTCGTTTGTTGGCGAAGTACGATCGGCTTATATGGCTATATTAGGTGATATTTCAGATTCTTGTTGTAAGGACTTATTATTTACCAAAGATCAAAGTAATCGTTTAGCGGAGAAGATAGCTAAAACTTTTGAAGATTCAGTTGATTATCCATTTGCGAAGCACCCACAATATGCTTCCTATCGTGTATCAGGTAAATGGTATGCTCTGCTTTTTCCATTGAAGATGGGGAAACTAGAAAATGTTCCAGCTCAACTGTCAGAAGATGAGGTTGAAGTTTTGAATATTAAAGTCAATCCTCAAGATATGGAAATACTCTTACAAAAAGAAGGTATTTATCCTTCTTATCATATGTCTAAAAAGACTTGGGTATCTATCGTTTTAGACAATACTTTGTCTGATATAGAAATTTTTAAATTGGTATCAGATAGTCGTAAGCTTGTTTCTCCCAATAAAAAATCAAATTCTGAGCCAGAGTTTTGGATTATTCCTGCTAATCCTAAATTTTACGATATTGATAAGGAGTTTGCAGAGCATCAATTGATTGATTGGACTCAAAAAGGAAAGATTGCGGTGGGAGATTATGTGTTTATTTATATTACAGCACCTATTCGTGCTTTGCGCTATGTCTGTCAAGTAATAGAACGTGACCTTAAAACAAGTACTTACTTAGGAGCAAGAGATGTCAAAGCTTATATGCGACTCAAACTGATAAGGCAATTTGAAGATTCTACCTATCCTGTGGCATTTTTAGCAGAACACGGCGTTAAGACTGTGAGAGGACCACGGCGAATGACCAAGGAATTGCGACAAGTCATGGCAAAAACAATTCTAGAG

SEQ ID NO: 5302 - protein, 354 aa, Streptococcus agalactiae
MSIESDFFRKKRFIFSSLEEFGFIKSDQEYIYCQTFMDNDFKAIITISLDGKIAGKVIDSALEEEYLPLRAANYNGSFVGEVRSAYMAILGDISDSCCKDLLFTKDQSNRLAEKIAKTFEDSVDYPFAKHPQYASYRVSGKWYALLFPLKMGKLENVPAQLSEDEVEVLNIKVNPQDMEILLQKEGIYPSYHMSKKTWVSIVLDNTLSDIEIFKLVSDSRKLVSPNKKSNSEPEFWIIPANPKFYDIDKEFAEHQLIDWTQKGKIAVGDYVFIYITAPIRALRYVCQVIERDLKTSTYLGARDVKAYMRLKLIRQFEDSTYPVAFLAEHGVKTVRGPRRMTKELRQVMAKTILE

SEQ ID NO: 5303 - protein, 897 aa, Streptococcus agalactiae
GTGCAAGGACCTATTCTTAGTCAGGTCGGGGATGGTATGCAAGATAATTTATCTGGTATTGAACATCCTGTATCGGTGAAAGTCCTTAATATACCTGAAGCTGAATTTGAAGTCGTTCACTCATTGGCTAAATGGAAACGTCATACTTTGGCAAGATTTGGGTTTAATGAGGGAGAAGGTCTTTTCGTTCATATGAAAGCTCTTCGTCCAGATGAAGATTCTCTTGATCCAACACACTCAGTTTACGTAGATCAGTGGGACTGGGAGAAGGTCATTCCTGATGGTAGACGTAATTTGGACTACCTAAAAGAAACTGTGGAAAAAATCTACAAAGCTATCCGCCTAACAGAGCTTGCCGTGGAAGCTCGTTTTGATATTGAATCCATTTTACCAAAGCGTATTACCTTTATTCATACAGAAGAATTGGTAGAAAAATATCCAGACTTAAGCCCTAAAGAGCGTGAAAATGCCATCGCTAAGGAGTATGGCGCAGTCTTTTTGATTGGTATTGGTGGAGAGTTAGCAGATGGTAAACCACATGATGGTCGTGCACCGGACTATGATGACTGGACAACACCATCAGAAAATGGTTTTAAAGGTCTCAATGGTGATATTTTAGTATGGAACGAACAGCTTGGAACTGCCTTTGAACTATCATCAATGGGAATTCGAGTTGATGAAGATGCTCTTAAACGTCAAGTTGTTCTCACCGGTGATGAAGGTCGTTTAGAGTTTGAGTGGCATAAGATGCTATTACGTGGTTTCTTCCCTTTGACTATTGGTGGGGGAATTGGTCAATCACGATTAGCTATGTTCTTGCTTCGTAAAAAACATATTGGAGAAGTACAGTCAAGTGTCTGGCCAAAAGAAGTCAGAGACACCTTTGAAAATATATTA

SEQ ID NO: 5304 - protein, 299 aa, Streptococcus agalactiae
MQGPILSQVGDGMQDNLSGIEHPVSVKVLNIPEAEFEVVHSLAKWKRHTLARFGFNEGEGLFVHMKALRPDEDSLDPTHSVYVDQWDWEKVIPDGRRNLDYLKETVEKIYKAIRLTELAVEARFDIESILPKRITFIHTEELVEKYPDLSPKERENAIAKEYGAVFLIGIGGELADGKPHDGRAPDYDDWTTPSENGFKGLNGDILVWNEQLGTAFELSSMGIRVDEDALKRQVVLTGDEGRLEFEWHKMLLRGFFPLTIGGGIGQSRLAMFLLRKKHIGEVQSSVWPKEVRDTFENIL

SEQ ID NO: 5305 - protein, 366 aa, Streptococcus agalactiae
ATGACTATTTCTCAACAACAATACCAACACATGATAACAAATAGTGACTTAATCGCCATCACAGATAAGGCGTTAGTAAGCAAAAGTCAACAATCTGAAGCGACTATTTTTATAGGACGTCAAACTTGCCAATATTGTAGAGCTTTCTTACCAAAATTATTAAAATCTAAAGCCACACTTCATTCAAAAATTTACTACCTTGATAGTCAAAAATACAAAGGGAAACGATTGAAGAGTTTTTTCAAAAAGCATCATATTACCACTGTTCCAAATTTAGCACATTATCAACGAGGAAAAATGACTAAATATCTTGTTCAAGGAAGCCAAGCTACACCTCAACAAATCCAAACTTTCTTAAGCCAAAAA

SEQ ID NO: 5306 - protein, 122 aa, Streptococcus agalactiae
MTISQQQYQHMITNSDLIAITDKALVSKSQQSEATIFIGRQTCQYCRAFLPKLLKSKATLHSKIYYLDSQKYKGKRLKSFFKKHHITTVPNLAHYQRGKMTKYLVQGSQATPQQIQTFLSQK

SEQ ID NO: 5307 - protein, 750 aa, Streptococcus agalactiae
ATGGTGTCAGCGCTACTTAAGTTTGATTTTAGCGTTGTAAGGCATAATATGGCTATTAAACTTAATAATAATTTTTTAATCATTATGGGAACCTCGTTTCTCTTACTGCTAGCTTATCATATCAAAAAAGAAGGAAAAGAGGTACTATCTTCTCTGTTTGTTATAAGCAATTTTTTTGATAACTCTACCTTATTTTTTGTTATAATAGTGGTTATGAGAGTAGTAGCAGGAACATTTGGAGGGCGTCCTTTAAAAACGCTTGATGGAAAAACAACTCGTCCAACAACTGACAAGGTTAAAGGCGCTATTTTTAATATGATTGGTCCTTTTTTTGAAGGTGGTCGTGTTTTAGACCTTTTTTCTGGCAGTGGTAGCTTAGCTATTGAGGCGATCTCAAGGGGAATGGACCAAGCTGTCCTAGTTGAAAAAGACAGGCGTGCGCAGGTCGTTATTCAAGAAAATATTGCAATGACTAAGAGTCCGGAGCAATTTCAATTATTAAAAATGGAAGCCAACCGTGCTTTAGAACAATTAACGGGACAATTTGATTTGGTCTTGTTGGACCCGCCATATGCTAAGGAAGAAATTGTAAAGCAAATCCAAATCATGGATAGCAAGGGTTTATTAGGCGATGATATCATGATTGTTTGTGAAACGGACAAATCAGTTGATTTACCTGAAGAAATTGCTTCTTTTGGGATATGGAAACAGAAAATTTATGGCATTTCTAAAGTAACGGTCTACGTTCGT

SEQ ID NO: 5308 - protein, 250 aa, Streptococcus agalactiae
MVSALLKFDFSVVRHNMAIKLNNNFLIIMGTSFLLLLAYHIKKEGKEVLSSLFVISNFFDNSTLFFVIIVVMRVVAGTFGGRPLKTLDGKTTRPTTDKVKGAIFNMIGPFFEGGRVLDLFSGSGSLAIEAISRGMDQAVLVEKDRRAQVVIQENIAMTKSPEQFQLLKMEANRALEQLTGQFDLVLLDPPYAKEEIVKQIQIMDSKGLLGDDIMIVCETDKSVDLPEEIASFGIWKQKIYGISKVTVYVR

SEQ ID NO: 5309 - protein, 288 aa, Streptococcus agalactiae
ATGGATTACAAATTAGTGATGATTATTCTCATCTTAGTCATATTGATTTATTTGTTGTTGCGCCTTCACTATTTAGAAGAGTTGCTAAAACATTATCACTTCAAAAATGATGAAGGAGTTTGTTCATTATCAAGAACAAAAAATCCATTGTATCTATTAATGGCAATGATTACTTTTTTGCCAAATCTTATCAATTGGATAGCTAACGGTTTTGAGGCAATAGACATTGTTCGCCTGATTCCTGTGGTAGTCTTTTTATGGTTGTATTATTGTGGAGATGACGACGAA

SEQ ID NO: 5310 - protein, 96 aa, Streptococcus agalactiae; identical to SEQ ID NO: 930

SEQ ID NO: 5311 - DNA, 483 bp, Streptococcus agalactiae
atgacaaagaaagctttatttacaggttcatttgatcctgttactaatggacatttagatattattgagcgcgccagctatctatttgatcatgtttacattgggttattttataaccttgagaagcaaggttacttttcgattgagtgccgtaaaaaaatgttagaagaagctatccgtcagtttaagaatgtttcagttttagtggcgcaagatagactagctgttgacttagcaagggaagtgggagcaaaatattttgttcgaggtctgcgtaatagccaggattttgattatgaagccaatttggagttttttaataaacagttggcagatgatattgagacagtttatttatcaacgtcgccatctttgagtccgatatcatctagtcgcatccgtgaattgatacattttaaggcttctgtgaagccttttgttccaaagagtgttgttagagaagtggagaaaatgagtgaagaa

SEQ ID NO: 5312 - protein, 161 aa, Streptococcus agalactiae; identical to SEQ ID NO: 932

SEQ ID NO: 5313 - DNA, 1071 bp, Streptococcus agalactiae
gtgaagaataaagatccaaaaagaaaacataaaagtttactaggtctgcttaaatggtggattataggttttgcttttttattgttagtattagcaagccttgtggtgaggctaccttattatttggaaatgccaggtggagcttatgatatccgttcggtattgaaagtgaataaaaaggctgataaagctaagggttcgtacaattttgtagcggtttctgtcagtcaagcaacgccagctcaggttctttatgcttggttaactccttttacagaattatctagtaaagaggagacaacaggtggctttagtaatgacgattatctcagaattaatcaattctacatggagacttctcaaaatgagtccgtctatcaagctttaaagttagctaataagcaagtatctcttacttataaaggagtttatgtgcttaacttagctaaaaattcgacatttaaagatagattacatttagctgatacagtcacaggagttaatggcaaaagtttcaaaaattcttctcaacttatcaaatatgttgcagctcttcatctaggtgataaagtaaaggtacaatacacaagtcaaggtaaaaagaaagaatcggttggtaaagttattaaactatcaaacggtaaaaatggtattggtatcggtttgacagaccatacagaagtatcatctgatgttcctgtggactttaatactgaaggtgttggaggaccaagtgcaggtttaatgtttactttagcgatttacgaccaattggttaaagaagatttacgtaaaggacgtaagattgcaggtactggtactattgagcaaaatgggcatgttggcgatattggtggagcaggtttgaaagttgtttcagcggctaaaaaaggaatggatattttctttgttcctaataatccgatcgataaaaatgctaaaaaaggcaaaacaaaggttcagacgaattatcaagaggcaaaagcagcagctaagcgattaggtacgaagatgaaaattgtaccagttcaaaatgttcagcaagctattgattatttgaaaaaaacaaaa

SEQ ID NO: 5314 - protein, 357 aa, Streptococcus agalactiae
MKNKDPKRKHKSLLGLLKWWIIGFAFLLLVLASLVVRLPYYLEMPGGAYDIRSVLKVNKKADKAKGSYNFVAVSVSQATPAQVLYAWLTPFTELSSKEETTGGFSNDDYLRINQFYMETSQNESVYQALKLANKQVSLTYKGVYVLNLAKNSTFKDRLHLADTVTGVNGKSFKNSSQLIKYVAALHLGDKVKVQYTSQGKKKESVGKVIKLSNGKNGIGIGLTDHTEVSSDVPVDFNTEGVGGPSAGLMFTLAIYDQLVKEDLRKGRKIAGTGTIEQNGHVGDIGGAGLKVVSAAKKGMDIFFVPNNPIDKNAKKGKTKVQTNYQEAKAAAKRLGTKMKIVPVQNVQQAIDYLKKTK

SEQ ID NO: 5315 - DNA, 1332 bp, Streptococcus agalactiae
atgacagagcttataagaatactacatttaaatgatctgcactctcattttgagaattttcctaaggtaaaacgattttttcatgacaatcaagcgcagccaatagagacgatttcacttgacttgggggataatattgataaaagccatcctttgacagaagcaagctcgggcaaggctaatgtccaattgatgaatgaactgggtattgagcttgctactattggtaataatgaaggagttggtttatccaaaaaagacttggaccaagtctacaaagattcagattttacggttattgttggtaatctaaaagataacataatcgaaccgagttgggcaaaaccttacattatttatgagacacagcaaggaactaagcttgcttttttagcttatacttttccttattataaaacctatgaacctaatgggtggacgatagaagatccaattgactgtcttaaatgccatttacaaataaatgagataaaagaggcaaattgtcgtattttgatgagtcatttaggtattcgttttgatacaaggattgctcaagaattttcagaaattgaccttattataggtgcacatacacaccatttatttgaggaaggggagctaattaccggtacatatcttgcagcagctggtaaatatggtcgctttgttgggagtattgatataacttttgataatcatacactaaaagatattttaatctcaacatatgatacaaaacaactaactggttatccttcggacagtgactgggctaaggagattgagtcagaaggtaaagaacagcttagaaaagaaagtttaatatcctttccagcaccattatcattagaagaatcgtgtcaactagtcatggatgcgatgctgttttacgcaggtgcagatgttgctattatcaattctggcttaattgttcagccatttgaaaaagacttttcgaggaaaaatctgcatgaatcattacctcatcaaatgcgtctcgctaaattgacagtgagtagtcaagaacttttagagatttatgaaactatttatcaacaaggtcaatttttagcgcaacaaaagattcatggtatgggctttcgtggcaagtactttggagaagttttacattcgggatttgattacaaaaatggaaaaatagtgtataatgagaaagatattgatgccaaagaagaagtgattcttgtaatcgttgatcagtattattttgcatcgtattttgagtgtttaaaaacaaaaaaagtagacttgctttttcctgaattactcagagatgtggtagcagattatttaataaatatgacacta

SEQ ID NO: 5316 - protein, 444 aa, Streptococcus agalactiae
MTELIRILHLNDLHSHFENFPKVKRFFHDNQAQPIETISLDLGDNIDKSHPLTEASSGKANVQLMNELGIELATIGNNEGVGLSKKDLDQVYKDSDFTVIVGNLKDNIIEPSWAKPYIIYETQQGTKLAFLAYTFPYYKTYEPNGWTIEDPIDCLKCHLQINEIKEANCRILMSHLGIRFDTRIAQEFSEIDLIIGAHTHHLFEEGELITGTYLAAAGKYGRFVGSIDITFDNHTLKDILISTYDTKQLTGYPSDSDWAKEIESEGKEQLRKESLISFPAPLSLEESCQLVMDAMLFYAGADVAIINSGLIVQPFEKDFSRKNLHESLPHQMRLAKLTVSSQELLEIYETIYQQGQFLAQQKIHGMGFRGKYFGEVLHSGFDYKNGKIVYNEKDIDAKEEVILVIVDQYYFASYFECLKTKKVDLLFPELLRDVVADYLINMTL

SEQ ID NO: 5317 - DNA, 576 bp, Streptococcus agalactiae
atgcgaaaagaagtgacaccagagatgcttaactataataagtatcctggcccacagtttattcactttgaaaatatcgttaaaagtgatgatattgaatttcaacttgttattaatgaaaaatcagcttttgatgtgactgtctttggacaacgtttttctgagattttattaaaatatgattttatcgttggcgattggggtaacgagcagttgaggctaagaggcttttacaaagatgctagtacgattagaaaaaatagccggatttcacgtttagaagattatattaaagagtattgtaactttggttgtgcttattttgtgttggagaatccaaatcctagagatattaaatttgatgatgaaagacctcataagcgtcgtaagtcaagatccaaatcacaatcatcaaagtcacaaactagaaataatcgttcccagtcaaatgccaatgctcattttacaagtaaaaagcgtaaagacacaaaacgccgtcaagaacgtcatattaaagaagagcaagataaggaaatgacctctgcaaagcagcattttgttattcgtaagaaaaaa

SEQ ID NO: 5318 - protein, 192 aa, Streptococcus agalactiae; identical to SEQ ID NO: 940

SEQ ID NO: 5319 - DNA, 1104 bp, Streptococcus agalactiae
atgtctaaaaaaactgatacacccgactataaaccctctatttatagcttaactcgcgatgaactaatagcttgggctattgaacatggagaaaagaaattccgtgcttcacaaatctgggactggctctataaaaagcgtgtgcaaagcttcgatgaaatgactaacatttccaaagattttattgcacttttgaatgagaattttgttgtcaatcctctaaaacaacgtattgttcaagaatctgctgatggaactgttaaatacctttttgaattacctgatggcatgctgattgagacggttttgatgcgtcaatattatggtttatcagtatgtgtaacgactcaagttggttgtaacattggttgcactttctgtgcaagtggtttaataaagaaacaacgtgatcttaacaatggcgaaatcactgctcaaattatgcttgttcaaaaatattttgatgaacgtggacaaggtgagcgcgttagtcacattgtggtcatgggaataggtgaaccctttgataactataccaatgtattaaaattcttgcgtacagttaatgatgataatggattagctattggtgcacgtcacattacagtgtctacttcaggtttagcacataaaattcgtgaatttgcaaatgaaggtgtacaagttaacttagcagtatctcttcatgctccaaataatgaattacgatcaagtatcatgcgtattaatcgttctttccctcttgaaaagttgtttgcggctattgaatattatattgagacgactaaccgtcgtgtaacatttgagtatattatgttaaatggtgtcaacgataccccagaaaatgctcaagagttagcagatttaacgaaaaagattcgcaaattatcttatgtcaatttaattccttacaatcctgtctcagaacatgaccagtatagtcgtagtcctaaagagcgtgtggaagctttctatgacgttttgaagaaaaatggagttaattgtgttgttcgtcaagaacatggtacggacattgatgcagcttgcggacaattacgttcaaacacaatgaaacgcgatcgtcaaaaagcgaaggtagggcgg

SEQ ID NO: 5320 - protein, 368 aa, Streptococcus agalactiae
MSKKTDTPDYKPSIYSLTRDELIAWAIEHGEKKFRASQIWDWLYKKRVQSFDEMTNISKDFIALLNENFVVNPLKQRIVQESADGTVKYLFELPDGMLIETVLMRQYYGLSVCVTTQVGCNIGCTFCASGLIKKQRDLNNGEITAQIMLVQKYFDERGQGERVSHIVVMGIGEPFDNYTNVLKFLRTVNDDNGLAIGARHITVSTSGLAHKIREFANEGVQVNLAVSLHAPNNELRSSIMRINRSFPLEKLFAAIEYYIETTNRRVTFEYIMLNGVNDTPENAQELADLTKKIRKLSYVNLIPYNPVSEHDQYSRSPKERVEAFYDVLKKNGVNCVVRQEHGTDIDAACGQLRSNTMKRDRQKAKVGR

SEQ ID NO: 5321 - protein, 513 aa, Streptococcus agalactiae
ATGCTTAAAAGATTACTTACTGAAGATGGGGAATTGACAAAGATTAGTCGTCGTTTCGTTTGGATGTTAGTGGTTATCTATTGTCTTATTATTGTCAGGATGTGTTTTGGGCCTCAAATTATGATTGAGGGGGTATCAACTCCGAATGTTCAGCGCTTCGGAAGAATTGTAGCTCTTTTAGTACCATTTAATTCTTTTCGTAGTTTAGATCAGCTAACTAGCTTTAAAGAGATTTTTTGGGTTATTGGTCAAAATGTAGTGAATATTTTACTGCTGTTTCCTCTCATTATAGGGTTACTATCCCTAAAGCCAAGTTTACGGAAATATAAAAGCGTTATATTACTTGCTTTCTTGATGTCTCTTTTCATAGAGTGTACTCAAGTTGTTTTAGATATTTTAATAGATGCTAATCGGGTTTTTGAAATCGACGATCTATGGACAAATACCTTAGGCGGTCCTTTCGCCCTATGGAGTTATCGAAACATAAAAGGTTGGCTTCTAACTATTAGAAAA

SEQ ID NO: 5322 - protein, 171 aa, Streptococcus agalactiae
MLKRLLTEDGELTKISRRFVWMLVVIYCLIIVRMCFGPQIMIEGVSTPNVQRFGRIVALLVPFNSFRSLDQLTSFKEIFWVIGQNVVNILLLFPLIIGLLSLKPSLRKYKSVILLAFLMSLFIECTQVVLDILIDANRVFEIDDLWTNTLGGPFALWSYRNIKGWLLTIRK

SEQ ID NO: 5323 - protein, 1743 aa, Streptococcus agalactiae
ATGTCTATTATAAAAAATTTGTGGTGGTTTTTTAAGGAAGAAAAGAAGCGCTATCTTATTGGGATTTTGTCATTAAGTTTGGTTGCAGTGTTAAATCTTATCCCTCCTAAAATCATGGGATCAGTTATTGATGCTATTACAACTGGAAAATTAACAAGACCACAATTACTATGGAATTTATTAGGTTTGGTTTTGTCAGCTTTAGCTATGTATGGGCTGCGTTATATTTGGCGTATGTATATTTTAGGGACTTCTTACAAATTAGGCCAAGTTGTCAGATACCGTTTATTTGAACATTTTACAAAAATGTCTCCTTCTTTTTATCAGAAATATCGTACAGGTGATTTAATGGCGCACGCGACCAACGACATCAATTCTCTAACACGTCTTGCAGGAGGAGGAGTTATGTCAGCAGTGGATGCCTCTATCACAGCATTAGTAACGCTTATCACCATGTTCTTTACTATTTCGTGGCAAATGACATTAATTGCGGTTATCCCTTTGCCCTTAATGGCCTTAGCAACTAGTAAATTGGGGCGAAAAACCCATGAAACCTTCAAAGAATCTCAGGCAGCCTTTTCAGAATTAAATAATAAAGTGCAAGAAAGTGTCTCTGGCGTCAAAGTGACTAAATCATTTGGTTATCAAGAACAAGAAATTGCTTCTTTTCAAGAGATTAATCAGATGACTTTCGTGAAGAACATGCGGACCATGACTTATGATGTCATGTTTGATCCTTTAGTTCTTCTTTTTATAGGTGCCTCCTACGTATTAACATTGGCTATGGGAGCTTTTATGATTTCAAAAGGTCAAGTTACTGTTGGTGACTTGGTAACATTTGTGACATATTTAGATATGTTGGTATGGCCCTTGATGGCGATTGGTTTCTTGTTCAATATGGTACAGCGTGGTAGTGTTTCTTATAACCGTATTAATAGTCTACTTGAGCAAGAATCGGATATAACTGATCCTTTAAATCCTATCAAACCTGTTGTCAATGGAACATTAAGATATGATATTGATTTCTTTAGATACGACAATGAGGAAACCTTAGCCGATATTCATTTCACCTTAGAAAAAGGTCAAACCTTAGGTTTGGTAGGTCAAACGGGATCAGGGAAGACAAGTCTTATTAAGTTATTGCTACGTGAACATGATGTGACTCAGGGGAAAATTACTTTAAATAAACATGATATACGTGATTATCGATTGTCTGAGTTACGTCAACTAATCGGTTATATTCCTCAAGATCAGTTTTTATTTGCTACCAGTATTTTAGAAAATGTTCGCTTTGGAAATCCAACTCTATCTATCAATGCTGTCAAAGAAGCAACTAAATTGGCACATGTTTACGATGACATTGAACAGATGCCAGCAGGATTTGAGACTCTAATTGGAGAAAAAGGAGTCTCATTATCTGGTGGACAAAAACAAAGGATTGCGATGAGTCGTGCCATGATTTTAGATCCAGATATTCTTATTTTGGATGATTCTCTATCAGCAGTGGACGCTAAAACGGAACATGCTATTGTTGAGAATCTTAAAACGAATCGTCAAGGGAAATCGACTATTATTTCAGCACATCGTTTATCAGCTGTTGTGCACGCAGACCTTATCTTAGTTATGCGAGACGGCAGAGTCATTGAGCGAGGTCAACATCAAGAGTTGCTAAATAAAGGTGGTTGGTATGCTGAAACGTATGCCTCACAGCAATTAGAAATGGAGGAAGCATTTGATGAAGTC

SEQ ID NO: 5324 - protein, 581 aa, Streptococcus agalactiae
MSIIKNLWWFFKEEKKRYLIGILSLSLVAVLNLIPPKIMGSVIDAITTGKLTRPQLLWNLLGLVLSALAMYGLRYIWRMYILGTSYKLGQVVRYRLFEHFTKMSPSFYQKYRTGDLMAHATNDINSLTRLAGGGVMSAVDASITALVTLITMFFTISWQMTLIAVIPLPLMALATSKLGRKTHETFKESQAAFSELNNKVQESVSGVKVTKSFGYQEQEIASFQEINQMTFVKNMRTMTYDVMFDPLVLLFIGASYVLTLAMGAFMISKGQVTVGDLVTFVTYLDMLVWPLMAIGFLFNMVQRGSVSYNRINSLLEQESDITDPLNPIKPVVNGTLRYDIDFFRYDNEETLADIHFTLEKGQTLGLVGQTGSGKTSLIKLLLREHDVTQGKITLNKHDIRDYRLSELRQLIGYIPQDQFLFATSILENVRFGNPTLSINAVKEATKLAHVYDDIEQMPAGFETLIGEKGVSLSGGQKQRIAMSRAMILDPDILILDDSLSAVDAKTEHAIVENLKTNRQGKSTIISAHRLSAVVHADLILVMRDGRVIERGQHQELLNKGGWYAETYASQQLEMEEAFDEV

SEQ ID NO: 5325 - protein, 1737 aa, Streptococcus agalactiae
ATGAAGTCTAATCAATGGCAAGTCTTTAAGAGATTAATCTCCTATTTACGCCCTTATAAATGGTTTACAGTATTAGCTCTATCTCTCTTATTGTTGACGACTGTTGTTAAAAATATTATTCCTTTAATTGCTTCACATTTTATTGATCACTATCTGACAAATGTTAATCAAACAGCAGTTCTTATTTTAGTGGGATATTATTCAATGTATGTCTTGCAGACCTTAATTCAATATTTTGGGAATCTCTTTTTTGCGCGTGTTTCTTATAGTATTGTTAGAGATATTCGTAGAGATGCTTTTGCTAATATGGAAAGGCTAGGCATGTCTTATTTTGATAGGACACCGGCAGGATCTATTGTGTCACGTATTACTAATGATACTGAAGCAATATCTGATATGTTTTCGGGTATTTTATCAAGTTTTATCTCGGCGATATTTATTTTTACAGTTACTCTGTACACTATGTTGATGCTAGACATTAAACTAACAGGACTCGTCGCTCTTTTGTTACCTGTTATCTTTATATTAGTGAATGTCTATCGGAAAAAATCAGTCACTGTCATTGCTAAAACGAGAAGTTTACTTAGTGATATCAACAGTAAATTATCAGAAAGTATTGAAGGAATTCGCATTGTACAGGCTTTTGGTCAAGAAGAGCGCTTGAAGACTGAATTTGAGGAAATTAACAAAGAGCATGTTGTGTATGCCAATCGTTCTATGGCTCTTGATAGTCTCTTCTTAAGACCGGCGATGTCTCTTTTAAAACTCCTAGCATATGCTGTTCTTATGTCTTATTTTGGATTTACAGGAGTTAAAGGAGGTCTTACGGCAGGATTAATGTATGCTTTTATTCAGTACGTTAATCGTCTATTTGACCCTTTAATTGAAGTAACGCAAAATTTTTCAACCTTACAAACATCAATGGTATCAGCAGGGCGTGTGTTTGATCTGATTGATGAAACAGGTTTTGAACCAAGCCAAAAAAATACAGAAGCTTTTGTGAGAGAAGGAAATATCGAATTTAAAAATGTATCATTCTCATATGATGGAAAAAAACAAATCCTTGATAATGTTTCTTTTAGTGTTAAAAAAGGTGAAACTATTGCTTTTGTAGGAGCGACAGGTTCTGGAAAATCATCTATTATTAATGTCTTTATGAGGTTTTACGAATTTCAATCTGGACAAGTTTTATTAGATGGGAAGGATATTAGGGATTACTCACAAGAACAATTGCGAAAGAATATTGGACTCGTCTTACAAGACCCCTTTTTATATCATGGCACTATTAAATCTAATATCAAAATGTACCAAGACATCACCGATCAAGAGGTACAGGACGCAGCAGAGTTTGTTGATGCTGATCAATTTATTCAGAAGTTGCCAGATAAGTACGATTCAGCTGTTTCAGAACGTGGGTCAAGTTTTTCAACTGGACAACGCCAACTATTAGCGTTTGCCAGAACTGTGGCTAGTAAACCTAAAATTTTAATCTTAGATGAGGCGACAGCAAATATTGATTCGGAAACAGAGCAGATTGTACAAGATTCGTTAGCAAAAATGCGTCAAGGTCGAACAACAATTGCCATTGCTCACCGCTTATCAACCATTCAAGATGCTAATTGTATCTATGTTCTTGATAGAGGAAAGATAATTGAAAGTGGGAATCACGAGTCTTTATTAGACCAAAAAGGGACTTATTATCGTATGTACCAATTACAAGCCGGCATGATGGAGGTC

SEQ ID NO: 5326 - protein, 579 aa, Streptococcus agalactiae
MKSNQWQVFKRLISYLRPYKWFTVLALSLLLLTTVVKNIIPLIASHFIDHYLTNVNQTAVLILVGYYSMYVLQTLIQYFGNLFFARVSYSIVRDIRRDAFANMERLGMSYFDRTPAGSIVSRITNDTEAISDMFSGILSSFISAIFIFTVTLYTMLMLDIKLTGLVALLLPVIFILVNVYRKKSVTVIAKTRSLLSDINSKLSESIEGIRIVQAFGQEERLKTEFEEINKEHVVYANRSMALDSLFLRPAMSLLKLLAYAVLMSYFGFTGVKGGLTAGLMYAFIQYVNRLFDPLIEVTQNFSTLQTSMVSAGRVFDLIDETGFEPSQKNTEAFVREGNIEFKNVSFSYDGKKQILDNVSFSVKKGETIAFVGATGSGKSSIINVFMRFYEFQSGQVLLDGKDIRDYSQEQLRKNIGLVLQDPFLYHGTIKSNIKMYQDITDQEVQDAAEFVDADQFIQKLPDKYDSAVSERGSSFSTGQRQLLAFARTVASKPKILILDEATANIDSETEQIVQDSLAKMRQGRTTIAIAHRLSTIQDANCIYVLDRGKIIESGNHESLLDQKGTYYRMYQLQAGMMEV

SEQ ID NO: 5327 - protein, 564 aa, Streptococcus agalactiae
ATGTTACTATTGGTAGATAATTATGATTCTTTTACCTATAATTTAAAGCAATATTTAAGTGTCTATAAAGAAATATTCGTCATAAAAAATGATGATCCTAACCTTTTTTTATTAGCTGAGAGCGCAGAAGCTATCGTCTTATCACCTGGACCAGGACACCCAAAGGATGCTGGGAAAATATTAGAATTAATCAATCAGTTTATAGGACAGAAACCTATTCTAGGTATCTGTTTGGGGCATCAAGCGCTTGCTGAGTGCTTGGGTGGGCGATTAAATTTAGCAAATCACGTTATGCATGGTAAACAAAGTTGGGTAACAATAAACGACCATACTAGTTTGTTTAAGGGAATTGATAGTCCAACCCAAGTTATGCGTTATCACTCATTGGTAGTGACTGATTTACCAGAGAATATTGCTATTATTGCACGATCAAATGAGGATAATGAAATCATGGCATTCCATTGCCCCAGCTTAAAGGTATATGCGATGCAGTTTCATCCTGAGTCAATCGGGAGTATTGATGGAATGAAAATGATTGAAAACTTTTTGACGTTAATTAATGAC

SEQ ID NO: 5328 - protein, 188 aa, Streptococcus agalactiae
MLLLVDNYDSFTYNLKQYLSVYKEIFVIKNDDPNLFLLAESAEAIVLSPGPGHPKDAGKILELINQFIGQKPILGICLGHQALAECLGGRLNLANHVMHGKQSWVTINDHTSLFKGIDSPTQVMRYHSLVVTDLPENIAIIARSNEDNEIMAFHCPSLKVYAMQFHPESIGSIDGMKMIENFLTLIND

SEQ ID NO: 5329 - protein, 537 aa, Streptococcus agalactiae
ATGAAAACAAGAACAACTACCTATATTGCACTCATGGTTGCACTACTCATTGTTTTAGGTTTTATCCCAGGGATCCCATTAGGTTTCATTCCAGTCCCAATTGTCTTACAAAATCTTGGTGTTATGCTGGCAGGTGCTCTGCTTGGTAGTAGGAAAGGTTTCCTAGCTGTGGCTATTTTCTTGCTCTTAGTTGCTATTGGTGCACCATTTTTACCAGGAGGGCGGTCAGGTCTCGTAACGCTGTTTGGGCCAACAGCAGGCTATCTGCTGACTTATCCATTTGCAGCTTTTTTTATCGGCCTAGGGCTTGAGAAAGTGAAAACAACAAAACTCTGGGTTCAATTCCTTATTATTTGGATATTTGGCGTACTATTGATTGATATTTGTGGTAGCATCGTTCTTTCCTTTCAAACTTCTCTCCCCTTAACTAAATCACTATTTTCTAACCTTATTTTTATTCCTGGGGATACCTTAAAAGCATCCATTTGCTTGATTATTTATCGTAAATTTGCAGACAGATTAACTCATCTATACAAC

SEQ ID NO: 5330 - protein, 179 aa, Streptococcus agalactiae
MKTRTTTYIALMVALLIVLGFIPGIPLGFIPVPIVLQNLGVMLAGALLGSRKGFLAVAIFLLLVAIGAPFLPGGRSGLVTLFGPTAGYLLTYPFAAFFIGLGLEKVKTTKLWVQFLIIWIFGVLLIDICGSIVLSFQTSLPLTKSLFSNLIFIPGDTLKASICLIIYRKFADRLTHLYN

SEQ ID NO: 5331 - DNA, 990 bp, Streptococcus agalactiae
atgtcatttcaaacaaattatatccatttggctgacgaaatattatctggaaagactagcatttcttatgaacaagcgctggaaattctaaatagcgatgagaactggtgggaaatctacgctgctgccttataccttaaaaatcaagttagccgaaataatattcgccttaacgttttattaagtgctaagcaaggactttgtgcagaaaattgtggttactgttctcaatctaaagaaagcactgctgacattgataaatttggtctgcttcctcaaaatgtcattctaaaacaggctattgtcgctcatcaaaatggtgctagcgtcttttgtattgcgatgagtggaactaagcctagcaagagagaaattgagcagttatgtcaagtcatccctgaaatcaaaaaaagccttcctctagaaatatgccttaccgctggttttttggatagagaacaacttcatcagctaaaacaagcaggaattgaccgtatcaatcataacctcaacacccccgaagaaaactaccccaacattgcaacgacgcatagcttcaaagatcgttgtgatactttagaaagaattcacaatgaagacattgatgtttgttctggattcatttgtggtatgggagagagcgatgaggggctcatcacattagctttcagactaaaagaactgaacccctattctatccctgtcaattttttacttgctgttgaaggaacacctcttggaaaatataactatttgactcccattaaatgcttaaaaattatggccatgttgcgttttgtttttcctttcaaggaattaagattaagtgctggacgggaggtccattttgagaattttgaatcattagtcaccttacttgttgactcaacttttttgggaaattacctaacagaggggggtcgcaatcaacataccgatattgaattcttggaaaaattacaactaaatcatactaaaaaggaattaatt

SEQ ID NO: 5332 - protein, 330 aa, Streptococcus agalactiae
MSFQTNYIHLADEILSGKTSISYEQALEILNSDENWWEIYAAALYLKNQVSRNNIRLNVLLSAKQGLCAENCGYCSQSKESTADIDKFGLLPQNVILKQAIVAHQNGASVFCIAMSGTKPSKREIEQLCQVIPEIKKSLPLEICLTAGFLDREQLHQLKQAGIDRINHNLNTPEENYPNIATTHSFKDRCDTLERIHNEDIDVCSGFICGMGESDEGLITLAFRLKELNPYSIPVNFLLAVEGTPLGKYNYLTPIKCLKIMAMLRFVFPFKELRLSAGREVHFENFESLVTLLVDSTFLGNYLTEGGRNQHTDIEFLEKLQLNHTKKELI

SEQ ID NO: 5333 - DNA, 513 bp, Streptococcus agalactiae
atgaaaaaactatttaaaaaagcgatagctatgtgccgagatttgccgcttaattttgtaattgttgaacttagtttgtatcaaagagaggatggctcatctgataatattaaatggatttctaagcgaatccttgaggtaacggtaactgatcagcaatggatttaccatttgaggatgcttaatttaccaaaacttaagccaatgtcactagcatccagtgactgtcctgcaagggaagagaaggctagtcttatttcaatagaagaatgtcaaaaattcactagcttagtgcgagataaaaatccttttcaccaaggggaagcagctattgtgcctgcggctctattattggaaaaaataatggaagttagaaatggaaaaataaaggagattcatttgacttttttatctccagtaagggtgaatcaagaattctcagtgcaagtagtggataacacagtgattatttttcagcatcaaatattatgtgtgagggggacatatgaagaa

SEQ ID NO: 5334 - protein, 171 aa, Streptococcus agalactiae
MKKLFKKAIAMCRDLPLNFVIVELSLYQREDGSSDNIKWISKRILEVTVTDQQWIYHLRMLNLPKLKPMSLASSDCPAREEKASLISIEECQKFTSLVRDKNPFHQGEAAIVPAALLLEKIMEVRNGKIKEIHLTFLSPVRVNQEFSVQVVDNTVIIFQHQILCVRGTYEE

SEQ ID NO: 5335 - DNA, 1113 bp, Streptococcus agalactiae
atgaagaatagagatgtttatattggttttgggctacgaacacctatcggtataaaagggaagcaatttaaacattaccgtccagaacttttaggagcacacctcttaaatcaaataaaaaaaatagaatcagaatctaatattgatagtattatttgtgggaacacagttggtactgggggcaatattggtcgtttgatgactcttttttctgattatgaatcctatattccagtacaaacgattgatatgcagtgtgcttcatcaagttctgccttgttttttggttatctaaaaatcagtgccggtattaatgaaaaagttcttgttggggggattgaaagtagttctcttcaacctatgagacgttacgctaaagaagataatcgtaacggagaatataccgttgctcagttttctcctgactcttatgctgaaactgtaatgttagaaggggcacaaagagtctgtcaaaaatatggttttagaagagaaatgttagataaattggcattcttgagccataaacgcgccttaacagctaaacaaggtggctatttagaagaggtaatcttaccaatggaagggatgcgagatcaaggcgttagaaaactaaaagaagcattttttcaaaaattaccaagattgatggaaaattcacctttgctcactattggaaatgtttgtttaatgcacgatgctgctgcatttctaacgcttcagagtcagaaaacagaattccggattgttcacattgtagaagtagcaggagatcccaagcttagtccagaattggttcacacggctacggaaaaactattaacagaaactcatactaaaatatcggattatgatgcaattgaatggaatgaaccatttgcagcgattgatgctttatttaatcattattatcctgaagagagagaaaaattcaatatttttggaggggcattagcttacggacacccttatgcctgctcaggaattattaatatccttcatcttatgcaggcattaaaatataaaaataaacctatgggtctaactgccattgcaggggcaggaggagtcggaatggccatatcaatagagtacttaggagttaagaatgct

SEQ ID NO: 5336 - protein, 371 aa, Streptococcus agalactiae
MKNRDVYIGFGLRTPIGIKGKQFKHYRPELLGAHLLNQIKKIESESNIDSIICGNTVGTGGNIGRLMTLFSDYESYIPVQTIDMQCASSSSALFFGYLKISAGINEKVLVGGIESSSLQPMRRYAKEDNRNGEYTVAQFSPDSYAETVMLEGAQRVCQKYGFRREMLDKLAFLSHKRALTAKQGGYLEEVILPMEGMRDQGVRKLKEAFFQKLPRLMENSPLLTIGNVCLMHDAAAFLTLQSQKTEFRIVHIVEVAGDPKLSPELVHTATEKLLTETHTKISDYDAIEWNEPFAAIDALFNHYYPEEREKFNIFGGALAYGHPYACSGIINILHLMQALKYKNKPMGLTAIAGAGGVGMAISIEYLGVKNA

SEQ ID NO: 5337 - DNA, 1227 bp, Streptococcus agalactiae
atgcttgaatcattgaaaacaatagttaaaaccaatagcgataaaaagttatttgatggtgatttacaggtcagttatggagaattttataacttagtcagacaagatatggcgtcacaagacaataggaaacatgtgattagcacacactctctgcttaaccaattagtaagatttgtttcaaagttatgtcaaaaagctcttcctattatttgtaaacctaaccttactcataatgaaataagtcgattagaaaaagaagtgcagtatgctcctcaactagctgattttggtgttctttcttctgggactacagctgatgctaaactattgtggaggagcttcgcttcgtggtctgatttttttagcattcagaatgcttatttttcggtcacttccaatagcagactgtttattcaaggtgatttttcatttactggtaacttaaatttagcgctatcccttttattactggggggaacgcttgttgtcacacagaaaaattctgtaaaatactggcagactttatgggaaaaaactggtgtaacgcatctatatctgctccctagttatctcaagttagtggaacaatatagcaaggagactgcgttagacaataaaactattattacctcttcgcaatatgtctctgactcattactggaaggtttatatataaagcatcctaaagtgtcagtgaaaatcttctatggtgctagtgaactcaattatgtgtcatggtacgatggtcgtgatatccgagataagccacagtatgttggagaaatcgttccaaatgtagctgttaggattaaagagggaagaatttttgtaaaaacaccgtatagtatctgtggcctttcaagtgaatattgtgctggtgattatggtgaactgatagatggcaaattatatctatttggtcgtggtgacgattggtgcaatcaatcgggcattaagctctatttacctagattaattgaaaaaataaaaacatgcccttatatcaaggatgcagtagcatttacaaaagagagtcaaagtcatggacaagagtcacattgctgtattgttttaattgaaaatcagatgcaacaagagtgtttgaagtggttatcggaacattttgaaaagaagtatgggtttaagcattatcatattgtatctaaaattcctttgatgccatctggaaaaattgattatcaacaactcaaaagacaattagca

SEQ ID NO: 5338 - protein, 409 aa, Streptococcus agalactiae
MLESLKTIVKTNSDKKLFDGDLQVSYGEFYNLVRQDMASQDNRKHVISTHSLLNQLVRFVSKLCQKALPIICKPNLTHNEISRLEKEVQYAPQLADFGVLSSGTTADAKLLWRSFASWSDFFSIQNAYFSVTSNSRLFIQGDFSFTGNLNLALSLLLLGGTLVVTQKNSVKYWQTLWEKTGVTHLYLLPSYLKLVEQYSKETALDNKTIITSSQYVSDSLLEGLYIKHPKVSVKIFYGASELNYVSWYDGRDIRDKPQYVGEIVPNVAVRIKEGRIFVKTPYSICGLSSEYCAGDYGELIDGKLYLFGRGDDWCNQSGIKLYLPRLIEKIKTCPYIKDAVAFTKESQSHGQESHCCIVLIENQMQQECLKWLSEHFEKKYGFKHYHIVSKIPLMPSGKIDYQQLKRQLA

SEQ ID NO: 5339 - DNA, 630 bp, Streptococcus agalactiae
atgttatcaaaagcaaaatcacgatatattatccgtgagattattaagttatttccagatgctaaacctagcttagactttactaatgtctttgagcttttggtagctgtaatgctatcagctcaaacaactgatgcagctgttaataaagtcactcccgccctttttgaacgctttccaaatcctttagttttggcacaagctgatcccaaagagattgaaccctatatttctaaaattgggctttaccgtaataaagctcgattcttaaatcaatgcgctaaacaattgatagagcattttgatgggaaagtcccccaaactcgtcaagagctagaaagtttgtctggcgttggaaggaaaacggctaatgtggtcatgagtgttggatttggtattccggcttttgccgtagatactcatgtcactcggatttgtaaacaccaccagatttgcaaacagtcggcttctccactagaaattgagaaacgagtcatggaggttttaccgccagaagagtggctagctgctcatcaatccatgatttattttggtcgtgcaatttgtcatcctaaaaatccaaaatgcgaccagtacccacaactttatcactttcctgataatttaaag

SEQ ID NO: 5340 - protein, 210 aa, Streptococcus agalactiae
MLSKAKSRYIIREIIKLFPDAKPSLDFTNVFELLVAVMLSAQTTDAAVNKVTPALFERFPNPLVLAQADPKEIEPYISKIGLYRNKARFLNQCAKQLIEHFDGKVPQTRQELESLSGVGRKTANVVMSVGFGIPAFAVDTHVTRICKHHQICKQSASPLEIEKRVMEVLPPEEWLAAHQSMIYFGRAICHPKNPKCDQYPQLYHFPDNLK

SEQ ID NO: 5341 - protein, 387 aa, Streptococcus agalactiae
ATGTCTACCATCTATTTTATTTCTTTATGCATGAGTTTTATCTTAAGTTATTATGATATAAAATACCAAGAGTATCCTATTTTTCTATGGATATTATTCACCATTTCAACGATAATTCTCACACCGATTACAAAAGTTTCTATTGTTTTATGTTTATTTGGGATTTTAGCTGAAGTGGTTGATATTAATATCGGAAGTGGAGATTTCCTTTATTTAGCCACAATTGGCTTATCTTTACCTCTTCATCAAATGCTTTTTATTATTCAAATAGGTGCTTGGTTAGGAATTATTTATTGTTTAGTTATGAGAAAAATGAAAAAAACGATAGCTTTTCTACCGTTTTTAAGTATCGCTTATATAATCGTCACCAGTTACTCTCTTTTATTC

SEQ ID NO: 5342 - protein, 129 aa, Streptococcus agalactiae
MSTIYFISLCMSFILSYYDIKYQEYPIFLWILFTISTIILTPITKVSIVLCLFGILAEVVDINIGSGDFLYLATIGLSLPLHQMLFIIQIGAWLGIIYCLVMRKMKKTIAFLPFLSIAYIIVTSYSLLF

SEQ ID NO: 5343 - protein, 207 aa, Streptococcus agalactiae
ATGAAAGTTTTATTCGATGTGCAGAATCTTTTGAAAAAATTTGGTATTTATGTTTATATTGGTAAACGTCTTTATGATATCGAAGTTATGAAGATTGAATTGCAACGTCTCTACGATAATGGTCTGATAAGTAGAGATGACTATTTAAAAGCAGAACTGATTTTAAGAAGAGAGCACAGACTAGAATTGGAGAAGGAAAATAAAAAA

SEQ ID NO: 5344 - protein, 69 aa, Streptococcus agalactiae; identical to SEQ ID NO: 966

SEQ ID NO: 5345 - protein, 966 aa, Streptococcus agalactiae
ATGAGTAAGAAATTATTGGGAATTGACCTCGGAGGAACGACCATTAAATTTGGTATCTTGACGCTTGAGGGAGAAGTACAAGAAAAATGGGCAATTGAGACCAATACTTTAGAAAACGGAAGACATATCGTTTCTGATATCGTTGAATCTCTCAAACATCGTTTGAGCCTCTATGGATTAACAAAAGATGACTTTCTCGGTATCGGTATGGGTTCTCCAGGAGCTGTTGATAGAACTAGTAAAACAGTAACAGGTGCTTTTAATCTAAATTGGGCTGATACTCAAGAAGTAGGTTCGGTTATTGAAAAAGAAGTTGGAATTCCATTTTTTATTGATAACGATGCTAATGTTGCAGCACTTGGTGAACGCTGGGTAGGTGCTGGTGCCAATAATCCCGATGTTGTTTTCGTAACCCTCGGAACAGGAGTAGGTGGAGGTGTTATCGCAGATGGTAACCTCATCCATGGTGTTGCAGGAGCAGGTGGAGAAATTGGGCATATGATTGTTGATCCAGAAAATGGATTTACGTGCACATGTGGTAACAAAGGCTGTCTTGAGACAGTTGCATCAGCGACAGGTGTTGTTAGAGTAGCACGTCAACTCGCAGAACAATATGAAGGTTCGTCTGCCATTAAAGCAGCGATTGACAACGGTGATACTGTTACAAGTAAAGATATTTTTATAGCAGCAGAAGATGGGGATAAATTTGCTAATTCTGTTGTTGAACGTGTATCACGTTACCTTGGACTGGCAGCAGCTAATATTTCAAATATTTTAAACCCTGATTCTGTGGTTATTGGTGGCGGTGTCTCAGCAGCAGGTGAATTTTTACGTAGTCGCGTTGAGAAATACTTTGTCACATTTGCTTTCCCACAAGTTAAAAAGTCAACTAAAATTAAGATTGCTGAACTAGGTAATGATGCTGGTATTATTGGTGCAGCAAGCTTAGCCAATCAACAAGCAAGT

SEQ ID NO: 5346 - protein, 322 aa, Streptococcus agalactiae; identical to SEQ ID NO: 968

SEQ ID NO: 5347 - protein, 378 aa, Streptococcus agalactiae
ATGGATATGTCTGTTATTTTAATTATCGTTATTCTTCTGGCTTTTGTTGCTTGGGCATCTTGGAATTATTGGAGGGTTCGTAGGGCAGCTAAATTTTTAGATAACGAGTCTTTTCAAAAAGAAATGTCACGAGGACAGTTAATTGATATCCGAGAAGCTGGTGCTTTTCATAGAAAGCATATTCTCGGAGCACGTAACATTCCAGCAAGTCAATTTAAAGTTGCCTTATCGGCTTTACGCAAAGATAAACCTGTCCTCTTATATGACGCAAGCCGTGGTCAGTCTATTCCAAGGATTGTTTTGTTACTCAGAAAAGAAGGTTTTAATCAACTTTACGTGTTAAAGGACGGTTTCAATTACTGGACGGGTAGAGTTAAG

SEQ ID NO: 5348 - protein, 126 aa, Streptococcus agalactiae; identical to SEQ ID NO: 970

SEQ ID NO: 5349 - protein, 1839 aa, Streptococcus agalactiae
ATGACAAATTTAAGAACAGATATCCGTAACGTTGCGATCATTGCCCACGTTGACCACGGTAAAACAACTCTCGTTGATGAATTATTAAAACAATCACATACTCTTGATGAGCGTAAAGAGCTTGAAGAACGTGCAATGGATTCAAATGATATCGAGAAAGAACGTGGTATCACCATTCTTGCAAAAAATACAGCCGTAGCATACAACGATGTTCGTATCAATATTATGGACACACCTGGTCACGCGGACTTTGGTGGTGAAGTTGAGCGTATTATGAAAATGGTTGATGGTGTTGTTTTAGTCGTTGATGCTTACGAAGGAACAATGCCACAAACACGTTTTGTTTTGAAGAAAGCTCTTGAACAAAACTTAATTCCAATCGTTGTTGTAAATAAAATTGATAAGCCATCAGCTCGTCCATCAGAGGTTGTTGATGAAGTTCTTGAACTCTTCATTGAGCTCGGTGCTGATGATGACCAACTAGATTTCCCTGTTGTTTATGCTTCAGCCATCAATGGAACATCTTCAATGTCAGATGATCCTTCAGATCAAGAAAAAACAATGGCACCGATTTTTGATACTATCATTGATCACATTCCAGCCCCAGTTGACAACTCGGAAGAACCACTTCAATTCCAAGTTTCTCTTCTTGATTACAATGATTTTGTAGGACGTATTGGTATTGGACGTGTTTTCCGCGGGACTGTCAAAGTTGGAGATCAAGTTACTCTTTCAAAACTTGATGGTACAACTAAAAACTTCCGCGTAACAAAACTTTTTGGTTTCTTTGGACTTGAACGTAAAGAAATCCAAGAGGCTAAAGCGGGTGATTTAATCGCTGTTTCTGGTATGGAAGATATCTTCGTTGGTGAGACAGTAACTCCGACAGATGATATTGAACCACTACCAGTTTTACGTATTGACGAGCCAACACTTCAAATGACTTTCTTGGTGAATAATTCACCATTTGCAGGTCGCGAAGGTAAATGGATTACGTCACGTAAGGTTGAAGAACGTCTTTTAGCAGAATTACAAACAGACGTTTCTTTGCGTGTTGACCCAACAGATTCGCCAGATAAATGGACGGTTTCAGGGCGTGGAGAATTACATTTATCTATCCTCATTGAAACAATGCGTCGTGAGGGATATGAACTTCAAGTATCACGTCCAGAAGTTATCATCAAAGAAATTGATGGTGTTCAATGCGAGCCGTTTGAGCGTGTTCAAATTGATACTCCAGAAGAATATCAGGGTGCTATTATCCAAAGTTTGTCAGAGCGTAAAGGTGATATGCTTGATATGCAGATGGTTGGTAATGGTCAAACGCGTTTGATTTTCTTGATTCCTGCACGTGGTTTGATTGGTTATTCAACAGAGTTTCTTTCAATGACACGTGGATATGGTATCATGAATCATACTTTTGACCAGTATCTACCGGTTGTTCAAGGAGAAATTGGTGGTCGTCATCGTGGTGTCTTGGTTTCTATTGAAAATGGTAAAGCAACTACATATTCAATTATGCGTATTGAAGAACGTGGGACTATCTTTGTAAATCCAGGTACAGAAGTTTATGAAGGAATGATTGTTGGTGAGAATTCTCGTGATAATGATCTCGGAGTCAATATTACAACTGCTAAACAAATGACAAATGTCCGTTCAGCAACTAAAGATCAAACTGCAGTCATCAAGACGCCTCGTATCCTTACTTTAGAAGAGTCACTTGAATTTTTAGCAGATGATGAGTACATGGAAGTAACTCCTGAGTCTATTCGTCTTCGTAAACAAATTTTAAATAAAGCAGCACGTGACAAAGCTAATAAAAAGAAAAAATCAGCTGAA

SEQ ID NO: 5350 - protein, 613 aa, Streptococcus agalactiae
MTNLRTDIRNVAIIAHVDHGKTTLVDELLKQSHTLDERKELEERAMDSNDIEKERGITILAKNTAVAYNDVRINIMDTPGHADFGGEVERIMKMVDGVVLVVDAYEGTMPQTRFVLKKALEQNLIPIVVVNKIDKPSARPSEVVDEVLELFIELGADDDQLDFPVVYASAINGTSSMSDDPSDQEKTMAPIFDTIIDHIPAPVDNSEEPLQFQVSLLDYNDFVGRIGIGRVFRGTVKVGDQVTLSKLDGTTKNFRVTKLFGFFGLERKEIQEAKAGDLIAVSGMEDIFVGETVTPTDDIEPLPVLRIDEPTLQMTFLVNNSPFAGREGKWITSRKVEERLLAELQTDVSLRVDPTDSPDKWTVSGRGELHLSILIETMRREGYELQVSRPEVIIKEIDGVQCEPFERVQIDTPEEYQGAIIQSLSERKGDMLDMQMVGNGQTRLIFLIPARGLIGYSTEFLSMTRGYGIMNHTFDQYLPVVQGEIGGRHRGVLVSIENGKATTYSIMRIEERGTIFVNPGTEVYEGMIVGENSRDNDLGVNITTAKQMTNVRSATKDQTAVIKTPRILTLEESLEFLADDEYMEVTPESIRLRKQILNKAARDKANKKKKSAE

SEQ ID NO: 5351 - DNA, 243 bp, Streptococcus agalactiae
atgttttacttaattgttgcccttttgattgccttatattacttttttatggcaccaaaaacagtacgtaatactttgaacgctattggtttagtaggtttggtagccttattacttgtcttggcagttatgagttttattaaaatccttcaattgccaggtgaattgtatattgggcttataatgattcctctaggatatacagcatttaaagaaacattgaatttgtcagaaaagaagaaa

SEQ ID NO: 5352 - protein, 81 aa, Streptococcus agalactiae; identical to SEQ ID NO: 976

SEQ ID NO: 5353 - DNA, 1353 bp, Streptococcus agalactiae
atgaaaacaataacaacatttgaaaataaaaaagttttagtccttggtttagcacgatctggagaagccgctgcacgtttgttagctaagttaggagcaatagtgacagttaatgatggcaaaccatttgatgaaaatccaacagcacagtctttgttggaagagggtattaaagtggtttgtggtagtcatcctttagaattgttagatgaggatttttgttacatgattaaaaatccaggaataccttataacaatcctatggtcaaaaaagcattagaaaaacaaatccctgttttgactgaagtggaattagcatacttagtttcagaatctcagctaataggtattacaggctctaacgggaaaacgacaacgacaacgatgattgcagaagtcttaaatgctggaggtcagagaggtttgttagctgggaatatcggctttcctgctagtgaagttgttcaggctgcggatgataaagatattctagttatggaattatcaagttttcagctaatgggagttaaggaatttcgtcctcatattgcagtaattactaatttaatgccaactcatttagattatcatgggtcttttgaagattatgttgctgcaaaatggaatatccaaaatcaaatgtcttcatctgattttttggtacttaattttaatcaaggtatttctaaagagttagctaaaactactaaagcaacaatcgttcctttctctactacggaaaaagttgatggtgcttacgtacaagacaagcaacttttctataaaggggagaatattatgttagtagatgacattggtgtcccaggaagccataacgtagagaatgctctagcaactattgcggttgctaaactagctggtatcagtaatcaagttattagagaaactttaagcaattttggaggtgttaaacaccgcttgcaatcactcggtaaggttcatggtattagtttctataacgacagcaagtcaactaatatattggcaactcaaaaagcattatctggctttgataatactaaagttatcctaattgcaggaggtcttgatcgcggtaatgagtttgatgaattgataccagatatcactggacttaaacatatggttgttttaggggaatcggcatctcgagtaaaacgtgctgcacaaaaagcaggagtaacttatagcgatgctttagatgttagagatgcggtacataaagcttatgaggtggcacaacagggcgatgttatcttgctaagtcctgcaaatgcatcatgggacatgtataagaatttcgaagtccgtggtgatgaattcattgatactttcgaaagtcttagaggagag

SEQ ID NO: 5354 - protein, 451 aa, Streptococcus agalactiae
MKTITTFENKKVLVLGLARSGEAAARLLAKLGAIVTVNDGKPFDENPTAQSLLEEGIKVVCGSHPLELLDEDFCYMIKNPGIPYNNPMVKKALEKQIPVLTEVELAYLVSESQLIGITGSNGKTTTTTMIAEVLNAGGQRGLLAGNIGFPASEVVQAADDKDILVMELSSFQLMGVKEFRPHIAVITNLMPTHLDYHGSFEDYVAAKWNIQNQMSSSDFLVLNFNQGISKELAKTTKATIVPFSTTEKVDGAYVQDKQLFYKGENIMLVDDIGVPGSHNVENALATIAVAKLAGISNQVIRETLSNFGGVKHRLQSLGKVHGISFYNDSKSTNILATQKALSGFDNTKVILIAGGLDRGNEFDELIPDITGLKHMVVLGESASRVKRAAQKAGVTYSDALDVRDAVHKAYEVAQQGDVILLSPANASWDMYKNFEVRGDEFIDTFESLRGE

SEQ ID NO: 5355 - DNA, 1074 bp, Streptococcus agalactiae
atggggaaaaaaattgtttttacaggtggtggtacggtaggtcatgtaacactaaacctaatattaatccccaaatttatcaaagatggttgggaagtacattatattggtgataaaaatggcatagaacatgaacaaattaatcagtctggacttgatatcacatttcactctatagctactgggaaactacgtcgctatttttcatggcaaaatatgttagatgtctttaaagtaggggttggcgttcttcaatcgattgctattattgctaaacttagaccccaagccttattttcaaaagggggatttgtttcagtacctcctgtagtagctgcacgcctattaaaagttcctgtttttgttcatgaatcagatttatcaatggggttagcaaataagattgcttataaatttgcgactattatgtatacgacttttgaacaatctaaagatttaatcaaaactaagcatattggtgctgtaacaaaagtcatggattgtaaaaagtcgtttgaaaatactgacttaactagtataaaagaagccttcgatccaaacctaaagaccttactatttattggaggatcagcaggtgcaaaagtattcaatgattttattactcaaacacctgagctggaagaaaaatataatgttatcaatatttcaggcgattcttctctcaatcgattgaagaagaacctttatcgcgtggattatgttacagacctttatcagcctttaatgaatttagcagatgtggttgttacacgaggtggctctaatactatttttgaattagtagctatgaaaaaacttcatcttattatccctcttggacgtgaagcgagccgaggtgaccaattagagaatgctgcttattttgaagaaaagggctacgcattgcagttaccagaatctgaattaaacataaatacacttgagaaacagataaatttattaatttctaacagtgagagttacgaaaaaaacatgtcacaatcatctgaaataaaatctcaagatgaattttatcaattattaattgatgatatggcaaaagtaacaaaagga

SEQ ID NO: 5356 - protein, 358 aa, Streptococcus agalactiae; identical to SEQ ID NO: 980

SEQ ID NO: 5357 - DNA, 1134 bp, Streptococcus agalactiae
atgcctaagaagaaatcagataccccagaaaaagaagaagttgtcttaacggaatggcaaaagcgtaaccttgaatttttaaaaaaacgcaaagaagatgaagaagaacaaaaacgtattaacgaaaaattacgcttagataaaagaagtaaattaaatatttcttctcctgaagaacctcaaaatactactaaaattaagaagcttcattttccaaagatttcaaaacctaagattgaaaagaaacagaaaaaagaaaaaatagtcaacagcttagccaaaactaatcgcattagaactgcacctatatttgtagtagcattcctagtcattttagtttccgttttcctactaactccttttagtaagcaaaaaacaataacagttagtggaaatcagcatacacctgatgatattttgatagaaaaaacgaatattcaaaaaaacgattatttcttttctttaatttttaaacataaagctattgaacaacgtttagctgcagaagatgtatgggtaaaaacagctcagatgacttatcaatttcccaataagtttcatattcaagttcaagaaaataagattattgcatatgcacatacaaagcaaggatatcagcctgtcttggaaactggaaaaaaggctgatcctgtaaatagttcagagctaccaaagcacttcttaacaattaaccttgataaggaagatagtattaagctattaattaaagatttaaaggctttagaccctgatttaataagtgagattcaggtgataagtttagctgattctaaaacgacacctgacctcctgctgttagatatgcatgatggaaatagtattagaataccattatctaaatttaaagaaagacttcctttttacaaacaaattaagaagaaccttaaggaaccttctattgttgatatggaagtgggagtttacacaacaacaagtactattgaatcaacccctgtgaaagcggaagatacaaaaaataaatcaactgataaaacacaaacacaaaatggtcaggttgcggaaaatagtcaaggacaaacaaataactcaaatactaatcaacaaggacaacagatagcaacagagcaggcacccaaccctcaaaatgttaat

SEQ ID NO: 5358 - protein, 378 aa, Streptococcus agalactiae
MPKKKSDTPEKEEVVLTEWQKRNLEFLKKRKEDEEEQKRINEKLRLDKRSKLNISSPEEPQNTTKIKKLHFPKISKPKIEKKQKKEKIVNSLAKTNRIRTAPIFVVAFLVILVSVFLLTPFSKQKTITVSGNQHTPDDILIEKTNIQKNDYFFSLIFKHKAIEQRLAAEDVWVKTAQMTYQFPNKFHIQVQENKIIAYAHTKQGYQPVLETGKKADPVNSSELPKHFLTINLDKEDSIKLLIKDLKALDPDLISEIQVISLADSKTTPDLLLLDMHDGNSIRIPLSKFKERLPFYKQIKKNLKEPSIVDMEVGVYTTTSTIESTPVKAEDTKNKSTDKTQTQNGQVAENSQGQTNNSNTNQQGQQIATEQAPNPQNVN

SEQ ID NO: 5359 - DNA, 1371 bp, Streptococcus agalactiae
atggctagaaatggcttttttactggtttggatataggaacaagctcgattaaagttttagttgcagaatttattgcaaatgaaatgaatgtaattggggttagcaacgtccctagttccggtgtaaaagatggtataattattgatattgaggcagcagcaactgcaatcaaagaggcggtaaaacaagctgaggagaaagcaggcatcaccattgacaaaatcaatgttggattaccagcaaatcttctccaaattgaaccaactcaaggaatgattcctgttcccaatgaatcaaaagaaattaaggatgaagatgtcgaaagtgttgttaaatcagcattgactaaaagcattactcctgaaagagaagttatttcattgattccgcttgaattcattgtagatggtttccaagggattagagaccctagagggatgatggggattcgccttgagatgcgtggtcttatctatactggaccaacaactatccttcataatcttcgtaaaactgttgaacgagcaggtataaaagtagagcatgttgtgattgcccctctagccttagcaaaatcagttctaaacgaaggtgaacgtgagtttggtgcaactgtgattgatatgggaggcggacaaacaacagtcgcttctatgcgtaatcaagaattgcaatatactaatatttattctgaaggtagcgattatgtcaccaaagatatttctaaagtgttacgtacaacagtagaaatcgccgaagcattgaaattcaactttggacaagctaatgttgaagaagcaagtacttctgatacagttcaagttaatgttgttggtaacgaggaacctgttgaaattacagaaagctatctttcgcaaattatttcaggacgtattcgtcaaattttagaacatgtcaaacaagacttgggtagaggtcgtttacttgatttacctggtggtattattcttgttggaggtggtgcaattatgccaggagttgtcgaggttgctcaacaaatttttggaactagagttaaattgcacgttccaaaccaagtaggtattcgcaatccaatgttcgctaatgttattagtatcgttgattatgtaggaatgatgtcagaagttgacattatcgcacaacatgctgtaactggcgacgaaatgctaagacataaaccagtcgactttgattataaagaaaaaacaaatacaatgtcgacaatgccttattctgagccgttagcctcttctatggaagattctaatttagaaccaatccgagcaagagaaaacgctcaagagcctactgagcctaaagctaatattggtgagcgcatcagaggaatttttggaagtatgtttgac

SEQ ID NO: 5360 - protein, 457 aa, Streptococcus agalactiae
MARNGFFTGLDIGTSSIKVLVAEFIANEMNVIGVSNVPSSGVKDGIIIDIEAAATAIKEAVKQAEEKAGITIDKINVGLPANLLQIEPTQGMIPVPNESKEIKDEDVESVVKSALTKSITPEREVISLIPLEFIVDGFQGIRDPRGMMGIRLEMRGLIYTGPTTILHNLRKTVERAGIKVEHVVIAPLALAKSVLNEGEREFGATVIDMGGGQTTVASMRNQELQYTNIYSEGSDYVTKDISKVLRTTVEIAEALKFNFGQANVEEASTSDTVQVNVVGNEEPVEITESYLSQIISGRIRQILEHVKQDLGRGRLLDLPGGIILVGGGAIMPGVVEVAQQIFGTRVKLHVPNQVGIRNPMFANVISIVDYVGMMSEVDIIAQHAVTGDEMLRHKPVDFDYKEKTNTMSTMPYSEPLASSMEDSNLEPIRARENAQEPTEPKANIGERIRGIFGSMFD

SEQ ID NO: 5361 - protein, 1278 aa, Streptococcus agalactiae
ATGGTATTTTCATTTGATACAGCATCAGTACAAGGTGCAGTTATTAAAGTTATTGGTGTTGGAGGCGGTGGCGGTAACGCTATTAACCGCATGATTGACGAAGGTGTCGCTGGCGTTGAGTTTATTGCAGCAAATACTGATATTCAAGCCTTAAGTAGCTCAAAAGCTGAAACTGTCATTCAACTTGGTCCAAAATTAACTCGCGGACTTGGTGCAGGAGGACAACCTGAAGTTGGTCGTAAAGCAGCTGAAGAAAGTGAAGAAGTTTTAACAGAAGCACTTACTGGCGCTGATATGGTATTTATCACAGCAGGTATGGGGGGCGGATCTGGTACAGGTGCGGCTCCAGTTATTGCACGTATTGCAAAGAGTTTAGGAGCACTTACAGTAGCGGTTATCACACGTCCTTTTGGCTTTGAGGGTAATAAACGTTCTAACTTCGCTATCGAAGGTATTCAAGAATTAAGAGAACAAGTTGATACACTGCTTATCATTTCAAATAATAATCTTCTTGAAATTGTAGATAAGAAGACACCATTGCTTGAAGCTCTTAGTGAAGCAGATAATGTTTTACGTCAAGGTGTTCAAGGTATTACAGATTTGATTACTAACCCAGGTTTAATTAACCTTGACTTTGCAGATGTTAAAACAGTTATGGCAAATAAAGGTAATGCACTGATGGGAATTGGTATCGGTTCTGGTGAGGAACGTATTACTGAAGCTGCTCGAAAAGCAATTTATTCACCACTTCTTGAAACAACGATTGATGGAGCAGAAGACGTTATTGTCAATGTTACCGGCGGTATGGATATGACACTTACTGAAGCAGAGGAAGCATCAGAGATTGTTAGCCAAGCAGCAGGTAAAGGTGTCAATATTTGGTTAGGCACTTCAATTGACATGGATATGAAAGACGAAATCCGCGTAACAGTTGTTGCAACAGGTGTGCGTAAAGATAAAACTAATCAAGTATCTGGTTTTACAACATCAGCTCCAACTAATCAAGCACCTTCAGAACGTCAAAGTACTTCAAATTCAAACTTTGATCGTCGTGGCAACTTTGATATGACAGAGTCTCGCGAAATGCCAACTCAACAAAATCAGCCTCATGCACAAAATCAGCAACAAAGTTCTGCTTTTGGTAATTGGGACCTTCGTCGTGATAATATTTCACGTCCGACAGAAGGTGAACTTGATAGCAAGTTGTCTATGTCAACGTTTTCAGAAAATGATGATATGGATGATGAACTTGAAACACCTCCATTCTTTAAAAACCGT

SEQ ID NO: 5362 - protein, 426 aa, Streptococcus agalactiae; identical to SEQ ID NO: 986

SEQ ID NO: 5363 - protein, 672 aa, Streptococcus agalactiae
ATGATGAATTTACAAGAAAATAAAACAGCGATTTTTGACAATGTTAGTAAATTAGCACTAAAAGCAGGTCGCGCTCCTGAATCAGTTCATATCGTAGCTGTAACAAAATATGTTAACTGTCAAACAACAGAAGCGCTTATTAGAACAGGTGTTAATCATATCGGTGAAAATCGTGTTGATAAATTTCTTGAAAAATATCAAGCATTAAAAGATGAAAAGCTTACATGGCATCTCATTGGTAGTTTACAACGTCGAAAAGTTAAAGATGTCATTAATTATGTTGATTATTTTCATGCTTTAGATTCTGTTAAGTTAGCAGCTGAGATTCAAAAACGTGCTCAAAAACCAGTTAAATGTTTTCTACAAGTTAATATATCACGAGAAGACAGTAAGCATGGTTTTACTATTGAGCAAATAGATGATGCACTGAACTTAATTTCTCGGTACGATAAAATTGAACTTATCGGCATCATGACTATGGCTCCCTTAAAAGCAACTAAAGAGGAAATATCATCAATTTTTGAAGAGACTGAGAGTCTTAGGAAAAGGCTTCAAGCTAGGAACATAGAACGAATGCCGTTTACAGAATTAAGCATGGGCATGAGTAGAGATTATGATATTGCTATTCAAAATGGATCAACATTTGTAAGGATAGGAACTTCATTCTTTAAA

SEQ ID NO: 5364 - protein, 224 aa, Streptococcus agalactiae
MMNLQENKTAIFDNVSKLALKAGRAPESVHIVAVTKYVNCQTTEALIRTGVNHIGENRVDKFLEKYQALKDEKLTWHLIGSLQRRKVKDVINYVDYFHALDSVKLAAEIQKRAQKPVKCFLQVNISREDSKHGFTIEQIDDALNLISRYDKIELIGIMTMAPLKATKEEISSIFEETESLRKRLQARNIERMPFTELSMGMSRDYDIAIQNGSTFVRIGTSFFK

SEQ ID NO: 5365 - protein, 603 aa, Streptococcus agalactiae
ATGGCATTAAAAGATAGATTTGACAAAATTATTTCTTATTTTGACACTGACGATGTAAGTGAAAATGAAGTACACGAAGTACAAGAGAGAACTTCAGTGCAAAGAGATTCCAGAGCAGCTACAGCACAGGAAGCTTCTCAGCGTAGTCATATGACTAACTCCGCAGAGGAAGAGATGATTGGTAGTCGTCCGAGAACTTCTACCTATAATCCTAATCGTCAGGAGAGACAAAGGGTACAGAGAGACAATGCTTATCAGCAAGCTACTCCTAGGATTCAAAATAAAGACTCAGTTCGACAACAGAGAGAACAAGTAACAATTGCTCTGAAGTATCCCCGTAAGTATGAGGATGCACAAGAAATTGTTGATTTACTTATCGTTAATGAATGTGTCTTGATTGATTTTCAATATATGCTTGATGCGCAAGCACGACGTTGCTTGGATTATATTGATGGTGCAAGTAGAGTATTATATGGTTCATTACAAAAGGTTGGGAGTTCAATGTTTCTATTAACACCAGCCAATGTTATGGTCGATATTGAGGAGATGAATATTCCAAAGACTGGTCAAGAGACGAGTTTTGATTTTGATATGAAGAGACGA

SEQ ID NO: 5366 - protein, 201 aa, Streptococcus agalactiae
MALKDRFDKIISYFDTDDVSENEVHEVQERTSVQRDSRAATAQEASQRSHMTNSAEEEMIGSRPRTSTYNPNRQERQRVQRDNAYQQATPRIQNKDSVRQQREQVTIALKYPRKYEDAQEIVDLLIVNECVLIDFQYMLDAQARRCLDYIDGASRVLYGSLQKVGSSMFLLTPANVMVDIEEMNIPKTGQETSFDFDMKRR

SEQ ID NO: 5367 - protein, 498 aa, Streptococcus agalactiae
GTGTCTACTTCAGGTTTAGCACATAAAATTCGTGAATTTGCAAATGAAGGTGTACAAGTTAACTTATCAGTATCTCTTCATGCTCCAAATAATGAATTACGATCAAGTATCATGCGTATTAATCGGTCTTTCCCTCTTGAAAAGTTGTTTGCGGCTATTGAATATTATATTGAGACGACTAACCGTCGTGTAACATTTGAGTATATTATGTTAAATGGTGTCAACGATACCCCAGAAAATGCTCAAGAGTTAGCAGATTTAACGAAAAAGATTCGCAAATTATCTTATGTCAATTTAATTCCTTACAATCCTGTCTCAGAACATGACCAGTATAGTCGTAGTCCTAAAGAGCGTGTGGAAGCTTTCTATGACGTTTTGAAGAAAAATGGAGTTAATTGTGTTGTTCGTCAAGAACATGGTACGGACATTGATGCAGCTTGCGGACAATTACGTTCAAACACAATGAAACGCGATCGTCAAAAAGCGAAGGTAGGGCGG

SEQ ID NO: 5368 - protein, 166 aa, Streptococcus agalactiae
MSTSGLAHKIREFANEGVQVNLSVSLHAPNNELRSSIMRINRSFPLEKLFAAIEYYIETTNRRVTFEYIMLNGVNDTPENAQELADLTKKIRKLSYVNLIPYNPVSEHDQYSRSPKERVEAFYDVLKKNGVNCVVRQEHGTDIDAACGQLRSNTMKRDRQKAKVGR

SEQ ID NO: 5369 - protein, 684 aa, Streptococcus agalactiae
ATGCAGTCCTCGGAATCCCTCGGTCTTCCACCTAATTCATTGAGTACAGAAGAATCCATTAAGCAAGGTGTGAAGTATTTCAGTGAATTATTAGCCAGTAGCGAAAGGCTCAGTGTAGATTTAGAATCGGTTATCCAGTCCTACAATTATGGTGGTGGTTTCTTAGGGTATGTGGCTAATCGTGGAAATAAATATACCTTTGAACTGGCTCAAAGTTTCTCAAAAGAGTATTCAGGTGGCGAAAAAGTGTCTTACCCCAATCCCATAGCCATACCTATCAATGGGGGCTGGCGATACAACTATGGCAATATGTTTTATGTGCAACTGGTAACGCAGTATCTTGTCACAACAGAGTTTGATGATGATACGGTACAAGCCATCATGGACGAAGCACTGAAATATGAGGGCTGGCGATACGTTTACGGTGGAGCTTCCCCGACTACTTCTTTTGATTGTAGCGGACTGACACAATGGACGTATGGAAAAGCTGGAATTAACTTACCACGAACCGCACAACAGCAATATGATGTGACCCAGCATATCCCACTATCGGAAGCACAAGCTGGCGATTTGGTTTTCTTTCATTCTACCTATAACGCTGGCTCTTATATTACTCATGTTGGGATATACCTTGGCAATAACCGTATGTTTCATGCAGGCGACCCAATCCCCTCAATCATAATT

SEQ ID NO: 5370 - protein, 228 aa, Streptococcus agalactiae
MQSSESLGLPPNSLSTEESIKQGVKYFSELLASSERLSVDLESVIQSYNYGGGFLGYVANRGNKYTFELAQSFSKEYSGGEKVSYPNPIAIPINGGWRYNYGNMFYVQLVTQYLVTTEFDDDTVQAIMDEALKYEGWRYVYGGASPTTSFDCSGLTQWTYGKAGINLPRTAQQQYDVTQHIPLSEAQAGDLVFFHSTYNAGSYITHVGIYLGNNRMFHAGDPIPSIII

SEQ ID NO: 5371 - DNA, 603 bp, Streptococcus agalactiae
atggcattaaaagatagatttgacaaaattatttcttattttgacactgacgatgtaagtgaaaatgaagtacacgaagtacaagagagaacttcagtgcaaagagattccagagcagctacagcacaggaagcttctcagcgtagtcatatgactaactccgcagaggaagagatgattggtagtcgtccgagaacttctacctataatcctaatcgtcaggagagacaaagggtacagagagacaatgcttatcagcaagctactcctaggattcaaaataaagactcagttcgacaacagagagaacaagtaacaattgctctgaagtatccccgtaagtatgaggatgcacaagaaattgttgatttacttatcgttaatgaatgtgtcttgattgattttcaatatatgcttgatgcgcaagcacgacgttgcttggattatattgatggtgcaagtagagtattatatggttcattacaaaaggttgggagttcaatgtttctattaacaccagccaatgttatggtcgatattgaggagatgaatattccaaagactggtcaagagacgagttttgattttgatatgaagagacga

SEQ ID NO: 5372 - protein, 201 aa, Streptococcus agalactiae; identical to SEQ ID NO: 5366

SEQ ID NO: 5373 - DNA, 786 bp, Streptococcus agalactiae
atgacgttagatgatatttatcagcattttcgaccagaagagtatgcgtttatcaataaaatagaccatttagctcaatatgtcgaaaacacctattcgtttattaccactgaatttctaaatcctagggaatttaaaatactcgaaagtgttctagagaggcgaggtagtcattattacacttctggtcagtattttcaaacagaatatgttaaagtaataatagcaccggaatactatcagttagatatggttgattttaaccttagcctaattgaaataaagtataatgctaaatttaatcaccttacccatgctaaaattatgggaactttactgaattacttaggtgtaaaacgatcaattttaggggatatcctagttgaagaaggctgtgctcaggttttggtcgatagtcaaatgacaaatcaccttgttcattcagttacaaaaattggaactgctagtgtacaattagctgaagttcccttgtccaaacttctaactcccaaacaagatattcaaaaactaactgttattgcttccagtttacgtcttgataaaattttagcaacgattttaaagatttcacgaacacagtcgacgaaattgattgaggcagataaagtcaaggtcaattatgcaatcgtcaatcgagtttctgaacaattagtagagggggatttgattagtgttagaggatatggtcgatttacgttgaaccataacctagggttaactaaaaatcaaaaatataagttagaagtagacaaaatgatacataac

SEQ ID NO: 5374 - protein, 262 aa, Streptococcus agalactiae
MTLDDIYQHFRPEEYAFINKIDHLAQYVENTYSFITTEFLNPREFKILESVLERRGSHYYTSGQYFQTEYVKVIIAPEYYQLDMVDFNLSLIEIKYNAKFNHLTHAKIMGTLLNYLGVKRSILGDILVEEGCAQVLVDSQMTNHLVHSVTKIGTASVQLAEVPLSKLLTPKQDIQKLTVIASSLRLDKILATILKISRTQSTKLIEADKVKVNYAIVNRVSEQLVEGDLISVRGYGRFTLNHNLGLTKNQKYKLEVDKMIHN

SEQ ID NO: 5375 - DNA, 768 bp, Streptococcus agalactiae
atgccacttacagcacttgaaattaaagataaaacattttcatcaaaatttcgcggttatagcgaagaagaagttaatgaatttttagagattgttgttgacgattacgaagacttgattagacgtaatcgtgagcaagagcaatacattaaagatttagaagagaaaatcgcttacttcaacgaaatgaaggaatcgttaagtcaatcagttattttagctcaagaaactgctgaacgtgtgaaaatttcagcacaggatgaagcatctaacctaatggggaaagctacatttgatgctcaacatttaattgatgaggctaaattaaaagcaaatcaaatccttcgtgatgcgacagatgatgctaagcgtgtcgctatagaaacagaagatttgaaacgtcaatcacgtgttttccaccaacgcttactttctgaattagaaggtcagttaaaattagctaactcatctgcttgggaagaattgttgaaaccaacagctatttatcttcaaaattctgatgcttctttcaaagaagttgttgaaaaagttcttgatgaagatgatgctttaccagtggtggatgacactgagtcatttgatgctactcgtcaattctcaccagatgaaatggaagaattacagcgtcgtgttgaagaaagtaacaaacaacttgaagagtcaggtttattagatactaataatttccaaatggaagaaccgatcaatttaggtgaaactcaaacttttaaattaaatattgaagat

SEQ ID NO: 5376 - protein, 256 aa, Streptococcus agalactiae; identical to SEQ ID NO: 998

SEQ ID NO: 5377 - DNA, 2790 bp, Streptococcus agalactiae
atgaaattaaaagaaaccttgaatttaggacaaacagcttttccaatgcgtgcagggcttccaaataaggaacctcaatggcaagaagcatgggatcaagctgatatttataaaaaacgtcaagcattgaatgaaggaaaaccagcctttcaccttcatgacggacctccctatgctaatgggaatattcatgtaggacatgcactaaataaaatttctaaagacattattgtacgttcaaaatcaatgtcaggttttcgagctccttatgtgcctggttgggatactcatggactcccaattgagcaagtattagctaaaaaaggggttaaacgtaaagaaatggacctggctgaataccttgaaatgtgtcgtgattatgctctcagccaagttgacaaacaacgtgatgattttaaacgtctgggcgtttctgctgattgggaaaatccttatattacactgacaccagattatgaagcagatcaagtacgtgttttcggtgctatggcagataaaggatatatctatcgtggtgctaaaccagtgtattggtcatggtcatcagagtctgcccttgctgaggctgaaatcgaatatcatgatattgattcgacatcactctactatgccaataaagttaaagatggtaagggaattcttgatacagatacctatatcgtcgtttggacgacaacaccatttactgtaacagcttcacgcggtttaacagtaggaccagatatggagtatgttgtagttgcaccagtaggtagtgagcgtaaataccttcttgcagaggttcttgtagatagtctcgctgctaagtttggctgggaaaactttgaaattgtgactcatcacactggtaaagaacttaatcacattgttacagaacatccatgggatacagaagtagaagagttggttatccttggagaccatgttacaacagattctggtacaggtattgtccacacggctcctggttttggtgaagatgactataacgttggtattgctaatggacttgatgttgtagttaccgtagatagtcgtggtttgatgatggaaaatgctggtcctgattttgaaggtcaattctatgacaaagtgacaccacttgtaaaagaaaaattgggagatcttcttttagccagcgaagttatcaaccactcatatccatttgactggcgtacgaaaaagccaatcatttggcgtgcggttccacaatggtttgcctctgtttcgaaattccgtcaagaaatcctcgatgaaattgaaaagacaaatttccaacctgagtggggtaaaaaacgtctttataacatgatccgtgaccgtggcgactgggtaatctcacgtcaacgtgcttggggtgttccacttccaattttttatgcagaagatggtacagctatcatgacaaaagaagtgactgatcacgttgcagatttatttgctgaatacggctcaatcgtttggtggcaacgtgatgctaaggaccttctaccagcaggttatactcatccaggttcacctaatggtctctttgagaaagaaacagacatcatggatgtttggtttgattctggttcatcatggaatggagtaatgaatgctcgtgaaaacctttcctatccagcagatctttatcttgaaggttctgatcaataccgtggttggttcaactcatcactaattacatcagttgctgttaatggtcacgctccatacaaagcagtcttatctcaaggttttgtacttgatggtaaaggtgagaaaatgtctaaatctctaggaaatacaattcttccgagtgatgttgaaaaacaatttggtgcggaaatcttgcgtctgtgggtaacttctgttgattcaagtaatgatgttcgtatttcaatggatatcttaaaacaaacatcagaaacttatcgtaagatcagaaatacattgcgtttcttgattgcaaatacttccgattttaatcctaaacaagatgcagtagcctatgaaaatttaggtgccgttgatcgttatatgactattaaatttaatcaagttgtggatacaatcaacaaagcttatgctgcttatgattttatggcaatttataaagctgtcgttaacttcgtaacagttgatctatcagcattttaccttgattttgcaaaagatgtggtttacattgaagcggctaacagtccagaacgacgtcgtatgcaaactgttttctacgatattttagttaaacttacaaaacttttgactccgattctaccacatactgctgaagaaatttggtcataccttgaacatgaggaggaggaatttgttcaattagcagaaatgcctgttgcacagacattctctggtcaagaagaaattcttgaagagtggtcagcattcatgacgttacgaacacaagctcaaaaagctctcgaagaagcacgtaacgctaaagtcattggtaaatctctagaagcacatttaacaatttatgctagtcaagaagtgaaaacgttattaacagcgttaaatagcgatattgcactcttgatgattgtctcacaattaacaattgctgatgaagcagataaaccagctgactcagtatcatttgaaggtgttgcatttactgttgaacacgctgaaggtgaagtctgcgaacgctcacgccgtattgatccaaccacaaggatgcgttcgtatggtgtagctgtttgtgatgctagtgcagcaattattgagcaatattatcctgaagcagtagctcaaggttttgaagct

SEQ ID NO: 5378 - protein, 930 aa, Streptococcus agalactiae
MKLKETLNLGQTAFPMRAGLPNKEPQWQEAWDQADIYKKRQALNEGKPAFHLHDGPPYANGNIHVGHALNKISKDIIVRSKSMSGFRAPYVPGWDTHGLPIEQVLAKKGVKRKEMDLAEYLEMCRDYALSQVDKQRDDFKRLGVSADWENPYITLTPDYEADQVRVFGAMADKGYIYRGAKPVYWSWSSESALAEAEIEYHDIDSTSLYYANKVKDGKGILDTDTYIVVWTTTPFTVTASRGLTVGPDMEYVVVAPVGSERKYLLAEVLVDSLAAKFGWENFEIVTHHTGKELNHIVTEHPWDTEVEELVILGDHVTTDSGTGIVHTAPGFGEDDYNVGIANGLDVVVTVDSRGLMMENAGPDFEGQFYDKVTPLVKEKLGDLLLASEVINHSYPFDWRTKKPIIWRAVPQWFASVSKFRQEILDEIEKTNFQPEWGKKRLYNMIRDRGDWVISRQRAWGVPLPIFYAEDGTAIMTKEVTDHVADLFAEYGSIVWWQRDAKDLLPAGYTHPGSPNGLFEKETDIMDVWFDSGSSWNGVMNARENLSYPADLYLEGSDQYRGWFNSSLITSVAVNGHAPYKAVLSQGFVLDGKGEKMSKSLGNTILPSDVEKQFGAEILRLWVTSVDSSNDVRISMDILKQTSETYRKIRNTLRFLIANTSDFNPKQDAVAYENLGAVDRYMTIKFNQVVDTINKAYAAYDFMAIYKAVVNFVTVDLSAFYLDFAKDVVYIEAANSPERRRMQTVFYDILVKLTKLLTPILPHTAEEIWSYLEHEEEEFVQLAEMPVAQTFSGQEEILEEWSAFMTLRTQAQKALEEARNAKVIGKSLEAHLTIYASQEVKTLLTALNSDIALLMIVSQLTIADEADKPADSVSFEGVAFTVEHAEGEVCERSRRIDPTTRMRSYGVAVCDASAAIIEQYYPEAVAQGFEA

SEQ ID NO: 5379 - DNA, 300 bp, Streptococcus agalactiae
atgagactaattaatacaaccagtagtcatcctgaactagttcgaaatcaactccaaaatacagatgcaaaattagtggaagtctattcagctggcaacaccgatgtcgtttttacaaaagcacctaaacattatgaattattaatttcaaacaaatatcgtgctatcaaagatgaagaattagaagctattcgtgagttcttcttaaagcgtaaaatagatcaatctattattattcaagagcagatgaaatcactccatactgccaagttaattgaaatttcatatccaacaacagca

SEQ ID NO: 5380 - protein, 100 aa, Streptococcus agalactiae; identical to SEQ ID NO: 1004

SEQ ID NO: 5381 - protein, 453 aa, Streptococcus agalactiae
ATGACTAATCCTACTTTCGGTGAAAAAATAGATAATGTAGACTATAGGTCACGATTTGGTGTCTATGCTATTATTCCAAATCCAACTCATGATAAAATTATTTTAGTACAGGCACCTAATGGTGCTTGGTTTCTTCCAGGTGGGGAAATTGAAGAAAATGAAAATCACCTAGAAGCTTTAACTCGTGAGTTAATTGAAGAATTAGGTTATTCTGCAACAATTGGCCATTACTATGGTCAAGCTGATGAATATTTTTACTCTAGACACCGTGATACTTACTACTATAATCCCGCCTATATTTATGAAGTTACTGCCTATCATAAGGAGCAAGCGCCACTAGAAGATTTCAACCATCTAGCCTGGTTTCCTATCCAAGAAGCTAAAGAAAAGCTAAAACGAGGAAGCCATAGATGGGGTGTCCAAGCTTGGGAAAAAAATCACCATTCTAGGAAA

SEQ ID NO: 5382 - protein, 151 aa, Streptococcus agalactiae
MTNPTFGEKIDNVDYRSRFGVYAIIPNPTHDKIILVQAPNGAWFLPGGEIEENENHLEALTRELIEELGYSATIGHYYGQADEYFYSRHRDTYYYNPAYIYEVTAYHKEQAPLEDFNHLAWFPIQEAKEKLKRGSHRWGVQAWEKNHHSRK

SEQ ID NO: 5383 - protein, 2072 aa, Streptococcus agalactiae
ATGATTTCTTTTGGAGATTTAAATAATTTCAGAGCCTTTAATGGCCAAGATTTACCAAACACTCCTCCTACACAATCAGGAGGAAACCGAGGTGGAGGAAACGGTAATGGACGAAATAATAATCGCAACCAAACTGCAACTCCTCCTCAAGCCAAAGGGATTCTAGAAGAATTTGGTATCAATGTCACTGAAATAGCCCGCCATGGTGATATTGACCCTGTTATTGGACGTGACTCAGAAATTATTCGTGTTATCGAAATCCTTAATCGTCGTACAAAAAATAATCCTGTACTTATTGGTGAACCCGGCGTAGGGAAAACTGCTGTTGTTGAAGGACTTGCTCAGAAAATTGTTGATGGTAATGTGCCTCATAAACTTCAAGGCAAACAAGTTATTCGTTTGGATGTTGTGAGTCTAGTACAAGGAACGGGCATTCGTGGTCAATTTGAAGAACGCATGCAAAAGTTGATGGAAGAAATTCGTCAACGTCAAGATGTTATTCTATTCATAGATGAAATTCACGAAATAGTTGGAGCTGGTACAGCTGGCGAAGGTAGTATGGATGCAGGTAATATTTTAAAACCTGCCCTTGCACGTGGAGAATTACAACTAGTAGGTGCTACTACTCTCAATGAATATCGTATTATCGAAAAGGACGCTGCCTTAGAACGCCGCATGCAACCTGTAAAAGTCGATGAGCCTTCTGTTGAAGAAACCATTACTATTTTGAAAGGTATCCAAAAAAAATACGAAGATTATCATCACGTAAAATATAATAATGATGCCATAGAAGCAGCTGCAGTACTATCTAATCGTTATATCCAAGACCGCTTTTTACCTGATAAAGCAATAGACTTATTAGATGAAGCTGGTTCTAAAATGAACCTAACACTAAATTTTGTTGATCCAAAAGAAATTGATCAACGTCTCATTGAAGCAGAAAATTTAAAAGCGCAAGCGACTCGTGAAGAAGATTACGAACGTGCAGCTTACTTCCGTGACCAGATTGCAAATATAAAGAAATGCAACAACAAAAGGTCGACGATCAAGATACACCTATTATTACCGAAAAAACAATTGAGCACATCATTGAAGAAAAAACGAATATCCCTGTTGGTGATTTAAAAGAAAAAGAACAATCTCAATTAATTAATCTCGCAGATGACTTGAAACAACATGTGATCGGCCAGGATGACGCTGTCGTTAAGATTGCAAAAGCTATTCGTCGTAATCGAGTTGGTCTTGGTATCCCAAACCGTCCTATTGGTTCCTTTTTATTTGTAGGACCAACCGGTGTTGGTAAAACTGAACTTTCTAAACAACTAGCAATTGAGCTCTTTGGTTCAGCTGATAGTATGATTCGTTTTGACATGTCAGAGTACATGGAAAAGCATGCCGTTGCTAAATTAGTCGGAGCGCCTCCAGGATACGTGGGATACGAGGAAGCTGGACAATTAACTGAAAAGGTTCGTCGAAATCCTTACTCGCTCATCCTTCTAGATGAAATTGAAAAAGCTCATCCTGATGTCATGCATATGTTCTTGCAGGTCCTTGATGACGGTCGATTAACAGATGGACAAGGAAGAACTGTTAGTTTTAAAGATACCATTATCATCATGACCTCAAATGCTGGTTCTGGTAAAACTGAAGCAAGCGTTGGCTTTGGTGCCTCACGAGAAGGTAGGACGAATTCCGTACTAGGTCAACTAGGTAACTTCTTCAGCCCTGAATTTATGAACCGCTTTGACGGTATTATTGAATTCAAGGCTTTAGACAAAGAGAATCTCCTCAATATCGTTGATATTATGTTATCTGACGTTAATGCACGTCTCGCCATCAATGGTATTCATCTAGATGTCACTGATAAAGTGAAAGAAAAATTGGTTGATTTAGGTTACGATCCAAAAATGGGAGCACGTCCATTACGTCGTACCATTCAAGAACATATTGAAGATGCTATCACAGATTACTATCTTGAGAATCCAAGCGAAAAAGAACTTCGTGCTATTATGACTAGCAATGGAAATATCATAATAAAATCTTCTAAAAAAACTGAAGAAAGTACAAAAGGT

SEQ ID NO: 5384 - protein, 691 aa, Streptococcus agalactiae
MISFGDLNNFRAFNGQDLPNTPPTQSGGNRGGGNGNGRNNNRNQTATPPQAKGILEEFGINVTEIARHGDIDPVIGRDSEIIRVIEILNRRTKNNPVLIGEPGVGKTAVVEGLAQKIVDGNVPHKLQGKQVIRLDVVSLVQGTGIRGQFEERMQKLMEEIRQRQDVILFIDEIHEIVGAGTAGEGSMDAGNILKPALARGELQLVGATTLNEYRIIEKDAALERRMQPVKVDEPSVEETITILKGIQKKYEDYHHVKYNNDAIEAAAVLSNRYIQDRFLPDKAIDLLDEAGSKMNLTLNFVDPKEIDQRLIEAENLKAQATREEDYERAAYFRDQIAKYKEMQQQKVDDQDTPIITEKTIEHIIEEKTNIPVGDLKEKEQSQLINLADDLKQHVIGQDDAVVKIAKAIRRNRVGLGIPNRPIGSFLFVGPTGVGKTELSKQLAIELFGSADSMIRFDMSEYMEKHAVAKLVGAPPGYVGYEEAGQLTEKVRRNPYSLILLDEIEKAHPDVMHMFLQVLDDGRLTDGQGRTVSFKDTIIIMTSNAGSGKTEASVGFGASREGRTNSVLGQLGNFFSPEFMNRFDGIIEFKALDKENLLNIVDIMLSDVNARLAINGIHLDVTDKVKEKLVDLGYDPKMGARPLRRTIQEHIEDAITDYYLENPSEKELRAIMTSNGNIIIKSSKKTEESTKG

SEQ ID NO: 5385 - protein, 636 aa, Streptococcus agalactiae
GTGGTGGTTATTATTGGCCCTTCTGGCTCTGGTAAGTCAACATTTTTAAGAACAATGAATCTCTTGGAAGTACCAACAAAGGGAACAGTGACTTTTGAAGGGATTGATATAACAGACAAAAAGAATGATATTTTTAAAATGCGCGAAAAAATGGGCATGGTTTTTCAACAGTTCAATCTATTTCCCAATATGACTGTACTAGAAAATATTACTTTATCACCTATTAAGACAAAGGGACTTTCTAAGCTTGATGCTCAGACAAAAGCATACGAGCTACTTGAAAAAGTTGGACTCAAAGAGAAGGCTAATGCTTATCCAGCTAGCTTATCTGGAGGGCAACAACAACGAATTGCTATTGCAAGAGGTCTTGCAATGAATCCTGATGTCCTTCTTTTTGATGAACCTACTTCAGCTCTTGATCCTGAAATGGTAGGTGAAGTCTTGACTGTTATGCAAGATTTAGCTAAATCTGGTATGACGATGGTTATTGTCACTCATGAAATGGGTTTTGCACGTGAAGTAGCGGATCGTGTCATTTTTATGGATGCAGGCATTATTGTTGAGCAAGGGACCCCTAAGGAAGTATTTGAGCAGACAAAAGAAATCCGCACAAGAGATTTCTTAAGTAAAGTATTA

SEQ ID NO: 5386 - protein, 212 aa, Streptococcus agalactiae
MVVIIGPSGSGKSTFLRTMNLLEVPTKGTVTFEGIDITDKKNDIFKMREKMGMVFQQFNLFPNMTVLENITLSPIKTKGLSKLDAQTKAYELLEKVGLKEKANAYPASLSGGQQQRIAIARGLAMNPDVLLFDEPTSALDPEMVGEVLTVMQDLAKSGMTMVIVTHEMGFAREVADRVIFMDAGIIVEQGTPKEVFEQTKEIRTRDFLSKVL

SEQ ID NO: 5387 - protein, 1691 aa, Streptococcus agalactiae
ATGAATTATAAAGAGATTTATCAAGAGTGGTTAGAAAACGACTCACTCGGTAAAATATTAAGTCAGATTTAGAAGCTATTAAAGGCGATGAATCTGAAATTCAGGATCGTTTTTACAAAACATTAGAATTTGGAACGGCGGGATTGAGAGGTAAACTTGGAGCAGGAACCAATCGTATGAATACTTATATGGTGGGGAAAGCAGCACAAGCATTAGCTAATACGATTATTGATCATGGCCCTGAAGCTATTGCACGTGGAATTGCAGTTAGTTATGATGTCCGTTATCAATCTAAGGAATTTGCAGAATTAACTTGTTCCATTATGGCAGCAAATGGTATTAAGTCTTATATTTATAAAGGGATTCGCCCAACACCAATGTGCTCATATGCTATTCGTGCTCTAGGATGTGTTTCGGGTGTGATGGTTACTGCTAGTCATAATCCTCAAGCTTATAATGGTTATAAGGCATATTGGAAAGAAGGATCTCAGATTTTAGATGATATTGCTGATCAAATTGCCAATCATATGGATGCTATAACCGATTATCAGCAAATTAGGCAAATACCCTTTGAAGAGGCTCTGGCAAGTGGTTTGGCAAGTTATATTGATGAGAGTATTGAAGAAGCATATAAAAAAGAAGTGCTTGGTTTAACCATTAATGATACTAACATTGATAAGTCAGTCCGAGTAGTTTATACTCCTTTAAATGGCGTAGGAAATTTACCTGTGCGCGAAGTTTTAAGACGCCGTGGTTTTGAAAATGTTTATGTGGTACCTGAGCAGGAAATGCCCGATCCTGATTTTACAACGGTTGGCTATCCAAACCCTGAAGTTCCTAAAGCATTTGCCTATTCAGAATCTCTAGGAAAGTCAGTTGATGCAGATATCTTACTTGCCACAGATCCAGATTGTGACCGAGTAGCATTGGAAGTCAAAGATAGTAAGGGAGAATATATTTTCTTAAATGGTAATAAGATAGGGGCACTTCTTTCCTATTATATTTTTTCACAACGATGTGCCTTAGGGAATTTGCCACATCATCCTGTATTGGTAAAATCCATTGTAACTGGTGATCTATCAAAAGTTATTGCAGATAAATATAATATTGAAACTGTTGAAACTTTAACCGGATTTAAAAATATTTGTGGAAAAGCTAATGAATATGATATCTCAAAGGATAAAACTTATCTCTTTGGCTATGAAGAAAGTATTGGTTTTTGCTATGGCACTTTTGTACGTGATAAAGATGCTGTGAGTGCTTCAATGATGGTAGTAGAAATGACTGCCTATTATAAAGAACGAGGGCAAACACTTTTAGACGTTTTGCAAACCATTTACGATGAATTTGGCTATTACAACGAGCGCCAATTTTCTCTTGAGTTAGAGGGTGCTGAGGGGCAAGAACGTATTAGTCGTATTATGGAGGATTTTAGACAGGACCCAATATTACAAGTAGGTGAGATGAGATTGGAGAATTCTATTGATTTCAAGGATGGTTATAAGGATTTTCCAAAGCAAAATTGTTTAAAATATTATTTTAATGAGGGTTCATGGTATGCTTTAAGGCCGTCAGGGACGGAACCTAAGATAAAATGTTACCTTTATACGATTGGTTGTACAGAAGCAGATAGTTTATCGAAACTTAATGCAATTGAGTCGGCTTGTCGTGCTAAAATGAATAGTACTAAA

SEQ ID NO: 5388 - protein, 564 aa, Streptococcus agalactiae
MNYKEIYQEWLENDSLGKDIKSDLEAIKGDESEIQDRFYKTLEFGTAGLRGKLGAGTNRMNTYMVGKAAQALANTIIDHGPEAIARGIAVSYDVRYQSKEFAELTCSIMAANGIKSYIYKGIRPTPMCSYAIRALGCVSGVMVTASHNPQAYNGYKAYWKEGSQILDDIADQIANHMDAITDYQQIRQIPFEEALASGLASYIDESIEEAYKKEVLGLTINDTNIDKSVRVVYTPLNGVGNLPVREVLRRRGFENVYVVPEQEMPDPDFTTVGYPNPEVPKAFAYSESLGKSVDADILLATDPDCDRVALEVKDSKGEYIFLNGNKIGALLSYYIFSQRCALGNLPHHPVLVKSIVTGDLSKVIADKYNIETVETLTGFKNICGKANEYDISKDKTYLFGYEESIGFCYGTFVRDKDAVSASMMVVEMTAYYKERGQTLLDVLQTIYDEFGYYNERQFSLELEGAEGQERISRIMEDFRQDPILQVGEMRLENSIDFKDGYKDFPKQNCLKYYFNEGSWYALRPSGTEPKIKCYLYTIGCTEADSLSKLNAIESACRAKMNSTK

SEQ ID NO: 5389 - protein, 852 aa, Streptococcus agalactiae
ATGACTGAATTAATAGATGGTAAAGCCTTATCACAAAAAATGCAGGCTGAGTTAGGGCGAAAAGTTGAAAGGTTAAAGGAACAGCATGGTATCATACCTGGTTTAGCTGTAATCCTTGTTGGGGATAATCCAGCTAGCCAAGTGTACGTTCGAAATAAAGAACGCTCTGCATTAGAAGCTGGTTTTAAAAGTGAGACTTTACGATTATCTGAATCCATTTCTCAAGAAGAACTAATTGATATTATCCATCAATACAATGAAGATAAAAGTATCCATGGTATTTTAGTTCAACTTCCGTTACCACAACATATTAACGATAAAAAAATTATTTTAGCAATAGATCCTAAGAAAGATGTTGATGGTTTCCACCCAATGAATACGGGTCATCTTTGGTCAGGACGACCGATGATGGTACCTTGTACGCCAGCTGGTATTATGGAGATGTTTAGAGAGTACCATGTGGATTTAGAGGGAAAACATGCTGTTATCATCGGAAGGTCCAATATTGTTGGTAAGCCAATGGCACAACTTCTCCTTGATAAAAACGCAACAGTTACTTTGACACATTCAAGAACTCGAAACCTTTCTGAGGTAACAAAGGAGGCTGATATCCTTATTGTTGCGATTGGTCAGGGGCACTTTGTTACAAAAGACTTCGTTAAAGAAGGTGCTGTGGTGATTGATGTTGGTATGAATCGCGATGAAAATGGTAAATTGATTGGAGACGTTGTATTTGAACAAGTGGCAGAAGTTGCTAGTATGATAACACCTGTTCCTGGGGGCGTAGGACCTATGACGATTACAATGCTTTTGGAACAAACTTATCAAGCAGCTCTTAGAAGTGTGAGTCTA

SEQ ID NO: 5390 - protein, 284 aa, Streptococcus agalactiae; identical to SEQ ID NO: 1016

SEQ ID NO: 5391 - DNA, 711 bp, Streptococcus agalactiae
atggcagctttggcctgtgtcaaaactggtgcaggattagttactgtagcaacccaaagttgcaatatcccctctttgcatagtcaactgccagaggtaatggcgtttgatagtgatgattacaaatggttggaaaaatcaattgttcaaagtgatgttattgtaattggtcctggattaggagtatcagaatcatctcgaaaaatcttgaaccagaccatggagaagattcaatcacatcaaagtgtcatcattgatggatcagccttgactctgttatcagaaggtgcgtttccgcaaacaaaggctaaaaatttagtgttgacacctcatcaaaaagaatgggagcgattgtcaggtattgctgtatcgcaacagacaaaagaaaatacccaaaccgctcttaagtcttttcccaaaggaacgatcttagtcgctaagagttcgcatacgcgtatttttcaagatttagacgaaaaagaaattatagtaggaggtccttaccaggcgactggagggatgggggatactttgtgtggtatgattgcaggtatgttagcgcaatttaaagaagcctctcctctagataaggtatcagtgggagtttatctacattcggcaattgctcaagaattatctaaagaagcctacgttgttctaccgacaacgattagtgatgagattccaaaagaaatggctagactatctaaa

SEQ ID NO: 5392 - protein, 237 aa, Streptococcus agalactiae
MAALACVKTGAGLVTVATQSCNIPSLHSQLPEVMAFDSDDYKWLEKSIVQSDVIVIGPGLGVSESSRKILNQTMEKIQSHQSVIIDGSALTLLSEGAFPQTKAKNLVLTPHQKEWERLSGIAVSQQTKENTQTALKSFPKGTILVAKSSHTRIFQDLDEKEIIVGGPYQATGGMGDTLCGMIAGMLAQFKEASPLDKVSVGVYLHSAIAQELSKEAYVVLPTTISDEIPKEMARLSK

SEQ ID NO: 5393 - DNA, 1338 bp, Streptococcus agalactiae
atgtcagactatttatccgtgtcgacactgactaagtatttaaaattaaaatttgacaaagacccttatttagagagggtttatttaactgggcaagtgtctaattttcgtcgtcgcccaaaccatcaatacttctctttaaaagatgataaatcagtcattcaggcgacaatgtggtcaggtcaattcaaaaaactgggttttgaattagaggaagggatgaaggttaatgtagttggccgtgttcaactttatgaaccaagcggctcctactctattattgttgaaaaagcagaaccggatggtataggagctcttgctatccaatttgaacaactaaagaagaaactctctcaatcaggttactttgatgatcgtcataagcaattaattcctcaatttgttagaaaaataggagttgtgactagtccaagtggagctgttattcgggatattattacaacagtatctcgtcgattcccaggagtggaaatattacttttccccacaaaagttcaaggagagggcgcagctcaggagatagcacaaactattgctttagctaacgagaaaaaggatttggatctattaattgttggccgtgggggaggttctattgaggacttatgggcatttaatgaagaatgtgttgtagaagctatttttgaatctcgtcttcccgttatttctagtgtcggacatgaaactgatacaactttagcagattttgtagccgatcgcagagcagcaactccaactgcagcagctgagcttgctacaccggttactaaaattgatatcttgtcttggattactgaacgtgaaaatagaatgtatcagtctagccttcgtcttatcaggacaaaagaggagaggttgcaaaaatcaaagcaatcagttatttttaggcaaccagagcgtctatatgatggtttccttcaaaaattagataacctaaatcagcagttaacatattctatgcgtgataaactacaaacagtaagacaaaagcaaggtttgcttcatcaaaaactgcaaggcatagatttaaaacagcgtattcatatttaccaagagcgtgttgtgcaaagtagacgactattatcaagtacaatgactagtcagtatgacagcaagctagcacgttttgaaaaggctcaagatgcgcttatatcattggatagttctagaattgtagcgcgtggttacgctattatcgaaaaaaaccatactttagtatctactactaatggaataaatgaaggagatcatttgcaagttaagatgcaagatggtcttttagaagttgaggtgaaggatgtcagacaagaaaacatt

SEQ ID NO: 5394 - protein, 446 aa, Streptococcus agalactiae
MSDYLSVSTLTKYLKLKFDKDPYLERVYLTGQVSNFRRRPNHQYFSLKDDKSVIQATMWSGQFKKLGFELEEGMKVNVVGRVQLYEPSGSYSIIVEKAEPDGIGALAIQFEQLKKKLSQSGYFDDRHKQLIPQFVRKIGVVTSPSGAVIRDIITTVSRRFPGVEILLFPTKVQGEGAAQEIAQTIALANEKKDLDLLIVGRGGGSIEDLWAFNEECVVEAIFESRLPVISSVGHETDTTLADFVADRRAATPTAAAELATPVTKIDILSWITERENRMYQSSLRLIRTKEERLQKSKQSVIFRQPERLYDGFLQKLDNLNQQLTYSMRDKLQTVRQKQGLLHQKLQGIDLKQRIHIYQERVVQSRRLLSSTMTSQYDSKLARFEKAQDALISLDSSRIVARGYAIIEKNHTLVSTTNGINEGDHLQVKMQDGLLEVEVKDVRQENI

SEQ ID NO: 5395 - DNA, 213 bp, Streptococcus agalactiae
atgtcagacaagaaaacatttgaagaaaatttacaggaattagagacaattgtctcacgtttagaaacaggtgatgttgccttagaagatgccattgctgaatttcaaaaaggaatgcttatttcaaaagagttacaaagaactttaaaagaagctgaagagacgcttgtaaaagtgatgcaagctgacggaacggaagtagaaatggatact

SEQ ID NO: 5396 - protein, 71 aa, Streptococcus agalactiae; identical to SEQ ID NO: 1022

SEQ ID NO: 5397 - DNA, 870 bp, Streptococcus agalactiae
atggttactattgaaaaaattgatgaagctattcatcgttattacaaacagacacatagtgtcgtttctcctgatttgattaaggctatcctctactcagttgatggaggtgggaaacgtattcgtccacgcatccttttagaaattttagagggatttggagttgaactaatagatggtcattatgatgtggctgctgctttggagatgattcacaccggctctttaatccatgatgatttaccggcgatggataatgatgattttcgtcgtggccgcttaacaaaccataaaaagtttgatgaagctacagcggttttagctggagattccctttttttagacccatttgatttagttgtaaaagctggttttaaagctgatgttactgttaggttaatagagttattgtctatgtctgcgggtagttttggcatggttggtggacaaatgttagatatgaagggagaaaacaaagttttatctattgacgatttaagcttgattcatattaataaaacgggacgcctgttagcttatccctttgttgcagcaggtattttagctgagaagtcggaagaagtaaaaggaaaactgcatcaagctggccttttaatcggtcatgcttttcaagtacgtgatgatattttagatgtgactgctagttttgaagaattggggaagacaccaaataaagacattgtagcagaaaagacaacttatccaaatttattgggtttggataagtcacaggaaatacttgatgatactttgaaaaaagctcaggcaatttttcaaaatctagagaaaaaagctaactttaatgctagaaaaataatagatataatagagggattacggttgaatggc

SEQ ID NO: 5398 - protein, 290 aa, Streptococcus agalactiae; identical to SEQ ID NO: 1024

SEQ ID NO: 5399 - DNA, 825 bp, Streptococcus agalactiae
atggctaaagagagggtagatgttcttgcctataaacagggactttttgatacacgagagcaagcgaaacgtggtgttatggcaggaatggtgattaacgttatcaatggagaacgttatgataaaccaggtgaaaaggttgcagacgatactgaattaaaactaaaaggtgaaaaactaaaatatgttagtagaggtggattgaaattagaaaaagctttacaagtttttgaaatttcagttgcagataagctaactatagatattggcgcctctacgggtggttttactgatgttatgctacaatcaggagcgcgtttagtttacgcagtagatgtaggaacaaatcaattagtttggaagttacgtcaggatcatcgtgttcgttctatggaacaatataattttaggtatgcccaaaaagaagatttcaaggagggactgcctgaatttgcatcgatagatgtctcatttatctctcttaatttgattttaccagctctaaaagaaattttagtggatggtggacaagtagtggcattaattaaaccacaatttgaagcaggtcgtgagcaaattggtaaaaatggtattgtcaaagacaagttggttcatgaaaaggttttgacaacagtgaccaatttcacgaaagattatggatatacggttaaacatcttgatttttcgcccattcaaggtggacatggaaatattgagtttttaatgcatttgcaaaagtgtcaagatccacaaaatcttgtgcttgaccaaatacaagatgttatagaaaaagcacataaggaatttaagaaaaatgaagaagag

SEQ ID NO: 5400 - protein, 275 aa, Streptococcus agalactiae
MAKERVDVLAYKQGLFDTREQAKRGVMAGMVINVINGERYDKPGEKVADDTELKLKGEKLKYVSRGGLKLEKALQVFEISVADKLTIDIGASTGGFTDVMLQSGARLVYAVDVGTNQLVWKLRQDHRVRSMEQYNFRYAQKEDFKEGLPEFASIDVSFISLNLILPALKEILVDGGQVVALIKPQFEAGREQIGKNGIVKDKLVHEKVLTTVTNFTKDYGYTVKHLDFSPIQGGHGNIEFLMHLQKCQDPQNLVLDQIQDVIEKAHKEFKKNEEE

SEQ ID NO: 5401 - protein, 471 aa, Streptococcus agalactiae
ATGAAGAAGAGTGAACGTTTAAATTTAATTAAGCAAATTGTTCTTAACCATGCTGTTGAAACACAACATGAGTTGTTACGCAGATTGGAAGCTTATGGGGTAACTCTAACTCAAGCAACTATTTCACGTGATATGAATGAAATTGGCATTATAAAAGTGCCATCAGCAAAAGGTCGCTATATTTACGGTTTGTCAAATGAAAACGATCCTATCTTTACAACTGCTGTGGCAAAGCCTATTAAAACAAGTATTTTATCAATATCAGATAAGCTACTAGGTTTAGAGCAATTTATCAATATTAATGTCATACCAGGTAACAGTCAATTAATTAAAACCTTCATAATGTCACATTGTCAAGAACATATTTTTAGTTTGACAGCTGACGATAATAGTCTCCTTTTGATTGCAAAATCAGAAGCAGATGCTGATCACATTCGTCAATCAATGATTGCAATGTTGGAGAAAAAAGAT

SEQ ID NO: 5402 - protein, 157 aa, Streptococcus agalactiae; identical to SEQ ID NO: 1028

SEQ ID NO: 5403 - protein, 1656 aa, Streptococcus agalactiae
ATGCTTTTAGAAATTTCTATTAAGAATTTCGCTATTATCGAAGAAATTTCACTTAATTTTGAAACAGGAATGACTGTTTTAACTGGTGAGACTGGTGCAGGGAAATCTATCATTATTGATGCTATGAATATGATGTTAGGATCCCGTGCTAGCGTTGAAGTGATTCGCCATGGTGCTAACAAAGCAGAAATTGAAGGATTTTTCTCTGTTGAAAAAAATCAATCATTAGTCCAATTATTGGAAGAAAATGGCATTGAATTAGCAGATGAATTAATTATTCGCCGAGAAATCTTTCAAAATGGGCGCAGCGTTAGTCGAATTAATGGGCAAATGGTGAATTTGTCAACACTAAAAGCTGTGGGGCATTATTTGGTAGACATTCATGGTCAGCATGACCAAGAGGAACTAATGAAACCTAACATGCACATTCTGATGTTAGATGAATTTGGTAATACAGAATTTAATGTCATAAAAGAACGTTATCAAAGTCTTTTTGATGCTTATCGTCAGCTTCGTAAACGCGTATTGGATAAGCAAAAAAATGAACAAGAGAATAAATCACGTATTGAAATGCTAGAATTTCAAATAGCAGAAATTGAGTCTGTAGCCCTTAAATCAGATGAAGACCAAACGCTACTCAAGCAACGTGATAAATTAATGAATCATAAGAATATTGCAGATACTTTGACAAATGCATATCTTATGTTAGATAACGAAGAGTTTTCAAGTTTATCGAATGTTCGTTCTGCAATGAATGACCTTATGGCTTTAGAAGAATTTGATCGAGAATATAAAGATCTTTCCACCAATCTTTCAGAAGCTTACTACGTTATTGAAGAAGTTACTAAACGTTTAGGTGACGTTATCGATGATTTAGATTTTGACGCTGGTTTACTACAAGAAATTGAAAATAGACTAGATGTTATTAACACAATAACGCGAAAATATGGCGGTGATGTGAATGATGTTTTAGACTATTTTGATAACATTACTAAAGAATATAGTCTATTGACAGGTAGTGAAGAGTCCTCAGATGCTTTAGAAAAAGAATTAAAGATTTTAGAACACGATTTGATTGAATCAGCAAATCAATTAAGTTTAGAGCGCCATAAGCTAGCTAAACAATTGGAAAATGAAATCAAACAAGAATTAACAGAGCTTTATATGGAGAAAGCTGATTTCCAAGTTCAATTTACAAAAGGAAAATTTAATAAAGAAGGGAACGAAATCGTTGAATTTTATATTTCAACGAATCCCGGAGAGGGCTTTAAGCCATTGGTAAAAGTGGCTTCAGGAGGAGAGTTATCTCGATTGATGTTAGCTATTAAATCTGCTTTTTCACGTAAGGAAGATAAAACTTCCATTGTATTTGATGAGGTGGATACAGGAGTTTCTGGTCGCGTGGCCCAGGCTATCGCTCAAAAAATTCACAAGATTGGTAGTCATGGACAAGTTTTAGCAATTTCTCATTTAGCTCAGGTTATTGCAATAGCGGATTACCAATATTTTATTGAAAAAATTTCCAGTGACTCTTCAACAGTTTCAACGGTAAGGCTTTTAAGCTATGAAGAACGTGTAGAAGAAATCGCTAAAATGTTGGCAGGAAACAATGTAACAGACACTGCACGTACTCAAGCTAAAGAATTACTTGGTAGT

SEQ ID NO: 5404 - protein, 552 aa, Streptococcus agalactiae
MLLEISIKNFAIIEEISLNFETGMTVLTGETGAGKSIIIDAMNMMLGSRASVEVIRHGANKAEIEGFFSVEKNQSLVQLLEENGIELADELIIRREIFQNGRSVSRINGQMVNLSTLKAVGHYLVDIHGQHDQEELMKPNMHILMLDEFGNTEFNVIKERYQSLFDAYRQLRKRVLDKQKNEQENKSRIEMLEFQIAEIESVALKSDEDQTLLKQRDKLMNHKNIADTLTNAYLMLDNEEFSSLSNVRSAMNDLMALEEFDREYKDLSTNLSEAYYVIEEVTKRLGDVIDDLDFDAGLLQEIENRLDVINTITRKYGGDVNDVLDYFDNITKEYSLLTGSEESSDALEKELKILEHDLIESANQLSLERHKLAKQLENEIKQELTELYMEKADFQVQFTKGKFNKEGNEIVEFYISTNPGEGFKPLVKVASGGELSRLMLAIKSAFSRKEDKTSIVFDEVDTGVSGRVAQAIAQKIHKIGSHGQVLAISHLAQVIAIADYQYFIEKISSDSSTVSTVRLLSYEERVEEIAKMLAGNNVTDTARTQAKELLGS

SEQ ID NO: 5405 - protein, 834 aa, Streptococcus agalactiae
ATGAGTAAAATCAAAATTGTAACGGATTCTTCCATTACCATTGAACCAGAACTTATTAAAGAGCTTGACATTACAGTTGTTCCCTTGTCAGTTATGATAGATGGTACCTTGTATTCAGACAATGACTTAAAAGCACAAGGGGAATTCTTGAACCTAATGCGTGGAAGTAAGGAATTGCCAAAAACAAGTCAACCACCTGTAGGTGTTTTTGCAGAAATTTATGAAAAATTAATGAATGAAGGTGCGGAACATATCATTGCAATTCATTTAACGCATACACTATCAGGAACTATTGAAGCATCACGCCAGGGAGCTAATATTGCTGGTGCAGATGTTACAGTTATTGATTCTACTTTTACAGACCAGTGTCAAAAATTCCAGGTTGTAGAAGCTGCGAAATTAGCTAAAGAGGGAGCTGATTTAGATACCATCTTGGCTCGTGTGGAAGAAGTACGCCAGAAGTCAGAATTATTTATTGGCGTATCGACCCTTGAAAATTTAGTAAAAGGTGGTCGTATTGGACGTGTAACAGGTCTCCTAAGTTCATTGCTTAATATAAAAGTAATTATGGAGCTAACAAACCATGAATTAGTACCGATTGTTAAAGGTCGCGGTCTAAAGACCTTCAGCAAATGGTTAGATAATTTTGTTGAAAGTGCCCAAACACGAAAAATTGCTGAAATTGGCATCTCCTACTGTGGTAAAGCTGATATGGCTAATAACTTTAAAGAAAAACTAGCTGTTCTAGGTGCTCCTATATCCGTTTTAGAAACTGGCTCAATCATCCAAACTCATACTGGTGAGGATGCATTTGCTGTTATGGTTCGTTATGAA

SEQ ID NO: 5406 - protein, 278 aa, Streptococcus agalactiae
MSKIKIVTDSSITIEPELIKELDITVVPLSVMIDGTLYSDNDLKAQGEFLNLMRGSKELPKTSQPPVGVFAEIYEKLMNEGAEHIIAIHLTHTLSGTIEASRQGANIAGADVTVIDSTFTDQCQKFQVVEAAKLAKEGADLDTILARVEEVRQKSELFIGVSTLENLVKGGRIGRVTGLLSSLLNIKVIMELTNHELVPIVKGRGLKTFSKWLDNFVESAQTRKIAEIGISYCGKADMANNFKEKLAVLGAPISVLETGSIIQTHTGEDAFAVMVRYE

SEQ ID NO: 5407 - protein, 855 aa, Streptococcus agalactiae
TTGCTGTTATGGTTCGTTATGAATAAGAAAAAAATACTTACCGGACTTTCTTTTTTTCTGGTAAGTCTTCTTTTATCTTTTGGGATTTTTTCCTTGATCATTCCAAAATCAAATCCTAAATTAACAAAAAAAGACTTCCTAACAAAGAAAGTTATCCCACTTAACTATGTTGCTCTTGGAGATTCTCTGACCGAAGGTGTGGGCGATACAACCTCTCAAGGTGGTTTTGTCCCACTGCTATCAGAATCACTCCATAATCGATACTCTTACCAAGTGACTTCTGTTAATTATGGTGTGTCTGGGAATACTAGTCAACAAATTTTAAAACGTATGACGACGGATCCTCAAATCGAAAAAGATTTAGAGAAAGCTGATTTATTGACGCTAACTGTTGGTGGTAATGATGTCTTGGCTGTTATTCGTAAAGAGCTCAGTCATTTATCACTAAATTCCTTTGAGAAACCAGCAGAAGCATATAAGGAACGTTTGAAAGAAATCCTTGCAAAAGCAAGACAAGATAATCCTAAATTGTCTATTTATGTTTTAGGCATTTATAATCCTTTTTACCTAAACTTTCCACAATTAACTAAAATGCAAACCGTTATTGATAATTGGAATAAAGCTACAAAAGAAGTAGTTGATGCTTCAGAAAATGTTTATTTTGTCCCAATTAATGACCGCCTTTATAAGGGAATAAATGGTAAAGAGGGTATTACAGAGTCATCAAATAGTCAGGCAAGTATCACTAATGATGCTCTCTTTACTGGAGACCATTTTCATCCCAATAATATTGGCTATCAAATCATGTCTAACGCCGTTATGGAGAAAATAAATGAAACAAAAAAAAACTGGCCG

SEQ ID NO: 5408 - protein, 285 aa, Streptococcus agalactiae
MLLWFVMNKKKILTGLSFFLVSLLLSFGIFSLIIPKSNPKLTKKDFLTKKVIPLNYVALGDSLTEGVGDTTSQGGFVPLLSESLHNRYSYQVTSVNYGVSGNTSQQILKRMTTDPQIEKDLEKADLLTLTVGGNDVLAVIRKELSHLSLNSFEKPAEAYKERLKEILAKARQDNPKLSIYVLGIYNPFYLNFPQLTKMQTVIDNWNKATKEVVDASENVYFVPINDRLYKGINGKEGITESSNSQASITNDALFTGDHFHPNNIGYQIMSNAVMEKINETKKNWP

SEQ ID NO: 5409 - protein, 600 aa, Streptococcus agalactiae
ATGAAACAAAAAAAAACTGGCCGTAATTTAAATTTCTGGAAATGGGCATTTCTCTTATTGTTGGCAATTAACCTTTCCTTCACAGCAGTGATTGCAAGTCGCTTAATTCAAGTACGTGAGCCTAATACAGGAAAAATTTCGACTGGGGTACAAGATAAAGTAAAAGTAGGTACTTTTACGACCAATAAGTCGCAACTGAATAAGACAATTGCACTTTATTTAAAACAATATCAAACTAAGAAGATGAATTATAAGATTTATGCTGCTTCATCTTCTATACTATTTGAAGGCTCTTATCAATTATTAGGTTATGAAGTGCCTTTATACATCTATTTTGAACCTTATCGTTTAACAAATGGCGCTGTTCAACTTAAAGTGACCTCATTTTCAGTAGGAACTCTTCCGCTTCCAGAAAAAGATGTGTTACAATATATAAAATCATCTTATAAATTGCCAAACTTTGTAGATATAAAACCTAAAAAATCGGTTATTAATATTAATTTGCAAGATTTAAAAAATAAAGAAGGTATTTATTTGAAAGCGACTGCAATTGATTTAGTAAACGATAATTTTAGTTTCGATATTTTTAAGAAAAAGCCC

SEQ ID NO: 5410 - protein, 200 aa, Streptococcus agalactiae
MKQKKTGRNLNFWKWAFLLLLAINLSFTAVIASRLIQVREPNTGKISTGVQDKVKVGTFTTNKSQLNKTIALYLKQYQTKKMNYKIYAASSSILFEGSYQLLGYEVPLYIYFEPYRLTNGAVQLKVTSFSVGTLPLPEKDVLQYIKSSYKLPNFVDIKPKKSVININLQDLKNKEGIYLKATAIDLVNDNFSFDIFKKKP

SEQ ID NO: 5411 - protein, 273 aa, Streptococcus agalactiae
ATGGCTAACAAACAAGATTTAATTGCAAAAGTAGCAGAAGCTACAGAATTAACTAAAAAAGATTCAGCAGCAGCAGTAGATGCAGTTTTCGCAGCTGTAGCAGATTACCTTGCTGAAGGTGAAAAAGTACAATTAATCGGTTTTGGTAACTTTGAAGTTCGTGAACGTGCAGCTCGTAAAGGTCGTAACCCACAAACTGGTGCAGAAATCGAAATTGCAGCATCAAAAGTTCCAGCATTTAAAGCTGGTAAAGCTCTTAAAGACGCTGTTAAA

SEQ ID NO: 5412 - protein, 91 aa, Streptococcus agalactiae
MANKQDLIAKVAEATELTKKDSAAAVDAVFAAVADYLAEGEKVQLIGFGNFEVRERAARKGRNPQTGAEIEIAASKVPAFKAGKALKDAVK

SEQ ID NO: 5413 - protein, 207 aa, Streptococcus agalactiae
TTGCGAAAGAGAATGTCAGAAAAAGCTATACTATTAATTATCCTTATTGCTTTTGTTATTATCGCTATTATAAAGATAGCTCTGTTAAAGTTATATATGAATACGATAAAACCTAAAGTAGATAATGAAGGAAACATCATAACAAAGCCTGTAAAGGATGATTTAACACCCGAGGAACGTGAAGAACGTGAATTTGATAAAGATTGG

SEQ ID NO: 5414 - protein, 69 aa, Streptococcus agalactiae; identical to SEQ ID NO: 1040

SEQ ID NO: 5415 - protein, 930 aa, Streptococcus agalactiae
ATGGTATCGCTAAAAACGGAAATTGCTGGTTTTAGTTTTGACAATTGTTTGATGAATGCAGCGGGTATTTATTGTATGACTAAGGAAGAGTTATTAGCTATTGAAAATTCTGAAGCTGGTTCCTTTGTTACAAAAACAGGTACCCTTGAAGCTAGAGAGGGAAACCCTCAACCACGTTATGCAGATACTGACTGGGGATCAATTAATTCTATGGGACTCCCTAATAAAGGTATTGACTATTATCTTGATTTCGTGACTGAATTACAAGATCAAGACAATAGCAAAAATCACGTTTTATCATTAGTAGGTTTATCACCAGAAGAGACACATATTATTCTTAAAAAGGTTGAAAACAGTAGTTACAATGGCCTAATAGAGTTAAATTTATCGTGCCCAAATGTTCCTGGAAAACCTCAAATTGCTTATGATTTTGAAATGACTGACCTCATCCTTTCAGAAATCTTTAGCTATTATCAAAAGCCATTGGGCATCAAATTACCACCTTACTTTGATATCGTTCACTTTGATCAAGCAGCTACAATTTTTAACAAATATCCTTTAGCTTTTATTAACTGTGTTAATTCTATCGGAAATGGACTTGTTATTGATGATGAAACTGTCGTTATAAAGCCTAAAAATGGCTTTGGAGGTATCGGTGGGGATTTTATCAAGCCTACCGCCTTAGCTAACGTCCATGCTTTCTACAAACGTTTAAATCCTTCAATTAAAATTATCGGAACAGGTGGTGTTAAAAACGGCCGTGATGCCTTTGAACACATTCTATGTGGAGCTAGTATGGTCCAAATCGGAACCGCTTTACAAAAAGAAGGACCAGAAATTTTTCAGCGTGTAAGCAGAGAATTAAAAGAAATAATGGCTGATAAAGGCTATCAATCATTGGAGGATTTTCGAGGACAACTTAATTACCTT

SEQ ID NO: 5416 - protein, 310 aa, Streptococcus agalactiae; identical to SEQ ID NO: 1042

SEQ ID NO: 5417 - protein, 1233 aa, Streptococcus agalactiae
ATGGCGCTTAAAGAATTAACAGCTAAAGAGTTCGAAAGTTATTCAGGAAATTACGATTTACAATCGTTTATGCAAACCCCTGAGATGGCAAAGCTTCTAAAAAAACGTGGGTATGACATTACCTACATGGGCTACCAAATCGACGGGAAAATGGAAATCATCAGTATTGTTTATACCATCCCAATGACTGGTGGACTTCATATGGAAGTCAATTCTGGTCCAGCCCATTCCAATTCTAAATATCTGAAACATTTTTATAAAGAACTACAGAACTATGCCAAATCTCAGGGCGCTTTAGAATTATTAATTAAACCTTATGATACCTACCAAGAGTTTACTGGTGAAGGTGAGCCTAAAGGTGCACCGAACACCTATCTTATTGATGACCTGACTAGTATAGGTTATCACCACGATGGGCTTCATATTGGTTATCCTGGCGGTGAACCTGATTGGCATTATGTTAAAAATCTAGAAGGTATCACTCCTCAAAATCTTCTTAAATCTTTCTCTAAAAAAGGACGCCCCTTGGTTAAGAAAGCCATGTCTTTTGGTATAAAAATACGTGTCCTCAAGCGGGAAGAACTACATATCTTTAAGGATATTACTTCTTCTACTTCTGATCGCCGGGACTATATGGATAAATCTCTAGATTATTATCAAGATTTTTATGATAGTTTCGGAGATAAGGCGGAATTTGTCATTGCAACTCTAAACTTTAGGGAATATGATCATAACCTACAATTAAATGCAAAGAAATTGGAAGAACAGATTACAGTCCTTGATAATCGCCATCAAAATAATACAGATTCTGCCAAATACCATCGTCAACGTACTGAGCTTGTCAATCAACTAGCTAGTTTAGATAAACGTCGCAAAGAAGTCGAACCTTTTATTCAAAAATTTGGAAATCAAGATGTTGTTTTAGCTGGTAGCCTCTTTATTTATAGCCCTAAAGAAACTGTCTATCTTTTCTCTGGCTCATACACAGAATTTAATAAATTTTATGCGCCTGCAGTTCTTCAAGAATATGTTATGCAAGAGGCTTTAAAGCGTCAATCAACTTTCTATAATTTTTTAGGTATTCAAGGAAATTTTGATGGTTCAGATGGCGTACTTCGCTTTAAACAGAATTTTAATGGTTACATTGTTCGTAAAATGGGTACTTTCCGCTACTACCCAAATCCATTAAAATATAAGAGTATTCAATTACTAAAGAAAATCTTACGCCGAACA

SEQ ID NO: 5418 - protein, 411 aa, Streptococcus agalactiae
MALKELTAKEFESYSGNYDLQSFMQTPEMAKLLKKRGYDITYMGYQIDGKMEIISIVYTIPMTGGLHMEVNSGPAHSNSKYLKHFYKELQNYAKSQGALELLIKPYDTYQEFTGEGEPKGAPNTYLIDDLTSIGYHHDGLHIGYPGGEPDWHYVKNLEGITPQNLLKSFSKKGRPLVKKAMSFGIKIRVLKREELHIFKDITSSTSDRRDYMDKSLDYYQDFYDSFGDKAEFVIATLNFREYDHNLQLNAKKLEEQITVLDNRHQNNTDSAKYHRQRTELVNQLASLDKRRKEVEPFIQKFGNQDVVLAGSLFIYSPKETVYLFSGSYTEFNKFYAPAVLQEYVMQEALKRQSTFYNFLGIQGNFDGSDGVLRFKQNFNGYIVRKMGTFRYYPNPLKYKSIQLLKKILRRT

SEQ ID NO: 5419 - protein, 1209 aa, Streptococcus agalactiae
ATGTATAGAGAAATTACCGCTGTCGAACACGATCGCTTTGTGAGCGAATCCAACCAAACAAACCTACTTCAATCTTCTAATTGGCCCAAAGTAAAAGACAACTGGGGTAGTCAATTACTTGGCTTTTTTGACGGTGAAACCCAAATTGCCAGCGCTAGTATTCTCATCAAATCACTTCCTCTTGGCTTCTCCATGCTATATATTCCGCGTGGACCAATCATGGATTACTCCAATCTAGATATTGTAACTAAGGTCCTTAAGGACCTTAAAGCTTTTGGCAAAAAACAAAGAGCTCTCTTTATCAAGTGTGATCCTCTCATCTATTTAAAAATGGTCAATGCCAAAGATTTTGAAAATTCGCCCGATGAAAAAGAAGGGTTAATCGCCATTGATCATTTACAGCGTGCAGGTGCTGATTGGACTGGTCGGACAACAGATTTAGCTCATACTATCCAACCACGTTTTCAGGCAAACCTATATGCTAATCAATTTGGACTTGATAAAATGTCTAAAAAAACTCGTCAAGCTATTCGAACTTCCAAAAATAAGGGAGTAGATATACAATTTGGTAGCCATGAACTACTTGAAGATTTTGCAGAGTTGATGAAAAAAACGGAAGACCGTAAAGGGATAAATCTTAGAGGAATTGACTACTACCAAAAACTCCTTGATACGTATCCTAATAACTCATACATCACAATGGCTTCGCTAGATGTTGCAAAACGATTAGAAAAAATAGAAAAAGAATGTCAGATAGCCCAATCTGAAAGAATAAAATCACTTGAACTTAATCGTGAGAAAAAAGTTAAACAACACCAAGGTACGATTGATCGATTAAATAAAGAAATTGATTTTCTCAAAGAAGCTCAAAAAGCCTATGACCGAGACATTATTCCATTGGCTGCAACCCTCACTCTAGAATTTGGTAATACATCAGAAAATATTTATGCTGGTATGGACGATTACTTTAAATCTTATTCTGCTCCTATTTACACTTGGTTTGAAACAGCTCAAAGGGCTTTTGAACGTGGAAATATTTGGCAAAATATGGGGGGGATTGAGAATGACTTATCTGGTGGTTTATATCATTTTAAGTCTAAGTTCGAACCAATCATTGAGGAATTTATTGGAGAATTTAACATTCCAGTGAACAGATTGCTTTATAAAGCCTCTAATTATGTCTATGCCTTACGCAAAAAACGTAATAGC

SEQ ID NO: 5420 - protein, 403 aa, Streptococcus agalactiae; identical to SEQ ID NO: 1046

SEQ ID NO: 5421 - protein, 1218 aa, Streptococcus agalactiae
ATGTATCATGTTACCGTTGGAATATCCGAAAAAGAATATGATGCCTTTGCTATTGCATCGTCTCAAACCAATCTCCTCCACTCTTCAAAGTGGGCACAAGTAAAATCAAATTGGCAAAATGAACGTTTAGGCTTTTATAAAGATGACCAATTAGTTGCTGTAGCTAGCATCTTAATTAAATCATTACCACTTGGTTTTACAATGCTTTATATTCCACGTGGACCTATTATGGACTACAGCAATAAAGAATTAGTTAACTTTGTGTTAAAAACACTAAAAAACTTTGGACGAAAGAAACGTGCTGTTTTTGCAAAATTCGATCCAGCACTTCTTCTACGTCAATATCACCTTAAAGAAGAGAATGTCGCCGAAGAGATAGATGAAAGTAGACAGGCAATTGATAATCTTAAGTCAGCAGGTGCCCAATGGATAGGTCCAACGAAAGCCATTTCCGAAACCATCCAACCTCGTTTTCAAGCGAATATCTATACCAAAGCAAATATAGAAGAAAACTTTCCAAAACACACTAAACGTCTGATAAAAGATGCAAAGCATCGCGGTGTTCAAATTTATCGTGCCAACATTGATGATTTACCTAAATTCGCCACGGTTGTAGCATTAACCGAGAATCGTAAAGGTGTAGCTTTACGTAATGAAAACTATTTCCATCAACTAATGACAATTTATGGAGAAGATGCCTATCTCTATTTAGCTAAAGTCAATCTTCCTAAAAGATTAGCGCAATTTAAAGAACAACTTCTTCAAATCCAAAAAGATTTATCAGAAACTCCATCCCATCAAAAAAGTCGCCTGACAAGGCTAAATCAACAAGAAGCTTCTGTTAAACAATATATCCTTGAATTTCAGGAGTTTAGCAAGAAATATCCAGATGAGCCTGTCATTGCAGGAATTTTGTCCATTCGTTTTGGCAATGTCCTGGAGATGTTGTATGCTGGTATGGATGATAGCTTCCGTAAATTTTATCCACAGTATCTCTTGAATGCTAGGGTGTTCGAAGATGCTTTCAAAAACGATATTGTATCTGCTAATCTAGGCGGTGTCGAGGGAAGTCTTAACGATGGTTTAACAAAATTTAAAAGTAACTTCAATCCAATGTTTGAAGAATATATTGGCGAGTTTAATCTAGCAATCAATCCATTATTATATAAATTGGCCAACCTAGCCTATACTATTCGAAAAAAACAAAGACACTCTCAC

SEQ ID NO: 5422 - protein, 406 aa, Streptococcus agalactiae; identical to SEQ ID NO: 1048

SEQ ID NO: 5423 - protein, 810 aa, Streptococcus agalactiae
ATGACTTCAATTAAACTTGTTGCCGTAGATATTGACGGCACCCTATTAAATAGTAAGCGTGAAATTACACCTGAAGTGGCTAAAGCTGTTCAAGAAGCAAAATCAAAAGGCGTTAAAATTGTTATTGCTACAGGACGTCCAATCATCGGAGTCCAAGATCTTTTAGAAGAATTGAAACTCAATGAAGAGGGAGATTATGTTATCACCTTTAACGGCGGTCTAGTTCAAGACACAGCCACAGGAGATGACATCATCAAAGAAACCTTAACCTATGAAGACTATCTGGATTTCGAACTGTTAGCGCGTAAATTAGGCGTCCACATGCACGCCATTACAAAAGAAGGAATTTACACAGCAAATCGTGATATTGGTAAATATACAATACACGAAGCAACTTTAGTTAATATGCCGCTCTTCTATCGTACTCCTGAAGAAATGGGAGACAAAGAAATCATTAAACTAATGATGATTGATCAACCTGACATCTTAGATGCAGCAATTGCTAAAATTCCAAAAAAAGTTCTCGATAACTACACTATTGTAAAATCAACTCCTTTTTATTTAGAAATTTTACCCAAAAACGTTAATAAAGGCACTGCACTTCTCCATCTTGCAGAGAAAATGGGATTAACTGTAGATCAAACAATGGCTATTGGTGATGAAGAAAATGACCGTGCTATGCTTGAAGTTGTTGGAAATCCTGTTGTTATGCAAAACGGCAATCCTGAACTAAAAAAAATAGCAAAATATATCACCAAATCAAACGAGGAAAGTGGCGTAGCCTACGCACTACGTGAATGGGTAATAAAC

SEQ ID NO: 5424 - protein, 270 aa, Streptococcus agalactiae
MTSIKLVAVDIDGTLLNSKREITPEVAKAVQEAKSKGVKIVIATGRPIIGVQDLLEELKLNEEGDYVITFNGGLVQDTATGDDIIKETLTYEDYLDFELLARKLGVHMHAITKEGIYTANRDIGKYTIHEATLVNMPLFYRTPEEMGDKEIIKLMMIDQPDILDAAIAKIPKKVLDNYTIVKSTPFYLEILPKNVNKGTALLHLAEKMGLTVDQTMAIGDEENDRAMLEVVGNPVVMQNGNPELKKIAKYITKSNEESGVAYALREWVIN

SEQ ID NO: 5425 - protein, 1314 aa, Streptococcus agalactiae
ATGAATGAAAAAGTATTTCGTGACCCCGTTCACACTTATATCCATGTAAATAATCAAGTCATATATGACTTGATTAACACTAAAGAATTTCAACGTTTACGACGCATTAAACAAACCTCAACGACTTCTTTTACCTTCCATGGTGCAGAGCATAGTCGTTTTTCACATTGTCTCGGAGTTTATGAACTGGCTCGTAAAGTTACAGAAATCTTTGATGAACATTATTCTGATCTTTGGAATAAAAATGAGTCCCTGCTAACGATGGCTGCCGCCCTACTACATGATATCGGACATGGCGCATATTCTCATACATTTGAGCGTCTCTTCAATACTGATCATGAAGCTTACACTCAGGAAATCATCACCAATCCTACCACAGAGATTAATGCTATTTTACGAAAGGTGGCTCCTGATTTTCCTGATAAAGTAGCTAGTGTTATTAATCATAGCTACCCCAATAAACAAGTTGTTCAATTAATTTCTAGTCAAATTGATTGTGATCGAATGGACTATCTTCTCAGAGATTCTTACTACACTGCTGCTAGCTATGGACAATTTGATTTAACACGAATTTTACGCGTTATTAGACCAACCGATTCTGGAATTGCTTTTGCTCGTAACGGGATGCACGCTGTGGAAGATTATATTGTTAGTCGCTTCCAAATGTATATGCAAGTTTATTTCCATCCAGCCAGTCGTGCTATGGAATTACTCTTACAAAATTTACTAAAACGTGCTCGCTTCTTATTTGATACCCATCGCGATTTTTTTGAACAAACTTCTCCAAATCTTATTCCTTTCTTCACGGATCAATATGATTTACAAGATTATTTAGCCCTAGATGATGGGGTAATGAATACTTACTTCCAATCTTGGATGCAAGCTGATGATAACATTTTGGCAGATTTAGCTAATCGTTTTATCAATCGAAAAGTCTTTAAATCAATTACCTTTGAAGAGTCTGATAAAGAAAATCTAGTTAAAATGAAAGAACTAGTCTCACAGGTTGGTTTTGATCCCGATTATTACACTGGTGTCCATGCTAATTTTGACTTACCTTACGATGTTTATCGGCCTGAACATTCAAATCCACGAACAGAAATTCAAATTATCCAAAAGAATGGACAACTTGCTGAATTATCAAGCTTATCACCGATTGTAAAAGCATTAACTGGATCTAATTATGGTGATCAACGTTTTTATTTTCCAAAAGAAATGTTGACATTAGATAGCCTATTTTCAAGTACAAAAGAAGAATTTCAATCTTATATCACAAATGAGCATTTGACACTCACGAAAGATAATAGCCATTCA

SEQ ID NO: 5426 - protein, 438 aa, Streptococcus agalactiae; identical to SEQ ID NO: 1052

SEQ ID NO: 5427 - protein, 384 aa, Streptococcus agalactiae
ATGAAACTAGAAATTAACAATAACATTCAAATTGACAACGAAACCGAAATGATTCATGAGATTCACGATTGTCAATTTATTGAAAAAGGAAGTTACGTTTATTTGAATTATATTAATGCTGAGGGCGAGAGGGTAGTTATTAAGGCAAATCATGAGGAATTGCTTATGACGAAGTTTTCAAATCCTAAGTCTGTAATGCGTTTTCATCGTGAAACGCCTGCTTTGGTTAATATCCCCACTCCACTTGGTGTTCAACATTTGATTACAGAGACAAGTCACTATCAGTTTGATTTGTCACAGCAAAGGTTGCATATCAATTATGTCCTTAAGCAAACGGAGACAGGAGACTGTTTTGCAAATTATGAATTAAGGATTCAATGGTAT

SEQ ID NO: 5428 - protein, 128 aa, Streptococcus agalactiae
MKLEINNNIQIDNETEMIHEIHDCQFIEKGSYVYLNYINAEGERVVIKANHEELLMTKFSNPKSVMRFHRETPALVNIPTPLGVQHLITETSHYQFDLSQQRLHINYVLKQTETGDCFANYELRIQWY

SEQ ID NO: 5429 - protein, 1226 aa, Streptococcus agalactiae
TTGTTAAAAGAACAGAAAAAATCCTTGTTTTACACACAAGGTCAAGAAGAGGTTCTAACGTCTTTAGAATCTTCTCGTGAAGGATTATCAACGACAGAAGCGAAAAATCGCTTAGAGATGTATGGTCGCAATGAGCTTGAAGAAGGGAAAAAACGTAGTCTAATAGCTAAGTTTTTTGACCAATTCAAAGATTTAATGATTATTATCTTACTGGTTGCTGCAGCTCTCTCTGTTATTACGGAAGGTATGCATGGCTTAACGGATGCATTGATTATCTTGGCGGTTGTTATCTTAAATGCAGCTTTTGGTGTTTATCAAGAGGGGCAAGCCGAAGCAGCTATTGAAGCCCTCAAAGATATGTCAAGCCCAATTGCGCGTGTTCGTCGTGATGGTCATACTATTGAGGTGGATTCTAAAGAACTAGTTCCTGGTGACCTCGTTATGTTAGAAGCAGGAGATGTTGTTCCCGCAGATTTACGACTTTTAGAAGCCGCGTCTCTAAAAATTGAAGAAGCAGCTCTAACTGGTGAGTCAGTACCTGTTGAGAAAGACATATCTCAAGTAGTAGCAGAGGATGCAGGTATTGGTGACCGTGTGAATATGGCGTATCAAAATTCAAATGTCACGTATGGTCGAGGATATGGTGTTGTTACTAACACAGGGATGTATACTGAAGTTGGTAAAATTGCGGACATGTTGGCAAATGCTGATGAATCTGAAACACCATTGAAACAAAGTTTAGTTCAACTTTCTAAATTATTGACTTACTTAATCGTGATTATTGCGGTTATTACTTTCTTAGTGGGGATATTTGTCCGTAAAGAAGGTTGGATTGAAGGATTGATGACTTCAGTTGCTTTAGCAGTTGCAGCTATTCCAGAAGGGCTTCCTGCAATTGTTACGATTGTCTTATCAATGGGAACAAAAACTCTTGCTAAACGTAATTCTATCGTTCGTAAACTCCCTGCAGTTGAAACTTTAGGTTCTACAGAAATCATTGCATCAGATAAGACTGGTACTCTGACAATGAATCAAATGACTGTCGAAAAAGTGTATACTAATGGTGTTCTCCAATCATCTTCGGAAGAAATTTCAGTTGATAATAACACTTTACGTATTATGAATTTCTCCACGATACTAAGATTGATCCTTCAGGAAAATTAATTGGTGACCCAACAGAGACTGCACTGGGTACATTTGGTTTAGATAAGAATTTTGATGTCCCG

SEQ ID NO: 5430 - protein, 409 aa, Streptococcus agalactiae
  VARIANT 378: Xaa = Any Amino Acid
MLKEQKKSLFYTQGQEEVLTSLESSREGLSTTEAKNRLEMYGRNELEEGKKRSLIAKFFDQFKDLMIIILLVAAALSVITEGMHGLTDALIILAVVILNAAFGVYQEGQAEAAIEALKDMSSPIARVRRDGHTIEVDSKELVPGDLVMLEAGDVVPADLRLLEAASLKIEEAALTGESVPVEKDISQVVAEDAGIGDRVNMAYQNSNVTYGRGYGVVTNTGMYTEVGKIADMLANADESETPLKQSLVQLSKLLTYLIVIIAVITFLVGIFVRKEGWIEGLMTSVALAVAAIPEGLPAIVTIVLSMGTKTLAKRNSIVRKLPAVETLGSTEIIASDKTGTLTMNQMTVEKVYTNGVLQSSSEEISVDNNTLRIMNFSXDTKIDPSGKLIGDPTETALGTFGLDKNFDVP

SEQ ID NO: 5431 - protein, 1769 aa, Streptococcus agalactiae
ATGTCTATCAAAGGACAAAACTTGCTAAAGTATTCTATCGTTCGTAAACTCCCTGCAGTGAAACTTTAGGTTCTACAGAAATCATTGCATCAGATAAGACTGGTACTCTGACAATGAATCAAATGACTGTCGAAAAAGTGTATACTAATGGTGTTCTCCAATCATCTTCGGAAGAAATTTCAGTTGATAATAACACTTTACGTATTATGAATTTCTCCAACGATACTAAGATTGATCCTTCAGGAAAATTAATTGGTGACCCAACAGAGACTGCACTGGTACAATTTGGTTTAGATAAGAATTTTGATGTCCGTGAAGTTTTGAAAAATGAACCACGTGTAGCTGAGTTACCATTTGATTCAGATCGTAAGTTAATGTCTACGATTCATAAAGAATCAGATGGTCGCTACTTTATCGCAGTCAAAGGTGCTCCTGATCAATTATTAAAACGAGTTACTAAAATTGAAGATAATGGCTTGGTTCGTGATATCACGGCTGAAGATAAAGAGGCTATCCTAAATACCAATAAAGAACTCGCAAAACAAGCTCTTCGTGTCTTGATGATGGCTTATAAATATGAAACACAAATTCCAACTTTAGAGACTGATATTGTTGAGTCAGATTTAGTATTCTCAGGTTTAGTGGGAATGATTGACCCTGAGCGTCCAGAAGCGGCAGAAGCTGTTCGAGTTGCTAAAGAAGCAGGAATTCGTCCGATTATGATTACCGGGGACCATCAAGATACTGCAGAAGCTATTGCAAAGCGTCTAGGTATTATTGATGCAAATGACACAGAAGATCATGTCTTTACGGGTGCTGAACTTAATGAATTAAGTGATGAAGAGTTTCAAAAAGTATTTAAACAATATTCTGTCTATGCACGTGTTTCTCCTGAACATAAAGTGCGTATCGTGAAAGCTTGGCAAAACGATGGTAAAGTCGTTGCCATGACTGGTGATGGTGTTAATGATGCTCCATCGCTAAAAACAGCAGATATTGGTATTGGTATGGGAATAACTGGTACGGAAGTTTCCAAAGGTGCTTCTGATATGGTCCTTGCTGATGATAATTTTGCAACTATTATTGTGGCTGTTGAGGAAGGACGTAAAGTCTTCTCAAATATCCAAAAATCTATTCAATATCTTCTTTCAGCCAACATGGCAGAGGTATTTACAATTTTCTTTGCAACGTTATTAGGATGGGATGTACTTGCACCGGTTCACCTTCTTTGGATTAACTTGGTAACAGATACTCTTCCAGCTATCGCTCTTGGAGTTGAGCCAGCTGAACCAGGAGTTATGACACATAAACCTCGTGGTCGCCAGTCAAACTTCTTTGATGGTGGTGTTATGGGAGCTATTATCTATCAAGGTATTTTACAAACTATCTTAGTACTTGGTGTCTATGGTTGGGCATTGATGTATCCAGAACATGCTGGTTATCGCATGATTCACGCAGATGCCCTTACGATGGCCTTTGCAACGCTTGGTTTAATCCAATTGGTACATGCATTTAACGTTAAGTCAGTTTACCAATCAATCTTTACAGTTGGAGCTTTTAAAAATAGAACCTTTAACTGGTCTATTCCAGTAGCTTTCATTCTTTTGATGGTGACTATTGTTGTTCCTGGATTTAATAAACTTTTCCATGTAACTCATTTAAGTTCAACACAATGGTTAACTGTAGTTATCGGAAGTTTATTGATGGTAGTGTTAACGGAAATTGTTAAATTTATCCAACGTAAATTAGGACAAGACGAAAAAGCTATT

SEQ ID NO: 5432 - protein, 592 aa, Streptococcus agalactiae
  VARIANT 9: Xaa = Any Amino Acid
MSIKWBKTXAKRNSIVRKLPAVETLGSTEIIASDKTGTLTMNQMTVEKVYTNGVLQSSSEEISVDNNTLRIMNFSNDTKIDPSGKLIGDPTETALVQFGLDKNFDVREVLKNEPRVAELPFDSDRKLMSTIHKESDGRYFIAVKGAPDQLLKRVTKIEDNGLVRDITAEDKEAILNTNKELAKQALRVLMMAYKYETQIPTLETDIVESDLVFSGLVGMIDPERPEAAEAVRVAKEAGIRPIMITGDHQDTAEAIAKRLGIIDANDTEDHVFTGAELNELSDEEFQKVFKQYSVYARVSPEHKVRIVKAWQNDGKVVAMTGDGVNDAPSLKTADIGIGMGITGTEVSKGASDMVLADDNFATIIVAVEEGRKVFSNIQKSIQYLLSANMAEVFTIFFATLLGWDVLAPVHLLWINLVTDTLPAIALGVEPAEPGVMTHKPRGRQSNFFDGGVMGAIIYQGILQTILVLGVYGWALMYPEHAGYRMIHADALTMAFATLGLIQLVHAFNVKSVYQSIFTVGAFKNRTFNWSIPVAFILLMVTIVVPGFNKLFHVTHLSSTQWLTVVIGSLLMVVLTEIVKFIQRKLGQDEKAI

SEQ ID NO: 5433 - protein, 858 aa, Streptococcus agalactiae
ATGACCAAACTTGCTATCATGAGTGATTTACATATTGACCTCAATCATTTTTCTACCTTTGAGACGAAAACGTTAATTAATTTGCTTAAGAAAGAAAAAATTGATCACCTCCATATCGCTGGAGATATATCTAATCATTTTACTAAAGATACACTTCCCTTTATCAATAACTTAAAAAAGCATATTAAACTTAGCTATAATTTAGGAAACCATGATATGCTTGATTTAACAGAAACAGAAATCCAACGCCTTGACTTTCAAACCTATCGATTTGACAAAAAAATGCTACTAGCTTTTCATGGCTGGTATGATTACAGCTTTTCAAATAATAGAGACATCAAGAATGTTGAAAAATTAAAAAAGACTTTTTGGTTTGATAGACGTTTAAAACGTCCAAATAATGATGTAACTATCCAAGCATCAATTTTAAAACGCTTAGACGAAATATTATCAAAAGTCGATTCTTCAAATATCATTATTGCTATGCACTTTGTTCCCCATAAACAGTTCACGATGACTCATCCTAGATTCTCTCCTTTTAATGCTTTTTTGGGGAGTCAGGCTTATCATGATTTATTCCAAAAATATCATATCAAAGATGTTGTTTTTGGTCATGCACACCGCTCATTTGACGACGTTAAAATTGGAGAAACTACTTATCATTCTAGACCACTTGGATATATTAGAGAATGGAATTTAACTATTGACTTTGTCAATCAGAATCCCAATCATAACCCTAATTTAACCTGGAATCTTAGCAAAAGGTATAATGCCGTTAAGCATTTGGATAGTTTTGAAAACTATCGAAAAAAATATTTTGAAGACGAATTACGCAACTCTATGACAATATTTGATTGC

SEQ ID NO: 5434 - protein, 286 aa, Streptococcus agalactiae
MTKLAIMSDLHIDLNHFSTFETKTLINLLKKEKIDHLHIAGDISNHFTKDTLPFINNLKKHIKLSYNLGNHDMLDLTETEIQRLDFQTYRFDKKMLLAFHGWYDYSFSNNRDIKNVEKLKKTFWFDRRLKRPNNDVTIQASILKRLDEILSKVDSSNIIIAMHFVPHKQFTMTHPRFSPFNAFLGSQAYHDLFQKYHIKDVVFGHAHRSFDDVKIGETTYHSRPLGYIREWNLTIDFVNQNPNHNPNLTWNLSKRYNAVKHLDSFENYRKKYFEDELRNSMTIFDC

SEQ ID NO: 5435 - protein, 1929 aa, Streptococcus agalactiae
ATGTCTAATTTTTATAAGCTCTTGAAAGAAAAATTTCCTCGAAAAGAAGATATCGTAACAGAAATGATCAATTTAGAAGCTATTTGTCAATTACCCAAAGGGACAGAATATTTTATTAGTGATTTACACGGGGAATACGATGCTGTTGATTATCTCTTACGGACAGGCGCAGGGTCTATTAGAGCTAAATTATTAGACTGCTTTGATTGGCAGAAAATAGTTGCTGTTGATTTAGATGATTTTTGTATACTGCTTTATTACCCAAAGGAAAAATTAGCCTTCGATAAAATGAACTTGTCAGCAAGTGCTTATAAAACGAAGTTATGGGAAATGATTCCGTTACAAATACAAGTTTTAAAATATTTTTCTAGTAAATATACAAAATCTAAAGTACGTAAGCAATTGCCAGGTAAGTTTGCTTACATTATCGAAGAACTTTTAGCTGAGATTGACCGTAACCCAGAGAAGAAAAGCTATTTTGATACTATTATTGAAAAATTATTTGAATTAGACCAAGTAGAAGATTTAATTATAGTATTATCCCAAACAATTCAAGTTTTAATCATTGACCATTTACATGTTGTAGGGGATATTTACGATCGTGGTAGGTATCCTGATCGTATCTTGAATAGGTTAATGGCTTTTCCAAATTTGGATATCCAATGGGGGAACCATGATGTTACTTGGATGGGAGCAGTATCTGGTTCCTACCTTTGTATGGTAAATGTTATCCGTATTGCTGCACGTTATAATAATATTACTTTAATTGAAGACCGATATGGTATCAATTTGCGTCGCTTGGTTGATTACTCACGCCGTTACTATGAACCTCTACCTTCTTTCGTTCCTATATTAGATGGAGAGGAAATGACTCATCCAGATGAACTAGACTTGTTAAATATGATACAACAAGCAACAGCAATTTTACAGTTTAAATTGGAAGCCCAATTGATTGACAGGCGTCCAGAATTTCAAATGCATAATCGGCAACTTATTAACCAGGTAAATTATAAAGATTTAAGTATATCTATTAAGGGAGTTGTGCATCAACTTAAAGATTTTAATAGTAGATGCATTGATTCGAAAAATCCCAGTCGATTAACAAGTGAGGAAGAAGAGCTTTTACAACAATTGATGATAGCCTTCCAGACTTCTGAAAGTTTAAAGAAACATATTGATTTCTTATTTGCGAAAGGAAGTATGTATTTAACCTATAATGATAATCTTTTATTCCATGGTTGCATACCAATGCATAGTAATGGTGATTTTAAAAGCTTTAAAATTGCAGGAAAAACTTATGGTGGTAGGGATTTACTGGATTTATTTGAAAGTCAAATACGTCTAGCATATGCTAGACCAGAGAAACATGATGATTTGGCGACAGATATCATTTGGTATCTTTGGTGTGGTGAAAATTCTTCTCTTTTTGGTAAGAATGCCATGACTACTTTTGAGCGCTATTATGTTTCCGACAAAGTAACTCATCAAGAAAGAAAAAATCCCTACTTTAAACTGAGAGATAAAGATGATATTTGCACTACTCTTTTACAAGAGTTTGATTTGCCTAAGTTTGGACATATTGTCAATGGTCATACGCCAGTCAAAGAAAAAAATGGTGAGCAACCGATAAAAGCAAATGGTAAGATGTTAGTAATTGATGGTGGCTTTGCCAAAGGTTATCAGAAAAATACAGGTTTAGCTGGCTACACTTTGATTTATAATAGCTATGGGATACAATTAATTTCACACCTTCCTTTTACATCCATTGAGGAAGTTTTAAGTGGAACCAACTATATCATTGATACGAAGCGATTAGTAGAAGAAGCCAAGGATAGGATTCTTGTAAAAGATACAACTATTGGACAAAAGTTAACCAAAGAGATTAAAGACTTAGATCACCTTTATCGTCATTTTCAGGAATATGATGAC

SEQ ID NO: 5436 - protein, 643 aa, Streptococcus agalactiae
MSNFYKLLKEKFPRKEDIVTEMINLEAICQLPKGTEYFISDLHGEYDAVDYLLRTGAGSIRAKLLDCFDWQKIVAVDLDDFCILLYYPKEKLAFDKMNLSASAYKTKLWEMIPLQIQVLKYFSSKYTKSKVRKQLPGKFAYIIEELLAEIDRNPEKKSYFDTIIEKLFELDQVEDLIIVLSQTIQVLIIDHLHVVGDIYDRGRYPDRILNRLMAFPNLDIQWGNHDVTWMGAVSGSYLCMVNVIRIAARYNNITLIEDRYGINLRRLVDYSRRYYEPLPSFVPILDGEEMTHPDELDLLNMIQQATAILQFKLEAQLIDRRPEFQMHNRQLINQVNYKDLSISIKGVVHQLKDFNSRCIDSKNPSRLTSEEEELLQQLMIAFQTSESLKKHIDFLFAKGSMYLTYNDNLLFHGCIPMHSNGDFKSFKIAGKTYGGRDLLDLFESQIRLAYARPEKHDDLATDIIWYLWCGENSSLFGKNAMTTFERYYVSDKVTHQERKNPYFKLRDKDDICTTLLQEFDLPKFGHIVNGHTPVKEKNGEQPIKANGKMLVIDGGFAKGYQKNTGLAGYTLIYNSYGIQLISHLPFTSIEEVLSGTNYIIDTKRLVEEAKDRILVKDTTIGQKLTKEIKDLDHLYRHFQEYDD

SEQ ID NO: 5437 - protein, 1122 aa, Streptococcus agalactiae
ATGGATATAAAGGCAGAAATTCAAAAATTAGCAAAAGAAATTGGTATTTCTAAAATTGGTTTTACGACGGCAGATAACTTTGATTATTTGGAAAAGTCATTGCGTGCTTCTGTGGAAGAGGGGCGCAATTCAGGATTTGAACATAAAGTCATAGAGGATCGTATCTACCCTGAAAGGCTTTTAGAATCAGCTAAAACGATTATTTCAATTGGCGTTGCTTATCCTCACAAACTTCCTCAGCAACCTCAAAAAACACCTTATAAACGAGGAAAAATTACACCTAATTCGTGGGGGCTTGATTATCATTATGTGGTCGGCGAAAAGTTAGACAGACTATCAAAAGGCATTGAAGAGCTCTGTCGAGATTTTCCTTTGCAACAAAAAGCAATGGTCGATACTGGAGCTTTAGTTGATACTGCAGTTGCCCAAAGAGCAGGTATTGGTTTTATAGGAAAAAATGGTCTAGTTATTTCTAAAGAATATGGCTCTTATATGTTTTTGGGAGAATTAATTACCAATTTAGAGATCGAGCCAGACAAGCCTGTCGATTATGATTGTGGTGACTGTCGTCGTTGTCTAGATGCCTGTCCAACTTCTTGTTTAATTGGTGATGGCTCAATGAATGCCAAGCGTTGTCTATCATTTCAAACCCAAGATAAGGGAATGATGGACATAGAGTTTCGAAAAAAGATTAAAACAGTTATCTATGGTTGTGATATTTGCCAAATTTGCTGTCCTTATAACAAAGGTATAAATAATCCATTGGCGACAGAGATTGATCCTGAGTTGGCTCAACCAGAATTAATACCATTTTTGAGTTTATCAAATGGACAATTTAAAGAAAAATTTGGTATGATTGCTGGAAGTTGGCGAGGTAAAAATATTTTACAGCGTAATGCTATTATTGCGCTAGCAAATGCTCATGATAAAACCGCAGTGGTCAAATTAATAGAGATTATTGATAAAAATAATAACCCTATTCATACTGCAACAGCTATATGGGCATTGGGAGAAATTGTCAAAAAACCAAACGATGAGATACTGGAGTTTATGAGTAATTTAACCTTAAAAGATGAAGATAGCCGAAAAGAGTTGGAATTAATCCGTCATAAATGGCAATTT

SEQ ID NO: 5438 - protein, 374 aa, Streptococcus agalactiae
MDIKAEIQKLAKEIGISKIGFTTADNFDYLEKSLRASVEEGRNSGFEHKVIEDRIYPERLLESAKTIISIGVAYPHKLPQQPQKTPYKRGKITPNSWGLDYHYVVGEKLDRLSKGIEELCRDFPLQQKAMVDTGALVDTAVAQRAGIGFIGKNGLVISKEYGSYMFLGELITNLEIEPDKPVDYDCGDCRRCLDACPTSCLIGDGSMNAKRCLSFQTQDKGMMDIEFRKKIKTVIYGCDICQICCPYNKGINNPLATEIDPELAQPELIPFLSLSNGQFKEKFGMIAGSWRGKNILQRNAIIALANAHDKTAVVKLIEIIDKNNNPIHTATAIWALGEIVKKPNDEILEFMSNLTLKDEDSRKELELIRHKWQF

SEQ ID NO: 5439 - protein, 978 aa, Streptococcus agalactiae
ATGACTGAGCCAGACTTTTGGAATGACAATATTGCAGCGCAAAAGACATCTCAAGAACTGAATGAGTTAAAAGGTAAGTATGATACTTTCCATAATATGCAAGAATTATCTGACGAAACAGAACTCTTACTTGAGATGCTTGACGAAGATGATTCTTTGAAAGAAGAATTAGAAGAAAATCTAATGCAGCTAGATAAGATAATGGGTGCTTATGAAATGACGCTTCTCTTATCTGAGCCTTATGACCACAATAATGCTATCTTAGAAATCCATCCTGGTTCAGGAGGAACTGAAGCGCAAGATTGGGGAGATTTACTCTTACGAATGTATACCCGTTTTGGCAATGCTAATGGTTTTAAAGTAGAAGTATTGGATTATCAAGCAGGGGATGAAGCTGGTATTAAATCGGTTACCCTCTCTTTTGAAGGTCCCAATGCTTATGGTTTGTTGAAATCAGAAATGGGAGTTCATCGCCTCGTTCGTATATCACCTTTTGATTCGGCTAAACGTCGTCATACCTCATTTGCTTCAGTTGAAGTGATGCCAGAGTTAGATGATACGATTGAAGTAGAAGTACGTGATTATGACATTAAAATGGATACTTTCCGTTCCGGAGGAGCTGGTGGTCAGAACGTCAATAAAGTATCAACAGGTGTTCGTTTGACGCATATTCCAACTGGAATTGTGGTATCGTCTACCGTTGACCGTACTCAATATGGGAACCGCGATCGCGCTATGAAGATGTTGCAGGCTAAGCTATATCAGTTAGAACAAGAAAAGAAAGCACAAGAAGTAGATGCTCTTAAGGGTGATAAAAAAGAAATCACTTGGGGAAGTCAGATTCGTTCTTATGTTTTCACCCCTTATACGATGGTGAAGGATCATCGTACTAACTTTGAGCTTGCTCAGGTAGATAAGGTTATGGATGGAGAAATCAATGGCTTTATTGATGCCTACCTTAAGTGGCGCATTGAAGAC

SEQ ID NO: 5440 - protein, 326 aa, Streptococcus agalactiae
MTEPDFWNDNIAAQKTSQELNELKGKYDTFHNMQELSDETELLLEMLDEDDSLKEELEENLMQLDKIMGAYEMTLLLSEPYDHNNAILEIHPGSGGTEAQDWGDLLLRMYTRFGNANGFKVEVLDYQAGDEAGIKSVTLSFEGPNAYGLLKSEMGVHRLVRISPFDSAKRRHTSFASVEVMPELDDTIEVEVRDYDIKMDTFRSGGAGGQNVNKVSTGVRLTHIPTGIVVSSTVDRTQYGNRDRAMKMLQAKLYQLEQEKKAQEVDALKGDKKEITWGSQIRSYVFTPYTMVKDHRTNFELAQVDKVMDGEINGFIDAYLKWRIED

SEQ ID NO: 5441 - protein, 690 aa, Streptococcus agalactiae
ATGGCACTAATAGAAATGTCTGGTGTTACTAAAAAGTATCGCCGTTCAACAACTGCCTTGAGAAACTTAAATTTATCAATTCAGCAAGGTGAGTTTGTGTATTTAGTTGGTCCGTCAGGTGCTGGTAAATCTAGCTTGATTCGCCTCCTATACCGTGAAGAAAAATTAAGTTCAGGTAGATTAAAGGTAGGGGAATTCAATCTCAATAAACTCAAACGTCGTCAAATTCCTATTTTACGTCGTAGTATTGGAGTTGTCTTCCAAGATTATAAATTACTACCAACAAAAACAGTTTATGAGAATGTTGCGTTTGCGATGCAAGTTATTGGAGCTAAGCGCCGTCATATTAAAAAACGCGTGCCAGAAGTTCTAGAATTAGTAGGTTTAAAACACAAGATGCGTTCTTTTCCAACACAGTTATCTGGTGGAGAACAACAACGTGTGGCAATTGCACGTGCGATTGTTAATAATCCAAAATTATTAATTGCAGATGAACCTACTGGTAATTTGGATCCAGAAATTGCTTGGGAAATCATGCATCTATTGGAACGTATTAACCTTCAAGGAACGACTGTTTTGATGGCAACACACAATAGTCAAATTGTTAACACACTTCGTCATCGTGTCATTGAGATTGAAGCAGGTAGCGTTATCCGAGATGAAGAGAAGGGAGAATATGGTTATCATGAT

SEQ ID NO: 5442 - protein, 230 aa, Streptococcus agalactiae; identical to SEQ ID NO: 1066

SEQ ID NO: 5443 - protein, 927 aa, Streptococcus agalactiae
ATGGTTATCATGATTAATTTCTTTAGACATTTCTGGGAATCGCTTAAAAACTTGAAACGTAACTTTTGGATGACTTTTGCTTCTGTAACATCAGTTACCATAACCTTACTTCTTGTAGGCTTGTTTTCATCAGTTTTACTGAATGTTGAAAAGTTAACAACTGATGTTTCAGGTAATTTTACTATCAGTGCCTTTTTAAATGTTGACTCAACGGATGCTCAAAAACAAGTCAAAGATAAGGACGGAAAGCTAAAAGATAATCCTGATTATCATAAAGTTTACGACAAAATTAAACGTATTTCTGGTGTAGAGAAAGTCACTTATTCAAGTAAAGCTGAACAATTAAAAGAAGTTCAAAAAGAGTATGGTTCAGATGTTATTGATGATACCTATAAAGATGCTTTGTTAGATGTTTACGTAGTTGGGACAAGTTCTGCAAAAGTTTCTAAGAGTGTCAGTGAAGCAATTGGACGCATTGAAGGTGTTGATTATACTAAAGAACCTATTGATTCAACAAAACTATCTAATCTCACAGATAACATCCGTATATGGGGATTTGGTGGTGTTGCCTTATTAATTGTCCTTGCTATCTTTTTGATTTCAAATACTATTCGTATGTCGATTATGTCACGCCGTACAGATATTGAAATCATGAGATTAGTTGGCGCTAAAAATTCTTATATTCGAGGACCGTTCTTTTTTGAAGGTGCTTGGGTAGGGATTTTAGGGGCTATCGTTCCATCGCTGATTTTCTATTTTGGTTATCAATTTGTGTTTAACAAGTTTAATCCAAAATTTGAGACAAGCCATGTTTCATTGTATCCTATGGATATTATGGTTCCAGCAATTATTGGTGGTATGGTGATTATTGGTATTATTATTGGCTCACTTGGGTCTGTCCTATCAATGAGACGTTACCTTAAGATT

SEQ ID NO: 5444 - protein, 309 aa, Streptococcus agalactiae; identical to SEQ ID NO: 1068

SEQ ID NO: 5445 - protein, 708 aa, Streptococcus agalactiae
ATGAACATAAAACGTCACTCTATTTTTCTTTGGTTAACAACAAGTATCCTTGCTATTTTAATGGCCGTCGGGATGACCATTTACTTCAATACTTACCAAGCCTCCCCATTAGCTAGGAGAATTGCTAAAACCGCTACAAACCATAAGAACTACCTTCTTTTTAGAAGCAAGGGTAAGGTAAAAGCAAATATTATTTTCTATCAAGGGGCTCTTGTGGAAGAAGAAGCTTATTCTCAACTTGCTAGAGATTTAGCTGACAAAGGGTATAATACCTATATTTTGAAGACACCTTTAAATTTGCCAGTTTTATCGCCTCATAAAGCTAAAACAATTATTAATCAGAACCACTTAACTAATGTTTACCTTGCTGGACATTCTTTAGGAGGAGTTGTTGCTAGCCAAAATGCCAAAGTAGCCCCTGTTAGAGGGCTCATATTATTAGCTTCCTACCCTTCACGTAAATCCGACCTATCTCATAAAAAGTTAAGAGTACTCTCCATTACAGCAAGTAATGATCATATTTTAAACTGGGAAAAATATGAGGAAGCTAAAAAACGCCTCCCAAATTCAAGTACTTTTCGAACTATTGTCGGAGGAAACCATAGCCGATTTGGTAACTACGGACATCAAAAAGGGGATGGTAAAGCTACCCTTTCTCACAAATCATCTGAAAAACAATTGGCTACGTTTATTTCGAATTTTATCCAC

SEQ ID NO: 5446 - protein, 236 aa, Streptococcus agalactiae
MNIKRHSIFLWLTTSILAILMAVGMTIYFNTYQASPLARRIAKTATNHKNYLLFRSKGKVKANIIFYQGALVEEEAYSQLARDLADKGYNTYILKTPLNLPVLSPHKAKTIINQNHLTNVYLAGHSLGGVVASQNAKVAPVRGLILLASYPSRKSDLSHKKLRVLSITASNDHILNWEKYEEAKKRLPNSSTFRTIVGGNHSRFGNYGHQKGDGKATLSHKSSEKQLATFISNFIH

SEQ ID NO: 5447 - protein, 696 aa, Streptococcus agalactiae
TTGCCATTTATTTTCCGCCACTCTTTTTTTAACAAAGTCTTGATTTTTTGGTACACTATCATTATGAAAATCTATAAAACAATAAACCACATTGCTGGTGAAAATACTTATTACCTCGTTAATGATCAAGCTGTTATCCTCATTGATCCAGGGAGCAATGGCCAAGAAATTATTGCTAAAATTAAATCCTTTGAAAAACCTTTAGTGGCTATCCTCTTAACTCATACTCACTATGATCATATTTTTAGTTTAGATTTGGTCAGAGATACTTTTGATAATCCACCTGTTTATGTTTCAGAAAAAGAAGCCGCTTGGCTATCTTCCCCAGATGATAATTTATCTGGGTTAGGCCGTCATGATGATATCATTAATGTTATAGCAAGACCGGCAGAGAACTTTTTTAAATTAAAGCAACCCTATCAACTAAATGGTTTTGAATTCACAGTTTTACCAACACCTGGTCATTCTTGGGGAGGAGTCTCGTTTGTTTTCCACTCAGATGAATTAGTCGTTACTGGCGATGCTCTATTTCGTGAAACTATCGGTCGTACTGACTTACCTACCAGTAACTTTGAGGACCTCATTACTGGTATTCGTCAAGAACTATTCACCTTACCTAGTCATTATAGTGTTCACCCAGGCCATGGCATGAATACAACTATTGGCCACGAAAAAAACTTTAATCCTTTCTTCCAA

SEQ ID NO: 5448 - protein, 232 aa, Streptococcus agalactiae; identical to SEQ ID NO: 1072

SEQ ID NO: 5449 - protein, 762 aa, Streptococcus agalactiae
ATGTCAAAAGTTGCTATTGTTACTGGTGCTGGTCAAGGAATTGGATTTGCTATTGCGAAACGTCTTCATGCAGACGGCTTTAAAATAGGCGTTTTAGACTATAATGAAGAGACTGCTCAGGCTGCGGTTGATAAACTATCACCTGAGGATGCTGTTGCAGTTGTAGCAGATGTTTCAAAACGTGATCAAGTTTTTGATGCTTTCCAAAAAGTTGTAGATACTTTTGGTGATTTGAATGTTGTTGTTAACAATGCAGGTGTTGCCCCAACAACTCCTCTTGACACTATTACTGAAGAGCAGTTTGAAAAGGCTTTTGCAATCAATGTCGGAGGAACTATTTGGGGAAGCCAAGCAGCTCAGAAACATTTTAGAGAATTAGGTCATGGCGGAAAAATTATAAATGCAACTTCACAAGCAGGATGTGAAGGGAATCCTAATTTGACTGTTTATGGTGGTACAAAATTTGCAGTTCGTGGTATTACACAGACTTTGGCAAAAGATTTAGCATCAGAAGGAATCACAGTCAATGCTTACGCACCAGGTATTGTTAAAACACCTATGATGTTTGATATTGCCCATGAAGTTGGTAAGAATGCAGGCAAAGATGATGAATGGGGTATGGAGCAGTTTGCCAAAGATATCACTTTGAAACGCTTGTCTGAACCAGAAGATGTTGCTAATGCAGTAGGCTTCTTAGCGGGAGATGATTCAAATTATATCACTGGACAAACAATAGTTGTCGATGGGGGTATGGTATTCCAT

SEQ ID NO: 5450 - protein, 254 aa, Streptococcus agalactiae; identical to SEQ ID NO: 1074

SEQ ID NO: 5451 - protein, 2505 aa, Streptococcus agalactiae
ATGTTTTGTTTTATAGATATAGCGTGCTATAATAGACTTACTATGACCCAGAAAAAACTTAGAAAATATGCAGTAGTTGACTTGGAGGCTACTGGAGCAGGTCCCAATGCTTCTATTATTCAGGTTGGGATTGTTATTATCCAAGGAAATAAAATTATTGATAGTTATGAAACAGATGTTAATCCTCATGAATCTTTGGATGAGCATATTGTTCATTTGACAGGTATTACGGATAAGCAGTTGGCTAAAGCTCCGGATTTTGGTCAAGTGGCGCATCACATTTATCAATTGATTGAAGATTGTATTTTTGTTGCCCACAATGTAAAGTTCGATGCAAATTTATTGGCTGAGCAACTATTTTTAGAAGGCTGCGAGTTACGTACACCAAGGATAGATACAGTAGAATTATCACAAGTATTTTATCCCTGTTTAGAAAAATATTCTTTAGGGGCATTAGCAGAAAGCTTAAATATTGAATTAACAGATGCGCACACTGCTATTGCAGATGCAAGAGCTACAGCACAGTTATTCATTAAGTTAAAAGCTAAAATTAGTAGTTTACCTAAAGAAGTGTTGGAGACCATTTTAACATTTGCTGATAATCTTTTGTTCGAATCCTATTTATTGATTGAAGAAGCTTATCAAGAAGCTGATTTCGTTAATCCTAAAGAATATTATTTCTGGCAAGGATTGGTCTTAAAAAAAGAAAAAGCTGTTGGAAAGCCTAAGAAATTATCTAGTGATTTTCAAGTTAACATGGCTTTGTTAGGTATGGATGCTCGCCCTAAGCAAGTTGTTTTTGCTGACTTGGTTAAAGCGCATTTTAATGATCAAACAACAACGTTTTTAGAAGCTCAATCAGGACTTGGTAAAACATATGGTTATCTCTTGCCTTTATTGGATCAGTCTCAAAAACAACAAATAATAGTATCTGTTCCAACAAAGATTTTGCAAGATCAAATAATGGCTAAAGAAATAAAGCACATTCAAGAACTTTTTCATATTCCCTGTCACAGTATCAAAGGACCGAGAAATTACTTGAAGTTAGATGCGTTTTATAAGAGCCTCCAAGTGCAGGATCGAAATCGATTGATAAATCGTTTTAAAATGCAACTGCTAGTGTGGTTGACGGAAACGACTACAGGTGATTTGGATGAAATTAAACAAAAACAACGATTAGAATCTTACTTTGACCAGCTAAAACACGATGGAGAAGTGACTCAATCATCACTTTTTTATGATCTGGATTTTTGGAAACGCAGTTATGATAAAGTTGCACAAAGTCAACTTGTTATTATCAATCATGCTTATTTTCTTGAGCGTGTTCAGGATGACAAAGATTTTGCAAAGGGGAAGGTTTTAGTTTTTGATGAAGCTCAGAAACTTGTTTTGGGACTGGAAAATTTTTCTCGTGGGCAACTTGATATTAGTCACCAATTGCAGGTTATTCAAAAAATAATTGATAGTTCTATTCCATTATTACAAAAGCGCCTTCTGGAAAGTATCTCTTATGAGCTAAGTCATGCAGTAGAACTTTTTTATCGTCATAATTCTTTTGAATTTTCAGAGACCTGGTTGAAACGTCTAAAAAATAGTATAAACGCTTTAGAAGTAGTAGGATTAGATGAGTTACAAACTTTTTTCACAGCTACTTATACTAACTATTGGTTTGAAACTGACAAAGTCAATGAGAAGCGTTTAACCATTTTACGTGGGGCGAGAGAAGATTTTCTTAAATTTTCAAAGTTCCTCCCCCCCACAAAAAAGACCTATATGATATCAGCGACTTTACAAATCAGTCCCAAAGTCTACTTGTCAGATCTTTTAGGAGGATTTTCAAGTATAAGTACAGAAAAGATAGCGCATGAGAAAAATGCCAATCAGAAAGTATGGATTGATACCTCTATGCCTAATATACTTGATTTATCACCGGAACAGTATGCTTACGAAATAGCCAAGCGTTTACAAGATATAATGACGTTAAAGCAGCCTACCTTAGTCTTATTAACTTCTAAACAGACAATGTTTATGGTATCTGATTATTTGGATAAGTGGGAGATAAAACATCTTACTCAAGATAAAAATGGCTTAGCTTATAACGTTAAAAAACGTTTTGATCGTGGAGAAAGCAATCTTCTTTTAGGTACAGGATCTTTTTGGGAAGGTGTTGACTTTGTACATCGTGATCGTCTTATTGAAGTTATCACGCGATTGCCTTTTGATAATCCCAAAGACTATTTTATCCAGAAACTATCGCAGAGTTTAACAAAAGAGGGGAAAAACTTCTTTTATGACTATTCTTTACCAATGACTGTCTTAAAATTAAAACAGGCCTTGGGACGTACTACAAGGAGAGAAGAACAAAAGTCAGCGGTAATTATTTTGGATAGCAGATTGGTTATTAAATCTTATGGACAAACCATCATGCATTCTCTTGGTAGAGATTTTGAAATTTCTAAGGAAAAAATTAACAAGGTCTTGACTGAAATGGCTAAATTTTTGATA

SEQ ID NO: 5452 - protein, 835 aa, Streptococcus agalactiae
MFCFIDIACYNRLTMTQKKLRKYAVVDLEATGAGPNASIIQVGIVIIQGNKIIDSYETDVNPHESLDEHIVHLTGITDKQLAKAPDFGQVAHHIYQLIEDCIFVAHNVKFDANLLAEQLFLEGCELRTPRIDTVELSQVFYPCLEKYSLGALAESLNIELTDAHTAIADARATAQLFIKLKAKISSLPKEVLETILTFADNLLFESYLLIEEAYQEADFVNPKEYYFWQGLVLKKEKAVGKPKKLSSDFQVNMALLGMDARPKQVVFADLVKAHFNDQTTTFLEAQSGLGKTYGYLLPLLDQSQKQQIIVSVPTKILQDQIMAKEIKHIQELFHIPCHSIKGPRNYLKLDAFYKSLQVQDRNRLINRFKMQLLVWLTETTTGDLDEIKQKQRLESYFDQLKHDGEVTQSSLFYDLDFWKRSYDKVAQSQLVIINHAYFLERVQDDKDFAKGKVLVFDEAQKLVLGLENFSRGQLDISHQLQVIQKIIDSSIPLLQKRLLESISYELSHAVELFYRHNSFEFSETWLKRLKNSINALEVVGLDELQTFFTATYTNYWFETDKVNEKRLTILRGAREDFLKFSKFLPPTKKTYMISATLQISPKVYLSDLLGGFSSISTEKIAHEKNANQKVWIDTSMPNILDLSPEQYAYEIAKRLQDIMTLKQPTLVLLTSKQTMFMVSDYLDKWEIKHLTQDKNGLAYNVKKRFDRGESNLLLGTGSFWEGVDFVHRDRLIEVITRLPFDNPKDYFIQKLSQSLTKEGKNFFYDYSLPMTVLKLKQALGRTTRREEQKSAVIILDSRLVIKSYGQTIMHSLGRDFEISKEKINKVLTEMAKFLI

SEQ ID NO: 5453 - protein, 1191 aa, Streptococcus agalactiae
ATGACCTATTTGTCAGAACGTGTACTCAATATGGAAGAGAGTGTTACTTTAGCTGCGGGAGCTAAAGCAAGAGAACTCAGAGTACAAGGAAGAGATATTCTTAGTTTAACTTTAGGGGAGCCTGACTTTGCTACTCCTAAAAACATTCAGCAAGCGGCTATTGAGGCTATAACAGATGGACGTGCAAGTTTTTACACACCATCAAGTGGTTTGCCGGAGTTGAAGTCAGCAATTAATGCGTATTTTGAACGTTTTTATGGCTACTCCCTTAAACCTAATCAGGTGGTTGTGGGAACTGGTGCTAAGTTTATCCTTTATACTTTCTTTATGACAGTACTGAATCCCGGTGATGAAGTAATTATTCCGACTCCTTATTGGGTATCTTATGCTGATCAGATTAAGATGGCTGAAGGTAAGCCAGTTTTTGTCACAGCAAAAGAAGTTAATCACTTCAAAGTAACTGTGGAACAGTTAGAAGCTGTTAGGACTGATAAGACAAAAGTCATACTTCTTAATAGTCCATCAAATCCTACAGGTATGATTTATAAAGCTGAGGAGTTGGAGGCTATTGGAAATTGGGCAGTCGAACATGATATCCTAATTTTAGCAGATGATATTTACGGTCGATTGGTTTACAATGGCAATATTTTTACCCCTATTTCAAGCCTTTCAGAGTCTATTCGAAACCAAACGATAGTCATAAATGGAGTTTCTAAGACTTATGCGATGACAGGTTGGCGTGTTGGTTTTGCAGTGGGTAATCATGATATTATAGCGGCAATGTCTAAAGTAGTCAGTCAAACAACTTCTAACCTTACGGCTGTCTCACAGTATGCTACTATTGAGGCTTTAAATGGTTCTCAAGAGTCATTTGAAAAAATGAGGCTAGCATTTGAAGAACGCCTTAATATCATTTATCCATTGTTGTGTCAGGTCCCTGGGTTTGAGGTTGTTAAACCACAAGGTGCTTTTTATCTTTTCCCAAATGTTACAAAAGCAATGGAAATGAAAGGATATACGGATGTTACAGCATTCACGGATGCCATTCTTGAAGAAGTTGGACTTGCTTTAGTAACGGGTGCTGGTTTTGGAGCGCCGGAAAATGTTCGTCTGAGTTATGCTACAGATCTTGAAACCCTTAAAGAAGCTGTTCGTAGACTGCATGTCTTTATGGGAAGTAATGAAATTAAT

SEQ ID NO: 5454 - protein, 397 aa, Streptococcus agalactiae; identical to SEQ ID NO: 1080

SEQ ID NO: 5455 - protein, 1343 aa, Streptococcus agalactiae
ATGTCAAAAAAACTTATTTCAATTGTTGATGTTAAAGATTATGTTGGTCAAGAAGTTACTATTGGTGCTTGGGTTGCTAACAAATCAGGTAAAGGTAAGATTGCGTTTGTACAGTTGCGCGATGGTTCTGCCTTTTTCCAAGGTGTCGCTTTTAAACCAAACTTCATTGAAAAATATGGTGAAGAATCAGGTCTTGAAAAATTTGACGTTATTAAACGTCTCAACCAAGAAACATCTGTTTATGTAACAGGGATTGTTAAAGAGGATGAACGTTCAAAATTTGGCTATGAGCTTGATATTACTGACCTTGAAGTCATTGGAGAGTCACATGAATATCCTATAACTCCTAAAGAGCATGGGACAGACTTCTTGATGGACAACCGTCATCTTTGGTTGCGTTCTCGTAAACAAATGGCTGTTATGCAAATTCGTAACGCTATTATTTATTCAACTTATGAATTCTTTGACCAAAATGGTTTTATCAAATTTGATAGCCCAATTTTATCAGAAAATGCAGCAGAAGATTCAACAGAGTTATTTGAAACAGACTATTTTGGGAAACCAGCATTTCTTAGCCAATCTGGTCAATTATACCTTGAAGCTGGAGCAATGGCTCTAGGCCGAGTTTTCGACTTTGGTCCAGTCTTTCGTGCTGAAAATCTAAAACACGTCGCCATTTAACAGAATTTTGGATGATGGATGCTGAGTATTCTTTCTTGTCACATGAGGAATCACTTGACCTCCAAGAAGCTTATGTTAAAGCATTGATCCAAGGCGTTCTAGATCGTGCGCCTCAAGCACTTGATATTTTAGAACGTGATGTTGAGGCTCTCAAACGTTATATCGCAGAGCCATTCAAGCGTGTTTCTTATGATGATGCTATTACACTTCTTCAAGAGCATGAAGCAGATGAAGATACAGATTATGAACATTTAGAGCATGGTGATGACTTTGGTTCACCACATGAAACTTGGATTTCTAATTACTTTGGAGTGCCGACATTTGTAGTGAATTACCCAGCAAGCTTTAAAGCATTTTATATGAAACCAGTTCCTGGAAATCCAGAACGCGTTCTTTGTGCTGATCTTCTAGCTCCAGAAGGTTATGGAGAGATCATTGGCGGCTCAATGCGTGAAGACGACTACGATGCTCTTGTGGCTAAAATGGATGAACTAGGTATGGATAAATCAGAATACGACTTTTACCTTGACCTTCGTAAATACGGCTCTGTTCCTCATGGCGGTTTTGGTATAGGTATTGAACGTATGGTAACTTTTGTTGCTGGTACCAAACATATTCGCGAAGCTATTCCATTCCCACGTATGTTACATCGTATCAAACCA

SEQ ID NO: 5456 - protein, 448 aa, Streptococcus agalactiae; identical to SEQ ID NO: 1082

SEQ ID NO: 5457 - protein, 555 aa, Streptococcus agalactiae
ATGACAAAATCACCTGCTCGTTTAATTTCATTTATCTCAATCGCTATCGCCATCAACCTTGTTGGGGCTAATTTAGCTCTATTTTTACGCCTACCTATCTATCTAGATACTATAGGTACATTGTTAATAGCAGTTATCCTGGGACCATGGTACGCTGCCAGCACTGCTTTTCTCAGTGCACTCATCAATTGGATGACTACTGATATTTTTTCACTTTATTATTCACCAGTCGCCATCGTGGTTGCTATCATTACGGGTATCTTGATTAAAAGGAATTGTAAACCCTCTAGCCTATTGTGGAAATCACTGATTATTTCTTTACCAGGAACTATTATTGCTTCAGTTATAACAGTTATCCTTTTTAAAGGAATTACCTCTAGTGGCTCAAGTATTATAGCACAATTCTTACATGGAATTGGATTAGACATGACAAGTAGTTTGATACTTGTTCAAGTTGGAACAGATTATATGGATCGACTAATCAGTCTTATCCTTGTCTTTTCGACAATCACATTGTTAAAAAAACATAGTCCCAATTTAATTAACCAACGATTC

SEQ ID NO: 5458 - protein, 185 aa, Streptococcus agalactiae; identical to SEQ ID NO: 1084

SEQ ID NO: 5459 - protein, 981 aa, Streptococcus agalactiae
ATGAATAAAGAAAAAATTATTATCGATTGCGATCCCGGTATTGATGATACCTTAGCACTGATGTATGCTATTCAGCATCCTAAGTTAGAAGTTGTTGCTATTACTATAACAGCAGGCAATTCGCCTGTTGAGCTAGGACTAAAGAATACCTTTGTAACGCTTGAATTACTAAACCGTCACGACATTCCAGTTTATGTTGGTGATAACTTGCCTTTACAACGTGAATTTGTATCTGCTCAGGATACTCATGGAATGGATGGCCTTGGAGAGAATAACTTTACATTGGCGCAACCAATTATCTTTCAAGAAGAATCAGCAGATTGTTTTTTAGCAAACTATTTTGAACACAAAAATGATACTTCTATTATAGCTCTCGGACCTCTGACCAATATCGCTCGAGCCTTACAAACTAATCCCAAATTAGGCAAACATTGCAAGCGATTTATTAGCATGGGAGGAAGTTTTAAATCACATGGCAATTGTTCTCCAGTTGCTGAATACAACTATTGGTGTGATCCTCATGCTGCACAATATGTATTTGAAAACCTTGACAAAAAAATAGAGATGGTTGGACTAGACATCACACGTCATATTGTATTAACCCCCAATCATTTATCTTATATGGAGCGTATTAATCCAGACGTATCAAGTTTTATCCAAAAAATCACAAAGTTCTACTTCGATTTTCACTGGCAATATGAGCATATTATTGGATGTGTGATAAATGATCCTTTAGCTATTGCTTACTTTGTTAATGAAAATATCGCTACTGGTTTTGATAGCTATACCGATGTTGCTTGTCACGGAATCGCCATGGGACAAACAATTGTAGATCAGTATCATTTTTATAAAAAAGATGCTAACAGTAAGATTTTAACCTCAGTCAATACTAATTTATTTTGGAATGATTTTATGACCGTCCTATTACATGCACAAAATTCAGTCATCATTGAAGACTTAGAAATGTTAGGACTTAACAAA

SEQ ID NO: 5460 - protein, 327 aa, Streptococcus agalactiae
MNKEKIIIDCDPGIDDTLALMYAIQHPKLEVVAITITAGNSPVELGLKNTFVTLELLNRHDIPVYVGDNLPLQREFVSAQDTHGMDGLGENNFTLAQPIIFQEESADCFLANYFEHKNDTSIIALGPLTNIARALQTNPKLGKHCKRFISMGGSFKSHGNCSPVAEYNYWCDPHAAQYVFENLDKKIEMVGLDITRHIVLTPNHLSYMERINPDVSSFIQKITKFYFDFHWQYEHIIGCVINDPLAIAYFVNENIATGFDSYTDVACHGIAMGQTIVDQYHFYKKDANSKILTSVNTNLFWNDFMTVLLHAQNSVIIEDLEMLGLNK

SEQ ID NO: 5461 - protein, 411 aa, Streptococcus agalactiae
ATGCTTTATGAAGTAACCTCATCAAACACTCAAGGCGTTGATGGAAAAGTTTATCTCTCCAATGGAAAAATTGTGGAGACCAATCACCCTTTAAATCATTTACCAGGATTTAATCCTGAGGAATTAATTGCTTTAGCATGGTCAACATGTTTAAATGCAACTATAAAAGCTATTTTAGAACAAAAAGGATTCAAAGACCTAAAATCTCGCGTTGATGTTACTTGCCAGCTCATGAAGGAAAAGCAAGTAGGTAAGGGATTTTATTTCCAAGTTAACGCTGTTGCTAGTATTGAAAAACTGTCATTATCTGATAGTAAGCTAATCGTTAACAAAGCACACAGCAGATGTCCGATTTCAAAATTAATTTCAAATGCTAAAACAATCAATCTAGACACTGTTAAATGGTCAGTT

SEQ ID NO: 5462 - protein, 137 aa, Streptococcus agalactiae
MLYEVTSSNTQGVDGKVYLSNGKIVETNHPLNHLPGFNPEELIALAWSTCLNATIKAILEQKGFKDLKSRVDVTCQLMKEKQVGKGFYFQVNAVASIEKLSLSDSKLIVNKAHSRCPISKLISNAKTINLDTVKWSV

SEQ ID NO: 5463 - protein, 888 aa, Streptococcus agalactiae
ATGTCAGACGAACAAATCAAACTTGTGATTGTAACAGGTATGAGTGGGGCAGGAAAGACAGTGGCTATTCAGTCATTTGAAGATTTAGGATATTTTACAATAGATAATATGCCGCCTACTCTAGTGCCTAAGTTTTTAGAATTAGCAGCACAATCAGGAGATACAAGCAAGATTGCTATGGTAGTTGACATGCGTAGTCGTCTTTTCTTTAGAGAAATTAACTCTATTTTGGATAGCCTTGAAATTAATGATAATATTAACTTTAAGATTCTATTTTTAGATGCTACTGACACCGAGCTAGTGTCACGATATAAAGAGACACGTCGTAGCCACCCTCTTGCTGCCGACGGCAGAGTGTTAGATGGTATTTCTCTAGAGAGAGAACTATTAGCACCGCTTAAAAGTATGAGTCAGAACGTTGTGGACACTAGTGAATTAACACCAAGACAACTACGTAAGGTCATTTCTGAAGAATTCTCAAATCAAGATAGTCAAAGTTCTTTTCGTATCGAAGTTATGAGTTTTGGTTTTAAATATGGTATACCTTTGGATGCGGATTTAGTATTCGATGTGCGTTTTTTACCAAATCCATACTATAAACCAGAATTAAGAGATAAGACAGGTTTAGATACTGAGGTTTATGACTATGTCATGAGTTTTGATGAATCAGATGATTTTTATGACCATCTTCTTGCCTTAATAAAGCCAATCTTACCAGGCTATCAAAATGAAGGGAAATCTGTTTTGACTGTGGCAATCGGATGTACAGGTGGGCAACATCGTAGCACCGCTTTTGCTCATAGATTATCAGAAGATTTAAAAGCAGATTGGACAGTTAATGAAAGCCATCGTGATAAAAATAAGCGTAAGGAGACGGTAAATCGTTCA

SEQ ID NO: 5464 - protein, 296 aa, Streptococcus agalactiae
MSDEQIKLVIVTGMSGAGKTVAIQSFEDLGYFTIDNMPPTLVPKFLELAAQSGDTSKIAMVVDMRSRLFFREINSILDSLEINDNINFKILFLDATDTELVSRYKETRRSHPLAADGRVLDGISLERELLAPLKSMSQNVVDTSELTPRQLRKVISEEFSNQDSQSSFRIEVMSFGFKYGIPLDADLVFDVRFLPNPYYKPELRDKTGLDTEVYDYVMSFDESDDFYDHLLALIKPILPGYQNEGKSVLTVAIGCTGGQHRSTAFAHRLSEDLKADWTVNESHRDKNKRKETVNRS

SEQ ID NO: 5465 - protein, 972 aa, Streptococcus agalactiae
ATGAGAAAACCTAAAATAACCGTTATCGGCGGAGGAACGGGAATTCCAGTTATTTTGAAAAGTCTTCGCTTAGAAGATGTTGAGATTACAGCGGTTGTCACGGTTGCAGATGATGGTGGTTCGTCAGGTGAGTTGCGCTCAGTTATGCAACTAACACCACCAGGAGATCTAAGAAATGTTTTGGTTGCCTTGAGTGATATGCCGAAGTTTTACGAACAAATTTTCCAATATCGTTTTGCAGAAGGTGATGGAGATTTTGCAGGTCATCCTTTAGGAAATCTTATTATTGCTGGTGTTGCTGAAATGCAAGGTTCAACTTATAACGCTATGCAGAGTTTAACACAGTTCTTTCATACAACAGGAAAGATATATCCATCTAGTGAACATCCGCTCACTCTGCATGCTGTTTTTAAAGATGGCCATGAAGTGGTTGGAGAGAGTCAAATAGCCGATTATAAAGGCATGATTGACCATGTGTATGTCACTAATACTTATAATGAAGAGACTCCTACGGCCAGCCGCAAAGTTGTTGATGCAATTTTAGAAAGTGATATGATTGTGTTGGGTCCAGGGTCACTTTTCACCTCTATTTTACCTAACCTAGTTATTCCAGAGATTAAACAAGCTCTTTTAGAAACTCGGGCAGAGGTAGCTTATGTATGCAATATTATGACACAACGTGGTGAAACTGAGCATTTTACAGACGCAGACCACGTTGAAGTATTGAAACGTCATTTAGGACAAGATGCTATCGATACAGTTTTGGTTAATATTGAAAAAGTGCCAGAGTCTTATATGGAAAACAATCATTTTGATGAGTATTTGGTACAGGTTGAACATGATTTTTCAGGGCTTAGAAAACATGCCAGACGTGTCATCTCGTCTAACTTTTTAAAATTAGAAAAAGGTGGAGCCTTCCATCATGGTGACTTCGTTGTTGAGGAACTAATGAATTTAGTAGGAACACATTTA

SEQ ID NO: 5466 - protein, 324 aa, Streptococcus agalactiae; identical to SEQ ID NO: 1098

SEQ ID NO: 5467 - protein, 909 aa, Streptococcus agalactiae
ATGAGTTTTACAGTAAAAGTCAAAGAAGAGTTGCTAGGTCATAAGAGTGAAAATAAGATGGAACTGTCAGCTATTATCAAAATGTCAGGTAGTTTAGGATTAGCTAACCACGGCCTCAACCTTTCTATTACCACAGAAAATGCTAAAATTGCTCGTCATATTTATAGCATGTTAGAAGAACATTATCATTTGCAGCCAGAAATCAAATACCATCAAAAAACGAACTTACGAAAGAATCGTGTGTATACTGTTTTTATTGAAGAAAAAGTTGATGTTATTCTTGCTGATTTGAAGTTGGCTGATGCTTTTTTTGGTATTGAAACTGGTATTGAACACTCTATATTGGACAATGATGAAAATGGAAGAGCTTATCTCAGGGGAGCATTCTTATCAACGGGTACTGTTAGAGAACCTGATTCTGGAAAATATCAACTAGAAATTTTTTCTGTTTATCTAGACCATGCACAAGACTTAGCTAATCTTATGAAAAAATTTATGTTAGATGCAAAGGTTATTGAACATAAACATGGAGCAGTAACTTATTTGCAAAAAGCAGAAGATATTATGGATTTCTTGATAGTCATTGATGCCATGGAAGCTAGAGATGCTTTTGAAGAGATTAAAATGATACGTGAGACACGTAATGATATTAACCGTGCTAACAACGTTGAAACAGCTAATATTGCTAGAACAATCACAGCTAGTATGAAGACTATCAATAATATTATCAAGATTATGGATACTATTGGTTTTGATGCACTGCCTAGTGATTTAAGACAAGTAGCTCAGGTGCGTGTGGCTCATCCAGATTACTCTATTCAACAAATAGCAGACAGTTTAGAAACGCCTCTGAGTAAGAGTGGCGTTAACCATCGCTTACGGAAAATAAATAAAATTGCAGATGAATTA

SEQ ID NO: 5468 - protein, 303 aa, Streptococcus agalactiae; identical to SEQ ID NO: 1100

SEQ ID NO: 5469 - protein, 1395 aa, Streptococcus agalactiae
ATGGCTTGTACAACAATATTGGTTGGTAAAAAGGCTTCTTATGATGGTTCGACTATGATCGCTAGAACGGAAGACTCTGTTAATGGCGATTTCACACCCAAAAAATTAAAGGTAATGACATCTAAAGATCAACCGCGTCATTACAAATCAGTTTTATCAAATTTTGAAGTAGATTTACCAGATAACCCACTTCCTTATACTTCAGTACCGGACGCATTGGGAAAAGATGGTATATGGGGTGAAGCCGGTATTAACAGTAAAAATGTAGCGATGAGTGCTACAGAAACTATTACAACGAATTCCCGCGTTTTGGGTGCAGATCCTTTGGTTTCAGATGGTATAGGGGAAGAGGATATACTCACTTTAGTGCTTCCCTATATTCAGTCAGCGCGAGAAGGTGTGGAGCGTTTAGGTGCTATTTTGGAAAAATATGGAACCTATGAATCAAATGGTATTGCTTTTTCAGATACCGAAGAAATATGGTGGTTAGAAACAATTGGTGGGCATCATTGGATTGCTCGTCGCGTACCTGATGATGTTTATGTTACTAATCCTAACCAACTAGGAATTGATCATTTTGAATTTAATAACTGTGATGACTACATGTGCTCTAGTGATTTGAAAGAGTTTATCGAACAATACCATTTAGATTTGACCTATTCTAATGAGCATTTCAATCCTCGATATGCTTTTGGTAGCCAACGTGATAAAGATCGTCATTACAACACACCAAGAAGTTGGGCAATGCAGCGTTTTTTAAATCCTGAAATTGAACAGGATCCACGTAGCTTGTTTATTCCCTGGTGTCAAAAACCTTACCGAAAAATTACTGTTGAGGATATTAAATATGTGTTGAGTGATCATTATCAAGACAGTGTGTATGACCCATATGGACCAGAAGGGGATGCGGTAAGTAGGAGAGCTTTTCGTTCAGTTGGTATCAACCGAACTAGTCAAACGTCTATTCTACAATTACGACCAAATAAATCACTTGAAACGACAGGTGTTCAATGGTTATCTTATGGCTCTATGCCATTTGCAACCATGGTGCCGTTGTTTACACAAGTTGAGACTGTACCAGACTATTTTTCGAATACAACCAAGGATGCTTCAACAGATAATTTTTATTGGACCAATCGTTTAATTGCAGCTCTAGCAGATCCACACTTTTATCAACATGAAGCTGATATTGAAAGCTATATCGAGAGAACGATGGCCCAAGGACATGCACATATTAACGGTATTGATAGAGAAGTTGCTGAGAATAAAGAGATTGATTTTCAACAGAAAAATCAAGAGATGAGTGACTATATTCAAAAAGAAAGCCAAGAATTGTTAAATCGTATTCTATTTGATGCAAGTAATTTAATGACAAATCGCTTTTCAATGGGAGAT

SEQ ID NO: 5470 - protein, 465 aa, Streptococcus agalactiae
MACTTILVGKKASYDGSTMIARTEDSVNGDFTPKKLKVMTSKDQPRHYKSVLSNFEVDLPDNPLPYTSVPDALGKDGIWGEAGINSKNVAMSATETITTNSRVLGADPLVSDGIGEEDILTLVLPYIQSAREGVERLGAILEKYGTYESNGIAFSDTEEIWWLETIGGHHWIARRVPDDVYVTNPNQLGIDHFEFNNCDDYMCSSDLKEFIEQYHLDLTYSNEHFNPRYAFGSQRDKDRHYNTPRSWAMQRFLNPEIEQDPRSLFIPWCQKPYRKITVEDIKYVLSDHYQDSVYDPYGPEGDAVSRRAFRSVGINRTSQTSILQLRPNKSLETTGVQWLSYGSMPFATMVPLFTQVETVPDYFSNTTKDASTDNFYWTNRLIAALADPHFYQHEADIESYIERTMAQGHAHINGIDREVAENKEIDFQQKNQEMSDYIQKESQELLNRILFDASNLMTNRFSMGD

SEQ ID NO: 5471 - protein, 1524 aa, Streptococcus agalactiae
ATGAGAAAGAAATTTCTTTTATTGATGAGCTTTGTAGCTATGTTTGCAGCTTGGCAACTTGTTCAAGTTAAACAAGTTTGGGCTGATAGTAAACTTAAAGTGGTAACAACTTTTTACCCAGTTTATGAGTTTACAAAAAATGTCGTTGGTGATAAAGCTGATGTATCTATGTTAATTAAAGCAGGTACAGAGCCGCATGATTTTGAACCATCAACTAAAAACATCGCTGCCATCCAAGATTCAAATGCTTTTGTTTACATGGATGATAACATGGAAACTTGGGCTCCAAAAGTAGCTAAGTCAGTTAAATCCAAAAAAGTAACAACTATTAAAGGTACTGGCGATATGTTACTTACTAAAGGCGTCGAAGAAGAAGGTGAAGATCATGAACATGAAGGACATGGTCATGAAGGGCATCATCATGAACTTGACCCACACGTATGGTTGTCTCCAGAACGTGCGATTTCTGTTGTAGAAAACATCCGTAATAAATTTGTCAAAGCTTATCCAAAAGATGCAGCTTCATTTAACAAAAATGCAGATGCTTACATTGCAAAATTAAAAGAGCTTGACAAAGAATACAAAAATGGTTTGTCAAATGCTAAACAAAAGAGTTTTGTGACTCAACACGCAGCGTTTGGTTACATGGCGCTTGATTACGGTTTAAATCAAGTTCCAATTGCTGGTCTTACTCCAGATGCAGAACCTTCATCAAAACGTTTAGGCGAATTAGCTAAATACATCAAGAAATATAACATCAACTACATTTATTTTGAAGAAAATGCTTCAAATAAAGTTGCTAAAACTTTAGCAGATGAAGTTGGCGTGAAAACAGCTGTGCTTAGTCCACTTGAAGGACTTTCTAAAAAAGAAATGGCAGCTGGCGAAGATTACTTCTCAGTTATGAGACGTAATTTGAAAGTTCTTAAAAAGACAACAGATGTTGCAGGTAAAGAAGTAGCTCCTGAAGAAGATAAAACTAAAACAGTTGAAACAGGTTACTTTAAAACTAAAGATGTTAAAGACCGTAAATTGACAGATTACTCTGGTAATTGGCAATCAGTATATCCTCTTCTTCAAGATGGAACACTTGATCCAGTTTGGGATTACAAAGCTAAATCTAAAAAAGATATGACTGCTGCAGAGTACAAAAAATATTATACAGCAGGTTACAAGACTGACGTAGAATCAATCAAGATTGATGGTAAAAAACATCAAATGACCTTTGTACGTAATGGTAAATCACAAACATTTACATACAAATATGCAGGTTACAAAATCTTAACTTATAAAAAAGGTAATCGTGGAGTACGTTATCTCTTTGAAGCTAAGGAAAAAGATGCTGGTCAATTCAAATATATCCAATTTAGTGACCATGGTATTAAACCGAATAAAGCTGAACACTTCCATATCTTCTGGGGTTCAGAAAGCCAAGAAAAATTATTTGAGGAAATGGAAAACTGGCCAACATACTTCCCAGCTAAAATGTCTGGACGTGAAGTTGCCCAAGACCTTATGTCTCAT

SEQ ID NO: 5472 - protein, 508 aa, Streptococcus agalactiae
MRKKFLLLMSFVAMFAAWQLVQVKQVWADSKLKVVTTFYPVYEFTKNVVGDKADVSMLIKAGTEPHDFEPSTKNIAAIQDSNAFVYMDDNMETWAPKVAKSVKSKKVTTIKGTGDMLLTKGVEEEGEDHEHEGHGHEGHHHELDPHVWLSPERAISVVENIRNKFVKAYPKDAASFNKNADAYIAKLKELDKEYKNGLSNAKQKSFVTQHAAFGYMALDYGLNQVPIAGLTPDAEPSSKRLGELAKYIKKYNINYIYFEENASNKVAKTLADEVGVKTAVLSPLEGLSKKEMAAGEDYFSVMRRNLKVLKKTTDVAGKEVAPEEDKTKTVETGYFKTKDVKDRKLTDYSGNWQSVYPLLQDGTLDPVWDYKAKSKKDMTAAEYKKYYTAGYKTDVESIKIDGKKHQMTFVRNGKSQTFTYKYAGYKILTYKKGNRGVRYLFEAKEKDAGQFKYIQFSDHGIKPNKAEHFHIFWGSESQEKLFEEMENWPTYFPAKMSGREVAQDLMSH

SEQ ID NO: 5473 - protein, 282 aa, Streptococcus agalactiae
ATGGCAGAAAGGAAATTTTTAAAGATGAAAAAAGACATCCATCCAGATTATCGTCCAGTTGTTTTCTTAGATACAACTACAGGTTACAAATTCCTTAGTGGTTCAACTAAATCAACTAAAGAAACAGTAGAATTCGAAGGTGAAACTTACCCACTTATCCGTGTGGAAATCTCATCAGATTCACATCCATTCTATACAGGACGTCAAAAATTCACTCAAGCAGATGGACGTGTGGACCGTTTCAACAAAAAATATGGTCTCAAAGACGCAAACGCTGCTCAA

SEQ ID NO: 5474 - protein, 94 aa, Streptococcus agalactiae; identical to SEQ ID NO: 1108

SEQ ID NO: 5475 - protein, 933 aa, Streptococcus agalactiae
ATGATTATTTTTCAACAAATTCTTGATAAAATCAAAGAGTACGACACCATCATTATCCATCGACATATGAGACCAGACCCTGATGCTCTTGGTAGCCAAATCGGCTTAAGGGATATCATCAGGCATAATTTCCCAAAGAAAAAAGTACTTGCTACTGGTTTTGACGAACCCACACTCACTTGGATTGCTAAAATGGATCAAGTGACCGACCAAGACTATCAAGGCGCTCTTGTTATTGTTACAGATACAGCAAATACCCCACGCATTGATGATGAACGTTATAAAAAAGGTGACTTTTTAATTAAAATTGACCATCATCCAAACGATGAAATCTATGGAGATCTCTCTTATGTAGATACTAACGCCTCTAGTGCAAGTGAAATTGTGACAGACTTTGCTCTTTCTTGTGATTTGTTGTTATCAACAAGTGCAGCAAGAGTTCTATATAATGGTATTGTAGGAGATACAGGACGCTTTTTATATCCTGCTACCACAAGTAAAACACTGAAGATTGCTAGCAAGCTTCGTGAATTTGACTTTGATTTTTCTGCAATGGCACGTCAAATGGATTCCTTTCCTTTCAAAATTGCAAAATTACAAGGCTTCATTTTTGAACAACTTAAAATTGACAAGAACGGCGCTGCATGCGTTACTTTAACACAAGAAGACTTAAAACGCTTTGATGTAACAGATGCAGAGACTGCTGCAATCGTTGGTGTACCTGGAAAAATTGATATTGTAGAAAGTTGGGCAATTTTCGTTGAACAAAGCGATGGGCATTATCGTGTGCGCCTACGTAGTAAGTCACACATCATTAATGAAATAGCTAAACGTCATAATGGTGGCGGACATCCTTTAGCCAGTGGAGCTAATTCTTATAGTTTGGAAGAGAATCAAGCTATTTACCAAGAAATCCAGGAAGTACTTTCTTTA

SEQ ID NO: 5476 - protein, 311 aa, Streptococcus agalactiae
MIIFQQILDKIKEYDTIIIHRHMRPDPDALGSQIGLRDIIRHNFPKKKVLATGFDEPTLTWIAKMDQVTDQDYQGALVIVTDTANTPRIDDERYKKGDFLIKIDHHPNDEIYGDLSYVDTNASSASEIVTDFALSCDLLLSTSAARVLYNGIVGDTGRFLYPATTSKTLKIASKLREFDFDFSAMARQMDSFPFKIAKLQGFIFEQLKIDKNGAACVTLTQEDLKRFDVTDAETAAIVGVPGKIDIVESWAIFVEQSDGHYRVRLRSKSHIINEIAKRHNGGGHPLASGANSYSLEENQAIYQEIQEVLSL

SEQ ID NO: 5477 - protein, 1020 aa, Streptococcus agalactiae
ATGACACAAGCAGTATTAAAAGAATTGGCTAAGGCGGAGTTGCATTGTCATCTAGATGGCTCACTTTCTTTACCAGCTATTAGAAAATTGGCTAATATGGCTGATATAATACTGCCGAGTAGTGATAAAGAATTAAGAAAATATGTTATAGCTCCAGCTCAAACAGAAAGCTTAGTAGATTACCTTAAAACGTTTGAGTTTATCAGACCGCTTCTTCAAACGAAGGAAGCATTACGTTTTGCTGCTTATGATGTTGCTAGACAGGCAGCTTTAGAAAATGTTATTTATATTGAGATTCGTTTTGCGCCAGAACTCTCTATGGATAAAGGTTTAACTGCAAGTGATACAGTCCTTGCAGTCTTAGAAGGTTTAGCAGACGCTCAGAAAGAATTTAATATCGTTGCACGCGCTCTTGTTTGCGGTATGCGCCAATCGTCTCATAAAACGACCAAGGACATTATTAAACACATTGTTGATTTGGCTCCCAAAGGCCTGGTAGGTTTTGATTTTGCAGGTGATGAATTTTCCTATCCAACAGATAGTTTAGTAGATCTTATTCAGGAAGTAAAACGCTCAGGTTACCCGATGACTTTGCATGCAGGTGAGTGTGGTTGTGCTAAGCATATTGCGGATAGTTTAAATTTAGGGATTAAGCGTATGGGACATGTGACCGCTTTAACAGGACAGAGGGATTTAATAAAGCGATTTGTCGAAGAAGATGCTGTAGCAGAGATGTGTTTAACTAGCAATTTACAAACGAAAGCAGCCTCAAGTATTCAAAGTTTTCCTTATCAAGAACTTTATGATGCTGGAGGTAAGATTACAATTAATACAGATAATCGTACTGTTTCCGATACAAATTTGACGAAAGAATATAGTCTTTTCGTAACTTATTTTGGAACGAAAATAGAAGACTTTCTTGTTTTTAATCAAAACGCTGTGAAAGCCTCCTTTACAAGTGATTCAGAGAAAGATACTTTACTACATAAGCTACAAGAAAACTATGACAGCTATCTAAAA

SEQ ID NO: 5478 - protein, 340 aa, Streptococcus agalactiae; identical to SEQ ID NO: 1114

SEQ ID NO: 5479 - protein, 357 aa, Streptococcus agalactiae
ATGGCTTTAGCAAAGATTGTTTATGCTAGCATGACCGGAAATACTGAAGAAATTGCTGACATTGTTGCTGATAAATTACGTGACTTGGGTCTAGATGTTGAAGTAGAAGAGTGTACGATGGTTGATGCTGCAGATTTTGAAGATGCTGACATTGCAATTGTTGCCACTTATACATATGGTGATGGAGATTTACCAGATGAAATCGTGGACTTTTATGAAGATTTAGCAGAAGTTGATTTATCTGGTAAAGTTTACGGCGTAGTAGGTTCAGGTGATACTTTCTATGATTACTTCTGCAAATCTGGTGATGAGTTCGAGGCTCAATTCGCATTTACAGGAGCACAAAAAGGTNNNNNT

SEQ ID NO: 5480 - protein, 119 aa, Streptococcus agalactiae
  VARIANT 118, 119: Xaa = Any Amino Acid
MALAKIVYASMTGNTEEIADIVADKLRDLGLDVEVEECTMVDAADFEDADIAIVATYTYGDGDLPDEIVDFYEDLAEVDLSGKVYGVVGSGDTFYDYFCKSGDEFEAQFAFTGAQKGXX

SEQ ID NO: 5481 - protein, 579 aa, Streptococcus agalactiae
TTGGGACTGGAAATTTTTCTCGTGGGCAACTGGATATTAGTCACCAATTGCAGGTTATTCAAAAAAATAATTGATAGTTCTATTCCATTATACAAAAAGCGCCTTCTGGAAAGTATCTCTTATGAGCTAAGTCATGCAGTAGAACTTTTTTATCGTCATAATTCTTTTGAATTTTCAGAGACCTGGTTGAAACGTCTAAAAAATAGTATAAACGCTTTAGAAGTAGTAGGATTAGATGAGTTACAAACTTTTTTCACAGCTACTTATACTAACTATTGGTTTGAAACTGACAAAGTCAATGAGAAGCGTTTAACCATTTTACGTGGGGCGAGAGAAGATTTTCTTAAATTTTCAAAGTTCCTCCCCCCCACAAAAAAGACCTATATGATATCAGCGACTTTACAAATCAGTCCCAAAGTCTACTTGTCAGATCTTTTAGGAGGATTTTCAAGTATAAGTACAGAAAAGATAGCGCATGAGAAAAATGCCAATCAGAAAGTATGGATTGATACCTCTATGCCTAATATACTTGATTTATCACCGGAACAGTATGCTTACGAAATAGCCAANNNNNTTAAT

SEQ ID NO: 5482 - protein, 193 aa, Streptococcus agalactiae
  VARIANT 190, 191, 192: Xaa = Any Amino Acid
MGLEIFLVGNWILVTNCRLFKKIIDSSIPLYKKRLLESISYELSHAVELFYRHNSFEFSETWLKRLKNSINALEVVGLDELQTFFTATYTNYWFETDKVNEKRLTILRGAREDFLKFSKFLPPTKKTYMISATLQISPKVYLSDLLGGFSSISTEKIAHEKNANQKVWIDTSMPNILDLSPEQYAYEIAXXXN

SEQ ID NO: 5483 - protein, 273 aa, Streptococcus agalactiae
ATGGAATTAGAAGAGATTCGTCAAGAAATAGATGAAATAGATCAGCAATTGGTAAGCCTTTTAGAAACTAGAATGGGTCTAATTTTAGAGGTCATAGCATTTAAAAAGAAACACCGACTTCCAGTTTTAGATAATAATCGTGAAAACGAAGTGCTTAACAATGTATTGAAGAAAGTCCAAAATCATCAATTTGACGATGTGATACGAGCAACTTTCAAAGACATTATGACAGAATCTCGTGTTTATCAAAAGGAGAATATTGTAGACGGTGAT

SEQ ID NO: 5484 - protein, 91 aa, Streptococcus agalactiae; identical to SEQ ID NO: 1118

SEQ ID NO: 5485 - protein, 426 aa, Streptococcus agalactiae
GTGATTAAACGATTTGATAATTATGCTCAGTACGTACTTGTTTTAGGGTTTAGCTTACTAATCGGTGGTGTGGTTGGGGCTATTACAGCAGTCTTTGGACGTGTTCTATTATTCCTGACAGCCTTTAGAAGTGATTATATAGCTTACCTACTCCCTTTTCTTAGCATTGTTGGTTTATTTATAGTTTTTGTCTATCAAAAATTTGGGGGTAAGAGTGTTAAAGGGATGGGATTGGTATTTGAAGTAGGTCATGGTAATGAGGAGACTATTCCGAAACGTCTTGTTCCTCTCGTGATATTAACAACTTGGTTAACCCACTTATTTGGTGGTAGTGCAGGTCGTGAGGGGGTTGCTGTACAGATTGGGGCTACCGTTTCACACTACTTTCAAAAATATTGCCGTTTACAAAACGCTTCTCAACTTTCC

SEQ ID NO: 5486 - protein, 142 aa, Streptococcus agalactiae
MIKRFDNYAQYVLVLGFSLLIGGVVGAITAVFGRVLLFLTAFRSDYIAYLLPFLSIVGLFIVFVYQKFGGKSVKGMGLVFEVGHGNEETIPKRLVPLVILTTWLTHLFGGSAGREGVAVQIGATVSHYFQKYCRLQNASQLS

SEQ ID NO: 5487 - protein, 345 aa, Streptococcus agalactiae
ATGAATCCATTAATTCAAAGTTTGACAGAAGGTCAACTTCGTTCTGATATCCCTGAGTTCCGTGCTGGTGATACTGTACGTGTTCACGCTAAAGTTGTTGAAGGTACTCGCGAACGTATTCAGATCTTTGAAGGTGTTGTTATCTCACGTAAAGGTCAAGGAATCTCAGAAATGTACACAGTACGTAAAATTTCTGGTGGTATCGGTGTAGAGCGTACATTCCCAATTCACACTCCTCGTGTTGATAAAATCGAAGTTGTTCGTTATGGTAAAGTACGTCGTGCTAAACTTTACTACTTACGCGCATTGCAAGGTAAAGCTGCACGTATTAAAGAAATCCGTCGT

SEQ ID NO: 5488 - protein, 115 aa, Streptococcus agalactiae; identical to SEQ ID NO: 1122

SEQ ID NO: 5489 - protein, 984 aa, Streptococcus agalactiae
GTGACACTAGATAAAAATTCTAGTCAAGCTCAGAAAAAAGCTGGTTTAATATTGCAGGAAAAGATTGAAGATAGGCTCGCTATCAGAAATCACTCAGAAATGACTTACGGAGAACTTAAAAAGGAATATCTAAAGCAATGGATACCGACCGTCAAAGACTCCACAAAACGTGGTTATTTAGTATCTGACAGTCATATAGCAACCGTGTTACCAGATGATACAATTATCAACAAGTTGACTAAACGTGATATTAGCTAATCATTGTAAACTATTAAAACACAATTCGTATCATGTTACGCATAAATGTAGAAAGAGATTGCATGCTATATTTTCTTATGCGATACAAATGGACTATATGACAAGTAATCCGACGGAGAACGTCTTAGTTCCCAAACCAAAGGATGATTACAAGCCTGAAAAGGTGCTTTATTTAACATCTAACGAGGTTTACGACCTGTGCAATAGAATGATAGACAATGATGAACAAACGCTCGCAGACATCGTTTTATTCATGTTTTTGACGGGTGTACGGTATGGAGAATTAGCTTGTCTGACTTACGACAAAATAGATTTTGAAAATAAAGAAATTCTGATTAATGCAACTTACGATTTTAACACACGAGAAATCACTACGACCAAGACCAAAAAATCAACACGCAAAATATCTGTATCAGATAATATTTTAGATATCGTCAATAACAGAAAAGCAAGTTCATTCGTCTTTCCAAATTCGAACGGTGTACCGATTTTAAACGCATACATCAATAAGCGATTGAAAATTTACGGAGATTATCACACGCACTTATTTAGACACTCGCATATATCATTTTAGCAGAAAAAGGGATACCGCTAAATGCGATAATGGATAGAGTTGGTCACAGCGATCCAAAAACAACATTATCTATTTACAGTCACACAACTGTAAATATGAAAGAAATTATAAATAAACAAACTGCCCCTTTTGTGCCCTTTTTAAAACCGGAA

SEQ ID NO: 5490 - protein, 330 aa, Streptococcus agalactiae
  VARIANT 238: Xaa = Any Amino Acid
MTLDKNSSQAQKKAGLILQEKIEDRLAIRNHSEMTYGELKKEYLKQWIPTVKDSTKRGYLVSDSHIATVLPDDTIINKLTKRDIRLIIDKLLKHNSYHVTHKCRKRLHAIFSYAIQMDYMTSNPTENVLVPKPKDDYKPEKVLYLTSNEVYDLCNRMIDNDEQTLADIVLFMFLTGVRYGELACLTYDKIDFENKEILINATYDFNTREITTTKTKKSTRKISVSDNILDIVNKQKKXSSFVFPNSNGVPILNAYINKRLKIYGDYHTHLFRHSHISFLAEKGIPLNAIMDRVGHSDPKTTLSIYSHTTVNMKEIINKQTAPFVPFLKPE

SEQ ID NO: 5491 - protein, 165 aa, Streptococcus agalactiae
ATGGAAATAAAAAAAGCCCCACGCTCAAATTTTGTCCAAGGAGAGCGTGAGGCAAATTCTAGTATAGTAAAAACCTGCTTTTTGGGAGGGGCTTTTACCATACCTATTTTAACAGAAAATGAGGTAAAAAACAATGTGGATAGAGGAGCTAGCCAACGGGAAATT

SEQ ID NO: 5492 - protein, 55 aa, Streptococcus agalactiae
MEIKKAPRSNFVQGEREANSSIVKTCFLGGAFTIPILTENEVKNNVDRGASQREI

SEQ ID NO: 5493 - protein, 612 aa, Streptococcus agalactiae
ATGAAAAAACCTTTTTATAAAAAGTGGTATTTTTGGACACACGCTATACTACTATTAGTTTTAGGATTTTCGTTTTTTGTCATTTACAGATTGGCAGAGACTAATATTGTTAACGAGAAGAAAATAGCAAAATTAGAAAAAACTCAAGAAAATAAAACGACGTCAGGTATTAGGAAAACCATATCCGATTTTACCAGTCGTTTTGACGAAGAATTGTCTGTCAGAGCTATTAAATTTTATCTTAATAAAGATCAAGTTGTATCGTCTTTTGGTGATGAAGTTAAATTGGGTGGAGGTTACTTAACTATAAATAAACCAAATAATGACAAAACAAGAATGTTAGCAACAACAACAGATTTCAAAAATAAAATCATTGTGCCGATAGAATTCAAAAATACAACTGGGGAAACAAAAGGTTTTGATACAAGAGATATTTTCGCCTACAATGGAGATGAAACTATTTCTTTTGATTCAGTTATCAGCGAAAATTTAGATAATGACGGATATAGCGTTGTTGTAAAAGATGGAGAAACAGCAGCGGCTAGTATTGTTTTTGGGACAAACAGCAAGATTAAAGATATCAAAGTGAGATATAACTCAGGATTATGGAAA

SEQ ID NO: 5494 - protein, 204 aa, Streptococcus agalactiae
MKKPFYKKWYFWTHAILLLVLGFSFFVIYRLAETNIVNEKKIAKLEKTQENKTTSGIRKTISDFTSRFDEELSVRAIKFYLNKDQVVSSFGDEVKLGGGYLTINKPNNDKTRMLATTTDFKNKIIVPIEFKNTTGETKGFDTRDIFAYNGDETISFDSVISENLDNDGYSVVVKDGETAAASIVFGTNSKIKDIKVRYNSGLWK

SEQ ID NO: 5495 - protein, 777 aa, Streptococcus agalactiae
ATGTCTTCAAAAAAATTAGAGAACAAAGAGATATTTTCTAAAAACCTTGCATTTTATATGGAGCGAAAAAGAGTAGACAGAAATACACTATGTGCAGACTTAGGACTGAAGTATACTACGGTTAGAGATTGGCTCAAGGGTATAACTTATCCACGAATAGGGAAAATAGAACTTTTGGCTGAATACTTTTCAATTAACAAGTCAGATTTGATTGAAGAACACTCTACTAATGGAGCAACTTCCAAAGTCAACTTTGATCCAAGGCAAGCAATTCTCTTATCTAACTATTCAAAACTTAACAACGTACGAAAGAATAAGTTGCTGGCTATATCTGAGACACTTTTATCTGAGGAACAAGGCAAAGTGATAAACTTGCAAGAGAAGATGGCAGAATACGGCTCCAGAAAACGTGTAAGTCTATCTGTACCCGGTAAAGTGTCTGCTGGTACTGGATATTGGCAAGAGGATGACTATGACACAGAGGTTGACTTCTACGCTGATGAAATACCAGATGAAAAAAACTATGACACCGTTGCGGTTGTTGTCGGTCACTCAATGGAACCAAAAATAAAAAATGGCGACTTTTTATTTATTAAGCTGGCTGATCAAGTTGACATTAACAAAATTGGTATTTTCCAAGTTAACGGTGAAAACTATGTCAAGAAATTAAAGAACGACTACCTCCAGTCACTTAATCCAAAGTATGCTGACATCACACCAGCTGAAGGAGATGATTTCAGAACCATTGGTGAGGTGGTAGATATTTATAGAGAAGGG

SEQ ID NO: 5496 - protein, 259 aa, Streptococcus agalactiae
MSSKKLENKEIFSKNLAFYMERKRVDRNTLCADLGLKYTTVRDWLKGITYPRIGKIELLAEYFSINKSDLIEEHSTNGATSKVNFDPRQAILLSNYSKLNNVRKNKLLAISETLLSEEQGKVINLQEKMAEYGSRKRVSLSVPGKVSAGTGYWQEDDYDTEVDFYADEIPDEKNYDTVAVVVGHSMEPKIKNGDFLFIKLADQVDINKIGIFQVNGENYVKKLKNDYLQSLNPKYADITPAEGDDFRTIGEVVDIYREG

SEQ ID NO: 5497 - protein, 291 aa, Streptococcus agalactiae
ATGGATTTATTGAAAGTAGGTGGCATGACCTATAACGTTGTTATTCAGGAGCATTTCAAAGCTTATGATGATGATAGAAATCTCTGGGGGTATTGTGATTACGAACAACAAATCATATATATTCGTGAGTCATTATCAGAGCAAAAGAAAAAGCAAGTGCTAGTCCACGAACTAACACATGCTATTCTACATGAAGTTGGCTACAAAGAACAAGATGAAGAACTTGTTAGTCGTTTTTCAATCGGTCTGCATCAGGTTCTTAAAGATAATCCAACGCTTACTTTTCAGTCC

SEQ ID NO: 5498 - protein, 97 aa, Streptococcus agalactiae
MDLLKVGGMTYNVVIQEHFKAYDDDRNLWGYCDYEQQIIYIRESLSEQKKKQVLVHELTHAILHEVGYKEQDEELVSRFSIGLHQVLKDNPTLTFQS

SEQ ID NO: 5499 - protein, 168 aa, Streptococcus agalactiae
ATGGCGAAAAATGGACCTAAAGGCGGCGGTCGTATCGGAGCCGTCAAAGGTCGCTCTCAGTCTCATAACCCTAAAACTGGACTTTATACCAAGCGTGACACATCTACTGGCAAGTTTATGGACACGAAAACTACTGGTGGAAAGTTCAAAGGTGTTAGGACTGAAAAG

SEQ ID NO: 5500 - protein, 56 aa, Streptococcus agalactiae
MAKNGPKGGGRIGAVKGRSQSHNPKTGLYTKRDTSTGKFMDTKTTGGKFKGVRTEK

SEQ ID NO: 5501 - protein, 156 aa, Streptococcus agalactiae
ATGAATTGGAAAAAACTAATGCTAGGCGATTTAGAACACACGTTTACTAGTCGTAATGGCAAAGAAAAAACAAGTATTGAATTTGAAGGCGGCGTATTGCCAGCGCTATTGGTGCTAGGTGGTATCACTTGGCTGATCGCTTGGCTTATTACAAAA

SEQ ID NO: 5502 - protein, 52 aa, Streptococcus agalactiae
MNWKKLMLGDLEHTFTSRNGKEKTSIEFEGGVLPALLVLGGITWLIAWLITK

SEQ ID NO: 5503 - protein, 240 aa, Streptococcus agalactiae
ATGACAGTTGTTGATAAAATTTTTCGTGGTGATAAATGGTTTATACCTAAACCTAAAATTAGCTATACAAAACCTATGAATATTATAGTTTTTAGTAAACAAGAAAGATTTGATTTGTTTTTATTTGAAGCTCATAACTTTGATGAGGTATTTAAACAATTTGAAGAAGAGAAATTCAAGCCTTATAAATACACAGCTTGGGCATCAATAGACGAAACAATAATAAAGCTATTTAATTTT

SEQ ID NO: 5504 - protein, 80 aa, Streptococcus agalactiae
MTVVDKIFRGDKWFIPKPKISYTKPMNIIVFSKQERFDLFLFEAHNFDEVFKQFEEEKFKPYKYTAWASIDETIIKLFNF

SEQ ID NO: 5505 - protein, 555 aa, Streptococcus agalactiae
TTGTTGGCGTTAGTAATATCTTTAATATCGATTTTGATTTCGTTTTTTTCATTTATTGTTCCATTATATAAATCTACATTCAGACTCGGAGTTTCAAATCAGAAAGCGGAATTCAATCTTGAAGAATTGGAAATGATTGTTAAAATCACATTTATTAATGAATCTTCCAGCCCAATTACAATTGAAGGGTTAACTATCACTGAGAAAAAACTTCAATTCGAAGCATCAAATTATGGAGAATTATTAAAAAGTCACGAGGTAAAGTCATCAAATTTCAAATATGGCTATGTACCTTTTATCATTCCCCCATATTCGACTTACGCTAATAATTTTGTGTTTAGATTCCCTAATACTGTAAAGTCAAATTATTTTTTAGAGGTGCAAACTTCTAAAAAGTTCTATGTTTTTCCATTCAATCCCTCACCACACGTAACAACTAACTGTTACAGAGAAATCAATGGGCGAGTTAGAGAAGAAAATACATTTTGGAAACAAGATAATTTCAGAAATCAAATAAATAAAATTTATAAATTAATTGATTATTTAAAAATTAAA

SEQ ID NO: 5506 - protein, 185 aa, Streptococcus agalactiae
MLALVISLISILISFFSFIVPLYKSTFRLGVSNQKAEFNLEELEMIVKITFINESSSPITIEGLTITEKKLQFEASNYGELLKSHEVKSSNFKYGYVPFIIPPYSTYANNFVFRFPNTVKSNYFLEVQTSKKFYVFPFNPSPHVTTNCYREINGRVREENTFWKQDNFRNQINKIYKLIDYLKIK

SEQ ID NO: 5507 - protein, 207 aa, Streptococcus agalactiae
ATGCGCCCCAAAAAATATCCGTATAGCCAAAAAAACTATCCAGCGCCGAAGCTTCATAACATCATTGAAACCGATAATCATTTCTTGATAGATGATAAAAGGATTCATTATGTTATTGAAGATTCTGTAAAGACAAAAACCCTTGGCGATGGCTATGTTGAAGTAACACTTTCCATAATTGCCAAGAGTTTTACAAAATCACAAGGT

SEQ ID NO: 5508 - protein, 69 aa, Streptococcus agalactiae
MRPKKYPYSQKNYPAPKLHNIIETDNHFLIDDKRIHYVIEDSVKTKTLGDGYVEVTLSIIAKSFTKSQG

SEQ ID NO: 5509 - protein, 204 aa, Streptococcus agalactiae
ATGACGAAAATGACGTTGAAAGCTTTAAGAGCAACAAAAAACTGGAGTCAAGAAGAGGCTGCAAGAGCTTTGAAAGTTTCCAAAGATACATGGGGCAACTGGGAAAGAGGTAATACAGAGCCAAGTGTTACAAAGGCTTATCAAATTGCCTATATATTCGATATATCATTAGATGATATTATTTTTTTACCAAACATTGCGGTT

SEQ ID NO: 5510 - protein, 68 aa, Streptococcus agalactiae
MTKMTLKALRATKNWSQEEAARALKVSKDTWGNWERGNTEPSVTKAYQIAYIFDISLDDIIFLPNIAV

SEQ ID NO: 5511 - DNA, 957 bp, Streptococcus agalactiae
atgcaggaaataacaacacaaaatgattttgactattcacttgttgattttgaaactcaagaatttttacaagagcgttcaaatattatctatggaattcaaagcaaaagcgcttatgaaataggtaagcaacttgttaaagctcaagaagttttggcaaaaaatagatatggttgttttgaagagtggtattcaagccttggatttagaaaaacaaaagcttatgagtacattaatcattataatttcattcgttcgcaaagcgaacaattgaatatcgaaacatttgaagaacttccaaaaaagcttcaatcagaaatgtcaaagccgtctgccaatccagaactcaatcaaaaagtctttgatggggatattacaactcataagcaatacaaagagttagaacgccaactcaaactagcagaagctgacaaagaacggttaaaacaacaaaatgagagactagccgaacaagccttgagtgctaaagtcgttgaaaaagaagtcgtaatcgaaaaagttccagatgattatgaatctacaaagcaacttaaccggactttactagataaaaataaagagctttccacaacacttgaagaagctgaatgggagctagatagtaaaaagcttgagttatcgacaataaagcttgagtcacaacgagctattgaagtaacaaaccagattcgtcacctcgagggcaaaaaagaaaaacttgagaaccttgttacttcgataagtgagctgtcctcaatcattagtgacgtgcaaaacttcttcgatacgaaaatggcgccacttcgttttaagccaattatcaacaatgtcaatgcacattattcagttacggaagtaaccaagatggttaacacagtccagtcttggtgtgatgaaatgtacaaaatcattccatccgggaatagaaaaattatagaagaggtaataatcaatgag

SEQ ID NO: 5512 - protein, 319 aa, Streptococcus agalactiae
MQEITTQNDFDYSLVDFETQEFLQERSNIIYGIQSKSAYEIGKQLVKAQEVLAKNRYGCFEEWYSSLGFRKTKAYEYINHYNFIRSQSEQLNIETFEELPKKLQSEMSKPSANPELNQKVFDGDITTHKQYKELERQLKLAEADKERLKQQNERLAEQALSAKVVEKEVVIEKVPDDYESTKQLNRTLLDKNKELSTTLEEAEWELDSKKLELSTIKLESQRAIEVTNQIRHLEGKKEKLENLVTSISELSSIISDVQNFFDTKMAPLRFKPIINNVNAHYSVTEVTKMVNTVQSWCDEMYKIIPSGNRKIIEEVIINE

SEQ ID NO: 5513 - DNA, 507 bp, Streptococcus agalactiae
atgagtaaagaattatcaaaaatgaacgaaaaagacgctcttgaagtcgtcaaaggaatgacgcttgaagatatgatgattgaggttttatcttctcaaaagcaagtaaaagcttcccaagaagccattaaaaaagatgttgaagaagttcggtctttagcaattgaaattgataaaaaagtccacatcgacgatgtagaagctagtgaaatcaaaagtattatcagcaaacaagcttatggttttgctaaagaatattttgacgcatcaggtaaaatcgctagtcaaaacctatttgcatctaaaaaaggtcagttcatccgtttgcaacattcacgattgaaacatcatttcaatgtgacgaagtacactcatatcaaacatacagaagcagaaaaagcgttctcttatttaaaatcactaacatttgacagtttctcattgtttgaaattcgtgaaacaccaaaacaaaaagaaattatcgctttagaaaaaggcgatgtagct

SEQ ID NO: 5514 - protein, 169 aa, Streptococcus agalactiae
MSKELSKMNEKDALEVVKGMTLEDMMIEVLSSQKQVKASQEAIKKDVEEVRSLAIEIDKKVHIDDVEASEIKSIISKQAYGFAKEYFDASGKIASQNLFASKKGQFIRLQHSRLKHHFNVTKYTHIKHTEAEKAFSYLKSLTFDSFSLFEIRETPKQKEIIALEKGDVA

SEQ ID NO: 5515 - DNA, 135 bp, Streptococcus agalactiae
ttgatcactgaaaatatcttagaatttttaggttctgactatggaaaaggtttcttaaccggcataaaaattgccgttgagattattgccaaacaaataccgacaccttcagaagaggatatcggtcatgatagt

SEQ ID NO: 5516 - protein, 45 aa, Streptococcus agalactiae
MITENILEFLGSDYGKGFLTGIKIAVEIIAKQIPTPSEEDIGHDS

SEQ ID NO: 5517 - DNA, 144 bp, Streptococcus agalactiae
atgattactattttaaaagaaataaaccaaacactaaaagaaatcctagcagaattaaaagaacctactgtggtaacagtagattctgaaaagttaagtaatacgctaactactgaacagaagatacgccgattatctggtcaa

SEQ ID NO: 5518 - protein, 48 aa, Streptococcus agalactiae
MITILKEINQTLKEILAELKEPTVVTVDSEKLSNTLTTEQKIRRLSGQ

SEQ ID NO: 5519 - DNA, 306 bp, Streptococcus agalactiae
atgaacgacgttttaaaaactaatcttattgcagatgtcgctattttttcggaaaaaagcaattgtaagcttaatgtgattacagcgagtggaatattcactggaactttattacctgaaaatcctgataaagccaagtatgctcatgtccttgaattcttggaatatcgtaaagaaaataaagatgacaacgaaagatttatgttgcttgttgatgctactttgtcaacatcaaaagaatctactttgaaccttccatttgttgttctgtttattgaccagataatcggcgtatcttctgttcag

SEQ ID NO: 5520 - protein, 102 aa, Streptococcus agalactiae
MNDVLKTNLIADVAIFSEKSNCKLNVITASGIFTGTLLPENPDKAKYAHVLEFLEYRKENKDDNERFMLLVDATLSTSKESTLNLPFVVLFIDQIIGVSSVQ

SEQ ID NO: 5521 - protein, 228 aa, Streptococcus agalactiae
ATGCTAGCAAAACTTAAAAGCGGTATCGAAGTACCTTACGAAGAGCTTTGGCTTAATGATAACGACTTATCCGAATTTATTGGAAAGTCATTTGACCAAACGCAGCGATTACTAAGAAAGATGTACAAAGACAGAAATTATCGCAAATACATTGACAAGGTTGGCGGTCGTTCAACAAAAGTTAAAAAATTTGAAGAATGGAGAAAATTACAAAATGAAAAAATTATT

SEQ ID NO: 5522 - protein, 76 aa, Streptococcus agalactiae
MLAKLKSGIEVPYEELWLNDNDLSEFIGKSFDQTQRLLRKMYKDRNYRKYIDKVGGRSTKVKKFEEWRKLQNEKII

SEQ ID NO: 5523 - protein, 222 aa, Streptococcus agalactiae
ATGGAAAATCCAATGACAGGAGTAGCAATACTAGCATTTATCGCTTTACTTGCATATCTCGGCAATCGCAATAGCAATCAAAAGACAATTACTAAGACTGTTGAGACGGTGTTAGATAACTACCAAGTTGTGCGAAAGGTTGAGAGACCAAAACGCACGGATTTTATAGAGTTACCTACCCCAGGATCATGCGGGAAAGTTTGGGGCAAGGATAGACCTTTT

SEQ ID NO: 5524 - protein, 74 aa, Streptococcus agalactiae
MENPMTGVAILAFIALLAYLGNRNSNQKTITKTVETVLDNYQVVRKVERPKRTDFIELPTPGSCGKVWGKDRPF

SEQ ID NO: 5525 - protein, 858 aa, Streptococcus agalactiae
ATGGCAGATAACAAAAAGTATTACTATCTAAAATTAAAAGAAAATTTTTTTGAAAGTGATGAAGCAATCATTTTAGAAAGTATGCCTGACGGCTATATCTATAGCAATATTTTGCTCAAGCTATACCTAAGAAGTTTAAAAAATGACGGTTTATTAATGTTTAACAACCTTATCCCTTACAACGCACAAATGCTTGCAACGATTACAAGACATCAGGTTGGCACTGTCGAAAAGGCTATTCAAATTTTTAGAGACCTACAACTAATTGAAATTCTTGATAATGGTGCTATATATATGACAAATATTCAAAATTTTGTCGGAAAATCAAGCACTGAGGCTGACAGGATACGAAAACTAAGAGCAAAAAATAACAGTGGTGTACAAATGTTGTACAAATGTACACCAGAGATAGAGATAGAGAAAGATAAAAAGATAGATATAAATATAGATAAAGAGTTAGAACTAGAACAAGATAAAGAAGATAGGTTTGTTGATGTTGTTGAAGCAAATCTTGGTAGAGGTCTTGTAAAGTTTGAGTTCGACATGATTAATGACTATCTCATTGGACAAAATGTCTCAAAGGATTTGTTTTTGGAAGCTGTTAAAGTAGCAGTTGCTAATAATGTCCGCAAATTTAATTACATCGCTCGCATTTTGGATAATTGGATTAATGATGGGATAAAGACTCCTGAACAAGCATATCAGGCTCAAAGAGACTTTAAAGCTAAAAAAGCTAACAAAACAATGCAATCACAATCCAACGTTCCTAGCTGGTCTAATCCAGACTACAAAGGACCAGATTTAAAAGAATTTGCACTAGGAAGCATAGACGATATAGAAGATGGATCAGGAGATTTT

SEQ ID NO: 5526 - protein, 286 aa, Streptococcus agalactiae
MADNKKYYYLKLKENFFESDEAIILESMPDGYIYSNILLKLYLRSLKNDGLLMFNNLIPYNAQMLATITRHQVGTVEKAIQIFRDLQLIEILDNGAIYMTNIQNFVGKSSTEADRIRKLRAKNNSGVQMLYKCTPEIEIEKDKKIDINIDKELELEQDKEDRFVDVVEANLGRGLVKFEFDMINDYLIGQNVSKDLFLEAVKVAVANNVRKFNYIARILDNWINDGIKTPEQAYQAQRDFKAKKANKTMQSQSNVPSWSNPDYKGPDLKEFALGSIDDIEDGSGDF

SEQ ID NO: 5527 - protein, 231 aa, Streptococcus agalactiae
ATGGATCAGGAGATTTTTAATTTTTTTAACAAACAAATCAAAAAAGATTTTGGTAAAACGGCGAGTAAAGAGACTTTTGCTAAGTTTGCTAGTTACTGCGCCGAAGGAATCGAAAAAAATGGAGTTAAGCCAATTTTTAATTGGATAAACCTATACGCTTTTGGAACCGGTATGACAACAGCAGAAGCAGACCGATTAAGAATAGAGCGATATAAACAGGAGAATACGTTA

SEQ ID NO: 5528 - protein, 77 aa, Streptococcus agalactiae
MDQEIFNFFNKQIKKDFGKTASKETFAKFASYCAEGIEKNGVKPIFNWINLYAFGTGMTTAEADRLRIERYKQENTL

SEQ ID NO: 5529 - protein, 138 aa, Streptococcus agalactiae
ATGACAAAACAACATAGAGAAACGCTTATCTGGTACCGAGCAAGTCATCAAGAGCGTGAGAAGCTGCTTGATTTTGGGCTAGTTGATAAATCACAGTACGTGACACTATTGCGGCAATTGCGCAAGAAATATGCGATT

SEQ ID NO: 5530 - protein, 46 aa, Streptococcus agalactiae
MTKQHRETLIWYRASHQEREKLLDFGLVDKSQYVTLLRQLRKKYAI

SEQ ID NO: 5531 - DNA, 159 bp, Streptococcus agalactiae
gtgaacgaagaaatatatgagtctagtcgttactggcaaagtagatacagcgacttgatgtctgattatcttaaagaagctgaagaaaatatagagttaaagaaacagttgaagagattaaaagccgaaaattggcagctgaaacacagaaagaggaaa

SEQ ID NO: 5532 - protein, 53 aa, Streptococcus agalactiae
MNEEIYESSRYWQSRYSDLMSDYLKEAEENIELKKQLKRLKAENWQLKHRKRK

SEQ ID NO: 5533 - DNA, 480 bp, Streptococcus agalactiae
atggcttatttatacgagttacagggtatttatgcgcaattatcagctatggatcttgatgatgaaacatttcaagacactttggatagcatcgattttcaatcagatttagagaataatattgaatattttgtaaagatgttaaaaaatacacaagctgatattgaaatgtacaaaaacgaaaaagaaactttttacaaaaagcaaaagcaagcagaagccaaagcggaaaaatacaaagatacaattaggctagcaatggacttaagtcaaaagaaaaaagttgatgctggaatgtttaaagtatctttgcgaaaaagtaagaaggttgaggttttggacgaaacaaaaataccttttgaatacatgcaagaaaaagttgaatacaaaccaaaaaaagatgaaatctcaaaagttttaaaatctggaattgatatatctggagttcaactaatcgaaacagaaagtttacaggtgaag

SEQ ID NO: 5534 - protein, 160 aa, Streptococcus agalactiae
MAYLYELQGIYAQLSAMDLDDETFQDTLDSIDFQSDLENNIEYFVKMLKNTQADIEMYKNEKETFYKKQKQAEAKAEKYKDTIRLAMDLSQKKKVDAGMFKVSLRKSKKVEVLDETKIPFEYMQEKVEYKPKKDEISKVLKSGIDISGVQLIETESLQVK

SEQ ID NO: 5535 - DNA, 666 bp, Streptococcus agalactiae
atgacttttgcagaattgcagacaaaaatgcaaataacaaaaacaacaaaacaaggcgttaaatatacatttcgcaatgcagaagatatttttacacactttaaaacactaaatagcgggtgggagttaacggtatctgacgaattggtggaattgatcggcagaatttttatcaaagcaacagcaacagctagacttggtgatgaacaacaccaagcgacaagatatgctgagttggacagtgtgcctgttttaaatactaaagactataaaacaggagaacctaaacaaatacaacaaatgcaagttccgcaatggactggtgcagtgagttcgtacgcaggtaagtatgccttgcaagggctgtttggaattggtgaggaagatgtagatgcgattgttacagaagatacgcaacgcaaagaacaaaaaacctcccgaccgacaacctctaaaactcctaaaataagcaatatccaagtcgagacttacaagtctgatttaaatgatattgcgaaagccacaaaccaaaacgttgaagagttaacaaaatggctaaccgatactttaaaagtggggacactggaaaatttgcatacggaacacattgtttcggcagacgaattaatcaataaactcaaaaagaaagcaggactaaaaaatgat

SEQ ID NO: 5536 - protein, 222 aa, Streptococcus agalactiae
MTFAELQTKMQITKTTKQGVKYTFRNAEDIFTHFKTLNSGWELTVSDELVELIGRIFIKATATARLGDEQHQATRYAELDSVPVLNTKDYKTGEPKQIQQMQVPQWTGAVSSYAGKYALQGLFGIGEEDVDAIVTEDTQRKEQKTSRPTTSKTPKISNIQVETYKSDLNDIAKATNQNVEELTKWLTDTLKVGTLENLHTEHIVSADELINKLKKKAGLKND

SEQ ID NO: 5537 - DNA, 414 bp, Streptococcus agalactiae
atgattaataatattgtacttgtaggtcgcatgaccaaggatgccgaacttcgtcacacgccaagtcaagtagctgtagctacgtttacacttgcagttaaccgcagattcaaagagcaaaacggagagcgagagacggacttcattaattgtgttatctggcgacaatctgctgaaaatctagcaaactgggctaaaaaagggactttaatcggtatcacagggcacattcagacacgcaattacgaaaatcagcaagggcaacgtatctatgtaacagaagttgttgcggaaaatttccaattattagaaagtcgcaatagccaacaacagactaatcaaagcggcaatagttctaattctcattttggcaatgccaacaaaatggatatttcagatgatgacttaccattc

SEQ ID NO: 5538 - protein, 138 aa, Streptococcus agalactiae
MINNIVLVGRMTKDAELRHTPSQVAVATFTLAVNRRFKEQNGERETDFINCVIWRQSAENLANWAKKGTLIGITGHIQTRNYENQQGQRIYVTEVVAENFQLLESRNSQQQTNQSGNSSNSHFGNANKMDISDDDLPF

SEQ ID NO: 5539 - DNA, 198 bp, Streptococcus agalactiae
atgacgaagccgcggaagcaaaggatatatgcaatatatgacgacgacaagtttgtcgacgttggcacaaaagaagagttatcagcacggcttggtatcaaaaaagcaaccatagaacagtacatgactaaatcttatcaagctagacctagctcaaaaagaatcgctatttttgtaggagttgaagaaattgaattt

SEQ ID NO: 5540 - protein, 66 aa, Streptococcus agalactiae
MTKPRKQRIYAIYDDDKFVDVGTKEELSARLGIKKATIEQYMTKSYQARPSSKRIAIFVGVEEIEF

SEQ ID NO: 5541 - protein, 486 aa, Streptococcus agalactiae
TTGAATTTTAAAACAGAGTTTGAGATACCAGTAGAGCCAAAACCACAAACAAGACCAAAATTTAGCAAGTGGGGAACGTATGAAGACCCTAAAATGAAAAAGTGGAGAAAACAAGTCACTGGTTGGATTGAAAAAAACTATAATGGGCCATTTTTTGATAACTGTGTAAAAGTAGATGTCACGTTTTACATGAGAGCGCCACAAACGCTAATAAAAGAGCCTACGGCACGCTCAAAAAGTAAAACCGTACAAATATATCAAAAATTTATAAACGAGCTTATATGGCACGTAAAGAAGCCTGATATTGATAACCTAGTTAAAGCTGTTTTTGATAGTATTTCAGACGCGGGTTATGACAAAATACAAAAATCGGGGATTGTCTGGTCAGACGATAATATTGTATGTGACTTAAGAGCAACAAAAAAGTATAGTCCAAACCCTAGAATAAAAGTAAAAATTGAGGAAATAGATGAACGAACTAACGGA

SEQ ID NO: 5542 - protein, 162 aa, Streptococcus agalactiae
MNFKTEFEIPVEPKPQTRPKFSKWGTYEDPKMKKWRKQVTGWIEKNYNGPFFDNCVKVDVTFYMRAPQTLIKEPTARSKSKTVQIYQKFINELIWHVKKPDIDNLVKAVFDSISDAGYDKIQKSGIVWSDDNIVCDLRATKKYSPNPRIKVKIEEIDERTNG

SEQ ID NO: 5543 - protein, 342 aa, Streptococcus agalactiae
ATGAACGAACTAACGGATAAATTTTATAGTATCTTTGATAGCAGTATTTTGAGACGTGTCAAAGAGTTAAATCTAGATGATAAAACATCAGAACGCTTAAGACTAAATATCTCAAATAACAAGCGTAGAAATATACTGCCAAGGCCTTACGTAATCGAAGCATTTAAAGATTATTTTGATAAAGACACTTATGTGCAGCTGTATCTTAAATCATACAGAGAGTATCACAACCCAAACAGCCATGAAACTGATATTTTTATAAAGTTAAACAAAAAGCACAGAGATACAAAGTTAGACCATTACAAGAAAGTTAAGCGATTGATGTACGCAGCAATGACTTTC

SEQ ID NO: 5544 - protein, 114 aa, Streptococcus agalactiae
MNELTDKFYSIFDSSILRRVKELNLDDKTSERLRLNISNNKRRNILPRPYVIEAFKDYFDKDTYVQLYLKSYREYHNPNSHETDIFIKLNKKHRDTKLDHYKKVKRLMYAAMTF

SEQ ID NO: 5545 - protein, 162 aa, Streptococcus agalactiae
ATGACAAAAGAAGAAGTAATTGCATTTCTGACAGAACAGCGTGATTTGCGGCTTGTTGCATATGAGTGGGGAAAAGACAATCTGTCCGTTTTTGCGAGATGGCAATTAGAACAAGCAAATATGTATTTAGATATCATTGAGTGGATAGAGGAGGTGACGGAA

SEQ ID NO: 5546 - protein, 54 aa, Streptococcus agalactiae
MTKEEVIAFLTEQRDLRLVAYEWGKDNLSVFARWQLEQANMYLDIIEWIEEVTE

SEQ ID NO: 5547 - protein, 267 aa, Streptococcus agalactiae
ATGACTGAACAACAGATGATTGATTGCTTGCTTTATGAGTTAGCAAAAAAAGACAAATTGAACATTAGACGAAACAATATCATAACGTTTTTATCGATTGTGCTGATGGCTATATCTATTTTAAACGTCGCACTGCAAGACCACTACAAGCTACAAATTACAGGATTACGGACACAGCTAAGCAGAACACAAAAGCAACTTAAACGTGCTAGCGAGCAAAATCAGAGACAGACTAAGCGGATTGCGGAACTTACAGGAAATGGGGGA

SEQ ID NO: 5548 - protein, 89 aa, Streptococcus agalactiae
MTEQQMIDCLLYELAKKDKLNIRRNNIITFLSIVLMAISILNVALQDHYKLQITGLRTQLSRTQKQLKRASEQNQRQTKRIAELTGNGG

SEQ ID NO: 5549 - protein, 141 aa, Streptococcus agalactiae
ATGATTGACGAAATTTTAAAAAGACTTAATAAAGAATTTGACAATGATCTGGATAATTACGAACAAGAAAGATACGCTGGTTACATGGACGCAATAGGTGTAGCAATTGAAATTGTTGAAGAAGTTAAGCGAGGTAGAAAA

SEQ ID NO: 5550 - protein, 47 aa, Streptococcus agalactiae
MIDEILKRLNKEFDNDLDNYEQERYAGYMDAIGVAIEIVEEVKRGRK

SEQ ID NO: 5551 - DNA, 510 bp, Streptococcus agalactiae
atgaatattgaagaagcgaagaaattgatagacaaacagtctattggtaaaggtggtgtcggcgacattccagtagtgaaaacacatattgtaaaagtattactcgaccaactcgacaaaccaaaactagaagtaccacaaatgatagctgatgttattgaaagctttgacgaagatgtgaattatttgcacgaacatatgagttatcagtctgatgaagttagagagtggctaactcacaatgaacgtgagttttatgaagcttggctagcttatccaaatatcacagtcgaaaaagaaaatctgtatactgttgagatacctaatccgaatgaaagacagttaagttttgtgctgatgagacagcttagcggaaatgtaagtatcaaagttatgcatagagataacttagacttactaaagatagataacaatttacaactcacagaatccgaaatccgcaaagattttgactgggcttggcagtttagaaaagatgtagaaaatgaa

SEQ ID NO: 5552 - protein, 170 aa, Streptococcus agalactiae
MNIEEAKKLIDKQSIGKGGVGDIPVVKTHIVKVLLDQLDKPKLEVPQMIADVIESFDEDVNYLHEHMSYQSDEVREWLTHNEREFYEAWLAYPNITVEKENLYTVEIPNPNERQLSFVLMRQLSGNVSIKVMHRDNLDLLKIDNNLQLTESEIRKDFDWAWQFRKDVENE

SEQ ID NO: 5553 - DNA, 297 bp, Streptococcus agalactiae
atgaattatgataaaaataaaaatgatgctaaaaagaactttattatagctttagttctattgccgttcggcttagtattatctggatttgttattaaatacggttggaataacattttatcaacaattgatggcgtaccatctatcaatttaccgcaagctgtaggaatcaatgtgttaattagtccttttgcttctaaaaaaaatacagatgaagattttgctacagtgattgcaagagcgtttatttctccgctagtcgtattgttattgctttggatagtgactttgtttatg

SEQ ID NO: 5554 - protein, 99 aa, Streptococcus agalactiae
MNYDKNKNDAKKNFIIALVLLPFGLVLSGFVIKYGWNNILSTIDGVPSINLPQAVGINVLISPFASKKNTDEDFATVIARAFISPLVVLLLLWIVTLFM

SEQ ID NO: 5555 - DNA, 192 bp, Streptococcus agalactiae
atgacatatttaaaaaaattatttgaagccgttaaatttctcaactctatggaaaaacagaacaaaaaaataatgattactttccataataaaaaagttcatttttacgagttagaagaaattacagagtcttcgagtggtactgttgaagctaaagcgaaaatgcttagtttatggggaaagattaaatta

SEQ ID NO: 5556 - protein, 64 aa, Streptococcus agalactiae
MTYLKKLFEAVKFLNSMEKQNKKIMITFHNKKVHFYELEEITESSSGTVEAKAKMLSLWGKIKL

SEQ ID NO: 5557 - DNA, 264 bp, Streptococcus agalactiae
atgaaagaaaaaacaatttttatatcaaaaaaatatgcaaatgactttaacaatgacaaatataatttgtcctctggctattattttagaagtggtgaaaaacatgatattgctattgttaaatatggtgaaaaagattatttaaaaaatactgatttagcatatgttgtatgcgataagatcgttgacgcagactctataagcttcgtttatcatggtgaatatgaaacttggcattttaaactattaaacacagaagcaaat

SEQ ID NO: 5558 - protein, 88 aa, Streptococcus agalactiae; identical to SEQ ID NO: 4184

SEQ ID NO: 5559 - DNA, 432 bp, Streptococcus agalactiae
atgacgttttttccagaaattaatatacaaaagactaaatcaaacgctaagcgaaaactaagagagtatccacgctggcgtaggatcgctaatgatgtagatactcaaaaagtgacagccacttattcctttgagcctagacaatcacacggaactcctagtaagccagttgaacgcttagcactcaaccgtgtgtcagctgaacaagaattagaagcaattgagcaatcagttagtatgatattggagccagaaaagcgtaggattttgtatgacaaatacctatctccttacaaaaatgcagataaggttatttatacagaattatgtatgtcagagagtttttattatgacacgctagatgctgcattattagcttttgcagagctttatagggagggttctttgattgtagagcaaggagtttttgac

SEQ ID NO: 5560 - protein, 144 aa, Streptococcus agalactiae; identical to SEQ ID NO: 4182

SEQ ID NO: 5561 - protein, 432 aa, Streptococcus agalactiae
ATGACGTTTTTTCCAGAAATTAATATACAAAAGACTAAATCAAACGCTAAGCGAAAACTAAGAGAGTATCCACGCTGGCGTAGGATCGCTAATGATGTAGATACTCAAAAAGTGACAGCCACTTATTCCTTTGAGCCTAGACAATCACACGGAACTCCTAGTAAGCCAGTTGAACGCTTAGCACTCAACCGTGTGTCAGCTGAACAAGAATTAGAAGCAATTGAGCAATCAGTTAGTATGATATTGGAGCCAGAAAAGCGTAGGATTTTGTATGACAAATACCTATCTCCTTACAAAAATGCAGATAAGGTTATTTATACAGAATTATGTATGTCAGAGAGTTTTTATTATGACACGCTAGATGCTGCATTATTAGCTTTTGCAGAGCTTTATAGGGAGGGTTCTTTGATTGTAGAGCAAGGAGTTTTTGAC

SEQ ID NO: 5562 - protein, 144 aa, Streptococcus agalactiae; identical to SEQ ID NO: 4182

SEQ ID NO: 5563 - protein, 759 aa, Streptococcus agalactiae
ATGCTTAAATTAGACGAAAAAAAAATAAGAAAAGGTAAGCCATTTGGACTTCCGTACCAAGGTAGCAAAAAGAAAATCAGCAAAAAGATAGTTGAAATAATCAAGCAAAATTTTGGCACAGACAAAAAAATATATGACATTTTTGGTGGAGGAGGTGCAATAACTGCAGAGTGTATGCTAAATAATTTAGAAGTGCATTACAACGATTTAAACAATGATGTTACTGATATGTTTAAAAGAGTTATTACTCAAGATAGAGAGTGGTTAAAAACACTAATCATCAGCCGAGAAGAATTTTTAAAAATAAAAACCAAAACAAACAAAACAGTTGACGACAATATTAAATTGCTTGTTAACAGTTTTGGGAACAACTCAATAAGTTTTTTGTATAACATAGAATTGTCAGATATAAAATATAAATTAGCGGTTGAGATTATTAATAAGCATGATGTATTTAGTGGCTATAAGCAAACAGACACATACAAAGAGACTTGTCTTTTATGCGAGGAAGAAAAGCTTGGTAAAATCGGAAACTTACAGCGATTACAGCAACTAGAGCAATTGCAACGATTACAACAGTTAGAACGATTACAACAGTTAGAACAGTTAGAACGATTAGAAGCGACAAATTTAGATTATAAAGCATTCTCGAATGTTGATGGCGCTATTTTTTATCTTGATCCACCGTATGAAATGACGAGCCAGCATTCTTACATTGGTGATACATTTGACAGTCAATATTCTACGACNNNNNTTAAT

SEQ ID NO: 5564 - protein, 253 aa, Streptococcus agalactiae
  VARIANT 251, 252: Xaa = Any Amino Acid
MLKLDEKKIRKGKPFGLPYQGSKKKISKKIVEIIKQNFGTDKKIYDIFGGGGAITAECMLNNLEVHYNDLNNDVTDMFKRVITQDREWLKTLIISREEFLKIKTKTNKTVDDNIKLLVNSFGNNSISFLYNIELSDIKYKLAVEIINKHDVFSGYKQTDTYKETCLLCEEEKLGKIGNLQRLQQLEQLQRLQQLERLQQLEQLERLEATNLDYKAFSNVDGAIFYLDPPYEMTSQHSYIGDTFDSQYSTTXXN

SEQ ID NO: 5565 - protein, 186 aa, Streptococcus agalactiae
GTGACGACAGATAACTTAGAAGTAGACCACATCAAAGAACTTGAATTTTATCCCGAACTTGCAACGGACTTAGCTAATCTTAGAACGCTTTGCAAGGACTGTCACAATAGACGACACAAGCGCTTTAATTATAAAAAGAAGAAGGTCGATAAAGAAACAAATTACCGTTCCGATGAATGGTTTGGA

SEQ ID NO: 5566 - protein, 62 aa, Streptococcus agalactiae
MTTDNLEVDHIKELEFYPELATDLANLRTLCKDCHNRRHKRFNYKKKKVDKETNYRSDEWFG

SEQ ID NO: 5567 - protein, 507 aa, Streptococcus agalactiae
ATGAATGGTTTGGATAAGTACCTCCCCGTCAAAATAAAACGAGGTAAAAGCCAAATGATGAAACCGGTGGGAAGGGTCAACTGTCCAAATATTTGCTTTTTTTATCGCACGACCCCCCACCCCAGAGAAAAACTAGAAAGGAGATGTGAATTTTTGGATGAATTAAAACGTCGTAACAAATTAGTTTATAGTGAAAAATATCGCTTGAAACAGCTATTTAAAGACATTCCTGAAGATAAAAAGAAAATCGCAGAAGGATTGTTCACTCAAGCTGCACGTCTCCGGATACTACTTAATGACATGTGGATTGATATCTCAGAGAACGGCGATTATGAACTGTTTTCTCAATCAGAAACTCAGACACCTTATGAAAGAGAGCGTCCTGTAGCAAAATTATATAACTCACGAGATGCAACGTATCACAGAGTTATAAAACAATTGATCGATATGCTGCCAGAAGGAAAAACAGTCAATAAAGATGATTTTACGAACGGTGGTGATTTGTTG

SEQ ID NO: 5568 - protein, 169 aa, Streptococcus agalactiae
MNGLDKYLPVKIKRGKSQMMKPVGRVNCPNICFFYRTTPHPREKLERRCEFLDELKRRNKLVYSEKYRLKQLFKDIPEDKKKIAEGLFTQAARLRILLNDMWIDISENGDYELFSQSETQTPYERERPVAKLYNSRDATYHRVIKQLIDMLPEGKTVNKDDFTNGGDLL

SEQ ID NO: 5569 - protein, 1563 aa, Streptococcus agalactiae
ATGCTCGTTAATATTATCAGAGAAAAAATACTTGTCAGAGATGACCTGTATTTTGATGACAGCTTGATAGATAAGTATGTGAGATTCGCTGAAAAGAATTTTTTCCCATTAGCTGGATATCAAAAGTTTATAACTCCTTTTATTTTTTTGTTTCGAAAAGATGATGGCGAGCCACAATTTAATGAATACCTTTTAACGTTGGCTCGTGGAGGTGGTAAAAATGGTTTTATGTCCACTAGAGATGCATTTTTTACAAGTCCGTTGTACCCTATCAAAAACTATGATGTAACCATTACAGCTAACTCGGAAAGACAGGGGAAGGTATCTTTTGAAGAAGTTTATGAGACTATCCAATCAAAAGGGCTAGAAAACCACTACTATTTGACTAAAATGGCAATTGTGGGACGGAAAAACAATTCTGTCTTTTCTTTTCGCACAAACAACCCCAAAACGATGGACTCTGCTCGTGATGGCTGTTTAGAATTCGATGAAATCCACCAATTTGAAGATGATAAAATCGTAAAAGTCCAAAAATCTGGTTTGGGTAAAATAGCACATGTAAGAACCTTCTTTAATGGCACAAATGGTTATGTACGTGAGGGTTTTTACGATAAAACGATTGAGAAAGCTATGCAGATACTACGAGGAGAGGTTGAAGATTTCAGAATGTTTCCTTTTATCTGCAAGCTTGATAACGCTAGCGAAGTTGACGATATGCGTAATTGGTCAAAGGCTAATCCAATGCTCGACGAAGACACACCATACGCAAAAAGACTACTAACAGTTACTAAAAGTGATTATGATGATTTGGAACTTGAACCTAGTGGCAGGCAAGAGTTTATGACAAAGCGAATGAATTTGCCGGAAGCTGATTTAGAAAAAGACGTCACTAGCCGTGAGAAACTATTAGCATGTCTCAGGGAGCCCCAGATTAGCCTCAGAGGGCGCTCTTGCGTATCTGGGTTTGATTATGCATCTATAAGAGACTTTGCTTCTGTAGGTTTGTTATTTAAGGATAATGATGAGCTAATTTGGAAGCAACATTCATTTGTTAGACGAGAGTTTTTCAAAGCGTTTAAACTTAAAGCTCCCATCGAAGAGTGGCAAGACAAAGGATTGCTAACTCTTGTTGACGGAGACAGTATTGATCCTCGCTTGCTTGTCGATAAGTTAATTGAATGGAGGAAGGATTATAATATTGAAATAGTTTGTGCAGATGGTTTTAGGATGGATTTGCTTAAACCGCTACTAGAGGAAGCTGGCTTTGAATATGAGTTTTTACGAAATCCAGGAGCGATTCAAAGCAAAGTTGCACCTATCATTGAAGACGGTTTTGCTAATGAGCGTTTTATTTTCTTAGATGGTGACCACATGATGTTATGGTATACGGACAATACTTACGTAAAAGAAGATGGTTCTGGAAACAAGAGATTTTTGAAGAAAGAACCAGTTAGAAGAAAAACAGACGGATTCCATGCGTTTATAGCAGCACTTTATAAAAAAGAACTTATTCAAGAAAGTAATGTTGGCGAATTTTTAGCAAGTATTGCTGATTGGGATTTT

SEQ ID NO: 5570 - protein, 521 aa, Streptococcus agalactiae
MLVNIIREKILVRDDLYFDDSLIDKYVRFAEKNFFPLAGYQKFITPFIFLFRKDDGEPQFNEYLLTLARGGGKNGFMSTRDAFFTSPLYPIKNYDVTITANSERQGKVSFEEVYETIQSKGLENHYYLTKMAIVGRKNNSVFSFRTNNPKTMDSARDGCLEFDEIHQFEDDKIVKVQKSGLGKIAHVRTFFNGTNGYVREGFYDKTIEKAMQILRGEVEDFRMFPFICKLDNASEVDDMRNWSKANPMLDEDTPYAKRLLTVTKSDYDDLELEPSGRQEFMTKRMNLPEADLEKDVTSREKLLACLREPQISLRGRSCVSGFDYASIRDFASVGLLFKDNDELIWKQHSFVRREFFKAFKLKAPIEEWQDKGLLTLVDGDSIDPRLLVDKLIEWRKDYNIEIVCADGFRMDLLKPLLEEAGFEYEFLRNPGAIQSKVAPIIEDGFANERFIFLDGDHMMLWYTDNTYVKEDGSGNKRFLKKEPVRRKTDGFHAFIAALYKKELIQESNVGEFLASIADWDF

SEQ ID NO: 5571 - DNA, 297 bp, Streptococcus agalactiae
atgtttctgaatttagaaattgaaaatattaatgaagtccagaatgctattgataatgtaaaaaaagcactgaatgaacttaataatttaggtattaattttaatatcaataattgtaagcaaccaaaacaagttggaaatgtcaaaacaatttacgagatagatcccgggtatacaattacagaagctagaaaaatagcttttcgtaacggttacaattatttaaattttaatggaaatatttatgaagtatttgaaaatggcttggaaaaagttggtagacttgaaaaatattgg

SEQ ID NO: 5572 - protein, 99 aa, Streptococcus agalactiae
MFLNLEIENINEVQNAIDNVKKALNELNNLGINFNINNCKQPKQVGNVKTIYEIDPGYTITEARKIAFRNGYNYLNFNGNIYEVFENGLEKVGRLEKYW

SEQ ID NO: 5573 - DNA, 1146 bp, Streptococcus agalactiae
atgaaaatacttgatttttttggcagtatttttaaaacaggaactatacctgaaaatgggtatgatttagatgacatcttcaatgattatcaaaatctttacttaaaaaatctagctattgataagtccgcagaatttctagctaggatatttgctgattctgaaatgcgattagttaatatcgagagtccgtcttggaattatttgctcaatgtacgaccaaataacaatgagtcagcatcatatttttggcaaaaatttatttataggttagttactcaaaatgaagtgttagttatcaaaacagatgacgatcagttacttgtcgctgatgactacagtcgcaaagaatacgctgtatatgaagatacatttgatagtgtgactgttaaagactttatattcaagcgaacgtttaaaatgagcgaagttatcttcttgcaatacaacaataacaggctatcaagttatattgacggtttgtttttagagtacgaaaaattacatcagcgcatggtagaaactgttttaagaaacaatcagataagagggatgatgcatgcaaaaggctcttctcaatttacagataaccagatgtctttgatgaaggattatgctgataagttgtttaaagccttctctgagaggtctgtcgctatagttccgactaatgatcatatcacatatgaagagttgacgaacaccacaggtacaacaaatttatctgtcgatgatttacaaaagataagacgacaattcgacgatgaaatcgctgatattttaggtattccaccaactgtactacatggagacatggctactttagatagttctcaaaaagctttagtgctttattgcatgagtccgcttagcaaaaagatacaagatgagttaaatgcgaaaatcatcagtaaaagtgactatcaaaaaggtaagagactaaagattgtaggactgtcacaacatgatatttttgacattgcagtcaatattgataaattggtttcaagtggtacatttacccgaaatgaagtgcgtgaaagacttgattttgcaccgatagatggtggagataacatcatcttaactaaaaactatattgaagaggggaaaggaggtgataatacagatgacacaaatacagat

SEQ ID NO: 5574 - protein, 382 aa, Streptococcus agalactiae
MKILDFFGSIFKTGTIPENGYDLDDIFNDYQNLYLKNLAIDKSAEFLARIFADSEMRLVNIESPSWNYLLNVRPNNNESASYFWQKFIYRLVTQNEVLVIKTDDDQLLVADDYSRKEYAVYEDTFDSVTVKDFIFKRTFKMSEVIFLQYNNNRLSSYIDGLFLEYEKLHQRMVETVLRNNQIRGMMHAKGSSQFTDNQMSLMKDYADKLFKAFSERSVAIVPTNDHITYEELTNTTGTTNLSVDDLQKIRRQFDDEIADILGIPPTVLHGDMATLDSSQKALVLYCMSPLSKKIQDELNAKIISKSDYQKGKRLKIVGLSQHDIFDIAVNIDKLVSSGTFTRNEVRERLDFAPIDGGDNIILTKNYIEEGKGGDNTDDTNTD

SEQ ID NO: 5575 - DNA, 729 bp, Streptococcus agalactiae
atgacacaaatacagattaaaggacctattgtttcagatagcgaccgttggttttacgactggttagatatgccagcaactgcaccaaaagatattatcttgccacaagataatagcgatattgaagtgcttattaactctggtggtggcgacgtatatgcagggagcgaaatttataccgcattgaaatcatatcaaggaaacgtaacggttaagattgttggtattgctgcttcggcggcttcagtaatcgcaatggctggtgatgttgttgagattagtcctacagcacaattgatgattcacaatgtatctactacagttagtggagatcataaacaaatgctgcatgaggcaggagttttagaaaactacaatatatctattgctaatgcttatgtcaataagactgacttagaaatgaatgaattgctagatttgatgagcacagaaacttggtttaatgcacagcaagctgttgaaaaaggctttgcagacaaggaaatgtttgctgaagaaatcaaacaagcgccgcaattggtggctgggattgaaaatatcattcctagtgatgtcatttcaaaattagctaatgcgattaacacaaaaaaaccagaagttaatattgatgaaatcgtagatatggttatttccaaaatggaaaacaccgagcaaaaaggaactaaagacagaaaagaagcaccaacaggttttggggctttttgtttt

SEQ ID NO: 5576 - protein, 243 aa, Streptococcus agalactiae
MTQIQIKGPIVSDSDRWFYDWLDMPATAPKDIILPQDNSDIEVLINSGGGDVYAGSEIYTALKSYQGNVTVKIVGIAASAASVIAMAGDVVEISPTAQLMIHNVSTTVSGDHKQMLHEAGVLENYNISIANAYVNKTDLEMNELLDLMSTETWFNAQQAVEKGFADKEMFAEEIKQAPQLVAGIENIIPSDVISKLANAINTKKPEVNIDEIVDMVISKMENTEQKGTKDRKEAPTGFGAFCF

SEQ ID NO: 5577 - DNA, 1158 bp, Streptococcus agalactiae
atgacaatgaaattatcgaatgaattcaacgaaattcgacaaaaatttgtagatgcagtatctaacaaagcgccacaagaggaacagagcgctctctacaacaacatgctagaagcaatgtttgaagaatctaaaaaagttgcgcaagcagaagtagaatctgcaatcgcattgactccagacgacgcaaaaatgacagctcgtgaacgtaaattttttaatgagatcgtaaaaacagcgccagctgggctaactgagttaatcccagaagaaacagttgatcgtatttttgaagatttaacaacaaaacatccgcttattggagcgattggtcttaaaaatatgggccttcgcatgaagttcattgattctgattctaaaggtaaagccgagtggggtgacttgtacggggaaatcaaagggcaacttcaagcttcatttagctcaactaaggctatccaacacaagctcacagcttacgtagttattcccaaagacgctgttaagttcggcccaggctggttacttcgtttcattatgacacaaattgatgaagcgttcgcagttgcattagaagaagcttttttaaatggagatggcaatggtaaaccaatcgggttatctcgtactctaaaaggtaaagttgttggcgaaaaagcgacgtatgatgcaaaaaaaccgacaggagttttaacatttaaagatccatctacaacagtaaaagaattgacgatggtacataaataccactctgtaaaagaagatggaaagacagctgttgaagttgatggaaacattgtaatcgtggttaatccagcagatgcatgggatgttaaaaaacaatatacatcacttaatgctaacggaacgttcgtgactgctctaccttacaacgttaccttaattgagtcagtccatcaaaaggctaaggaagttacaacttttgttaagggacgatatgatgcatatgttgcaggcggaattgagttacacaagtatacagagacatacgctcttgaagatttagacttatttacagctaaacaatttgcgtatggtcgtgctaaggatgagacttcagcagcagtttggacgcttagtgttgcagacccaattgtaatttctggcgaaccgggtgtaggagctattccaggagtg

SEQ ID NO: 5578 - protein, 386 aa, Streptococcus agalactiae
MTMKLSNEFNEIRQKFVDAVSNKAPQEEQSALYNNMLEAMFEESKKVAQAEVESAIALTPDDAKMTARERKFFNEIVKTAPAGLTELIPEETVDRIFEDLTTKHPLIGAIGLKNMGLRMKFIDSDSKGKAEWGDLYGEIKGQLQASFSSTKAIQHKLTAYVVIPKDAVKFGPGWLLRFIMTQIDEAFAVALEEAFLNGDGNGKPIGLSRTLKGKVVGEKATYDAKKPTGVLTFKDPSTTVKELTMVHKYHSVKEDGKTAVEVDGNIVIVVNPADAWDVKKQYTSLNANGTFVTALPYNVTLIESVHQKAKEVTTFVKGRYDAYVAGGIELHKYTETYALEDLDLFTAKQFAYGRAKDETSAAVWTLSVADPIVISGEPGVGAIPGV

SEQ ID NO: 5579 - DNA, 291 bp, Streptococcus agalactiae
atggatgaacacaagcttttaaaaccatttaaagaacgaatgagagtgtttcatgattttgatgatgacaatctatcactaattttgaaaagttcagagagcgccctcaaagggttgttagggtttgatttgatggattatgaaagcggtaaagagttaataatggagcgctcgagatatgtctttaacgactgtctcgagttgttttatgactcttttaaaaacgaaatcgctcgtttggctattgaagaaatggaaagagaatatgaaagtaagaacgattcaacgatt

SEQ ID NO: 5580 - protein, 97 aa, Streptococcus agalactiae
MDEHKLLKPFKERMRVFHDFDDDNLSLILKSSESALKGLLGFDLMDYESGKELIMERSRYVFNDCLELFYDSFKNEIARLAIEEMEREYESKNDSTI

SEQ ID NO: 5581 - protein, 147 aa, Streptococcus agalactiae
ATGAAAGTAAGAACGATTCAACGATTTGAAGATTATAAAGAAGAGGTAATTCGAGAAATTGGGGATGTCTTTGTTGTCAACAAAAACCGCTTTAAAGAGATTGACGACAAATTACCTGGTTTTATCGAAGAAGTTTCTGACGATGTC

SEQ ID NO: 5582 - protein, 49 aa, Streptococcus agalactiae
MKVRTIQRFEDYKEEVIREIGDVFVVNKNRFKEIDDKLPGFIEEVSDDV

SEQ ID NO: 5583 - protein, 345 aa, Streptococcus agalactiae
ATGTCTAGAAAAAAAACAAATAATGGTGATTTGAGAACTCCTGTCATCTTTTATTCATCAACAACAGACGATGAATTAGATGGAAGAGATATGAAATTAAAGAAACTATTCGCAACACTCGCCGAAGTCTATAATCCAAGCATAAAAGATATTGAGAAAGTAACTGAGAGAGGCGTTAAAGCACAATACACTATTAAGTTTAGAGACCCTCTGTCGGGTTATATCCCTCAGAATGATCATCTTGTAGAAATTATTGATAGCAGGTTGCCAAATAAAAAAATAGGAATATTAGATATAAGGCCTGATTTTGTTGATAGAGACTTTATTGTTATAGTTCTTGGAGGA

SEQ ID NO: 5584 - protein, 115 aa, Streptococcus agalactiae
MSRKKTNNGDLRTPVIFYSSTTDDELDGRDMKLKKLFATLAEVYNPSIKDIEKVTERGVKAQYTIKFRDPLSGYIPQNDHLVEIIDSRLPNKKIGILDIRPDFVDRDFIVIVLGG

SEQ ID NO: 5585 - protein, 369 aa, Streptococcus agalactiae
ATGGATGAACTTTTAGCGAATATGGAAAAAAAGTTAGGCTCTGCGAAAGTTAACAGAGTAGTTAATAAAGCGCTAAAAGAAATCGGTGAAGAACTAGAACCTAGTTTCGAAGCTGCTATATCGGTTTACCGAAGAAGCGGAGAGACGGTTAAAAGTGCCGTTGTATCTAGGATTAAACGTGAGGAGGGAATACCAAAAGTGAAACTTGGATTCCAAGCTCCACGATGGAACATGGTCCACTTACAAGAGTTGGAATATGGATGGAAGGAGAAACGGCGTGGTGTCGGGGTAATTCGACGTTATTCGGATGTTTTAGAAACGATATATCCGAAAGGCATAAAAGACAAGTTGAAGGGAGGTTTTGATGGT

SEQ ID NO: 5586 - protein, 123 aa, Streptococcus agalactiae
MDELLANMEKKLGSAKVNRVVNKALKEIGEELEPSFEAAISVYRRSGETVKSAVVSRIKREEGIPKVKLGFQAPRWNMVHLQELEYGWKEKRRGVGVIRRYSDVLETIYPKGIKDKLKGGFDG

SEQ ID NO: 5587 - protein, 378 aa, Streptococcus agalactiae
ATGGTTAAAGACATGCTAACAGAAATTGGTGAGCTTTTTAAACAAGACGAAGTTTTGAGATCAGTTAAAACAAAAACTTTTAAGCGACCAGAAAGTCTACCTTCTGACCAAACAAGCATTGTTATTGTACCTCTTGCACCACCTAGACAAACAAACTTCGGTTCAGATAAACCATTAGCTAAGAAATTTATGTATCAAATCGATGTAGAGAGTGTATCAAGGCTCGAATGTAAAGATTTGCAAAATAGGATTGAGAAAAAGCTGATGGTTATAGATTTTTTTCAAAGTGATAACGGCTTAGAACGTTATGACGAGGATACAAACAGATATCTAGATGCTAGAACTTACAAAGGATTTAGCAGTTTATATGAAGAGTAT

SEQ ID NO: 5588 - protein, 126 aa, Streptococcus agalactiae; identical to SEQ ID NO: 4232

SEQ ID NO: 5589 - protein, 603 aa, Streptococcus agalactiae
ATGCAAGCAGTAGGATTTAAACGAATGACAATTCAAGTTTTAAGTGATGCGAAAAAAAAGATTGTCATCGAGGGTGAGGCTGGTAAAGGTGCAACTAAAACAGCTAAAATTAGTGGATTATCAGCAGCCCCTGTCAAAACATATGGTTCAGATATTGCTTATTACACCTCGCGCAGAGGTGTTGGCGATGTAAAAATGGAGACAGAAGCAATTGATATCCCATTCGAACATTTACAAACCATACTTGGTTATAAAAAAGGTGAAAAAACAGAAGGAGTTACATTTATCGGAGAAGATACAGAAGCGCCTGAAGTGTCTGTTCTTTTAGAAGCTCCAGGGACAGAGGGGAATGTATATCTCGGTTTCTTTAAAGGGACTTTCTCGATGGAAGATTTCGAATTAAAAACCAAGGAAGAAAAACATGATGGTTTAGACTCTCAAAAATTAGTGTTCACAGCACAACCTGGTGAAGTAGGGAAAGCGAAAGGTCAATATGTCGGTTGGGCAATGGATAAAGAAGCAGAAGCTAAGGGCAAAAATGCAATGGCTTTGGTTAAGCTTTTGAATCCAGGCGAACCAAGCGTAGGAGCTATTCCAGGAGTG

SEQ ID NO: 5590 - protein, 201 aa, Streptococcus agalactiae
MQAVGFKRMTIQVLSDAKKKIVIEGEAGKGATKTAKISGLSAAPVKTYGSDIAYYTSRRGVGDVKMETEAIDIPFEHLQTILGYKKGEKTEGVTFIGEDTEAPEVSVLLEAPGTEGNVYLGFFKGTFSMEDFELKTKEEKHDGLDSQKLVFTAQPGEVGKAKGQYVGWAMDKEAEAKGKNAMALVKLLNPGEPSVGAIPGV

SEQ ID NO: 5591 - DNA, 300 bp, Streptococcus agalactiae
atgtcagacttagaaattaaaattaaaaatgataacggcgagctcgtggtgaaagaatgtaaatctcttactgtgagagactatcgaaattacttgattatgcaagatgaacttgcaaaaggagatgatccagaacatgtgaaactagacaaacaactaacttttatggctagtttgtttgaaggcttaaccgtcgatatgttatatgacaaatacaacatgtatgaattaaacaatgctctggcaaatctatatgttaagttaatcggaggggagccagaagacccaaaggagacaact

SEQ ID NO: 5592 - protein, 100 aa, Streptococcus agalactiae; identical to SEQ ID NO: 4222

SEQ ID NO: 5593 - DNA, 105 bp, Streptococcus agalactiae
atggagacaaactggattgatatgctggaagttttaaagcctgcagaagtcaaatctgaggaagtgatgtcgttagaagactttgttgggactctaaatggcgga

SEQ ID NO: 5594 - protein, 35 aa, Streptococcus agalactiae; identical to SEQ ID NO: 4226

SEQ ID NO: 5595 - DNA, 3921 bp, Streptococcus agalactiae
atggcaaaaggtacaccactagggagtatgtttatcgaacttggattagatacttctaagtttgaccctaagttgcaaagcgcaaaaagagctgttaattatttcaaagcagagacgagagctttagatgccgccttaaaaaacaccggaaacgcattaaacaataacgcagctaaagccaatgcactacaagcaaaatataagtcagtaacacaggcaattgaagcgcaaaaaaaagtgttaacgagtttgaaatctgattttgacaaattagatccagggacagctaaatgggaagccgcagccgttaatattgagagagagaatgcaaaattagcagcattagagggacaattaggagctgtaaaaaaagcttttgaagaagtttctgctcaatccggttttactggttttttacagcgcagtggcaaacagattgactcttttggtcaaaaaatgcaaaaactaggtgaagctactaaatgggtaagcgctggatttggagctggagcattatatagcgtcaaggctgcaagcgattttgaatctgcgtttgctggtgtaaaaaagactgttgatgaagtaagagattcgaacggaaaagttatttactcttatgatatgttgtcaaaaggaattagaaacatgtctaaacagatacctgcatcaacgacggagatttctcatgttgcggaagctgctggtcagctaggtatcaaaacaaaggatgttttaaatttcactcgtgtcatgattgatatgggaaaatctactaacttgtcatcagaagaagctgcaactgcattagctaggtttgctaatatcacacaattagatccatctaagtacagcaatctaggtagctcaattgttgagttgggtaacaactttgcgacaactgaaaaagaaatcgttgaaatgggtcttcgcttagctggtacaggtaaggttgtagggttgacagaccctcaaattcttggcttggcaacagctatgagttctgttggtatcgaagcggaagcaggtggttcggcgtttagtcgtgtcatgcaaaaaattaatacacaagtgttgtctggtggcgaagatttgtggaagtttgcaaaaatcgctggtaaatctgctgatgaatttgctgcatcttggaagaaaaatccacaagaagccattattgattttgttaaagggttaaaacgctttaaagaagagggcaaagacgtaactgctcacttgcaagatattggtattgaatcagtacgagaaattgacacattacaacgtttggctggtgctggtgatttacttggcgatgcatttaagtccgcaaataaaggatttagtgaaaacaaagcgttgactgatgaggcttctaaacgatacgcaactttccaaagcaaactacaactcctaaaaaacaaactaaatgatgtagctgtcacaatgggtggaccattaatggatgctgcttcaaatgcccttgatgcattggaaccaatgtttaaagttgttagggatctcgcaaaagcatattctaacgctagcccagaaatgaaaaaacttatcacatatgcaattttaggtgcaactgcattttctccattaatgactgctatcggtaaaacaacttctaacgtaggtagattagtaggttggataggaaagttgtctggtgcaacgaaaggcgcaaaagcagcagaaggattagctactgctgtaggcggtctaggtgctaattctgcaacagcggcagctagtgtagggcttttaggaaatccagtgacttggggggtcatcatcggcggtgctgcggttatcggaataggtatattagctaataagatatatgaagctcaccagcgtacacaagagtggggaactaaagttaatcaggtacaagccaatgaactacaggcttttaaagataaagttgataagacgaatcagtcgatggcaggattcagaggtggagctgaccaagtcaatgctgttaagacagcatttcaaggactagttaccgaaatcgaaaaactagaaaataaagacttaagtaaaaacgttaaattagcagagcaacttggtttcagtcaagaaacgatagaacagttgaaaaaatcaagcaggcaaacaattgataatgtcaagcagatgtctgatgaagtcattaatatctatcaaaacgctagcaacgaacatagaagattaactgaagaagagaatgctgttgttttagcaaatcaaaatgagcttatcaatgtgcagctatcaaaattgaactactctgctaaagagaagaaggcaattaccaaggcgatgaatggtgagctagaagcgttaaatagtcagcagttaactaaggctcttgaagttactgaaaaatggataaaagctgaaaataaatcatatcaaaagttaaaaagtggtcttaaaaaagcttatgactctatcaaaggtgatgatgaagctgctgttaaagcgagggaagaaatccacaagaaacagcaacaactcgaagctgaccattacttgaaaatggaagcttatggcaaacgttatgctaaaatccaaaagaaattgcttaaagggactgcgaaatatttagacccgcagttgcaacaagcgatggttaacgatgtcaaaaagcaaatgaaggagcttgggttatcttatgaagagttgatgaagaagacaaccaaagcagcatctaaagctcaagaagttaatactatgtgggctagaactactaaaaaatcaacagaagatcaaaaggtggctaattcgcaatggaatagccttgtctggaatcccaaaacgggtaagttgaaaacaaatgctaaagaggaagtagctaaagctcttgaagcggaaggtggctgggacagacttaagtttattgcaaagaatgcaaatttagagactaacgctcgtgtaaccatggcagaagttctagtcgaaactggcaaatgggatgctctcaaaccagaagataaaaaactaatcgttgatgggcatcaaggcattcaatccatagtagaaagtgaggagcacttaaaaatatggaatagtttgccagaaggcgttaagcgtattctaggcgacaataaagattttcttgataaaaaaggagttgcgaccaaagcgcttgaaaattggaattcgttgtctccaaaacagcaaaagttactagcaaaagatatgactagttctgatgttgagaaagcaaaaaaagcagtcaacagcattgttcaaaagaaaccaacaagcattaaagctaaaaatgatacaaaacctgatgtcaattctgcgcaacgagcaattgatagcgctaaacaacgtcaacctatctcaattagagctaggaatgacgcaggaggagtcatagaacaactattagctagcataccgagaacggtcactataggaatcgctgctgctgcagctaatgcctttaagttcgcaaatggtactgattatcacccaggcggtttcgcaatggtcaatgaccaaaaagggcctttatataaagaactagtaactttaccgaatggacaatcattcatcccagatggccgtgatgtagtattaccactgccgaaaggttcgaaagtcatgaaagctagtatgaccagggactatatgaaaaatttaggaatacctaaatatgctaacggcgttggaattcctaaagattcgacgtttgtcaaaagcattacaatccctaagaggagagtatcagaaacgacatcatacgacgactctaatattgcaagaattttgaatgaaattttactaacgcttagaacaaaaaatcatgagacagaaaatggcgatgtctatttagatatgagaaaggtcggcaggatgattaaagaacacaacgagtctgaaagtatcatgcttaaacgaatgcgaggtgaactgtca

SEQ ID NO: 5596 - protein, 1307 aa, Streptococcus agalactiae
MAKGTPLGSMFIELGLDTSKFDPKLQSAKRAVNYFKAETRALDAALKNTGNALNNNAAKANALQAKYKSVTQAIEAQKKVLTSLKSDFDKLDPGTAKWEAAAVNIERENAKLAALEGQLGAVKKAFEEVSAQSGFTGFLQRSGKQIDSFGQKMQKLGEATKWVSAGFGAGALYSVKAASDFESAFAGVKKTVDEVRDSNGKVIYSYDMLSKGIRNMSKQIPASTTEISHVAEAAGQLGIKTKDVLNFTRVMIDMGKSTNLSSEEAATALARFANITQLDPSKYSNLGSSIVELGNNFATTEKEIVEMGLRLAGTGKVVGLTDPQILGLATAMSSVGIEAEAGGSAFSRVMQKINTQVLSGGEDLWKFAKIAGKSADEFAASWKKNPQEAIIDFVKGLKRFKEEGKDVTAHLQDIGIESVREIDTLQRLAGAGDLLGDAFKSANKGFSENKALTDEASKRYATFQSKLQLLKNKLNDVAVTMGGPLMDAASNALDALEPMFKVVRDLAKAYSNASPEMKKLITYAILGATAFSPLMTAIGKTTSNVGRLVGWIGKLSGATKGAKAAEGLATAVGGLGANSATAAASVGLLGNPVTWGVIIGGAAVIGIGILANKIYEAHQRTQEWGTKVNQVQANELQAFKDKVDKTNQSMAGFRGGADQVNAVKTAFQGLVTEIEKLENKDLSKNVKLAEQLGFSQETIEQLKKSSRQTIDNVKQMSDEVINIYQNASNEHRRLTEEENAVVLANQNELINVQLSKLNYSAKEKKAITKAMNGELEALNSQQLTKALEVTEKWIKAENKSYQKLKSGLKKAYDSIKGDDEAAVKAREEIHKKQQQLEADHYLKMEAYGKRYAKIQKKLLKGTAKYLDPQLQQAMVNDVKKQMKELGLSYEELMKKTTKAASKAQEVNTMWARTTKKSTEDQKVANSQWNSLVWNPKTGKLKTNAKEEVAKALEAEGGWDRLKFIAKNANLETNARVTMAEVLVETGKWDALKPEDKKLIVDGHQGIQSIVESEEHLKIWNSLPEGVKRILGDNKDFLDKKGVATKALENWNSLSPKQQKLLAKDMTSSDVEKAKKAVNSIVQKKPTSIKAKNDTKPDVNSAQRAIDSAKQRQPISIRARNDAGGVIEQLLASIPRTVTIGIAAAAANAFKFANGTDYHPGGFAMVNDQKGPLYKELVTLPNGQSFIPDGRDVVLPLPKGSKVMKASMTRDYMKNLGIPKYANGVGIPKDSTFVKSITIPKRRVSETTSYDDSNIARILNEILLTLRTKNHETENGDVYLDMRKVGRMIKEHNESESIMLKRMRGELS

SEQ ID NO: 5597 - DNA, 1506 bp, Streptococcus agalactiae
atgaaatttgatggtatagatctatctaatgtcatagagatacacgacatcaaaagagacgtcggaaatacacgtaatgttgtttcaagtagcgctttaaaaattggcgagcacgttcaatctgtgcacgttggagctaaaaaaataagtgttgatttttctatttggaccagaaatagaaacgaggtaaaacataatttagcgaaggttttcaacagaacaacacctagaaaattgtttttttctgacgaaccagataaatattatatggcaatagttgtagatgacataccgatggttgaagatgttatcaagcgttcaatagggactatcacttttttaattccagatggcgttgcgcattcaactacttacaaaaagtttttagattacacgcaagatggaaataaattaatctttaaattgcaaaacgaaggtaacacaaatgcgttgccaattatcaaaataaaacacaactccgaaaacggctatattggtattgcaaacgaaacaggtgcttttgcgcttggatcatcagaagaagaagacgggactatcgtgcatcgtaacgaagtcctttttgattactcaaaagcgatagcgaaagctttggagggtgcgccaaacgtcgcaaaacttaatcacatgccaccttctttcgatacagaacttaaacgtatgcgtattgataacatcttaggttctggcaaaggcggtgaatatgttgttattggaaatagaggtactactcctggctacacagagcacgttgggactcgaacgtttattatcaatcctgattcaaatggggaatatactctcaatgaacatttgtggtggcaacagatttttattgctactgcgcaggatcaaaaaggttttttaaagctttgtgtaacaggaatcgatgatgaaggaaatgacgagtttctgtatggaatcgaaacttacaaacgaaaaaatggttttgaagcagaatacaatttctttgctctggatgatgacggtgttggttggagattttataagcagtttgaatttcaggcagatagaaattatcacaatcctttttcgatggatagaagcagagctgttgagattttcagggaagaagacaagtttcgtatttattttaatggggcacatcatcatgtaactgttccgtcccttaaagggaaaaaatcccgcaagatacatcttgcaatggggacatgcagtgatagctctaaatatatcaactacaacctgtttgaaaaagtcaattttgaaaaaatgggcgtgtctcattacaacaatatcgtcaataaatatcaaccaggtgacgaagttattattaattttgaaaatgatacagtcaaaactaaagatattgactccctgcaggatatggttttaggctctcaaccaatatctattccaccgggtgagtctgaactcgtcatcaatgtgtctaaattttcttcaacagaccctgacatcgaactattgttagaagagaggtggttg

SEQ ID NO: 5598 - protein, 502 aa, Streptococcus agalactiae
MKFDGIDLSNVIEIHDIKRDVGNTRNVVSSSALKIGEHVQSVHVGAKKISVDFSIWTRNRNEVKHNLAKVFNRTTPRKLFFSDEPDKYYMAIVVDDIPMVEDVIKRSIGTITFLIPDGVAHSTTYKKFLDYTQDGNKLIFKLQNEGNTNALPIIKIKHNSENGYIGIANETGAFALGSSEEEDGTIVHRNEVLFDYSKAIAKALEGAPNVAKLNHMPPSFDTELKRMRIDNILGSGKGGEYVVIGNRGTTPGYTEHVGTRTFIINPDSNGEYTLNEHLWWQQIFIATAQDQKGFLKLCVTGIDDEGNDEFLYGIETYKRKNGFEAEYNFFALDDDGVGWRFYKQFEFQADRNYHNPFSMDRSRAVEIFREEDKFRIYFNGAHHHVTVPSLKGKKSRKIHLAMGTCSDSSKYINYNLFEKVNFEKMGVSHYNNIVNKYQPGDEVIINFENDTVKTKDIDSLQDMVLGSQPISIPPGESELVINVSKFSSTDPDIELLLEERWL

SEQ ID NO: 5599 - DNA, 4131 bp, Streptococcus agalactiae
gtggttgtaataactctagtaatacacgacgcaaaactacatccagttttgcttttagacaatgagcgacaaggagcacttaattattatgatgatttgtggactagacagctcacaactggttcgtcagcatttgagttttctgtttataaaaaatcgctgttgggtgataatccacttaatcacaaatatcacgcactaaacgatcaagcatttgtttcttttgtacacaaagataaagtacaattgtttaacatcatgcgagtcgaggaaacagagacaacaatacattgctattgcgaaaatcttaatttagagttactaaacgagtattgcaacgcatataaagcaactaaagcaatgtcatttgaagagtatcttgtgcagtttgatattttaaattggggtgctttgacaattggcacaaacgaagttaaggacaaaaaactgacattggaatggactggtcaagacactaagttagctcgtattttgtcaattgctaataattttgatgcagaaatcgaatttgaaactcaattacacaacaatcacacgtttaaagcgtttattgtaaatgtgtacaaggaatacgaagagggcgtgtcctatggcgtaggtcgtgaccgcagcgacatagtgttgagatatcaaaaaaatgtaactggtatcactaaaaaattagacaagcgccagatttacaacgccatacgcccgtatggcaaaaagacagtcaaaggcgagcgcgttatttctaatcctgtaactcgcaaagtcactaaaacagttgggtcaaatcgtacatatttaggcggagacctcaaatattatggtcatacaatcaaaaaagctaacgtacaatctattattaactacgcggtgcagtataatattttgccgagtggaatcatatgtcaactgtacttagaaagtctttggggtgattcagcagttggtaaacgtgacaataactgggcaggtataagcggcggagcacagacacgccctagtggagtaaaagtcactactggaatggctcgtcctcccagcgagggcggaacgtacatgcactatgctagtgtagacgactttttaaaagactacacttatcttttagcaaaacaagggatttataatgtcgtcggcaaaaagaatatagcagactatacaaaagggctttttagagctggtggagctaaatatgactatgcagcagcaggatatcaaagctacacaaatttgatgactaatatccgaaatggtatcaataaagtaactggaaatatcctcaatacgattgataagctgtggcaaacaccagtacagcctataacagccgtaaacgtagctagaagagctactaagacaatgcaagcactaaatgaagctactagacttaaaggtcgcagaatcggctcaggacagtgttatgctttgtctggttggtacgctaagaagttagacggcgcttggattgacagctcggttggtggtattagaggtcgtatcggaggcggtatggctgctgccttaatcggcactgattataactggggtgcttatggttggaagctagacaggtcgcctaatgctggcaacttgcaagctggcggtatctataatgttaaagcaaattttggtgctccattttatacaacacaatgggggcacacagggattatcaagagtgtgtctaaaacaagagtcactgtcttagagcagaattacgctggacgcatgtatgtcatggaaaactcgtatgagattaacgcttttgctagaggattgcagacagtatgttatccacgtgaaatagcgcaaggaatggctgttaacggtgcaacaacacagcaagtaagcggtggaacacaaatatcatacgaggaagtcgtgcaagaagcacagacagaatcatacgaagaagaacaaatcatctacattgacaactcaatctacaaagagtggaaagacgaaaacggtaaagtagagtactatctcaaaaatggatttttgtacgcacctttatcaagagaccgttatccatctgttttaacaggtaacgagacacgagataactggatacgaaaagacatggaagttgagactgatagtcaagatgtcttgatatcaactgctttaaaagatctaaaagcacacgcttatccagcaattacttatgaagttgatggctatgttgacttagaacttggtgatgttgtgcggatacaggacgacggatacgagccaccgctgattttgacagcacgagtagttgagcaagaaatatccataacaaatcccagctctaacaaaactaaattcagcaattttgtcgaaaaagaaagtcagttagcttctgatttaatcagtgatatgttgcgtctatacgatgagtcaattccatacgaaatcaaactagctacttcgaatggtgtcgcttttaaaaatggcactggtgaatctgtcctaactcctagcttgcaaaagaacgggaaagactatgaagcagtttatttttataaaaatggtgactcgctaattgatatcggaccatcgctaattgttaaagcaagcgactttaaccacgttttaaatataacagttgaggcatatttaaatgaggaacttgtagcaagtacgcaaatatcctttacagacacagaagacggtgcagacggaaaagacgggttgccaggaccgcaaggtccaccggggatagatggtttacaaggtccgagaggagaacagggtattcctggtccggctggtgctgacggaaaggcaacgtacacacacattgcttacgcccttgacgaaaccggaactactggttttagcgtatctgataatactggcaaaacatacataggtatgtatgttgatgataatatcattgactcaaacgaccctaaaaagtacaagtggaatttgataaaaggcgcagatggtgcaagaggtattcaaggtccggctggagcagatggtaaaacgccttattggcatgtagcgtatgcaaatagctctgacggtaaaactgattttagtgtaaccgatagccttaataaacgctatatagggcaatacacagactatatcgctattgactcgagcgatccaacaaaataccgttggactgatatggtcggaacagtcgttgttggcacaaataatctgattgacggtacaaaatcatttgttggttctgattggtttacttctgcaacactagaagatgaaaatatctctaattatccatttacatttaaaaaatggataagcggccaaaaggtatcacacgcaaaagacattatagttgagcaaggtgtgacatacacttttagcgcttatgttaaacgtgaggtagctgggaatttatatttttatctctatgatatagcagatggttttattactagtgacactccacgagaaacaattataaaaaatgttgactcgaatgtcagacgttttgaaatcacctttacaccaactaagacaggtaagattagaccacggtttgcgatggtgtcatcggaacaaggtagttttagtactggtggctttatgcttgtcagaggtaacaagacaggcgattggcaagagtcggaagctgacaaagcaagtaatcttgattcaaaagccgatggtgcttttactgttgagcagttaaacgctattgcggaagaacagcgtttgatgaaagctaatcttgaagctgctgcaagtttgcaagaagtacaagataaagcaaaagagttacttgatcaaattaaaaaaatagaagatggtcaaaaagtatcagagcaaactatgatttcaaacgctaatagagttgttcagatactggctaagctcgaaaatgtacaacttgttacagaagccattacgcagtatatgtcatactcaaatgatggtttagttatcaaaatgaaagatggtacatcgtcggtgagagtaacaactgatcgcatagctttttattcaggtggcactgagactgcgtttattagtcaaggttatctacaaatcgagtctggtgttttcactttgcggcttcgtattggaagctttttgtttgaagaaagttcgaaggggcgtttacaaatcaagaaaattagagggattggagga

SEQ ID NO: 5600 - protein, 1377 aa, Streptococcus agalactiae
MVVITLVIHDAKLHPVLLLDNERQGALNYYDDLWTRQLTTGSSAFEFSVYKKSLLGDNPLNHKYHALNDQAFVSFVHKDKVQLFNIMRVEETETTIHCYCENLNLELLNEYCNAYKATKAMSFEEYLVQFDILNWGALTIGTNEVKDKKLTLEWTGQDTKLARILSIANNFDAEIEFETQLHNNHTFKAFIVNVYKEYEEGVSYGVGRDRSDIVLRYQKNVTGITKKLDKRQIYNAIRPYGKKTVKGERVISNPVTRKVTKTVGSNRTYLGGDLKYYGHTIKKANVQSIINYAVQYNILPSGIICQLYLESLWGDSAVGKRDNNWAGISGGAQTRPSGVKVTTGMARPPSEGGTYMHYASVDDFLKDYTYLLAKQGIYNVVGKKNIADYTKGLFRAGGAKYDYAAAGYQSYTNLMTNIRNGINKVTGNILNTIDKLWQTPVQPITAVNVARRATKTMQALNEATRLKGRRIGSGQCYALSGWYAKKLDGAWIDSSVGGIRGRIGGGMAAALIGTDYNWGAYGWKLDRSPNAGNLQAGGIYNVKANFGAPFYTTQWGHTGIIKSVSKTRVTVLEQNYAGRMYVMENSYEINAFARGLQTVCYPREIAQGMAVNGATTQQVSGGTQISYEEVVQEAQTESYEEEQIIYIDNSIYKEWKDENGKVEYYLKNGFLYAPLSRDRYPSVLTGNETRDNWIRKDMEVETDSQDVLISTALKDLKAHAYPAITYEVDGYVDLELGDVVRIQDDGYEPPLILTARVVEQEISITNPSSNKTKFSNFVEKESQLASDLISDMLRLYDESIPYEIKLATSNGVAFKNGTGESVLTPSLQKNGKDYEAVYFYKNGDSLIDIGPSLIVKASDFNHVLNITVEAYLNEELVASTQISFTDTEDGADGKDGLPGPQGPPGIDGLQGPRGEQGIPGPAGADGKATYTHIAYALDETGTTGFSVSDNTGKTYIGMYVDDNIIDSNDPKKYKWNLIKGADGARGIQGPAGADGKTPYWHVAYANSSDGKTDFSVTDSLNKRYIGQYTDYIAIDSSDPTKYRWTDMVGTVVVGTNNLIDGTKSFVGSDWFTSATLEDENISNYPFTFKKWISGQKVSHAKDIIVEQGVTYTFSAYVKREVAGNLYFYLYDIADGFITSDTPRETIIKNVDSNVRRFEITFTPTKTGKIRPRFAMVSSEQGSFSTGGFMLVRGNKTGDWQESEADKASNLDSKADGAFTVEQLNAIAEEQRLMKANLEAAASLQEVQDKAKELLDQIKKIEDGQKVSEQTMISNANRVVQILAKLENVQLVTEAITQYMSYSNDGLVIKMKDGTSSVRVTTDRIAFYSGGTETAFISQGYLQIESGVFTLRLRIGSFLFEESSKGRLQIKKIRGIGG

SEQ ID NO: 5601 - protein, 1989 aa, Streptococcus agalactiae
ATGACAACTTTTTATAGTAACTCTGACAGGAGTTATCGCTTAACTTATATTGTTGACGAGGTTTCAACGTCGGTTGCAGACAATAGTAGTCAAGTAAGATTTAGGCTCTATTTGACTTCTGGTACTAACAGTTATGCTCAGTATAACTTCGGTGGATATGCTTGGGTGGGTGCTAAATATGACTTTAACGCACCTTCCTCTATCGGTTTTAACGGCAATCAATTATTGATTGACAAAACAATCAGAGTTCCGCATGATGCAGATGGAAACAAAACGGTCGTTGTTGCCGCTAAGTTATTAGGTCCAGGCGGATACGCACCCGGAACGTTGACGATACCAGATCAAAAATTCACGCTTACGAAAATACCTCGCACCAGCGCAGTATCGGTTAGCAGTGGCTATTTTGGAGATACGCTAAATGTTAATATCAATCAAAGTTCAAGTGATTTTACACACGATGTCAGATACAATGTGAATGGTATAACAGGGGTTGTTGCTAGTGACATAAAAGGTTCAACAACTTTTAAAACAAGTTTAGATTGGGCTAATACGATTCCGAACGCTACTAGCACACCAGCGACAATTTACGTTGACACTAAGTCAAATGGATCGGTCATTGGGACGTCGACCGCTATTTTTTATCTGACTTTACCGGACAGTGTAAAACCTAAAATTTCTAGTCTTGTTTTATCGGATACAAATCAAAAAGCATCTGCATTAGTAGGTTCTAATAATTTTGTGCAAATTGTGTCTAATCCAACTGTTGTATTTAATGGTGCGAATGGGATTTACGGCTCTACAATCCAAAATTTCTACGCTGAAATTGTTGGTAAAAACCAATCTACTCAGTCAGACGGTGGCTTGCTAGGCATTTTAAAGTTTGAAGGTAAAGCTACCGTTAAAGCAACAGTTACAGATAGCAGAGGGCGTGTATCTGACCCTGTAACAACCGAAATAAATGTTTTACCGTATAGCGGCATAGCACTAGATTTTAGCGCCCAGCGCGGCGGTGCTGATGGCACACAAATCGTTGTAACTGTTAATGCATCAGTTAGTCCATTAACTGTTAATAAGCTGCAAAAAAATAAAATGACGCTAAGTTTCAAGACGGCGCCAACTGGCACTAAAACGTTCAAAATTGATACTTCTGAAGCAAGTAAGACCTATACAGATAAATACCAACTCATCAATCAGAATTTTGTACTTAGTGGTGAATTCCCGTCTGATCAATCATTTGATATTTATGGGACTATCTCAGACAGTTTTGGGACTAATGATACTAAACGAGTACCTCTTCTTGCAAAATTTGTAGCAGTAGAAATAGAAGATAGTGGTAATCCCGAGACAACAGGAGTAGCAATTGGTAAAGAGTGGGAGCGTGGGTCAATTGATGCAGCAGGAGATATATACGCCCGTGGCAAGCCAATCCAACAAAAACAACTTGCTCTTAACAATGGTGGTTCTTTTAGACATGACGACACTGACCTAAATAGCTTGCAAGACACAGGTTTTTATTGTGTATTTAGAGGTGCTAATAGACCGACCGGAGCAGGCCCTGGCTATGTAACTGTTGTAAGACACGAGACATCAAACTATGCTTATCAACAATTTTACGACCGTACAAATAAAACTATATTTACCAGAGTATTGGAAAATGGGGTTTGGAGCGGTTGGAGTGAGTATGTTAAAAAAGATAGTTTGCCTACAACGATAGACACAGGTTGGCAGTCGATTGGAAATGGTTTTAGTTATAGGCAGACAGGCAGTACAGTCACCGTTAAGTACAACTTTGCGACGAATGGCATAGATAAGTTGACGGTTGGCTCTATGCCTACGAATTTGATAACTAGCGACATGATGTTTGCAGTAACGGCTTGGACTATACAACTCAATGTTTTAAATGTTCAAGTGAGCGCAGACGGTCGTATTCTGTGGTTTAATCCGTCAAAATGGACTGTTAACGTAAAAGGTCAAATTCAGTGGACGATT

SEQ ID NO: 5602 - protein, 663 aa, Streptococcus agalactiae
MTTFYSNSDRSYRLTYIVDEVSTSVADNSSQVRFRLYLTSGTNSYAQYNFGGYAWVGAKYDFNAPSSIGFNGNQLLIDKTIRVPHDADGNKTVVVAAKLLGPGGYAPGTLTIPDQKFTLTKIPRTSAVSVSSGYFGDTLNVNINQSSSDFTHDVRYNVNGITGVVASDIKGSTTFKTSLDWANTIPNATSTPATIYVDTKSNGSVIGTSTAIFYLTLPDSVKPKISSLVLSDTNQKASALVGSNNFVQIVSNPTVVFNGANGIYGSTIQNFYAEIVGKNQSTQSDGGLLGILKFEGKATVKATVTDSRGRVSDPVTTEINVLPYSGIALDFSAQRGGADGTQIVVTVNASVSPLTVNKLQKNKMTLSFKTAPTGTKTFKIDTSEASKTYTDKYQLINQNFVLSGEFPSDQSFDIYGTISDSFGTNDTKRVPLLAKFVAVEIEDSGNPETTGVAIGKEWERGSIDAAGDIYARGKPIQQKQLALNNGGSFRHDDTDLNSLQDTGFYCVFRGANRPTGAGPGYVTVVRHETSNYAYQQFYDRTNKTIFTRVLENGVWSGWSEYVKKDSLPTTIDTGWQSIGNGFSYRQTGSTVTVKYNFATNGIDKLTVGSMPTNLITSDMMFAVTAWTIQLNVLNVQVSADGRILWFNPSKWTVNVKGQIQWTI

SEQ ID NO: 5603 - protein, 297 aa, Streptococcus agalactiae
ATGCTAGAAGATAAAAGCATTGCAAAAGTTAATGCAATTGTGGCAGTTGATTTACCTCACGTAAGAGGTAACTTAACTTTTGACTTACCAGTTGACTTTGATAATAAATCTTTTGCAGAAACGCTTGAAAAGTGTGAGCAGATATTTTACGACGAAAAGTATAAAGATAAAGCTCAGTCTGAAAAAATGACTGAACTAAGTACATCAACATCAACAGGCACACAAACACTTATCAATCTGATAAGTACGCTTTACGCAAAAGAGGTTTTAAAAGATGAAGATCTTATTGCTATTGGT

SEQ ID NO: 5604 - protein, 99 aa, Streptococcus agalactiae
MLEDKSIAKVNAIVAVDLPHVRGNLTFDLPVDFDNKSFAETLEKCEQIFYDEKYKDKAQSEKMTELSTSTSTGTQTLINLISTLYAKEVLKDEDLIAIG

SEQ ID NO: 5605 - protein, 210 aa, Streptococcus agalactiae
ATGAAGATCTTATTGCTATTGGTTAGAATTTTTTTACAGGAAGAAGGGATAGATATGATGATTAAATTATTTGCGATTGACTTATATTATGGACGTATGGCTTGGTCAAGTTTTGTTAAAAAGGGATTTTCAGAGTTTATTAATAACAAAACAAAAGAGCAACTTGCAATTATGTGCGATGAAGAATTACTTGCTGAAATTTTAGCAAGT

SEQ ID NO: 5606 - protein, 70 aa, Streptococcus agalactiae
MKILLLLVRIFLQEEGIDMMIKLFAIDLYYGRMAWSSFVKKGFSEFINNKTKEQLAIMCDEELLAEILAS

SEQ ID NO: 5607 - protein, 300 aa, Streptococcus agalactiae
ATGACAGTAGAACAAGCAGAAAGAATCGCTCAATCACAATTTGTGTGGGCTATTCTCTTTATCTTGCTTTTTATGATTGTGGTTGGTTATCTGGTGCGAACGTCTGATAAGCGTGAGAAAAAGCTAATGGATTTCCATGACCAATCAAAATCAGAATCTAACAAACGTGAAGAGTGGCTCAAAGGTCACTTAGATAAAAATACAGAACAGTTACAGGACATTTCTCAGACCATTGGTGTTGTCCAAAAGGAGATGTCTTATATGAGTGACCGCATTGGTCGTCTAGAAAAAGAGGAGAAA

SEQ ID NO: 5608 - protein, 100 aa, Streptococcus agalactiae
MTVEQAERIAQSQFVWAILFILLFMIVVGYLVRTSDKREKKLMDFHDQSKSESNKREEWLKGHLDKNTEQLQDISQTIGVVQKEMSYMSDRIGRLEKEEK

SEQ ID NO: 5609 - protein, 333 aa, Streptococcus agalactiae
ATGAACGAATTTATAACACAAATCATTACAGTATCAGTACCAATTTTTGGTATCATCGCAGGTATTCTCACGCACAAAGTAAAAAAATTACTTATAAAAAAAGGTGGAGAAAAAGCTGTTAAAATTGCAGAAATTGTCGCTCGTAATGCTGTTGAGGCAGTTGAACAAATATCTGTGGAAGTTGGTATTAAGGGACAAGATAAGCTAACAGAAGCTAAAACAGCTGTTATTGATGGTTTATCGCAATATAATATCAGTTTAACAGAGACTCAGTTAGAAACATTTATCGAAGCTGCGGTTAAACGCATGAATGATGAGTGGAAGAAAGGTCAA

SEQ ID NO: 5610 - protein, 111 aa, Streptococcus agalactiae
MNEFITQIITVSVPIFGIIAGILTHKVKKLLIKKGGEKAVKIAEIVARNAVEAVEQISVEVGIKGQDKLTEAKTAVIDGLSQYNISLTETQLETFIEAAVKRMNDEWKKGQ

SEQ ID NO: 5611 - protein, 744 aa, Streptococcus agalactiae
ATGATGAGTGGAAGAAAGGTCAATAATATGGTAATTAATATTGAGCAAGCTATCGCATGGATGGCATCTAGAAAAGGTAAAGTTACTTACTCGATGGACTATCGAAATGGTCCTTCATCTTACGATTGCTCTAGCTCTGTCTATTTTGCTCTACGCTCAGCAGGCGCATCAGATAATGGCTGGGCAGTAAATACAGAATATGAGCACGATTGGTTGATAAAAAACGGTTATGTTCTTATTGCAGAAAATACTAATTGGAATGCGCAAAGAGGTGATATTTTTATTTGGGGTAAACGTGGGGCTTCGGCTGGAGCTTTTGGACATACTGGTATGTTTGTTGATCCAGACAATATTATTCACTGTAATTATGGTTATAACTCAATTACAGTGAATAACCATGATGAAATCTGGGGATATAATGGTCAACCTTATGTTTACGCTTATCGTTACGCTAGGAAACAGTCAAATGCTAAGGTTGATAATCAATCAGTTGTATCTAAATTTGAAAAAGAGTTAGACGTTAACACACCGCTAAGTAATTCAAATATGCCATATTACGAAGCAACAATTTCAGAAGATTATTACGTTGAGTCCAAGCCTGACGTCAATAGCACTGATAAGGAGTTGCTTGTTGCTGGTACTAGAGTTCGAGTTTACGAAAAAGTAAAAGGCTGGGCAAGGATAGGCGCTCCACAGTCTAATCAGTGGGTAGAAGATGCTTACTTAATTGATGCAACAGATATG

SEQ ID NO: 5612 - protein, 248 aa, Streptococcus agalactiae
MMSGRKVNNMVINIEQAIAWMASRKGKVTYSMDYRNGPSSYDCSSSVYFALRSAGASDNGWAVNTEYEHDWLIKNGYVLIAENTNWNAQRGDIFIWGKRGASAGAFGHTGMFVDPDNIIHCNYGYNSITVNNHDEIWGYNGQPYVYAYRYARKQSNAKVDNQSVVSKFEKELDVNTPLSNSNMPYYEATISEDYYVESKPDVNSTDKELLVAGTRVRVYEKVKGWARIGAPQSNQWVEDAYLIDATDM

SEQ ID NO: 5613 - protein, 969 aa, Streptococcus agalactiae
ATGAAACAACCTTTAGCTTTGACATGGGAAGATCAAATTAGACTACTTGAAAAACGTGGATTAATTGTTAAAGCTGATGATGTAGAGAAAATCAAACATATCAGTTATTATAGAATTAAAGAATTTGCAAAACCACTTGAAATAAAGCAACAAGATGGTGAGGAGCAGGATATTTTATATGATAATATTGAGTTTGCAGAAGTTTTGGCAAGATATTATCAGGATAAAAACTTAAGAATCTATCTACTGCACGCTATTGAAAAAATTGAAGTGTCTATTAAAACAAAAATTTCTTTTGTTTTGGGGGATAGATATGGGGCGTTCGGATATTTAAATTTCTCTTCATGGGCTAATAGGAATAAGTTTACAAAATATGATATTGAAAAAAGACAATTTAGGATTAAAAAGAATTTATTGAATACTGTAAGAAAATCTCAACTAACTGAGTTACAAAAATCAATTAACCTTGATCTAGATGGATTCCCAACAGTGTGGCTTGCTATTGATTTATTGATGTTTGGTGACATCGTTTCAATCTTAACAATCATGAGTGAGAAGAACATTAAACAGATTTGTCAATATTACAGTTGTACACCAGAAGAACTTGTTTCGTGGCTTAAATGTTTGAATTTCATAAGAAATGTATGTGCTCATAATTCAAATGTACTGGATATTCAAATCACAACAAAGCCTAAACTTCGTTCAGAATGGAGAAATTATATTGATACAGTAATAATTAAACATAACGTGACTAAACCTTCTAATAAGTTATCCGTTATTATTGCTATTGTAGTCTATCTTGTAAATACTATTAATTCCAAATATCAATGGAGAAATATACAGTCTAGTTTGAAGGCTCTTTGTAAAGAAGATGACAGTAGGGCAAAGCTTTTAGGTTTTAAAGATTATGATTCTGTTAAAGCAATGATTAATGGGATAAAGTGTACTACTTTTACAAATTCAAAAAAA

SEQ ID NO: 5614 - protein, 323 aa, Streptococcus agalactiae
MKQPLALTWEDQIRLLEKRGLIVKADDVEKIKHISYYRIKEFAKPLEIKQQDGEEQDILYDNIEFAEVLARYYQDKNLRIYLLHAIEKIEVSIKTKISFVLGDRYGAFGYLNFSSWANRNKFTKYDIEKRQFRIKKNLLNTVRKSQLTELQKSINLDLDGFPTVWLAIDLLMFGDIVSILTIMSEKNIKQICQYYSCTPEELVSWLKCLNFIRNVCAHNSNVLDIQITTKPKLRSEWRNYIDTVIIKHNVTKPSNKLSVIIAIVVYLVNTINSKYQWRNIQSSLKALCKEDDSRAKLLGFKDYDSVKAMINGIKCTTFTNSKK

SEQ ID NO: 5615 - protein, 198 aa, Streptococcus agalactiae
ATGTCACAAGAAAAACTAAAATCAAAAGTTGAACAAGCATCAGGTAGCCTAAAAGAAGGAGCTGGTAAGCTAACTGGCGATAAAGAGTTAGAGGCAAAAGGTTTTGTCGAAAAAACAATTGCTAAAGGTAAAGAACTAGCAGATGATGCTAAAGATGCTGTTGAAGAGGCAGTAGATGTTGTCAAAGAAAAACTGAAA

SEQ ID NO: 5616 - protein, 66 aa, Streptococcus agalactiae
MSQEKLKSKVEQASGSLKEGAGKLTGDKELEAKGFVEKTIAKGKELADDAKDAVEEAVDVVKEKLK

SEQ ID NO: 5617 - protein, 201 aa, Streptococcus agalactiae
TTGTATTTTACTTTATTAACAAGGATGATTGAAATGGATAAAGAATTAACACCTCAAGAAAAAGCAAATAAAAAGTGGGCAGAAAACAATAGAGAACATAGAACCTATCTATCAAAACGATCTACTGCTCGTAGTTTTATTAACAAAAATGCTACAAAAGAAGACTTATTAGAATTAAAACAATTAATTGAAAGCAAACTC

SEQ ID NO: 5618 - protein, 67 aa, Streptococcus agalactiae; identical to SEQ ID NO: 1140

SEQ ID NO: 5619 - protein, 177 aa, Streptococcus agalactiae
ATGTTATATATAGATGAGTTTAAAGAAGCGATTGATAAAGGCTATATTTCAGGGAACACAGTAGCGATAGTGCGTAAAAACGGAAAGATATTTGATTATGTGTTGCCGCACGAGGAAGTGAGAGATGATGAAGTTGTGACAGTTGAGAGTGTAGAAGAGGTGTTGAGGGAATTGAAG

SEQ ID NO: 5620 - protein, 59 aa, Streptococcus agalactiae
MLYIDEFKEAIDKGYISGNTVAIVRKNGKIFDYVLPHEEVRDDEVVTVESVEEVLRELK

SEQ ID NO: 5621 - protein, 828 aa, Streptococcus agalactiae
TTGATAAAAATTTGTAAAGAAAAATCACAACATCAATCGTATGCAGCGTTATACCTCATCGCTAAAACTGGCATGCGCTTCGCTGAATGTTTAGGTTTAACAGTTAATGATATTGATTACACTAACAAATATTTATCAATTAATAAAACTTGGGATTATCATTTCAACCAAAGATACCTGCCAACAAAAAACAAAAGTAGTATCAGAAATATACCAATTGACAATGATACATTATTTTTTTTGCATGAATTTACAAAAAATAAAAACGACAGATTATTCGACAAACTTTCAAATAATGCAGTCAATAAAACTATCCGAAAAATAACTGGTCGCGAGGTACGAGTGCACTCTCTCAGGCATACATTTGCAAGCTATCTAATTTCCATCTCTCAAGTTTTAGATCACGAGAATTTAAATATCACTTTAGAAGTTTACGCACATCAATTACAAGAACAAAAAGATAGGAACGATAAACTTAATCAGAGAAATTTGGGGCAAAATAGCTCTAAACCGCTATTTACATGCAATGAATATGTCCCCTGCCGGAATCTACTACTATTGTACACAATAGTTCATAATAGTCCAAGCGTTGATTTAATGGTTGTTTATAATAGTAAAAAGTTCAATGTAGTTTCATTTTTAATCTATTTTGCCCCTTTTTTGCACCCTTTCACTTCAATTCCCTCAACACCTCTTCTACACTCTCAACTGTCACAACTTCATCATCTCTCACTTCCTCGTGCGGCAACACATAATCAAATATCTTTCCGTTTTTACGCACTATCGCTACTGTGTTCCCTGAAATATAGCCTTTATCAATCGCTTCTT

SEQ ID NO: 5622 - protein, 276 aa, Streptococcus agalactiae
MIKICKEKSQHQSYAALYLIAKTGMRFAECLGLTVNDIDYTNKYLSINKTWDYHFNQRYLPTKNKSSIRNIPIDNDTLFFLHEFTKNKNDRLFDKLSNNAVNKTIRKITGREVRVHSLRHTFASYLISISQVLDHENLNITLEVYAHQLQEQKDRNDKLNQRNLGQNSSKPLFTCNEYVPCRNLLLLYTIVHNSPSVDLMVVYNSKKFNVVSFLIYFAPFLHPFTSIPSTPLLHSQLSQLHHLSLPRAATHNQISFRFYALSLLCSLKYSLYQSLL

SEQ ID NO: 5623 - protein, 402 aa, Streptococcus agalactiae
TTGATATACTCCACATTAGCTAAAGAACAGGGTGTTCAAGGCTACCTTGATGGAAAAGGCTCTCTTAGAGATATTTGTAAATGGTATGATATCTCAAGTCGCTCTGTTCTCCAAAAGTGGATAAAACGGTATACTAGTGGTGAAGACTTGAAAGCCACTAGTAGAGGATATAGCCGTATGAAACAAGGAAGGCAAGCCACATTTGAAGAACGTGTAGAGATTGTTAACTACACCATTGCCCATGGGAAAGACTATCAAGCAGCTATTGAGAAGTTTGGTGTTTCCTACCAACAAATTTATTCTTGGGTGCGTAAGCTTGAGAAGAATGGCTCACAAGGTTTGGTTGATAGACGTGTGAAAGGGTTGGAGAGTAGGCCTGATTTAACCGAGATTGAGCAACTT

SEQ ID NO: 5624 - protein, 134 aa, Streptococcus agalactiae
MIYSTLAKEQGVQGYLDGKGSLRDICKWYDISSRSVLQKWIKRYTSGEDLKATSRGYSRMKQGRQATFEERVEIVNYTIAHGKDYQAAIEKFGVSYQQIYSWVRKLEKNGSQGLVDRRVKGLESRPDLTEIEQL

SEQ ID NO: 5625 - protein, 198 aa, Streptococcus agalactiae
GTGCCTATTCAGGCCTTATGCCAACTCTTGAAGGGGTCTCGTTCAGGCTATTACAAGTGGCTCAATCGTCAAAAAACAGATTTTGAGACAAAAAATACAAAGCTAATGGCTAAAATCAAGGAACTTCGTAGACTCTACAATGGTATCTTAGGTTATCGCCGTATGACAACATTTATTAATCGTCAACTTGGGACAACT

SEQ ID NO: 5626 - protein, 66 aa, Streptococcus agalactiae
MPIQALCQLLKGSRSGYYKWLNRQKTDFETKNTKLMAKIKELRRLYNGILGYRRMTTFINRQLGTT

SEQ ID NO: 5627 - protein, 258 aa, Streptococcus agalactiae
TTGATGAACATTCTGGGGATTAGTTCAGTCATTCGTCGTGTTAGCCATGCTTGTACAAAAGCTGGTGACAGATTTTACGAAGAAAATATTCTTAATCGTGAATTTACAGCCACAGCTCATAACCAGAAATGGTGCACAGATGTCACCTATCTTCAATACGGTCTGGGAGCTAAAGCTTATCTCAGTGCGATTAAAGACCTGTATAACGGTTCTATTATCGCTTATGAGATTAGTCACAACAATGAAATCCACTTGTTA

SEQ ID NO: 5628 - protein, 86 aa, Streptococcus agalactiae; identical to SEQ ID NO: 1130

SEQ ID NO: 5629 - protein, 207 aa, Streptococcus agalactiae
ATGTCCCGGATTGGCAAATGTATTGATAATGCACCAACTGAAAGTTTCTTTGGGTTTTTCAAGACTGAGTCTTACCACCTTAAGAAATACAACTCTTATGATGAGTTGGTCAATGATGTGGCACGTTATATCGAATTCTACAACACACAACGTTATCAATCAAAATTAAACAACCTGACTCCTCTAGAATTCAGGAATCAGGTTGCA

SEQ ID NO: 5630 - protein, 69 aa, Streptococcus agalactiae
MSRIGKCIDNAPTESFFGFFKTESYHLKKYNSYDELVNDVARYIEFYNTQRYQSKLNNLTPLEFRNQVA

SEQ ID NO: 5631 - protein, 159 aa, Streptococcus agalactiae
TTGGGCGGCATTGGAGCGCATAAATTTTACGCAGGAAAAATAGGCCAGGTTTTTTTATATATTATTTTTAGTATTACCTTTATTCCTGGAATTATCGACCTTATCGAAGCTTTGATGGCTCTCGGAAAACAAACTGATGAATATGGAAATATCATCGTT

SEQ ID NO: 5632 - protein, 53 aa, Streptococcus agalactiae; identical to SEQ ID NO: 1132

SEQ ID NO: 5633 - protein, 1275 aa, Streptococcus agalactiae
GTGATAAAAAATGCTATAGCATATATTACCAGAAAAAAAAATAGAACACTTATTATATTTGCTATTTTAACAATTGTTCTTTCTTGCTTGTATTCATGTTTAACAATAATGAAATCAAGTAATGAAATAGAAAAGGCTTTATATGAAAGTTCTAATTCTTCAATATCAATTACAAAAAAAGATGGTAAATATTTTAATATTAATCAATTTAAGAATATTGAAAAAATAAAAGAGGTTGAAGAAAAAATATTTCAATATGATGGATTAGCAAAATTGAAAGATCTTAAAGTAGTTAGTGGTGAGCAAAGTATAAATAGAGAAGATTTATCTGACGAATTTAAAAATGTTGTTTCACTAGAAGCTACAAGTAATACTAAAAGAAATCTTTTATTTAGTAGTGGAGTATTTAGTTTTAAAGAAGGAAAAAATATAGAAGAAAATGATAAGAATTCAATTCTTGTTCATGAAGAATTTGCTAAACAAAACAAACTAAAATTGGGTGATGAAATTGATCTTGAATTACTAGATACGGAAAAAAGTGGAAAAATAAAAAGTCATAAATTTAAAATTATAGGAATCTTTTCTGGTAAAAAACAGGAAACATATACAGGATTATCATCTGATTTTAGCGAAAATATGGTTTTTGTAGATTATTCAACTAGCCAAGAAATATTAAATAAATCAGAGAATAATAGAATTGCAAATAAAATTTTAATGTATTCTGGTAGTTTAGAATCTACAGAGCTTGCCTTAAACAAATTGAAAGACTTTAAAATTGATAAGTCAAAGTATTCTATTAAGAAAGATAATAAAGCATTCGAAGAGTCTTTAGAGTCAGTGAGTGGAATAAAACATATAATTAAAATAATGACTTATTCGATTATGTTAGGTGGAATAGTTGTTCTTTCATTAATCTTGATTCTATGGTTAAGAGAAAGAATTTATGAAATAGGTATATTTTTATCTATTGGAACAACTAAGATACAAATTATAAGGCAATTTATATTTGAGTTAATATTCATATCAATACCAAGTATAATATCCTCCTTATTTTTAGGGAATCTACTATTAAAAGTAATTGTAGAAGGATTTATTAACTCAGAGAACTCAATGATTTTCGGTGGAAGTTTAATAAATAAAAGCAGTTTTATGTTAAACATAACAACACTTGCAGAAAGTTATTTAATATTAATAAGTATTATTGTTTTATCAGTTGTAATGGCCTCTTCATTAATATTATTTAAGAAACCACAAGAAATATTATCAAAAATAAGT

SEQ ID NO: 5634 - protein, 425 aa, Streptococcus agalactiae
MIKNAIAYITRKKNRTLIIFAILTIVLSCLYSCLTIMKSSNEIEKALYESSNSSISITKKDGKYFNINQFKNIEKIKEVEEKIFQYDGLAKLKDLKVVSGEQSINREDLSDEFKNVVSLEATSNTKRNLLFSSGVFSFKEGKNIEENDKNSILVHEEFAKQNKLKLGDEIDLELLDTEKSGKIKSHKFKIIGIFSGKKQETYTGLSSDFSENMVFVDYSTSQEILNKSENNRIANKILMYSGSLESTELALNKLKDFKIDKSKYSIKKDNKAFEESLESVSGIKHIIKIMTYSIMLGGIVVLSLILILWLRERIYEIGIFLSIGTTKIQIIRQFIFELIFISIPSIISSLFLGNLLLKVIVEGFINSENSMIFGGSLINKSSFMLNITTLAESYLILISIIVLSVVMASSLILFKKPQEILSKIS

SEQ ID NO: 5635 - protein, 654 aa, Streptococcus agalactiae
ATGGATATATTAGAAATAAAGAATGTAAATTACAGTTACGCAAATTCTAAAGAAAAAGTTTTGTCAGGAGTAAATCAAAAATTTGAACTTGGAAAGTTTTATGCGATAGTAGGGAAGTCAGGAACAGGAAAATCCACACTTCTTTCCTTACTTGCAGGACTTGATAAAGTTCAAACAGGAAAAATCTTGTTTAAGAATGAAGATATAGAAAAGAAAGGATATAGTAATCACAGAAAAAATAATATATCTTTGGTATTTCAAAATTATAATTTAATAGATTATTTATCGCCGATTGAAAATATTAGACTAGTAAATAAATCAGTAGATGAGAGTATCTTGTTCGAATTAGGTTTAGATAAAAAACAAATAAAAAGAAATGTTATGAAATTATCTGGTGGTCAGCAACAAAGGGTAGCTATTGCTAGGGCACTGGTATCAGATGCCCCAATAATACTAGCTGATGAGCCTACCGGTAACCTAGACAGTGTTACTGCTGGAGAAATAATTAATATATTAAAGGAATTAGCTCAAGATAGAAATAAATGTGTAATAGTTGTAACACATAGTAAGGAAGTAGCAGATTCTGCGGATATCATTTTAGAACTAAGTGGTAAAAAGTTGAAAAAAGTAAATAAAATGAATTTGGAGGTTGAA

SEQ ID NO: 5636 - protein, 218 aa, Streptococcus agalactiae
MDILEIKNVNYSYANSKEKVLSGVNQKFELGKFYAIVGKSGTGKSTLLSLLAGLDKVQTGKILFKNEDIEKKGYSNHRKNNISLVFQNYNLIDYLSPIENIRLVNKSVDESILFELGLDKKQIKRNVMKLSGGQQQRVAIARALVSDAPIILADEPTGNLDSVTAGEIINILKELAQDRNKCVIVVTHSKEVADSADIILELSGKKLKKVNKMNLEVE

SEQ ID NO: 5637 - protein, 1374 aa, Streptococcus agalactiae
ATGATAAAAAATGCATTTGCTTATGTAACTAGAAAAAGCTTAAAATCATTAATTATTATATTAGTTATTCTATCAATGGCAACTTTAAGCATCATTAGTTTATCTATTAAAGATGCCACAGATAGAGCTTCTAAGGAAACATTTGCTAATATAACAAACAGTTTTTCTATGGAAATAAATAGACAAGTAAATCCAGGAACACCTAGGGGTGGAGGAAATGTAAAAGGTGAAGATATTAAAAAGATATCTCAAACAAACAGTATAGACTCCTATGTAAAAAGAATAAACAGCGTCGCAGACCTAGTTGATCATGATATAATTGAAACTCAAGATACACTTGCAAATCAATCACCTGAAAGAGCAAAGAATTTTAAGAGAACAGTTATGTTAACAGGGGTTAATGACTCAGCAAAAGAAACAAAATTTGTATCAGAAGCATATAAGTTAGTAGAAGGAAAGCATTTAGAAAATAAAGATAAAAATAAAATTTTAATGCATAAAGATTTGGCAAAAAAAAACAATCTCAAAGTTGGAGATAAAATAAAAATAAAATCTAATTTGTTTGATGCTGACAATGAAAAAGTTGCAAATGAAACTGTAGAAGTAGAAATTAAAGGTTTATTTGATGGTCATAATAGCGGTGGGGTAAGTGCAGCACAAGAACTATACGAAAATACACTAATCACTGACGTTCATTCAGCTGCTAAAGTTTATGGTAATACAGAAGATACAGCCGTATACCAAGATGCAACATTCTTTGTAAAAGGTGATAAGAATCTTGATAGTGTAATAAAAGATCTTGGGAAACTAGATATAAATTGGAGAGAATATAATTTGATTAAAAGTTCATCAAATTATCCTGCGCTGCAACAATCTATATCCGGTATCTATTCTATTTCAAACAAATTATTTGTTGGCTCATTAATATTTGCAGGAGTTGTAGTTTCATTATTACTTTTCTTATGGATGAATGCCAGAAAGAAAGAAATAGCAGTATTACTATCATTAGGTATATCTAAATTAGAAATTTTTGGTCAATTTATAATCGAGATGGTATTTATATCCATTCCCGCACTTCTTGGATCTTATTTCTTAGCTCAATATACAGCTGATAAGCTAGGGAATAATATATTGAATAAAGTTACTGGCGATATAGCTAAACAAATAGCTAGACAATCTGCATCTAGTCAATTAGGCGGGGGGGCAGAAGCTGAAGGATTCAACAAGACTCTTTCAGGTTTAGATATAAATGTATTACCTAAATTCATAATTTATGTAGTTATATTTATGAGTTTTGTACTTCTTGTATCATTGATTCTTTCTTCAATTTATACATTAAGAAAGAATCCAAAAGAGTTATTAATTGATAATAAT

SEQ ID NO: 5638 - protein, 458 aa, Streptococcus agalactiae
MIKNAFAYVTRKSLKSLIIILVILSMATLSIISLSIKDATDRASKETFANITNSFSMEINRQVNPGTPRGGGNVKGEDIKKISQTNSIDSYVKRINSVADLVDHDIIETQDTLANQSPERAKNFKRTVMLTGVNDSAKETKFVSEAYKLVEGKHLENKDKNKILMHKDLAKKNNLKVGDKIKIKSNLFDADNEKVANETVEVEIKGLFDGHNSGGVSAAQELYENTLITDVHSAAKVYGNTEDTAVYQDATFFVKGDKNLDSVIKDLGKLDINWREYNLIKSSSNYPALQQSISGIYSISNKLFVGSLIFAGVVVSLLLFLWMNARKKEIAVLLSLGISKLEIFGQFIIEMVFISIPALLGSYFLAQYTADKLGNNILNKVTGDIAKQIARQSASSQLGGGAEAEGFNKTLSGLDINVLPKFIIYVVIFMSFVLLVSLILSSIYTLRKNPKELLIDNN

SEQ ID NO: 5639 - protein, 179 aa, Streptococcus agalactiae
ATGAAAATATTAACTGTTGAAGATGATAAGTTGATAAGAGAGGGAATAAGTGAATACCTTTCAGAATTTGGATATACTGTTATTCAGCTAAAGATGGAAGGGAAGCCTTGTCAAAATTTAATAGTGATATAAACTTGGTTATCTTAGACATTCAGATACCTTTTATAAATGGATTTAGC

SEQ ID NO: 5640 - protein, 60 aa, Streptococcus agalactiae
  VARIANT 29: Xaa = Any Amino Acid
MKILTVEDDKLIREGISEYLSEFGYTVIXAKDGREALSKFNSDINLVILDIQIPFINGFS

SEQ ID NO: 5641 - protein, 165 aa, Streptococcus agalactiae
TTGGCTATCGCTTTTATATTAAATATCAGCTTTTCCGTCCTTGAATTCATCTTTGGAAGTCTATTCTTCTCAGGAGCTATCTTAGCCGATGCTGTTCATGATTTTGGTGATGCAATAGCTATTGGCATCTCAGCTAAATCCATTTATAAAAGGTATCTGAATGTC

SEQ ID NO: 5642 - protein, 55 aa, Streptococcus agalactiae
MAIAFILNISFSVLEFIFGSLFFSGAILADAVHDFGDAIAIGISAKSIYKRYLNV

SEQ ID NO: 5643 - protein, 340 aa, Streptococcus agalactiae
TTGTCAAATTATATTCGAGATGTATTTATATCCATTCCCGCACTTTCTGGTTTCTATTTCTTAGCTCAATATACAGCTGATAAGCTAGGGAATAATATATAATAAAGTTACTGGCGATATAGCTAAACAAATAGCTAGACAATCTGCATCTAGTCAATTAGGCGGGGGGGCAGAAGCTGAAGGATTCAACAAGACTCTTTCAGGTTTAGATATAAATGTATTACCTAAATTCATAATTTATGTAGTTATATTTATGAGTTTTGTACTTCTTGTATCATTGATTCTTTCTTCAATTTATACATTAAGAAAGAATCCAAAAGAGTTATTAATTGATAATAAT

SEQ ID NO: 5644 - protein, 114 aa, Streptococcus agalactiae
MSNYIRDVFISIPALSGFYFLAQYTADKLGNNILNKVTGDIAKQIARQSASSQLGGGAEAEGFNKTLSGLDINVLPKFIIYVVIFMSFVLLVSLILSSIYTLRKNPKELLIDNN

SEQ ID NO: 5645 - protein, 651 aa, Streptococcus agalactiae
ATGAAAATATTAACTGTTGAAGATGATAAGTTGATAAGAGAGGGAATAAGTGAATACCTTTCAGAATTTGGATATACTGTTATTCAGGCTAAAGATGGAAGGGAAGCCTTGTCAAAATTTAATAGTGATATAAACTTGGTTATCTTAGACATTCAGATACCTTTTATAAATGGATTAGAAGTGTTGAAAGAAATTAGAAAGAAAAGCAATTTACCAATTCTAATTTTGACTGCATTTAGTGATGAAGAATATAAAATTGATGCATTTACTAATTTAGTAGATGGATATGTAGAAAAACCATTTTCATTGCCTGTTTTAAAGGCTAGAATAGATTCTTTAATTAAGAAGAATTTTGGACATTTAGAGAAGTTTGAATATAAGAATCTTTCGGTAAATTTTAATAGTTATACAGCTAAAATAAATGATGAAAAAATAGATGTAAATGCAAAAGAACTCGAAATACTAAAATGTTTATTGGATAATGATGGACAAGTTTTAACAAGAATGCAAATTATTGATTATGTCTGGAAGGATAGCGAAGAGATCCCTTATGATCGAGTAGTAGATGTATATATAAAAGAACTTAGAAAAAAATTACAATTAGACTGTATAACTACTATAAGAAATGTAGGATATAAATTGGAGAGAAAA

SEQ ID NO: 5646 - protein, 217 aa, Streptococcus agalactiae; identical to SEQ ID NO: 1146

SEQ ID NO: 5647 - protein, 1317 aa, Streptococcus agalactiae
ATGAAGAAATTAAAAATATTCCCAAAAATGTTCATACAAATATTTTCTATTCTTGGAATACTAATTATATTAGTTCATTCATTATTCTTTTTTATCTTTCCTAAAACATATTTGGAGACGAGGAAAGTAAAAATCCACATTATGGCAGATGAAATTTCTAAAAATATGAATGGAAAAGAGTTAAAATATTTAGACCAAACTTTGGAGCTTTATTCTAAAAGTAGTGACATAAAGGTATTTATAAAAAAAAATAATAACAAAAATGAATTACAAATAAATGATAATATAAATGTTAATGTAAAAAGTGATAGTAATTCTTTAATAATTGAAGAAAGGGAAATTAAACTTCATGATGGCAAAAAAATACATCTTCAATTTGTTTCAACAGCTGATATGCAAAAAGACGCGAAAGACTTGAGCCTTAAGTTTTTACCATATTCTTTATCGATATCATTTCTTTTTTCCATTGTTATTTCTTTAATTTATGCTAAATCTATAAAAAACAATATACAAGAAATAACTATGGTTACTGATAAAATGATAAAACTTGACAAAGAAACAAGATTGAAAATTAGTTCTAATGATGAAATTGGACAACTAAAACAGCAAATCAATGACTTATATTGTGCTTTATTGAATACAATTAATGATTTGGAATTTAAAAATAAGGAAATTTTAAAGTTAGAAAAATTGAAATATGATTTTTTTAAGGGGGCGTCCCACGAACTTAAAACTCCTCTTTCCAGCCTAAAGATATTACTTGAGAATATGAAATATAATATCGGAAAATATAAAGATAGAGACTTTTATATCAGTGAGTGTATTAATATTGTAGATAACTTAACAAAGAATGTCTCGCAAATATTATCTTTTTATTCTATAAAAGACTTGAATAATGATGAAGAATATTTAAATGTTGGTGATACATTAGATGAAGTATTAGAAAAATACTCTATCTTAGTAAATCAAAAAAAAATAAATATTAATAAGGAATTATTAGACTATAATATTTATATAGGAAAAACGGCACTAAATATTGTATTTTCTAATTTGATTAGCAATGCAGTAAAATATACTAATCGAAATGGAATAATTAATATCAAAATAGCTAATGATTGGTTACTTATAGAAAACTCATATGATAAAAATAAAATTTCGAAAATAAATAAAATTTTAGATGCTAGTTTTGATCTAAAATTGGATAATAGTAATGGATTAGGATTAAATATAGTAAAGAATATACTTAATAAGTATAATATAAAGTATGAAATATTACATGGTGAAAATTATTTTATATTTAAAATAAAAATAATCTCT

SEQ ID NO: 5648 - protein, 439 aa, Streptococcus agalactiae
MKKLKIFPKMFIQIFSILGILIILVHSLFFFIFPKTYLETRKVKIHIMADEISKNMNGKELKYLDQTLELYSKSSDIKVFIKKNNNKNELQINDNINVNVKSDSNSLIIEEREIKLHDGKKIHLQFVSTADMQKDAKDLSLKFLPYSLSISFLFSIVISLIYAKSIKNNIQEITMVTDKMIKLDKETRLKISSNDEIGQLKQQINDLYCALLNTINDLEFKNKEILKLEKLKYDFFKGASHELKTPLSSLKILLENMKYNIGKYKDRDFYISECINIVDNLTKNVSQILSFYSIKDLNNDEEYLNVGDTLDEVLEKYSILVNQKKININKELLDYNIYIGKTALNIVFSNLISNAVKYTNRNGIINIKIANDWLLIENSYDKNKISKINKILDASFDLKLDNSNGLGLNIVKNILNKYNIKYEILHGENYFIFKIKIIS

SEQ ID NO: 5649 - protein, 609 aa, Streptococcus agalactiae
ATGAAGGATATGGCGCTCCCTAAAATGGCTACCGTTAAGACAAAAACAGCTCTTAAAAAGACTCAAAAAACGTATCCTCAAAACTTACTCAACCAGAAATTTAATCCTGATAAACCTAATCAAGTATGGTCTACTGACTTCACCTATATTTCTATTGGATATAAGAAATATGTCTATCTCTGCGCAATAATTGATCTCTATTCTAGAAAATATATTGCTTGGAAACTGAGTCATCGTATGGATGCAAAGTTAGCATGTGACACTCTAGAATTAGCTCTTAATAAAAGAAAGATTGAAGGAACACTTCTCTTTCATTCCGACCAAGGGTCACAATTTAAGGCCAGGGAATTTAGAAAAATAATTGATGACAACAATATCATGCATTCTTTTTCTAAACCTAGATATCCTTATGATAATGCCGTAACTGAAGCATTTTTCAAGTATTTAAAGCATAGACAAATCAACCAAAAAAATTATCAAAATATCAAACAGGTTCAATTAGACTGCTTTGAATACATTGAGAATTTTTATAACAATTACATCCCACATACGGCTAATCTAGGACTAACCCCTAATCAGAAAGAAGAAAATTATTTTAACGCAATAAAA

SEQ ID NO: 5650 - protein, 203 aa, Streptococcus agalactiae
MKDMALPKMATVKTKTALKKTQKTYPQNLLNQKFNPDKPNQVWSTDFTYISIGYKKYVYLCAIIDLYSRKYIAWKLSHRMDAKLACDTLELALNKRKIEGTLLFHSDQGSQFKAREFRKIIDDNNIMHSFSKPRYPYDNAVTEAFFKYLKHRQINQKNYQNIKQVQLDCFEYIENFYNNYIPHTANLGLTPNQKEENYFNAIK

SEQ ID NO: 5651 - protein, 198 aa, Streptococcus agalactiae
ATGTCACAAGAAAAACTAAAATCAAAATTAGATCAAGCAAAAGGTGGTGCTAAAGAAGGCTTTGGCAAAATAACCGGTGATAAAGAGTTAGAAGCAAAAGGATTTATCGAAAAAACAATTGCTAAAGGCAAAGAACTAGCAGATGATGCTAAAGATGCTGTTGAAGGGGCAGTAGATGCTGTCAAAGAAAAACTGAAG

SEQ ID NO: 5652 - protein, 66 aa, Streptococcus agalactiae
MSQEKLKSKLDQAKGGAKEGFGKITGDKELEAKGFIEKTIAKGKELADDAKDAVEGAVDAVKEKLK

SEQ ID NO: 5653 - protein, 186 aa, Streptococcus agalactiae
TTGTCTATCAGAACAGATATAGATGAGTTTAAAGAAGCGATTGATAAAGGCTATATTTCAGGGAACACAGTAGCGATAGTGCGTAAAAACGGAAAGATATTTGATTATGTGTTACTACACGAAGAAGTGAGAGAAGAAGAGGTTGTTACAGTTGAGAGAGTGCTTGATGTACTGAGGAAGTTATCA

SEQ ID NO: 5654 - protein, 62 aa, Streptococcus agalactiae
MSIRTDIDEFKEAIDKGYISGNTVAIVRKNGKIFDYVLLHEEVREEEVVTVERVLDVLRKLS

SEQ ID NO: 5655 - protein, 1203 aa, Streptococcus agalactiae
ATGTCACAAAAATCAAACTATTTTAAAGGGCAAATTGATTATGCTGTTGTGATACCAGTATTTTTTTTATTAATGATTGGTTTAGCCTCAATTTATGTTGCAACGATGAATGATTATCCTTCTAATATCTATATCGCGATGTTTCAGCAGGTGTCTTGGATTATTATGGGGTGTATTATTGCATTTGTCGTTATGCTTTTCAGTACTGAATTTTTATGGAAAGCCACGCCCTATCTGTATGCTTTAGGACTAACCCTAATGGTTCTTCCCTTAATTTTTTATAGTCCACAGCTTTTTGCGGCAACAGGTGCTAAAAATTGGGTGACCATTGGCTCGGTAACTTTGTTTCAACCGTCAGAGTTTATGAAGATTTCCTATATTTTAATGTTATCTCGAATAACTGTTAGTTTTCATCAGAAAAATCGCAAAACTTTTCAAGATGATTGGAAGTTGCTAGGATTGTTTGGTTTGGTTACATTGCCAGTGATGATTCTTCTAATGTTACAAAAAGATTTAGGAACAGCATTAGTTTTCCTTGCCATTTTGTCAGGTTTAATCCTTTTATCGGGCATATCTTGGTGGATAATCTTGCCAATTTTATCTACTATCGTTCTTTTTATAGCTAGCTTTTTGATGATTTTTATCTCACCAAACGGCAAGGAATGGTTTTATAATTTGGGGATGGATACATATCAAATCAACCGTTTATCTGCTTGGATTGATCCATTTAGTTTTGCAGACTCAATTGCTTATCAACAAACACAGGGTATGGTATCAATTGGAAGTGGCGGGTTAACAGGTAAAGGTTTTAATATTTTAGAGCTCTCGGTTCCTGTTCGTGAAAGTGACATGATTTTTACTGTCATTGCTGAGAATTTTGGCTTCATTGGTTCGGCGATTGTTTTAGGGTTATATCTCATTATCATTTACCGTATGTTAAGGATCACCATTGAATCTAATAATCAATTTTATACTTTTATATCAACTGGTTTTATCATGATGATTGTTTTCCATGTTTTTGAAAATATTGGTGCAGCAGTTGGTATATTACCTCTAACAGGAATCCCACTTCCGTTTATTTCGCAAGGTGGAAGTTCATTACTAAGTAATCTTATTGGAATTGGATTGGTCTTATCCATGTCTTATCAAAATACAGTTCGTCAGGCCAAGGCTAATGGATCACATTTGAAGTATCGTAGTATA

SEQ ID NO: 5656 - protein, 401 aa, Streptococcus agalactiae
MSQKSNYFKGQIDYAVVIPVFFLLMIGLASIYVATMNDYPSNIYIAMFQQVSWIIMGCIIAFVVMLFSTEFLWKATPYLYALGLTLMVLPLIFYSPQLFAATGAKNWVTIGSVTLFQPSEFMKISYILMLSRITVSFHQKNRKTFQDDWKLLGLFGLVTLPVMILLMLQKDLGTALVFLAILSGLILLSGISWWIILPILSTIVLFIASFLMIFISPNGKEWFYNLGMDTYQINRLSAWIDPFSFADSIAYQQTQGMVSIGSGGLTGKGFNILELSVPVRESDMIFTVIAENFGFIGSAIVLGLYLIIIYRMLRITIESNNQFYTFISTGFIMMIVFHVFENIGAAVGILPLTGIPLPFISQGGSSLLSNLIGIGLVLSMSYQNTVRQAKANGSHLKYRSI

SEQ ID NO: 5657 - protein, 558 aa, Streptococcus agalactiae
ATGAATTATCATGATTATATTTGGGATTTGGGTGGTACACTACTTGATAATTACGAAAGTTCCACACGTGCTTTTGTAGAGACTTTGAAAGAATTTGGATATCAAGCAGACCACGATAGTGTGTATCAAAAATTAAAAGAGTCAACAGCAGATGCAATTGCATATTTTATCCCTGAAGAAGCTGATTTTTTAAAAGAGTATAAGGCTAATGAAGCTAAGGTTTTGGAAACACCAATTCTATTCCAAGGGGCAAAAGAACTTTTAGCGAAAATTCAAAGACAAGGTAGTCGTAATTTTTTGGTGTCTCATCGTGATAATCAAGTTATAGTTATTCTGGAAAAAACAGAAATTATTGACTATTTTACAGAAGTAGTGACTGCTGATAACGGCTTTTCAAGGAAACCTAGTCCCGAGAGTATGCTTTATTTGAAAGAAAAATACCAAATTGATAATTGTTTAGTAATAGGCGATCGTGATATAGATAAGCAAGCAGGAGAATCGGCTGGTTTTGATACCTTATTAGTCGATGGGTCAAAATCATTGATGGAGATAATAGAG

SEQ ID NO: 5658 - protein, 186 aa, Streptococcus agalactiae; identical to SEQ ID NO: 1154

SEQ ID NO: 5659 - protein, 1729 aa, Streptococcus agalactiae
ATGCGTCCAGGCATGTATATCGGTTCGACTTCGAAAGAAGGGCTTCATCACCTTGTATGGGAAATTGTTGATAACTCAATTGATGAAGCCTTAGCTGGATTTGCAGGACATATTAAAGTTTACATTGAACCAGATAATTCTATTACAGTTGTTGATGATGGTCGCGGTATTCCGGTAGATATCCAAGAAAAAACTGGAAGACCAGCTGTAGAGACAGTTTTTACAGTTCTCCATGCCGGTGGTAAATTTGGTGGTGGCGGATACAAGGTTTCTGGTGGCTTACATGGTGTAGGGTCATCTGTTGTTAATGCATTGTCAACACAATTAGATGTCAAGGTTTATAAAAATGGCAAGATTCATTATCAAGAATACCAACGCGGTGTTGTTGTTAATGATCTTGAAATTATCGGTGATACTGACTTATCAGGAACAACAGTTCACTTTACGCCTGACCCAGAAATTTTCACTGAAACCACTGTATTTGATTTTGATAAATTAGCCAAACGTATTCAGGAATTAGCTTTTTTAAATCGTGGACTAAGAATCTCCATTTCAGACAAGCGAGAAGGTCAAGAAGTTGAAAAAGAATATCACTATGAAGGTGGTATAGGTTCATACGTTGAGTTTATCAATGAGAACAAAGAAGTGATTTTTGAAAATCCTATTTATACTGACGGTGAATTAGATGGTATTTCAGTTGAAGTAGCAATGCAGTATACTACTGGATATCAAGAGACTGTTATGAGTTTTGCAAATAACATCCACACTCATGAAGGAGGAACGCACGAACAAGGATTTCGTACTGCCTTGACACGTGTGATTAATGATTACGCTAAAAAGAATAAGATTCTCAAAGAAAATGAAGATAATTTAACTGGAGAAGATGTTCGTGAAGGTTTAACAGCAGTTATATCTGTTAAACATCCAAATCCACAATTTGAAGGACAAACTAAAACAAAACTTGGAAATTCTGAAGTTGTTAAAATTACAAATCGTCTCTTTAGCGAAGCATTCAATCGATTCCTATTAGAAAATCCACAAGTAGCTAAGAAGATTGTTGAAAAAGGAATTTTGGCATCTAAAGCCCGTATTGCAGCAAAACGGGCGCGTGAAGTAACACGTAAAAAGTCAGGCTTAGAGATTTCAAACTTACCTGGGAAACTGGCTGATTGCTCATCTAATAATGCTGAGATGAATGAACTTTTTATAGTGGAGGGAGATTCTGCGGGAGGGTCTGCAAAATCAGGACGTAATCGTGAGTTTCAAGCAATTTTACCGATTAGGGGTAAGATTCTAAACGTTGAAAAAGCTACAATGGATAAAATTTTAGCAAACGAAGAAATCCGAAGTCTCTTCACAGCTATGGGAACTGGATTTGGTGCAGATTTTGATGTATCAAAAGTCAGATATCAAAAATTAGTCATTATGACTGATGCCGATGTTGATGGAGCTCACATCAGAACTTTACTTTTAACTCTGATTTATCGTTTTATGCGACCTGTTTTGGAAGCAGGATATGTTTATATCGCTCAACCACCAATCTATGGTGTCAAAGTAGGAAGTGAGATTAAAGCTTATATTCAGCCAGGGGTCAATCAAGAAGAGGAATTACGTCAAGCTCTAGATACCTATAGTTCAGGACGTTCAAAACCTACTGTACAACGTTACAAAGGTCTAGGTGAGATGGATGACCATCACTTTGGGAAACACAATGGATCCTGAAACCGCT

SEQ ID NO: 5660 - protein, 577 aa, Streptococcus agalactiae
  VARIANT 566, 571: Xaa = Any Amino Acid
MRPGMYIGSTSKEGLHHLVWEIVDNSIDEALAGFAGHIKVYIEPDNSITVVDDGRGIPVDIQEKTGRPAVETVFTVLHAGGKFGGGGYKVSGGLHGVGSSVVNALSTQLDVKVYKNGKIHYQEYQRGVVVNDLEIIGDTDLSGTTVHFTPDPEIFTETTVFDFDKLAKRIQELAFLNRGLRISISDKREGQEVEKEYHYEGGIGSYVEFINENKEVIFENPIYTDGELDGISVEVAMQYTTGYQETVMSFANNIHTHEGGTHEQGFRTALTRVINDYAKKNKILKENEDNLTGEDVREGLTAVISVKHPNPQFEGQTKTKLGNSEVVKITNRLFSEAFNRFLLENPQVAKKIVEKGILASKARIAAKRAREVTRKKSGLEISNLPGKLADCSSNNAEMNELFIVEGDSAGGSAKSGRNREFQAILPIRGKILNVEKATMDKILANEEIRSLFTAMGTGFGADFDVSKVRYQKLVIMTDADVDGAHIRTLLLTLIYRFMRPVLEAGYVYIAQPPIYGVKVGSEIKAYIQPGVNQEEELRQALDTYSSGRSKPTVQRYKGLGEMDDHXLWETXMDPETA

SEQ ID NO: 5661 - protein, 129 aa, Streptococcus agalactiae
TTGATGGCACGTGTCTCAGTTGATGATGCAGCAGAAGCAGATAAGATTTTCGATATGCTAATGGGAGATCGAGTAGAACCACGACGTGAATTCATTGAAGCTAATGCTGTTTATAGTAACTTAGATATC

SEQ ID NO: 5662 - protein, 43 aa, Streptococcus agalactiae
MMARVSVDDAAEADKIFDMLMGDRVEPRREFIEANAVYSNLDI

SEQ ID NO: 5663 - protein, 1722 aa, Streptococcus agalactiae
ATGTCGAGCGGAATCATATTGCTGCTTGTGGCTATAGTCCTGCTTGTGATTATTGCCTACGTAGTCGGCGTCGTAATAAGAAAACGTAATGATACATTAATTGCAAACTTAGAAACTAGAAAACAAGAGTTAGTTGACCTTCCTGTGCAAGAGGAGATTGAGCAAGTCAAATTGCTTCATTTGATTGGCCAAAGTCAATCAACTTTTAGAGAATGGAACCAAAAATGGACTGATTTATCAACTAATTCATTTAAAGATATTGATTTTCATTTAGTTGAAGCTGAAAATCTTAATGATTCATTTAATTTTGTGCGTGCTAAGCACGAGATTGATAATGTTGATAGTCAGCTAACTATTATAGAAGAAGATATTGTTTCGATTCGTGAAGCTTTAGAAGTTTTAAAAGAGCAAGAAGAGAAAAATAGTGCCCGTGTAACACATGCTTTGGACCTATACGAAACACTTCAAAAATCAATTTCTGAAAAAGAAGATAATTACGGGACAACCATGCCAGAAATTGAAAAGCAGTTGAAAAATATCGAGGCTGAATTTTCACATTTTGTGACCTTAAACTCAACTGGTGACCCGATTGAAGCTTCTGAAGTTTTGAATAAAGCAGAGGAGCATACGATTGCTTTAGGGCAAATTACAGAACAAATTCCAGCTATTGTTGCTAAATTAGAAGACGATTTTCCAGATCAGTTAGATGATTTGGAGACAGGATATCGTCGTCTTTTAGAGGAAAACTACCATTTCCCTGAAAAGGATATTGAACAACGTTTTCAAGAAGTTCGTGAGGCTATTCGTTCGAATTCAGATGGTTTAGTTAGTTTGGATCTAGATCGTGCTCGCGATGAAAATGAACATATTCAAGAAAAAATTGATAAACTTTATGATATTTTTGAACGTGAGATTGCTGCTTATAAAGTAGCTCATAAGGATAGTAAAATTATTCCTCAATTCCTTGCTCATGCAAAATCTAACAATGAACAACTGGGGCATGAAATCAAACGATTATCTGCTAAATATATCTTAAATGAAAATGAAAGCTTAAGTTTACGTTCCTTCACAAATGATTTGGAAGAAATTGAAACAAAGGTTTTACCTTCTGTAGAAAATTTTGGTCAAGAAGCTTCACCTTATACTCATCTACAAATTTTATTTGAGCGTACGTTGAAAACATTGACTACTGTTGAAGAAAATCAAATGGAAGTTTTTGAAGCCGTTAAAACTATTGAAAGCGTTGAGACACGAGCACGCCAAAATATGGATAAGTATGTTAACAAGCTCCATATGATTAAACGTTTCATGGAAAAACGCAATCTTCCAGGAATCCCGCAAGACTTCTTAAGCACTTTCTTTACAACAAGTTCTCAAATTGAGGCACTTATTAATGAACTCAGTCGCGGTCGTATTGATATTGAGGCTGTTTCACGTTTAAATGATGTGACTACAAATGCTATCGCTAATTTAGAGCAAGCTACATATCTAGTTGTTCAAGATGCGACTCTCACAGAGCAGTTACTACAGTATTCAAACCGTTATCGTAGTTTTGAACAAAATGTGCAAAAGAGCTTTGAACAAGCTTTGTACTTATTTGAAGTTGAACATAACTATAAAGCATCTTTCGATGAAATTTCATACGCACTTGAGACTGTGGAACCAGGTGTAACTGACCGTTTTGTGACGTCTTATGAAAAGACACAAGAACGTATTCGTTTC

SEQ ID NO: 5664 - protein, 574 aa, Streptococcus agalactiae; identical to SEQ ID NO: 1160

SEQ ID NO: 5665 - protein, 639 aa, Streptococcus agalactiae
ATGATTAAAGGTTTGTTAGTCATGGACGTTGATTCAACCTTAATAATGGAAGAAGCTATTGATTTATTAGCTATTGAAGCAGGGGTGGGGAAACAGGTTGCTGCACTGACTGACGCTGCAATGCGTGGCGAGTTAGATTTTGAAGAAGCTTTGAAGAAAAGAGTAGCGCTACTTAAAGGTTTGCCTGTTACTATTTTGACAGATATATTATCCTCAATACATTTTACTCCAGGGGCTTATGAATTGATTAAAGAGTGTCACAAGCGTCAGATGAAAGTTGGTCTTGTATCAGGAGGTTTTCACGAGACGATTGATATCTTAGCTAAGCAATTACAAGTTGATTATGTCAAAGCGAATCGTCTTGGTGTCAAAGGTGGTTTTCTCACTGGCGAAGTTGAGGGAGAGATTGTCACTAAAGAAGTGAAAAAAATAAAGTTAAAAGAGTGGGCTTCTGAAAATCACTTAGACCTTTCACAAACCATCGCAATGGGAGATGGTGCCAATGATTTACCAATGATCAAATCCGCTGGGGTAGGAATTGCTTTTTGTGCAAAACCAATTGTCAGAGAAGAAGCTGCGTATCAGATTAATGAAAAAAATTTGCTTAAGGTATTTGATATTATTGATGCAAATGAAAAC

SEQ ID NO: 5666 - protein, 213 aa, Streptococcus agalactiae; identical to SEQ ID NO: 1162

SEQ ID NO: 5667 - protein, 483 aa, Streptococcus agalactiae
ATGGAAATTTGGGATGCTTATGACCAATATGGGTTCATTACAGGTCTTACACTTAATAGGGATCAAAATATCCCACAAGGCTTATTCCACTTAGTTGTTGATGTTATCCTTTTTCATGAGGATGGTGACGTATTGATGATGAAACGGCACCCTAAAAAGAAAGCTTTTCCTGCTTATTTCGAAGCCACCGCTGGCGGATCTGCCCTTAAAGGAGAAAATGCTAAGCAAGCTATTCTAAGGGAACTCAAAGAAGAAACTGGTATCGTTCCTCAATGTCTAACCTTTCTTAATAGAGAGTGGTTCTCTGAGCGTTCTTACTTTGTAGACCATTTTATCGCAAAATACAATGGTGCAAAAGATATAATTACATTGCAAGAAGGAGAGACCGTTGACTATATCTGGTTAAAACCAGAATATATTGATTTATTTTTATCTAAAAACAAATTAATACCCTCTCAAATAAAACTCTTAAAATCCTTAATC

SEQ ID NO: 5668 - protein, 161 aa, Streptococcus agalactiae; identical to SEQ ID NO: 1164

SEQ ID NO: 5669 - protein, 453 aa, Streptococcus agalactiae
ATGACTGAACTTGACAATAAAATCCTACAAAAAGCAAGCGGTGAAAATCGTCTTGATCCTGATCAACAACGTTACTACCTTGGTACTTATAAAGAAAGAGTTGTGCTCCACTTAAGTTTAAAAGAGGCACAAGAAGAAAAGTTTCAACTTGCTATAACATCTGCTCTTAATAATCTGATACTTGAATATCCTAATCTTAGTTTAAAATTATCACCAAATCTCCCTACTGATGTTCAAATGTTCTACATGAAGTTAGCTAACCGTCTATCACTAGCTGCTACGATTGTTAATGAAGCAAATGCCAATTCTCCATTTGGTATTATTATACATAGTGATAAGGCTGAAAACGTTGAATGGAACGATTTTGAGACACAATTCCCTGATTTATTCAATTCACCAAAAAAAGAGGAGTCTCCTAAAAAAAGTCTATGGCAACATTTCTTTAGTCAAAAA

SEQ ID NO: 5670 - protein, 151 aa, Streptococcus agalactiae; identical to SEQ ID NO: 1166

SEQ ID NO: 5671 - protein, 1304 aa, Streptococcus agalactiae
ATGTCAATTATTACTGATGTTTACGCACGCGAAGTCCTTGACTCACGCGGTAACCCAACACTTGAAGTAGAAGTTTATACAGAATCAGGTGCTTTCGGACGTGGTATGGTTCCTTCAGGAGCTTCTACTGGTGAACACGAAGCAGTTGAACTTCGCGACGGCGACAAGTCTCGTTACAGTGGTCTTGGAACACAAAAAGCTGTTGACAATGTAAATAACGTTATTGCAGAAGCAATCATTGGTTATGATGTACGCGACCAACAAGCTATCGACCGTGCTATGATCGCTCTTGACGGAACTCCTAATAAAGGTAAATTAGGTGCAAATGCTATTCTTGGTGTTTCTATTGCCGTAGCACGTGCTGCAGCTGATTACCTTGAAGTACCACTTTACAGCTACCTTGGTGGATTCAACACTAAAGTTCTTCCAACTCCAATGATGAACATCATCAACGGTGGTTCTCACTCAGACGCTCCAATCGCATTCCAAGAATTCATGATTATGCCAGTTGGTGCACCAACTTTCAAAGAAGCACTTCGTTGGGGTGCTGAAGTATTCCATGCTCTTAAGAAAATCCTTAAAGAACGTGGTCTTGAAACAGCTGTTGGTGATGAAGGTGGATTTGCACCTAAATTTGAAGGTACTGAAGATGGCGTAGAAACTATTCTTAAAGCTATTGAAGCTGCTGGTTACGAAGCTGGCGAAAACGGAATCATGATTGGTTTTGACTGTGCTTCATCAGAGTTCTACGATGCAGAACGTAAAGTATACGACTACAGTAAATTCGAAGGTGAAGGTGGAGCAGTTCGTACTGCTGCAGAACAAATCGATTACCTTAAGAGTTGGTTAACAAATACCCAATCATCACTATTGAAGATGGTATGGATGAAAACGACTGGGATGGTTGGAAAGCTCTTACAGAACGCCTTGGTGGACGTGTACAATTAGTTGGTGACGATTTCTTCGTTACAAATACTGATTACTTAGCACGTGGTATCAAAGAAGAAGCTGCTAACTCAATCCTTATCAAAGTTAACCAAATCGGTACTTTGACAGAAACTTTCGAAGCTATTGAAATGGCTAAAGAAGCTGGTTACACTGCAGTTGTATCACACCGTTCAGGTGAAACTGAAGATTCAACAATCGCTGATATCGCAGTTGCAACTAACGCTGGTCAAATTAAAACAGGTTCATTATCACGTACTGACCGTATTGCTAAATACAACCAATTACTTCGTATCGAAGACCAACTTGGTGAAGTTGCTCAATACAAAGGTATCAAATCATTCTACAACTTAAAAAAA

SEQ ID NO: 5672 - protein, 435 aa, Streptococcus agalactiae
MSIITDVYAREVLDSRGNPTLEVEVYTESGAFGRGMVPSGASTGEHEAVELRDGDKSRYSGLGTQKAVDNVNNVIAEAIIGYDVRDQQAIDRAMIALDGTPNKGKLGANAILGVSIAVARAAADYLEVPLYSYLGGFNTKVLPTPMMNIINGGSHSDAPIAFQEFMIMPVGAPTFKEALRWGAEVFHALKKILKERGLETAVGDEGGFAPKFEGTEDGVETILKAIEAAGYEAGENGIMIGFDCASSEFYDAERKVYDYSKFEGEGGAVRTAAEQIDYLEELVNKYPIITIEDGMDENDWDGWKALTERLGGRVQLVGDDFFVTNTDYLARGIKEEAANSILIKVNQIGTLTETFEAIEMAKEAGYTAVVSHRSGETEDSTIADIAVATNAGQIKTGSLSRTDRIAKYNQLLRIEDQLGEVAQYKGIKSFYNLKK

SEQ ID NO: 5673 - protein, 1062 aa, Streptococcus agalactiae
ATGAAAAGAAAACAGTTTATAAAATTAGGAATTGCAACCTTACTAACGGTTATTTCGCTTTACACACCAATAAACCTAGCTACAAATCATACCACAGAAAATATTGTTACTGCTCAAGAGTATAAAACAAAAGAGAATGGTACTTTACCTTTTAAACACAAACGACAATTGGTTTTAGGAGAGTTGGATGACAAAGGTCGTGCCACATTCGCACATATTCAGCTAAAAGTTAAAGATGAACCCAAGAAAAAGAGAGTAAAACGTTTAAAAACAACCCCTGTTGGATGGCACAATTTTAAATTCTATTATAATGATGGTACTCAAAAAGCTTGGCTAATGAGCCGAGGCCGTCTTATTTGCCACCAATTTAGTGGACTAAACAATGAAAGAAAGAATTTAGTTCCAATGACGAATTGGCTAAATACTGGAAACTACAATAGCACGAATTCATCTAACCCTGAGAGCATGCTATTCTATGAAAAACAACTAAAGACTTGGCTTTCGACTCATAAAAACTACTACTTAGATTATAAAGTAACACCAATTTATCAAAATAATGAACTAATTCCAAGAAAAATTGAATTAAAATATGTTGGTATTGATAAGACTGGGAAATTATTACCTATTTTTATCGGAAACAAATCCACTCAAGATCAATTCGGCATCAGCACTGTTACCTTAGAGAATACCTCACCAAATGCTACCATTGACTACCTCAGCGGAAAGGCTCAAAATACTGTCTTATCAGCTAAAGAACAAAGAAAACTTATCGCTAAGCACGAAGAAGAAAAACGACTTGCAGAAAAGAAAGTTGAAGAGGAAAAAGCTGCTGCTGAAACTCAGAAAAAACTGGAAGAAGAACAAGCAAGGCTTGCTGCTGAAGCTCAAAGGAAGCAAAAAGAGGAGCAAGCAAGGCTCGCAGCTGAAACTCAGAAAAAACAAGAAACTCTAGTACAAGAACAAACTAGTCAAGGCTACAAACGTGACTATAGAGGAAGGTGGCATCGTCCAAATGGACAATACGCTTCAAAAGCAGAAATCGCTGCTGCTGGATTGCAATGG

SEQ ID NO: 5674 - protein, 354 aa, Streptococcus agalactiae; identical to SEQ ID NO: 1170

SEQ ID NO: 5675 - protein, 1281 aa, Streptococcus agalactiae
ATGAAATTACTGACTAATGCAAATACTCTCAAGGGAACCATCCGTGTTCCTGGCGATAAATCAATAAGTCACAGGGCTATTATTTTTGGGAGTATATCTCAGGGAGTTACCCGAATTGTTGATGTCTTAAGAGGCGAGGATGTTTTATCAACTATAGAGGCTTTTAAACAAATGGGGGTTCTAATTGAAGACGATGGCGAGATAATCACTATCTATGGCAAAGGATTTGCAGGTTTAACACAACCGAATAATCTCTTAGACATGGGAAACTCTGGTACTTCAATGCGTCTGATAGCAGGTGTGTTAGCTGGTCAAGAGTTTGAAGTGACGATGGTTGGAGACAATAGTTTGTCAAAGAGACCTATGGATCGTATAGCATTGCCTTTAAGCAAAATGGGAGCTAGAATTTCGGGAGTAACTAACCGTGATTTACCACCATTAAAACTTCAAGGTACAAAAAAATTAAAACCTATTTTTTACCATTTACCCGTAGCTTCTGCACAAGTAAAATCAGCTTTAATTTTTGCGGCTTTACAAACTAAGGGAGAATCTCTCATTGTAGAAAAAGAGCAAACAAGGAATCATACTGAGGACATGATTCGGCAATTTGGTGGACATTTGGATATTAAAGATAAAGAAATTCGACTCAATGGCGGTCAGAGCTTAGTAGGACAAGATATAAGAGTTCCTGGTGATATTTCGAGTGCTGCCTTTTGGATAGTAGCGGGTCTTATTATTCCTAACAGTCATATTATTTTAGAAAACGTAGGTATAAACGAGACACGAACTGGAATCCTTGATGTCGTCAGTAAAATGGGTGGAAAAATTAAGTTATCTTCGGTTGATAATCAAGTAAAATCAGCAACCCTTACAGTTGATTACTCTCATCTACAAGCTACTCATATTTCTGGGGCTATGATTCCACGTCTGATTGATGAATTACCTATTATTGCTCTTTTAGCAACACAAGCTCAAGGCACCACAGTCATAGCAGATGCTCAGGAATTAAAGGTGAAAGAGACAGATCGGATTCAGGTCGTTGTCGAATCGCTAAAACAGATGGGTGCTGATATTACTGCTACAGCAGATGGTATGATTATACGTGGTAATACCCCTCTTCACGCTGCTTCACTTGATTGTCATGGAGATCATAGAATAGGAATGATGATAGCTATTGCTGCTCTCTTGGTCAAAGAAGGCGAAGTAGATTTATCTGGTGAAGAAGCTATTAATACAAGCTATCCTAACTTTTTAGAACATTTGGAGGGATTAGTTAATGCC

SEQ ID NO: 5676 - protein, 427 aa, Streptococcus agalactiae; identical to SEQ ID NO: 1172

SEQ ID NO: 5677 - protein, 510 aa, Streptococcus agalactiae
ATGCCTAAGGTATTATTGGGATTCATGGGAGTTGGCAAGACTAGTGTTGCCAACTGCTTAGAAAATGAAGTAATTGATATGGATAGTCTGATTGAAAAACATATTGGTATGTCAATTTCCCGATTTTTTACAGAAGAAGGAGAAGCCTCCTTTCGTGCTTTAGAATCTCAATTTTTAAACGAACTTTTAAAGAAAAAAAATGAAGGACTTGTGATAGCTAGTGGAGGAGGTATTGTACTCCTTGAAGAAAATCGTCGTCTTTTAACTTTAAATCGTCATAATAATATTCTTTTAACAGGAAGTTTTGAAGTCTTATATCATCGTATAAAAAAAGATGAGAAGAATAGAAGACCATTATTTTTAAACCATTCAAAAGAAGAATTTTATGATATTTATCAAAAACGCATGTTACTCTATAGTGGTTTGTCTGATATGATTATTGATACCGATTATCTTACACCACAAAAAATAGCTACTGTAATTGGAGAGTCACTGGTTAATTTATCTAAC

SEQ ID NO: 5678 - protein, 170 aa, Streptococcus agalactiae
MPKVLLGFMGVGKTSVANCLENEVIDMDSLIEKHIGMSISRFFTEEGEASFRALESQFLNELLKKKNEGLVIASGGGIVLLEENRRLLTLNRHNNILLTGSFEVLYHRIKKDEKNRRPLFLNHSKEEFYDIYQKRMLLYSGLSDMIIDTDYLTPQKIATVIGESLVNLSN

SEQ ID NO: 5679 - protein, 1378 aa, Streptococcus agalactiae
ATGTCAAGAAATAATTACGGTCAGCTAAATCATCATGAAGAGCTACGATATAACTATCTTTTAAAAAACATCCATTATCTTAATGAACGTGAAAAGATGGAATTTCAGTACCTTCATTATAAAAAAACAGCAGTACGACCACAGAGAAGGACAGAAAGTCCACCAACTAATTCTTATTATGAGGAACCTTATTCTGATTCTTATTATCAAGATGACGATTTTTACTCAGAGCCTCAGCTAACCTCACAAGGTTTACCAATTTATCAAGAAGAGAGAGCTCCGAAGAAGAAAAAACAAAGGGCCAGAAAAGAAAAACAGAGGGTGAAGGTTATGGCGCCTTTCCCTCCAAAGGCTATAACCCCCCCTAGAAAGAAAAAAAAATTTAAGGGTTTCCTAAAGTTCATAGGTATTATATTACTAATTGTTTTATCAGGTATGGTTTTCATGTTTGTTAAAGGAATGCGTGATGTGAATAATGGGAAGTCACATTATAGCCCTGCAATTATTGAAGATTTTAAGGGAAAAGATGCTGTTGATGGGACTAATATCTTAATTTTAGGTAGTGATAAACGTATCAGCGAGAGATCTACTGATGCGAGAACAGATACCATAATGGTTGCTAATGTTGGTAACAAGGATAATAAGGTTAAGATGGTGAGTTTTATGCGAGATCTCTTAGTCAATATTCCTAATTATAGTACGGAAGGTTACTATGATATGAAATTAAATGCGTCTTTTAATTTGGGAGAACAAGATAATCATAAAGGAGCAGAGTATGTTCGACAAACGTTGAAAAATCATTTTGATATTGATATAAAATATTATGTTATGGTTGACTTTGAGACATTTGCAGATGCTATTGATACACTGTTTCCTAATGGTGTCAAGATTAATGCTAAATTTGGACTTGTCGGTGGACAATCTGCTGATTCAGTTAAAGTTCCTGATGATTTAAGGATGAAAAATGGCGTTGTACCTAGCCAAAAAATTAAGGTTGGGATTCAGTATATGGATGGAAGGACCCTTCTAAATTATGCTCGTTTCAGAAAAGACGATGATGGGGACTTTGGTCGAACACAACGTCAACAACAAGTTATGAGAGCTATTGTCTCTCAAATAAAAGACCCACGTCGTCTCTTTACAGGTTCTGCTGCTATCGGTAAAGCCTATGCTTTAACTTCAAGTAATTTATCTTATAGCTTTGTCCTAACAGATGGCATTCCAATTTTATCAGATGCTAAAAATGGTATTAAGCAAATGACAATTCAAGAGAAGGAGATTGGGTAGATGATTATGACCAGTATGGTGGTCAAGGGTTAACAATTGATTTTGCTAGTACAAAAAGATCCCTAAGAAATGGGACTGCGGTAACATTTTT

SEQ ID NO: 5680 - protein, 460 aa, Streptococcus agalactiae
  VARIANT 446: Xaa = Any Amino Acid
MSRNNYGQLNHHEELRYNYLLKNIHYLNEREKMEFQYLHYKKTAVRPQRRTESPPTNSYYEEPYSDSYYQDDDFYSEPQLTSQGLPIYQEERAPKKKKQRARKEKQRVKVMAPFPPKAITPPRKKKKFKGFLKFIGIILLIVLSGMVFMFVKGMRDVNNGKSHYSPAIIEDFKGKDAVDGTNILILGSDKRISERSTDARTDTIMVANVGNKDNKVKMVSFMRDLLVNIPNYSTEGYYDMKLNASFNLGEQDNHKGAEYVRQTLKNHFDIDIKYYVMVDFETFADAIDTLFPNGVKINAKFGLVGGQSADSVKVPDDLRMKNGVVPSQKIKVGIQYMDGRTLLNYARFRKDDDGDFGRTQRQQQVMRAIVSQIKDPRRLFTGSAAIGKAYALTSSNLSYSFVLTDGIPILSDAKNGIKQMTIPREGDWVDDYDQYGGQGLTIDFAXYKKIPKKWDCGNIF

SEQ ID NO: 5681 - protein, 715 aa, Streptococcus agalactiae
ATGGTGAGTTTTATGCGAGATCTCTTAGTCAATATTCTTAATATAGTACGGGAAGGTTACTATGATATGAAATTAAATGCGTCTTTTATTTGGGAGACAGATACATAAAGGAGCAGAGTATGTTCGACAAACGTTGAAAAATCATTTTGATATTGATATAAAATATTATGTTATGGTTGACTTTGAGACATTTGCAGATGCTATTGATACACTGTTTCCTAATGGTGTCAAGATTAATGCTAAATTTGGACTTGTCGGTGGACAATCTGCTGATTCAGTTAAAGTTCCTGATGATTTAAGGATGAAAAATGGCGTTGTACCTAGCCAAAAAATTAAGGTTGGGATTCAGTATATGGATGGAAGGACCCTTCTAAATTATGCTCGTTTCAGAAAAGACGATGATGGGGACTTTGGTCGAACACAACGTCAACAACAAGTTATGAGAGCTATTGTCTCTCAAATAAAAGACCCACGTCGTCTCTTTACAGGTTCTGCTGCTATCGGTAAAGCCTATGCTTTAACTTCAAGTAATTTATCTTATAGCTTTGTCCTAACAGATGGCATTCCAATTTTATCAGATGCTAAAAATGGTATTAAGCAAATGACAATTCCAAGAGAAGGAGATTGGGTAGATGATTATGACCAGTATGGTGGTCAAGGGTTAACAATTGATTTTGCTAAGTACAAAAAGATCCTAAAGAAAATGGGACTGCGT

SEQ ID NO: 5682 - protein, 240 aa, Streptococcus agalactiae
  VARIANT 33, 36: Xaa = Any Amino Acid
MVSFMRDLLVNILNIVREGYYDMKLNASFNLGXQDXHKGAEYVRQTLKNHFDIDIKYYVMVDFETFADAIDTLFPNGVKINAKFGLVGGQSADSVKVPDDLRMKNGVVPSQKIKVGIQYMDGRTLLNYARFRKDDDGDFGRTQRQQQVMRAIVSQIKDPRRLFTGSAAIGKAYALTSSNLSYSFVLTDGIPILSDAKNGIKQMTIPREGDWVDDYDQYGGQGLTIDFAKYKKILKKMGLR

SEQ ID NO: 5683 - protein, 1359 aa, Streptococcus agalactiae
ATGTTACATAAAAATGATATTATTGAAACTGAAATTAGCGACATTAGCCATGAGGGAATGGGTATTGCCAAAGTAGATGGCTTTGTTTTCTTTGTTGAAAATGCTCTTCCAGGTGAGATTATTCAGATGCGCGTCTTGAAATTACGTAAGCGTATAGGATATGGAAAAGTTGAGGAATATTTAACGACTTCTCCTCACCGAAATGAAGGATTAGACTATACCTATTTACGTACAGGGATTGCTGATTTGGGACATCTTACTTATGAACAACAGCTGTTATTTAAACAAAAACAAGTAGCTGATAACCTTTATAAAATTGCTCATATATCTGATGTTTTAGTAGAACCTACTCTTGGTATGACAATCCCTTTGGCATATCGAAATAAAGCTCAGGTACCAGTTCGTCGTGTTGATGGACAGCTAGAGACAGGTTTTTTCAGAAAAAATTCACATACTCTGGTATCCATTGAAGATTATTTAATTCAGGAAAAAGAGATTGATGCTCTGATTAATTTTACACGAGATTTATTAAGAAAATTTGATGTTAAACCATATGACGAAGAGCAGCAATCTGGTTTAATTAGAAATCTCGTTGTTCGTCGAGGACATTATACAGGGCAATTAATGTTGGTTTTGGTGACAACACGTCCTAAAATATTCCTCATTGACCAAATGATTGAAAAGTTGGTGTCTGCCTTTCCTTCTGTTGTTTCAATTATGCAAAATATTAATGATCGTAATAGCAACGTTATTTTTGGGAAAGAATTTCGTACTCTATATGGTTCTGATACTATTGAGGACCAAATGTTAGGAAATACTTACGCTATATCAGCCCAATCTTTTTACCAAGTTAATACTGAAATGGCTGAAAAACTGTACCAAAAAGCAATCGATTTTTCAGATTTAAACTCAGAGGATATCGTTATTGATGCCTATTCAGGTATAGGAACAATTGGCTTATCTGTTGCTAAACAAGTAAAACATGTTTATGGTGTTGAAGTTGTTGAAAAAGCAGTAAGTGATGCCAAAGAAAATGCTACTCGAAATGGGATAACTAACAGTACCTATGTTGCTGATTCGGCTGAAAATGCAATGGCAAAGTGGCTTAAAGAAGGTATAAAACCAACTGTTATAATGGTTGATCCACCACGAAAAGGATTAACGGAGAGTTTTGTATATTCTGCTGCCCAAACAAAAGCAGACAAAATCACTTATATTTCTTGTAATTCAGCGACAATGGCGCGTGATATCAAACTATTTGAAGAATTAGGGTATCATTTAGTAAAAATTCAACCAGTAGACTTATTCCCAATGACACATCATGTGGAGTGCGTAGCGTTGCTACAACGAAGCAAAGGG

SEQ ID NO: 5684 - protein, 453 aa, Streptococcus agalactiae
MLHKNDIIETEISDISHEGMGIAKVDGFVFFVENALPGEIIQMRVLKLRKRIGYGKVEEYLTTSPHRNEGLDYTYLRTGIADLGHLTYEQQLLFKQKQVADNLYKIAHISDVLVEPTLGMTIPLAYRNKAQVPVRRVDGQLETGFFRKNSHTLVSIEDYLIQEKEIDALINFTRDLLRKFDVKPYDEEQQSGLIRNLVVRRGHYTGQLMLVLVTTRPKIFLIDQMIEKLVSAFPSVVSIMQNINDRNSNVIFGKEFRTLYGSDTIEDQMLGNTYAISAQSFYQVNTEMAEKLYQKAIDFSDLNSEDIVIDAYSGIGTIGLSVAKQVKHVYGVEVVEKAVSDAKENATRNGITNSTYVADSAENAMAKWLKEGIKPTVIMVDPPRKGLTESFVYSAAQTKADKITYISCNSATMARDIKLFEELGYHLVKIQPVDLFPMTHHVECVALLQRSKG

SEQ ID NO: 5685 - protein, 90 aa, Streptococcus agalactiae
ATGGGAAATGGTCAGGATTGGGTTGGAACAGCCGAAAGACTAGATGGTGAAACTGATACAGTTCCAAAAGAAGGTACTATTCTCTCTTTT

SEQ ID NO: 5686 - protein, 30 aa, Streptococcus agalactiae; identical to SEQ ID NO: 1226

SEQ ID NO: 5687 - protein, 93 aa, Streptococcus agalactiae
TTGAAAATTCATATCGTCGACGAAAAACAATTAGAAGTTCTAGAACTATTAGCTATATTTGAATTTCAAAATGGAAAGCACTTAGGATACTCT

SEQ ID NO: 5688 - protein, 31 aa, Streptococcus agalactiae
MKIHIVDEKQLEVLELLAIFEFQNGKHLGYS

SEQ ID NO: 5689 - protein, 228 aa, Streptococcus agalactiae
ATGGGCATTACTCTAGTTTTTAATAAGCTATCTGATGAGCAGAAGGAGAAGTTAATGCATGTTGGGAAGTCTTATTTTGACTATCAAGAAAATGCTCTTATCCCACAATTAGGTTTTCTATATTCTAAATTAACTAAAAAAATTGAACTTGATAATCGGTTGTCTCCGACTGAACAAAAGTTATTGATTACCTTATTATTACATACTAAAGGTTTAATCATTGATATG

SEQ ID NO: 5690 - protein, 76 aa, Streptococcus agalactiae; identical to SEQ ID NO: 1228

SEQ ID NO: 5691 - protein, 102 aa, Streptococcus agalactiae
ATGATATTTGAAGAGTCCAAAGATCTAATAGATAGTCCAGTTAGAGAAGCGTTGATTATAAGTGATAAGGATTTTCAAAAATTAAAACAAGAGCTATTATTT

SEQ ID NO: 5692 - protein, 34 aa, Streptococcus agalactiae; identical to SEQ ID NO: 1230

SEQ ID NO: 5693 - protein, 267 aa, Streptococcus agalactiae
ATGGTGAGCTTGCTTCTCTTGAAAGTAAAGCAGGAGGAGTTGATAGAGTTTCATAATGTTTTTTATAGAGAAGCGATATCTTCTTATCTTGAAACAGAAAATTTTGAGAAGGCTAAAGTGACTGAAGAGAATTACCAAGTTTTTTTAGGAATCCGTACTTATCAGAAGAGTTATAACTATCAAGATCATAGTGAGAATCTAAAAGGAAATATTGAGGTAGCAATGATAGGAGTTGAAAATAATATTAGCGACGAACATATTTTTTGC

SEQ ID NO: 5694 - protein, 89 aa, Streptococcus agalactiae; identical to SEQ ID NO: 1232

SEQ ID NO: 5695 - protein, 1149 aa, Streptococcus agalactiae
ATGGTACGTAAATTTTTAAAATCGCTCCTATCTCTCTTTCTTATAGCAGTAATCGCCACCGGTATTTCAGTGGCATGTTTCTTTTTTATTCCAGAAAATAAAGGGAATATTACACCGATTTTATTGCATCGCTTTATGCGAAAAAATAATGTTAATGGAATGATGATTGTTAGCGATAATACTGGTAAACCGATTACCATCTCGCATGGGATTAACCGTGGGGAAGTTGAAACGGATATTGAAAATAATAAATTATTTCCAATGGCTTCTCTCCAAAAACTCATGACAGGAATTATTATCCAAAGATTAATTGATCAAGATGTCTTGAGTGAAGACGACCGATTGTCTCAGTTCTTTCCCCAAGTAAAAGGTAGTAATAGTATTACCATCCACCAATTGTTGACCCATACGAGTGGGTTAAGAGAAAAAGGTGTTAAGGTGTCTCCTTATCTAAAAAATGAGAGAGAACAATTACAATTTTGCTTAAAACACTATAACTTTGTTAATAAGAAATCGTGGTATTATTCTAATATCAACTTTAGTTTCCTAACAGGTATAGCCACTCAAGTTACGGGAAGGACCTACGCTGAACTTGTTGATGATGTGATAAAAAATCCTTTGCGATTAGATGATATCCAAAGTTACCAATCAGTTGTTAATCATGACTTAGTTAGCCCAATGCGAAAGAACGGCAAGTTAAATAAAATTAATATCTTTAATCAAGTATCCACAGCATATGGAGCTGGAGATTTTTTCACAACTCCGCTGAACTTTTGGGTGTTGATGCGGTCTTTTTCTAAAGGGTACTTTTTCCCAACGGATGAATATACCAAACATCAAAATGATGCGATATCACATTATTATGGTGGGCTTTACATGCATGGTCGTATAGTTAATTCTAATGGGGCCTTTTTCCAGTATTCAAGTTTTGGTTATGCAGATCTAAAGACGCATGATACAATGGTGCTTTTTATGAATAACAAAGTCTATAGTGATGCTAGTCACGTGGCACCAAAAGCATTTGAATATTATCAAAAATTTATGTTCCTTAATAAGATTTTCCACTTAGTCTTTTACTTTGTATTTTCTTTCTTTTTAATGCTTTTAATACGTCATTCGTTTAGGAAAAGAAGGTATAAGAAACGTCAC

SEQ ID NO: 5696 - protein, 383 aa, Streptococcus agalactiae
MVRKFLKSLLSLFLIAVIATGISVACFFFIPENKGNITPILLHRFMRKNNVNGMMIVSDNTGKPITISHGINRGEVETDIENNKLFPMASLQKLMTGIIIQRLIDQDVLSEDDRLSQFFPQVKGSNSITIHQLLTHTSGLREKGVKVSPYLKNEREQLQFCLKHYNFVNKKSWYYSNINFSFLTGIATQVTGRTYAELVDDVIKNPLRLDDIQSYQSVVNHDLVSPMRKNGKLNKINIFNQVSTAYGAGDFFTTPLNFWVLMRSFSKGYFFPTDEYTKHQNDAISHYYGGLYMHGRIVNSNGAFFQYSSFGYADLKTHDTMVLFMNNKVYSDASHVAPKAFEYYQKFMFLNKIFHLVFYFVFSFFLMLLIRHSFRKRRYKKRH

SEQ ID NO: 5697 - protein, 990 aa, Streptococcus agalactiae
ATGTCAATGATTGAAGTTTCTCACCTTCAGAAAAATTTTATAAAAACCGTTAAAGCACCAGGGTTAAAAGGAGCATTTCAATCATTTCTTCGTCCTGAAAAACACACCTTTGAAGCTGTTAAAGATTTAACATTTGATGTGCCTAAAGGACAAATTTTGGGATTTATTGGAGCGAACGGTGCAGGAAAATCTACAACAATTAAAATGTTAACTGGGATTTTAAAACCAACTTCGGGCTTTTGCCGTATTGATGGCAAATTGCCACAAGAAAACCGACAAAATTATGTTAAGGATATTGGAGTCGTTTTTGGGCAACGTACGCAGTTGTGGTGGGATTTAGCTCTACAAGAAACCTATACAGTGTTAAAAGAAATCTATGACGTTCCTGATAAAGAATTTCGCAAACGCATGGCTTTTTTAAATGAGGTTTTGGAACTAAATGACTTTATAAAGGATCCTGTTAGAACTTTGTCTCTCGGACAGCGTATGAGAGCGGATATCGCAGCTTCTTTATTACATAACCCAAAGGTTCTTTTCTTAGATGAACCCACCATTGGCTTGGACGTTTCAGTGAAAGATAATATCCGACGTGCAATCACACAAATTAATCAAGAAGAAGAGACAACGATTTTACTAACGACACATGACCTCAGTGATATTGAACAACTTTGTCATCGTATTTTTATGATTGATAGAGGACAAGAAATATTTGATGGCACAGTTTCTCAGCTAAAAGAGACATTTGGAAAGATGAAAACTCTTTCTTTTGATTTGCGCCCAGGACAAGAGCATATCAGCTCTAGTTTAATTGGAAAGTCGGAGATTAATATTAAACGTAATGACTTAGTTTTAGATATTCAGTATGATAGTTCTCGCTACCAAACTGCTGACATAATTCAGCAGACATTAGCAGATTTTTCTGTACGTGACCTTAAAATGACAGATGCGGATATTGAAGATATCATTCGTCGCTTCTATAGAAAGGAGCTA

SEQ ID NO: 5698 - protein, 330 aa, Streptococcus agalactiae
MSMIEVSHLQKNFIKTVKAPGLKGAFQSFLRPEKHTFEAVKDLTFDVPKGQILGFIGANGAGKSTTIKMLTGILKPTSGFCRIDGKLPQENRQNYVKDIGVVFGQRTQLWWDLALQETYTVLKEIYDVPDKEFRKRMAFLNEVLELNDFIKDPVRTLSLGQRMRADIAASLLHNPKVLFLDEPTIGLDVSVKDNIRRAITQINQEEETTILLTTHDLSDIEQLCHRIFMIDRGQEIFDGTVSQLKETFGKMKTLSFDLRPGQEHISSSLIGKSEINIKRNDLVLDIQYDSSRYQTADIIQQTLADFSVRDLKMTDADIEDIIRRFYRKEL

SEQ ID NO: 5699 - protein, 816 aa, Streptococcus agalactiae
ATGAACAGAATTTGGAGACGTTATAAACCTTTTATTAGTACAGGAATCCAAGGATTAATCACATATCGTGTTGATTTCATCCTTTATAGGATAGGTGATGTGATAGGAGCATTTGTTGCATTTTATCTATGGAAAGCAGTTTTCGATTCCTCAAGTCAATCCTTAATCCAAGGTTTTCAGCTGTCAGATATGATTCTCTATATTATTATGAGTTTTGTGACTAATTTATTAACAAGAACTGATAGTTCATTTATGATAGGTGACGAAGTAAAAGACGGTTCAATTATTATGCGACTCTTACGTCCAGTTCATTTTGCTGCTTCCTACCTTTTCATGGAGATTGGTTCTAGATGGCTCATCTTTTTAAGTATAGGGGTACCGTTTTTGCTTGTTATTACGGGGGTACGCCTCTTCTTGGGGACTGATTTGATTCAAGCTATAGTGTTAGTGGTATTTTATATTATTAGCATTATTTTAGCTTTTTTGATTAACTTCTTTTTTAATATTTGTTTTGGCTTCTCGGCATTTGTTTTTAAAAATTTATGGGGGTCAAACCTGTTAAAAAATTCGTTAGTCGCATTTATGTCGGGGAGCTTGATTCCTCTTACTTTTTTTCCGAAAATCGTTGCTGATATTTTAGGATTTTTACCATTTTCATCTTTAATTTACACACCAGTAATGATTATTATTGGTAAATATGATGGCAGTCAAATTGTGCAAGCCTTACTTTTACAAATATTTTGGCTAATAGTAATGGTAGCTTTATCTCAATTAATATGGAAAAAAGTACAGTCGCATATCACTATCCAAGGAGGT

SEQ ID NO: 5700 - protein, 272 aa, Streptococcus agalactiae
MNRIWRRYKPFISTGIQGLITYRVDFILYRIGDVIGAFVAFYLWKAVFDSSSQSLIQGFQLSDMILYIIMSFVTNLLTRTDSSFMIGDEVKDGSIIMRLLRPVHFAASYLFMEIGSRWLIFLSIGVPFLLVITGVRLFLGTDLIQAIVLVVFYIISIILAFLINFFFNICFGFSAFVFKNLWGSNLLKNSLVAFMSGSLIPLTFFPKIVADILGFLPFSSLIYTPVMIIIGKYDGSQIVQALLLQIFWLIVMVALSQLIWKKVQSHITIQGG

SEQ ID NO: 5701 - protein, 783 aa, Streptococcus agalactiae
ATGACAAAATATCAGCGAATGCACTTTATTTTTATTAAACAATACATGAAGCAAATCATGGAGTATAAAATAGACTTTTTTGTAGGCGTTTTAGGAGTATTGTTAACACAAGGGCTAAATCTTTTATTTCTGAATGTTCTTTTTCAACATATCCCTTCTTTAGAAGGATGGACTTTTCAGCAAATAGCTTTTATTTATGGTTTTTCTCTCCTCCCAAAAGGAATTGATCACCTTTTCTTTGATAACTTGTGGGCTCTTGGTCAAAGGCTTATTCGAAAAGGAGAATTTGATAAGTATTTAACCAGGCCTATCAGTCCTTTATTTCATGTCCTAGTTGAAACCTTTCAAGTAGATGCATTGGGGGAGTTATTGGTTGGTTTTATTCTGTTATCTACCACAGTATCTAGTATAAGCTGGACCGTGCCAAAAGTATTATTATTTATATTTATTATCCCCTTTGCAACTTTGATTTATACCTCCTTGAAGATTGCTACGTCAAGTATCGCTTTTTGGACCAAACAATCTGGTGCTGTTATCTATATTTTTTATATGTTTAATGACTTTGCTAAGTATCCTGTCGCAATATATAATAATCTATTGCGTTGGATCATTAGTTTTGTCATTCCATTTGCTTTTACAGCTTATTATCCCGCTGCTTACTTCTTACAAGATAGAAATGTCTATTTTAATATTGGTGGGGTTATCTTGATTTCCTTGATTTCTTTTATGGTATCACTAATACTTTGGCATAAAGGAGTAGAAGTATATGAGAGTGCGGGTTCT

SEQ ID NO: 5702 - protein, 261 aa, Streptococcus agalactiae
MTKYQRMHFIFIKQYMKQIMEYKIDFFVGVLGVLLTQGLNLLFLNVLFQHIPSLEGWTFQQIAFIYGFSLLPKGIDHLFFDNLWALGQRLIRKGEFDKYLTRPISPLFHVLVETFQVDALGELLVGFILLSTTVSSISWTVPKVLLFIFIIPFATLIYTSLKIATSSIAFWTKQSGAVIYIFYMFNDFAKYPVAIYNNLLRWIISFVIPFAFTAYYPAAYFLQDRNVYFNIGGVILISLISFMVSLILWHKGVEVYESAGS

SEQ ID NO: 5703 - protein, 846 aa, Streptococcus agalactiae
ATGAAAACAGTAATAATATATGGAGGACAGGGTAATGTTCAGTCAAAACACCTTTGTCAACTAGTTAAAACTCCAAAAGGTGAAATTCTTTTTTCAAAGTTACAAGCAACTGATTTAGAATCATATCAGTTAATGATGGATGTCATTAACCACAAGGTAAGTTTAGACAATGTTCATGCGTCTATGTTAGCAAATTTTTTATATAATGATTGGCTAACAAACGATGAAAAAATAGTATCTGGGATAGGATTTTCAGCTCATAGCGCCGGTATTTTCAATGTGTTATATGCTAGTGGTAGTACTAGTTTTGAAAACATTATTCACTTTATTAAACGTCGTGCCCAACTTATAGAAAATTGTCATGTGTCTGAAGAGCTTTGGCTTTTGATGGTTGAAAACATTGATATGTTTAGTAAGGATGTTTTAAAAGAACAGTCTGAGAAAGTAAAATTAGCTATTATTACTGATGATAGAGCTGGTGTAATTGCTATGGATCAAGTCAACCGTTCTTTCTTTGATGACGTGATGACTAACAAAGGTTATTTTTATAAATTAAAGCAGTTAGGCGTAAAAGCACCATATCATACTGATTTTTTAAATGAATCTAAAGAGCAGTATAAACAATTGATTGAAAGCCTAGATATTTCGCAAAATGATGACTATGACTATATTTTTCATTGTGATCAATTGGTAGATGAAATTTTATATCAGTGGACCAATCTCTTTAACTGGCGTGCGATTAAGGAAACTATCATAGAAAAGGATGCGGAGATTATTGATATTTCTCCTAATAGGTTTATTTCTAGTCAGTTGCAAAAAATGAAAAAGAGGGGGAGGAAACAGTTA

SEQ ID NO: 5704 - protein, 282 aa, Streptococcus agalactiae; identical to SEQ ID NO: 1242

SEQ ID NO: 5705 - protein, 720 aa, Streptococcus agalactiae
ATGAAAGTAGCAATAGTTACTGGTGGTACCAGAGGAATTGGAAGGGCTATTACAAAAGAGTTATACAAAGAAGGTTACAAAGTCATTGCTATTTATAATAGCAATGATGCTAAGGCAAGAGCTTTACAAGAGGAGTTACCAAAATTAGACGTTTATAAATGCAATATTTCAGATGCAAAAGCAGTACAAAAATTGGTGACTAAAATTTTTAGAGAATATGGCGGTATTGATTGTTTAGTTAATAATGCTGGTATTGTTAGAGATGGCTTTTTCTTGATGATGTCTGAGGAAAAATGGATGGATGTCATTAACATAAATATTATGGGGCTAGTTAACATGAGTAAAGCCGTGTTAAAAATCATGAAGGCTAAGCGTATACAGGGAAAGGTTATCAATATTTCTTCAACTAGTGGTATAGCAGGGCAGATAGGGCAAGCGAACTATTCAGCAACGAAAGGCGCTATCATTTCCATTACTAAAACTCTAGCGAAAGAATTTGCATCAGATGGTATTACGATTAATTGTGTAAGTCCAGGATTCATTGAAACAGATATGACAAATGAATTGCAAAATAAAGAAGAGCTAAAAGAGCATCTTATTCCTCTAAAAAGGTTTGGACAACCTGAAGAGGTGGCTTGGCTCGTAAGCTTTTTAGCAAGTGAGAAGGCAAACTATATTACAGGAAAAAATATTGTGATTGATGGAGGAATGATTAATGAT

SEQ ID NO: 5706 - protein, 240 aa, Streptococcus agalactiae
MKVAIVTGGTRGIGRAITKELYKEGYKVIAIYNSNDAKARALQEELPKLDVYKCNISDAKAVQKLVTKIFREYGGIDCLVNNAGIVRDGFFLMMSEEKWMDVININIMGLVNMSKAVLKIMKAKRIQGKVINISSTSGIAGQIGQANYSATKGAIISITKTLAKEFASDGITINCVSPGFIETDMTNELQNKEELKEHLIPLKRFGQPEEVAWLVSFLASEKANYITGKNIVIDGGMIND

SEQ ID NO: 5707 - protein, 303 aa, Streptococcus agalactiae
ATGATTAACTGGGCTGAAGAACGTAAAATAATAAAAACACGTCAAGAAGTAGTTGATGAAATTAAAGGTATTTTGATTGACTCTTTAATGTTGGATATTGATAAAGATCTGATTATGAATGATCAACCATTATTTGGTCGTGGATTAGAGCTAGACTCTATTGATGCCCTAGAACTGTCAATAGGGATTTCAACAACGTTTGGTGTTGAACTAAATGATGATGATATTTCAATATTATCATCAGTAAATAGACTAGCAGATTTTGTGATTGAAAATAGTGAGGATATAGATGACCAAGCTAAG

SEQ ID NO: 5708 - protein, 101 aa, Streptococcus agalactiae; identical to SEQ ID NO: 1246

SEQ ID NO: 5709 - protein, 474 aa, Streptococcus agalactiae
ATGACCAAGCTAAGTAGTGAAGAAATTATAAAAATGTTACCTCATCGCTATCCGTTTCTAATGGTGGATAGAGTGCAGAGTTATAAAAAAGGTATCATTGAATGTCGTAAGAATATTACTATCAACGAACCTTACTTTCAAGGACATTTTCCACAACGTCCTATAGTTCCGGGTGTTTTGATGATTGAGATGGCAGCTCAATCTGCAGCTTTACTTTATATTTTAGATGCACTTGATGGTAGCCTCCCCTCTCTTGATGAATTAACAGCAGAGAAAATAGCAGAAAAAGTAGGTTATTTAGCCAGTGTGAAGAATTTCAAATTCAAGAAAATTGTTACTCCAGGAGACCAGCTAAACATTACATGTAAATCTCAATCAAAATTGGGGCATCTTTTAGAAATTCAAGTCGTTATTAGAGATGAGAATAAAAAAGAGGTTGCCTCAGGAAGGATGTTGGTATCAGAAAATGGAAAT

SEQ ID NO: 5710 - protein, 158 aa, Streptococcus agalactiae; identical to SEQ ID NO: 1248

SEQ ID NO: 5711 - DNA, 927 bp, Streptococcus agalactiae
atggaaattaaactcaaaaatattggaaaaaaatatggttcttttgaagcattgagagacattaatctcatctttgaagagggaaaattttatggccttcttggacctaatggagctggtaaaacaactttatttaaccttttaattcaaaattttaagcaaacgtcaggcgatattaagtgggaggtggatggaaaacctctatctattaaagatttttatcgtcacattggtattgtcttccaaagtaatcgcttagatgataatttaacggttgaggaaaatctaatttctagaggtgctttgtacggtttatctaaatcacaagtacgtaatcgccttaaagatcttcaaacgtatctagatatcacagcaataaaaaaacaaaaatatggcagtttatcaggaggtcaaaaacgaaaagttgatattgcacgcgccttgctgccacaaccttctctattattattagatgaaccaacgactggtttagaccctcaatctcgtcgcgatttatgggatgctatcgcacaactaaatcaacaatcgcagatgacagttgtactaattactcattatcttgaagaaatgtctgcttgtgatgttttaaatgttcttattgaaggaaacatttattattcgggagatattaaaagctttattgagcaacattccacaacaaacttgaatgtggtattgaaaccagagaagtcattagaccaactttcgatagctgattttgttaataaatgtcaagtcctttcagaaagggagatagtatttaaggatatttctgttgaggaaatgatgcaggttatctcagacaatcaagataaatctattattgagacatttaatgttgaatattcgaacttagaggcggcgtatctcaacttgcttagagaaaaagaaaggaaaaacaatgtt

SEQ ID NO: 5712 - protein, 309 aa, Streptococcus agalactiae; identical to SEQ ID NO: 1250

SEQ ID NO: 5713 - DNA, 876 bp, Streptococcus agalactiae
atgtttgaactaatttctagaaatcgtaaagtttacacgcgagatcggttagcgtttttcatgtcttttttatcagttattatcttaattttggtctatcagattttcttgggaaaaattcaattagatgctataaaagcagcattgaggagtaatacagtatccagtgatactattcacatggttaattattggctcattgcaggtttgacgactattatttcaatgactagtacattaggtgcctttggagttatggtgtccgacaaagaaaaaaaattaaatgaagattttaaggtcagtcctatatcaaatatcaaaattgaattgtcctatgctatatttgccgttttatttggtattgtcatgacgatgttctcttgcatctttgctatcggtatttttaacggctttaattccttgctagagtattcagctatggattatttaactattttagggatcgtttccttagggactgttttatctgcggcgatgattttacctattttagcctttattcatactagttcagcttttacgactcttagcacaattgtagggacttttattggttttatttcaggagtatatctctcaattggctcggtaggaaaagcattacaacaggttatgacatggtttccattgactcaaatcaattctcttttgaaacaggtcttaatgaagggttctattgcgaaggtatttgacaaagccaacgaagccactgtctctaactataaagaatcatatggtgttgttttgcgtaatgctgatggagaaaggctgagtaatcactttatgttgatttatgtcattgccctcattcttattttattggcaattcattttattattaaaaaggttaaaaaa

SEQ ID NO: 5714 - protein, 292 aa, Streptococcus agalactiae
MFELISRNRKVYTRDRLAFFMSFLSVIILILVYQIFLGKIQLDAIKAALRSNTVSSDTIHMVNYWLIAGLTTIISMTSTLGAFGVMVSDKEKKLNEDFKVSPISNIKIELSYAIFAVLFGIVMTMFSCIFAIGIFNGFNSLLEYSAMDYLTILGIVSLGTVLSAAMILPILAFIHTSSAFTTLSTIVGTFIGFISGVYLSIGSVGKALQQVMTWFPLTQINSLLKQVLMKGSIAKVFDKANEATVSNYKESYGVVLRNADGERLSNHFMLIYVIALILILLAIHFIIKKVKK

SEQ ID NO: 5715 - DNA, 2001 bp, Streptococcus agalactiae
atgaaagatgataataaattaaagatttctgaagcttccttagaagattattctgaagtggttcatttatttaataggaatcatgtttatcaatttccagacggtaggcctttaactgttgatgaccttgatttaacgttaaaagttaaagaagtgacacatttatttttactgaaaaatcatggtgttttgattggaacatcagctttctttaaatttattacctatggttgtttagattggaatagtagctttagtggttttcttttaattgattcgaaaagtcgtagtggacaggcaatcacttatctatataaaactatcttaaagaagataacaaaactgaagttttctaatatctataccgaaatcagtaactacaataaaccctccttagctttatcaaaattgaatggcttcaaagagtatgataagacatatgaagacatactgcattgtcgatcattgcgtagtcacctccctaagatattgaatacgtttcgtatttcgaattattatggtaaaacatacgacatatcaacttttcaaattatggaggaaattgaaaatcccttggaagaggagacagaaattaggaccaaagtctctgatgaagaaatattatttaaagcagaagatagtgcttcacttccttattatttaaaaatgagcttgtttcaaatggaaattgctaggttagataaccgttatgttttacaagttgactttttatcggaacaagtaaagagggttcgggttaaaactggaaaatatcacttggcaaacttaacgagggctcaccctagcctaactttaagtcgttttgccaattattattacattcaagcaactgtggaaaccctttatggtaatatcgatgttcaactggaacgtcgaaaaaagcattatagagatgcaactatttgtcttaagagaacttttcaaggttatgatttacttatctctccaaatggcagccttatttttgaaaagcagaaaagaaagatacttgaagatagttttttgatttttagccaacctttggacaagaaattagttgtaaaagaagaagaaaatcacattacaatcaaatgtttctatcaaggtgctttaattgagaaaatcatgacatttacaagtgacgaagaaatcacttgtgtttataaatgtaatcaaaaggctaaagagatgttcccaaaattattgaaacagactttcaagttacactgccaagagcagttgattagagatagtgaaggttatcttgtgaatgttccaggaagttacccgattgagcatgatgattttcttcgagcagataagtttgaagatagacaattccattattacctcccgaatgaagataaaatgatttcctattctcctcctggcaaagccagcaatcaaatgcaatttagacccttatgtcttattgatacagatagcctttcttttccactgacttatcattttaggatttcacaagcatcatcggaggaggcgttaatcaatctaaaaaaacagccaatatgggacagcaactaccaagcgtcagcaactgaccttttaaaacatatctctaacctaacattagaagaagagaaggattatggcatcaagagaatgatagctaacagaaagcattatcctagtcacaaactggttttagcctataatcagattgttttgcctaagaatgaaattccaagagacagtgaattatattctatttcttttgattatcgaattagaggaaagtttgtccaaatccgccaaggggaacatgtcaaatatgataataaatcctatgttttggaaaatagtcaacaattagtattgtatgtagctagcgatgataaatatatactaatttctgctaaaaatggaatattttattcttacaaagagaacaatcatttaaaaataaggtgcatgtttaaaaggaactcaccttatgctacaaatgtgagcattacagaatatagaaagtgtgaagaaaaa

SEQ ID NO: 5716 - protein, 667 aa, Streptococcus agalactiae
MKDDNKLKISEASLEDYSEVVHLFNRNHVYQFPDGRPLTVDDLDLTLKVKEVTHLFLLKNHGVLIGTSAFFKFITYGCLDWNSSFSGFLLIDSKSRSGQAITYLYKTILKKITKLKFSNIYTEISNYNKPSLALSKLNGFKEYDKTYEDILHCRSLRSHLPKILNTFRISNYYGKTYDISTFQIMEEIENPLEEETEIRTKVSDEEILFKAEDSASLPYYLKMSLFQMEIARLDNRYVLQVDFLSEQVKRVRVKTGKYHLANLTRAHPSLTLSRFANYYYIQATVETLYGNIDVQLERRKKHYRDATICLKRTFQGYDLLISPNGSLIFEKQKRKILEDSFLIFSQPLDKKLVVKEEENHITIKCFYQGALIEKIMTFTSDEEITCVYKCNQKAKEMFPKLLKQTFKLHCQEQLIRDSEGYLVNVPGSYPIEHDDFLRADKFEDRQFHYYLPNEDKMISYSPPGKASNQMQFRPLCLIDTDSLSFPLTYHFRISQASSEEALINLKKQPIWDSNYQASATDLLKHISNLTLEEEKDYGIKRMIANRKHYPSHKLVLAYNQIVLPKNEIPRDSELYSISFDYRIRGKFVQIRQGEHVKYDNKSYVLENSQQLVLYVASDDKYILISAKNGIFYSYKENNHLKIRCMFKRNSPYATNVSITEYRKCEEK

SEQ ID NO: 5717 - DNA, 951 bp, Streptococcus agalactiae
atgaatactatttataatacattgagaacagataaaggttataaagtttatgaggggtatttatatgaaattactggtgaagaatgtgaagaagccttagaccttgtgattcctaagaatattgtatttgcagatacagatacttgtggctacacttttttactcaatgaagatggaacagtttatgatgatgtgactttctacaaatttgatgataaatattggttggctagtcataaagctttggattcttatttagacaacatcaattttgactataccgtaacagatatttctgacgagtataaaatgctgcaaattgaaggaagatattcgggagaaattgctcagtcattttatgaatatgatatttcaacacttaattttcgtactttgatagagatgacttataaaggtgagaaaggttatcttgctagatttggtttttctggagaatttggctatcaatttttcctaccatcttctatttttgctacttttgtttcggatgtctgtgaaggtatagcagagtatggggatgaacttgatagatatttaaggtttgaagtgggacaacccattactgatatttatcaacaagaagaatattctttatatgaaataggttattcttggaatctagatttcacaaaggaagaatttagaggtcgcgatagcttgttagagcacatcagatcagcaacagttaaaagtgttggattctcaacgaaggaaaaactcgcttcaggaacaccagtgctatttgatgaccaaattgttggaaagattttttggatagcagacgagaaagactcttcggaaaattacctaggtttgatgattgttaaccaaacatatgctcattcaggagttacttttgtaacagaagatggccaaattttgaaaacacaatcaagcccttattgtatcccagaaagttggaacaaagaa

SEQ ID NO: 5718 - protein, 317 aa, Streptococcus agalactiae; identical to SEQ ID NO: 1256

SEQ ID NO: 5719 - DNA, 2193 bp, Streptococcus agalactiae
atgagcgtatatgttagtggaataggaattatttcttctttgggaaagaattatagcgagcataaacagcatctcttcgacttaaaagaaggaatttctaaacatttatataaaaatcacgactctattttagaatcttatacaggaagcataactagtgacccagaggttcctgagcaatacaaagatgagacacgtaattttaaatttgcttttaccgcttttgaagaggctcttgcttcttcaggtgttaatttaaaagcttatcataatattgctgtgtgtttagggacctcacttgggggaaagagtgctggtcaaaatgccttgtatcaatttgaagaaggagagcgtcaagtagatgctagtttattagaaaaagcatctgtttaccatattgctgatgaattgatggcttatcatgatattgtgggagcttcgtatgttatttcaaccgcctgttctgcaagtaataatgccgtaatattaggaacacaattacttcaagatggcgattgtgatttagctatttgtggtggctgtgatgagttaagtgatatttctttagcaggcttcacatcactaggagctattaatacagaaatggcatgtcagccctattcttctggaaaaggaatcaatttgggtgagggcgctggttttgttgttcttgtcaaagatcagtccttagctaaatatggaaaaattatcggtggtcttattacttcagatggttatcatataacagcacctaagccaacaggtgaaggggcggcacagattgcaaagcagctagtgactcaagcaggtattgactacagtgagattgactatattaacggtcacggtacaggtactcaagctaatgataaaatggaaaaaaatatgtatggtaagtttttcccgacaacgacattgatcagcagtaccaaggggcaaacgggtcatactctaggggctgcaggtattatcgaattgattaattgtttagcggcaatagaggaacagactgtaccagcaactaaaaatgagattgggatagaaggttttccagaaaattttgtctatcatcaaaagagagaatacccaataagaaatgctttaaatttttcgtttgcttttggtggaaataatagtggtatcttattgtcatctttagattcacctctagaaacattacctgctagagaaaatcttaaaatggctatcttatcatctgttgcttccatttctaagaatgaatcactttctataacctatgaaaaagttgctagtaatttcaacgactttgaagcattacgctttaaaggggctagaccacccaaaactgtcaacccagcacaatttaggaaaatggatgatttttccaaaatggttgccgtaacaacagctcaagcactaatagaaagcaatattaatctaaaaaaacaagatacttcaaaagtaggaattgtatttacaacactttctggaccagttgaggttgttgaaggtattgaaaagcaaatcacaacagaaggatatgcacatgtttctgcttcacgattcccgtttacagtaatgaatgcagcagctggtatgctttctatcatttttaaaataacaggtcctttatctgtcatttcgacaaatagtggagcgcttgatggtatacaatatgccaaggaaatgatgcgtaacgataatctagactatgtgattcttgtttctgctaatcagtggacagacatgagttttatgtggtggcaacaattaaactatgatagtcaaatgtttgtcggttctgattattgttcagcacaagtcctctctcgtcaagcattggataattctcctataatattaggtagtaaacaattaaaatatagccataaaacattcacagatgtgatgactatttttgatgctgcgcttcaaaatttattatcagacttaggactaaccataaaagatatcaaaggtttcgtttggaatgagcggaagaaggcagttagttcagattatgatttcttagcgaacttgtctgagtattataatatgccaaaccttgcttttggtcagtttggattttcatctaatggtgctggtgaagaactggactatactgttaatgaaagtatagaaaagggctattatttagtcctatcttattcgatctttggtggtatctcttttgctattattgaaaaaagg

SEQ ID NO: 5720 - protein, 731 aa, Streptococcus agalactiae
MSVYVSGIGIISSLGKNYSEHKQHLFDLKEGISKHLYKNHDSILESYTGSITSDPEVPEQYKDETRNFKFAFTAFEEALASSGVNLKAYHNIAVCLGTSLGGKSAGQNALYQFEEGERQVDASLLEKASVYHIADELMAYHDIVGASYVISTACSASNNAVILGTQLLQDGDCDLAICGGCDELSDISLAGFTSLGAINTEMACQPYSSGKGINLGEGAGFVVLVKDQSLAKYGKIIGGLITSDGYHITAPKPTGEGAAQIAKQLVTQAGIDYSEIDYINGHGTGTQANDKMEKNMYGKFFPTTTLISSTKGQTGHTLGAAGIIELINCLAAIEEQTVPATKNEIGIEGFPENFVYHQKREYPIRNALNFSFAFGGNNSGILLSSLDSPLETLPARENLKMAILSSVASISKNESLSITYEKVASNFNDFEALRFKGARPPKTVNPAQFRKMDDFSKMVAVTTAQALIESNINLKKQDTSKVGIVFTTLSGPVEVVEGIEKQITTEGYAHVSASRFPFTVMNAAAGMLSIIFKITGPLSVISTNSGALDGIQYAKEMMRNDNLDYVILVSANQWTDMSFMWWQQLNYDSQMFVGSDYCSAQVLSRQALDNSPIILGSKQLKYSHKTFTDVMTIFDAALQNLLSDLGLTIKDIKGFVWNERKKAVSSDYDFLANLSEYYNMPNLAFGQFGFSSNGAGEELDYTVNESIEKGYYLVLSYSIFGGISFAIIEKR

SEQ ID NO: 5721 - protein, 1209 aa, Streptococcus agalactiae
ATGAGTAAATTTTTATTTGCTCCTTTCATGATGAATTTAGGAGAGAGCCAAAGATTATCAAAACTGGCTAATTATTTATATGAACAAGGACATGATATTCATATCCTTGGAGACAATTATTATCCATTTTTATTTAATAATGATGCTTATCGTTATCACCACTGTGTAGAAGATAAATCTGTTTATAATAGTAAGCGATATGATGCTTTCTTTTCTCTTTCAACAGACTTTAATTTTTTATCAGAAGAAGAAATTGAACGCATCTGTTCTATTGAAAGAGACTTGTTACGCCAAGAAAAATTTGATGCTGTATTGACAGGTTACCGTCTATCTATTATTACAAGTTGTCGTTTAGAAAGCATACCATTAATTTGGATTATTTCAGGGGCAACACATATCAGTGAAATTGTTGAAAACTCAGAAGGAATATTGCCTAATGGGAAGATAAGTAAAGCTAGTAAGCCTCAAACAAAGGATTTTATCAAAAGAGTAATCACTACTTATTCAACAAATGTTAAAACGTGGAACAACTATATTAAAAAATATGGTGGCAAACCTTTTAATAATGCTTTAGAATTATTCACTGGTGATCTAAACTTGGTAACAGATTACTCTTTGTTTTATGAATTTGATAAAGATTCGTCCTATAAAACGATAGGACCTATTTTGATAGATAATGTAGGTTTTTCAAAATGCAGCCAAATTAAGCAAGACAATAAGACTGTACTGCTCAGCTTTGGTACTTCATTTAAACGAGATTGGGTGGAATCTTTTTTAAAGACATTACCAAGGCATTATCATTATTTACTGACAAGCTGTGGTGAGGCTATAAACATTCCAGGAAGTTATATTGAGGTAGTTGATTTTATTGATTTTAAAACCATAGATAAAGAGATTTATTTCGCTATTATACACGGTGGGCAAGGAACAGTTTATGCGATGGCAGCACAAGGTATTCCCTTTATAGGTATCCCTTTCTTTAACGAACAATTTTGGAATATTAAGAAGTTCAGTAAAGAAAAGTGCGCTTATTTGGTAAAGAAACCTGATGTAAGAGAGATACGTAAAGCAATTAGCTGTCTTGAAAGAGGCTATGATATCTATAAGAGTCATATGATAAGACTAAGCCGAGGGATTAAAGAAGAAGCAGAGGCATCTTTACAAAAAGCGGAGGCAGAAATTGAATCCTTTATCAGAAAAAGACAAAGT

SEQ ID NO: 5722 - protein, 403 aa, Streptococcus agalactiae
MSKFLFAPFMMNLGESQRLSKLANYLYEQGHDIHILGDNYYPFLFNNDAYRYHHCVEDKSVYNSKRYDAFFSLSTDFNFLSEEEIERICSIERDLLRQEKFDAVLTGYRLSIITSCRLESIPLIWIISGATHISEIVENSEGILPNGKISKASKPQTKDFIKRVITTYSTNVKTWNNYIKKYGGKPFNNALELFTGDLNLVTDYSLFYEFDKDSSYKTIGPILIDNVGFSKCSQIKQDNKTVLLSFGTSFKRDWVESFLKTLPRHYHYLLTSCGEAINIPGSYIEVVDFIDFKTIDKEIYFAIIHGGQGTVYAMAAQGIPFIGIPFFNEQFWNIKKFSKEKCAYLVKKPDVREIRKAISCLERGYDIYKSHMIRLSRGIKEEAEASLQKAEAEIESFIRKRQS

SEQ ID NO: 5723 - protein, 573 aa, Streptococcus agalactiae
TTGAATCCTTTATCAGAAAAAGACAAAGTTAACTATATTATGATTTATAAAAATAGGCAGTCTACATTGGAGAATAATTTATCTGGCGATCGGTTGATGAGATATCAACAAGCAAATAGACAGGTAAGCAAAGATAAACTGTTAACAGGGAGTTATTTTGTGTACCAATGCTTAAAAAAGTTAGGTTTTACCAATGAGATTTGTCAGGAATCTTTTTCTAGTGTCAGTAGTTATTTAATTGGTTTGCCAAAGGGAAAAATTAGTTACTCTAATTCTGGTGACTATCATATTCTAACCTATGCTCCCAGTGGTTCAACTGGGGTTGATATTGAGAAATACAAAGATAGATCAGAACAAACCTACCAAACCTACCTAGGAGAATCAGTTAGTAGTGATATGGATTCTAAATTATTATTTTATAAGGCATGGTTACAAAAAGAAATTTCCTATAAATGTGGGAAATCTATAGATATTACCTATCAAACAATGATAGATGGCTATATTTATGGTTATGCTTTTGATAATACTTTTAAAGTAGAATTGGTTTACTTAAAAGAATTATTACCAGATAAC

SEQ ID NO: 5724 - protein, 191 aa, Streptococcus agalactiae
MNPLSEKDKVNYIMIYKNRQSTLENNLSGDRLMRYQQANRQVSKDKLLTGSYFVYQCLKKLGFTNEICQESFSSVSSYLIGLPKGKISYSNSGDYHILTYAPSGSTGVDIEKYKDRSEQTYQTYLGESVSSDMDSKLLFYKAWLQKEISYKCGKSIDITYQTMIDGYIYGYAFDNTFKVELVYLKELLPDN

SEQ ID NO: 5725 - protein, 633 aa, Streptococcus agalactiae
TTGGTTAGGAAGATTAGTAAACAAAAAGGTTATCAGACGGTTGCAGTGCGCTTAAGTGATAAACGTTTAGTGGATACAGTTATCCAAAACATCAAACAATGGCCGTTTGATTTCGGGAAATTAGATGTTCAAACAGCTAAAGAGTTTTATGGAGATTCTTATCGTAATATCGAGACATTGCATCGTCTAGTGGGACGAATCATTCTTATTGTTAGTCTCGTGGCGATGGCAATATTAGTTGTCATGCTAACATTTTGGATTAATAACCGCATTAAAGAGACGGGAATTTTACTCGCTATCGGAAAAACTAAGTTTGAAATCATAGGTCATTATCTGATAGAAGTACTGTTAGTAGCAGGTGCTGCCTTCACACTATCTATTATTGGTGGTGTCTTTCTTGGAAAAACATTTGCAGCTGGCCTTTTATCACAAGTTAATGGTGGTGTGAGTTCACAAATTGTACAAAATAGTAGTCTAATTATTGATAGAATTGATAACCTCACTGTTTCTGTTGGAGTAATGGATGTCTTTAGACTCTATGCTCAGGGTGCTTTAATTTGCTTATTTGCAGTTGTATTATCTAGTTATTCTATTCTTAAACTACAACCAAAGCAAATATTGTCACGAATGTCA

SEQ ID NO: 5726 - protein, 211 aa, Streptococcus agalactiae
MVRKISKQKGYQTVAVRLSDKRLVDTVIQNIKQWPFDFGKLDVQTAKEFYGDSYRNIETLHRLVGRIILIVSLVAMAILVVMLTFWINNRIKETGILLAIGKTKFEIIGHYLIEVLLVAGAAFTLSIIGGVFLGKTFAAGLLSQVNGGVSSQIVQNSSLIIDRIDNLTVSVGVMDVFRLYAQGALICLFAVVLSSYSILKLQPKQILSRMS

SEQ ID NO: 5727 - protein, 1020 aa, Streptococcus agalactiae
ATGAATTTATTTAAACGTTCCTTTTTATATGTTATCCGTAAAAAGCGTAAGAGTATCACTTTATTCGTATGTTTATGGCTAGTTGCTTCTACATTAATTAGCGGTATTGCGGTAAAAAATGCTGGTCTTACTGCTAAGAAGACATTTTCAAGGCAAACTGGATCAATTTTGCATATTTCATCGGATAGTACTGACCTTGTTGGTGATGGTTACGGATCTGGAGAAATCCCTGAAAAAGCAATAGTTAACATAGCAAGTAATCCAAATGTTAAGCGCGTTAATAATAATTTGATGGCTTATGCTGGACTAACCTCGGAAAAAATGGTTACACGACCAAATGATAAAGAACAATATAAAGAACAAGTTTTACAAGTTCATGGTAATAGTTACTCCGATACAGATCCTAAATACACAGCGGGGATGATTTCTCTTAAGGAAGGGCGACATATCACGCCGAAAGATCAGCGAGTTATAATTGTTCATCAGGCTTTTGCGAAGACAAATCATCTTAAAGTTGGCGATAAGTTAATGTTTTCAAAAGACCCCGTTAGAAACAGTAAGGATAAAACATTAGTTGAAGCAACTATTGTTGGCATATATAAAGGTAAAACGGTACAAAAATCAAATTACCCTTATGAGATGCTAGAAAATACAGCCTTTTCAGATACGCAATTGATTAAGGATTTATACGGCTATTCTAAAGGTAAGGCCTTTTATCGCCAAACAACTGTATATCCTAAAAAGAAAGCTGATATAAAAGCTCTTAAAAGTTTTATCAAAAAACAATCTATTGATTGGAATAAATACCAACTGACAATTACAGCAACCTTGCTAACAAGTTATGCAAAAAGTATAGATGTCTTGAATCAATTAATTACTTCTCTACAAGGCGGCATGTTAGTAGTATCTATTATCCTAGTGATGATGGCTCTGCTATTCTGGATTGGTGGTAGAACCCATGAGACAGGTATTTTATTAGCTATTGATAAGTCTAAAGCAATTATCATTGTCAGTACGCAG

SEQ ID NO: 5728 - protein, 340 aa, Streptococcus agalactiae
MNLFKRSFLYVIRKKRKSITLFVCLWLVASTLISGIAVKNAGLTAKKTFSRQTGSILHISSDSTDLVGDGYGSGEIPEKAIVNIASNPNVKRVNNNLMAYAGLTSEKMVTRPNDKEQYKEQVLQVHGNSYSDTDPKYTAGMISLKEGRHITPKDQRVIIVHQAFAKTNHLKVGDKLMFSKDPVRNSKDKTLVEATIVGIYKGKTVQKSNYPYEMLENTAFSDTQLIKDLYGYSKGKAFYRQTTVYPKKKADIKALKSFIKKQSIDWNKYQLTITATLLTSYAKSIDVLNQLITSLQGGMLVVSIILVMMALLFWIGGRTHETGILLAIDKSKAIIIVSTQ

SEQ ID NO: 5729 - protein, 192 aa, Streptococcus agalactiae
ATGATTGCTATTCCAGCCTTTGCTTTATCAGTACTTAGCGGTCAATTTATTGGTCAAAAATTAGCAGACTCCTTAGTGTATCAGGCCTCTAGAACTGTCAGAGCAGACTTTATGAAAGGGTTTGGGAATATGCAGCTTGGGTCTGATAGTGATACAGATATGTTTATGCAAACGAAATGTACAAGTGAAGCC

SEQ ID NO: 5730 - protein, 64 aa, Streptococcus agalactiae
MIAIPAFALSVLSGQFIGQKLADSLVYQASRTVRADFMKGFGNMQLGSDSDTDMFMQTKCTSEA

SEQ ID NO: 5731 - DNA, 669 bp, Streptococcus agalactiae
atgttcgaattaaaaaatattgcttatcgttataaggggaacgacaataaaacattagaaaatatcaattatagttttcagtcaggggtattttatactatattagggaattctgattcaggtaaaacaacccttctatccttgatggcaggtcttgattcgcccactgagggacaagtattatttaacaaaaaagatattaaagaagcaggttatgctcagcatcgcaaaaagaatatagctttggtctttcaaaattataaccttttagactatctaaccccattggaaaatgttcagttggtaaaacctactgcagataaacaattattgttggatttaggtttaaaagaagatatgttaacgcgaaatatcttgagattatcaggagggcaacaacaacgtgtagctattgcgagggctttggttgcaggaacaccagctattttacttgatgaacctacggggaatttagattttgacattgcacgtgatattacgatgcgtcttaaagattttgcgcataaagaaaaacgatgtgttattatggtgacacatagtagagaaatcgctcatatggctgatactgctttacaattgacaggagataacttaaaagaattatcaaaagaaagtatagcacagtctatattacaacaaaggaattta

SEQ ID NO: 5732 - protein, 223 aa, Streptococcus agalactiae
MFELKNIAYRYKGNDNKTLENINYSFQSGVFYTILGNSDSGKTTLLSLMAGLDSPTEGQVLFNKKDIKEAGYAQHRKKNIALVFQNYNLLDYLTPLENVQLVKPTADKQLLLDLGLKEDMLTRNILRLSGGQQQRVAIARALVAGTPAILLDEPTGNLDFDIARDITMRLKDFAHKEKRCVIMVTHSREIAHMADTALQLTGDNLKELSKESIAQSILQQRNL

SEQ ID NO: 5733 - DNA, 483 bp, Streptococcus agalactiae
atgtcattatcagataagaaagagtataaagcactatatggaaaagcgattattaacttgcgaaatcctatgcctgatgaatctgctaaagtaattttgaaagctgcacaaaaagggactttttccctgatcaataacgtcaagacaattgcaaaaaatgacgaaggattttcaatagaaaaagaaaaacaaaatcatatatctgtcgatcgcgtcattaatgctactggttaccagttaaatactaaaaactggacaaaagccaatccactcctaaaatcgctcatcaatcaagaattttgtcaaattgacgatcaaggagggattactattttaactgaaaatgcacaagttttgtctccaaaatatggtccaatgccaggtttatatgcgcatggtgcactggttaatggtgtcgtttatcagaataactctacaattaaaattcaacaaatggcagagcgagccttttctgataataaa

SEQ ID NO: 5734 - protein, 161 aa, Streptococcus agalactiae
MSLSDKKEYKALYGKAIINLRNPMPDESAKVILKAAQKGTFSLINNVKTIAKNDEGFSIEKEKQNHISVDRVINATGYQLNTKNWTKANPLLKSLINQEFCQIDDQGGITILTENAQVLSPKYGPMPGLYAHGALVNGVVYQNNSTIKIQQMAERAFSDNK

SEQ ID NO: 5735 - DNA, 846 bp, Streptococcus agalactiae
atgggagttagtggtttagctgttctactagcactttctcgtaaaaaagagaaagagttaaaacagttagctattttttgttttgatgatactgtccactttggacgaggaattccttttcaagaagacgttgactcagctttaatcaattccccaatcaacgatatttcatttgattatcgccatatgtctgacttcatggattggttagaagaaaattactatgacacaaatctaacctatgtatcaaggacactttacggacaatacctttcagaaagaactaaattacttttagataaactccctgtcacggttattaaaacaagagtggataaactaaactatttatcagataagcaacaatggcaagtctatattcaagataagctttttcctgtcacatttgatgaattacatttagcttgtggtgctctgcccgttatagacccttatcatttggaagggaagactgattatatcaaagacccttatcctatcaaacacttggctcaggaaaattggaagggaaaaacagttgctatcatcgggactggtctagctgcaattgatgttataaaatggttgctactcaatacacaatcttctgttaaagcattttcaagaaccaactacttccctagcgtccgtattgttaatgatttaccacttacttggcacttttttaccaatgataaccttaaagcatttctatcacatccttcaaaaaccttcactattgccgattttaatgatttgatgtctggtgaattggagcatcttggctttaaaaactggaaaaatacaacagaaacctttttatccccaggaattgatggtctcaag

SEQ ID NO: 5736 - protein, 282 aa, Streptococcus agalactiae
MGVSGLAVLLALSRKKEKELKQLAIFCFDDTVHFGRGIPFQEDVDSALINSPINDISFDYRHMSDFMDWLEENYYDTNLTYVSRTLYGQYLSERTKLLLDKLPVTVIKTRVDKLNYLSDKQQWQVYIQDKLFPVTFDELHLACGALPVIDPYHLEGKTDYIKDPYPIKHLAQENWKGKTVAIIGTGLAAIDVIKWLLLNTQSSVKAFSRTNYFPSVRIVNDLPLTWHFFTNDNLKAFLSHPSKTFTIADFNDLMSGELEHLGFKNWKNTTETFLSPGIDGLK

SEQ ID NO: 5737 - DNA, 597 bp, Streptococcus agalactiae
  misc_feature 584, 585, 586, 587, 588: n = A,T,C or G
atggttaattattggctcattgcaggtttgacgactattatttcaatgactagtacattaggtgcctttggagttatggtgtccgacaaagaaaaaaaattaaatgaagattttaaggtcagtcctatatcaaatatcaaaattgaattgtcctatgctatatttgccgttttatttggtattgtcatgacgatgttctcttgcatctttgctatcggtatttttaacggctttaattccttgctagagtattcagctatggattatttaactattttagggatcgtttccttagggactgttttatctgcggcgatgattttacctattttagcctttattcatactagttcagcttttacgactcttagcacaattgtagggacttttattggttttatttcaggagtatatctctcaattggctcggtaggaaaagcattacaacaggttatgacatggtttccattgactcaaatcaattctcttttgaaacaggtcttaatgaagggttctattgcgaaggtatttgacaaagccaacgaagccactgtctctaactataaagaatcatatggtgttgnnnnnttaattaat

SEQ ID NO: 5738 - protein, 199 aa, Streptococcus agalactiae
  VARIANT 195, 196: Xaa = Any Amino Acid
MVNYWLIAGLTTIISMTSTLGAFGVMVSDKEKKLNEDFKVSPISNIKIELSYAIFAVLFGIVMTMFSCIFAIGIFNGFNSLLEYSAMDYLTILGIVSLGTVLSAAMILPILAFIHTSSAFTTLSTIVGTFIGFISGVYLSIGSVGKALQQVMTWFPLTQINSLLKQVLMKGSIAKVFDKANEATVSNYKESYGVXXLIN

SEQ ID NO: 5739 - DNA, 783 bp, Streptococcus agalactiae
atgaaaagattacataaactgtttataaccgtaattgctacattaggtatgttgggggtaatgacctttggtcttccaacgcagccgcaaaacgtaacaccgatagtacatgctgatgtcaattcatctgttgatacgagccaggaatttcaaaataatttaaaaaatgctattggtaacctaccatttcaatatgttaatggtatttatgaattaaataataatcaaacaaatttaaatgctgatgtcaatgttaaagcgtatgttcaaaatacaattgacaatcaacaaagaccatcmactgctaatgcaatgcttgatagaaccattcgtcaatatcaaaatcgcagagataccactcttcccgatgcaaattggaaaccattaggttggcatcaagtagctactaatgaccattatgggcatgcagtcgacaaggggcatttaattgcctatgctttagctggaaatttcaaaggttgggatgcttccgtgtcaaatcctcaaaatgttgtcacacaaacagctcattccaaccaatcaaatcaaaaaatcaatcgtggacaaaattattatgaaagcttagttcgtaaggcggttgaccaaaacaaacgtgttcgttaccgtgtaactccattgtaccgtaatgatactgatttagttccatttgcaatgcacctagaagctaaatcacaagatggcacattagaatttaatgttgctattccaaacacacaagcatcatacactatggattatgcaacaggagaaataacactaaat

SEQ ID NO: 5740 - protein, 261 aa, Streptococcus agalactiae
MKRLHKLFITVIATLGMLGVMTFGLPTQPQNVTPIVHADVNSSVDTSQEFQNNLKNAIGNLPFQYVNGIYELNNNQTNLNADVNVKAYVQNTIDNQQRPSTANAMLDRTIRQYQNRRDTTLPDANWKPLGWHQVATNDHYGHAVDKGHLIAYALAGNFKGWDASVSNPQNVVTQTAHSNQSNQKINRGQNYYESLVRKAVDQNKRVRYRVTPLYRNDTDLVPFAMHLEAKSQDGTLEFNVAIPNTQASYTMDYATGEITLN

SEQ ID NO: 5741 - protein, 96 aa, Streptococcus agalactiae
GTGAAGCAGCACTTCTCGCTTATTATCTTGGGAATTGTATTTGTTACCTTAATTCCTGTCCTTATTTCTGGTGTCAAATCATATCGGAACACTAAG

SEQ ID NO: 5742 - protein, 32 aa, Streptococcus agalactiae
MKQHFSLIILGIVFVTLIPVLISGVKSYRNTK

SEQ ID NO: 5743 - protein, 398 aa, Streptococcus agalactiae
ATGTTTTTAATCGATTTTATTTTACATATTGATACTCATATCTATGCTATGGCTAACACTGTTGGTAATTGGACCTATCTATTGCTCTTCCTCGTTATTTTCGTTGAAACTGGGGCTGTCATCTTTCCATTTTTACCAGGTGATAGTTTATTATTTGCTGCTGGAGCCCTTGCTGCAAATCCAAAAATGTCCTTCAATATTGTAACTTTCCTTATTATTTTCTTTATTGCAGCATTTATTGGTGATAGTTGCAATTTCTTGATTGGTCGTACATTTGGTTACCGTTTTATCAAACATCCTTTCTTTCGTCGTTTCATAAAGAAAAAAATATTCGAGATGCTGAGCTTTATTTTGAGAAAAAAAGGTACTGCTGCCATCATTTTAGGGCNNNNNTTAAT

SEQ ID NO: 5744 - protein, 133 aa, Streptococcus agalactiae
  VARIANT 131, 132: Xaa = Any Amino Acid
MFLIDFILHIDTHIYAMANTVGNWTYLLLFLVIFVETGAVIFPFLPGDSLLFAAGALAANPKMSFNIVTFLIIFFIAAFIGDSCNFLIGRTFGYRFIKHPFFRRFIKEKNIRDAELYFEKKRYCCHHFRAXXN

SEQ ID NO: 5745 - protein, 654 aa, Streptococcus agalactiae
ATGTCCTATTTAACCTTTAAACACGTTGATTTTAAAACGGATGATAAGTTGGTTTTAAATGATATCAACTTTGCAATTGATGAAGGTGATTTTGTTTCTATTGTAGGACCATCTGGAAGTGGTAAGAGTACTGTTTTAAAATTGGCCAGTGGTTTAATGAGTCCTACTGCAGGTCATATTTTCTTTGATGGAAAAGATTTGAACCAATTAGAACCGATTGAAAGTCGAAAAATGATTTCTTACTGTTTTCAAACGCCACATTTATTTGGTAATACAGTGGAAGACAATATTAGTTTTCCTTACCACATTCGACACGAAAAAGTAGATTATAGACGCGTTGATGATTTATTTCAACGTTTTGAAATGGACCAGTCTTACCTGAAACAGGATGTCAAAAAACTATCAGGAGGAGAAAAGCAACGTATTGCTCTGATTAGGCAATTATTGTTTGAACCTAAAGTTTTACTCTTAGATGAAGTTACTTCGGCTTTAGACAATCATAATAAAGCTATTGTTGAAAAGGTTATTAAATCATTACATGACAAAGGAATAACGATTTTGTGGATTACGCATGATGAGGAGCAGAGTCGTCGATTTGCCAATAAAGTCTTAAAAGTTGTCAATGGTAGTATTGAAGCAATGGAGGTTATAAAA

SEQ ID NO: 5746 - protein, 218 aa, Streptococcus agalactiae; identical to SEQ ID NO: 1304

SEQ ID NO: 5747 - protein, 771 aa, Streptococcus agalactiae
ATGAGCGGTGCAAATTCTATTTCTTTAATGTCATTACTAATGGCATCATCATTAGTTTTGATTACTTTATTTTTTTCTTACTGGCAAAAGTTAAACCTAGAAAAAGAAGTGATTATTAGCGCTATCCGAGCAGTGATTCAATTATTAGCAGTGGGGTTTTTGCTAGACTATATATTTGGTTATCAAAATCCTATTTTCACAGCTCTTTTAATGCTATTCATGATTATTAATGCTTCTTATAACGCAGCTAAGCGTGGTAAAGGGATTAATAAAGGGTTTGTTATTTCATTTATAGCTATTGGGTCAGGGACTATAATCACTTTATCTGTCTTGATTTTTTCAGGAATTTTAAAATTTGTTCCGAATCAAATGATTCCTGTAGGTGGTATGATTATTAGTAATTCTATGGTAGCAATCGGTTTGTGCTATAAACAATTATTGTCCGAATTTAGAAGTAAACAAGAGGAAGTGGAGACAAAATTAGCTTTAGGAGCAGATATTTTGCCAGCTTCGATTGATATTATTCGTGATGTTATCAAAACCGGTATGGTACCTACAATTGATTCAGCTAAAACACTTGGGATTGTATCTTTGCCAGGGATGATGACAGGGTTAATTCTTGCTGGAACTTCACCTATCCAAGCGGTTAAATACCAAATGATGGTGACGTTTATGCTATTAGCAACGACTTCGATAGCTTCTTTTGTAGCTACTTATTTGGCTTATAAAATTTTCTTTAATAATCGTAAGCAATTAGTAGTAACAAAAGAT

SEQ ID NO: 5748 - protein, 257 aa, Streptococcus agalactiae; identical to SEQ ID NO: 1306

SEQ ID NO: 5749 - protein, 816 aa, Streptococcus agalactiae
ATGATTTTAAAAATTTGTCGTGCAGCATATAGTTTACAATGGGGAGGTGTTTACCAATTAGCTTTGCTGGATTATCCTCGAATTAAGGCGTTTGAATTGGAAAGGATAGGAGCTTTCATAGCTTACGAGAAACAATATAAAAGAAAAATTGAGATACAATGTGACGATAAACATCTCCTCACAAAAATTGTTCATTTTTTAAAATACAATAGTTTTACTTTTCCCTATATTCCCAAATATAGAGAAGCGGCAGCTACTTTTAATGAGGATGGTATTAGTTTAACTTCTGATTTTTTAAGCCATACATGTACGATTGAAACTGCAAAACTAATTTTTAAAGAAGGTAAAATCTTATCAGCAGTTAAAGCCTTTAATAAGCCTGCTGAAGTACTGGTAAATGATAAGAGGAATGCTGCTGGAGACCCTAAAGATTACTTTGACTATGTGATGTTGAACTGGTCAAATACCAATTCTGGTTATCGTTTAGTAATGGAAAGATTGTTAGGCAAAGCACCATCTGAACAGGAGTTAACAGTAGCTTTTAAGCCAGGGGTCAGCTTTCATTTTAATTATCAAGATATCATCAATCATCCTGATTCTATTTTTGATGGTTATCATCCTGCTAAAATTAAAAATCAACTTTCTTTAGCAGAACATTTAGTTGCATGTGTTATCCCAAAACATTATCAAGAAGATTATCAAAGCCTTGTGCCTAATGACTTGAAACACAGAGTTTATTATTTAGATTACTGTAACGAAACACTTTATGAGTGGAATCAAAAAGTTTATGATTTTCTTTGTCATTTGGAAAATAAA

SEQ ID NO: 5750 - protein, 272 aa, Streptococcus agalactiae
MILKICRAAYSLQWGGVYQLALLDYPRIKAFELERIGAFIAYEKQYKRKIEIQCDDKHLLTKIVHFLKYNSFTFPYIPKYREAAATFNEDGISLTSDFLSHTCTIETAKLIFKEGKILSAVKAFNKPAEVLVNDKRNAAGDPKDYFDYVMLNWSNTNSGYRLVMERLLGKAPSEQELTVAFKPGVSFHFNYQDIINHPDSIFDGYHPAKIKNQLSLAEHLVACVIPKHYQEDYQSLVPNDLKHRVYYLDYCNETLYEWNQKVYDFLCHLENK

SEQ ID NO: 5751 - DNA, 882 bp, Streptococcus agalactiae
atggatattagacaacttacttactttattgctgttgcagaagcaaaaaattattcacacgctgcaaaaagtctttttgtgacccaacctacactttcacaatccattaaaaaattagaagcagaattaaatactattttattcttacaaaatggtcgtcaactcgctttaactgaagcaggagaaattctctatgagaaaggacaattgttgatgactaattttaatcaaatggttacggaaatccagcaattaaatcaagaaaaaaaggaaggtatccgtgtagggcttacttctctttttgctattcaatttatgaaacagatttcaacttttatggctacacattcaaatgttgaagtatctttgattcaagatggttcccgtaaattacaagaattgttagcaaaaggaaagatcgatattggcttattgtcctttccaagtacccgcaatgatatcactatcgaaccactgcaaacctcaactaaaggatataaagtaagcattgtcatgccaaaatcgcatcctcttgcaacacttcctgaaattgaacttaatgatttaagagattacaaagttgcctcactcaacgaacattacatgctaggagagatgttgcctcgtaaatgtcgtgctttaggatttgacccccatatcgtctttaaacacaatgactgggaagttcttattcatagtttacaagacctcaatgcagtcactattttaccaagtgaatttgaaagcattagccaagttcaagatttatgctgggtcccacttaaggataaaaataatttttatccgattggtattgcttaccgaaatgatacttcttttagtcctataattgaagaatttttaagtcttttaaagaccaat

SEQ ID NO: 5752 - protein, 294 aa, Streptococcus agalactiae
MDIRQLTYFIAVAEAKNYSHAAKSLFVTQPTLSQSIKKLEAELNTILFLQNGRQLALTEAGEILYEKGQLLMTNFNQMVTEIQQLNQEKKEGIRVGLTSLFAIQFMKQISTFMATHSNVEVSLIQDGSRKLQELLAKGKIDIGLLSFPSTRNDITIEPLQTSTKGYKVSIVMPKSHPLATLPEIELNDLRDYKVASLNEHYMLGEMLPRKCRALGFDPHIVFKHNDWEVLIHSLQDLNAVTILPSEFESISQVQDLCWVPLKDKNNFYPIGIAYRNDTSFSPIIEEFLSLLKTN

SEQ ID NO: 5753 - DNA, 510 bp, Streptococcus agalactiae
atgggattaaatttaaaattgagaccaaccataataccaataacaagccccatcatacttgttgcaactgctgttgcagcgattaaagttgcaaatccgctccacattggcagtaaagctttcattaattctccaaggattgctcctggtatcaagacaataacagtccctaaagctaaaccatttaatacgttcattataaacgatttagctgtttgtttttcgacaacatccgacataagatgcctcctactaataatgattgtttgtgatttcgctaactatattaactatatcatagctatttgcaaaaggaaaattggaaaaaattatataagtatagcttttactaatattattgtggaaataatcataaaggtcagattgatagacttgtgctatactattactaagaaaaaaggacagatattatggatattagacaacttacttactttattgctgttgcagaagcaaaaaattattcacacgctgcaaaaagtctttttg

SEQ ID NO: 5754 - protein, 170 aa, Streptococcus agalactiae
MGLNLKLRPTIIPITSPIILVATAVAAIKVANPLHIGSKAFINSPRIAPGIKTITVPKAKPFNTFIINDLAVCFSTTSDIRCLLLIMIVCDFANYINYIIAICKRKIGKNYISIAFTNIIVEIIIKVRLIDLCYTITKKKGQILWILDNLLTLLLLQKQKIIHTLQKVFL

SEQ ID NO: 5755 - DNA, 1056 bp, Streptococcus agalactiae
atgtcggatgttgtcgaaaaacaaacagctaaatcgtttataatgaacgtattaaatggtttagctttagggactgttattgtcttgataccaggagcaatccttggagaattaatgaaagctttactgccaatgtggagcggatttgcaactttaatcgctgcaacagcagttgcaacaagtatgatggggcttgttattggtattatggttggtctcaattttaaatttaatcccattcaatcagcatcactaggattagcggttatgtttgcaggtggagctgcaaccttccttaaaggcgctattatgctaaaaggaacaggcgatatcattaatatgggaattactgctgccttaggtgtccttttgatccaatttttatctgacaagacgaaatcattcactttgattgtcattccaacagtaacactcttactagttggaggagtaggtcatgtgttattaccttatgtcaaaatgattaccaccatgattggacaagggattgcttcattacttggtttacaacctgttttgatgtcaattttaattgcgatgattttctgtttcttgatcgtatctccaatcacaacagttgggattgctttggcaattagtttgtccggaattggttctggtgctgctaatttaggtatctgtgctgctagttttgggctttgtatggctgggtggtcagtcaattctaaggggacagccttagcgcatgttttagggtctcctaagatttcgatggctaatgtattagcaaaaccgaagattatgctacctatgatatcttcagcagcaatactaggaattctcggagctctctttaatattcaaggaacaccagctagtgcaggttttggtatcagtggtttgattggaccgattaatgctcttaatttagcaaaaggtggatggtcagttatgaatatgttattgataattataatatttgttgctgcaccaattatattgaattttatttttaattacctctttataaaagtacttaaaattattgatccaatggactataaattagatatt

SEQ ID NO: 5756 - protein, 352 aa, Streptococcus agalactiae
MSDVVEKQTAKSFIMNVLNGLALGTVIVLIPGAILGELMKALLPMWSGFATLIAATAVATSMMGLVIGIMVGLNFKFNPIQSASLGLAVMFAGGAATFLKGAIMLKGTGDIINMGITAALGVLLIQFLSDKTKSFTLIVIPTVTLLLVGGVGHVLLPYVKMITTMIGQGIASLLGLQPVLMSILIAMIFCFLIVSPITTVGIALAISLSGIGSGAANLGICAASFGLCMAGWSVNSKGTALAHVLGSPKISMANVLAKPKIMLPMISSAAILGILGALFNIQGTPASAGFGISGLIGPINALNLAKGGWSVMNMLLIIIIFVAAPIILNFIFNYLFIKVLKIIDPMDYKLDI

SEQ ID NO: 5757 - DNA, 990 bp, Streptococcus agalactiae
atgaaactcaaagtatttaatgttagagaagaagaagcaacattagcacaagattgggcaaaccgaaatcatgtggaactttctatgagtgaaggacctttgacattggaaactgttaatgaggtagaaggttttgatgggattgctaatgcacagattgggcctttagatgatgctatttatcctcttctcaaagaaatgggaattaagcaaatcgctcagcgcagtgctggtgtcgatatgtataatcttgagttagctaagcaacatggtattatcattagcaatgtgccaagttactcaccggagtctattgcagaatttacagtgacaatcgctcttaaccttattcgaaaagttgagcttattagagctaatgttcgtgaacagaatttttcatggaccttgccaattcgaggacgagtcctaggtaacatgactgtggctataataggaactggtcgcattggtctagcgactgctaaaatttttaaagggttcggatgtcgtgttattggttatgatatttaccataatccaatggcagatggtatccttgagtatgtcaattcggtagaagaagctgttgaaaaagctgatcttgtgtccttacatatgccaccaactgctgaaaatacgcatctatttaatttagatatgtttaaacagtttaaaaaaggtgctattttaatgaatatggcacgtggagcattggtggaaaccaaagatcttcttgaggctttagatcaagggcttttggagggagctggtattgatacttatgaatttgaggggccatatatacctaaaaattgtcaaggtcaggacatttcagacaaggatttcctaagactgattaaccatccgaaagtaatatacactcctcatgcggcttattatacagatgaagcggtcaaaaatctagtagagggtgccttaaatgcttgtgtagaagtggttgaaacgggaacaactactacgagagtcaac

SEQ ID NO: 5758 - protein, 330 aa, Streptococcus agalactiae
MKLKVFNVREEEATLAQDWANRNHVELSMSEGPLTLETVNEVEGFDGIANAQIGPLDDAIYPLLKEMGIKQIAQRSAGVDMYNLELAKQHGIIISNVPSYSPESIAEFTVTIALNLIRKVELIRANVREQNFSWTLPIRGRVLGNMTVAIIGTGRIGLATAKIFKGFGCRVIGYDIYHNPMADGILEYVNSVEEAVEKADLVSLHMPPTAENTHLFNLDMFKQFKKGAILMNMARGALVETKDLLEALDQGLLEGAGIDTYEFEGPYIPKNCQGQDISDKDFLRLINHPKVIYTPHAAYYTDEAVKNLVEGALNACVEVVETGTTTTRVN

SEQ ID NO: 5759 - DNA, 435 bp, Streptococcus agalactiae
atggagaaaacaatggatatggaacaacgtgaagaagttgtatcttataaccgagcgaaagtatggcagttagttatgtttgccatgaacaatgcttctacaaatatatacttatttacgtttatgtttgttacctatttctcaactggcgttcttggcttggcagccatttttgtcagtcaaattatgggttatatccgtatttttgatggttttattgatccagctattggtattatgattgataaaactgatacaaaatttggtaagtatcgtcctattttgattattgggaacgttattacggctttgtcattgatttttcttcttgcattgagaggtgtcgatgaaaatattcgtttcccattatttatccttgttctaattatccataaaattggatactcaatgcaacagacaataactaaagcaggg

SEQ ID NO: 5760 - protein, 145 aa, Streptococcus agalactiae
MEKTMDMEQREEVVSYNRAKVWQLVMFAMNNASTNIYLFTFMFVTYFSTGVLGLAAIFVSQIMGYIRIFDGFIDPAIGIMIDKTDTKFGKYRPILIIGNVITALSLIFLLALRGVDENIRFPLFILVLIIHKIGYSMQQTITKAG

SEQ ID NO: 5761 - protein, 1053 aa, Streptococcus agalactiae
ATGACAACATCATTAATGACAGGCGGTCAGTTTGTAGTTTCAGGTTTCTTAGTACCAAAATTTGGTAATTTTACACCTCAATTCTTCAATGTCCTTATTTTTGGAACAATTCTTATTTCAGCTATTTTAGCAATCGTTGCAATTATTGGGATTTGGGCAAAAGACAGAAAAGAATTCTTTGGTTTAGGAGAAAATACCCAAAAGACTGCTCTAAAAGATTACTGGAAGGTGTTGAAAGGAAATAAACCGCTTCAGATATTATCCATTGCTGCAGCTTTGGTAAAATTTGCCATCCAATTCTTTGGCGATTCCGTTGTTATGGTGCTATTGTTTGGTATTTTATTTGGTAATTATGCTTTATCAGGACAATTCTCACTTCTTTTCATTGTTCCTGGTGTTATTATTAATATTTTGTTCTCAACAATTGCTCGTAAAAAAGGTCTTCGTTTTTCATATGTCAGAGCAATTCAGGTCGGTATGATTGGTTTACTTGCTTTTGGTGCAGTTCTTTACGTTGGTAAGCCTGGTGACCTTAGTTTAACAAGCCTAAATCTTTATACTATTTTATTTATCGTTACGAATATTATTGCGAGATACGCTTCACAAGCACCTGCTAGTTTAGTATTGACTATGGGAGCAGATATTTCTGACTATGAAACTTCTGAATCCGGTCGTTATGTATCAGGAATGATTGGAACTATCTTCTCCTTAACAGATTCGATTGCTTCTTCATTTGCTCCTATGGTAGTAGGTTTTGTGTTAGCAGGAATTGGATTTTCAAAATCGTTTCCAACTATCGAAACACCACTGACCCCTGATTTAAAAATGGCAGCTATTAGTCTCCTTGTGGCCATTCCATTTATAGCTTTGTCTATAGCCCTTCTTTTAATGAAATTTTACAAACTAGATAAAGAAGAAATGTTTCGTATTCAAGAGAAGATTCAAGTTATGAAAGCAGCAACTACTAAGGAACGTGCTAAAGATATTGCTCGTAATGTTCCTTTGACAGATATGGATTATGTTGATGTAACAAAATATCCTATTGATAAAGAT

SEQ ID NO: 5762 - protein, 351 aa, Streptococcus agalactiae
MTTSLMTGGQFVVSGFLVPKFGNFTPQFFNVLIFGTILISAILAIVAIIGIWAKDRKEFFGLGENTQKTALKDYWKVLKGNKPLQILSIAAALVKFAIQFFGDSVVMVLLFGILFGNYALSGQFSLLFIVPGVIINILFSTIARKKGLRFSYVRAIQVGMIGLLAFGAVLYVGKPGDLSLTSLNLYTILFIVTNIIARYASQAPASLVLTMGADISDYETSESGRYVSGMIGTIFSLTDSIASSFAPMVVGFVLAGIGFSKSFPTIETPLTPDLKMAAISLLVAIPFIALSIALLLMKFYKLDKEEMFRIQEKIQVMKAATTKERAKDIARNVPLTDMDYVDVTKYPIDKD

SEQ ID NO: 5763 - protein, 1023 aa, Streptococcus agalactiae
ATGGCAAAAATTATTTCATTAGGTGAGGTTCTTTTGCGATTATCTCCACCTCAATATCACACACTGATGCAGGCTAATCACCTAAAATGCCAATTTGGTGGTTCAGAACTTAATGTCTTAGCAAGCCTTGCTCAACTAGGTCACCATGTAGGATTAGTCTCAGCTTTGCCTGATAATGATTTGGGTAAGATGGCAAGACAATTTATATTGTCACAGCAAATTAGTCCAGCTGCTATAATTAAAAAAGAAGGACGACTAGGAATTTATTATTATGAACAAGGATTTTCGGTAAGAACAAATAAGGTTATCTACGATCGTAACTATTCATCTTTTTGGGAAAGTACCTTGAGTGATTATGATTTTACTTCTATTTTTAAGGGAGTGGATTGGTTTCATGTTTCTGGAATTACTCCAGCACTAACCAAGGACTTATATGAGGTGACTCGGTTCCTTATGACAAAAGCTAAAGAAGGAGGTGTAAAAGTATCGATTGATCTCAATTTTCGTGAGAGTTTATGGTCATCTTTTCAAGAGGCGCGTGAGCAATTATCGCCACTATTAGGATTATCAGATGTTTGCTTTGGCTTAGAGCCGATTTATTTAGCTGGCGAAAGTGAAGATTTAAAAGATGAGTTGGGCTTATCCAGACCTTACCTTGATATTGAATTACTTGAAAAGATAACTCAAAAGATTGTTCAAGAATATGGGTTAGACTATATTGCCTTTACTCAAAGGGAAATGGGATATACTAATCAGTATATGTTAAAATCATATTTGTATCATAATAATATGTTATATCAAACTGATAAAACTGGCGTTGAAGTATTAGATCGTGTGGGGACGGGAGATGCCTTTGCTGCAGGTTTAATTCATGCGCTTCTGGAAAAAGAAACTCCTCAAAGGGCCTTAGAAATTGCTATGACTACATTTAAATACAAACATACCATTCAAGGAGATATCAATATCATGACACGAGATGATATTGCTTACCTCATTGAAAAAGAAACAAATGATATTAAACGA

SEQ ID NO: 5764 - protein, 341 aa, Streptococcus agalactiae
MAKIISLGEVLLRLSPPQYHTLMQANHLKCQFGGSELNVLASLAQLGHHVGLVSALPDNDLGKMARQFILSQQISPAAIIKKEGRLGIYYYEQGFSVRTNKVIYDRNYSSFWESTLSDYDFTSIFKGVDWFHVSGITPALTKDLYEVTRFLMTKAKEGGVKVSIDLNFRESLWSSFQEAREQLSPLLGLSDVCFGLEPIYLAGESEDLKDELGLSRPYLDIELLEKITQKIVQEYGLDYIAFTQREMGYTNQYMLKSYLYHNNMLYQTDKTGVEVLDRVGTGDAFAAGLIHALLEKETPQRALEIAMTTFKYKHTIQGDINIMTRDDIAYLIEKETNDIKR

SEQ ID NO: 5765 - protein, 1797 aa, Streptococcus agalactiae
ATGTTATATCCATTATTGACAAAAACAAGAAATACTTATGATTTAGGCGGTATTTGGAACTTTAAATTAGGAGAACATAATCCAAATGAATTACTACCTTCAGATGAAGTCATGGTTATCCCGACTTCATTTAATGATTTGATGGTAAGTAAAGAAAAACGTGATTATATAGGTGATTTTTGGTATGAAAAAGTCATTGAAGTACCTAAAGTATCAGAGGGTGAAGAGATGGTGCTACGTTTTGGCTCAGTGACACATCAAGCTAAAATTTATGTTGACGGTATATTGGTAGGGGAGCATAAGGGAGGTTTTACTCCTTTTGAAGTTCTTGTTCCTGAATGTAAGTACAATAATGAGAAAATTAAGGTATCAATTTGTGCTAATAACGTTTTAGACTATACCACGCTTCCGGTCGGAAATTATAGTGAAATCATTCAAGAAGATGGTAGCATTAAGAAGAAAGTACGTGAGAATTTTGATTTCTTCAATTATGCAGGTGTGCATCGTCCTCTTAAGTTGATGATACGTCCTAAAAATCATATTTCTGATATTACAATTACAAGTCGTCTATCAGATGATTTACAGTCAGCAGATTTACATTTTTTAGTTGAGACTAATCAAAAGGTTGACGAAGTTAGAATTAGCGTTTTTGATGAAGATAACAAACTAGTGGGTGAAACGAAGGATAGCAGATTATTTCTTAGTGATGTCCATCTTTGGGAAGTTTTAAATGCCTATCTGTACACAGCGCGTGTTGAAATTTTTGTTGATAATCAACTCCAAGATGTCTATGAGGAAAATTTTGGTCTTAGAGAAATAGAAGTGACAAATGGTCAATTCCTATTGAATCGCAAACCTATTTATTTTAAAGGATTTGGTAAACATGAAGATACGTTCATTAATGGCAGAGGTTTGAATGAAGCTGCTAACTTAATGGATTTGAATCTTTTGAAGGATATAGGGGCAAACTCTTTTAGAACATCCCACTATCCTTATTCTGAAGAAATGATGCGTTTAGCAGATCGAATGGGAGTGTTAGTGATAGATGAGGTTCCAGCAGTAGGGTTATTTCAAAACTTTAACGCTTCCTTAGATTTGTCACCAAAAGATAATGGTACGTGGAGTTTGATGCAAACAAAAGCTGCGCATGAACAAGCTATCCAAGAATTAGTGAAGCGTGATAAAAATCATCCTAGCGTCGTGATGTGGGTAGTCGCTAACGAACCGGCTAGTCATGAAGCGGGAGCACACGATTATTTTGAGCCATTAGTAAAACTTTATAAAGATTTAGACCCTCAAAAACGTCCTGTCACCTTGGTTAATATTTTAATGGCAACCCCAGATAGAGACCAAGTGATGGACCTGGTTGATGTTGTCTGCCTTAATCGTTACTATGGTTGGTACGTTGACCACGGTGATTTAACAAATGCAGAAGTAGGTCTAAGAAAAGAGTTATTAGAATGGCAAGATAAATTTCCTGACAAACCAATTATCATAACGGAGTATGGCGCTGATACGTTGCCGGGATTACACTCTACTTGGAATATTCCATATACAGAAGAATTTCAATGTGATTTTTATGAAATGAGTCATCGTGTTTTTGATGGTATTCCTAATTTAGTTGGTGAGCAAGTCTGGAACTTTGCAGACTTTGAAACTAATCTGATGATACTTCGTGTACAGGGGAATCACAAAGGTCTCTTTTCAAGGAATCGCCAGCCAAAACAAGTCGTCAAAGAATTTAAAAAACGCTGGATGACTATTCCTCATTACCATAATAAAAAAAATAGTGTAAAA

SEQ ID NO: 5766 - protein, 599 aa, Streptococcus agalactiae
MLYPLLTKTRNTYDLGGIWNFKLGEHNPNELLPSDEVMVIPTSFNDLMVSKEKRDYIGDFWYEKVIEVPKVSEGEEMVLRFGSVTHQAKIYVDGILVGEHKGGFTPFEVLVPECKYNNEKIKVSICANNVLDYTTLPVGNYSEIIQEDGSIKKKVRENFDFFNYAGVHRPLKLMIRPKNHISDITITSRLSDDLQSADLHFLVETNQKVDEVRISVFDEDNKLVGETKDSRLFLSDVHLWEVLNAYLYTARVEIFVDNQLQDVYEENFGLREIEVTNGQFLLNRKPIYFKGFGKHEDTFINGRGLNEAANLMDLNLLKDIGANSFRTSHYPYSEEMMRLADRMGVLVIDEVPAVGLFQNFNASLDLSPKDNGTWSLMQTKAAHEQAIQELVKRDKNHPSVVMWVVANEPASHEAGAHDYFEPLVKLYKDLDPQKRPVTLVNILMATPDRDQVMDLVDVVCLNRYYGWYVDHGDLTNAEVGLRKELLEWQDKFPDKPIIITEYGADTLPGLHSTWNIPYTEEFQCDFYEMSHRVFDGIPNLVGEQVWNFADFETNLMILRVQGNHKGLFSRNRQPKQVVKEFKKRWMTIPHYHNKKNSVK

SEQ ID NO: 5767 - protein, 669 aa, Streptococcus agalactiae
ATGGCTAGACCCTTAGTAGAACAAACAGCAGATCGTCTATTGCATTTAATTTTAGAAAGAGAATACCCTGTTGGTGCTAAGCTCCCCAATGAATATGAATTAGCGGAAGATCTAGATGTTGGTCGCAGCACAATCCGAGAAGCAGTCAGAAGTTTAGCAACGCGTAATATTTTAGAAGTCAGACAGGGCTCTGGAACATATATTAGTTCTAAAAAGGGTGTTTCTGAGGATCCATTAGGGTTCTCTCTAATAAAGGACACAGATAGGTTGACATCAGATCTCTTTGAACTACGCCTTTTATTGGAACCTCGAATAGCGGAGCTGGTAGCTTATAGAATTACAGATGATCAGTTACAATTACTCGAAAAGCTTGTTGGAGATATTGAAGATGCTGTTCACGCAGGCGATCCGAAACATTTACTTTTAGATGTGGAATTTCATTCCATGCTAGCTAAATACAGTGGTAATATTGCAATGGATAGCCTTTTGCCAGTCATCAACCAGTCAATTCATCTGATAAATGCGAATTATACAAATCGTCAGATGAAGTCGGATAGTTTAGAAGCACATAGAGAAATTATCAAAGCAATCCGAGAAAAAAATCCAGTAGCTGCACATGATGCTATGCTTATGCATATCATGAGTGTTAGACGTTCAGCATTGAAAGCT

SEQ ID NO: 5768 - protein, 223 aa, Streptococcus agalactiae; identical to SEQ ID NO: 1324

SEQ ID NO: 5769 - protein, 615 aa, Streptococcus agalactiae
ATGTTAAATCAATTGAAAAACAACTATTTCTTCGCTGTTATTCGAGGAAAATCATCTGAGGATGCACTAGAAATCGCAAAGCATGCTATTTTAGGTGGTATTCGGAATATTGAAGTAACTTTTTCGACTCCTGAAGCAAGCAAAGTCATCAAACAATTATCAGATGACTTTAAAAATAATAAAAAAATTATTGTGGGGGCCGGAACGGTTATGACAACTGAACTTGCTAAAGATGCTATTGATGCTGGAGCTAAATTTTTGGTTAGCCCACACTTTGATTCAGATATTGCTAATTTAGCTAATGAAAACAAGGTTTATTATTTCCCAGGCTGTGCAACGGCAACAGAAATCGTGGTAGCTAGAAAGTATAAATGTCAGATTATAAAGCTTTTTCCAGGTGGAGTTGTGGGCCCAGATTTGATCAAAGATATTCATAGTCCTATTCCAGATGTTGATTTAATGCCATCAGGTGGCGTCTCTGTTTCAAATGTAGCTGAATGGAGAAAAGCAGGAGCAGTTGCGGTTGGTGTTGGCTCAGCATTATCTAGTAAAGTAGCCACAGAAGGCTATGATAGTGTTACTAAAATAGCTAAACAGTTTGTTTCTGCACTTGAT

SEQ ID NO: 5770 - protein, 205 aa, Streptococcus agalactiae
MLNQLKNNYFFAVIRGKSSEDALEIAKHAILGGIRNIEVTFSTPEASKVIKQLSDDFKNNKKIIVGAGTVMTTELAKDAIDAGAKFLVSPHFDSDIANLANENKVYYFPGCATATEIVVARKYKCQIIKLFPGGVVGPDLIKDIHSPIPDVDLMPSGGVSVSNVAEWRKAGAVAVGVGSALSSKVATEGYDSVTKIAKQFVSALD

SEQ ID NO: 5771 - DNA, 1398 bp, Streptococcus agalactiae
atgacgtttaatactgaaacatttatgttaaaaaatcaagcagctatacagctgtatgaagaggtcaagaggcaacctatttttgattatcattgccacttagatccaaaggacatttttgaagatcgtatttttgataatattgtggatttgtggcttggtggtgaccactataaatggcgtcttatgagggctaatggtatttctgaagcagaaattacaggtccagcatccaaccttgagaaatttaaatcatttgctagaacactagaaagagcatacggtaatcctgtttaccattggtctgctatggaattgaaaaatgtctttggtgttaatgagattttgacagaatcaaatgctgaggaaatttatcatcgtttaaatcatttcttgaaagagcataaaataagtcctagacgtttaattgcagatagcaaagttatgtttattggtactacagaccatcctcttgatactctcaagtggcataaaaagttggctgctgatgagagttttaaaacagttgttgctccgacatttaggccggatgaagcttttattgaacatcgacattttgttgattttataactaaactgggtgacattactcaaaaagagattacagatttttcaacatttatagcagcaatggaagaacgcattgcgtattttgctcaaaatggttgtagggctagcgatatcagttttacggaaatcgtctttgaacaaactgatgaattggagttgaacgatttatttaataaagtttgtgaaggctatatcccaaatcaatcagaaatcagcaaatggcaaacagctgtttttatggaactttgccgattatataaaaaatatggttttgtaacacaggtgcattttggagctttgagaaataatcattctactatttttgaaaaattgggagctgacgtgggtgtggattcacttggtgaccaagtggctttaactgttaatatgaaccgtttatkggattccttggttaaaaaagatagtctgcctaaaatgatttggtataatctcaatccagcttacaatatagcagtagctaacactttggcaaattttcaagctaacgaacttggagtgagatcttaccttcaatttggtgcaggttggtggtttgcagatactaaattagggatgattagtcaaatgaatgccttagcagagcaaggcatgttggcgaattttattggtatgttaacagattctagaagttttctatcttatcaacgtcatgactattttcgacgtattttatgtacctacttaggagaatggattgaagaaggagaagttccagaagattatcaagctttaggaagtatggctaaagacattgcttatcaaaatgcagttaattattttaagaac

SEQ ID NO: 5772 - protein, 466 aa, Streptococcus agalactiae
  VARIANT 331: Xaa = Any Amino Acid
MTFNTETFMLKNQAAIQLYEEVKRQPIFDYHCHLDPKDIFEDRIFDNIVDLWLGGDHYKWRLMRANGISEAEITGPASNLEKFKSFARTLERAYGNPVYHWSAMELKNVFGVNEILTESNAEEIYHRLNHFLKEHKISPRRLIADSKVMFIGTTDHPLDTLKWHKKLAADESFKTVVAPTFRPDEAFIEHRHFVDFITKLGDITQKEITDFSTFIAAMEERIAYFAQNGCRASDISFTEIVFEQTDELELNDLFNKVCEGYIPNQSEISKWQTAVFMELCRLYKKYGFVTQVHFGALRNNHSTIFEKLGADVGVDSLGDQVALTVNMNRLXDSLVKKDSLPKMIWYNLNPAYNIAVANTLANFQANELGVRSYLQFGAGWWFADTKLGMISQMNALAEQGMLANFIGMLTDSRSFLSYQRHDYFRRILCTYLGEWIEEGEVPEDYQALGSMAKDIAYQNAVNYFKN

SEQ ID NO: 5773 - DNA, 1044 bp, Streptococcus agalactiae
atggaaatgtcatttaggtggtatggtgaagacgaccccgttactttagaaaatattggtcaaattccaacaatgaaagggattgttacagcgatatacgatgtaccagtaggagaagtttggtcacgtgagcgcattcaacagctgaaagaaaaggtagaggcagcagggcttaaaatttcggttatcgaatcagttcctgttcatgaagatatcaaattgggacgtccaacacgtgacctcttgattgataattatattcaaaccgtcaaaaatttggctgcggaaggtattgatactatttgctataattttatgccagtatttgactggacacgcactgatttagcatatcaatatccagatggttctacagctttgatatttgatgagacggtttctaaaaaaatggatccagtaaacggtgaattatctttgccaggatgggatgccagctatagtaaagaagaaatgaaggctatcatggatgcctatgctgaaattgatgaggaaaaactttgggaaaatctcacttattttattaaacgtattattcctgaagcggaagccgtaggcgttaaaatggccattcatccggatgacccaccatattctatttttggtttacctcgcattattactgggttagaggctattgagcgttttgtgaaattgtacgatagtaaaagtaatggcatcactttatgtgtgggttcttacgcttctgatccccagaatgatgttttagagatttcgcgacgtgcttttgagttagatcgtgtaaactttgttcatgctcgcaatattaaattaggtgatggaaagtcatttaaagaatcggctcatccatcagaatacgggtcaatagacatgtatgaagttattaagttatgccatgaatttgggtttgagggtgctattcgacctgaccacgggcgtatgatttggggagaaacaggtcgtccaggatatggcctatacgatagagctttaggagccacttacctttctggtttatacgaagctgttattaaaggttcaaaa

SEQ ID NO: 5774 - protein, 348 aa, Streptococcus agalactiae
MEMSFRWYGEDDPVTLENIGQIPTMKGIVTAIYDVPVGEVWSRERIQQLKEKVEAAGLKISVIESVPVHEDIKLGRPTRDLLIDNYIQTVKNLAAEGIDTICYNFMPVFDWTRTDLAYQYPDGSTALIFDETVSKKMDPVNGELSLPGWDASYSKEEMKAIMDAYAEIDEEKLWENLTYFIKRIIPEAEAVGVKMAIHPDDPPYSIFGLPRIITGLEAIERFVKLYDSKSNGITLCVGSYASDPQNDVLEISRRAFELDRVNFVHARNIKLGDGKSFKESAHPSEYGSIDMYEVIKLCHEFGFEGAIRPDHGRMIWGETGRPGYGLYDRALGATYLSGLYEAVIKGSK

SEQ ID NO: 5775 - DNA, 837 bp, Streptococcus agalactiae
atgtcaaaaataattacatttaccaataaagttgtcgtcataacaggtgcaggcggtgttctctgtggttatatggctaaagaatttgcgaaagcaggcgctaaagtggcattattagatttgaatcaagaagctgctcaaacatttgctgatgaaattgtagcagaaggtggtatcgccaaggcttataaagctaacgttttgtctaaagaaaaccttgaagaagtgcatcaagccgttttagaggatcttggaccaactgatattttagttaatggtgcaggaggcaacaatcctaaagccacaactgataatgaatttcacgaattagacttaccttcagaaacaaaaaccttctttgagttagatgaagctggtattagctttgtttttaacttaaattatttaggaacattattgccaacgcaagtatttgcccaagatatggttggacgtgaaggagcgaatattattaatatctcttcaatgaatgctttcacccctctgaccaaaataccagcttattctggagctaaagcagctattagtaacttcacacaatggctagctgttcatttctcaaaagttggtatccgttgtaatgctattgcacctggtttcttggtaacaaatcagaaccgaagcttgttattcactgaggacggtcagccaactgcgcgtgctgagaaaattcttaataatacaccaatgggaaggtttggagaagcaagtgagctgattggcggattgttctttttagcagatgaaaaatcatcaagttttgttaatggcgttgtccttccgattgatggtggatttgctgcttactctggtgtt

SEQ ID NO: 5776 - protein, 279 aa, Streptococcus agalactiae
MSKIITFTNKVVVITGAGGVLCGYMAKEFAKAGAKVALLDLNQEAAQTFADEIVAEGGIAKAYKANVLSKENLEEVHQAVLEDLGPTDILVNGAGGNNPKATTDNEFHELDLPSETKTFFELDEAGISFVFNLNYLGTLLPTQVFAQDMVGREGANIINISSMNAFTPLTKIPAYSGAKAAISNFTQWLAVHFSKVGIRCNAIAPGFLVTNQNRSLLFTEDGQPTARAEKILNNTPMGRFGEASELIGGLFFLADEKSSSFVNGVVLPIDGGFAAYSGV

SEQ ID NO: 5777 - DNA, 810 bp, Streptococcus agalactiae
atggtagatacaaatcacaaaatcgctttttgcatagattccgatggttgcgcaatggatacaatgacatataagcatcaactcttttttggtccaattgctgcagatatatttgggatatcagaacaagaaagaacaagttttttaaaagagtgggatagagtcaatctttattcaagaactcgtggagttaatcggtttgtgggattggttatgggccttgagtttgccggagtagaacatattgataaattaaaagaatgggtcgaaacaacagactcattgtctaataattccttagagttagcgcttgccaacgattttagtagagatttagagaaggctttagaatggtccaatgaagtgaatcaccaaatcaaaaattatgagggagattctttagcgttttcaggtgtgttagaaagtttagaacgattaagtcaatttggtaatgtttatgtcgtgagttctgctaacaaggaagctgtttggcaagagtgggaagaacagggattgctaaagtatgttgatgatatctattgtcaagatagaggtaaaaaagaagatgttatcgccactttaattgcaagtggttactgccgtgaaactattttgatggtaggagattccccaggtgatttggctgcagcagaacaaaatggtattgcattttacccagtacttgttggtaaggaagtcaaatcatgggaaattcttagagaagatattggtgaagcttttgcaaaaggtcaattcgaacagcaaaggcaaaaagaatctattaataccttttgggctaatttagataac

SEQ ID NO: 5778 - protein, 270 aa, Streptococcus agalactiae
MVDTNHKIAFCIDSDGCAMDTMTYKHQLFFGPIAADIFGISEQERTSFLKEWDRVNLYSRTRGVNRFVGLVMGLEFAGVEHIDKLKEWVETTDSLSNNSLELALANDFSRDLEKALEWSNEVNHQIKNYEGDSLAFSGVLESLERLSQFGNVYVVSSANKEAVWQEWEEQGLLKYVDDIYCQDRGKKEDVIATLIASGYCRETILMVGDSPGDLAAAEQNGIAFYPVLVGKEVKSWEILREDIGEAFAKGQFEQQRQKESINTFWANLDN

SEQ ID NO: 5779 - DNA, 1788 bp, Streptococcus agalactiae
atgacacatttagttgacttaacaaagaaacccttcaatctaaatcaagaagcaattgagtggattgaaaaaacaattaatgagatgacattggatgagaaaattgggcaactttttttcaatatgggagctagtcgttcagaagaatatttaacagatgttttggatcggtatcatattgctgctgttcgctataatagaggtagttcaagtgaaatttatgatcagaatttaattttacagacaaagtcgaaattaccgatgttgattgctgcaaatacagaagctggtggagacggtgctgtcacagatggaactaaagttggcgatgaaataaaagtggctgctacaaatgatccgaaatatgcttatgaaatgggaagaatcgcagggatggaggcatctgctgtgggttgtaatgcttcatttgctccaattgtagatttgacacgtaattggcgtaatcctatcatagctagtcgaaattggggtgctaacgttgatcaaattatctcactttcaaaagagtatatgaaaggaatcatgcaatataatattgtacctttcgctaaacattttccaggggatggcattgatgagcgtgatcatcatttgtcatttgcttccaatcctatgagtaaagaggaatggatgtcgacatttggccgcatttatggtgaattggctgacgcaggtctaccaggagtcatggcaggtcacatacatttaccaaatgttgaaaaagaaatgcatccagagcgagaccttgatgatatgttaccagcttcattgaataaaacacttttagatgagttattgagaggagagttaggttataatggagctattgtaacggacgcttctcatatggttggaatgactgcttcaatgccaaggagagatttgttgccaacggcgattgaagcaggttgtgacttattcttattctttaatgaccccgatgaagacattcaatggatgaaagaaggttacgaaaaaggtattctaacagaggaacgtctccatgacgctttacgtcgtactctcggtctaaaagcgaaattaggcttgcataactatgagggacgtcgccaagaactctttatgcctaaagataaggctatggctttaatcaacacattagagtcgcaaaaaatagctgatgaagttgctgataaagcagtaactctggtaaaagataaacaaaaagatatctttccagtaaatccagaacgttatcgtcatatcttacttgttaacgttgaaggatataagggaggttttggtgcgatgattgctggaaacaaacaacgtgcatcggattacatgaaagagttacttgaggcacgtggccatgaagtaactgtctgggagtctaccgaagagcgcattatgaaattgcctcaagaggagcgggcagcagctatcgctaatgtttacgcacaaaaacagccaatcgcaaatctaacagaacactatgacttgattattaacttggtagatgtcaatgctggaggaacaacacaacgtattatttggccagcagctaaaggcacccctgatcagcctttttacgttcatgaaataccatctattgtgatttcagtacaacatgcatttgctttagcagatatgccacaggtagggacttatattaatgcttatgatgggcttcctagcacgataagtgcagtagttgcgaaattggctggagaatcagaatttacaggagtttcaccagtagatgcttactgtggtttaattgatacacatttatggcgccaatgc

SEQ ID NO: 5780 - protein, 596 aa, Streptococcus agalactiae
MTHLVDLTKKPFNLNQEAIEWIEKTINEMTLDEKIGQLFFNMGASRSEEYLTDVLDRYHIAAVRYNRGSSSEIYDQNLILQTKSKLPMLIAANTEAGGDGAVTDGTKVGDEIKVAATNDPKYAYEMGRIAGMEASAVGCNASFAPIVDLTRNWRNPIIASRNWGANVDQIISLSKEYMKGIMQYNIVPFAKHFPGDGIDERDHHLSFASNPMSKEEWMSTFGRIYGELADAGLPGVMAGHIHLPNVEKEMHPERDLDDMLPASLNKTLLDELLRGELGYNGAIVTDASHMVGMTASMPRRDLLPTAIEAGCDLFLFFNDPDEDIQWMKEGYEKGILTEERLHDALRRTLGLKAKLGLHNYEGRRQELFMPKDKAMALINTLESQKIADEVADKAVTLVKDKQKDIFPVNPERYRHILLVNVEGYKGGFGAMIAGNKQRASDYMKELLEARGHEVTVWESTEERIMKLPQEERAAAIANVYAQKQPIANLTEHYDLIINLVDVNAGGTTQRIIWPAAKGTPDQPFYVHEIPSIVISVQHAFALADMPQVGTYINAYDGLPSTISAVVAKLAGESEFTGVSPVDAYCGLIDTHLWRQC

SEQ ID NO: 5781 - protein, 1083 aa, Streptococcus agalactiae
ATGTCAAAACTTAATCGTATACGCCATCACTTACATTCAGTCCAAGCTGAACTTGCTGTCTTTTCTGATCCTGTGACAGTCAACTATTTAACAGGTTTCTTTTGCGATCCCCATGAAAGACAAATGTTTTTATTTGTCTATGAAGATCGCGATCCTATTTTATTTGTACCAGCACTAGAAGTATCGCGTGCAAAACAAAGTGTACCATTTCCCGTCTTTGGTTACATAGATTCAGAAAATCCTTGGCAAAAAATAGCTAGCAACTTACCATCCTTTTCTGTTTCTAAAGTTCTAGCCGAATTTGATAATCTTAATGTTACTAAATTCCAAGGTCTCCAAACCGTTTTTGATGGTCATTTTGAAAACCTAACACCTTATATTCAAAACATGCGCCTAATTAAATCACGAGATGAAATTGAGAAAATGTTAGTCGCTGGAGAATTTGCTGATAAAGCTGTTCAAGTTGGATTTGACAATATCTCGCTAAACAACACTGAAACCGATATTATCGCTCAAATCGAATTTGAAATGAAAAAACAAGGTATCAATAAAATGAGTTTCGACACTATGGTTTTGACTGGCAATAATGCAGCAAATCCACATGGTATCCCAGGAACTAATAAAATCGAAAATAATGCTTTGTTATTATTTGATTTAGGTGTAGAAACACTAGGTTATACGTCAGATATGACCCGTACAGTAGCAGTGGGGAAACCTGATCAATTCAAAAAAGATATTTACCATTTATGTCTTGAAGCACATCAAGCGGCTATTGATTTTATTAAGCCAGGAGTCCTTGCTTCTGAAGTTGACGCAGCAGCAAGAAATGTTATTGAAAAGGCTGGTTATGGACAATACTTTAACCACCGCCTTGGTCATGGATTAGGTATGGATGTCCATGAATTTCCATCTATTATGGCTGGTAACGATATGGAGATTCAAGAAGGCATGTGCTTCTCTGTTGAACCAGGTATTTATATACCAGATAAAGTTGGTGTGCGAATTGAAGACTGCGGTTATGTGACTAAAACCGGCTTTGAAGTATTTACCAAAACACCCAAGGAACTACTCTATTTTGAAGGA

SEQ ID NO: 5782 - protein, 361 aa, Streptococcus agalactiae; identical to SEQ ID NO: 1338

SEQ ID NO: 5783 - protein, 945 aa, Streptococcus agalactiae
ATGGCAACTGTTAGTCGTGTGGTAAATGGAAATAAAAATGTCAAGGAAAATACACGTAAGAAAGTCCTTGAAGTTATTGATCGTCTTGACTATCGTCCAAATGCTGTGGCGCGTGGTTTAGCAAGTAAAAAAACGACAACTGTTGGTGTTGTCATTCCTAATATCGCAAATAGCTACTTTTCAATTTTAGCGCGTGGTATTGATGATATTGCAGCAATGTACAAATATAACATTGTCCTTGCTTCAAGTGATGAAGACGATGATAAAGAGGTTAATGTTGTTAATACTTTGTTTGCTAAGCAAGTAGACGGTATTATTTTTATGGGACACCACTTAACTGAAAAGATTCGTGCAGAGTTCTCTCGTTCACGCACACCGATTGTTTTAGCAGGTACTGTGGACCTTGAGCATCAATTACCAAGTGTTAATATCGATTACAAAGCAGCAGCAGTTGATGTTATTGATATTTTAGCTGGCAATCATAAAGACATTGCTTTTGTATCAGGACCACTTATTGACGATATTAATGGCAAGGTTCGTTTGGCAGGATACAAAGAAGGTCTCAAGAAAAATGGCTTAAACTTTAAAGAGGGGTTGGTTTTTGAAGCCAACTACCGTTATGCTGAAGGCTTTGCATTAGCTCAACGTGTGATTAATGCTGGAGCAACAGCAGCATATGTTGCTGAGGATGAGTTAGCGGCAGGTTTGTTAAATGGTCTTTTTGAGGCAGGTAAACGTGTTCCTGAAGATTTTGAAATTATCACAAGCAATGACTCGCCAATCGCACAATATACACGTCCTAACTTAACTTCTATCAGTCAACCGGTCTATGATTTGGGTGCTGTTAGCATGCGTATGCTAACAAAAATTATGCACAAAGAAGAGTTGGAAGAAAAAGAAATAGTGCTTAATCACGGGATTGTTAAACGTGGCACAACAAATAAT

SEQ ID NO: 5784 - protein, 315 aa, Streptococcus agalactiae; identical to SEQ ID NO: 1340

SEQ ID NO: 5785 - protein, 1463 aa, Streptococcus agalactiae
ATGACAAATGAATTGATAATGCAGCTTTTGAGTGGTATTTACCTAGTGATGGGAATCACTGGAAGAAATTAGAGGAGTCTATATCAGACCTTAAAAAACTTGGAATTAGTAAAATCTGGTTACCACCAGCATTTAAGGGAACTAGCAGTGATGATGTAGGATATGGTGTTTATGATCTCTTTGATTTAGGAGAATTTGACCAGAATGGAACAATTAGAACAAAATATGGTAGGAAAGAAGAGTATCTAAAGCTTATTAAGTCGTTAAAGGCAAATGGCATTAAACCGTTTGCAGATATCGTTCTTAACCATAAAGCCAATGGTGATCATAAAGAAAAATTTCAAGTCATCAAAGTCAATCCTGAAAATCGTCAAGAAGCATTAAGTGAACCCTATGAGATTGAAGGATGGACGGGATTTGATTTCCCAGGTAGACAGGGTGAGTACAATGATTTTAAATGGCACTGGTACCACTTTACTGGTTTAGATTACGATGCTAAAAATAATGAAACAGACATCTTTATGATTGTAGGCGATAATAAAGGTTGGGCAGACGATGATTTGATTGATGATGAAAATGGTAATTTCGATTATCTCATGTACAATGACATTGATTTTAAGCATCCTGAAGTTATAAAAAACTTACAAGATTGGGCTAAGTGGTTTATTGAAACTACAGGCATTGAAGGTTTTCGTTTGGATGCTGTGAAACATATCGATTCTTACTTTATTCAAACTTTCATTAATGATATTCGTACAAAAATAAAACCCGATTTAGAGGTCTTTGGCGAATATTGGAAATCTGACCAAACATCAATGAAGGACTATTTAGAGGCAACACAATTTCAATTTTCTCTTGTTGATGTCACCTTGCATATGAATTTTTTTGATGCCAGTCACCAAAACCGTGATTTTGATATGCGAACAATTTTTGATGATAGTCTTGTTATTGATAATCCTGAGTATGCTGTTACATTCGTAGAAAATCACGATACGCAAAGTGGACAAGCTCTAGAAAGTAGAGTGGAAGATTGGTTTAAACCTTTAGCTTATGGCTTGATACTTTTACGCCAACAAGGGACTCCATGTCTTTTTTATGGTGATTACTATGGCATTCAAGGAGAATTTGGCCAACCATCCTTTAAAGAGGTTATTGATAAAATGGCTGAGCTACGCCAAAACTATGTATTTGGCGAACAAGTCGATTACTTTACGCATTCAAATTGTATTGGTTGGACTTGTCTTGGGGATGAGGAACATAATTCTTGTTTAGCTGTGGTCCTAACAAATGGTGATCAGGGATGGAAACATATGGAAGTAGGGGAAATTTATGCAGGCAAAACTTTTGTTGATTATTTAGGCAATTGTGAACAAGAGGTTGTTATAGGAGATGATGGTTGGGGTGATTTTTTAGTTGCATCTGCGTCTATCTCGGCTTGGGTCCCTAAAATAGAGGAAGCTAAC

SEQ ID NO: 5786 - protein, 488 aa, Streptococcus agalactiae
MTNELIMQAFEWYLPSDGNHWKKLEESISDLKKLGISKIWLPPAFKGTSSDDVGYGVYDLFDLGEFDQNGTIRTKYGRKEEYLKLIKSLKANGIKPFADIVLNHKANGDHKEKFQVIKVNPENRQEALSEPYEIEGWTGFDFPGRQGEYNDFKWHWYHFTGLDYDAKNNETDIFMIVGDNKGWADDDLIDDENGNFDYLMYNDIDFKHPEVIKNLQDWAKWFIETTGIEGFRLDAVKHIDSYFIQTFINDIRTKIKPDLEVFGEYWKSDQTSMKDYLEATQFQFSLVDVTLHMNFFDASHQNRDFDMRTIFDDSLVIDNPEYAVTFVENHDTQSGQALESRVEDWFKPLAYGLILLRQQGTPCLFYGDYYGIQGEFGQPSFKEVIDKMAELRQNYVFGEQVDYFTHSNCIGWTCLGDEEHNSCLAVVLTNGDQGWKHMEVGEIYAGKTFVDYLGNCEQEVVIGDDGWGDFLVASASISAWVPKIEEAN

SEQ ID NO: 5787 - protein, 996 aa, Streptococcus agalactiae
ATGAAAGTTTTACTGTATTTAGAGGCTGAAGAATACTTGAAAAAGTCAGGTATCGGTCGTGCTATCAAACATCAAGAGAAAGCTCTTCAAATTGCTGGGATAGATTATACCACTAATCCTACAGATGACTTTGACCTTGTTCATATGAATACCTATGGTATTAGAAGTTGGCTTTTGATGAGTAAAGCTAAAAAAACTGGGAAAAAAGTAATTATGCATGGCCATTCCACTGAAGAGGACTTTAGAAATTCTTTTATTGGCTCAAATTTAGTATCCCCGCTTTTTAAATGGTACCTTTGCCGTTTTTATCAAAAAGCAGATGCCATTATAACCCCAACTGATTATTCTAAACAACTAATAAAAGCATATGGCATCAAGAAACCAATTTTTGTTTTATCTAACGGGATTGATCTAAGTCGCTATCAGAGGTCAGAAAAGAAAGAAGCTGCATTTCGTCACTATTTTCACTTAAGTAAGGATGATAAAGTTGTTATGGGGGCCGGTCTTTATTTCATGCGTAAGGGAATTGACCAATTTGTTGAAGTAGCTGCAAAAATGCCTGATATTCGTTTTATTTGGTTTGGAGAAACAAATAAATGGGTTATTCCTCGAAAGGTTAGGCAAATCGTTACCAAGCAACATCCCTCAAATGTTACTTTTGCTGGTTACATAAAAGGTGATGTTTATGAAGGTGCCATGAGTGCTAGCGATGCTTTCTTCTTTCCGAGTCGTGAAGAGACAGAAGGGATAGTAGTTTTAGAGGCTTTAGCTAGTCATCAGCATGTGGTTTTAAGAGATATCCCTGTGTATCACGGTTGGGTGACCGAAGACAGTGTTGAATTAGCGACTGATGTTGATGGTTTTGTTGAAAAGTTGGATAAAGTCTTATCTGGTAAGAGTGATAAGATTAAAGAAGGTTATCGTGTGGCTGAGAGTCGAAGTATCGAACGAATTGCCCATGAATTGGCAAGTGTTTATCAAAAAGTAATGGAGTTG

SEQ ID NO: 5788 - protein, 332 aa, Streptococcus agalactiae
MKVLLYLEAEEYLKKSGIGRAIKHQEKALQIAGIDYTTNPTDDFDLVHMNTYGIRSWLLMSKAKKTGKKVIMHGHSTEEDFRNSFIGSNLVSPLFKWYLCRFYQKADAIITPTDYSKQLIKAYGIKKPIFVLSNGIDLSRYQRSEKKEAAFRHYFHLSKDDKVVMGAGLYFMRKGIDQFVEVAAKMPDIRFIWFGETNKWVIPRKVRQIVTKQHPSNVTFAGYIKGDVYEGAMSASDAFFFPSREETEGIVVLEALASHQHVVLRDIPVYHGWVTEDSVELATDVDGFVEKLDKVLSGKSDKIKEGYRVAESRSIERIAHELASVYQKVMEL

SEQ ID NO: 5789 - protein, 1332 aa, Streptococcus agalactiae
ATGCGTATAGGTCTATTTACAGATACATACTTTCCCCAAGTTTCGGGAGTTTCAACAAGTATCCGAACTTTAAAGGAAGGGTTGGAGAAGGAAGGACACGAAGTTTATATTTTCACAACTACCGACCGTAATGTCAAACGTTTTGAAGACCCTACAATTATTCGTTTACCAAGTGTCCCTTTTATTTCTTTTACAGATCGTCGAGTAGTTTATAGAGGTTTAATTTCTGCTTATAGGATAGCTAAAGACTACGAACTTGATATTATTCATACTCAAACAGAATTCAGTTTAGGACTTTTAGGAAAATTAGTTGCAAAAGCTTTAAGAATACCTGTTGTGCATACTTATCATACTCAATATGAGGATTACGTTGGTTATATCGCAAAAGGCAAATTGATTAAGCCAAGTATGGTCAAATATATCATGCGTACCTACCTAAGTGATTTGGATGGTGTCATATGTCCTTCTCGAATTGTTCTCAATCTTCTAGATGGTTACGGTGTCAAAATTCCAAAACAAGTTATTCCGACAGGTATTCCTGTTGAGAACTATCGTCGAGAGGATATCTCTGAAGAAACAATCAAGAATCTACGAACGGAGCTTGGACTTGCGGATAATGATACAATGCTATTGAGTTTATCACGGGTATCTTTTGAAAAAAATATTCAAGCAATCTTGATGCATTTATCAGCTATCGTTGATGAAAATCCTCACGTAAAATTAGTGATAGTTGGAGATGGTCCTTATCTTTCAGATCTAAAAGAACTTGTTCACTCTCTAGAACTTGAAAATTCAGTTATTTTTACAGGTATGGTTGAGCATAGCCAAGTGGCTATCTACTATAAAGCATGTGATTTCTTTATTAGTGCTTCAACAAGTGAAACGCAAGGATTAACTTACATTGAGAGTCTGGCGAGTGGACGTCCAATCATTGCGCAAAGTAATCCTTATCTAGATGATGTTATTTCAGATAAAATGTTTGGAACTCTGTACAAGAAGGAAAGTGATTTGGCAGATGCTATCCTAGATGCAATAGCAGAGACACCCAAAATGACTCAAGAAGCTTATGAACAGAAATTATATGAGATTTCTGCTGAGAATTTCAGCAAGTCTGTATATGCTTTTTACCTAGACTTTCTGATTTCACAAAAAGCTAGTGTGAAAGAAAAAGTCTCTCTGACAATAGGAAATAAGGATAGCCATTCTACTCTTCGTTTTGTCAGAAAAGCGGTATATTTACCTAAGAAAGTTTTTACCTTTACAGGAAGAGCCTCTAAAAAAGTGGTAAAAGCACCTAAACGTCGTATTTCATCTATTCGAGATTTTTTAGAT

SEQ ID NO: 5790 - protein, 444 aa, Streptococcus agalactiae
MRIGLFTDTYFPQVSGVSTSIRTLKEGLEKEGHEVYIFTTTDRNVKRFEDPTIIRLPSVPFISFTDRRVVYRGLISAYRIAKDYELDIIHTQTEFSLGLLGKLVAKALRIPVVHTYHTQYEDYVGYIAKGKLIKPSMVKYIMRTYLSDLDGVICPSRIVLNLLDGYGVKIPKQVIPTGIPVENYRREDISEETIKNLRTELGLADNDTMLLSLSRVSFEKNIQAILMHLSAIVDENPHVKLVIVGDGPYLSDLKELVHSLELENSVIFTGMVEHSQVAIYYKACDFFISASTSETQGLTYIESLASGRPIIAQSNPYLDDVISDKMFGTLYKKESDLADAILDAIAETPKMTQEAYEQKLYEISAENFSKSVYAFYLDFLISQKASVKEKVSLTIGNKDSHSTLRFVRKAVYLPKKVFTFTGRASKKVVKAPKRRISSIRDFLD

SEQ ID NO: 5791 - DNA, 1941 bp, Streptococcus agalactiae
atgattaaaatcactttcccagatggtgcaattcgtgaatttgaatctggcatcacaacatttgaaattgcacaatcaatttctaactctttagctaaaaaagctttagctggtaaatttaatggtcaacttattgatacaacacgtgctatcgaagaagatggtagtattgagattgtaacacctgaccacgaagatgctttaggagttcttcgtcactcagcagcgcatttatttgctcaagctgcaaaacgcctttttccagacttatgtttaggtgtaggtccagctattcaagatggtttttactatgatactgataataaatcaggtcaaatttcaaatgatgatcttcctcgtattgaagaagaaatgaaaaaaattgttaaggaaaatcacccttgtattcgtgaagaaatcagtaaagaagaagcgttagaactttttaaagatgacccttataaagttgaattaattagtgaacatgctgaagatggtttaactgtttatcgtcaaggtgaatttgtagacctttgtcgtggacctcatgtcccatcaacaggacgtattcaagtctttcatcttctaaatgtcgctggggcttactggcgtggtaacagtgataatgctatgatgcagcgtgtctatggtactgcttggtttgataaaaaagatttgaaagcatatcttaaacgccgtgaagaagctaaggaacgtgaccaccgcaaattaggtaaagaacttgatttatttatggttaatcctgaagtaggtcaaggattgccattctggttgccaaatggagcaactattcgccgcgaattggaacgttacattgttgataaggagattgcttcaggttatcaacacgtttacacacctccgatggcatctgttgaattttacaagacttctgggcactgggaccactatcgtgaagacatgtttccaacaatggatatgggagatggagaggaattcgttcttcgtccaatgaactgcccacaccatattgaagtttataaacatcatgttcactcataccgtgaattgccaattcgtatcgctgaacttggtatgatgcaccgttatgaaaaatcaggggccctcacaggattgcaacgtgtacgcgaaatgacactcaacgatgcccatattttcgttacacctgagcaaattaaagatgaatttcttaaagctcttaatctcatagcagaaatttatgaagattttaacttaacagattaccgtttccgcttatcttatcgtgacccagaagataaacataagtattatgataacgatgagatgtgggaaaatgcacaagctatgctaaaagaggctatggatgattttggattagattattttgaagcagaaggcgaagcagccttttacggtcctaaattggatatccaggtgaaaactgctcttggtaatgaagaaacattatctactatccaactagatttccttcttccagaacgctttgatcttaaatacatcggtgcagatggtgaagaacatcgtccaattatgattcaccgcggtggtatttcaacaatggagcgctttacagctattttaattgaaacttacaaaggtgcctttccaacttggcttgctccacaacaagtttctgttattccaatttcaaatgaagcccacattgattatgcttgggaagtggctcgtgtccttaaagatcgtggtattcgtgctgaagtggatgaccgtaacgaaaagatgcaatataagattcgtgcggctcaaacccaaaaaattccatatcaattgattgttggtgataaggaaatggaagaaaaagccgtaaatgtgcgtcgctatggaagcaaagcgactgaaacaaaatctatagaggaatttgtagaaagtattttagctgatattgcaagaaaatctagacctgacgaagttaaa

SEQ ID NO: 5792 - protein, 647 aa, Streptococcus agalactiae; identical to SEQ ID NO: 1350

SEQ ID NO: 5793 - DNA, 684 bp, Streptococcus agalactiae
gtgcaaggtgatgacgaaacaatagagttattaaggtcgtatctagagggagctctttataaggttgtgatggctagtgatggtgaggaggctttttctttatttcagcaacatcagattgatttagcaatcatagatattacgctacctaaaatagatggatatgagttgacgcgactcattcgtcaagatagtcagattcctattattatgctagcagctaagacaacagatatggacagaatattaggattgaatattggagcagatgattttatcacgaaaccgtttaattctttggaggttttagctcgaattaattcgcaactgcgtcgttactatgaattcaatagtcttgccaaacctaaaaatcaatttataaagataggggaattggaattagatgaggaacatgttgaactaactaaaaatggtaaacatatcaagttgactgctacagaatttaagattcttcatatcttaatgtcatcaccaggaaggatttatactaaaacacaactctatgagaagattaatggtaggtatttagaaggtgatgagacaacgattatggtgcatatttctaatatccgtgacaaaatcgaagatgatagtaaatatcctaaatatataaaaacacttagaggagtaggttataaaatcgaaaaaccgcagtatcttgtt

SEQ ID NO: 5794 - protein, 228 aa, Streptococcus agalactiae
MQGDDETIELLRSYLEGALYKVVMASDGEEAFSLFQQHQIDLAIIDITLPKIDGYELTRLIRQDSQIPIIMLAAKTTDMDRILGLNIGADDFITKPFNSLEVLARINSQLRRYYEFNSLAKPKNQFIKIGELELDEEHVELTKNGKHIKLTATEFKILHILMSSPGRIYTKTQLYEKINGRYLEGDETTIMVHISNIRDKIEDDSKYPKYIKTLRGVGYKIEKPQYLV

SEQ ID NO: 5795 - DNA, 1017 bp, Streptococcus agalactiae
atggcaaagaccgctcttaatattccttttacagttgaagggatagaaaattattatcaaaatataaaaatgatactgtctttagcagataaatggagcatacctagagatgatctattactttttttaaagggactcaaggctattgatgatataaaagttggctctcctatttttaagtatttttggacttctttaagtttacaagcacccctcaaagctttagaattcgtgttagagcaggctaaaatgccaactgaattgtcaggagaattatcagaaacacaatacttggtcgcacagttttcagatgagttagctccgcatgatgatttctggatagccttatcacaagttatttatgattcttttcctgggaatagtctagccgaagatactgtattaaataggaaactccatcaattccgctatttgatttctagtcagcaagcacagtatgttcgacgatactttaaagatgttggtatgactgatagagatgctttagtaaactatctatcatgtttaagagaaccagatagtatcgcctactatgaatctgctcgtttgcataataaacgtcggagaaatggtgaaatctttggtttcccagatgatgagcaggttattaatagtaagcttttaatttcattccatacggaatttattattgacgataaaggaaactttttaaacgagattgacgcagaagtaataacacgtaatggcattatcaatggagctagctttaattatgcttttaaaaataatacacgtcataaagaattagatgttgatcctgtaaagttagacccaaaatttcgaaacgatatgactagaggttatagatcgccaaatctatctagaaggaaatggtttttctttaaagaagaggattacgattgtagttatttcaataaaaaaggatattacgcatttggaaggcgtagtgctaagcaatcggttgataaacaagtcaaatacttgaagaaggctgtgcagaaaatgcgcatcaac

SEQ ID NO: 5796 - protein, 339 aa, Streptococcus agalactiae
MAKTALNIPFTVEGIENYYQNIKMILSLADKWSIPRDDLLLFLKGLKAIDDIKVGSPIFKYFWTSLSLQAPLKALEFVLEQAKMPTELSGELSETQYLVAQFSDELAPHDDFWIALSQVIYDSFPGNSLAEDTVLNRKLHQFRYLISSQQAQYVRRYFKDVGMTDRDALVNYLSCLREPDSIAYYESARLHNKRRRNGEIFGFPDDEQVINSKLLISFHTEFIIDDKGNFLNEIDAEVITRNGIINGASFNYAFKNNTRHKELDVDPVKLDPKFRNDMTRGYRSPNLSRRKWFFFKEEDYDCSYFNKKGYYAFGRRSAKQSVDKQVKYLKKAVQKMRIN

SEQ ID NO: 5797 - DNA, 564 bp, Streptococcus agalactiae
atgattaaaaaaaataaagtttttttaggagttcttttagtccttgttgttatccttggaggtggtgtattattttaccaatcacaattccaaaagacaactaatcaagcgttagctattgcttataaagatgctaaagtggctaagaaggatgtcatacatcaaaaaattgacaaagaatttgaaaactttagagggagctacgaaattgagttcaataccaaaagcgcagaatacagctatcatgtagatgctaagactggacaaatccttgagcgggacatggataataatggcttttcaaaatcgacttctcagtcaagttcatcgtcaagtcaaaaatctcataaaataagtcaagaagaagccaaaaagattgcatttaaagatgctaatatagaggaatcagaagtcagtaatcttaagatcaaagaagaaattgaaaatggaaaatcagtttatgatattgactttgtggacctgaaaaataaaaatgaagttgattatcaaattgatgcagaaactggaaaaatcattgaacgttctagagatcatatgaatgat

SEQ ID NO: 5798 - protein, 188 aa, Streptococcus agalactiae
MIKKNKVFLGVLLVLVVILGGGVLFYQSQFQKTTNQALAIAYKDAKVAKKDVIHQKIDKEFENFRGSYEIEFNTKSAEYSYHVDAKTGQILERDMDNNGFSKSTSQSSSSSSQKSHKISQEEAKKIAFKDANIEESEVSNLKIKEEIENGKSVYDIDFVDLKNKNEVDYQIDAETGKIIERSRDHMND

SEQ ID NO: 5799 - DNA, 648 bp, Streptococcus agalactiae
atgtcatcagtcttaacactaacaaatatactatttctccttcaagggttcggtttaaccttatatatatcttttatttccattttactatcaatgttttttggaactctattagcaattatgagaaatagcaaaaatcctatctggaaattaatagctagtatctatatcgaatttgtcagaaatgttccaaatctactttggatttttatcattttcttagtattccagatgaaatcagtcagcgctggtattacttcgtttacaatttttacctccgctgctttagcagaaattattcggggaggtttaaatggagtcgataaaggacagacagaagccggactttctcaaggattcacttatttgcaagttttcattattattattttcccacaagcttttcgcaaaatgttaccagccattatttctcagtttgtaacggttataaaagatacatcactactttattctgttatagctattcaagaaatcttcggaaaaagtcaaattctaatgggaagatatttcgaagctggacaagtttttacactctacgctattataactgctgtctatttcattacaaactttatcatctcaagtttttcacgtaaactttcaaaacgttgggagcaagctactgag

SEQ ID NO: 5800 - protein, 216 aa, Streptococcus agalactiae
MSSVLTLTNILFLLQGFGLTLYISFISILLSMFFGTLLAIMRNSKNPIWKLIASIYIEFVRNVPNLLWIFIIFLVFQMKSVSAGITSFTIFTSAALAEIIRGGLNGVDKGQTEAGLSQGFTYLQVFIIIIFPQAFRKMLPAIISQFVTVIKDTSLLYSVIAIQEIFGKSQILMGRYFEAGQVFTLYAIITAVYFITNFIISSFSRKLSKRWEQATE

SEQ ID NO: 5801 - protein, 620 aa, Streptococcus agalactiae
TTAAAGGCTTCTTATATACTCTAGGTATTTCGTTTGGTGCACTCCTACTTGCTCTGATATTAGGAATTCTCTCTGGTGGTTTATCAACTTCTAAAAGTAAAGTTGGTAAGTTGATATCACGTATCTATGTTGAAGTTTTTCAAAACACACCTCTTTTAGTTCAAATGGTTTTTGTCTACTATGGACTAGCAATCATTAGTAATGGACATGTTATGATTAGTGCTTTTTTCACCGCCGTTTTGTGCGTTGGCCTATACCATGGTGCCTATATTTCTGAAGTTATTCGCTCAGGAATTGAAGCTGTCCCTAAAGGACAAACAGAGGCTGCTTTAGCTCAAGGATTCACAGCTAATCAAACCATGCAACTTATCATTTTGCCTCAAGCTGTCAGAACAATTTTACCACCAATGACCAACCAAGTTGTTAACCTAATCAAGAATACCTCTACCGTAGCAATCATTTCTGGAGCCGATATCATGTTTGTAGCTAAGGCCTGGGCTTATGATACGACTAATTATATCCCAGCTTTTGCAGGAGCTGCTATCTTCTATTTTGTTATTTGTTTCCCACTAGCAAGCTGGGCAAGAAAACAAGAAGAATTAAATAAGAAAACTTATTCT

SEQ ID NO: 5802 - protein, 207 aa, Streptococcus agalactiae
  VARIANT 1: Xaa = Any Amino Acid
XKGFLYTLGISFGALLLALILGILSGGLSTSKSKVGKLISRIYVEVFQNTPLLVQMVFVYYGLAIISNGHVMISAFFTAVLCVGLYHGAYISEVIRSGIEAVPKGQTEAALAQGFTANQTMQLIILPQAVRTILPPMTNQVVNLIKNTSTVAIISGADIMFVAKAWAYDTTNYIPAFAGAAIFYFVICFPLASWARKQEELNKKTYS

SEQ ID NO: 5803 - protein, 279 aa, Streptococcus agalactiae
ATGAGCGGTGCAAATTCTATTTCTTTAATGTCATTACTAATGGCATCATCATTAGTTTTGATTACTTTATTTTTTTCTTACTGGCAAAAGTTAAACCTAGAAAAAGAAGTGATTATTAGCGCTATCCGAGCAGTGATTCAATTATTAGCAGTGGGGTTTTTGCTAGACTATATATTTGGTTATCAAAATCCTATTTTCACAGCTCTTTTAATGCTATTCATGATTATTAATGCTTCTTATAACGCAGCTAAGCGTGGTAAAGGGATTAATAAAGGGTTT

SEQ ID NO: 5804 - protein, 93 aa, Streptococcus agalactiae
MSGANSISLMSLLMASSLVLITLFFSYWQKLNLEKEVIISAIRAVIQLLAVGFLLDYIFGYQNPIFTALLMLFMIINASYNAAKRGKGINKGF

SEQ ID NO: 5805 - protein, 594 aa, Streptococcus agalactiae
ATGCTGAGACGAAAAAGATTAACGCTCTATCTATTATCCTGTATTTTCATTTTCCTGTTATTTTATCCCAACTCAACGTCAGCTAATCAATTATCAGAAATCAAAAAATCGGGTGTCCTTAAAGTTGGAGTCAAACAAGATGTGCCTAACTTTGGTTATCATAATGCTGAGACGAATCAATACGAAGGAATGGAAATTGATATTGCCAAAAAAATTGCCAAATCCTTAGGCGTCAAACCAGTTTTTGTACCGACAACTGCACAAACCAGAGAGCCTCTGATGGACAATGGACAAATTGATATTCTAATCGCAACATACACTATCACGCCCGAAAGAAAAGCTAACTATAATATTTCTAAAGCTTATTATCACGATGAAATTGGATTTTTGGTGCGTAAAAATAGTCATATCAAAACTATAAAAGAATTGGATGGTAAACACATTGGTGTGGCTCAAGGTGCCACTACAAAGTAAATTTAGAAAAATATGCTAAAGAACACAAACTAAAATTTAGCTATGCTCATTAGGAGTTTCCCAGAATTAGCGATATCGCTGTACGCTAATCGTATTGATGCTTTTTAGGATAACTATCCT

SEQ ID NO: 5806 - protein, 200 aa, Streptococcus agalactiae
  VARIANT 175: Xaa = Any Amino Acid
MLRRKRLTLYLLSCIFIFLLFYPNSTSANQLSEIKKSGVLKVGVKQDVPNFGYHNAETNQYEGMEIDIAKKIAKSLGVKPVFVPTTAQTREPLMDNGQIDILIATYTITPERKANYNISKAYYHDEIGFLVRKNSHIKTIKELDGKHIGVAQGATTKVNLEKYAKEHKLKFSYAXLGSFPELAISLYANRIDAFSVIIYP

SEQ ID NO: 5807 - protein, 753 aa, Streptococcus agalactiae
ATGTCACTCATATCTTATAAGAATGTTAACAAGTATTATGGAGATTATCACGCCCTTCGTCAGATTAATTTGGAAATAGAGCCAGGGCAAGTGGTTGTTCTATTAGGACCTTCTGGATCAGGTAAATCAACACTTATTAGAACAATGAACGCTCTCGAATCTATTGACGATGGTAGTTTGGTCGTGAATGGACATGAATTAGCAAATACTTCATCTAAAGAATTGGTCAACCTCCGTAAAGAAGTTGGTATGGTTTTTCAACATTTTAACCTTTATCCTCACAAAACCGTGTTAGAAAATATTACATTAGCTCCTATTAAAGTATTAAAACAATCTAAAAAAGAAGCTATGGAAATTGCTGAAAAATATTTAAAATTTGTCAATATGTGGGAAAGAAAAGATTCCTACCCATCTATGCTATCAGGTGGTCAAAAACAGAGAATTGCTATTGCTAGAGGGCTTGCCATGCATCCAAAACTCCTCCTCTTTGATGAGCCTACCTCTGCCCTTGATCCCGAAACCATCGGAGACGTTCTTTCAGTGATGCAAAAATTGGCAAATGACGGAATGAATATGGTCGTTGTAACTCATGAAATGGGATTCGCACGAGAAGTTGCTGATCGTATTATTTTTATGGCTGATGGGGAAATTTTAGTGGATACTACGGATGTGCAAGACTTTTTTGATAATCCCACAGAACCACGTGCCAAACAATTTTTAAGCAACATTATCAACCATACCAGTACTGACCTT

SEQ ID NO: 5808 - protein, 251 aa, Streptococcus agalactiae
MSLISYKNVNKYYGDYHALRQINLEIEPGQVVVLLGPSGSGKSTLIRTMNALESIDDGSLVVNGHELANTSSKELVNLRKEVGMVFQHFNLYPHKTVLENITLAPIKVLKQSKKEAMEIAEKYLKFVNMWERKDSYPSMLSGGQKQRIAIARGLAMHPKLLLFDEPTSALDPETIGDVLSVMQKLANDGMNMVVVTHEMGFAREVADRIIFMADGEILVDTTDVQDFFDNPTEPRAKQFLSNIINHTSTDL

SEQ ID NO: 5809 - protein, 708 aa, Streptococcus agalactiae
ATGAAAAAAATACTTATCGTTGATGATGAAAAACCAATTTCAGATATTATCAAATTTAATTTAACCAAAGAAGGATATGAGACGGCGACAGCTTTCGATGGCCGTGAAGCTTTAGTACAATATGCAGAATTTCAACCAGATTTAATCATTTTGGATTTAATGCTCCCTGAACTAGATGGTTTAGAAGTGGCTAAGGAAGTTCGTAAAACCAGCCATATTCCTATTATTATGCTTTCTGCAAAAGATAGTGAGTTTGACAAAGTCATTGGTTTAGAAATCGGTGCAGATGATTATGTTACTAAACCTTTTTCAAATCGTGAACTTTTGGCACGGGTCAAAGCACATTTACGACGTACTGAAAATATTGAAACAGCTGTAGCAGAAGAAAGTGCTCAAAATGCTTCTTCGGATATTACTATTGGTGAGTTGCAAATTTTACCAGACGCCTTTATTGCTAAGAAACGTGGCGAAGAAATTGAATTAACGCACCGAGAATTTGAATTACTTCACCATTTAGCGACACATATCGGACAAGTCATGACACGCGAACATTTATTGGAAACAGTTTGGGGATATGATTATTTTGGAGATGTCCGTACAGTTGATGTGACGGTGAGACGTTTACGTGAAAAGATTGAAGATACTCCTGGTCGTCCAGAATATATTTTGACTCGACGTGGTGTAGGTTATTACATGAAGTCTTATGAA

SEQ ID NO: 5810 - protein, 236 aa, Streptococcus agalactiae; identical to SEQ ID NO: 1364

SEQ ID NO: 5811 - protein, 1347 aa, Streptococcus agalactiae
ATGAATAATAGTGCTGCAAATATTAGGTCGTTTGAGCTAGCCTTACTTTTTTTACTAGTTTTTGTTGCTGTTTATTTTGTTTATCTAGCGGTTAGAGATTTTAAAATGTCTAAAAATATCCGACTTTTGAATTGGAAAGTCAGAGATTTGATAGCAGGAAATTATTCAGATAGTATTCTAATTCAAGGTGATGCAGATTTGGTAGAATTAGGTGAAAGTCTAAATGATTTATCTGATGTCTTCCGAATGGCACATGATAACTTAGAACAAGAAAAGAATCGCTTAGCAAGTATCTTAACTTATATGACTGACGGTGTGCTGGCTACAGATCGTTCAGGAAAAATCGTTATGATTAATGAGACAGCCCAACAGCAGTTCAATCTAGCATATGATGAAGCTTTATCAATGAATATTGTTGATATGTTAGGGTCGGGAAGTCCATATTCGTTCCAAGATTTAGTCTCTAAGACGCCAGAGGTAGTTCTTAATAGACGTGATGAAAATGGTGAATTTGTTACCTTACGGATTCGATTTGCTTTGAACCGTCGTGAAAGTGGTTTTATTTCCGGTTTAGTTGCAGTATCACACGATGCTACTGAGCAAGAGAAAGAAGAGCGTGAAAGAAGACTTTTTGTATCTAATGTTTCTCATGAACTTCGTACACCTTTGACATCTGTAAAATCTTATTTAGAAGCTTTAGATGAGGGAGCGCTCAATGAAGAAGTTGCTCCAAGCTTTATTAAGGTATCTCTAGATGAAACAAATCGTATGATGCGTATGATATCAGATTTATTAAGTTTATCGCGCATTGATAATGAAGTAACGCATTTAGATGTTGAAATGACGAATTTTACAGCTTTCATGACCTCAATTTTGAATCGATTTGATCAGATTAGAAATCAAAAAACAGTCACAGGAAAAGTTTATGAAATTGTCAGAGATTATCCTCTTAAGTCAATTTGGGTGGAAATTGATACAGATAAGATGACTCAAGTGATTGATAACATTTTAAATAATGCAGTCAAGTATTCACCAGATGGTGGTAAGATTACAGTTAATCTACGCACAACTAAAACGCAGATGATTTTATCAATATCAGACCAAGGCTTAGGTATTCCCAAAAAAGATTTACCTCTCATTTTTGATCGTTTTTATCGTGTTGATAAGGCGAGAAGTCGTCAACAGGGTGGGACTGGACTTGGTTTGTCAATTGCAAAAGAAATTGTTAAGCAGCATAAGGGATTTATTTGGGCTAAGAGTGAGTATGGTAAAGGATCTACTTTTACAATCGTCTTGCCTTATGATAAAGATGCTGTAACTTATGAAGAATGGGAGGATGTTGAAGAT

SEQ ID NO: 5812 - protein, 449 aa, Streptococcus agalactiae; identical to SEQ ID NO: 1366

SEQ ID NO: 5813 - protein, 807 aa, Streptococcus agalactiae
ATGTCAGAAATAGGATTTAAATATAGTATCTTAGCTTCAGGTTCAACTGGAAATTGTTTTTATATTGAGACACCCCAAAAACGTCTTTTAATTGACGCTGGTTTAACAGGCAAGAAAGTGACTAGCCTCCTTGCAGAAATTAATCGTAAACCAGAAGATTTAGATGCTATACTAGTTACCCACGAACATTCTGACCACATTAAAGGTGTTGGCGTATTGGCTAGGAAATATCACCTTGATATTTATGCCAATGAGCAGACGTGGAAAGTTATGGATGAGCGTAACATGTTAGGCAAAGTTGATGTTAGTCAAAAGCATGTTTTTGGACGCGGTAAAACCTTAACTTTCGGGGATTTAGATATTGAGAGCTTTGGTGTAAGTCATGATGCTGTGGATCCCCAATTTTACCGTATGATGAAAGATGATAAGAGCTTTGTGATGTTGACAGATACAGGATATGTTAGCGACCGAATGGCAAGTTTGATTGAGAATGCAGATGGTTATTTGATCGAGTCAAATCACGACATTGAGATTCTACGTTCGGGTTCTTATCCTTGGACACTTAAGCAACGTATTTTATCAGATAAAGGACATTTATCTAATGAAGATGGTTCAGAAACCATGATTCGCACTATAGGTAACCGTACTAAACACATCTATTTAGGACACTTGAGTAAGGAAAATAATATTAAGGAACTTGCTCACATGACTATGGAAAACAATTTAATGAGAGCTGACTTTGGTGTGGGCACAGATTTTTCTGTTCACGATACTTCACCTGATTCAGCTACCCCACTGACGAGGATT

SEQ ID NO: 5814 - protein, 269 aa, Streptococcus agalactiae
MSEIGFKYSILASGSTGNCFYIETPQKRLLIDAGLTGKKVTSLLAEINRKPEDLDAILVTHEHSDHIKGVGVLARKYHLDIYANEQTWKVMDERNMLGKVDVSQKHVFGRGKTLTFGDLDIESFGVSHDAVDPQFYRMMKDDKSFVMLTDTGYVSDRMASLIENADGYLIESNHDIEILRSGSYPWTLKQRILSDKGHLSNEDGSETMIRTIGNRTKHIYLGHLSKENNIKELAHMTMENNLMRADFGVGTDFSVHDTSPDSATPLTRI

SEQ ID NO: 5815 - protein, 366 aa, Streptococcus agalactiae
TTGAAAAAGATTTTTTACATTAGTTTAGGATTTATTAGTTTAGGGATAGGCATTGCAGGTATTGTCTTGCCGGTAGTTCCAACGACTCCATTAGTATTGCTTTCAGCTTTTTGCTTTTCGAGAAGCTCTGAAAAATTTGATATTTGGTTGCGTCAAACTAAAGTTTATAAATACTACGCTGCAGATTTTGTTGAAAGCAGAAGTATTGCCCCAGCGCGTAAAAAGTCAATGATTTGGCAAATTTATATCTTGATGGGGATTTCAATCTATTTTGCTCCTCTAATGTGGCTCAAACTGGGATTATTGATTGGAACTATTGTAGGAACTTATGTGCTTTTTTATGTAGTACCTGATAAAATTGATGAA

SEQ ID NO: 5816 - protein, 122 aa, Streptococcus agalactiae; identical to SEQ ID NO: 1370

SEQ ID NO: 5817 - protein, 683 aa, Streptococcus agalactiae
ATGAAAGAATTAAGATCAAAGCTGGAAAAAGACTATGGTATTGTTTTTGCTAATCAAGAATTATTAGATACAGCTTTTACCCATACATCATACGCAAATGAGCATCGCCTCCTAAACATTTCACATAATGAACGTTTGGAATTTTTAGGAGACGCTGTTCTACAATTACTTATTTCACAGTATCTTTTTACAAAGTACCCTCAAAAGGCAGAAGGTGATTTATCAAAATTACGTTCAATGATTGTTCGTGAGGAAAGTCTTGCAGGTTTTTCACGTCTATGTGGCTTTGATCACTATATTAAACTTGGAAAAGGAGAAGAAAAATCTGGTGGACGTAATCGTGACACTATTTTAGGAGATTTATTTGAGGCTTTTTTAGGAGCTTTATTATTGGATAAAGGTGTTGAAGTGGTTCATGCCTTTGTTAACAAGGTAATGATCCCTCACGTTGAAAAAGGGACCTATGAGCGTGTTAAAGATTACAAGACAAGCTTGCAAGAATTACTTCAATCTCATGGGGATGTAAAAATAGATTATCAAGTTACTAATGAAAGTGGTCCAGCACATGCAAAGGAATTTGAGGTGACTGTATCTGTCAACCAAGAAAATTTGAGCCAAGGAATTGGACGATCAAAGAAAGCTGCTGAACAAGACGCTGCCAAAATGCTTTAGCAACGTTACAA

SEQ ID NO: 5818 - protein, 228 aa, Streptococcus agalactiae; identical to SEQ ID NO: 1372

SEQ ID NO: 5819 - protein, 3357 aa, Streptococcus agalactiae
ATGCCAGACGTCATATTTGCTGGTACAGAAAATCGTAAGCCCCTTAATTATGCGCAAGTGAGTGTTACTTTAGATAATAGCGACCACTTTATCGAAAATATAGCTGACGAAGTTCGAGTTGAACGTCGTATTTTTCGAAACGGAGATAGTGAATATTTAATAGATGGACGCAAAGTTCGCTTACGTGATATTCATGATTTATTTATGGATACTGGATTAGGAAGAGATTCTTTTTCTATTATTTCCCAAGGACGCGTTGAAGCTATTTTTAATAGTAAACCAGAAGAGCGCCGTGCCATATTTGAAGAAGCCGCTGGTGTTCTGAAGTACAAAACACGTAAGAAGGAAACACAATCCAAATTAGAACAAACTCAAGGGAACTTAGATCGCTTAGAGGATATTATTTATGAATTGGATATGCAAGTCCAACCATTAGAAAAACAAGCAAGTATTGCCAAGCGTTTTTTAGTATTAGATGAGGAACGACAAGGACTCCACTTATCTATCTTGATTGAAGATATTTTACAACATCAATCAGATTTAACTACTGTTGAGGAAAAGCTATTGACAGTAAGAGAAGAGTTAGCAACTTATTACCAACAACGTCAGTCCCTTGAAGATGAAAATCAATCGTTAAAACAGAAACGTCACCATTTATCTGAAGAAATTGAGGCTAAACAGTTAGCTCTTTTAGACGTTACAAAGTTAAAGTCAGATTTGGAACGCCAAATTGATCTGATTCGTTTAGAGTCAAACCAAAAGGCTGAAAAAAAAGAAGAGGCAGGTCAACGTTTAGCAGAGTTAGAAATTAAAGCTAAAGATTGTAGTGACCAGATTACCCAAAAAAATATAGAGTTAACTACTCTGTCGGAAAAAATAGCCCAAATAAGATCAGAAATTGTTAGTACAGAAAGTTCCTTGGAGCGTTTTTCAACTAATCCGGATCAGATTATTGAAAAACTTCGAGAAGACTTTGTTACCTTGATGCAAGAAGAAGCCGACACTTCAAACGCTTTAACAGCTTTACTAGCTGATATAGAGAATCAAAAACAAGCTTCTCAAGCTAAATCTCAAGAAATACAAGAAGTTAGCAAAAATTTAGAAGTATTAAAAAGTAACGCAAAGGTAGCGTTGGAACGATTTGAGGCTGCAAAGAAGAATGTTCGTCGGTTATTATCTCACTACCAAGATTTAGGTCAAACCTTGCAAAATCTAGAAGGTGAGTATAAGAATCAGCAGTCAATTTTATTTGATCATTTAGATGAAATCAAATCAAAGCAAGCACGTATTTCGAGTTTAGAATCTATTTTGAAAAATCATAGTAATTTCTATGCTGGAGTGAAGTCAGTTCTACAGGCTAAGGACCAGCTTGGAGGTATCATAGGTGCTGTTAGTGAGCATCTTAGCTTTGACAAACATTACCAAATAGCATTGGAGATAGCTTTGGGAGGTAGCAGCCAACACATCATTGTTGAAGACGAGAGTGCTGCCAAACGTTCAATTGCTTTTTTAAAGAAAAACCGCCAAGGTAGAGCGACATTTCTGCCTTTAACTACAATAAAACCAAGAGAATTAGCACAACATTATCTCTCAAAATTACAAAGTTCTCAAGGGTTTTTAGGAATAGCTAGTGAATTGGTAACCTATGATCAACGCTTGTCAAACATTTTTAAAAATAACTTAGGGTTAACTGCTATTTTTGATACGGTTGATAATGCTAATGTAGCTGCAAGACAATTGAATTATCAAGTACGTTTAGTAACCTTAGATGGAACAGAATTACGCCCTGGAGGGTCGTACTCAGGGGGAGCAAATCGTCAAAATAATACTGTTTTTATCAAGCCTGAATTGGATAATCTAAAAAAAGAATTAAAACAGGCACAAAGTAAACAATTAATTCAAGAAAAAGAAGTTGCCGCATTGTTAGAGCAACTCAAAGAGAAACAAGAAACCTTAGCACAACTTAAGAATGATGGAGAACAAGCTCGTCTTGAGGAACAAAGAGCTGATATAGAGTATCAACAACTATCAGAAAAGCTTGCTGATTTAAATAAACTATATAATGGCTTACAATTAAGCAACGGGGTGTCGGAACAAACTACTTCTCAAAATGAAAAAAATCGTTTAGAAAAAGAACTTGAACAATTTGCTATTAAAAAAGAGGAGTTGACAACTTCAATTGCTCAAATTAAGGAAGATAAAGATTCAATTCAAGAAAAAGTCAATAATCTAACAACATTATTGTCAGAGGCACAGCTAGAAGAACGTGATTTGCTAAACGAGCAGAAATTTGAACGTGCCAACTGTACACGTCTAGAGATTACCTTGTCTGAAATAAAACGTGACATTAGTAATTTACAAACATTACTAAGCCATCAGGACAGTCAATTAGACAAAGAAGAGCTTCCACGTATAGAAAAACAGTTGCTACAAGCAAATAAGAGAAGAGAAAATGATGAAGAAAAGCTTGTGAGTCTCCGTTTTGAATTGGAGGATTGTGAAGCTGCTTTAGATGATTTAGCTGCTTCTCTGGCTAAAGAGGGACAAAAAAATGAAAGCCTTATTCGTCAGCAAGCTCAATTAGAGTCACAATGTGAACAATTATCTCAACAATTGATGGTATTCTCACGTCAATTATCAGAAGACTATCAGATGACATTGGATGAAGCGAAGGTAAAAGCAAATGTCTTGGAAGATATTTTGATGGCGCGTGAACAATTGAAATCTCTACAAGCTAAAATTAAAGCTTTAGGACCTGTTAATATTGATGCAATTGCTCAATTTGAAGAAGTTCATGAACGATTGACCTTCCTTAACACACAGCGAGACGACTTAGTTCATGCCAAAAATTTATTACTAGAGACGATTACAGATATGGATGATGAAGTTAAGACTCGTTTTAAATCGACATTTGAAGCCATTCGTCATAGTTTCAAAGAAACCTTTGTACAGATGTTTGGTGGAGGTTCTGCGGACCTTATTCTGACAGAAGGTGATTTATTATCAGCTGGGGTTGATATTTCGGTTCAACCTCCTGGTAAAAAAATCCAGTCTTTAAACTTGATGTCAGGTGGTGAAAAAGCATTATCAGCGTTAGCATTATTATTTGCCATTATCCGTGTTAAGACAATTTCATTTGTCATCTTGGATGAAGTTGAGGCCGCTTTAGATGAAGCAAATGTTAAGCGATTTGGCGATTATCTTAATCGATTTGATAAATCAAGTCAATTTATCGTTGTTACTCACCGAAAAGGAACTATGTCTGCTGCTGATAGTATCTATGGGGTAACGATGCAGGAATCAGGCGTTTCCAAAATTGTTTCTGTAAAATTAAAAGAAGCTCAAGAAATGACCAAT

SEQ ID NO: 5820 - protein, 1119 aa, Streptococcus agalactiae
MPDVIFAGTENRKPLNYAQVSVTLDNSDHFIENIADEVRVERRIFRNGDSEYLIDGRKVRLRDIHDLFMDTGLGRDSFSIISQGRVEAIFNSKPEERRAIFEEAAGVLKYKTRKKETQSKLEQTQGNLDRLEDIIYELDMQVQPLEKQASIAKRFLVLDEERQGLHLSILIEDILQHQSDLTTVEEKLLTVREELATYYQQRQSLEDENQSLKQKRHHLSEEIEAKQLALLDVTKLKSDLERQIDLIRLESNQKAEKKEEAGQRLAELEIKAKDCSDQITQKNIELTTLSEKIAQIRSEIVSTESSLERFSTNPDQIIEKLREDFVTLMQEEADTSNALTALLADIENQKQASQAKSQEIQEVSKNLEVLKSNAKVALERFEAAKKNVRRLLSHYQDLGQTLQNLEGEYKNQQSILFDHLDEIKSKQARISSLESILKNHSNFYAGVKSVLQAKDQLGGIIGAVSEHLSFDKHYQIALEIALGGSSQHIIVEDESAAKRSIAFLKKNRQGRATFLPLTTIKPRELAQHYLSKLQSSQGFLGIASELVTYDQRLSNIFKNNLGLTAIFDTVDNANVAARQLNYQVRLVTLDGTELRPGGSYSGGANRQNNTVFIKPELDNLKKELKQAQSKQLIQEKEVAALLEQLKEKQETLAQLKNDGEQARLEEQRADIEYQQLSEKLADLNKLYNGLQLSNGVSEQTTSQNEKNRLEKELEQFAIKKEELTTSIAQIKEDKDSIQEKVNNLTTLLSEAQLEERDLLNEQKFERANCTRLEITLSEIKRDISNLQTLLSHQDSQLDKEELPRIEKQLLQANKRRENDEEKLVSLRFELEDCEAALDDLAASLAKEGQKNESLIRQQAQLESQCEQLSQQLMVFSRQLSEDYQMTLDEAKVKANVLEDILMAREQLKSLQAKIKALGPVNIDAIAQFEEVHERLTFLNTQRDDLVHAKNLLLETITDMDDEVKTRFKSTFEAIRHSFKETFVQMFGGGSADLILTEGDLLSAGVDISVQPPGKKIQSLNLMSGGEKALSALALLFAIIRVKTISFVILDEVEAALDEANVKRFGDYLNRFDKSSQFIVVTHRKGTMSAADSIYGVTMQESGVSKIVSVKLKEAQEMTN

SEQ ID NO: 5821 - protein, 795 aa, Streptococcus agalactiae
ATGATAAAATTAGTAGCAACCGATATGGATGGTACATTCTTAGATGAAAACGGTACCTATGATAAAAAACGTTTAGCAAACGTGCTAAAAAAATTTAAAGAACAAGGAATTGTCTTTACGGCAGCAAGTGGGCGTTCCTTATTATCACTTGAACAATTATTTGCTGACTTTCGTGATCAGATGGCTTTTATAGCAGAAAACGGAAGTGCAGCAGTCTTATTTGATCGCTTGGCATATGAACAGCACTTGAGTCGAGAACAATACTTAGATATTATTGACCATTTGAGTAAGAGCCCTTATATGGAGAATAATGAATATGTCTTATCTGGAAAGGATGGTGCATATATTCTAAGTGATGCCAATCCAGGTTATATTGAATTCATCACTCATTATTATGATAATTTGCAAAAAGTTTCTCACTTTGAAGATGTTGATGATATTATTTTCAAAGTAACGGCTAACTTTACTGAAGAGACTGTTAGACAAGCTGAGGAGTGGGTAAATCAAGTTATACCGTATGCCACAGCAGTGACAACAGGCTTTAAATCCATTGATATTATTTTAAGCTCAGTTAATAAACGAAATGGTTTAGAGCACCTCTGTGAACAATACGGTATTAGAGCAGAAGAAGTCTTATCTTTTGGTGACAATATTAATGATTTAGAAATGCTAGAGTGGTCAGGCAAAGCTATTGCAACAGAAAATGCTAGACCAGAAGTTAAAGAGATAGCAGATTGTATTATAGGTCATCACAATGATCAAGCTGTAATGGCTTATTTAGAAAGTATGGTGGAT

SEQ ID NO: 5822 - protein, 265 aa, Streptococcus agalactiae
MIKLVATDMDGTFLDENGTYDKKRLANVLKKFKEQGIVFTAASGRSLLSLEQLFADFRDQMAFIAENGSAAVLFDRLAYEQHLSREQYLDIIDHLSKSPYMENNEYVLSGKDGAYILSDANPGYIEFITHYYDNLQKVSHFEDVDDIIFKVTANFTEETVRQAEEWVNQVIPYATAVTTGFKSIDIILSSVNKRNGLEHLCEQYGIRAEEVLSFGDNINDLEMLEWSGKAIATENARPEVKEIADCIIGHHNDQAVMAYLESMVD

SEQ ID NO: 5823 - protein, 822 aa, Streptococcus agalactiae
ATGTCGGATATTAAAATACTTGCTTTAGATTTAGATGGCACTTTATTTACAACAGATAAAAAAGTTTCAGAAGAAAATAAAGTGGCCTTAAAAGCAGCTAGAGAAAAAGGTATAAAAGTTGTTATTACAACAGGGCGTCCTTTAAAAGCAATTGGTAATTTGTTAGAGGACCTAGAGTTAGTATCTGATGAAGATTACAGCATTACTTTTAACGGTGGTTTAGTTCAACAAAATACAGGGAAAATCTTAGCTAAAACTGCAATGACACGACAAGAAGTGGAAGATATCCATGAGGAGTTGTATCAAGTGGGTTTGCCAACAGATATCTTAAGTGAGGGAATGGTATATAGTATTGCTAACAAGGGACACCATTCTCAATATCATTTAGCCAACCCGCTCTTAGAATTTATAGAAGTTGATGATTTAGAGCAAGTGCCAAAGGATGTAGTTTATAATAAAATTGTTAGTGTTATTGATGCTACATATCTTGATCAACAAATTGCTAAACTTCCTGATAGACTTAAAGTTGACTATGAAATGTTTAAATCACGTGATATCATTTTAGAATTGATGCCTAAAGGTGTTCATAAAGCAGTCGGCTTAGAACTACTGACAAAACACCTTGGGTTAGATAGTAGTCAAGTTATGGCAATGGGAGATGAAGCAAATGATTTATCAATGTTAGAGTGGGCAGGCTTAGGAGTTGCAATGGCTAATGGTATTCCAGAAGCTAAGGCAATAGCAAAAGCGACAACTATTTGTAATAACGATGAGTCTGGAGTTGCCGAAGCAGTTGGGAAATATATTTTAAGTGAGGAAAAT

SEQ ID NO: 5824 - protein, 274 aa, Streptococcus agalactiae
MSDIKILALDLDGTLFTTDKKVSEENKVALKAAREKGIKVVITTGRPLKAIGNLLEDLELVSDEDYSITFNGGLVQQNTGKILAKTAMTRQEVEDIHEELYQVGLPTDILSEGMVYSIANKGHHSQYHLANPLLEFIEVDDLEQVPKDVVYNKIVSVIDATYLDQQIAKLPDRLKVDYEMFKSRDIILELMPKGVHKAVGLELLTKHLGLDSSQVMAMGDEANDLSMLEWAGLGVAMANGIPEAKAIAKATTICNNDESGVAEAVGKYILSEEN

SEQ ID NO: 5825 - protein, 1608 aa, Streptococcus agalactiae
ATGGGATTATTTGACCGCCTATTTGGACATAAGAAAAAAGATAAAGAACCAGAAATTGAAGCATCAGAATCTGTTGTTTTAGAAGATGAAGATTCAGTTATTGATAAAGAGGAGGGCAGCAACTTTTCGAAGGAGTCAACTTTGAATCGAACCTCTGAAGTCCCTGTTGCAGAAGATGATTCTTTCTTAGAATTAGAAAGAGATACAGCATTGTCAGAATCACATCAACCAGTTACCTCTGAAATTCATCCTTTAGAGTCAGAAGATACCGATGAAATTCCTGTAAAAGAAGACGATAGTTTTTTAGAACTAGAAGATAGGGCTAAGACAAAGGTAGCAGATACTTCTGAGGTAGGAAATGTAGTTCCTGATTCCACGACTCTTTCTGACAATGTTTCTGCTAAATCTGAGGCATCTTTTAGTGATAAGGAGCAATCAAGTAATAGTCAGGCTTCAGAGCAGTTTTCAGAAACTCCCTTTCAAGAAGAGATGTCTAGTGGAAAAACTGAGGTACAAACAGAGTCAGAGGATACATCTGCGGCTGATGCTTTTTTAGCAGATTACTATGCTAAACGTAAAGCAATTGAGAAAGAAATCTCGTCTAATTCGCTGTCAACAGATGAGTCAAAACTTTCTGAGGCACAGGAAGTTTTATCGCAATCACAGGCAGACACTATAAAAGCTGAGAGTCAAGAGGAAAAATATAATCGTAGCCTGAAAAAAACACGCACAGGTTTTAGTGCACGCCTTAATGCTTTCCTTTCTAACTTCCGTCGTGTTGACGAAGAGTTCTTTGAAGAATTAGAAGAAATGTTAATCTTATCTGACGTTGGGGTAAATGTTGCAACACAGTTAACTGAAGATCTTCGTTATGAAGCAAAATTAGAGAATGCCAAGAAATCAGAGGATTTAAAACGTGTTATCGTTGAAAAATTAGTTGAAATCTACGAAAAAGATGGTATTTATAATGAGGCTATCAATTTCCAAGAAGGTTTAACCGTAATGCTTTTTGTAGGTGTTAATGGTGTTGGAAAAACGACATCTATAGGTAAGTTAGCTCATCAATACAAGTCTCAAGGGAAAAAAGTTATGTTAGTAGCAGCTGATACTTTCCGTGCAGGTGCTGTGGCTCAACTAGTAGAATGGGGACGCCGTGTTGATGTACCAGTTGTCACTGGAGAAGAAAAAGCAGATCCGGCTAGCGTTGTCTTTGATGGCATGGAAAAAGCCATTGCTCAAGGCGTTGATGTCTTGTTAATTGATACAGCAGGACGTTTGCAAAATAAAGAAAACCTTATGGCAGAGTTGGAAAAAATTGGACGTATTATTAAGCGTGTCGTACCAGATGCTCCCCATGAAACTTTGCTTGCTTTAGATGCATCTACAGGACAAAATGCTTTAAGTCAAGCTAAAGAGTTCTCGAAAATTACACCATTAACTGGCCTTATTCTGACTAAAATTGATGGTACTGCTAAGGGTGGTGTGGTACTGGCTATTCGTCAAGAACTAGATATTCCTGTTAAATTCATTGGTTTCGGCGAAAAAATCGATGATATTGGTGAATTTAATTCAGAAGATTTCATGCGTGGCCTTCTGGAAGGAATTTTA

SEQ ID NO: 5826 - protein, 536 aa, Streptococcus agalactiae
MGLFDRLFGHKKKDKEPEIEASESVVLEDEDSVIDKEEGSNFSKESTLNRTSEVPVAEDDSFLELERDTALSESHQPVTSEIHPLESEDTDEIPVKEDDSFLELEDRAKTKVADTSEVGNVVPDSTTLSDNVSAKSEASFSDKEQSSNSQASEQFSETPFQEEMSSGKTEVQTESEDTSAADAFLADYYAKRKAIEKEISSNSLSTDESKLSEAQEVLSQSQADTIKAESQEEKYNRSLKKTRTGFSARLNAFLSNFRRVDEEFFEELEEMLILSDVGVNVATQLTEDLRYEAKLENAKKSEDLKRVIVEKLVEIYEKDGIYNEAINFQEGLTVMLFVGVNGVGKTTSIGKLAHQYKSQGKKVMLVAADTFRAGAVAQLVEWGRRVDVPVVTGEEKADPASVVFDGMEKAIAQGVDVLLIDTAGRLQNKENLMAELEKIGRIIKRVVPDAPHETLLALDASTGQNALSQAKEFSKITPLTGLILTKIDGTAKGGVVLAIRQELDIPVKFIGFGEKIDDIGEFNSEDFMRGLLEGIL

SEQ ID NO: 5827 - protein, 810 aa, Streptococcus agalactiae
ATGATTCGATTTCTTATTCTTGCTGGTTATTTTGAATTAAGCATGTATTTAAAATTATCAGGTAAACTAAATCAGTATATTAATACTCATTATACCTATTTGGCCTATATTTCAATGGTCCTATCTTTTATTTTAGCAATTGTACAGCTAATTATTTGGGTTAAAAATATGAAAATGCATAGTCACCTACATGGTAAAATAGCTAAATCAACAAGCCCAATGATTTTAGTATTTCCCGTTTTAGTAGGTTTGTTAGTACCTACAGTTAGTTTAGACTCAACCACAGTCTCTGCCAAGGGATATAATTTCCCTCTAGCAGCCGGCTCTACTGGTACTGTAAGTCAAGATGGGACACGCGTTCAATATTTGAAACCAGATACCAGCACTTATTTTACTTCTTCAGCCTATGAAAAAGAAATGCAAAAAGAGCTTAAAAAATATAAAGGCTCTGGTACATTAACCATCACAACTGAAAACTACATGGAAGTTATGGAACTAATTTATCTCTATCCCGAGCAATTCATGGATCGCCAAATACAATATACTGGGTTTGTTTATAACGAACCCAAACACGAAGGATATCAATTTATTTTCCGCTTTGGAATCATTCATTGTATTGCCGATTCAGGAGTTTATGGTCTACTAACAACTGGAAATCAAAAAAGTTATCCGGACAATACTTGGGTAACTGTTAGAGGTACAATTAAATCCGAGTATAATCAATTGTTACAACAAAACTTACCAGTCTTACACATTGAAGAGTCTCGTCAAGTTTCTAAACCTAATAATCCTTATGTTTATCGTGTCTTT

SEQ ID NO: 5828 - protein, 270 aa, Streptococcus agalactiae
MIRFLILAGYFELSMYLKLSGKLNQYINTHYTYLAYISMVLSFILAIVQLIIWVKNMKMHSHLHGKIAKSTSPMILVFPVLVGLLVPTVSLDSTTVSAKGYNFPLAAGSTGTVSQDGTRVQYLKPDTSTYFTSSAYEKEMQKELKKYKGSGTLTITTENYMEVMELIYLYPEQFMDRQIQYTGFVYNEPKHEGYQFIFRFGIIHCIADSGVYGLLTTGNQKSYPDNTWVTVRGTIKSEYNQLLQQNLPVLHIEESRQVSKPNNPYVYRVF

SEQ ID NO: 5829 - protein, 900 aa, Streptococcus agalactiae
ATGGATATCTTTAATCAATTACCGGATAGTGTCCTTCAATGGTTTGCCATTTTCATTTCCATTATTATTGAGGCACTTCCTTTTGTTTTGCTTGGAACTATTTTATCAGGAATTATTGAAGTCTTTATAACACCTGATATAGTCAATAAGTTCTTACCGAAAAATAAATTTCTCAGAGTCTTATTTGGAACCTTCGTTGGCTTTGTCTTTCCTTCTTGCGAATGTGGTATCATTCCTATTATTAATCGATTCCTTGAAAAGCAAGTGCCTTCATACACGGCAGTTCCGTTTCTTGCTACTGCTCCTATTATTAATCCTATTGTTTTATTTGCAACCTACTCAGCATTTGGAAATTCTATACGCTTCCTGATATTACGCTTTGTAGGTGCTACCATTGTAGCCATTGCTTTAGGAGTCATGCTTGCCTTTTTAGTAGATGATAATATTCTAAAAGAAGACGCTAAACCTACTCATTTTCATGATTATTCTGATAAGAAGTGGTATCAAAAAATCTTTCTAGCCTTAGCTCATGCCATCGATGAATTTTTTGACACAGGACGCTATCTAGTATTTGGTACTTTAATTGCTTCAGCTATGCAAATTTATTTACCAACTCGAGTTCTTACTACTATCGGACACAGCCCTATCACAGCCATCTTAGTTATGATGTTGCTTGCTTTCATTTTGTCATTGTGTAGTGAAGCTGACGCTTTTATAGGTGCTTCTTTATTATCAACCTTTGGAATCGCGCCAGTAATGGCTTTCCTTTTAATTGGACCCATGATTGATATTAAGAATTTAATGATGATGGTAAATTCTTTTAAAACAAGGTTTATTGTCCAATTCATTAGTGTATCTTCTATTATTATTATCATCTATTGTCTATTTGTGGGGGTAATA

SEQ ID NO: 5830 - protein, 300 aa, Streptococcus agalactiae
MDIFNQLPDSVLQWFAIFISIIIEALPFVLLGTILSGIIEVFITPDIVNKFLPKNKFLRVLFGTFVGFVFPSCECGIIPIINRFLEKQVPSYTAVPFLATAPIINPIVLFATYSAFGNSIRFLILRFVGATIVAIALGVMLAFLVDDNILKEDAKPTHFHDYSDKKWYQKIFLALAHAIDEFFDTGRYLVFGTLIASAMQIYLPTRVLTTIGHSPITAILVMMLLAFILSLCSEADAFIGASLLSTFGIAPVMAFLLIGPMIDIKNLMMMVNSFKTRFIVQFISVSSIIIIIYCLFVGVI

SEQ ID NO: 5831 - protein, 126 aa, Streptococcus agalactiae
ATGGCTATTACGCACAAACGTCAAGATGACTTAGAAAGTATGTTCGCTAGTTTTGCTAAAGTACCAAAACCTAAAAAAGTTGATTCTGATTCAAAACCTGAACAGAAAGATGATTCTCAGAAAGAT

SEQ ID NO: 5832 - protein, 42 aa, Streptococcus agalactiae; identical to SEQ ID NO: 1388

SEQ ID NO: 5833 - protein, 1041 aa, Streptococcus agalactiae
ATGATTGAATTAGGTATTACAACATTCGGAGAGACAACAATCCTTGAAGAAACAAACCAAAGCTATTCACATCCTGAGAGGATTCGCCAATTAGTTGCTGAGATTGAACTAGCTGATCAAGTTGGTTTAGATGTCTATGGTATTGGAGAGCACCATCGTGAAGATTTTGCGGTCTCTGCACCCGAAATTGTCCTAGCAGCAGGAGCGGTTAGAACTAATAATATCCGTTTATCTAGTGCAGTAACGATTCTCTCTTCCAATGATCCTATTCGCGTCTACCAGCAATTTTCAACGATTGACGCACTTTCAAATGGTAGAGCAGAAATTATGGCAGGGCGTGGTTCCTTTATTGAGTCTTTTCCATTGTTTGGATACGATTTAGCGGATTATGATGATTTATTTAATGAAAAAATGGATATGTTGTTAGCAATTAACTCAGCGACAAATCTCGATTGGAAAGGTCATTTGACACAAACAGTTAATGAGCGACCAATTTATCCAAGAGCATTACAAAGACAGTTACCAATATGGGTGGCAACAGGAGGAAATGTTGATTCTACAATTCGTATTGCAGAACAAGGTTTGCCAATTGTTTATGCAACTATTGGTGGGAATCCCAAAGCCTTTCGTCAATTGGTCCATATTTATAAAGAAGTTGGTAGTCGTAATGGACACAAACCAGAACAACTAAAAGTTGCCGCTCACTCTTGGGGATGGATTGAAGAGGATAATCAAACCGCTATTGACCGTTATTTTTTCCCTACGAAACAGACCGTCGATAATATTGCTAAGGGACGCCCTCATTGGTCTGAAATGACTAAAGAGCAGTATTTACGTTCAGTAGGTCCAGAAGGTGCTATTTTTGTAGGAAGTCCTGAAGTGGTTGCACATAAAATTATAGGACTTGTTGAAGCGCTTGAGTTAGACCGTTTTATGTTACATCTACCAGTTGGCTCTATGCCTCACAAAGACGTCCTAAATGCCATCAAACTTTATGGTGAGGAAGTAGCACCAATTGTTCGAAAATATTTTGAAAAGAAT

SEQ ID NO: 5834 - protein, 347 aa, Streptococcus agalactiae
MIELGITTFGETTILEETNQSYSHPERIRQLVAEIELADQVGLDVYGIGEHHREDFAVSAPEIVLAAGAVRTNNIRLSSAVTILSSNDPIRVYQQFSTIDALSNGRAEIMAGRGSFIESFPLFGYDLADYDDLFNEKMDMLLAINSATNLDWKGHLTQTVNERPIYPRALQRQLPIWVATGGNVDSTIRIAEQGLPIVYATIGGNPKAFRQLVHIYKEVGSRNGHKPEQLKVAAHSWGWIEEDNQTAIDRYFFPTKQTVDNIAKGRPHWSEMTKEQYLRSVGPEGAIFVGSPEVVAHKIIGLVEALELDRFMLHLPVGSMPHKDVLNAIKLYGEEVAPIVRKYFEKN

SEQ ID NO: 5835 - protein, 2292 aa, Streptococcus agalactiae
TTGTTCGAAAATATTTTGAAAAGAATTAAAGCAGACCTGGTCTGTTTTTTATTGTTAGATTATAAAAACGCTATCTTGAAATCGCTTTTTAAAACTCTTCGTAAGTCAAAAATATGCTATAATAAAAGCGTTATGGAAAATTTAAATATTACACAAATTGCTATTGATTTAGGTATTAAAGCGTCACAAATCGAAAAGGTTTTAGAATTAACAGATGAAGGAAATACTATTCCTTTTATTGCCCGTTATCGTAAAGAAATGACAGGTAATTTGGATGAAGTTCAAATCAAATCAATTATTGACCTTGATAAGAGTATGACAGCTCTTTCAGATCGTAAAACTACGGTCTTAGCCAAAATTGAAGAACAAGGAAAGTTGACTCAAGAACTCAAAAAGGCTATTGAAGAAGCAACTAAACTAGCAGATGTTGAGGAACTCTACCTACCTTATAAAGAAAAACGTCGTACGAAAGCTACGATTGCACGTGAAGCAGGTCTTTTTCCTTTAGCACGTCTTATTTTACAAAATAAGGATAACCTTGAGGAAGAAGCTCAAAACTATCTTACAGATGGTTTTGAGACAACTACGAAGGCACTTTCTGGAGCAGTAGATATTCTTATCGAAGCTTTTTCTGAGGATAATAAATTACGTTCATGGACATATAATGAGATTTGGAACTACAGCTCAATCACTGCAGTTGTTAAAGATGAGTCACTTGATGAAAAACAGGTCTTCAAAATCTACTATGACTTTTCTGAAAAAATAAGTAAACTCCATGGCTATCAAGTTTTAGCATTGAATCGTGGTGAGAAAATGGGTGTTCTTAAGGTTAATTTTGAGCATAACCTTGAAAAAATGTTTCGCTTTTTTGCTGTTCGATTTAAAGAAACTAGCCAATATATAGATGACCTTATTGTACAGACTGTCAAGAAAAAAATCGTTCCAGCTATGGAACGCCGTATCCGTACAGAACTAAGTGAAGGAGCAGAAGATGGTGCAATTTCACTGTTTTCAGAGAATCTTCGTAACTTATTGTTAGTCTCACCGCTTAAGGGGAAAATGGTGTTAGGTTTTGACCCTGCCTTTCGTACAGGAGCAAAATTAGCAGTAGTAGACCAAACTGGAAAATTAATGACAACACAAGTGATTTATCCAGTTCCTCCAGCTAATCAAGCAAAAATCGAACAATCAAAAATAGAGTTAGCAAAACTTATCAAAGAATTCAATATAGAAATTATTGCTATAGGGAATGGAACAGCGAGTCGTGAATCGGAAGCATTTGTTGCAGAAGTTTTACAAGATTTTCCAGACGTATCCTATGTGATTGTTAACGAAAGTGGTGCCTCTGTTTATTCAGCCTCAGAATTGGCACGTCATGAATTTCCAGACTTAACGGTTGAAAAACGTTCGGCCATCTCAATTGCAAGACGTCTGCAAGACCCATTAGCAGAACTAGTCAAAATTGATCCAAAATCTATTGGTGTGGGTCAATATCAACATGATGTTAGTCAAAAAAAATTAGCAGAAAATCTTGATTTTGTTGTTGAAACTGTAGTTAACCAAGTAGGTGTTAATGTTAATACAGCAAGTCCAGCCTTGTTAGCTCACGTTTCAGGTTTAAATAAAACAATATCTGAAAATATTGTTAAATATCGTGAAGAGAATGGGCAAATTAAGTCACGTGCTGAAATTAAGAAAGTACCCAGATTAGGAGCAAAAGCTTTTGAGCAAGCTGCTGGATTCTTACGTATTCCTAATGCTAAAAATTTCTTGGATAATACAGGTGTTCACCCTGAGTCTTATGAAGCTGTTAAAAAGTTGCTTGACCAACTGACTATCAAAGAATTAGATGATTTTGCTAAAGAGAAGTTACAAAACCTTGACTTAATTGCAACAGCAGAAAGTATTGGGGTAGGTCAAGAAACATTGAAAGACATTATAGAAGATCTTTTGAAACCAGGTCGTGATTTACGTGATGATTTTGAAGCGCCTGTTTTGAGACATGATGTTTTAGATGTCAGTGATTTAAAAGTTGGACAGGAATTGCAAGGAACTGTTCGAAACGTCGTTGATTTTGGTGCTTTTGTTGATATTGGTGTTCATGAAGATGGTTTAATCCACCAGTCTCGCCTTATTAAGCGAAAACGCGATAAAAAAACTAGAAAAATGCCTCCTTTACCACATCCAAGCAAATATCTCTCTGTTGGTGATATTGTAACTGTTTGGGTTGTAGAGGTAGATGCGGAGCGTAGCAGAATTGGACTTAGTCTTATCAAGCCAGACGGACTTGAC

SEQ ID NO: 5836 - protein, 764 aa, Streptococcus agalactiae
MFENILKRIKADLVCFLLLDYKNAILKSLFKTLRKSKICYNKSVMENLNITQIAIDLGIKASQIEKVLELTDEGNTIPFIARYRKEMTGNLDEVQIKSIIDLDKSMTALSDRKTTVLAKIEEQGKLTQELKKAIEEATKLADVEELYLPYKEKRRTKATIAREAGLFPLARLILQNKDNLEEEAQNYLTDGFETTTKALSGAVDILIEAFSEDNKLRSWTYNEIWNYSSITAVVKDESLDEKQVFKIYYDFSEKISKLHGYQVLALNRGEKMGVLKVNFEHNLEKMFRFFAVRFKETSQYIDDLIVQTVKKKIVPAMERRIRTELSEGAEDGAISLFSENLRNLLLVSPLKGKMVLGFDPAFRTGAKLAVVDQTGKLMTTQVIYPVPPANQAKIEQSKIELAKLIKEFNIEIIAIGNGTASRESEAFVAEVLQDFPDVSYVIVNESGASVYSASELARHEFPDLTVEKRSAISIARRLQDPLAELVKIDPKSIGVGQYQHDVSQKKLAENLDFVVETVVNQVGVNVNTASPALLAHVSGLNKTISENIVKYREENGQIKSRAEIKKVPRLGAKAFEQAAGFLRIPNAKNFLDNTGVHPESYEAVKKLLDQLTIKELDDFAKEKLQNLDLIATAESIGVGQETLKDIIEDLLKPGRDLRDDFEAPVLRHDVLDVSDLKVGQELQGTVRNVVDFGAFVDIGVHEDGLIHQSRLIKRKRDKKTRKMPPLPHPSKYLSVGDIVTVWVVEVDAERSRIGLSLIKPDGLD

SEQ ID NO: 5837 - protein, 456 aa, Streptococcus agalactiae
TTGGACTTAGTCTTATCAAGCCAGACGGACTTGACTAATTATGTTAAGAAGGTGTCTATAGAAGATTTTGGATGTCAGTTTTTACATACTGCACATTGGAATAATCGCTTGAGAACAACTGGAGGACGCTTCTTTCCAAACGATAGACACCTTGACTTTAATCCCAAAATTTATCGTGAGTTTGGTATTGATATTTTTCGTAAGATTGTAAGACATGAGCTTTGCCATTATCATCTCTATATACAAGGTAAAGGATATCAACATAGGGATAAAGCTTTTAAAGAGTTACTAGAAAAAGTCGATGGCTTACGATATACCCCTAGAGTTACGGCTGTTAAAGTGAATTATCATCATTACTCTTGCCAATCTTGTGGTCAAGTATACCGACGTAGGAGACGTGTTAATTTACGCAAGTTTGCTTGTGGTTATTGTCATGGTCGCTTGATAGAGAGTTTT

SEQ ID NO: 5838 - protein, 152 aa, Streptococcus agalactiae
MDLVLSSQTDLTNYVKKVSIEDFGCQFLHTAHWNNRLRTTGGRFFPNDRHLDFNPKIYREFGIDIFRKIVRHELCHYHLYIQGKGYQHRDKAFKELLEKVDGLRYTPRVTAVKVNYHHYSCQSCGQVYRRRRRVNLRKFACGYCHGRLIESF

SEQ ID NO: 5839 - protein, 261 aa, Streptococcus agalactiae
ATGAAATCAAGCTTCTACAAACAACGAAAAGGTAAGTTGGTCTGCGGTGTTGTCGCCGGTCTAGCTGATAAGTATAACTGGGATTTAGCTCTTTCACGGGTGTTGATTGCACTGATTTTGTATTTTACCAAATTTGGTCTTTTGCTATATATTTTATTAGCTGTTTTCTTACCCTATAAAGAAGATATTATTGAAACAAGAAGACAAGGTCCCAGAAGACGTAAAGATGCTGAACCTGTTGATGATGACGGTTGGTTCTGG

SEQ ID NO: 5840 - protein, 87 aa, Streptococcus agalactiae
MKSSFYKQRKGKLVCGVVAGLADKYNWDLALSRVLIALILYFTKFGLLLYILLAVFLPYKEDIIETRRQGPRRRKDAEPVDDDGWFW

SEQ ID NO: 5841 - protein, 132 aa, Streptococcus agalactiae
ATGATGACGGTTGGTTCTGGTAATTCATATAAAGGAGATTTGCTAGACGAATCTCCTTTTTTCTTAGCTTTATTTAGACCATTTTTTCAAAATATCTTCTTTTTTTCAGAAAAACGCGTTAGCGCTTACTTT

SEQ ID NO: 5842 - protein, 44 aa, Streptococcus agalactiae
MMTVGSGNSYKGDLLDESPFFLALFRPFFQNIFFFSEKRVSAYF

SEQ ID NO: 5843 - protein, 933 aa, Streptococcus agalactiae
ATGGCAGTTACTGTTCAAATGTTAGTTGACCGCTTAAAGTTAAATGTCATCTATGGTGATGAACATCTATTATCTAAGCGGATTACAACAGCTGACATTTCACGTCCTGGTCTAGAAATGACAGGGTATTTTGATTATTATGCACCAGAGCGTTTGCAACTTGTTGGTATGAAAGAGTGGTCATATTTAATGGCTATGACAGGACATAATCGTTATCAAGTGTTACGTGAGATGTTCCAAAAAGAAACACCAGCTATTGTTGTAGCACGTGATTTAGAAATTCCAGAAGAGATGTATGAGGCGGCTAAAGATACCGGTATTGCTATTCTTCAAAGTAAGGCCCCTACAAGTCGTTTATCAGGTGAAGTTTCTTGGTATTTAGATTCTTGCTTAGCTGAGAGGACAAGTGTTCATGGTGTCTTGATGGATATCTATGGTATGGGTGTTCTGATTCAAGGAGATTCCGGTATTGGTAAGAGTGAGACAGGACTAGAGCTAGTTAAGCGAGGACATCGTTTGGTAGCAGATGATCGTGTTGATGTTTATGCTAAAGACGAAGAGACGCTTTGGGGAGAGCCTGCTGAGATATTACGTCATTTACTTGAAATTAGAGGTGTGGGAATCATTGATATTATGAGCCTATATGGAGCTAGTGCGGTTAAAGATTCATCGCAAGTGCAATTAGCTATATACCTTGAAAACTTTGAAACTGGAAAAGTTTTTGATAGACTCGGAAATGGCAATGAAGAGATTGAATTATCTGGAGTTAAGGTTCCTCGGATACGTATTCCTGTTAAAACAGGCCGAAACGTGTCAGTAGTTATTGAAGCAGCGGCTATGAATCACAGAGCTAAACAAATGGGGTTTGATGCTACCCAGACTTTTGAGGATCGTTTAACACATTTGATTAGTCAGAACGAGGTCAATGATGAT

SEQ ID NO: 5844 - protein, 311 aa, Streptococcus agalactiae; identical to SEQ ID NO: 1396

SEQ ID NO: 5845 - protein, 771 aa, Streptococcus agalactiae
ATGATTAATCCAGTAGCAATACAATTAGGCCCCTTTTCTATTCGCTGGTATGCTATTTGCATAGTGTCTGGTATGTTGTTAGCAGTTTACTTAGCAATGAAAGAGGCCCCTCGTAAGAACATTAAGTCGGATGATATTCTAGATTTCATTCTCATGGCTTTTCCACTATCCATTGTTGGAGCTCGTATTTATTATGTTATCTTCGAATGGGCTTATTACTCTAAGCACCCAGTAGAGATTATCGCCATTTGGAACGGTGGTATTGCTATTTACGGAGGGTTAATTACCGGAGCCATTCTCCTTGTGATTTTTTCATATCGTCGCTTGATTAATCCCATTGATTTTCTGGATATTGCTGCTCCAGGAGTGATGATTGCCCAAGCCATAGGTAGATGGGGGAATTTTATTAATCAAGAAGCATACGGTAGGGCAGTAAAAAATCTGAATTACTTACCCAACTTTATAAAAAATCAAATGTATATTGATGGAGCTTACCGAGTACCTACATTTTTATATGAGTCTCTTTGGAACCTCCTAGGTTTTGTCATCATCATGTCTATTCGTCATCGACCGCGCACTTTAAAACAAGGTGAAGTGGCATGTTTTTATTTAGTTTGGTATGGATGTGGACGGTTCATTATTGAAGGGATGAGGACAGATAGCCTTTATTTGGCGGGTTTGCGCGTGTCACAATGGTTATCAGTTATTTTAGTTATTATCGGAATTGTCATGATTATTTATCGTCGTCGTGAACAACATATTTCATATTAT

SEQ ID NO: 5846 - protein, 257 aa, Streptococcus agalactiae
MINPVAIQLGPFSIRWYAICIVSGMLLAVYLAMKEAPRKNIKSDDILDFILMAFPLSIVGARIYYVIFEWAYYSKHPVEIIAIWNGGIAIYGGLITGAILLVIFSYRRLINPIDFLDIAAPGVMIAQAIGRWGNFINQEAYGRAVKNLNYLPNFIKNQMYIDGAYRVPTFLYESLWNLLGFVIIMSIRHRPRTLKQGEVACFYLVWYGCGRFIIEGMRTDSLYLAGLRVSQWLSVILVIIGIVMIIYRRREQHISYY

SEQ ID NO: 5847 - protein, 396 aa, Streptococcus agalactiae
ATGATAGAAATTGCTGTATTAATTATTGCCATTGCGTTTGTTGTTTTAGTTTTAGGAATACTTTTCGTTCTGAAAAAAGTATCAGAAACGATTGAGGAAACCAAGCAAACTATTAAAGTATTAACAAGCGATGTTAACGTGACTCTTTACCAAACTAATGAAATTTTAGCCAAAGCTAATGTTTTAGTTGATGATGTTAATGGTAAAGTATCTACTATTGATCCTCTTTTTGTAGCTATTGCTGACTTATCAGAATCTGTATCTGATTTAAACCTACAGGCAAGACACATTGGACAAAAGGCAAGTAGTGCAACCTCAAGTGTTACTAAGGCAGGGTCAGCTTTAGCTATTGGAAAAGCGGCTTCAAAAATTTTTCGTAAAAAAGGAGACAAAAAA

SEQ ID NO: 5848 - protein, 132 aa, Streptococcus agalactiae
MIEIAVLIIAIAFVVLVLGILFVLKKVSETIEETKQTIKVLTSDVNVTLYQTNEILAKANVLVDDVNGKVSTIDPLFVAIADLSESVSDLNLQARHIGQKASSATSSVTKAGSALAIGKAASKIFRKKGDKK

SEQ ID NO: 5849 - protein, 429 aa, Streptococcus agalactiae
ATGAGTAAATTATTTAAAACTTTAGTTATCAGTGCTGCATCAGGTGCAGCAGCAGCTTATTTTTTAACAACAAAAAAAGGAAAAGAGCTAAGGAAAAATGCAGAAAAGTTCTATGGAGAATATAAAGAAAATCCAGAAGAATATCATCAAATAGCTAAAGATAAAGCAAGTGAATATTCAAATTTAGCTGTTGATACTTTTAAAGATTATAAAGGTAAATTTGAATCAGGTGAATTGACAACAGAGGATATCGTCTCAGCCGTTAAGGAAAAAAGCGGAGAAGTAGTTGACTTTGCTAATGATTTTGTCAATCAAGCTAAATCAAAATTCTCAGATGAGGATACTGCTAAAAAAGAAAATAAGGCTCCTGAAACAAAAGTAGAAGATATTGTCATTGATTATAAAGAAAACACAGAAGATAAAGAAAAA

SEQ ID NO: 5850 - protein, 143 aa, Streptococcus agalactiae
MSKLFKTLVISAASGAAAAYFLTTKKGKELRKNAEKFYGEYKENPEEYHQIAKDKASEYSNLAVDTFKDYKGKFESGELTTEDIVSAVKEKSGEVVDFANDFVNQAKSKFSDEDTAKKENKAPETKVEDIVIDYKENTEDKEK

SEQ ID NO: 5851 - protein, 273 aa, Streptococcus agalactiae
ATGTCATCACCACTTAAGCAAGAGCAAACTCACGAAAGCAAAACAGAGCAAGCTCAACCAAAATTTCAAGTATTTCAAGAATTTGATCACAGTGCTAAGTTGCGTGAGCTAGTCTTTTTTGCTCGTATCGCTCTCTTCAGTATAACCACTGTGCTAATCTCTTTCTTATTACTAGCACTAAGTTTAACACCTGTCTGGAGTTTCTTACTAGCGATGCTGGCAAGTCTAGCAGTTACATCTGCAGTCTCTTCATTCATTTGGTCACTCAGACAA

SEQ ID NO: 5852 - protein, 91 aa, Streptococcus agalactiae
MSSPLKQEQTHESKTEQAQPKFQVFQEFDHSAKLRELVFFARIALFSITTVLISFLLLALSLTPVWSFLLAMLASLAVTSAVSSFIWSLRQ

SEQ ID NO: 5853 - protein, 909 aa, Streptococcus agalactiae
TTGACAGCGACAGCTGAATCTATTGAACAAGTAAAGCAATTGCTAGCAATAGGAATTGACCGCATCTACGTAGGGGAAGAAAATTACGGTCTTCGTTTACCACATTCATTTTCAGACGATGAATTGCGTGAAATCGCTAAATTAGTACATGATGCTGGTAAAGAATTGACAGTAGCTTGTAATGCACTCATGCATCAAGAGATGATGGATAATATCAAACCATTTTTGGAGTTGATGAAAGAAATTAATGTGGATTATTTGGTAGTTGGTGATGCAGGAGTATTTTATATCAACAAGCGTGATGGTTATAACTTCAAACTTATCTACGACACTTCTGTATTCGTTACATCAAGTCGTCAAGTTAATTTTTGGGGACAACATGGAGCAGTAGAAACGGTTTTAGCACGTGAAATACCTTCTGAAGAACTTTTTAAGATGTCTGAGAACCTTGAATTTCCTGCTGAGATTTTAGTTTATGGGGCTTCTGTAATTCATCACTCTAAGCGTCCGTTATTACAAAACTATTATAATTTTACTCATATCACTGATGAAAAAACACGTGAGCGTGGTCTTTTTTTAGCAGAACCAGGTGATCCAGAAAGTCACTATTCTATTTACGAAGATAAGCATGGGACTCATATTTTTATTAACAATGATATCGATATGATGACTAAAGTGACTGAACTAGTTGAACATCACTTTACTCACTGGAAATTAGATGGTATTTATTGTCCAGGAGATAATTTTGTTGCTATTGCTGAAATTTTTGTCGAAACAGCTCGTTTGATTGAAAATGGAACATTCACTCAGGATCAGGCTTTCTTGTTTGATGAACGAATTAGAAAACTGCACCCTAAAGGACGTGGTTTAGATACTGGATTTTATGAGTTTGACCCATCAACAGTAAAA

SEQ ID NO: 5854 - protein, 303 aa, Streptococcus agalactiae
MTATAESIEQVKQLLAIGIDRIYVGEENYGLRLPHSFSDDELREIAKLVHDAGKELTVACNALMHQEMMDNIKPFLELMKEINVDYLVVGDAGVFYINKRDGYNFKLIYDTSVFVTSSRQVNFWGQHGAVETVLAREIPSEELFKMSENLEFPAEILVYGASVIHHSKRPLLQNYYNFTHITDEKTRERGLFLAEPGDPESHYSIYEDKHGTHIFINNDIDMMTKVTELVEHHFTHWKLDGIYCPGDNFVAIAEIFVETARLIENGTFTQDQAFLFDERIRKLHPKGRGLDTGFYEFDPSTVK

SEQ ID NO: 5855 - protein, 1284 aa, Streptococcus agalactiae
ATGTCTAATGTAAAAAAACGCCCTGAGGTTTTATCACCTGCAGGAACACTAGAAAAATTAAAAGTTGCTATTGATTATGGAGCAGATGCTGTATTTGTTGGAGGTCAAGCGTATGGTCTTCGAAGTAGAGCTGGTAACTTTTCTATGGAAGAGTTACAAGAGGGAATAAACTATGCTCATGCAAGAGATGCTAAAGTTTATGTAGCGGCTAATATGGTTACTCATGAAGGTAATGAGCTTGGGGCAGGTCCGTGGTTTCGTGAATTACGTGATATGGGACTAGATGCAGTCATTGTTTCAGATCCTGCTCTTATTGTTATTTGTGCTACAGAAGCACCAGGTTTAGAAATTCATTTGTCAACTCAAGCCTCTTCCACGAACTATGAAACTTTTGAATTTTGGAAAGAGATGGGGCTTACTCGTGTCGTATTAGCACGTGAGGTTACTATGGCAGAGTTGGCTGAAATCAGGAAGAGGACAGATGTTGAGATAGAAGCATTTGTTCATGGCGCGATGTGTATTTCATACTCAGGACGATGTGTTCTATCAAACCATATGAGCCATCGTGATGCTAATCGTGGCGGTTGCTCTCAGTCATGTCGTTGGAAATATGACCTCTACGATATGCCATTTGGACAAGAACGTCAATCGTTAAAAGGCGAGATTCCAGAACCTTTCTCAATGTCAGCTGTGGATATGTGTATGATTGAGCATATTCCAGATATGATTGAAAATGGCGTAGATAGTTTAAAAATAGAAGGACGTATGAAATCCATTCATTATGTTTCTACAGTAACTAATTGCTATAAAGCTGCTGTAGATGCCTATATGGAAAGTCCAGAAGCTTTTGAAGCTATTAAAGAAGACTTGATTGATGAACTTTGGAAGGTTGCACAACGCGAATTAGCAACAGGTTTTTACTACCATACACCAACTGAAAATGAACAACTCTTTGGAGCTCGTCGTAAAATTCCTCAATACAAATTTGTTGGGGAAGTGGTTTCATTTGACAATGCTAAAATGGAGGCTACAATTCGTCAGCGTAATGTTATTATGGAAGGAGATCGCGTAGAATTCTATGGTCCTGGCTTCCGTCACTTTGAATGTTTTATTGAAGGTCTGCGCGATGCTGAGGGAAATAAAATAGACCGTGCTCCAAATCCGATGGAATTATTAACCATAACATTACCAAATCCAGTAAAAAAAGGGGATATGATTCGTGCTTGTAAAGAAGGATTAGTGAACCTTTATCAAAATGATGGTACTAGCAAGACTATAAGAGCT

SEQ ID NO: 5856 - protein, 428 aa, Streptococcus agalactiae
MSNVKKRPEVLSPAGTLEKLKVAIDYGADAVFVGGQAYGLRSRAGNFSMEELQEGINYAHARDAKVYVAANMVTHEGNELGAGPWFRELRDMGLDAVIVSDPALIVICATEAPGLEIHLSTQASSTNYETFEFWKEMGLTRVVLAREVTMAELAEIRKRTDVEIEAFVHGAMCISYSGRCVLSNHMSHRDANRGGCSQSCRWKYDLYDMPFGQERQSLKGEIPEPFSMSAVDMCMIEHIPDMIENGVDSLKIEGRMKSIHYVSTVTNCYKAAVDAYMESPEAFEAIKEDLIDELWKVAQRELATGFYYHTPTENEQLFGARRKIPQYKFVGEVVSFDNAKMEATIRQRNVIMEGDRVEFYGPGFRHFECFIEGLRDAEGNKIDRAPNPMELLTITLPNPVKKGDMIRACKEGLVNLYQNDGTSKTIRA

SEQ ID NO: 5857 - protein, 210 aa, Streptococcus agalactiae
ATGTCAGAATTTACATTTGAAATTGTTGAGAAGTTACTGGTCCTATCTGAAAATGAAAAAGGTTGGACAAAAGAGTTGAATCGTGTTAGCTTCAACGGAGCGCCAGCTAAATTTGATTTGCGTACATGGAGTCCAGATCATACAAAAATGGGTAAAGGTATCACTTTATCTAATGAAGAATTTAAAGTCATTTTAGATGCTTTTCGTAAA

SEQ ID NO: 5858 - protein, 70 aa, Streptococcus agalactiae; identical to SEQ ID NO: 1410

SEQ ID NO: 5859 - protein, 795 aa, Streptococcus agalactiae
ATGATTAGATATTCATTTAAAAGTAAGATGTTATTGTTAGTCTTTATCTTAACAATAATAGTGAATTATTTATCCGCAACAGGTTTGTTAACAGGGAACAGTCAGAAGAGTCTGTCTGATCGTTATCAAACGCTCTTGACACCAGCACCATTAGCCTTTTCAATTTGGTCAGTCATCTATTTATTGACCTTTTTAGTAATATTAAGAGCTATATTCAGTAAGAGTCAATCTTACCAAGATAACTTTGCTAGCATTTTTCCATACTTTTTGGGTCTTCTATTAGTTAATAATATATGGACTGTATTTTTTACGAGTAATTTGATTGGCCTATCAACAATAATAATTTTTGCTTACTGTATTCTTCTGGTTATCATTATCAAGATACTCAGTAAAAATAAATCAAAATTACTGCTTAGAATAACATTTGGAATTCATGCAGGATGGTTGCTAGTTGCGTCATTGGTCAATTTAGCGGTCTACTTAGTTAAAATTGATTTTAATTACCCATTACCAAAGGTATATATAGCTATCATTGCCTTGATTTTTATAACTGTTTTAAGTCTTTACCTGGCTAGGGTATTACAAAATGCTTACTTAATCTTATCCGTTTTTTGGGCTTGGTTGATGGTTTTTAAAGCACATTTAGAAGGAAATTTTCAACACCTATATTTTAGTATCCAAATTTTATCTTTGATTGCAGCAATTATCTTTGGCGTATCGTTTTTCATCATCGGTTATTATAATGTCAAGGAGAGGTACAAGCAAAAAAATACTAGTCCTTACTCACGGGTTCTT

SEQ ID NO: 5860 - protein, 265 aa, Streptococcus agalactiae
MIRYSFKSKMLLLVFILTIIVNYLSATGLLTGNSQKSLSDRYQTLLTPAPLAFSIWSVIYLLTFLVILRAIFSKSQSYQDNFASIFPYFLGLLLVNNIWTVFFTSNLIGLSTIIIFAYCILLVIIIKILSKNKSKLLLRITFGIHAGWLLVASLVNLAVYLVKIDFNYPLPKVYIAIIALIFITVLSLYLARVLQNAYLILSVFWAWLMVFKAHLEGNFQHLYFSIQILSLIAAIIFGVSFFIIGYYNVKERYKQKNTSPYSRVL

SEQ ID NO: 5861 - protein, 1338 aa, Streptococcus agalactiae
ATGAATCAAAATCATTCCGTCAAAAGATCCTTATCCGAAGTTAATCAGAGCGTTGAGGTTCCTCACAATAGCTCTTTTTGGAACACTTTAAGAGCTTTTCTTGGACCTGGAGCTTTGGTTGCAGTTGGTTATATGGATCCAGGTAACTGGATTACTAGCGTTATTGGTGGAGCTACCTATCGTTACTTACTATTGTTTGTTGTTTTAGTATCTTCTTTGATGGCGATGCAATTACAACAAATGGCTGGCAAGCTTGGCATTGTTACACGACAGGACTTAGCACAAGCAACAGCTTCTCGACTCCCAAAACCGCTTCGTTACCTGCTATTTATTATCATTGAGTTAGCCCTTATCGCTACTGATTTAGCAGAAGTCATTGGCTCTGCCATTGCTCTTCACTTATTATTTGGCTGGCCCCTGTTACTGTCTATCATGATTACTATTTTGGATGTATTCTTACTTTTACTCTTAATGAAGTTAGGCGTCCAAAAAATTGAAGCCTTTGTTTCTGTTCTCATATTGACAATTTTGATAATCTTTACATATTTAGTTGTTTTATCACAACCTGATTTAGATGCTATGTTCAAAGGATTTTTACCACACCATGAGCTTTTTAACATATCACATGAAGGGAAAAATAGTCCTTTAACCCTCGCTCTTGGCATTATCGGCGCAACAGTCATGCCACATAATCTTTATTTACATTCTTCTTTATCTCAGACTAGACGCGTGGATTATCATAATAAATCTTCAATAAAAAAAGCTGTACGTTTCATGACCTTAGATTCTAACATTCAGCTATCACTTGCATTTGTCGTGAATTCGCTACTATTAGTCTTAGGAGCTAGTCTATTTTATGGGCATGCTAATGATATCAGTGCCTTTTCTCAAATGTATCTTGCCCTATCTGATAAAACTATTACTGGTGCAGTAGCCAGTTCTTTCCTTTCTACCCTTTTTGCAGTTGCCCTACTAGCAAGTGGTCAAAATTCAACGATTACAGGTACTTTAACAGGACAAATCGTTATGGAAGGTTTCCTTCACTTCAAATTACCTCAATGGTTAATAAGGCTTTGTACTAGATTATTAACTCTTCTTCCAATTTTTGTTATCGCCCTACTAGTTGGAGGCGAAGAAAATACGTTAGATCAACTAATCGTCTATTCACAAGTTTTTCTTTCCTTAGCTTTACCATTTTCAATCTTTCCATTGATTTATTTCACGTCGCAAAAATCAATTATGGGAGAGCATGCTAATGCTAAATGGAATACCTATTTAGCATACCTTGTCGCCATCATTTTAACATTACTCAATTTGAAATTAATCATGGATTTACTT

SEQ ID NO: 5862 - protein, 446 aa, Streptococcus agalactiae; identical to SEQ ID NO: 1414

SEQ ID NO: 5863 - protein, 1107 aa, Streptococcus agalactiae
ATGATGAAAAAAGAAGACTACATGGCATTAGCCTTGAAAGAGGCTGAGAAAGGTATGGGGTTCGTTGCTCCCAACCCATTAGTAGGTGCTGTTATTGTTAAAGATGATCGTATAATTTCCAAAGGTTATCATAAACGATTTGGAGATTTACATGCGGAAAGACAGGCTATTAAAAATGCTGATGAAGATATCTCTGGAAGTACTCTGTACGTGACTTTAGAACCATGCTGTCATGTGGGTAAGCAACCACCTTGTACTGAAGCTCTTATTAAATCTGGTATCAAAAAAGTAGTAGTTGGAAGTTTAGATCCAAATCCTTTAGTTTCAGGAAAAGGGATTGCCTTGTTAAGAAAAGAAGGTTTAAATGTTGAAGTTGGTATCTTAAGAGAAGAATGCGATGCTCTGAATGAAAGATTCATTTTTCACATGACCTATAAGCAGCCTTTTGTTTATTTGAAATATGCTATGACTTTAGATGGGAAGATAGCTACAAAGACGGGCGATTCTAAGTGGATATCAAATGAGCACTCAAGACAATCTGTTCAGAAATTGAGGCAAAAATGTAGTGCTATTATGGTCGGTATCAATACTGTATTAGCTGATAATCCACGTTTAACTTGCCGTATTCCTAAAGGTGAAGCGCTTGTGAGGATCGTATGTGACAGTCAGTTGAAGATACCTTTAGACTCTTACCTAGTTAAGAGTGCTAAAACAATACCAACATGGATTGCAACATGTTCAGATAATCTTGCTCAGCAACAAACATTAAAAGAAATGGGTTGCCGTTTGATTAAGGTTCCAAGAAAAGATGGAAAGCTGGATTTGAAAGTATTAATGACTATTTTAGGACAAGACGGGATTGATAGCCTTCTTATTGAAGGAGGAAGTAGTTTACATTTTTCAGCTTTAAAAGCTGGTATTGTTAACAGACTAATTGTTTTTATTGCACCCAAAATAATAGGAGGTCTGAAAGCAAAAACAGCTATTTCTGGAGAAGGCTTGGATTGGCTTAACCAAGCTTTCAGAGTAAAAGATATTGAACTTAGTCGTATGGATTCTGATGTTGTTATTGAAGGAAAGGTAGAACATTATGTTTACAGGAATTAT

SEQ ID NO: 5864 - protein, 369 aa, Streptococcus agalactiae
MMKKEDYMALALKEAEKGMGFVAPNPLVGAVIVKDDRIISKGYHKRFGDLHAERQAIKNADEDISGSTLYVTLEPCCHVGKQPPCTEALIKSGIKKVVVGSLDPNPLVSGKGIALLRKEGLNVEVGILREECDALNERFIFHMTYKQPFVYLKYAMTLDGKIATKTGDSKWISNEHSRQSVQKLRQKCSAIMVGINTVLADNPRLTCRIPKGEALVRIVCDSQLKIPLDSYLVKSAKTIPTWIATCSDNLAQQQTLKEMGCRLIKVPRKDGKLDLKVLMTILGQDGIDSLLIEGGSSLHFSALKAGIVNRLIVFIAPKIIGGLKAKTAISGEGLDWLNQAFRVKDIELSRMDSDVVIEGKVEHYVYRNY

SEQ ID NO: 5865 - protein, 624 aa, Streptococcus agalactiae
ATGGGTCAAGTCAGTCGTATTCGGAATGGCATAAAGTCCCAACAATTAAGTATTGACGCTCCCAAACTAGTCCCTTTATTAAGAAAAGGGGATAGCGTAGCTGTTAATGGTGTTTGTTTGACGGTTCTTGACAAAAGTGAAAAAGCTTTTATAGCAGACGTCATGCCAGAAAGTATGATGCGAACAAGTTTAGCTGCTTTACGACTTCATTCTAAAGTTAACTTAGAATTAGCACTCAGAAGTGACTCAAGGTTAGGGGGACATTTTGTTCTTGGACATGTGGATGGGGTTGGAAAAATAGAAAAAATCCAAAAAGATGATATTGCTGTCAGATTTTCAATTGATGCTCCACCTAGTATTATGTCTTATATTATAGAGAAAGGTTCGGTGGCTCTAGATGGGATTAGCTTAACAGTGGTATCATTTACAGAGCATTCTTTTGAAGTTTCGGTCATTCCCCACACGATGACTCAAACTAATTTATCCTTAAAAAAGGTTGGGGATTTATTAAATATCGAAGTGGATGTTTTAGGCAAATATGCTGAGAAATTTTTAGCACCGACTAATAGAACTAATCACACTTCATCGGTAATGGATTGGTCTTTTTTATCAGAAAATGGCTAC

SEQ ID NO: 5866 - protein, 208 aa, Streptococcus agalactiae
MGQVSRIRNGIKSQQLSIDAPKLVPLLRKGDSVAVNGVCLTVLDKSEKAFIADVMPESMMRTSLAALRLHSKVNLELALRSDSRLGGHFVLGHVDGVGKIEKIQKDDIAVRFSIDAPPSIMSYIIEKGSVALDGISLTVVSFTEHSFEVSVIPHTMTQTNLSLKKVGDLLNIEVDVLGKYAEKFLAPTNRTNHTSSVMDWSFLSENGY

SEQ ID NO: 5867 - protein, 1191 aa, Streptococcus agalactiae
ATGGCCTTTAGTCCAATAAAAAAACTTTTACAAGACATCAAATCAGGGAAAATGGTAGTTTTGATGGATGACGAAAATAGAGAGAATGAAGGGGACCTTATTTGTGCGGCTGAAATGGTGACAAAAGAGTCGATTAATTTTATGGCTAAATTTGGGAAAGGATTAATTTGCTTACCTCTATCTAATTACTATGCTGAAAAGTTAGAATTAGCTCAAATGGCTAGCCATAATACTGATAATCATGAAACAGCTTTTACCATATCCATTGATCATCTATCAACTAGTACTGGGATTTCTGCGGAAGATAGAGCTTTGACAGCTAAGATGGTTGCTAACGACAGTAGCAAAGCTAAAGACTTTAGACGTCCTGGGCACTTATTTCCCTTGTTAGCCAAGGAAGGAGGTGTTTTAGCTAGAAATGGACATACTGAAGCAACCGTTGACCTATGTCGTCTAGCTGGATTAAAGGAATGTGGACTTTGTTGTGAAATAATGGCTGAAGATGGTAGTATGATGAGAAAGGATGAGTTATTAGCATTTGCTCAAAAGCACGATTTAGCTATCGCTACCATAAAACAATTGCAAGACTATAGACGTCAAGAAGAGGGAGGGGTGGTTAGAGAAATTGAGATTCAGCTACCAACGCAATTCGGTCATTTTACGGCTTATGGATATAGCGAAGTTGTGGCAAGTAAGGAACATGTTGCCCTTGTTAAAGGGGATATTAGTAGTGGTGAAGATGTTTTATGTCGTTTACACTCAGAATGTTTGACAGGTGATGTCTTTCATTCCTTGAGATGTGATTGTGGGGAACAACTGGCTAATGCACTCCAACAAATAGAGGCTGAAGGTCGTGGCGTCCTTCTTTATATGAGACAGGAAGGTCGAGGAATTGGTTTGATTAATAAGTTAAAAGCTTATTATTTGCAAGAAGAAGGCTTAGATACTTTAGAAGCTAATTTGGCTTTAGGTTTTGAAGGAGATGAGAGAGACTATGGAGTTAGTGCTCAACTTTTAAAAGATTTAGGTATAAATTCTATAAACTTACTAACCAATAATCCAGATAAAATCCAACAACTTGAAGCAGAAGGAATTTGCGTCAAAAACAGAGTGCCATTACAGGTAGCAGCAACAGCTTATGACCTTAATTATTTAAAAACTAAGAAAGAAAAAATGGGACATCTTTTAGAT

SEQ ID NO: 5868 - protein, 397 aa, Streptococcus agalactiae
MAFSPIKKLLQDIKSGKMVVLMDDENRENEGDLICAAEMVTKESINFMAKFGKGLICLPLSNYYAEKLELAQMASHNTDNHETAFTISIDHLSTSTGISAEDRALTAKMVANDSSKAKDFRRPGHLFPLLAKEGGVLARNGHTEATVDLCRLAGLKECGLCCEIMAEDGSMMRKDELLAFAQKHDLAIATIKQLQDYRRQEEGGVVREIEIQLPTQFGHFTAYGYSEVVASKEHVALVKGDISSGEDVLCRLHSECLTGDVFHSLRCDCGEQLANALQQIEAEGRGVLLYMRQEGRGIGLINKLKAYYLQEEGLDTLEANLALGFEGDERDYGVSAQLLKDLGINSINLLTNNPDKIQQLEAEGICVKNRVPLQVAATAYDLNYLKTKKEKMGHLLD

SEQ ID NO: 5869 - protein, 468 aa, Streptococcus agalactiae
ATGACAATTATTGAAGGACAATTAGTGGCAAACGAAATGAAAATAGGAATCGTAGTCTCACGTTTCAATGAATTGATTACATCTAAATTATTATCAGGAGCAGTAGATGGACTGCTGAGACATGGTGTTTCAGAAGAAGATATAGATATTGTATGGGTACCCGGTGCTTTTGAAATCCCCTATATGGCTAGAAAAATGGCGTTATATAAAGATTATGATGCTATTATCTGTCTTGGGGTAGTCATTAAAGGCAGCACTGATCATTATGATTATGTTTGTAATGAGGTGACAAAAGGTATTGGTCATTTAAATAGCCAGTCAGATATCCCTCATATCTTTGGTGTTCTAACAACGGATAACATCGAACAAGCTATTGAGAGGGCAGGAACAAAAGCAGGAAATAAAGGTTATGATTGTGCTCTTTCGGCTATTGAAATGGTGAACCTTGATAAAAAATTGCGTGAGCGA

SEQ ID NO: 5870 - protein, 156 aa, Streptococcus agalactiae; identical to SEQ ID NO: 1422

SEQ ID NO: 5871 - protein, 1488 aa, Streptococcus agalactiae
ATGTCTAACCAACATATTGAAGAATTAAATGACCAACAGATTGTTCGTCGTGAAAAAATGGCTGCTTTGACTGAACAAGGCATTGATCCTTTTGGTAAACGATTTGAACGTACAGCAACATCTGGTCAATTAAATGAAAAATACGCTGACAAATCAAAAGAAGACTTGCACGACATTGAAGAAACTGCTACAATCGCTGGTCGTTTAATGACTAAGCGCGGTAAGGGGAAAGTTGGCTTTGCGCATATCCAAGATCGCGAAGGTCAAATTCAAATTTATGTCCGTAAAGATTCTGTTGGCGAAGAAAACTACGAAATCTTTAAAAAAGCTGATTTAGGTGACTTCCTTGGTGTTGAAGGGCAAGTAATGCGTACAGATATGGGAGAACTTTCTATCAAGGCTACTCATATTACTCACCTTTCAAAAGCGCTCCGTCCACTTCCTGAAAAATTCCACGGCCTAACTGATATTGAAACAATCTATCGTAAACGTCATCTTGATTTAATCTCAAATCGTGACAGCTTTGACCGTTTTGTAACACGCTCAAAAATCATTTCAGAAATTCGTCGCTTTATGGATAGCAATGGTTTCTTAGAGGTTGAAACACCTGTTCTTCATAATGAAGCTGGTGGTGCTTCTGCTCGCCCATTTATCACACACCACAATGCACAAGACATTGACATGGTTCTTCGTATCGCAACTGAATTGCATCTAAAACGTCTTATTGTAGGTGGTATGGAGCGTGTTTATGAAATCGGACGTATTTTCCGTAATGAAGGGATGGATGCAACCCACAATCCAGAGTTCACATCTATTGAAGCCTACCAAGCCTATGCTGACTACCAGGATATTATGGACTTGACAGAAGGTATTATCCAGCATGTTACAAAAACTGTAAAAGGTGATGGACCAATTAATTATCAAGGCACAGAAATTAAAATTAATGAACCATTCAAACGTGTTCATATGGTTGATGCGGTTAAAGAAATCACTGGTATTGACTTCTGGAAAGAAATGACTCTTGAAGAAGCACAAGCTTTGGCACAAGAAAAAAATGTTCCTCTTGAAAAACATTTCACAACAGTTGGTCACATCATTAATGCCTTCTTCGAAGAATTCGTTGAAGACACTTTAATTCAACCAACTTTTGTCTTTGGTCATCCAGTCGAAGTGTCTCCACTTGCTAAGAAAAATGATACAGACCCTCGTTTTACAGACCGTTTCGAACTCTTTATCATGACTAAAGAATACGCTAATGCTTTTACAGAATTAAATGACCCAATTGATCAGCTGTCTCGCTTTGAAGCACAAGCATCTGCTAAAGAACTTGGCGATGATGAAGCAACTGGAGTTGATTACGATTATGTTGAAGCACTTGAATATGGTATGCCACCTACTGGTGGACTAGGTATTGGTATCGACCGTCTCTGTATGCTGTTAACTGATACAACAACTATCCGAGACGTCCTACTTTTCCCTACAATGAAA

SEQ ID NO: 5872 - protein, 496 aa, Streptococcus agalactiae; identical to SEQ ID NO: 1424

SEQ ID NO: 5873 - protein, 900 aa, Streptococcus agalactiae
ATGATTACTTCAATTGTTTTTGATGTTGATGATACAATTTACGATCAACAAGCACCTTACCGTATTGCTGTGGAGAAATGCTTTCCTGATTTTGATATGAGCGCTATTAACCAAGCTTATATTCGCTTTCGTCATTATTCAGATATTGGCTTTCCACGAGTAATGGCTGGTGAATGGACAACAGAATATTTTCGTTTCTGGCGATGCAAAGAAACGCTTTTAGAGTTTGGTTATCGTGAAATTAACGAAGCTACTGGTATTTATTTTCAAGAAATATACGAACATGAACTTGAAAATATTACAATGCTTGATGAGATGCGTATGACACTTGACTTTTTGAAATCAAAAAATGTACCAATGGGAATTATTACAAATGGTCCTACGGAACATCAATTGAAAAAAGTTAAAAAATTGGGACTTTATGACTATGTTGATCCAAAACGTGTTATAGTTAGTCAAGCAACTGGTTTTCAAAAGCCTGAAAAGGAGATTTTTAATTTAGCAGCAGAGCAATTTGATATGAACCCTTCAACTACACTTTATGTGGGTGATTCATATGATAATGATATTATGGGTGCATTTAATGGTGGTTGGCATTCTATGTGGTTCAACCATAGAGGACGTTCTTTAAAACCGGGAATTAAACCAGTTTATGATGTTGCTATTGATAACTTTGAGCAATTATTCGGTGCTGTTAAAGTGTTGTTTGACTTACCTGATAATAAATTTATTTTTGATATCAACGATAAAAGTAATCCAGTCCTTGAAATGGGACTTAATAATGGTTTAATGATGGCAGCAGAGCGTCTGCTTGAGAGTAATATGAGCGTTGACAAAGTTGTTATTTTACTGCGCCTAACTGCAAAACAAGAAAAAGTATTACGCATGAAGTATGCTAGA

SEQ ID NO: 5874 - protein, 300 aa, Streptococcus agalactiae
MITSIVFDVDDTIYDQQAPYRIAVEKCFPDFDMSAINQAYIRFRHYSDIGFPRVMAGEWTTEYFRFWRCKETLLEFGYREINEATGIYFQEIYEHELENITMLDEMRMTLDFLKSKNVPMGIITNGPTEHQLKKVKKLGLYDYVDPKRVIVSQATGFQKPEKEIFNLAAEQFDMNPSTTLYVGDSYDNDIMGAFNGGWHSMWFNHRGRSLKPGIKPVYDVAIDNFEQLFGAVKVLFDLPDNKFIFDINDKSNPVLEMGLNNGLMMAAERLLESNMSVDKVVILLRLTAKQEKVLRMKYAR

SEQ ID NO: 5875 - protein, 639 aa, Streptococcus agalactiae
ATGAAATTTTATCTTGTTAGACACGGAAAAACACAATGGAATTTAGAGGGACGTTTCCAAGGTGCTAACGGAGACTCACCTCTCCTTGAAGAAGCTATTGAAGAATTAGAAGAACTTGGACAATACCTATCATCTATTCATTTTGATGCTGTTTATTCTAGCGACTTAGGTCGTGCTAGAGATACTGTTAATATCCTCAATGATGCTAATTCATGCCCAAAAGAAATCCACTATACTCCTCAACTTCGTGAATGGGCATTGGGAACTTTAGAAGGTTGTAAAATTGCAACTATGCAAGCTATCTATCCTCGTCAAATGACCGCATTTTATCAAAATCCCTTACAATTTAAACATGACATGTTCGGTGCAGAATCTCTTTATCAGACAACGCATCGTGTAGAGAGTTTCTTACGTTCTTTAGCTTCAAAAAATTACGACAAGGTCCTTATTGTAGGACATGGAGCAAACCTAACTGCGTCTATTCGTTCCTTACTGGGTTATCAATATGGTAGTTTACACTACAAAGATAAACTTGATAATGCCAGCCTCACAATCATAGAAACTCATGATTTTAAAGACTTCAACTGTCTGACTTGGAACGATAAATCTTATTTAAGGCAAGAGGTCAAAATGACACAC

SEQ ID NO: 5876 - protein, 213 aa, Streptococcus agalactiae; identical to SEQ ID NO: 1428

SEQ ID NO: 5877 - protein, 471 aa, Streptococcus agalactiae
ATGAGTAAAAAGAATAAAATCAAAAAAACTTTAGTTGATCAAATTTTAGATAAAGCAAAAATCGAACATGATAGTCTACAATTGGATGCTTTACAGGGAGATTTACCCAACGGTATTCAAAAACAAGATATCTTTAAGACATTAGCGCTAATCGGTGATAAAACCGGTCCCATAATAGGTATCTTACCTCTCACCGAGCATTTATCCGAAAAAAAGTTAGCTAAAATTTCAGGAAACAAAAAGGTACAAATGATACCTCAAAAAGATCTCCAGAAAATAACCGGTTATATTCACGGAGCAAATAATCCAATTGGAATTCGCCAAAAACATAATTACCCTATTTTTATCGATACTATCGCTTTAGAAAAACAAGAACTCATTGTCTCTGCAGGAGAAATTGGACGTTCTATTCGTATTAATAGTGAGGTTCTTGCAGATTTCGTAAATGCTAAATTTGCCGATATAAAGGAA

SEQ ID NO: 5878 - protein, 157 aa, Streptococcus agalactiae; identical to SEQ ID NO: 1430

SEQ ID NO: 5879 - protein, 615 aa, Streptococcus agalactiae
ATGGAAATACTGATTGCAGGTGGTAGTGGTTTTTTAGGAAAGCAGATAATAAAAGCAGCGCTTACAAAAGGGCATAAAGTGGCTTACTTATCAAGACATGAAGGTAAAGGTGATATATTTAAGGATCCTAGATTAACCTACATTAGGGGAGATATTACAGAAGCTGATAAGATTCATTTAGAAGACAGAACTTTTGATATATTAATTGACTGTATTGGAGCGATTAAGCCCAATCAACTAGATGAGCTTAACGTTAAAGCAACCCAAAAAGCAGTAGCACTCTGTCACAAAAATCAAATACCAAAGCTAGTTTACATTTCAGCCAACAGCGGCTATTCAGCTTACATTAGAAGTAAAAGGAAGGCAGAGCAGATAATCAAAGCAAGCGGTCTGGATTACCTTTTTGTAAGACCAGGTTTGATGTATGGTGAAGAGCGACCTCTCTCGATTTTCCAAGCCAAGTGTATAAAATTATTTAGTCATTTGCCTTTCTTAGGTATTGTTGTACAAAAGGTCTTTCCAACTAAGGTTGTGATAGTGGCAGAAGCAATCGTTACTACGCTTAGGAAAAAACCAACCCAAAAAATCCTTTCTATTGAAGAATTAAATAATAAA

SEQ ID NO: 5880 - protein, 205 aa, Streptococcus agalactiae
MEILIAGGSGFLGKQIIKAALTKGHKVAYLSRHEGKGDIFKDPRLTYIRGDITEADKIHLEDRTFDILIDCIGAIKPNQLDELNVKATQKAVALCHKNQIPKLVYISANSGYSAYIRSKRKAEQIIKASGLDYLFVRPGLMYGEERPLSIFQAKCIKLFSHLPFLGIVVQKVFPTKVVIVAEAIVTTLRKKPTQKILSIEELNNK

SEQ ID NO: 5881 - protein, 846 aa, Streptococcus agalactiae
ATGAGAAGAAGAATTAAACCTATTGTTGTTGCGGTTTTTTTCAGTTTATTTGGACTTTTATTAATTATTGGTCATTTACATTCGACAAATACTTTGAAAAAAGAATTAGTTGAAGCTAAAAAGACAATTCCATCCGTAAAAGCTTCAAAAGTACCGCAAAAATCAACATCATCGAAAGATAAAGAGTTTGTTCTTAAACCGATTATCGATGTCTCTGGTTGGCAACTTCCTAAGGAGATTGATTACGATACGCTTTCAAAAAATATTTCAGGTGTTGTTATTCGTGTCTTTGGTGGATCAAAGATATCTAAGACTAATAACGCTGCTTATACAACTGGAATCGATAAATCGTTTAAGACCCATATCAAAGAATTTCAAAAGCGAAATATCCCAGTAGCTGTCTACAGTTATGCACTTGGTTCAAGTGTTAAAGAAATGAAAGAAGAGGCTCAGATATTTTATAAGAATGCAGCTCCTTACAAACCAACTTTTTATTGGATTGACGTAGAAGAGGAGACAATGTCTAACATGAATAAAGGTGTCCAAGCATTCCGAAAAGAATTAAAAAGACTTGGTGCTAAAAATGTTGGTATCTACATTGGTACTTACTTTATGACTGAGCAAGGCATCTCTGTAAAAGGATTTGACGCTGTTTGGATTCCAACTTATGGTAGCGATTCTGGATACTATGAAGCAGCTCCGCAAACTGAACTTAAATACGATTTACACCAATACACCTCTCAAGGTTATCTACCAGGATTCAATCAACCGCTTGATTTAAATCAAATTGCAGTTAATAAAGACAAGAAGAAAACTTATGAGAAACTTTTTGGAAAAGTAAAAGAT

SEQ ID NO: 5882 - protein, 282 aa, Streptococcus agalactiae
MRRRIKPIVVAVFFSLFGLLLIIGHLHSTNTLKKELVEAKKTIPSVKASKVPQKSTSSKDKEFVLKPIIDVSGWQLPKEIDYDTLSKNISGVVIRVFGGSKISKTNNAAYTTGIDKSFKTHIKEFQKRNIPVAVYSYALGSSVKEMKEEAQIFYKNAAPYKPTFYWIDVEEETMSNMNKGVQAFRKELKRLGAKNVGIYIGTYFMTEQGISVKGFDAVWIPTYGSDSGYYEAAPQTELKYDLHQYTSQGYLPGFNQPLDLNQIAVNKDKKKTYEKLFGKVKD

SEQ ID NO: 5883 - protein, 522 aa, Streptococcus agalactiae
ATGATAAAGAATTCAACTTTAACTAAATTGACTAGAGTCGCTATATTATCTGCTTTGTGTGTTGTGTTGAGATATGCTTTTGCGCCTCTGCCTAACATTCAGCCAATTACTGCCATTTTTTTGATTACAGTTGTCTTATTCGATTTAAAAGAAGGTGTAGCTACTGTAACTATAACAATGCTAGTTTCTTCTTTTTTAATGGGCTTTGGTCCATGGGTCTTTTTGCAAATCATTTCCTTCGCTTTAATTTTATGCTTGTGGAAATTTCTGATATATCCGCTGACAAAAGCTGTATGTTTTGGTAAAATAACGGAGGTAGTACTTCAAACTTTCTTTGCAGGAGGGTTAGGGGTTGTTTATGGCGTCATTATTGATACCTGTTTTGCTTGGTTATATCATATGCCTTGGTGGACTTATGTATTAGCAGGACTTAGTTTTAATATGGCACACGCTTTATCAACTTGTTTATTTTATCCTCTTTTGTTACCGATTTTAAGGAGATTTAGGAATGAAAAAATACAT

SEQ ID NO: 5884 - protein, 174 aa, Streptococcus agalactiae
MIKNSTLTKLTRVAILSALCVVLRYAFAPLPNIQPITAIFLITVVLFDLKEGVATVTITMLVSSFLMGFGPWVFLQIISFALILCLWKFLIYPLTKAVCFGKITEVVLQTFFAGGLGVVYGVIIDTCFAWLYHMPWWTYVLAGLSFNMAHALSTCLFYPLLLPILRRFRNEKIH

SEQ ID NO: 5885 - protein, 387 aa, Streptococcus agalactiae
ATGAAAAAATACATTAAATTATTCTTGCTAACAGTATTCGCTACAACTTTAGTAGCTTGCGGGCAACCATCTACATCGAATAAGACAACAACTAGCTCAACGTTAGAAGTTGGTAAGGTTGAATTGGTGGTTAAAGAAGATACGAACGTGTTAAGTGAAAAGGTTGTTTACCATAAAGGTGATACTGTTTTGGATGTGCTTAAAGCTAACTATAAAGTTAAAGAAAAAGATGGTTTCATTACTTCAATTGATGGCATCAGCCAAGATGAAACCAAAGGGCTTTATTGGATGTTCAAGGTCAATAATAAATTAGCTCCTAAGGCAGCAAACCAAATTAAAGTTAAAAAGAATGACAAAATTGAATTTTATCAGGAAGTTTACAAAAAA

SEQ ID NO: 5886 - protein, 129 aa, Streptococcus agalactiae; identical to SEQ ID NO: 1436

SEQ ID NO: 5887 - protein, 1797 aa, Streptococcus agalactiae
ATGGAACTTAAAAAACGCTCTGAATTCCCTGAAAATGAACTTTGGGATCTGACTGCTCTCTACAAAGATCGTCAAGATTTTTTACTGGCTATTGAAAAAGCTCTTGAGGATATCAAGGTTTTCAAAAAAAATTACGAGGGAAAACTTAATTGTGTTGAGGATTTTACTAGTGCCCTTATGGAAATCGAGCATATTTATATCCAGATGAGTCACATTGATACCTATGCTTTTATGCCTCAAACTACTGACTTTAGCAACGAAGAGTTTGCACAAATTTCTCAAGCAGGATCAGACTTCGCAACTAAAGCTAATGTACTACTTTCTTTCTTTAATACTACCCTAGCAAATGCAGATATAAAGATTTTAGATTCTTTAGAAAATAACCCTCATTTCAAAGCAACTATTCGCCAAGCTAAAATTCAAAAGCAACACTTATTAAGTCCAGAAGTCGAAAAAGCTTTGACAAACTTAAATGAAGTCCTAAATACACCATATGATATTTATACTAAAATGCGTGCTGGCGATTTTGATATGGAAGATTTTGAAGTTGACGGAAAAACCTACAAAAATAGTTTTGTAACTTATGAAAATTACTTTCAAAATCACGAAAATGCAGAGATACGTAAAAAATCCTTCCGTTCATTCTCGAAAGGTCTACGTAAGCACCAAAATGCTGCAGCTGCGGCTTATCTTGCAAAAGTCAAATCTGAAAAGTTAATTGCTGATATGCGTGGTTACGATAGTGTTTTTGATTATCTTCTTTCCGAACAAGAAGTTGACCGTTCAATGTTTGACAGACAAATTGATCTTATCATGGATGAATTTGGTCCAGTAGCTCAACGATTCCTCAAACATATCGCCGATGTTAATGGTATTGAAAAGATGACTTTTGCAGATTGGAAATTAGACATTGATAACGAACTTAATCCCGAAGTAAGTATCAATGATGCTTATGACTTAGTAATGAAATCAGTTGCTCCTTTAGGAAAAGAATATTCCCAAGAGGTTGAGCGCTATCAAAAAGAGCGTTGGGTTGATTTTGCAGCTAACGCTAATAAAGATTCTGGAGGATATGCTGCGGATCCTTACAAAGTTCATCCCTATGTACTCATGAGCTGGACGGGGCGTATGAGCGATGTCTACACTCTTATTCATGAGATTGGACATTCTGGTCAATTTATCTTCTCAGATAATCACCAAAGTTTTTTCAATACTCACATGTCCACTTACTATGTTGAAGCTCCATCTACTTTTAACGAACTTTTACTTAGTGACTACTTAGAAAACCAATTTGATACAGCACGTCAAAAACGCTTTGCTCTTGCACATCGCTTAACTGATACTTACTTCCACAATTTCATTACTCACTTACTTGAAGCTGCTTTCCAACGTAAAGTTTACACTCTAATTGAGGAGGGAGGAACTTTTGGAGCAGAACAATTAAATGCTATTATGAAGGAAGTATTAACACAATTCTGGGGAGATGCTATTGAAATAGATGACGATGCTGCTTTGACATGGATGAGACAAGCTCATTACTACATGGGGCTCTATAGCTATACTTACTCTGCTGGTTTAGTAATCTCGACAACCGGCTATCTCAATCTCAAAAATAATCCAAACGGAGCAAAAGAGTGGTTAGCATTCTTGAAATCTGGTGGGAGCCGTACCCCTTTAGAAACAGCTCTATTAATCGGTGCTGATATTTCTACTGATAAGCCTCTACGCGATACTATTAATTTCTTATCTAACACTGTAGACCAAATTATTAATTACAGTAATCTTATTGAGCAAGGC

SEQ ID NO: 5888 - protein, 599 aa, Streptococcus agalactiae
MELKKRSEFPENELWDLTALYKDRQDFLLAIEKALEDIKVFKKNYEGKLNCVEDFTSALMEIEHIYIQMSHIDTYAFMPQTTDFSNEEFAQISQAGSDFATKANVLLSFFNTTLANADIKILDSLENNPHFKATIRQAKIQKQHLLSPEVEKALTNLNEVLNTPYDIYTKMRAGDFDMEDFEVDGKTYKNSFVTYENYFQNHENAEIRKKSFRSFSKGLRKHQNAAAAAYLAKVKSEKLIADMRGYDSVFDYLLSEQEVDRSMFDRQIDLIMDEFGPVAQRFLKHIADVNGIEKMTFADWKLDIDNELNPEVSINDAYDLVMKSVAPLGKEYSQEVERYQKERWVDFAANANKDSGGYAADPYKVHPYVLMSWTGRMSDVYTLIHEIGHSGQFIFSDNHQSFFNTHMSTYYVEAPSTFNELLLSDYLENQFDTARQKRFALAHRLTDTYFHNFITHLLEAAFQRKVYTLIEEGGTFGAEQLNAIMKEVLTQFWGDAIEIDDDAALTWMRQAHYYMGLYSYTYSAGLVISTTGYLNLKNNPNGAKEWLAFLKSGGSRTPLETALLIGADISTDKPLRDTINFLSNTVDQIINYSNLIEQG

SEQ ID NO: 5889 - protein, 2793 aa, Streptococcus agalactiae
TTGTCCCACCCGAAATTAGAAAGTAGTAGCAATAAAGAAATCATTACCGAAGAGGTCGGTTTACTGAAGCAGCTTTTGGATGAAGCAACGCAAAAATTGATTGGTAGTGAATCATTTGACAAGATTGAAAAAATAGTTTCATTATCATCAACTGACGATTATACTGGTCTGAAGGAAACTATTTCGGCTTTAAGCAACGAGGAGATGGTTATTGTTTCTCGTTACTTCTCTATTTTGCCGCTCTTAATTAATATTTCAGAAGACGTTGATTTAGCATATGAAATTAATTATAAAAATAATCTTAACCAAGATTACCTAGGAAAGTTATCAACGACTATTGATGTTGTAGCTGGCCATGAAAATGCTAAAGATATTCTTGAACACGTCAATGTTGTGCCTGTGCTAACAGCTCATCCTACTCAGGTGCAGCGTAAAACGGTGCTCGAATTAACGTCTAAGATTCATGATTTATTACGTAAATACAGAGATGTCAAGGCAGGAATCGTGAATCAAGAAAAATGGTATGCTGACTTGCGTCGTTACATCGGCATTATCATGCAAACAGACACTATTCGCGAGAAAAAATTGAAAGTCAAAAATGAGATAACCAATGTAATGGAATATTACAACCGTTCTCTTATTAAAGCAGTTACCAAATTAACAGCAGAATATAAGGCACTGGCAGCTAAAAAAGGTATTCACTTAGAGAATCCTAAGCCTCTGACTATGGGGATGTGGATTGGTGGTGATAGAGATGGCAATCCCTTTGTAACTGCTGAGACACTAAGATTATCAGCTATGGTACAAAGTGAAGTGATTATTAACCATTATATTGAGCAGCTAAACGAGCTTTATCGTAATATGTCACTTTCAATAAGTCTAACTGAAGTCTCTCCCGAACTTGTTACATTGGCAAACCAGTCACAAGATAATTCGGTATATAGGGAAAATGAACCTTACCGTAAAGCTTTCAATTTTATCCAAGGTAAGCTAGTACAAACCCTACTAAATTTAAAAGTTGGTTCTTACCCAAAAGAGAAATTTGTTAGTCGTCAAGAATCTTCTGATATTGTAGGAAGGTATATAAAATCACATGTCGCTCAAGTAGCTTCTGACATACAGACAGAAGAACTACCAGCATACGCTACTGCTGAGGAGTTTAAACAAGATTTGTTACTTGTGAAGCAATCTTTAGTTCAATATGGACAAGATTCTCTTGTCGATGGCGAATTAGCTTGTCTTATTCAAGCAGTAGATATCTTTGGATTTTATTTAGCTACTATTGATATGCGTCAAGATTCTAGTATTAATGAAGCTTGTGTAGCAGAATTATTGAAGTCTGCCAATATTGTAGATGATTACAGTTCTCTTTCAGAAGAAGAAAAATGTCAACTTCTCTTAAAAGAATTAACAGAAGATCCTAGAACATTATCTTCTACGCATACTCCTAAATCCGAGTTACTTCAAAAAGAATTGGCTATTTTCCAAACAGCACGTGAGTTAAAAGATCAATTGGGTGAAGACATTATAAAACAGCATATCATTTCTCACACAGAGAGCGTTTCGGATATGTTTGAGTTGGCTATCATGTTAAAAGAAGTTGGACTAATTGATGCCAATCAAGCTCGCATTCAGATTGTACCGTTATTTGAAACCATCGAAGATTTGGATAATTCACGTGATATTATGACCCAGTATCTACATTATGGATTAGTTAAAAAATGGATTGCTACTAACAACAATTATCAAGAAATAATGCTAGGTTATTCAGATAGTAATAAAGATGGTGGCTATTTATCATCTGGTTGGACTCTATATAAAGCTCAAAATGAGCTAACAAAAATAGGTGAAGAAAACGGTATTAAAATCACATTTTTCCATGGTCGTGGTGGGACTGTTGGTCGTGGAGGTGGTCCATCTTATGAAGCCATCACATCACAACCTTTTGGTTCAATCAAAGATCGAATTCGCCTAACAGAGCAAGGTGAAATCATTGAGAATAAATATGGTAATCAAGATGCAGCCTATTATAACCTTGAAATGCTTATTTCAGCTTCCATAGACCGCATGGTAACACGTATGATTACTAACCCTAATGAAATTGATAATTTCCGTGAGACAATGGATGGTATTGTGGCTGAAAGTAATGCTGTTTATAGAAATTTAGTTTTTGATAATCCTTATTTCTATGACTATTTCTTTGAAGCAAGTCCAATTAAAGAGGTATCAAGTTTAAATATTGGTTCTCGGCCAGCAGCACGTAAAACAATTACAGAAATTTCGGGTTTACGTGCAATTCCATGGGTATTTTCATGGTCACAAAATCGTATTATGTTTCCGGGTTGGTATGGTGTTGGGTCAGCCTTCAAGCACTTTATTGAACAAGATGAGGCAAACTTAGCAAAATTACAAACCATGTATCAAAAATGGCCATTCTTTAATTCTCTTTTATCTAATGTAGATATGGTTTTATCAAAATCAAATATGAATATTGCGCTTCAGTATGCTCAGTTAGCTGGAAGTAAAGAAGTTCGAGATGTTTTTAATATCATCCTTAATGAATGGCAGTTAACTAAAGATATGATTTTAGCTATTGAACAGCATGATAATTTATTAGAAGAAAACCCAATGTTACATGCAAGTTTAGATTATCGTTTGCCATATTTCAATGTTTTGAATTATGTTCAAATTGAATTGATTAAACGTCTTCGTAGTAACCAACTAGATGAAGACTATGAGAAGTTGATTCATATTACTATTAATGGTATTGCAACAGGTTTACGAAATTCAGGT

SEQ ID NO: 5890 - protein, 931 aa, Streptococcus agalactiae
MSHPKLESSSNKEIITEEVGLLKQLLDEATQKLIGSESFDKIEKIVSLSSTDDYTGLKETISALSNEEMVIVSRYFSILPLLINISEDVDLAYEINYKNNLNQDYLGKLSTTIDVVAGHENAKDILEHVNVVPVLTAHPTQVQRKTVLELTSKIHDLLRKYRDVKAGIVNQEKWYADLRRYIGIIMQTDTIREKKLKVKNEITNVMEYYNRSLIKAVTKLTAEYKALAAKKGIHLENPKPLTMGMWIGGDRDGNPFVTAETLRLSAMVQSEVIINHYIEQLNELYRNMSLSISLTEVSPELVTLANQSQDNSVYRENEPYRKAFNFIQGKLVQTLLNLKVGSYPKEKFVSRQESSDIVGRYIKSHVAQVASDIQTEELPAYATAEEFKQDLLLVKQSLVQYGQDSLVDGELACLIQAVDIFGFYLATIDMRQDSSINEACVAELLKSANIVDDYSSLSEEEKCQLLLKELTEDPRTLSSTHTPKSELLQKELAIFQTARELKDQLGEDIIKQHIISHTESVSDMFELAIMLKEVGLIDANQARIQIVPLFETIEDLDNSRDIMTQYLHYGLVKKWIATNNNYQEIMLGYSDSNKDGGYLSSGWTLYKAQNELTKIGEENGIKITFFHGRGGTVGRGGGPSYEAITSQPFGSIKDRIRLTEQGEIIENKYGNQDAAYYNLEMLISASIDRMVTRMITNPNEIDNFRETMDGIVAESNAVYRNLVFDNPYFYDYFFEASPIKEVSSLNIGSRPAARKTITEISGLRAIPWVFSWSQNRIMFPGWYGVGSAFKHFIEQDEANLAKLQTMYQKWPFFNSLLSNVDMVLSKSNMNIALQYAQLAGSKEVRDVFNIILNEWQLTKDMILAIEQHDNLLEENPMLHASLDYRLPYFNVLNYVQIELIKRLRSNQLDEDYEKLIHITINGIATGLRNSG

SEQ ID NO: 5891 - protein, 1266 aa, Streptococcus agalactiae
ATGAAAATTGATAAAAGGCATCTTCTGAATTATTCCATCCTCATTCCCTATTTGATATTGTCTATTCTAGGCTTAATTGTAATTTATTCGACAACTAGTGCAACTCTAATTCAGCTTGGAGCTAACCCTTTTCGTTCAGTAATCAACCAGGGTGTCTTTTGGGCAGTCAGTTTGGTTGCAATTATCTTTATCTATAAACTGAAACTAAATTTTTTGAAAAATTCTAAAGTGTTGACTATGGCAGTATTGGTAGAAGTATTTTTACTACTAATAGCGCGCTTTTTCACACAAGAAGTTAATGGAGCACATGGTTGGATTGTTATTGGTCCTATTAGTTTTCAACCTGCTGAATATTTAAAAGTTATCATTGTATGGTATTTAGCGTTTACTTTTGCTCGAAGGCAAAAAAAGATAGAAATATATGATTATCAAGCTTTGACAAAAGGGAGATGGCTTCCGAGATCACTAAGCGACCTAAAAGATTGGCGATTTTATTCTTTATTTATGATTGGTTTGGTAATTGCACAACCTGATTTAGGAAATGGTTCGATAATTGTTCTAACGGTCATTATTATGTACTGTATTAGTGGTATTGGTTATCGATGGTTTTCAGCTTTACTTGGTCTAATCGTCGTGGGGTCAACTTTATTTATCGGAACTATTGCAGTTGTTGGAGTTGAGACAATGGCTAAAGTCCCTGTCTTTGGTTATGTAGCTAAGCGATTTAATGCTTTTTTTGACCCATTTAAAGATTTAACAGATTCAGGACACCAGTTGGCTAATTCATATTATGCAATGAGCAACGGTGGCTGGTTTGGTCGAGGACTTGGGAATTCTATTGAAAAATTAGGGTACTTACCAGAAGCAACAACAGACTTTGTCTTTTCAATTGTTATTGAGGAATTAGGAGTTATTGGTGCAGGGTTTATTTTAGCTTTGGTTTTCTTCTTAATTTTACGTATTATGCACGTAGGTATAAAGGCTAAAGATCCTTTCAACTCAATGATCGCTCTTGGTATTGGAGCAATGCTATTGATGCAAGTTTTTGTTAACATTGGTGGTATTTCTGGGTTAATCCCCTCAACTGGAGTGACATTTCCTTTCTTATCCCAAGGAGGGAACAGCCTCTTGGTACTTTCTGTAGCTATCGGATTCGTGCTTAATATTGATGCTAACGAGAAAAAGGAACTCATAATGAAAGAAGCAGAAGAACAATATAAGCCACAAGAAAAAAATGAAAAAATAATCAACCTTGATGCCTTTAAA

SEQ ID NO: 5892 - protein, 422 aa, Streptococcus agalactiae; identical to SEQ ID NO: 1442

SEQ ID NO: 5893 - protein, 1192 aa, Streptococcus agalactiae
ATGGCAAAAGAAAAATACGATCGTAGTAAACCACACGTTAACATTGGTACAATCGGACACGTTGCCACGGTAAAACTACTTTAACAGCAGCTATCACAACTGTATTGGCACGTCGCTTGCCTACTTCAGTTAACCAACCAAAAGATTACGCTTCTATCGATGCTGCTCCAGAAGAGCGCGAACGCGGAATCACAATCAACACTGCACACGTTGAGTACGAAACTGAAAAACGTCACTATGCCCACATCGACGCTCCAGGACACGCGGACTACGTTAAAAACATGATCACTGGTGCTGCTCAAATGGACGGAGCTATCCTTGTAGTGCTTCAACTGATGGACCAATGCCACAAACTCGTGAGCACATCCTTCTTTCACGTCAAGTTGGTGTTAAACACCTTATCGTATTCATGAACAAAGTTGACCTTGTTGATGATGAAGAATTGCTTGAATTGGTTGAAATGGAAATTCGTGACCTTCTTTCAGAATACGACTTCCCAGGTGATGACCTTCCAGTTATCCAAGGTTCAGCTCTTAAAGCACTTGAAGGCGATGAAAAATACGAAGACATCATCATGGAATTGATGAGCACTGTTGATGAGTACATTCCAGAACCAGAACGTGATACTGACAAACCTTTACTTCTTCCAGTCGAAGATGTATTCTCAATCACTGGACGTGGTACAGTTGCTTCAGGACGTATCGACCGTGGTACTGTTCGTGTCAACGACGAAGTTGAAATCGTTGGTATTAAAGAAGATATCCAAAAAGCAGTTGTTACTGGTGTTGAAATGTTCCGTAAACAACTTGACGAAGGTCTTGCAGGGGACAACGTTGGTGTTCTTCTTCGTGGTGTGCAACGTGATGAAATCGAACGTGGTCAAGTTCTTGCTAAACCAGGTTCAATCAACCCACACACTAAATTTAAAGGTGAAGTTTACATCCTTTCTAAAGAAGAAGGTGGACGTCATACTCCATTCTTCAACAACTACCGTCCACAATTCTACTTCCGTACAACTGACGTAACAGGTTCAATCGAACTTCCAGCAGGAACAGAAATGGTTATGCCTGGTGATAACGTTACTATCGAAGTTGAATTGATTCACCCAATCGCCGTAGAACAAGGTACTACTTTCTCAATCCGTGAAGGTGGACGTACTGTTGGTTCAGGTATCGTTTCAGAAATCGAAGCT

SEQ ID NO: 5894 - protein, 398 aa, Streptococcus agalactiae
  VARIANT 22: Xaa = Any Amino Acid
MAKEKYDRSKPHVNIGTIGHVXHGKTTLTAAITTVLARRLPTSVNQPKDYASIDAAPEERERGITINTAHVEYETEKRHYAHIDAPGHADYVKNMITGAAQMDGAILVVASTDGPMPQTREHILLSRQVGVKHLIVFMNKVDLVDDEELLELVEMEIRDLLSEYDFPGDDLPVIQGSALKALEGDEKYEDIIMELMSTVDEYIPEPERDTDKPLLLPVEDVFSITGRGTVASGRIDRGTVRVNDEVEIVGIKEDIQKAVVTGVEMFRKQLDEGLAGDNVGVLLRGVQRDEIERGQVLAKPGSINPHTKFKGEVYILSKEEGGRHTPFFNNYRPQFYFRTTDVTGSIELPAGTEMVMPGDNVTIEVELIHPIAVEQGTTFSIREGGRTVGSGIVSEIEA

SEQ ID NO: 5895 - protein, 720 aa, Streptococcus agalactiae
ATGAATAAAAATCCAGAAGAAGCAAAAGCATTCATCGAAGCAGTAGCTTCTAAATTACCATCATCAGAACTTGTTGAAGCAGGGATTGCTGCTCCAGCGCTTACTTTATCAACAGTTCTTGAAGCAGCTAAAGGTTCAGAATTGAAAATCGCTGCTCAAAATAGCTATTTTGAGAATTCAGGTGCATTCACTGGTGAAAACAGCCCTAAAGTATTGGCTGAAATGGGTACAGACTACGTTGTTATCGGTCACTCAGAACGTCGTGATTATTTCCATGAAACTGACCAAGATATCAACAAAAAAGCAAAAGCTATCTTTGCTAATGGTTTGACTCCAATCATTTGTTGCGGTGAGTCTCTTGAAACTTACGAAGCTGGTAAAGCGGTTGAATTCGTAGGTGCTCAAGTTTCAGCAGCTCTTGCAGGTTTGTCAGAAGAGCAAGTATCATCACTTGTTATCGCTTACGAACCAATCTGGGCTATTGGTACTGGTAAATCAGCAACTCAAGACGATGCACAAAACATGTGTAAAGCAGTTCGTGACGTTGTTGCAGCAGACTTCGGTCAAGCAGTTGCTGACAAAGTTCGCGTTCAATACGGTGGTTCAGTTAAACCTGAAAACGTTGCAGAATACATGGCTTGCCCAGACGTTGACGGTGCCCTTGTAGGTGGAGCTTCACTTGAAGCAGAAAGCTTCCTTGCCTTATTAGATTTTGTTAAA

SEQ ID NO: 5896 - protein, 240 aa, Streptococcus agalactiae
MNKNPEEAKAFIEAVASKLPSSELVEAGIAAPALTLSTVLEAAKGSELKIAAQNSYFENSGAFTGENSPKVLAEMGTDYVVIGHSERRDYFHETDQDINKKAKAIFANGLTPIICCGESLETYEAGKAVEFVGAQVSAALAGLSEEQVSSLVIAYEPIWAIGTGKSATQDDAQNMCKAVRDVVAADFGQAVADKVRVQYGGSVKPENVAEYMACPDVDGALVGGASLEAESFLALLDFVK

SEQ ID NO: 5897 - protein, 690 aa, Streptococcus agalactiae
ATGGTAAAATTAGTATTCGCACGCCACGGTGAATCTGAGTGGAATAAAGCTAACCTTTTCACTGGATGGGCTGACGTAGATCTTTCAGAAAAAGGTACACAACAAGCTATTGATGCTGGGAAATTAATCCAAGCAGCAGGTATTGAGTTCGACCTTGCTTTTACATCAGTTCTTAAACGTGCCATCAAAACAACTAACCTTGCCCTTGAAGCAGCTGATCAACTTTGGGTACCAGTTGAAAAATCATGGCGCTTGAACGAACGTCATTACGGTGGATTGACAGGAAAAAATAAAGCAGAAGCAGCTGAACAATTTGGTGATGAGCAAGTTCATATTTGGCGTCGTTCATATGATGTATTGCCTCCAGATATGGCTAAAGATGATGAACATTCAGCACATACTGATCGTCGCTATGCTTCACTAGATGATTCTGTTATTCCAGATGCAGAAAACTTAAAAGTTACTTTAGAGCGTGCTCTTCCTTTCTGGGAAGATAAAATTGCTCCTGCTCTTAAAGATGGTAAAAATGTGTTTGTTGGTGCACACGGTAACTCAATCCGTGCTCTTGTAAAACATATCAAACAATTGTCAGATGATGAAATCATGGACGTTGAAATTCCTAACTTCCCACCACTTGTTTTCGAATTTGATGAAAAATTAAACCTTGTTTCAGAATATTACTTAGGTAAA

SEQ ID NO: 5898 - protein, 230 aa, Streptococcus agalactiae; identical to SEQ ID NO: 1448

SEQ ID NO: 5899 - protein, 2043 aa, Streptococcus agalactiae
ATGTTGAATCGTAAAAAAAGGTATCGTCTCACTGTAAAAAAGCAAAATGCTAGCATACCTAGACGATTAAATCTTCTATTTTTTATTATTGTTTTATTATTTACTGTTCTAATTCTTCGTTTAGAGCAAATGCAGATTGGGCAACAATCATTTTACATGAAAAAACTGACAGCTCTTACGAGTTATACAGTGAAAGAATCAAAAGCGAGAGGTCAGATTTTTGATGCTAAGGGAGTTGCCTTAGTTGAAAATGATGAACGTCCTACTGTGGCGTTTTCTAGAGGAAACAATATTTCATCTCAGTCTATCAAAGAGTTAGCGAATAAATTATCACATTACATTACCTTAACCGAAGTTGCTTCAAGCGATAGAGCAAAGAGAGATTATTATTTAGCAGATAAAGCCAACTACAAAAAAGTTGTTGAAAGTTTACCAGATTCTAAACGTTACGATAAATTTGGTAACCATCTAGCCGAATCAACCGTATATGCAAATGCAGTTGCTGCAGTTCCAGTGAGCGCTATTAACTATTCTGAAGATGAGTTAAAAGTGGTTGCCTTATTTAACCAAATGAATGCGACACCAACGTTTGGTTCAGTGAAATTAAGTACAGGTGAATTAAGTGATGATCAAATCAAGAAACTGGATGCTGATAAGAAGGAACTGTTAGGAATTTCTGTAACAAGTAATTGGCATCGTCGTAAAAAAGGAACTTCTTTATCGGATATATTAGGTACTATTTCTACAGAAAAGGCAGGTTTACCAAGAGAAGAAGTTAAAAAATATTTGAAAAAAGGTTATTCACTGAATGACCGAGTGGGAACTTCTTACCTTGAAAAACAATATGAAGATGACTTACAAGGAATCAGACAAATTCGCAAAGTAGTTGTTAATAAAAAAGGTAAAGTTGTTTCAGATAATATTACGCAAGAAGGTAAGTCAGGAAGAAATCTTAAATTAACGATTGATCTTAATTACCAAAACAAAGTAGAAAGTATCTTGAAACAATACTATGGCAGTGAATTATCTAGTGGGCGCGCTAGTTTTTCCGAAGGGATGTATGCAGTTGCTATAGAACCTTCAACTGGTAAAGTGTTAGCAATGGCTGGTCTGAAAAATGATCATGGGAATTTAGTTGATGACAGCCTAGGCACTATTGCTAAGAATTTCACGCCAGGATCTGTTGTGAAAGGTGCGACGCTATCATCAGGATGGGAAAATAAAGTTCTTAGAGGAAATGAAGTGCTTTATGACCAAGAAATTGCTAATATACGGTCATGGTTTACACGAGGTTTGACTCCAATATCTGCGGCACAAGCGCTAGAGTATTCATCTAATACTTATATGGTTCAAGTAGCACTTCGTTTAATGGGACAAGACTATAATACAGGAGATGCTTTAACTGATCGAGGCTATCAAGAAGCAATGGCTAAACTAAGGAAAACTTACGGCGAATATGGTTTAGGGGTTTCTACAGGATTAGATTTACCTGAATCAGAAGGTTATGTACCTGGAAAATACAGCTTAGGAACAACTCTAATGGAATCGTTCGGTCAGTATGACGCCTATACACCAATGCAACTTGGTCAGTATATCTCAACTATTGCGAATAATGGGAATCGTTTAGCACCTCACGTGGTTTCAGATATCTATGAAGGGAATGATTCTAATAAGTTCGCTCAATTGGTTCGTTCAATCACTCCTAAAACACTAAATAAGATAGCTATCTCAGATCAAGAGTTAGCCATTATTCAAGAAGGTTTTTATAACGTTGTCAATAGTGGAAGTGGCTATGCAACTGGTACGTCAATGAGGGGGAATGTGACAACCATTAGTGGTAAAACTGGTACCGCTGAAACATTTGCTAAAAATGTAAATGGACAAACAGTTTCTACCTACAACTTAAACGCTATTGCCTACGATACTAATCGTAAAATAGCAGTAGCGGTAATGTATCCGCATGTTACAACTGATACAACAAAATCCCATCAATTAGTTGCACGAGATATGATTGATCAATATATTTCACAGTTCACAGGACAA

SEQ ID NO: 5900 - protein, 681 aa, Streptococcus agalactiae
MLNRKKRYRLTVKKQNASIPRRLNLLFFIIVLLFTVLILRLEQMQIGQQSFYMKKLTALTSYTVKESKARGQIFDAKGVALVENDERPTVAFSRGNNISSQSIKELANKLSHYITLTEVASSDRAKRDYYLADKANYKKVVESLPDSKRYDKFGNHLAESTVYANAVAAVPVSAINYSEDELKVVALFNQMNATPTFGSVKLSTGELSDDQIKKLDADKKELLGISVTSNWHRRKKGTSLSDILGTISTEKAGLPREEVKKYLKKGYSLNDRVGTSYLEKQYEDDLQGIRQIRKVVVNKKGKVVSDNITQEGKSGRNLKLTIDLNYQNKVESILKQYYGSELSSGRASFSEGMYAVAIEPSTGKVLAMAGLKNDHGNLVDDSLGTIAKNFTPGSVVKGATLSSGWENKVLRGNEVLYDQEIANIRSWFTRGLTPISAAQALEYSSNTYMVQVALRLMGQDYNTGDALTDRGYQEAMAKLRKTYGEYGLGVSTGLDLPESEGYVPGKYSLGTTLMESFGQYDAYTPMQLGQYISTIANNGNRLAPHVVSDIYEGNDSNKFAQLVRSITPKTLNKIAISDQELAIIQEGFYNVVNSGSGYATGTSMRGNVTTISGKTGTAETFAKNVNGQTVSTYNLNAIAYDTNRKIAVAVMYPHVTTDTTKSHQLVARDMIDQYISQFTGQ

SEQ ID NO: 5901 - protein, 594 aa, Streptococcus agalactiae
ATGCTTTACCCAACACCAATTGCTAAATTGATTGACAGCTTTTCAAAATTACCGGGTATAGGTACTAAAACAGCAACACGTTTAGCTTTTTACACCATTGGTATGAGTGATGAAGATGTTAATGAATTTGCTAAGAATTTATTAGCTGCTAAGCGGGAATTAACCTATTGTTCTGTTTGTGGTAATTTGACTGATGATGATCCTTGCTTAATTTGTACAGATAAGACGCGTGACCAGTCTGTTATCTTGGTTGTTGAAGATAGCAAAGATGTGTCAGCTATGGAAAAAATTCAAGAGTATAATGGTTTGTATCATGTCTTACATGGCTTAATTTCACCTATGAATGGTATTAGCCCTGATGACATTAATTTGAAAAGTTTAATTACTCGATTGATGGATGGTCAGGTGACAGAAGTTATTGTTGCTACCAATGCGACTGCTGATGGTGAAGCTACATCAATGTATATTTCACGAGTCTTAAAACCAGCTGGTATCAAAGTGACACGATTAGCGAGAGGTTTAGCTGTTGGTTCAGATATCGAATATGCAGATGAAGTAACCTTGCTTCGAGCAATCGAAAATCGTACAGAGTTA

SEQ ID NO: 5902 - protein, 198 aa, Streptococcus agalactiae; identical to SEQ ID NO: 1452

SEQ ID NO: 5903 - protein, 1044 aa, Streptococcus agalactiae
ATGTCAAAAGAAACATTGATCTTGCTTTACGGTGGTCGCTCTGCGGAACGTGAAGTATCTGTACTGTCTGCAGAAAGCGTCATGCGTGCTATTAATTATGATAAATTTTTTGTTAAAACTTATTTTATCACGCAAGTAGGTCAATTTATTAAAACACAAGAATTTGATGAAATGCCATCTTCAGATGAAAAGTTAATGACAAACCAAACTGTTGATTTAGACAAAATGGTTCGTCCAAGTGATATCTATGATGATAATGCAATTGTTTTCCCCGTTTTACATGGACCAATGGGGGAAGATGGTTCTATCCAAGGATTTTTAGAAGTTTTAAGGATGCCTTATGTTGGGACTAATATTCTATCTTCAAGCGTGGCTATGGATAAAATTACAACAAAACAAGTCCTTGCAACAGTAGGTGTACCTCAGGTTGCATATCAAACTTATTTTGAGGGTGATGATTTGGAACATGCGATTAAACTCTCTTTAGAAACTTTAAGTTTCCCAATTTTTGTAAAACCGGCTAATATGGGGTCATCAGTAGGTATTTCAAAAGCGACAGATGAATCCTCACTTCGCTCTGCAATTGACTTAGCTCTCAAGTATGATAGCCGTATTTTGATTGAACAAGGCGTGACAGCTCGTGAAATTGAAGTAGGTATTTTAGGCAATAATGATGTTAAGACAACTTTTCCTGGCGAAGTCGTTAAAGACGTCGATTTCTATGACTATGACGCCAAATATATTGATAATAAAATTACTATGGATATTCCAGCTAAAGTTGATGAAGCAACTATGGAAGCAATGCGTCAATATGCAAGTAAAGCTTTTAAAGCAATCGGGGCTTGTGGTTTATCACGCTGTGATTTCTTTTTGACGAAAGATGGACAAATCTTCTTAAACGAACTGAATACAATGCCCGGTTTTACTCAGTGGTCAATGTATCCTCTGCTTTGGGAAAATATGGGGCTAACTTATAGTGATTTGATTGAAAAGTTAGTTATGTTAGCTAAAGAAATGTTTGAAAAACGTGAGAGTCATTTAATT

SEQ ID NO: 5904 - protein, 348 aa, Streptococcus agalactiae; identical to SEQ ID NO: 1454

SEQ ID NO: 5905 - protein, 1365 aa, Streptococcus agalactiae
ATGAAGCTTAGTTTGCATGAAGTTGCTAAAGTAGTTGGCGCTAAAAATCAAGTATCAGAGTTTGAAGACGTTCCCCTGGGAAATATTGAATTTGATAGTCGTAATATCAGTGAAGGTGACTTATTTCTTCCCTTAAAAGGAGCAAGAGATGGACATGAGTTTATAGAGATGGCTTTTGATAATGGAGCAATAGCAACCATTTCAGAGAAGGAAATAGAGGGTCATCCTTATCTTTTAGTGTCTGATGCACTTAAAGCATTTCAAGTCTTGGCACAGTATTATATTGAAAAGATGAACGTTGATGTTATTGCAGTAACTGGCTCAAATGGTAAGACAACAACTAAAGATATGATAGCTGCAATCTTATCAACCACATATAAGACTTATAAAACACAAGGAAACTACAATAACGAGATTGGCTTACCCTATACTGTGCTACACATGCCAGAAGATACTGAAAAAATTGTTTTGGAGATGGGACAGGATCATCTTGGAGATATCCATGTGTTATCTGAAATTGCAAAACCACGTATTGCTGTTGTTACTTTGATTGGTGAAGCACACTTAGAATTTTTTGGTAGTCGAGAAAAGATTGCAGAAGGGAAAATGCAAATCACAGATGGTATGAGTTCAGATGGCATATTAATTGCACCGGGAGATCCAATTATTGATCCATATCTTCCAGCAAACCAGATGACTATTCGTTTTGGTCATGACCAAGAATTGCAAGTGACAGAACTCAAAGAAGAAAAACATTCCTTAACTTTTAAAACTAATGCTTTGGAGCACCAATTACGTATACCAGTACCTGGTAAGTACAATGCAACTAATGCGATGGTCGCTGCCTATGTTGGAAAATTATTGGCAGTAGCAGAAGAAGATATAGTGGATGCTCTAGAAAATCTTCAACTAACTCGTAATCGCACCGAATGGAAGAAATCAGCCAATGGAGCAGATATTTTATCAGATGTTTACAATGCTAACCCAACGGCTATGCGATTGATACTAGAAACCTTTTCAGCTATTCCGAATAATGATGGTGGAAAGAAGATTGCTCTTTTAGCTGATATGAAAGAACTGGGAGAACAATCTGTGGATTTACATAATCAAATGATTATGAGTATCAGACCTGACTCTATTGATACTTTGATTTGTTATGGCCAGGATATTGAGGAGTTGGCTCAATTAGCAAGCCAGATGTTCCCAATTGGTAAAGTGTATTTCTTTAAAAAGAATCAAGAAGTGGATCAGTTTGATCAATTGCTTGCAAAAGTAAAAGATACTCTTAAGGAGAAAGATCAAATATTATTAAAAGGTTCTAACTCAATGAATCTTTCTAAAATAGTTGATATTCTTGAAGTAGAA

SEQ ID NO: 5906 - protein, 455 aa, Streptococcus agalactiae
MKLSLHEVAKVVGAKNQVSEFEDVPLGNIEFDSRNISEGDLFLPLKGARDGHEFIEMAFDNGAIATISEKEIEGHPYLLVSDALKAFQVLAQYYIEKMNVDVIAVTGSNGKTTTKDMIAAILSTTYKTYKTQGNYNNEIGLPYTVLHMPEDTEKIVLEMGQDHLGDIHVLSEIAKPRIAVVTLIGEAHLEFFGSREKIAEGKMQITDGMSSDGILIAPGDPIIDPYLPANQMTIRFGHDQELQVTELKEEKHSLTFKTNALEHQLRIPVPGKYNATNAMVAAYVGKLLAVAEEDIVDALENLQLTRNRTEWKKSANGADILSDVYNANPTAMRLILETFSAIPNNDGGKKIALLADMKELGEQSVDLHNQMIMSIRPDSIDTLICYGQDIEELAQLASQMFPIGKVYFFKKNQEVDQFDQLLAKVKDTLKEKDQILLKGSNSMNLSKIVDILEVE

SEQ ID NO: 5907 - protein, 1161 aa, Streptococcus agalactiae
ATGCTAGGATCAACTTATGCTTGGAGTGTGTTTCGTAACCCAATTATCTCAGAGACTGGTTGGGATATTTCATCAGTTTCATTCGCTTTTAGTTTGGCTATTTTTTGTCTAGGAATGTCTGCAGCTTTTATGGGACACTTAGTAGAGCGTTTTGGTCCTAGGATAATGGGAATGATTTCTGCTATTTTATATGGAGCAGGGAATGTGTTAACAGGCTTAGCCATTGAAACTCAGCAGTTATGGTTACTGTATGTTGCATACGGTATTTTAGGAGGAATCGGACTTGGTTCAGGTTATATTACTCCAGTATCGACTATTATTAAATGGTTTCCTGATAGGAGGGGACTAGCAACAGGATTCGCTATTATGGGATTTGGCTTGCTTCTTTAGTAACAAGTCCACTTGCACAATCCTTAATGATTAGGATTGGTGTAGGTAAAACATTTTATATTTTGGGATTAGTATATTTTTTTGTCATGATGATTGCCTCACAATTTATTAAACAACCACCTCAGGAAAAAATAACTATTTTGACTCACGACGGTAAAAAGAATGCTATGATCACAAATTATCACTGGATTAAAAGCAAACGTTGCTATAAAATCAAAAACCTTTTACATCATTTGGTTGACCTTGTTTATTAATATTTCGTGTGGCTTAGGTTTAATATCAGCAGCTTCACCAATGGCACAAGATTTAGCAGGCTATTCCGCAGAATCTGCAGCCTTATTAGTAGGGGTACTAGGGATATTTAACGGTTTTGGACGTCTGTTATGGGCAAGTCTCTCTGACTACATTGGACGCCCGTTGACCTTTATAATATTATTTATTGTGAACTTTATTATGACTTCTAGTTTATTTTTGTCATTCAATGCTATTGTATTTGCAATAGCGATGTCTATTTTAATGACTTGTTATGGTGCAGGTTTTTCCTTATTACCTGCTTATCTAAGTGATATTTTTGGAACAAAGGAATTAGCTACTTTACATGGTTATAGTTTAACAGCATGGGCAATAGCAGGTCTGTTTGGGCCCCTATTGTTATCAAAGACATATTCATGGGGAAATTCCTATCAATTGACATTAATGGTTTTTGGTTTTTTATTCTTATTCGGATTATTGTTATCTCTATATTTAAGAAAATTAACAACTAAAGTTGTG

SEQ ID NO: 5908 - protein, 388 aa, Streptococcus agalactiae
  VARIANT 127: Xaa = Any Amino Acid
MLGSTYAWSVFRNPIISETGWDISSVSFAFSLAIFCLGMSAAFMGHLVERFGPRIMGMISAILYGAGNVLTGLAIETQQLWLLYVAYGILGGIGLGSGYITPVSTIIKWFPDRRGLATGFAIMGFGXASLVTSPLAQSLMIRIGVGKTFYILGLVYFFVMMIASQFIKQPPQEKITILTHDGKKNAMNSQIITGLKANVAIKSKTFYIIWLTLFINISCGLGLISAASPMAQDLAGYSAESAALLVGVLGIFNGFGRLLWASLSDYIGRPLTFIILFIVNFIMTSSLFLSFNAIVFAIAMSILMTCYGAGFSLLPAYLSDIFGTKELATLHGYSLTAWAIAGLFGPLLLSKTYSWGNSYQLTLMVFGFLFLFGLLLSLYLRKLTTKVV

SEQ ID NO: 5909 - protein, 516 aa, Streptococcus agalactiae
ATGATAGAATTCTTTTCTAATATCAGAACAGAGATTCCGCAGATGCCTTTACTTATCCATAGTTTGATTTTATCTGTCTTACCTTTTCTGATGTGGCTGACTTTGGTTAATAGAGATAAGCCTTTGTATAAAACTATTTGGAGTATCCTTTTAGGACTTCAGTTAATTACGATTTATACTTGGTTTTTCTGGGCAAAATTGCCTTTATCTGAAAGTCTTCCCCTTTACCATTGTCGAATAGGCATGTTTGTCGTTCTCTTAGCGAGGCCTGGAATATTAAAGGATTATTTCGCATTGTTAGGAGTAGTAGGTGGAGTATTGGCAATGATTCACCCAGACTTTTACCCTTACCAGTTTCTACATGTGACTAATATTTTCTTCTTTATTGGACATTTTGCTTTATTTGTCCTTAGTTTACTACATCTGATGACACAGTCCAATTTGGACAAATTAAATCCAAAATTGATTATACAACTAACGCTTCTCAATAATATGTCTTTGATTTTNNNNNTTAAT

SEQ ID NO: 5910 - protein, 172 aa, Streptococcus agalactiae
  VARIANT 169, 170, 171: Xaa = Any Amino Acid
MIEFFSNIRTEIPQMPLLIHSLILSVLPFLMWLTLVNRDKPLYKTIWSILLGLQLITIYTWFFWAKLPLSESLPLYHCRIGMFVVLLARPGILKDYFALLGVVGGVLAMIHPDFYPYQFLHVTNIFFFIGHFALFVLSLLHLMTQSNLDKLNPKLIIQLTLLNNMSLIXXXN

SEQ ID NO: 5911 - DNA, 1362 bp, Streptococcus agalactiae
ttgccgggaaaattggtaactttgtcagaggtgacaagtggtcagcctaaaattattgcaagtgtgaaaacgaatgatgccggacaagctatttttaataatctccctataaaacgtaaccttagtgtgtctgttgatggacaagtaaaaggatatactattcgaactgacgtagcaggctctagtaaagcagctagttttacagcaacaggagtagggacaaatgagccaacgtattcaaaaaaaaccatagacattacagtgagagaccaaaatgctgaacctgtttcaggcaggacagttaccttaaaaacacaagctggtcgtgagattgctagcttggtttctggtgacaatggattaactcgctttactgatcgtttactagatggaacattctaccaatattttgttgatgggaaaaaaattggtgatattgtacctggagaatcaagaagtgcatatgttaatgttgcacctaaaaaagattattttacctttacagtcactgctttagataaagatggacttgttgttaaaggaaaagaagtaacgttgactgatattactgatggtaaagcagtagcgcttgcttctttaaaaacgaatgataatggacaagctatctttaccaacctaccattatcaagaaatatcagtgtttcaattgatggaaaatcaaagggctatactattcgaactgatgtagcaggctctcataaagcggctgcattctatgtagatggtaaaggtaccaaagcacctcaatttagtgcagaagcagcggttgtaactgtttacgatgctaatggaaatactatagcaaaccaagaagtgacattaactaattcaaatgggacaattgttgcaaaaggtttgactgaaaaagatggcaaagcaaggttcgccaataaattaatggcaggaacgttatacaatatttttgtaaatgggattgagatgcctaaaactgcccttgttggtagtgatgtcagtgtttttctaacagataaacaaattaagaaagaaaaaactgttactcctgataaattggataaagaaatgaaccaagagaaggaaaaggaactcttagatactccaaaaccaataccacctacttcgaaaccaacagcaccaattaaaaataaaaaggacgattcccctaagaagttcacgaaaagtcaatcttctagtttgaagtcaagtgttaaggctataggtgctaagccaaaagctatgacagccttagctaaaaaattgcctaaaactggtgatcaagccattagtattttaactttggttggttttattgtaacagggttagcgattatgttaggcttccttaaaaaatcacgatcaaaa

SEQ ID NO: 5912 - protein, 454 aa, Streptococcus agalactiae
MPGKLVTLSEVTSGQPKIIASVKTNDAGQAIFNNLPIKRNLSVSVDGQVKGYTIRTDVAGSSKAASFTATGVGTNEPTYSKKTIDITVRDQNAEPVSGRTVTLKTQAGREIASLVSGDNGLTRFTDRLLDGTFYQYFVDGKKIGDIVPGESRSAYVNVAPKKDYFTFTVTALDKDGLVVKGKEVTLTDITDGKAVALASLKTNDNGQAIFTNLPLSRNISVSIDGKSKGYTIRTDVAGSHKAAAFYVDGKGTKAPQFSAEAAVVTVYDANGNTIANQEVTLTNSNGTIVAKGLTEKDGKARFANKLMAGTLYNIFVNGIEMPKTALVGSDVSVFLTDKQIKKEKTVTPDKLDKEMNQEKEKELLDTPKPIPPTSKPTAPIKNKKDDSPKKFTKSQSSSLKSSVKAIGAKPKAMTALAKKLPKTGDQAISILTLVGFIVTGLAIMLGFLKKSRSK

SEQ ID NO: 5913 - DNA, 1542 bp, Streptococcus agalactiae
atgacattacaagacgaaatcaaaaaacgccgtacttttgccatcatctctcacccggatgctggtaagacgactattactgagcaactattatattttggtggtgaaattagagaagcagggacagtaaaagggaaaaaatcaggtacttttgcaaagtccgattggatggatattgaaaagcaacgtggtatctctgttacttcatctgttatgcaatttgattacgcgggtaaacgtgttaatattttggatacacctggacatgaggatttctcggaagatacataccggaccttaatggctgtggatgcagctgtcatggttgtagattcggctaaaggtattgaggctcaaactaaaaaactttttgaagttgttaagcatcgtaatattccggtttttacgtttattaataaattggaccgtgatggacgtgagccactggatttgcttgaagagttagaagaagtactaggtattgcttcttatccaatgaattggccaattggtatggggaaatcatttgaagggctttatgatttacataataaacgtttagaactctataagggagacgagcgttttgcaagtattgaagacggtgatcagctgtttgccaataatccattttatgaacaagtcaaagaagatattgaacttcttcaagaagcaggtaatgacttttcagaacaagcgattcttgatggtgacctaactccagtattctttggctctgcccttacgaactttggagttcagacttttcttgatactttcttggagtttgctccagaacctcatggtcataagactacagaaggtaatgttattgaccccttagctaaagatttttcaggttttgtctttaaaattcaagctaacatggacccacgtcatcgcgaccgcattgcttttgttcgtattgtttctggtgaatttgagcgtggtatgggagttaatttgacacgcactggcaaaggcgctaagctctccaatgttactcaatttatggcagaatcacgagaaaatgtgacgaatgctgttgctggggatattatcggggtttatgatacaggaacttatcaagttggggataccttaacggttgggaaaaataaatttgaatttgaaccattaccaacttttaccccagaattatttatgaaagtatcagcaaaaaatgttatgaagcagaaatcattccacaagggtattgagcaattagtacaagaaggagcaattcagctttataagaattatcagacaggcgaatacatgctgggtgctgtgggtcaacttcagtttgaagtttttaaacatcgtatggaaggtgaatacaatgctgaagttgttatgacaccaatgggtaaaaagactgtacgttggattaactcagacgatttagacgaacgcatgtcttcaagccgaaatattttggcaaaagatcgttttgaccaaccagttttcctatttgaaaatgattttgcacttcgctggtttgctgataagtatcctgatgtgaagcttgaagaaaaaatg

SEQ ID NO: 5914 - protein, 514 aa, Streptococcus agalactiae
MTLQDEIKKRRTFAIISHPDAGKTTITEQLLYFGGEIREAGTVKGKKSGTFAKSDWMDIEKQRGISVTSSVMQFDYAGKRVNILDTPGHEDFSEDTYRTLMAVDAAVMVVDSAKGIEAQTKKLFEVVKHRNIPVFTFINKLDRDGREPLDLLEELEEVLGIASYPMNWPIGMGKSFEGLYDLHNKRLELYKGDERFASIEDGDQLFANNPFYEQVKEDIELLQEAGNDFSEQAILDGDLTPVFFGSALTNFGVQTFLDTFLEFAPEPHGHKTTEGNVIDPLAKDFSGFVFKIQANMDPRHRDRIAFVRIVSGEFERGMGVNLTRTGKGAKLSNVTQFMAESRENVTNAVAGDIIGVYDTGTYQVGDTLTVGKNKFEFEPLPTFTPELFMKVSAKNVMKQKSFHKGIEQLVQEGAIQLYKNYQTGEYMLGAVGQLQFEVFKHRMEGEYNAEVVMTPMGKKTVRWINSDDLDERMSSSRNILAKDRFDQPVFLFENDFALRWFADKYPDVKLEEKM

SEQ ID NO: 5915 - DNA, 378 bp, Streptococcus agalactiae
atgggaattttttcgggattaatgggaaatgcttcacaaatggataccgataaagtcgagaatcagttatctgatattctgatttcagatgaacaggttgatttagcttataccttaattcgtgatttgattgtttttactaattatcgtttaattttagttgataaacagggggtgacaggtaaaaaggtttcttataattctataccttatgcttctatatcacgttttacagtggaaactagtggtcattttgatttagatgctgagttaaagatttggatatcatcagcaatagaaccagcagaagtacttcagtttaagaacgaccgtaacatagtgagtatacagaaagctttggcgatagctgttttaaaa

SEQ ID NO: 5916 - protein, 126 aa, Streptococcus agalactiae
MGIFSGLMGNASQMDTDKVENQLSDILISDEQVDLAYTLIRDLIVFTNYRLILVDKQGVTGKKVSYNSIPYASISRFTVETSGHFDLDAELKIWISSAIEPAEVLQFKNDRNIVSIQKALAIAVLK

SEQ ID NO: 5917 - DNA, 393 bp, Streptococcus agalactiae
atgataatagaattaaagagtgttggaaaaatttttccaaaatcacagtttagattagatgatatttcttttaatatagaagaaggcgagatagttggtctgattggttctaatggtactggaaagagtactattttgaagatgattaatggcttaatcccttatgataaaggaaatatttattatcaaggaaaagaagtgaagtctttttctgataataagttacgtcagatgcgtaaagatattgcttatatttttcaaaatcataatttgttagtaggagaaagtgtatattatcatctagctttagtttataaattaaatcatcaaaaagtaaatcatgacgcaattaatgatatcttagattttttaggtttgatggatttaaacagg

SEQ ID NO: 5918 - protein, 131 aa, Streptococcus agalactiae
MIIELKSVGKIFPKSQFRLDDISFNIEEGEIVGLIGSNGTGKSTILKMINGLIPYDKGNIYYQGKEVKSFSDNKLRQMRKDIAYIFQNHNLLVGESVYYHLALVYKLNHQKVNHDAINDILDFLGLMDLNR

SEQ ID NO: 5919 - DNA, 660 bp, Streptococcus agalactiae
atgattgagattattgaaaaacatggcgaaggtatcttaaaatcattttgggaaaccaatttaatgttagggttaaccttgattctttgttttctaattgcttttccaacaggtattttattgttttcattgagaaagtcttacttgattaaacattctttagcctatcaactattaaatttatttttaggtacgttacggagtgtccctttccttatttttatttttatcttaatccctctcaatcgattaatttttgggacctcatttggaacgatagcggcaatcttacctcttactttggtttcagtcagtttgtatgcacgttatgtggaacaagctttattaaatatacctcaagttgttgttgatcgagctctcagtctaggggctaacaagagacagataatttattattttttaatcccctccatcaagattgaccttgttttatcatttactgcaacggctataagtattcttggctactcgacaataatgggagttattggtgcaggaggtttgggtgaatatgcctatcgttttggctatcaagaatatgactacccagttatgtacttgattgttgtcttatttataatatatgtgtttatcttacagagtttgggctattttatagcaaaccgctactcaagaaaa

SEQ ID NO: 5920 - protein, 220 aa, Streptococcus agalactiae
MIEIIEKHGEGILKSFWETNLMLGLTLILCFLIAFPTGILLFSLRKSYLIKHSLAYQLLNLFLGTLRSVPFLIFIFILIPLNRLIFGTSFGTIAAILPLTLVSVSLYARYVEQALLNIPQVVVDRALSLGANKRQIIYYFLIPSIKIDLVLSFTATAISILGYSTIMGVIGAGGLGEYAYRFGYQEYDYPVMYLIVVLFIIYVFILQSLGYFIANRYSRK

SEQ ID NO: 5921 - protein, 828 aa, Streptococcus agalactiae
ATGAAAAAATTACTTTCCCTAACATGTCTAATCATGATGTCTTTATGTTTAGTGGCATGTACTAAGCAAGCAATGTCGTCTAAGCAAATTAAAGATAAGAATAGTAAAGAAAAAGTGATTACTGTTGCAACTTACAGCAAACCTACATCTACCTTTTTAGATTTGGTTAAAGATAATGTAAAAGAAAAAGGATATACTTTAAAGGTTGTCATGGTCTCTGACTATATTCAGGCTAACATTGCTTTAGAAAACAAAGAACATGATGCTAACCTTTTACAACATGAATTTTTCATGAGTATCTTTAATAAGGAAAATGATGGTCATCTAGTGTCAATTACACCAATTTATCATTCATTGGCTGGTTTTTATGGTCAACATTTGAAAAATATTGCCGAGCTTAAAGACGGTGCTAAGGTAGCGATTCCGTCTGATCCTGCCAATATGACTAGAGCTCTGCTTTTATTGCAAGAAAAGAAACTTATCACCTTAAAGAATACGTCCAAAAAGACCAAGGCTATCGAAGATATTCTTACTAACCCTAAAAAATTACGAATTGAACCTGTAGCATTACTTAACCTCAATCAGGCCTATTTTGAATATGACCTTGTCTTTAATTTCCCTGGATATGTGACAAAAATCAATCTAGTTCCTAAAAGGGATAGATTATTATATGAGAAAAAACCAGATATCCGTTTTGCAGGTGCCTTGGTAGCTCGTGAAGATAATAAAAATAGTGATAAAATAAAAGTACTTAAAGAAGTACTAACAAGTAAAGAGATTCGTCACTATATCACTAAGGAGATTCCAAGTGAAGCAGACGTTGCGTTC

SEQ ID NO: 5922 - protein, 276 aa, Streptococcus agalactiae
MKKLLSLTCLIMMSLCLVACTKQAMSSKQIKDKNSKEKVITVATYSKPTSTFLDLVKDNVKEKGYTLKVVMVSDYIQANIALENKEHDANLLQHEFFMSIFNKENDGHLVSITPIYHSLAGFYGQHLKNIAELKDGAKVAIPSDPANMTRALLLLQEKKLITLKNTSKKTKAIEDILTNPKKLRIEPVALLNLNQAYFEYDLVFNFPGYVTKINLVPKRDRLLYEKKPDIRFAGALVAREDNKNSDKIKVLKEVLTSKEIRHYITKEIPSEADVAF

SEQ ID NO: 5923 - protein, 1583 aa, Streptococcus agalactiae
TTGAAATTTACAGAACTTAACTTATCGCAAGATATTCTTTCAGCGGTAGAAAAAGCAGGCTTTGTAGAGCCATCACCAATCCAAGAAATGACTATCCCACTTGCTCTTGAAGGCAAAGATGTCATTGGTCAAGCGCAGACAGGTACAGGAAAACTGCAGCTTTTGGGTTACCAACTTTAAATAAAATTCATACTGAAGATAATACTATTCAAGCACTTATTATTGCTCCTACACGTGAACTTGCAGTACAATCACAAGAAGAATTGTTCCGTTTTGGACGCGATAAAGGTGTTAAGGTCCGCTCTGTTTATGGTGGGTCAAGTATTGAAAAACAAATCAAGGCATTACGTTCAGGAGCACACGTTGTTGTTGGAACTCCAGGTCGATTACTTGATTTAATTAAACGTAAAGCACTTAAACTTAATCACATTGAAACTCTTATTCTTGATGAAGCAGACGAAATGCTTAACATGGGATTTTTAGAGGACATTGAAGCAATCATTAGTCGTGTACCAGAAGCACGTCAAACTCTTTTATTCTCAGCGACAATGCCTGATCCAATCAAACGTATCGGGGTTAAATTCATGAAAAATCCTGAGCATGTTAAAATTAAAGCAACTGAATTAACTAATGTGAATGTTGATCAGTATTATGTTCGCGTTAAGGAAAATGAAAAATTCGATACTATGACACGTTTGATGGACGTTGATCAACCAGAATTGTCAATTGTCTTTGGACGTACGAAACGTCGTGTAGATGAATTAACTCGTGGACTAAAATTACGTGGTTTCCGAGCAGAAGGAATTCATGGAGACTTAGATCAAAATAAACGTCTTCGTGTTATCAGAGACTTTAAAAATGACCATATTGATATTCTTGTTGCCACAGATGTTGCTGCGCGTGGTTTAGATATTTCAGGCGTTACACATGTTTACAACTATGATATTCCCCAAGATCCAGAAAGTTATGTTCACCGTATTGGACGTACTGGTCGTGCTGGTAAATCTGGTCAATCTATCACTTTTGTTTCACCAAACGAAATGGGATATTTGACAATTATTGAAAACTTAACTAAAAAACGTATGACTGGAATGAAGCCTGCTACTGCAAGCGAAGCATTTCAGGCTAAGAAAAAAGTTGCATTGAAACGTATTGCACGTGACTTTGAGGATCAAGAATTAGTTTCTAAATTTGATAAATTTAAAGCCGATGCTTTGGAATTAGCAACTCAATACACACCAGAAGAACTTGCTCTTTATGTCTTAAGCTTAACAGTTCAGGATCCAGAATCGTTACCAGAAGTTGAAATCACACGTGAAAAACCATTACCATTTAAACCATCAGGTGGTGGCTTTAAAGGTAAAGGTGGACGAGGAAATGGCCGTGGTGGCGATCGTCGACGCAATGATCGTGGTGATCGTCGTGGAAATCGCGACCGTGATGATCGTGGTGGTCGTCGTGATTTTAAACGTCGTGATGATAAGTTCAAGAAAGATAATCGTTGTCAAGAAAATAAAAAACCTCATAAAAACACTTCAAGTGAAAAACAAACTGGATTTGTTATTCGCAATAAAGGCGATAAA

SEQ ID NO: 5924 - protein, 528 aa, Streptococcus agalactiae
MKFTELNLSQDILSAVEKAGFVEPSPIQEMTIPLALEGKDVIGQAQTGTGKTAAFGLPTLNKIHTEDNTIQALIIAPTRELAVQSQEELFRFGRDKGVKVRSVYGGSSIEKQIKALRSGAHVVVGTPGRLLDLIKRKALKLNHIETLILDEADEMLNMGFLEDIEAIISRVPEARQTLLFSATMPDPIKRIGVKFMKNPEHVKIKATELTNVNVDQYYVRVKENEKFDTMTRLMDVDQPELSIVFGRTKRRVDELTRGLKLRGFRAEGIHGDLDQNKRLRVIRDFKNDHIDILVATDVAARGLDISGVTHVYNYDIPQDPESYVHRIGRTGRAGKSGQSITFVSPNEMGYLTIIENLTKKRMTGMKPATASEAFQAKKKVALKRIARDFEDQELVSKFDKFKADALELATQYTPEELALYVLSLTVQDPESLPEVEITREKPLPFKPSGGGFKGKGGRGNGRGGDRRRNDRGDRRGNRDRDDRGGRRDFKRRDDKFKKDNRCQENKKPHKNTSSEKQTGFVIRNKGDK

SEQ ID NO: 5925 - protein, 264 aa, Streptococcus agalactiae
ATGATTAAAGTTCCTGCTTATATGTATGTTTTAGAATGTTCAGATGGAACACTTTATACAGGTTATACTACAGATGTCAAGCGCCGTCTCAATACACACAATACTGGAAAAGGTGCTAAATATACTCGTGCGAGATTGCCAGTAAAACTTCTTTATTCTGAAGCTTTTAATAGCAAACAAGAAGCAATGAGGGCAGAAGCATTATTTAAACAAAAGACTCGGCAAGCAAAATTGACTTATATTAAACAACATAAAAATGAACAA

SEQ ID NO: 5926 - protein, 88 aa, Streptococcus agalactiae; identical to SEQ ID NO: 1472

SEQ ID NO: 5927 - protein, 762 aa, Streptococcus agalactiae
ATGATAGATACAATTTTAAAAGAAAATGAACGCATTGATCAGCTTTTTTCAACTGATGTCAAAATCATCCAAAACAAAGAAGTTTTTTCCTACTCCATAGATAGTGTTTTATTGTCTCGGTTCCCTAAACTTCCTTCTCGTGGTCTTATCGTTGACTTATGCAGTGGTAATGGTGCTGTCGGTTTGTTTGCCAGCACCAAAACAAATGCGACAATTATAGAGATCGAACTACAAGAGCGCCTTGCGGATATGGCTAAGCGTTCGATTAAGCTTAATAAATTGGAAAAACAGGTTACTATGATTAATGATGATTTAAAAAATCTTCTTGATCATGTTCAACGTTCAAACGTTGATTTAATGCTTTGCAATCCACCTTATTTCAAAGCAAGCGAAACCTCTAAAAAAAATCTAAGCCCGCATTATCTCCTTGCAAGACACGAAATAACAACAAACCTTAGAGAAATTTGTCAAATTGCTCAACATGCTCTAAAAACAAAAGGACGTATCGCTATGGTACATCGTCCAGACCGTTTCCTTGAAATTATTGATACGATGCGTCAGTTCAATTTAGCACCTAAACGTATCCAATTTGTTTATCCAAAATTAGGAAAAGATGCTAATATGCTTTTAATTGAAGCTATTAAAGATGGCTCGACAGAAGGTATGAAAATACTTCCTCCTCTTGTTGTTCATCAAGATAATGGAGACTATACTGAGACTATTTTTGATATATATTTCGGGGAAAACGGAAAATCTCATGAT

SEQ ID NO: 5928 - protein, 254 aa, Streptococcus agalactiae
MIDTILKENERIDQLFSTDVKIIQNKEVFSYSIDSVLLSRFPKLPSRGLIVDLCSGNGAVGLFASTKTNATIIEIELQERLADMAKRSIKLNKLEKQVTMINDDLKNLLDHVQRSNVDLMLCNPPYFKASETSKKNLSPHYLLARHEITTNLREICQIAQHALKTKGRIAMVHRPDRFLEIIDTMRQFNLAPKRIQFVYPKLGKDANMLLIEAIKDGSTEGMKILPPLVVHQDNGDYTETIFDIYFGENGKSHD

SEQ ID NO: 5929 - protein, 738 aa, Streptococcus agalactiae
ATGTTCTATACTTACTTACGTACTTTAGTTATGTTCTTGATTTGGGTGGCTAATGGTAATGCGCACTATCATAATGAAGATAAAATGTTAAAAGATGATGAAAATTATATTTTAGTAGCTCCACACAGAACATTTTGGGATCCTGTGTACATGGCTTTTGCTGCTAGACCCAAACAGTTTATTTTTATGGCCAAAAAAGAATTATTCACGAATCGTTTGTTTGGTTGGTGGATTAAAATGTGCGGTGCTTTCCCTATTGATCGTGAAAAGCCAGGGCAAGATGCTATTCGATATCCTGTAAAGATGCTGAAAAATAGTAACCGTTCTTTGGTGATGTTTCCGAGTGGAAGCCGCCACTCCAAAGATGTCAAAGGAGGCGTAGCTGTTATTGCAAAAATGGCAAAAGTCAGAATTATGCCAGCAGCATATAGAGGTCCTATGGTTTTTAAAAATCTATTAAAGGGGCATCGTGTTGATATGAATTTTGGTAACCCTATTGATGTTTCTGATATTAAGCGTATGGATGCCGAAGGGATTGCAGAAGTATCTCGTCGTATTCAGGAAGAATTTGATCGTTTAGATAGAGAAAATGAAACTTATGATGATGGTAAGAAATTAAATCCATTGACTTATATTTATCGTCTACCTTTAGCAATTATAGCTATTGTCTTGCTTGTCCTAACTCTAATTTTTAGTTATTTAGCAAGCTTTGTGTGGGATCCACAAAAACATCTAAAA

SEQ ID NO: 5930 - protein, 246 aa, Streptococcus agalactiae; identical to SEQ ID NO: 1476

SEQ ID NO: 5931 - DNA, 651 bp, Streptococcus agalactiae
atgtttgaaatagtattggaaaaaattaaatcgcataaatgggagacaacaggaattattgtaggactcttattatttggaattttgggtttaaatcattttggcactcatcataaagaagacaatttaaatatcaatttagagaaaaaagtatcaactataacagaaaaaaaggtaccaatgattagtcacgtcaaagataaagtatctaatcaagtaacggttgacgtaaaaggggcagtcaatcatccaggtgtttatagtttgccttctcaaagtcgtgtaacagatgcgattaagcgtgcaggtggactaagcaatctcgctgatagtaaatccgttaatctagcacagaaattacaagatgagacggttatctatgttgctcaaaaaggtgaaaaaataactgttgtggaagaggagaaagcaaataatatcgccactcagggaaatagtaaggggaaaattaatcttaataaagcagatttatcaagtcttcagaccatatcaggcgttggagctaaaagagctcaagatattttagattatcgtgatagtcaaggtggttttaaaactattgatgacctcaaaaacgtatcaggtattggtgagaaaacactagaaaaattacgtcaagatgttacaattgac

SEQ ID NO: 5932 - protein, 217 aa, Streptococcus agalactiae
MFEIVLEKIKSHKWETTGIIVGLLLFGILGLNHFGTHHKEDNLNINLEKKVSTITEKKVPMISHVKDKVSNQVTVDVKGAVNHPGVYSLPSQSRVTDAIKRAGGLSNLADSKSVNLAQKLQDETVIYVAQKGEKITVVEEEKANNIATQGNSKGKINLNKADLSSLQTISGVGAKRAQDILDYRDSQGGFKTIDDLKNVSGIGEKTLEKLRQDVTID

SEQ ID NO: 5933 - DNA, 2226 bp, Streptococcus agalactiae
ttgactaagtattttcctctaaaacctatttatttagcattgttggtcttccaaatttacttactagtgttttcttggacaatgcttggttgtgcctttcttttatttacttttatttttctgatttatcaatatgatcgtgaaactatttttaaaacaatagcaatagtaatttttttcttattttattttttatggcaaaatcacaatatgaatgtccaatatcaaagagtaccgaatcatattagccagattaaagtgcgtattgatactatttctatcaatggtgatgttttatcattccaggcagatgcttcaggtaacacttatcaagctttttatacattaaaaaataaaagtgagaaagattattttcaaaatcttgataataatataatgataattgcagatatcaaacttgaagaagcagaggagagaaggcattttaatggctttgattatcgtcagtatttaaaaagacatggaatttatcgtatcgccaaagtgacaaagataaaacagatacgcttatttcaacataggtctttctttgatcttatgtttaagtggcgtagaagtgcaattgttattagtcaaacttttccaaatcctatgcgtcactatatgtcagggcttttgtttggatatctagataagacctttgatgacatgtccgatttatatagtagtctaggtattatacatttatttgctttgtcaggtatgcaagtaggtttttttctcggtatttttcgttatatctgtctacgtattggcttacgtctagaccatgtttggttacttcaaataccattctcgctaatttatgctggtttaacaggctttagtatctcagtcgttagggcacttattcaatctttattatcacatagcggtgtcaagaaagatgagaactttgctctctgcttgttaatttgtcttatctctctcccccactcacttttgactacgggaggagttcttagctttgcttatgcttttatacttacgatgacctcctttgatcatttttcgagtataaaaaaagtagctatcgaatctttgacagtctctgtaggaattcttcccatactaacctactatttttcgggttttcaaccaatatcaattatattaacagcacttttatcttttgcatttgatattatatttttgcctttattaactgttatatttgtcttatcgcctatcgttaaattaggttgtattaatagtttgtttgaaatcctagaagtgttattaaaatggactgggcaactttttccaaggccacttatttttggaaagcccagcctttttcttttaatagtcatgattataattttgggattactttatgattattatcattctaaatgttttcgttattgctcccttcttattatctttaccttgttttttatcactaagaatccaattactaacgaggttgcgattttagatgttggacagggagatagtattttagtgagggattggttaggaaaaacaattttaattgatactgggggaagggtgagatttgaacagcctgaagaatggaaacaaaaagtaaatcagtctaatgctgagagaacgctcattccttacttgaaaagcagaggtattagcaagatagatgatttagtgataactcataccgatacagatcatatgggggatatggaagttatctcaaagcattttaaagttgcacgtttgattacaagttcaggttctttaacgaattcgcagtacgttaagcgtttatcaaagataggtgtagcggtaaaatctatagaagccggtgataaacttgctgtcatgggaagttatttacaagtactttacccatggcacaagggtgatggaaaaaataatgattcaattgttttatatggacatttattaggaaaaggcttcttatttaccggtgatttggaggaagagggagaaaagcagttattagaagcttatcctaatttatcagtagatatccttaaagcaggacatcatggttctaagggctcatcaagtctatcctttctgaaaaagttgtctcctagtgtggttctagtgtcagctggtaaaaataatcgttaccagcatcctcatcaagagactttacaaaggttccaaaagattaaaagcaagattttccgaacggatcaatcaggtacaattaggctaacaggatggtggaagtggcatattcagacagttcgt

SEQ ID NO: 5934 - protein, 742 aa, Streptococcus agalactiae
MTKYFPLKPIYLALLVFQIYLLVFSWTMLGCAFLLFTFIFLIYQYDRETIFKTIAIVIFFLFYFLWQNHNMNVQYQRVPNHISQIKVRIDTISINGDVLSFQADASGNTYQAFYTLKNKSEKDYFQNLDNNIMIIADIKLEEAEERRHFNGFDYRQYLKRHGIYRIAKVTKIKQIRLFQHRSFFDLMFKWRRSAIVISQTFPNPMRHYMSGLLFGYLDKTFDDMSDLYSSLGIIHLFALSGMQVGFFLGIFRYICLRIGLRLDHVWLLQIPFSLIYAGLTGFSISVVRALIQSLLSHSGVKKDENFALCLLICLISLPHSLLTTGGVLSFAYAFILTMTSFDHFSSIKKVAIESLTVSVGILPILTYYFSGFQPISIILTALLSFAFDIIFLPLLTVIFVLSPIVKLGCINSLFEILEVLLKWTGQLFPRPLIFGKPSLFLLIVMIIILGLLYDYYHSKCFRYCSLLIIFTLFFITKNPITNEVAILDVGQGDSILVRDWLGKTILIDTGGRVRFEQPEEWKQKVNQSNAERTLIPYLKSRGISKIDDLVITHTDTDHMGDMEVISKHFKVARLITSSGSLTNSQYVKRLSKIGVAVKSIEAGDKLAVMGSYLQVLYPWHKGDGKNNDSIVLYGHLLGKGFLFTGDLEEEGEKQLLEAYPNLSVDILKAGHHGSKGSSSLSFLKKLSPSVVLVSAGKNNRYQHPHQETLQRFQKIKSKIFRTDQSGTIRLTGWWKWHIQTVR

SEQ ID NO: 5935 - DNA, 807 bp, Streptococcus agalactiae
atgactatcaaacgtattttttgtgacatggatggtacactattaaatagtgaaggacaagtgagtaaaagtaacgctaccttaatacgtgaggcagcgattccagtaactttagtgtctgctagggcacctatggaaatgaaggatgccgtagatgcacttcaattaggaggagtccaagttgcttttaatggaggattgatttatagaataggagataataatcaagttctacctattcatacacaaatcattaaaaaaagcacagtaaaacaattgctaagaggaatacggtttcattttcctcaagttagtttatcttattacgatcttaataactggtattgtgataaaatagatgaaggaatccgatacgaacatagtttaactcaacaatgcccaacgtttattcataatgaggatcagtttttagaaggtcacacaaatacttttaaaattatgatgattactttcgatgaagcaaatatgctagaattagaaaaatatcttcaaagtttggagttaccagaaatcactattcaacgttcaggtaaagcgtatcttgaaattacacatctcttagccaaaaaatctaaaggaattgcttacatccttcaaaaagagcagttagctagagaagaaacggctgcatttggagatggacataatgatttgcctatgcttgaaatggtaggttaccctattgttatggataatgcttttgatgatatcaaagcgatagcatatcaactaactaagtctaatgatgaagacggagtgggatatgggattcaaaaatttttaaag

SEQ ID NO: 5936 - protein, 269 aa, Streptococcus agalactiae
MTIKRIFCDMDGTLLNSEGQVSKSNATLIREAAIPVTLVSARAPMEMKDAVDALQLGGVQVAFNGGLIYRIGDNNQVLPIHTQIIKKSTVKQLLRGIRFHFPQVSLSYYDLNNWYCDKIDEGIRYEHSLTQQCPTFIHNEDQFLEGHTNTFKIMMITFDEANMLELEKYLQSLELPEITIQRSGKAYLEITHLLAKKSKGIAYILQKEQLAREETAAFGDGHNDLPMLEMVGYPIVMDNAFDDIKAIAYQLTKSNDEDGVGYGIQKFLK

SEQ ID NO: 5937 - DNA, 942 bp, Streptococcus agalactiae
atgacaagtattagtgatatagctaaaaaggcaggtgttgctaaatcaacagtttcccgtgttatcaatcatcacccacatgtttctgatgagacacgacaaaaagtaatggctcttatcaccgaattggattatataccaaatcaactagcgcgggatttaagtcgaggcaaaacacaaaaaataggtgtcgtcattccccacacgcgccatccttattttacacaattaataaatggcctattagatgctgctaaaactaccgactatcaacttgttatgatgccttcagattacaacaaagaattagaactttcctacttgaaacagctcaagatggaagctattgatgctttaatattcacttcaagagcaattagcctcgatattattgaaacttatgcaaaatatggacgaatagtagtttgtgaaaaattgcaggaatataatcacctatcctctgcttaccttgatcgctattcttcatttctagaggcgttttctgatatgaagttacgaggtttggagcacttagttttattattttcaaggaataatgaatcctctgctacctatcaatccgcattattagcttatcaagaggtctatgggcaactatcctctccatatatggtagttgggaatgttcatgactttaatgatggactaaatttatcttatcaattggtaaaagaagttagtatagatggtatattagctacaagtgatgaagtcgcggcagggctaataaaaggttatgaagaaagtaggaaaaaacgtccctatattattggtcaggaatgtttattagttgggcaacttttgaaactcccaacaattgaccacaaatcctattatttagggaaattagcttttaaacaggctttagctgaaaagattagtcaagaagttttattctcagagtttttatctcaagacaat

SEQ ID NO: 5938 - protein, 314 aa, Streptococcus agalactiae
MTSISDIAKKAGVAKSTVSRVINHHPHVSDETRQKVMALITELDYIPNQLARDLSRGKTQKIGVVIPHTRHPYFTQLINGLLDAAKTTDYQLVMMPSDYNKELELSYLKQLKMEAIDALIFTSRAISLDIIETYAKYGRIVVCEKLQEYNHLSSAYLDRYSSFLEAFSDMKLRGLEHLVLLFSRNNESSATYQSALLAYQEVYGQLSSPYMVVGNVHDFNDGLNLSYQLVKEVSIDGILATSDEVAAGLIKGYEESRKKRPYIIGQECLLVGQLLKLPTIDHKSYYLGKLAFKQALAEKISQEVLFSEFLSQDN

SEQ ID NO: 5939 - DNA, 990 bp, Streptococcus agalactiae
atgaaaaactatcgaaaacttattgtactactacttctaatcttttttgtcatttttacgggagcatatgcttacacgcatattgttgaaaaaagatccctaactagcaatactattgaaaaaactctacctgtggtaaatcagattaagcctcaaaccattaaagaataccaaaattacttaactaaggtagctaaacgtaatgttcttcctgtagacattcctcaggcattaaataatgaaaaggtagaaattaccgctactgatggcatgcaaacattcacttggaatgataaaaataatcctaagcaaaaggttatcttctatgttcatggaggatcatatatccatcaagcttccgaattacaatatatttttgtcaataaactagctaaaaaattagatgcaaaagttgtctttcctatttaccctaaagctcctacatataattatagtgatgctatccccaaaattaaaaaattataccaaaatacattagctagcgtcacatctcacaaacagattatcctagtaggtgaaagtgcaggcggaggccttgctttaggtcttgctgataaccttgtcacggagcatatcaaacaaccaaaagaaattattttaatatcaccatggttagatattgctactaataatccaaagattgaaaaagttcaaaaaaaagatccccttcttaaagcttggcaattacaacaagtagctccttactgggcaaatggaaaaaagaattttaaaaatcctcaagttagtcctctttacagtagccaatttaacaagatggctccaatatcattttttataggaacgcacgatattttctaccccgataatcaattattacatcaaaaattagcaaaagaaaacattaaacaccactatatcgttggccaaaaaatgaaccacgtttatccagtcttaccgattcctgaagcagagactgctttcaaacaaatgcttaaaattatcaatcat

SEQ ID NO: 5940 - protein, 330 aa, Streptococcus agalactiae
MKNYRKLIVLLLLIFFVIFTGAYAYTHIVEKRSLTSNTIEKTLPVVNQIKPQTIKEYQNYLTKVAKRNVLPVDIPQALNNEKVEITATDGMQTFTWNDKNNPKQKVIFYVHGGSYIHQASELQYIFVNKLAKKLDAKVVFPIYPKAPTYNYSDAIPKIKKLYQNTLASVTSHKQIILVGESAGGGLALGLADNLVTEHIKQPKEIILISPWLDIATNNPKIEKVQKKDPLLKAWQLQQVAPYWANGKKNFKNPQVSPLYSSQFNKMAPISFFIGTHDIFYPDNQLLHQKLAKENIKHHYIVGQKMNHVYPVLPIPEAETAFKQMLKIINH

SEQ ID NO: 5941 - protein, 726 aa, Streptococcus agalactiae
ATGTTTCACAGAGAAGATTTTTCAAAAGCATTATTAAAAAAAGCTTTGCAGCCCGGTATGAGAGTTATGGATATTGGTTGTGGTAGTGGGGAATTAACGCGTTTGGCTGCTGATATCGTTGGTAAAGAAGGTGATGTTGTAGGAATTGATATTAATGAGCAACTTTTATGGCAAGCTAGACATGATAATGGCTATGCTAATGTTAGTTATCAAAACGCAGATTTAGCAGCATTTTCCTCCTTTGAAACAAAAAGTTTTGATGCTATTATTGGACGTCGTGTATTAATGTATCAAAAAAATCCAAAGAAAGTAATAGAAAGTTTAACACCTTTGTTAAAGCAAAATGGTTTTTATGTTTTTCAAGAAAGTGATGCAATGTGTTTAGAACTAGCTAAGCCTAGCTTTGTAAATATGAATAAAATACAATCACTAATCTGGCAAACTGTTGAGAAGGAAGGAGGACACATTCATATTGGAAGTCAACTTGAGCAATTAATGTTAGAAGCAGGCTTAATCGTTGACCATTTTGTATCAGAAAATGTCATTCAAACGTCACAAACTGGTACAGATCTATCTTGGCTACTAAATATCATGAAAGAAAGAATACAAAAATATAGTGACCTTCAGGGGTTAGAAGATGTCAATTTACAAAAAGAATTAGAAGAGAATAATGACCATTTTATCCGAGATTGTCAATTTGGAATTATTTCTCATAGAGTTGATGAA

SEQ ID NO: 5942 - protein, 242 aa, Streptococcus agalactiae
MFHREDFSKALLKKALQPGMRVMDIGCGSGELTRLAADIVGKEGDVVGIDINEQLLWQARHDNGYANVSYQNADLAAFSSFETKSFDAIIGRRVLMYQKNPKKVIESLTPLLKQNGFYVFQESDAMCLELAKPSFVNMNKIQSLIWQTVEKEGGHIHIGSQLEQLMLEAGLIVDHFVSENVIQTSQTGTDLSWLLNIMKERIQKYSDLQGLEDVNLQKELEENNDHFIRDCQFGIISHRVDE

SEQ ID NO: 5943 - protein, 942 aa, Streptococcus agalactiae
ATGAAAGAGAAGCTATTTCAGGTAATTGGATTCAATAAAGACGATTTAGCCTATTCTTATTTTGATTTAAGTGAAGAAGACTATCAAAATGCGGAATTAGACTTAGAAAGTTTACCTTTTTTATCAGACTATAAGGTTGTTATTTTTGATCAGTTTCAAGATATTACGACTGATAAAAAAACTTATTTAGATGAACAAGCAATGAAGCGCTTTGAAGCCTACTTGCAGAATCCTGTAGATACTACGAGACTTGTTATTTGTGCCCCAGGAAAACTTGATGGAAAACGTCGACTTGTAAAGTTATTGAAACGTGATGCTCGTGTTTTAGAGGCTAATACTTTAAAAGAATCAGATTTAAAGACGTATTTTCAAAAATATGCTCACCAAGAAGGATTAGTTTTTGAAGCAGGCGTTTTTGATGAGTTATTGATTAAGTCTAACTATGATTTTAGTGATACTTTAACGAATATCGCTTTCTTAAAGTCATATAAAACAGACGGTCATATTTCGTCTAATGATGTTAGAGAGGCTATCCCTAAAAGCCTGCAAGATAATATATTTGATTTGACTCAAGATGTCTTACTTGGTAGGATAGATTTAGCGCGTGATTTAGTAAGAGATTTACGTCTACAAGGCGAAGACGAAATCAAATTGATTGCAATCATGTTAGGACAGTTTCGGATGTTTTTGCAAGTTAAAATACTGGCTAGTAAAGGAAAGTCAGAGAGTCAAATTGTTTCTGAACTATCCCATTACATAGGACGTAAAATCAACCCTTATCAAGTAAAATTTGCTGTCAGGGATTCTAGAAACCTTCCCCTCGCTTTTTTAAAAGAAGCGATTAGGATTTTAATTGAGACTGACTATGCTATTAAAAGAGGGACTTATGATAAGGATTATCTCTTTGACTTAGCCTTATTAAAAATTGCTCATAAAAAGCCC

SEQ ID NO: 5944 - protein, 314 aa, Streptococcus agalactiae; identical to SEQ ID NO: 1486

SEQ ID NO: 5945 - protein, 606 aa, Streptococcus agalactiae
ATGGCAATTATTTTACCAGATTTACCCTATGCATATGATGCGCTTGAGCCACATATTGATGCTGAGACAATGACACTACATCATGATAAGCACCATGCAACTTATGTTGCTAATGCAAATGCTGCTCTTGGGAAACATCCTGAAATTGGAGAAGACTTAGAAGCGCTCTTAGCTGATGTTTCTCAAATTCCAGAAGATATTCGTCAGGCAGTCATCAATAACGGTGGTGGACATCTTAACCACGCTCTTTTCTGGGAATTGATGTCACCAGAAGAAACTCAAATTTCACAAGAGTTATCTGAAGACATTGATGCAACTTTTGGTTCATTTGAAGACTTTAAAGCTGCTTTCACAGCAGCAGCAACAGGACGTTTTGGTTCAGGTTGGGCTTGGCTTGTTGTTAATGCTGAAGGCAAACTTGAAGTGCTTTCAACTGCCAATCAAGATACTCCAATTATGGAAGGTAAGAAACCTATTTTAGGGCTTGATGTATGGGAGCATGCTTATTACTTAAACTATCGTAATGTTCGTCCTAACTACATCAAAGCTTTCTTTGAAATTATTAACTGGAATAAAGTAAATGAACTTTACCAAGCTGCTAAAGCT

SEQ ID NO: 5946 - protein, 202 aa, Streptococcus agalactiae
MAIILPDLPYAYDALEPHIDAETMTLHHDKHHATYVANANAALGKHPEIGEDLEALLADVSQIPEDIRQAVINNGGGHLNHALFWELMSPEETQISQELSEDIDATFGSFEDFKAAFTAAATGRFGSGWAWLVVNAEGKLEVLSTANQDTPIMEGKKPILGLDVWEHAYYLNYRNVRPNYIKAFFEIINWNKVNELYQAAKA

SEQ ID NO: 5947 - protein, 849 aa, Streptococcus agalactiae
ATGATTATAAAACGCGTATTAAATCATAATGCAGTCATATCAGTAACACATCAAGGATTAGATGTGTTACTGATGGGGAAAGGAATTGCATTTAAGAAAAGAATAGGTGATAGGATTAATAGCGATGCTATTGAGAAGTCATTTGTTTTAAAAAATAGTGATAACATGAACCGTTTTACGGAGTTATTTATTACTGTTCCAGAAGAAGTAGTTGCATGTTCAGAACGAATTATCAACCTAGGTAAAATCAAATTGGGTAAGAACCTAGATGAAATTCTTTATATCAATTTGACAGATCATATTCATTCGGCTATTGAAAGACATGAACAAGGAATGGTTATCCAAAATCCACTAAGGTTGGAAATCCAGCGTTACTATCCTGATGAATACTCCATTGGGATGAAGGCTCTGGAACTTATAAAGGATGAATTGGGTATTTGTTTAACAATTGATGAGTCAGCTTTTATTGCTATGCACTTTGTAAATGCTGGATTGGATAATCCGTTTAATGAAGCGCATAAAATCACTGAGATTGTATCTTACATTGAACAGAAAGTAAAAACAGATTTTCGAACAGAACTAGATGAAAGTTCAATTGATTATTATCGTTTCATGACACATACCAAATTATTTGCTCAACGTGTTTTATCAGGAATGAAATACGAAGATGATGATGCTGATTTACTTTTAGTAGTTAAGAAAAAATATCCGAGAGAATATAAATGTGTTAAAGAGATCGGCAACAATATGGCTATCCAATACCAATATCAACTTAATTCAAGTGAACTCCTATATCTGACGGTGCATGTTAAACGATTAGTTAAAAATTTAAAGGAGATATCAGATGAC

SEQ ID NO: 5948 - protein, 283 aa, Streptococcus agalactiae
MIIKRVLNHNAVISVTHQGLDVLLMGKGIAFKKRIGDRINSDAIEKSFVLKNSDNMNRFTELFITVPEEVVACSERIINLGKIKLGKNLDEILYINLTDHIHSAIERHEQGMVIQNPLRLEIQRYYPDEYSIGMKALELIKDELGICLTIDESAFIAMHFVNAGLDNPFNEAHKITEIVSYIEQKVKTDFRTELDESSIDYYRFMTHTKLFAQRVLSGMKYEDDDADLLLVVKKKYPREYKCVKEIGNNMAIQYQYQLNSSELLYLTVHVKRLVKNLKEISDD

SEQ ID NO: 5949 - protein, 1866 aa, Streptococcus agalactiae
ATGACTAAATACCAAGAGACTGCTAAAGCTATTTTCGCAGCAGTAGGGGGAGAAAAAAATATTCAACACGTAACCCACTGTGTGACACGATTACGATTAGTTTTAGACAATGATGAAATTGTCAACGATCAGGTTATTAAAACTATTCCGAATGTTATCGGTGTTATGCGTAAAAATGATCAATACCAAATTATTTTGGGAAATGATGTCAATAATTATTATAATGCTTTTTTGACCTTAGGTCATTTTGAAAATACTACCAGAGAATTTTCATCACAAAAAAAGAGTTCAATACTTGAGAAATTAATTGAAACGATTGCAGGAGTCATTACGCCGCTTATACCTGCTCTTCTAGGAGGAGGTATGCTCAAGGTTATAGGTATTTTGCTCCTTATGCTCGGTATAGCAAGCTCTAGTTCTCAAACAGTAGCTTTTATCAATTTTTTTGGTGATGCCGCTTATTATTTTATGCCAATAATGATTGCTTATTCAGCTGCGTCACGATTTAAAGTTACACCTGTATTAGCTGCTACAGTAGGAGGGGTTCTCTTACACCCTGCTTTTGTGACAATGGTAGCTGAAGGAAAACCATTATCTTTATTTGGAGCTCCGGTTACACTGGCTAGTTATGGTTCTTCTGTTATTCCAATCTTAATTATGGTTTTTCTTATGCAATATATTGAGAGATGGATTAATAAAATTGTTCCTAGTATAATGAAGAGTTTTTTACAACCGACTTTGATTATTCTCATTTCTGGCTTTTTAGCTTTAGTGGTCGTGGGGCCACTGGGGGTAATTATTGGTAAAGGATTGTCTAGTGCAATGCTTTCGATTTACCATGTGGCACCATGGTCAGCTTTAGCTATTCTTGGTGCTATTATGCCATTGGTTGTTATGACAGGAATGCACTGGGCATTTGCTCCAATATTTTTAGCTGCTTCTGTTGCGACACCAGATGTTTTGATTTTACCAGCAATGTTAGCTTCTAATTTAGCTCAAGGTGCAGCTTCTTTTGCTGTTGCAGTTAAGGCTAAACAAAAACAAACACGTCAGGTGGCCTTTGCAGCAGGTTTATCAGCACTACTAGCTGGTATCACAGAACCTGCACTTTATGGTGTCACACTGAAATTCAAGAAGCCTTTATACGCTGCAATGATATCAGGTGGTTTAGTAGGAGCTTATATTGGATTAGTTAATATTGCTTCCTATACATTTGTAGTACCATCTATTATTGGTTTGCCACAATACATCAATCCACAGGGGGGCAATAATTTCAGTAATGCTGTTATTGCAGCAATAGCTACTATTATTTTGACTTTCATTATTACATGGTTCTTGGGAATTGATGAAGGAGAAAACGAAAAAAGTAGTATTAATGCTCAAGAGCACACACATATTAGAAGTGGTTTATCAAAAAAAGAGACATTGTATTCACCTATGGTAGGCAATGTATTACCTTTATCTAAAGTACCCGATGAAACATTTTCATCTAAATTACTAGGTGAAGGTTTAGCAATCACTCCTAGTGTGGGTGAAGTTTATGCACCATTTGATAGTGAAATTATAAGTTTATTTCCTACAAAACATGCCATTGCCTTAAAGGATGATAAGGGAGTCGAAGTGTTAATCCATATTGGAATAGATACTGTAGAACTAAATGGAGAAGGTTTTGAACAATTGGTCAAAGTTGGCGATTTTGTTAAACGAGGACAGTTACTTTTGCGAATGGATATTGATTTTATTAGTTCAAAGGGGTATTCTCTTATTAGTCCGGTTGTAGTTACAAATTCAATTGACCAACTTGAAATTATCGTTAAAGACGAAGAGACAATGGTTACAAATGAAGATGATTTACTTGTAATTCTT

SEQ ID NO: 5950 - protein, 622 aa, Streptococcus agalactiae
MTKYQETAKAIFAAVGGEKNIQHVTHCVTRLRLVLDNDEIVNDQVIKTIPNVIGVMRKNDQYQIILGNDVNNYYNAFLTLGHFENTTREFSSQKKSSILEKLIETIAGVITPLIPALLGGGMLKVIGILLLMLGIASSSSQTVAFINFFGDAAYYFMPIMIAYSAASRFKVTPVLAATVGGVLLHPAFVTMVAEGKPLSLFGAPVTLASYGSSVIPILIMVFLMQYIERWINKIVPSIMKSFLQPTLIILISGFLALVVVGPLGVIIGKGLSSAMLSIYHVAPWSALAILGAIMPLVVMTGMHWAFAPIFLAASVATPDVLILPAMLASNLAQGAASFAVAVKAKQKQTRQVAFAAGLSALLAGITEPALYGVTLKFKKPLYAAMISGGLVGAYIGLVNIASYTFVVPSIIGLPQYINPQGGNNFSNAVIAAIATIILTFIITWFLGIDEGENEKSSINAQEHTHIRSGLSKKETLYSPMVGNVLPLSKVPDETFSSKLLGEGLAITPSVGEVYAPFDSEIISLFPTKHAIALKDDKGVEVLIHIGIDTVELNGEGFEQLVKVGDFVKRGQLLLRMDIDFISSKGYSLISPVVVTNSIDQLEIIVKDEETMVTNEDDLLVIL

SEQ ID NO: 5951 - DNA, 1425 bp, Streptococcus agalactiae
atgacggtttttcctaaacattttctatggggaggtgcagttgctgccaatcaggtagagggtgcatttagaacagatggcaaaggtttatctgtacaagatgtacttccaaatggtggtttaggcgatttcaccgccaaacctactccagacaatttgaagctagaagcaattgatttttatcataactataaaaatgatataaaactgtttgcagagatgggctttaaagtttttagaacctctattgcctggtctcgaatttttccaaatggtgatgatagtgctccaaacgaagctggcttacaattttatgataatttatttgacgagttgcttaaatataatatcgagcccttggttaccttatctcattatgaaacaccgcttcatcttgcaaagacctataatggttgggctgatagacgtttgatagcattttttgagaaatttgctcaaacagtcatggagcgttataaagataaggtaaaatattggttaacttttaatgaagtgaattctattttacatatgcctttcaccagtggtgctattatgaccgacaaatcacaactaagtcctcaggagctttatcaagctattcatcatgaattagtagcatcggctagagtgacaaaattagggcgttctatcaatcctaattttaaaattggttgtatgattctggctatgccagcttatcctatgacatctgatccaagagatgtcctggctgcaagacaatttgagcaacataatctgctattttcagatatacatgtcagaggtaaatatcccacttatattcagtcctatttcaaaaataatggtattaaaattaaatttgaagaaggagatgaggaagtattggcacaaaatacagtagattttctatcgtttagttactatatgagcgtgacacaagcttatgactttgaaaattatcaaagtggtcagggaaatatccttggaggcctgactaatcctcatttaacaacttcagaatggggatggcaaatcgatcccatcgggctacgcctagtcttaaatcagtattatgaacgttatcagattccgttgtttattgtagaaaatggattgggagcaaaagatcaattgatagaaacactagacggtgattatactgtcgaagatgattatcgtattgattatatgaatcaacatttagttcaagttgctaaagctattgaagatggcgttgaaataatgggatatacatcttgggggtgtattgattgtgtatccatgtctacagctcaactaagtaaacgttatggtctaatatatgttgatcgaaatgatgatggaacagggagtctacaacgttacaagaagaagtcatttggttggtaccaaaaagtgattaggacaaatggtcaatcattgtttgaacatcataacaga

SEQ ID NO: 5952 - protein, 475 aa, Streptococcus agalactiae
MTVFPKHFLWGGAVAANQVEGAFRTDGKGLSVQDVLPNGGLGDFTAKPTPDNLKLEAIDFYHNYKNDIKLFAEMGFKVFRTSIAWSRIFPNGDDSAPNEAGLQFYDNLFDELLKYNIEPLVTLSHYETPLHLAKTYNGWADRRLIAFFEKFAQTVMERYKDKVKYWLTFNEVNSILHMPFTSGAIMTDKSQLSPQELYQAIHHELVASARVTKLGRSINPNFKIGCMILAMPAYPMTSDPRDVLAARQFEQHNLLFSDIHVRGKYPTYIQSYFKNNGIKIKFEEGDEEVLAQNTVDFLSFSYYMSVTQAYDFENYQSGQGNILGGLTNPHLTTSEWGWQIDPIGLRLVLNQYYERYQIPLFIVENGLGAKDQLIETLDGDYTVEDDYRIDYMNQHLVQVAKAIEDGVEIMGYTSWGCIDCVSMSTAQLSKRYGLIYVDRNDDGTGSLQRYKKKSFGWYQKVIRTNGQSLFEHHNR

SEQ ID NO: 5953 - DNA, 1092 bp, Streptococcus agalactiae
atgaaattaagaaaacaactcgcacaacaaatcgttacctctatcaaagatgtttgtcaacaagatattaattttattaataccaaaggaatcattttcgctagtaccaatccaaaacgtgttggagaattccatgaaattggtttaaaagtagcacagacaggacaaatgattgaagtaacagatcaagaatcttattttgggacacaagcagggatcaatattcctttctattataattgtgaattattagctactattgggattagtggaaaccccaaccaagtaggaaaatatgctttacttgctcaaaaaatgactcgactcatcttaaaagagcatgaattagattatcttgatttcgggcgaaaaaacgaagcttctattgtcttacatcatcttgttgaaggcagagagttagactactattacctcaatcaatttttaaaccaataccacctatcagaaaaaactgactatcgtctactcacttttgaaatcaatagtcaaaaacaaaaattactcttaagtcaatctgaaatgtcactcttgaacttttttgataaacttgacactgctatttatacctttaattatcccaatcaatactggcttttactttctgaccagatgtttgactattattatccaaatatcctatcaaagtttgaatgcaaaaagggcctctataaagttggtatcggacaaaaatcatctttatcacttttaaaaagatcatatgaaacgtctatcttagccctgaaagctttaaaaggtcaacaaaaggtcaacctcgtcgacgaccttgatcttgaactgttattaacaagtattgattctaatattaaacaatatgtgctaaataaagcgcttgtaaacttatctgaaaatgataagatcttgcttaactcatattttaagcataatctatcattaaaagaatgtagtcaggaactttttatccataaaaatactgttcaatataggttaaataagatttatgaatcaacgcaactcaacccaagaaactttaaggatgcaactttattgtatctagcacttaaatcagaagatattaaccttcataaatta

SEQ ID NO: 5954 - protein, 364 aa, Streptococcus agalactiae
MKLRKQLAQQIVTSIKDVCQQDINFINTKGIIFASTNPKRVGEFHEIGLKVAQTGQMIEVTDQESYFGTQAGINIPFYYNCELLATIGISGNPNQVGKYALLAQKMTRLILKEHELDYLDFGRKNEASIVLHHLVEGRELDYYYLNQFLNQYHLSEKTDYRLLTFEINSQKQKLLLSQSEMSLLNFFDKLDTAIYTFNYPNQYWLLLSDQMFDYYYPNILSKFECKKGLYKVGIGQKSSLSLLKRSYETSILALKALKGQQKVNLVDDLDLELLLTSIDSNIKQYVLNKALVNLSENDKILLNSYFKHNLSLKECSQELFIHKNTVQYRLNKIYESTQLNPRNFKDATLLYLALKSEDINLHKL

SEQ ID NO: 5955 - DNA, 1140 bp, Streptococcus agalactiae
atgaaggtagtagtagctattgattctttgaaagggagtctttcttctttagaagctggcaatgctataaaggagtcaattaatgaagtaatcccaggggcggatgtggaagtacatccattagcagacgggggagaaggaactgttgaagctttgacgctaggtatgggggggacgatcgaaacaatccctgttaaggggcctattggagaaaaagtacatgcgagttatggtattattccacagcgtcagttagctattattgaaatggctgcagctgctggtattaccctaattgctactgaagagagaaatcctctccatacaaccacttatggagttggagaaatgataaaggatgctataagtaaaggctgtaggcactttattattggtattggaggtagtgctactaatgatggtggggcaggtatgctacaagctttgggatatgcattattagataaagataatcaagaaatcagtttgggagcacaaggattagcagatttaaaatctatctctactgataaggttattgaggaattgaaagaatgcgattttaaaattgcatgtgatgtaacaaatcctttatgtggtgctcaaggttgtagttcgatttttggaccgcaaaaaggtgctgatgaagatatgattacaaaaatggatacttggttaagtaattatgctaccttagctacttcagttagtgaaaaagcagatgcaactattgaaggaacaggtgcagcgggtgggcttggatttgcctttttagcctttacaaatgctaccttagaacctggtattgatattattctatcagaaattaacatagaaaaagcgatttctgtagctgatttagtagttactggtgaaggtcgtctggatgggcaaacggtgatgggaaaagctccaattggcgtagcaaaattagctaaaaaatatggtaagaaagtagtggcattctctggatctgtcaccgaagatgctatactttgtaatcaacatggtattgatgctttttttccaatcgtacgacgccttatcagtttagatgaggctatgtctaaagaggtagcttataaaaatatgaaagaaactgctactcaagtctttagattaatcaatttgtataatcat

SEQ ID NO: 5956 - protein, 380 aa, Streptococcus agalactiae
MKVVVAIDSLKGSLSSLEAGNAIKESINEVIPGADVEVHPLADGGEGTVEALTLGMGGTIETIPVKGPIGEKVHASYGIIPQRQLAIIEMAAAAGITLIATEERNPLHTTTYGVGEMIKDAISKGCRHFIIGIGGSATNDGGAGMLQALGYALLDKDNQEISLGAQGLADLKSISTDKVIEELKECDFKIACDVTNPLCGAQGCSSIFGPQKGADEDMITKMDTWLSNYATLATSVSEKADATIEGTGAAGGLGFAFLAFTNATLEPGIDIILSEINIEKAISVADLVVTGEGRLDGQTVMGKAPIGVAKLAKKYGKKVVAFSGSVTEDAILCNQHGIDAFFPIVRRLISLDEAMSKEVAYKNMKETATQVFRLINLYNH

SEQ ID NO: 5957 - DNA, 1254 bp, Streptococcus agalactiae
atggaagctacatttacaacaacaggggctttaataggattagcgcttgctattttactgattatcaaaaaagttcatcctgcctatagtctcattcttggagcattagttggaggtttgattggtggcggtgatttagttacaattgtcaatactatggtattaggtgcgcaagggatgatgtcatccatattacgcattttaacatcagggattttagcgggtgctttaattaaaaccggatcagctgaaaaaattgcagaaagtatcattaaaaaattaggacaagagcgagccatcacagctttagccatcgcaacaatgattatttgtgcagtaggtgtctttattgatattgcagttattacagttgctccgattgcattagcaataggtaaaaaagctaatctttctaaatctagcatactgttagcaatgattggtggtggtaaggctgggaatattatctcacccaatcctaatacaattgctgcttcagaagcatttaaggttgatttaacaagcttaatggtacaaaatattattcctgcaattgcagctttagtagttacgattatattagcaaagattgtttccaagaaaaataacgatatttcttatgatagtgaggagcaagtgggctctgatctgccagcattcttaccggctatttctggtccacttgtggttatctgcttattagctcttcgtcctttatttggaatcactattgatcccttgattgcactgccgttgggtggtctaattagtattttagcaacaggttacctaaaagaaacggtaccgtttgttgaatacggtttatcaaaagttgttggcgtttcaattcttttgattggaacaggtacactctcaggtattattaaagcatctaatctacaatttgatatgattcatctccttgaatttttaaatatgccgacctttatccttgccccactctcaggtatttttatgggagcagcaacagcatcaacgacttctggaacaactatcgcttcacaaacgtttgctgaaaccttgattaaatcgggggtaccggcggtttcgggtgcagctatgattcacgcaggtgcgactgttctggattcgctacctcatggatccttcttccatgcgacaggcggagctgtcaatatggctataaaagatcgtatgaaactaattagctatgaagctttgattggattaactagcacaatagttgctgtcgtttactattgtttctttggg

SEQ ID NO: 5958 - protein, 418 aa, Streptococcus agalactiae
MEATFTTTGALIGLALAILLIIKKVHPAYSLILGALVGGLIGGGDLVTIVNTMVLGAQGMMSSILRILTSGILAGALIKTGSAEKIAESIIKKLGQERAITALAIATMIICAVGVFIDIAVITVAPIALAIGKKANLSKSSILLAMIGGGKAGNIISPNPNTIAASEAFKVDLTSLMVQNIIPAIAALVVTIILAKIVSKKNNDISYDSEEQVGSDLPAFLPAISGPLVVICLLALRPLFGITIDPLIALPLGGLISILATGYLKETVPFVEYGLSKVVGVSILLIGTGTLSGIIKASNLQFDMIHLLEFLNMPTFILAPLSGIFMGAATASTTSGTTIASQTFAETLIKSGVPAVSGAAMIHAGATVLDSLPHGSFFHATGGAVNMAIKDRMKLISYEALIGLTSTIVAVVYYCFFG

SEQ ID NO: 5959 - DNA, 1062 bp, Streptococcus agalactiae
gtgaaacaaacaaagaaagaatttattttaggattaaccattattattacccttactttattaatcatgctgatttttttagtaatgtttaataagtccagtaactctaagttgaagcagacaaaagatagaagagtattatctacttcaaccacaaggacatccagtagctcacatgatcaaaaaattgtagaaaagtctcttgaaaaaaagaaaatggtcatggaacaggatatggaattgatgaatgcctataggctctattatgattatgcccatttgtccttgaaagaggttgttctggcctatatgtctgaatatggcattgaaaaaaatagtgttgctttttcttataaaaatttaaaaacaggacaaagggacgctatgaatgatactcaggctatgacagcagggagcacctataagttacctcttaacatgttggtagtagatgcagtggtcaagggcaagttgtccatggaagaacgctttgatattaccgagactgactatgaatatattggtgaacataataattatgttgctgctttctcgggggcaatgtctattgatgatatgcaaaaatactctttagtttattcagaaaatacacccgcctatgctttagctgagcgtattggtggcatggatagtgcttattcaaagtttggtcgttatggccaatctaaaggagacatcaaaaatatacaaaaaaacggtaataaagtgacaacagattactatattcaagtgctagactatctctggaaacatcgtaaaaagtatgatagtttaattacttatttagaagaagcttttccaacagattattatcgtgctttgataccatctgatgttgttgttgctcaaaagccagggtatgtccgtgaggcgttgaatgttggagcaattgtcaaagaagaagtgccttatattgttgctatttatactgcaggtttaggtggctctactcaggaagattcagaaattaatggagtgggactatatcagctagaacaattatgttttgttattaatcaatggcatcgtgttaatatgaat

SEQ ID NO: 5960 - protein, 354 aa, Streptococcus agalactiae
MKQTKKEFILGLTIIITLTLLIMLIFLVMFNKSSNSKLKQTKDRRVLSTSTTRTSSSSHDQKIVEKSLEKKKMVMEQDMELMNAYRLYYDYAHLSLKEVVLAYMSEYGIEKNSVAFSYKNLKTGQRDAMNDTQAMTAGSTYKLPLNMLVVDAVVKGKLSMEERFDITETDYEYIGEHNNYVAAFSGAMSIDDMQKYSLVYSENTPAYALAERIGGMDSAYSKFGRYGQSKGDIKNIQKNGNKVTTDYYIQVLDYLWKHRKKYDSLITYLEEAFPTDYYRALIPSDVVVAQKPGYVREALNVGAIVKEEVPYIVAIYTAGLGGSTQEDSEINGVGLYQLEQLCFVINQWHRVNMN

SEQ ID NO: 5961 - protein, 441 aa, Streptococcus agalactiae
ATGATAATGAGTAATCGAAGTATTTTAGACGAGCGATTATGTTTTACGGTTAGTGAAACACATCGACTTTTCAATAAATTTTACCAAAAAGCTTTGGATGAATTTCAATTGACTTATCTCCAATACGTTATCTTGTTAGTCCTTTGGGAAGAGGATCATCGGCATATGAAGGAACTTAGTTATGCACTATCTCTTAATTCGAATACCCTAACTCCAGTTTTAAAGCGTATGGAAAATCGTGGGTGGATTGTACGAGAAAAACCAAGAGATGATAAAAGGCAACTCATTATTCATCTAAGTAACAAAGGTATTGAGTCACAAGATGCCGTTGTCAATGCGGTGCAATCGTGCGGGTATTTTTTCTCAGAAATTAGTCCTGAATCTTATCAAAAAACTGTTTCTGCCCTTTCTTCACTTAATCAAGTTATAAAATCACATTTA

SEQ ID NO: 5962 - protein, 147 aa, Streptococcus agalactiae; identical to SEQ ID NO: 1506

SEQ ID NO: 5963 - protein, 1026 aa, Streptococcus agalactiae
ATGAATACAAACGATTTTGATTTTTATTTACCAGAAGAACTCATTGCCCAAACACCACTTGAAAAAAGAGACGCTTCTAAACTATTAGTCATCGATCATAAGAATAAGACGATGACAGATAGCCATTTCGATCATATCTTAGATGAACTCAAGCCTGGTGACGCTTTAGTAATGAATAACACACGTGTTCTTCCCGCTCGCCTTTATGGTGAAAAGCCAGATACACACGGCCATATAGAGTTATTACTTCTCAAAAATACAGAGGGCGATCAATGGGAAGTGCTTGCTAAACCCGCTAAACGCTTACGCGTAGGGACCAAAGTTTCATTTGGTGATGGTCGGTTAATAGCAACAGTCACAAAGGAATTAGAACATGGTGGGCGTATTGTAGAATTCTCATATGATGGTATTTTTCTAGAAGTCCTTGAAAGTTTGGGCGAAATGCCGCTTCCGCCATATATTCATGAAAAACTAGAAGATCGTGACCGCTATCAGACTGTGTATGCAAAAGAAAATGGTTCTGCTGCTGCACCAACAGCCGGTCTTCATTTTACAAAAGAACTATTGGAAAAAATTGAAACAAAAGGTGTGAAGCTTGTCTATTTGACGCTTCACGTTGGACTTGGAACTTTCCGTCCTGTTTCAGTTGATAATCTTGATGAACACGAAATGCATTCTGAGTTTTACCAATTATCTAAAGAAGCTGCTGATACTCTCAATGCAGTTAAAGAATCTGGTGGACGTATTGTAGCTGTTGGTACAACTTCTATTCGCACATTAGAGACAATTGGTTCTAAATTCAATGGTGAATTAAAAGCCGACTCAGGGTGGACAAATATTTTTATCAAGCCTGGTTATCAGTTCAAGGTTGTAGACGCTTTTTCAACCAACTTTCACTTACCAAAGTCTACTCTTGTCATGTTAGTATCAGCATTTGCTGGACGTGATTTTGTACTAGAAGCTTACAACCATGCAGTTGAAGAACGATATCGTTTCTTCAGCTTTGGTGATGCTATGTTTGTTAAG

SEQ ID NO: 5964 - protein, 342 aa, Streptococcus agalactiae
MNTNDFDFYLPEELIAQTPLEKRDASKLLVIDHKNKTMTDSHFDHILDELKPGDALVMNNTRVLPARLYGEKPDTHGHIELLLLKNTEGDQWEVLAKPAKRLRVGTKVSFGDGRLIATVTKELEHGGRIVEFSYDGIFLEVLESLGEMPLPPYIHEKLEDRDRYQTVYAKENGSAAAPTAGLHFTKELLEKIETKGVKLVYLTLHVGLGTFRPVSVDNLDEHEMHSEFYQLSKEAADTLNAVKESGGRIVAVGTTSIRTLETIGSKFNGELKADSGWTNIFIKPGYQFKVVDAFSTNFHLPKSTLVMLVSAFAGRDFVLEAYNHAVEERYRFFSFGDAMFVK

SEQ ID NO: 5965 - protein, 678 aa, Streptococcus agalactiae
ATGAAAGAAGCAAAAAATTTTTCCCAACAATTGAATATTTTAAGAGCTGGTGTTCTTGGTGCTAATGATGGTATCATCTCTGTAGCTGGTGTTGTTATTGGTGTTGCGAGTGCAACTCATAACCTTTGGATTATTTTTTTATCAGCAGCTTCCGCGATTTTAGCTGGTGCATTTTCTATGGCTGGCGGGGAGTATGTTAGTGTTTCTACTCAAAAAGATACTGAACAAGCAGCAGTTGCGCGTGAAGAGAAACTACTAGAAAATAATCCAGAACTTGCCAAAAAATCCTTAGTTGATATCTACTTAGCAAAAGGAGAAAGTCACGAACATGCTCAATGGCTAGTTGACAAGGCTTTTTCAAAGAATGCTATTGAGCATTTAGTTGAAGAAAAATATGGTATTGAGTTCGGTGAATATACAAGCCCCTGGCATGCTGCTATATCTAGTTTTATAGCTTTTGCCATCGGATCAATTTTTCCAACTATAACTATTCTGTTATTGCCATTTTCGGTACGAATTGTAGGAACGGTAATAATTGTTATTGTTTCACTATTATCAACTGGTTATGTAAGTGCTAAGTTAGGTCAAGCCCCTACAGTACCTGCCATGCGTCGAAATGTGATGATTGGTTGTTTGACAATGTTGGCAACCTATGTCATTGGACAATTATTTTCAATA

SEQ ID NO: 5966 - protein, 226 aa, Streptococcus agalactiae
MKEAKNFSQQLNILRAGVLGANDGIISVAGVVIGVASATHNLWIIFLSAASAILAGAFSMAGGEYVSVSTQKDTEQAAVAREEKLLENNPELAKKSLVDIYLAKGESHEHAQWLVDKAFSKNAIEHLVEEKYGIEFGEYTSPWHAAISSFIAFAIGSIFPTITILLLPFSVRIVGTVIIVIVSLLSTGYVSAKLGQAPTVPAMRRNVMIGCLTMLATYVIGQLFSI

SEQ ID NO: 5967 - protein, 699 aa, Streptococcus agalactiae
ATGAGAGTTATTACAGTTAAGAACGACATTGAGGGGGGAAAAATTGCATTTACTCTTTTAGAAGAGAAAATGAAAGCTGGTGCTCAAACTTTAGGATTGGCAACAGGAAGTAGCCCAATCACCTTTTACGAAGAGATTGTAAAAAGTAATCTTGATTTTTCAAATATGGTTTCTATTAACCTTGATGAATATGTTGGAATTGCCGCAAGTAATGATCAAAGTTACTCTTATTTTATGCATAAACATCTTTTTGATGCTAAACCTTTCAAGGAAAATAACCTTCCAAACGGCTTGGCTAAAGATTTGAAAGAAGAAATAAAACGATACGATGCTGTCATAAATGCTAATCCAATTGATTTTCAAATCCTTGGAATTGGTCGTAACGGTCATATTGGTTTTAATGAACCAGGTACACCTTTTGATATTACAACACATGTGGTTGATTTAGCTCCAAGTACAATTGAAGCTAATAGTCGTTTCTTTAATAGTATTGATGATGTACCAAAGCAAGCCTTATCAATGGGTATAGGCTCTATTATGAAATCAAAAACAATCGTATTAGTGGCGTATGGTATTGAAAAAGCAGAAGCGATTGCAAGTATGATTAAAGGACCTATCACAGAAGATATGCCAGCAAGTATCCTCCAAAAACATGATGATGTTGTGATTATTGTGGATGAAGCAGCGGCATCAAAGTTG

SEQ ID NO: 5968 - protein, 233 aa, Streptococcus agalactiae
MRVITVKNDIEGGKIAFTLLEEKMKAGAQTLGLATGSSPITFYEEIVKSNLDFSNMVSINLDEYVGIAASNDQSYSYFMHKHLFDAKPFKENNLPNGLAKDLKEEIKRYDAVINANPIDFQILGIGRNGHIGFNEPGTPFDITTHVVDLAPSTIEANSRFFNSIDDVPKQALSMGIGSIMKSKTIVLVAYGIEKAEAIASMIKGPITEDMPASILQKHDDVVIIVDEAAASKL

SEQ ID NO: 5969 - protein, 954 aa, Streptococcus agalactiae
ATGGGACTTTTAGTAGATGGCAAATGGGTTGATCAATGGTATGATACTGCATCAACTGGTGGTAAATTCGTCCGAACCGTTACACAATTCCGTCATTGGGTTACTAAAGATGGTTCAGCAGGGCCTAGTGGGGATGCAGGTTTTAAAGCAGAATCTGGACGATATCATCTCTACGTTTCACTAGCCTGCCCTTGGGCATCACGTGTATTAATCATGAGAAAGCTTAAAAATCTAGAATCTCATATCTCTATCTCCATTGTTAACCCTTTAATGTTGGAGAATGGTTGGACTTTTCAAGAATATAAAGGCGTTATTCCTGATATGATTAACCAAAGCCAATACCTTTACCAAATCTATCAAGCAAGTCAAAGTGATTATACAGGACGCGTGACAGTCCCTGTTCTTTGGGATAAAAAATGCCATACAATCGTTAACAATGAATCATCTGAAATTATGCGTATGTTAAATACTGCATTTAATCATATTACTGGAAATACTGACGATTACTATCCCGATTCCTTACAAGGACAAATTGACGAAATGAATAATTTTATTTATCCAAAAATAAATAATGGTGTCTATAAAGCTGGTTTTGCTACTTCTCAGAACGTTTATCAAAAGGAAGTTGAAACCTTATTCACAGCTTTAGATCAGTTAGAAAAACACTTATCTGATAACCATTATCTTGTTGGAGAACAATTTACCGAAGCTGATATTCGCCTTTTCACAACTTTAGTTCGCTTTGACACCGTTTATTATGGTCATTTTAAATGTAATTTAAAAGCGCTACATGATTACCCACATTTATGGCATTATACAAAACGTATTTACAACCTACCTGGAATTGCTGAGACAGTTAATTTTGATCATATCAAAAAACACTATTACGGTAGCCATAAAACCATTAACCCTACTGGTATTATTCCAGCTGGACCTAACTTAGACTGGACAATT

SEQ ID NO: 5970 - protein, 318 aa, Streptococcus agalactiae
MGLLVDGKWVDQWYDTASTGGKFVRTVTQFRHWVTKDGSAGPSGDAGFKAESGRYHLYVSLACPWASRVLIMRKLKNLESHISISIVNPLMLENGWTFQEYKGVIPDMINQSQYLYQIYQASQSDYTGRVTVPVLWDKKCHTIVNNESSEIMRMLNTAFNHITGNTDDYYPDSLQGQIDEMNNFIYPKINNGVYKAGFATSQNVYQKEVETLFTALDQLEKHLSDNHYLVGEQFTEADIRLFTTLVRFDTVYYGHFKCNLKALHDYPHLWHYTKRIYNLPGIAETVNFDHIKKHYYGSHKTINPTGIIPAGPNLDWTI

SEQ ID NO: 5971 - DNA, 222 bp, Streptococcus agalactiae
ttgccatctactaaaagtcccatgataatctcctttgtttttctattactaattagtagtataaagattttaaaaggaattagacttccggctgcaggtgtcgttatggaagctgtagtagccaccgtcctggtgacagaagtgctagaaaaattttcttcagacaacatgtatgaactaaaagaagctgtaaaactatatcgcaattatgttaatcatttt

SEQ ID NO: 5972 - protein, 74 aa, Streptococcus agalactiae
MPSTKSPMIISFVFLLLISSIKILKGIRLPAAGVVMEAVVATVLVTEVLEKFSSDNMYELKEAVKLYRNYVNHF

SEQ ID NO: 5973 - DNA, 285 bp, Streptococcus agalactiae
  misc_feature 272, 273, 274, 275, 276: n = A,T,C or G
atggctaatgtatatgatttagcaaatgaattagaacgtgctgttcgtgctttaccagaataccaagcagttttaactgcaaaagcagctattgaaaatgatgcagatgcacaagtgctttggcaagactttttggctgcccaatcaaaagttcaagaaatgatgcaatctggccaaatgccaagtcaagaagaacaagatgaaatgtctaaacttggggaaaaaattgaatccaatgaccttttaaaagtttattttgaccaccaacaacnnnnnttaattaat

SEQ ID NO: 5974 - protein, 95 aa, Streptococcus agalactiae
  VARIANT 91, 92: Xaa = Any Amino Acid
MANVYDLANELERAVRALPEYQAVLTAKAAIENDADAQVLWQDFLAAQSKVQEMMQSGQMPSQEEQDEMSKLGEKIESNDLLKVYFDHQQXXLIN

SEQ ID NO: 5975 - DNA, 717 bp, Streptococcus agalactiae
  misc_feature 704, 705, 706, 707, 708: n = A,T,C or G
atgactatcaaacgtattttttgtgacatggatggtacactattaaatagtgaaggacaagtgagtaaaagtaacgctaccttaatacgtgaggcagcgattccagtaactttagtgtctgctagggcacctatggaaatgaaggatgccgtagatgcacttcaattaggaggagtccaagttgcttttaatggaggattgatttatagaataggagataataatcaagttctacctattcatacacaaatcattaaaaaaagcacagtaaaacaattgctaagaggaatacggtttcattttcctcaagttagtttatcttattacgatcttaataactggtattgtgataaaatagatgaaggaatccgatacgaacatagtttaactcaacaatgcccaacgtttattcataatgaggatcagtttttagaaggtcacacaaatacttttaaaattatgatgattactttcgatgaagcaaatatgctagaattagaaaaatatcttcaaagtttggagttaccagaaatcactattcaacgttcaggtaaagcgtatcttgaaattacacatctcttagccaaaaaatctaaaggaattgcttacatccttcaaaaagagcagttagctagagaagaaacggctgcatttggagatggacataatgatttgcctatgcttgaaatggtaggttaccctannnnnttaattaat

SEQ ID NO: 5976 - protein, 239 aa, Streptococcus agalactiae
  VARIANT 235, 236: Xaa = Any Amino Acid
MTIKRIFCDMDGTLLNSEGQVSKSNATLIREAAIPVTLVSARAPMEMKDAVDALQLGGVQVAFNGGLIYRIGDNNQVLPIHTQIIKKSTVKQLLRGIRFHFPQVSLSYYDLNNWYCDKIDEGIRYEHSLTQQCPTFIHNEDQFLEGHTNTFKIMMITFDEANMLELEKYLQSLELPEITIQRSGKAYLEITHLLAKKSKGIAYILQKEQLAREETAAFGDGHNDLPMLEMVGYPXXLIN

SEQ ID NO: 5977 - DNA, 651 bp, Streptococcus agalactiae
ttggtttaccttctggttattcctgttttctttttcttttggaaaaatgttccagaggttgaaaatcaaacacatacccttaaagctagtacaacatttgatactaaagcggctttgttgatgttcatcacgttcttagtaggtattgcttatataggagcaactgtcaaaattccaaccttactagtgacaaaatatcactacgcgacgagcttctctagtaatatgttaactctccttgcttttagtggtattttagttggatctatatttggaaaattagttaaagtattccaagagaagacgctattaatcatgattctagctatgggaataggtaatgtgctatttgctttagctaataatcagatcatttttatcgtagctagtattttaataggagctagttttgttggcaccatgtcttctgtattcttttatatttcaaaaaactatgcaaaagaacataataactttatcacaagccttgccttaacagctggtaatataggagttattttgacaccgcttattttaacgaaacttccaagccagctacatctggaaccttttatgacaccatttttaataacaagtgggctgatggtaattaatgtctttgtttacctagttttaatgtcaaaaaataaa

SEQ ID NO: 5978 - protein, 217 aa, Streptococcus agalactiae
MVYLLVIPVFFFFWKNVPEVENQTHTLKASTTFDTKAALLMFITFLVGIAYIGATVKIPTLLVTKYHYATSFSSNMLTLLAFSGILVGSIFGKLVKVFQEKTLLIMILAMGIGNVLFALANNQIIFIVASILIGASFVGTMSSVFFYISKNYAKEHNNFITSLALTAGNIGVILTPLILTKLPSQLHLEPFMTPFLITSGLMVINVFVYLVLMSKNK

SEQ ID NO: 5979 - DNA, 945 bp, Streptococcus agalactiae
atgttaattgctaaagacagacaaggaaatttaattaatctactcgagtctcatccgggaaagggacagtatttttgtccaacttgttgttcagctgtaaggttaaaagcaggtcgaatcatgagaagacactttgcacatattagtctaaaaaattgtcagttttatcatgaaaatgagtctaacgagcacttgcaattaaaagcaaagttatatatgagtttaagtagagagaatgaaactatgctcgagcatcatttgccagaaattaatcagattgcagatttatttgtgaatgagacattggctttagaagttcagtgtagccgactatcagagcagcgactcagggagcgaacaaaagcatatctacaggcagactttcaagtgagatggttactaggggaaaaactctggttaaaggatcgtttaacaaatctacataaacaatttttacaattttctcaaagtatcggatttcatatttgggagttagatttgaggttagaagtactgaggctaaaatatttgatttacgaagatttacgcggacatgtctattacttaagtaaaacttgccctcttagtggagacgttctagcatttttgaagtggccataccaatcaaaaaatctaaatttttataaggttaaacaagacagaaatatcagagattatgtgcgtcagcagttacgctatggcaatcaattttggttacgaaaacaagaaaaggcctacctttctggtcagaatctattaacccaagagctaatgatgttcttccctcaaatacagccaccacgtgtagatactgatttttgtcaaataacaaattctctaacatcgttttatcagaattttacaaattattatcaaaaaaataagaataacttggaccaaacactttatccccctgtattttatgataaaatagtcactaagaat

SEQ ID NO: 5980 - protein, 315 aa, Streptococcus agalactiae
MLIAKDRQGNLINLLESHPGKGQYFCPTCCSAVRLKAGRIMRRHFAHISLKNCQFYHENESNEHLQLKAKLYMSLSRENETMLEHHLPEINQIADLFVNETLALEVQCSRLSEQRLRERTKAYLQADFQVRWLLGEKLWLKDRLTNLHKQFLQFSQSIGFHIWELDLRLEVLRLKYLIYEDLRGHVYYLSKTCPLSGDVLAFLKWPYQSKNLNFYKVKQDRNIRDYVRQQLRYGNQFWLRKQEKAYLSGQNLLTQELMMFFPQIQPPRVDTDFCQITNSLTSFYQNFTNYYQKNKNNLDQTLYPPVFYDKIVTKN

SEQ ID NO: 5981 - protein, 1803 aa, Streptococcus agalactiae
ATGTCAGACAATCGCTCACATATTGAAGAAAAATACCAATGGGATTTAACTACTGTCTTTGCGACTGATGAGTTATGGGAAACTGAAGTGGTAGAGCTTACTCAAGCCATCGATAACGCAAAGGGTTTTTCAGGTCATCTGTTGGACTCAAGCCAATCTTTATTGGAGATCACGGAGGTTGAACTAGATTTATCTCGCCGTTTAGAAAAAGTTTATGTCTATGCTTCAATGAAAAATGACCAAGACACCACTGTTGCGAAATATCAAGAATTTCAAGCGAAAGCGACAGCGCTCTATGCAAAATTTAGTGAAACATTTTCGTTTTACGAGCCAGAACTATTGCAACTTTCAGAGTCTGATTACCAGTCATTCCTTTTAGAAATGCCTGACTTGCAAAAATATGATCATTTCTTTGAGAAAATATTTGCAAATAAACCTCATGTCTTATCTCAAAACGAAGAAGAATTGTTAGCTGGTGCTAGTGAGATTTTTGGAGCAGCTGGTGAGACATTTGAAATCCTTGATAATGCAGATATGGTCTTCCCAGTTGTAAAAAATGCAAAAGGTGAGGAAGTTGAGCTTACACATGGTAATTTCATTTCCCTTATGGAATCTAGCGATAGGACGGTTCGAAAAGAAGCATATCAAGCTATGTATAGCACATATGAACAATTCCAGCATACTTACGCTAAAACATTACAAACAAATGTGAAATCTCAAAATTTTAAAGCTCGTGTGCATCATTATCAATCAGCACGCCAATCAGCTCTATCTGCCAATTTTATTCCAGAAGAGGTCTACGAAACTCTAATTAAGACAGTTAATCATCATTTACCGCTCTTACATCGTTATATGAAGTTGCGTCAAAAAGTTCTTGGGCTAGATGATTTGAAGATGTATGACGTATATACACCCCTTTCTCAAATGGATATGAGTTTTACTTATGATGAAGCTCTAAAAAAATCAGAGGAGGTTCTGGCTATTTTTGGCGAAGTATATTCTGAACGTGTTCATCGTGCTTTTACTGAACGTTGGATTGATGTCCATGTTAACAAAGGAAAGAGGTCAGGCGCTTATTCAGGTGGATCTTATGACACTAATGCTTTCATGCTTCTTAACTGGCAAGATACTTTAGACAATCTTTATACGCTGGTGCATGAAACTGGACATAGTCTACACTCGACGTTTACTCGTGAAAATCAACCCTATGTTTATGGTGATTATTCTATTTTCCTAGCTGAAATTGCATCAACAACAAATGAAAATATATTAACAGAAACCCTTTTGAAAGAAGTTAAAGATGATAAAAATCGCTTTGCAATTCTCAATCATTATTTGGACGGTTTCAAAGGAACAATTTTTAGACAAACACAGTTCGCTGAATTCGAACATGCCATTCATGTAGCTGATCAGGAGGGGCAAGTACTAACTAGCGAATACTTAAACAACCTTTACGCTGAGCTTAATGAAAAATATTATGGTTTGACTAAAGAAGATAATCATTTTATTCAATATGAATGGGCAAGAATTCCACACTTTTACTACAATTATTATGTTTTCCAATATGCAACCGGCTTCGCAGCAGCAAATTATTTAGCAGAGCGTATTGTAAACGGTAATCCGGAGGATAAAGAGGCCTACCTAAATTACCTTAAAGCTGGGAATTCAGATTACCCTCTAAACGTCATTGCTAAAGCCGGTGTTGATATGACTAGTGCAGACTATCTGGATGCAGCTTTTAGAGTATTTGAAGAGCGTTTAGTGGAACTGGAAAATCTTGTAGCAAAAGGCGTCCATAATGAT

SEQ ID NO: 5982 - protein, 601 aa, Streptococcus agalactiae
MSDNRSHIEEKYQWDLTTVFATDELWETEVVELTQAIDNAKGFSGHLLDSSQSLLEITEVELDLSRRLEKVYVYASMKNDQDTTVAKYQEFQAKATALYAKFSETFSFYEPELLQLSESDYQSFLLEMPDLQKYDHFFEKIFANKPHVLSQNEEELLAGASEIFGAAGETFEILDNADMVFPVVKNAKGEEVELTHGNFISLMESSDRTVRKEAYQAMYSTYEQFQHTYAKTLQTNVKSQNFKARVHHYQSARQSALSANFIPEEVYETLIKTVNHHLPLLHRYMKLRQKVLGLDDLKMYDVYTPLSQMDMSFTYDEALKKSEEVLAIFGEVYSERVHRAFTERWIDVHVNKGKRSGAYSGGSYDTNAFMLLNWQDTLDNLYTLVHETGHSLHSTFTRENQPYVYGDYSIFLAEIASTTNENILTETLLKEVKDDKNRFAILNHYLDGFKGTIFRQTQFAEFEHAIHVADQEGQVLTSEYLNNLYAELNEKYYGLTKEDNHFIQYEWARIPHFYYNYYVFQYATGFAAANYLAERIVNGNPEDKEAYLNYLKAGNSDYPLNVIAKAGVDMTSADYLDAAFRVFEERLVELENLVAKGVHND

SEQ ID NO: 5983 - protein, 620 aa, Streptococcus agalactiae
ATGAAAAAGCTTACTTTTATTTGGGATTTAGATGGGACATTAATAGATTCGTATGTACCAATTATGGAAGCTCTTGAAGAAACCTATCGTCATTTTGGCTTAATATTTGATAAAGAATTAATCCATGAATATATTTTACAGGAATCAGTGGGGCAATTATTGGTAAACCTTTCAGAGGAAGAGCAAATACCTCATGAAAAACTGAAAGCATATTTTACAAAAGAACAAGAAAGTCGAGATTCTAAAATACATTTAATGCCATATGCAAAAGAGATTTTAGAATGGACCAAAGAACAAGATATCCCCAATTTTATGTATACACATAAAGGAGCAAGTACGCATTCAGTGTTGGAAACCTTGCAGATCTCTCATTATTTTGATGAAATTTTAACTGGTGTTTCTGGATTCGAGCGAAAACCACATCCACAAGGGATTAATTATTTAGTTAAACGATATTCTTTAGATAAATCAATGACTTATTACATAGGAGATCGTCCCCTAGATTTGGAGGTTGCTCAAAATGCTGGTATAAAATCATAAACTTAAGGTTAGAGATTCCAAAGAAACTATAATATTTCAAGTCTCAAGGATATAATATCACTTGATTCACTCGTTTGGAT

SEQ ID NO: 5984 - protein, 208 aa, Streptococcus agalactiae
MKKLTFIWDLDGTLIDSYVPIMEALEETYRHFGLIFDKELIHEYILQESVGQLLVNLSEEEQIPHEKLKAYFTKEQESRDSKIHLMPYAKEILEWTKEQDIPNFMYTHKGASTHSVLETLQISHYFDEILTGVSGFERKPHPQGINYLVKRYSLDKSMTYYIGDRPLDLEVAQNAGIKSINLRLENSKENYNISSLKDIISLDFTRLD

SEQ ID NO: 5985 - protein, 669 aa, Streptococcus agalactiae
ATGCGCCGTCCAGTAGTTAAAGAAGAAATTGTTCAATATATGCGTCAGCACCAAAAACAAAATAATGGCTGTTTAGCAGAGTTAGAAGCATTTGCTAAACAGGAAAATATCCCTATTATACCTCATGAAACAGCGACTTATTTTCGTTTTTTGATGCAAACATTACAACCTAAGCACATTTTAGAAATTGGAACAGCCATTGGTTTTTCGGCCCTTTTGATGGCAGAAAATGCTCCTGAAGCAAAGATAACAACGATCGATCGTAATGAAGAGATGATTGTCTTGGCTAAGGAAAACTTTGCAAAATATGATAATCACAATCAGATAACCCTTTTGGAAGGCGATGCTGTGGATGTGTTACAAACATTGGATAAATCTTACGATTTTGTATTTATGGATTCTGCTAAGTCTAAATATATCGTTTTTTTACCTCAAGTATTAAAACATTTAGACGTTGGAGGAGTAGTTGTTTTAGATGATATTTTCCAAGGTGGAGATATTGCAAAACCTATCGATGAAGTGAGAAGAGGTCAGCGAACTATCTACCGAGGTCTGCAACGTTTATTTGACTCGACTTTGCGACATCCTGATTTAACTGCTACTTTGGTACCTTTGGGAGATGGTTTATTGATGATTCGTAAAAATGCAGAGCATATTGTACTAGAAGAT

SEQ ID NO: 5986 - protein, 223 aa, Streptococcus agalactiae
MRRPVVKEEIVQYMRQHQKQNNGCLAELEAFAKQENIPIIPHETATYFRFLMQTLQPKHILEIGTAIGFSALLMAENAPEAKITTIDRNEEMIVLAKENFAKYDNHNQITLLEGDAVDVLQTLDKSYDFVFMDSAKSKYIVFLPQVLKHLDVGGVVVLDDIFQGGDIAKPIDEVRRGQRTIYRGLQRLFDSTLRHPDLTATLVPLGDGLLMIRKNAEHIVLED

SEQ ID NO: 5987 - protein, 927 aa, Streptococcus agalactiae
ATGAAAACAAGATCAAAACTTGCAGCAGGCTTTTTGACACTTATGTCAGTTGCCACATTAGCTGCCTGCTCAGGTAAAACATCAAATGGAACAAATGTTGTTACAATGAAGGGCGACACTATCACAGTCTCTGATTTTTATGATCAAGTAAAAACATCAAAAGCTGCACAACAATCAATGCTTACATTGATCCTCTCACGTGTTTTTGATACACAGTATGGTGATAAAGTTTCAGATAAAAAAGTATCAGAAGCTTATAATAAGACAGCTAAAGGCTATGGTAATTCATTTTCAAGCGCACTTTCACAAGCAGGTTTGACTCCAGAAGGTTACAAACAACAAATTCGCACAACTATGCTTGTGGAATATGCTGTAAAAGAAGCAGCTAAGAAAGAATTAACAGAAGCAAACTATAAAGAAGCATATAAAAACTATACTCCTGAAACTTCTGTACAAGTAATCAAATTGGATGCAGAAGATAAAGCTAAATCTGTCCTTAAAGATGTAAAGGCTGATGGAGCTGATTTTGCAAAGATTGCAAAAGAAAAAACAACAGCTACTGATAAAAAAGTTGAGTATAAATTTGATTCTGCAGGGACAAGCCTCCCTAAAGAAGTTATGTCAGCAGCCTTTAAGCTAGATAAAAATGGTGTTTCAGATGTGGTTTCAACGGTTGATTCAACAACTTATAAAACAAGTTACTACATCATTAAAGTAACTGATAAGACAGAGAAAAAATCTGATTGGAAATCTTACAAAAATCGCTTAAAAGAAGTTATTCTTAAGGATAAAACAAGCGATAGATCCTTCCAAAATAAAGTGATTTCAAAAGCCTTAGAAAAAGCTAACGTTAAGATTAAAGATAAAGCATTTGCAGGCATCTTATCACAATATGCTACAACAAGTGGTTCATCATCACTTAAAAAA

SEQ ID NO: 5988 - protein, 309 aa, Streptococcus agalactiae
MKTRSKLAAGFLTLMSVATLAACSGKTSNGTNVVTMKGDTITVSDFYDQVKTSKAAQQSMLTLILSRVFDTQYGDKVSDKKVSEAYNKTAKGYGNSFSSALSQAGLTPEGYKQQIRTTMLVEYAVKEAAKKELTEANYKEAYKNYTPETSVQVIKLDAEDKAKSVLKDVKADGADFAKIAKEKTTATDKKVEYKFDSAGTSLPKEVMSAAFKLDKNGVSDVVSTVDSTTYKTSYYIIKVTDKTEKKSDWKSYKNRLKEVILKDKTSDRSFQNKVISKALEKANVKIKDKAFAGILSQYATTSGSSSLKK

SEQ ID NO: 5989 - protein, 483 aa, Streptococcus agalactiae
ATGGCTACTTTTCAAATTAAAGAAAAAATGTTTTCTCTAGGCGGTAAATTTACTATTACAGACCAGACTGGGCTTCCCTGTTATCACGTTGAAGGAAGTTTGTTCCCTCTACCTAAGACTTTTAAAGTCTTTGACGAAGAGGGGCATCTGATTAGTCAGATTGAGAAGAAGGTTTTAAGTTTTTTACCAAAGTTTAATGTGACATTAGCCAATGGGAATCATTTCACGATTAAGAAAGATTTCTCATTTTTGAAACCTCATTACACCATTGAAGACCTTGATATGGAAGTTAAGGGAAATTTTTGGGATATGGATTTCCAACTCTTAAAAGACAATCAAGTTATAGCAAACATATCTCAACAGTGGTTTCGTATGACTTCAACTTATCAGGTAGAAGTTTACAATGAAACTTACAACGATTTGACAATTTCGCTTGTCATAGCGATCGACTATGTCAAAGAGTTAGAAAAAAATGCATCAAAC

SEQ ID NO: 5990 - protein, 161 aa, Streptococcus agalactiae
MATFQIKEKMFSLGGKFTITDQTGLPCYHVEGSLFPLPKTFKVFDEEGHLISQIEKKVLSFLPKFNVTLANGNHFTIKKDFSFLKPHYTIEDLDMEVKGNFWDMDFQLLKDNQVIANISQQWFRMTSTYQVEVYNETYNDLTISLVIAIDYVKELEKNASN

SEQ ID NO: 5991 - DNA, 2616 bp, Streptococcus agalactiae
atgaaagaattatcgtctgcacaaatccgccaaatgtggttggatttctggaaatccaaaggacattccgttgagccttcagctaacttggttcctgttaatgacccaacgcttctttggatcaactcaggtgttgcaaccttgaaaaaatattttgatggttcagtgattccagaaaatccacgtattaccaatgcacaaaaatcaattcgtactaatgatattgaaaatgttggtaaaacagcacgtcaccatactatgtttgaaatgcttggtaacttctcaattggagactatttccgtgatgaagctattgagtggggatttgaactcttgacaagtcctgaatggtttgacttccctaaagacaagctctacatgacttattacccagatgacaaggattcatataaccgttggattgcttgtggcgttgaaccaagtcacttggtgccaatcgaggataacttctggraaatcggtgctggtccttcaggtccagatactgagattttcttcgaccgtggtgaagattttgatccagacaatatcggacttcgtcttttggctgaagatatcgaaaacgatcgttacatcgaaatctggaacatcgttctctcacaattcaatgctgacccagccgtaccacgttcagaatacaaagaattgccaaacmaaaacattgatacgggtgctggtcttgaacgtcttgcagctgttatgcaaggggcaaaaacaaactttgaaactgaccttttcatgcctatcatccgtgaagtagagaaattgtcaggtaaaacttacgatccagatggcgacaacatgagtttcaaggttatcgctgaccacatccgtgcgctttcatttgctatcggtgatggtgcgcttcctggaaatgaaggtcgtggttacgttcttcgtcgtcttcttcgtcgtgcggttatgcacggtcgccgtcttggcatcaacgaaactttcctttacaaattggttccgactgttggacaaatcatggaaagctactacccagaagtgcttgaaaaacgtgattttatcgagaaaatcgttaaacgtgaggaagaaacatttgctcgtactatcgatgcaggtagcggtcacttggattcattgcttgcgcagcttaaagctgaaggtaaagatacacttgaaggtaaagatatcttcaaactttatgatacttatggattcccagtcgaattgacagaggaattggcagaagatgcaggctacaagattgaccacgaaggctttaagtcagccatgaaagaacaacaagaccgtgcgcgtgcagctgttgttaagggtggctcaatgggtatgcaaaatgaaactctagctggtatcgttgaagaatcacgcttcgaatacgacacatatagtcttgaatcaagtctttcagttatcattgctgataatgaacgtactgaagctgtttcagaaggccaagcccttcttgtctttgctcaaacaccattctatgctgaaatgggtggacaggttgctgacacaggtagaatcaaaaatgataagggtgacacagttgctgaggttgttgatgtccaaaaagcaccaaatggtcaacctctacacactgtaaacgttttggcatcactttcagttggaacaaactacacacttgaaatcaacaaagagcgtcgtttggctgttgagaaaaaccacacagcaactcacttgctccatgcagcccttcacaatgttatcggtgaacacgcaactcaggctggttcattgaacgaagaagaattcttgcgctttgattttactcactttgaagcagtaagcaatgaggaacttcgtcacattgaacaagaagttaatgagcaaatttggaacgctcttacaatcacaacgactgaaactgacgttgaaaccgcaaaagagatgggagcaatggcactttttggtgagaaatatggtaaagtggttcgtgtggttcaaattggtaattattctgttgaactttgcggtggaactcacttaaataattcttcagaaatcggtctctttaagattgtcaaagaagaaggtattggttcaggcactcgtcgtattattgcagttactggtagacaagcttttgaagcttatcgtaaccaagaggatgcactaaaagagatcgctgctactgtaaaagctccgcaattgaaagatgcagcagctaaagtacaagctcttagcgactcacttcgtgatcttcaaaaagaaaatgtagagcttaaagaaaaagcagcagctgcagcagctggtgatgtttttaaagatattcaagaagctaagggcgtgcgcttcattgctagtcaagttgatgttgcagacgcaggtgcacttcgtacatttgctgataactggaaacaaaaagactactctgatgtgcttgttctcgtagcagctattggtgagaaggttaatgtccttgttgcaagcaaaactaaagatgtccacgctggtaacatgatcaaaggattggcaccaattgtagcaggtcgtggtggtggtaaaccagacatggctatggcaggtggtagcgatgcaagtaaaattgcagagttgctagcagcagttgcagaaaattta

SEQ ID NO: 5992 - protein, 872 aa, Streptococcus agalactiae
  VARIANT 159, 226: Xaa = Any Amino Acid
MKELSSAQIRQMWLDFWKSKGHSVEPSANLVPVNDPTLLWINSGVATLKKYFDGSVIPENPRITNAQKSIRTNDIENVGKTARHHTMFEMLGNFSIGDYFRDEAIEWGFELLTSPEWFDFPKDKLYMTYYPDDKDSYNRWIACGVEPSHLVPIEDNFWXIGAGPSGPDTEIFFDRGEDFDPDNIGLRLLAEDIENDRYIEIWNIVLSQFNADPAVPRSEYKELPNXNIDTGAGLERLAAVMQGAKTNFETDLFMPIIREVEKLSGKTYDPDGDNMSFKVIADHIRALSFAIGDGALPGNEGRGYVLRRLLRRAVMHGRRLGINETFLYKLVPTVGQIMESYYPEVLEKRDFIEKIVKREEETFARTIDAGSGHLDSLLAQLKAEGKDTLEGKDIFKLYDTYGFPVELTEELAEDAGYKIDHEGFKSAMKEQQDRARAAVVKGGSMGMQNETLAGIVEESRFEYDTYSLESSLSVIIADNERTEAVSEGQALLVFAQTPFYAEMGGQVADTGRIKNDKGDTVAEVVDVQKAPNGQPLHTVNVLASLSVGTNYTLEINKERRLAVEKNHTATHLLHAALHNVIGEHATQAGSLNEEEFLRFDFTHFEAVSNEELRHIEQEVNEQIWNALTITTTETDVETAKEMGAMALFGEKYGKVVRVVQIGNYSVELCGGTHLNNSSEIGLFKIVKEEGIGSGTRRIIAVTGRQAFEAYRNQEDALKEIAATVKAPQLKDAAAKVQALSDSLRDLQKENVELKEKAAAAAAGDVFKDIQEAKGVRFIASQVDVADAGALRTFADNWKQKDYSDVLVLVAAIGEKVNVLVASKTKDVHAGNMIKGLAPIVAGRGGGKPDMAMAGGSDASKIAELLAAVAENL

SEQ ID NO: 5993 - DNA, 714 bp, Streptococcus agalactiae
atggttggtttaggaacagttatcaatgttattcttattatagttggaggctttgtaggtttatttttgaaaaattttttgaaagaatcacttcaaaagagccttatgcaagccatgggagttgcagttttatttatttcgatatcaggtgttttggagaaaatgatgttagtcgaaaagtcacatctcatctctaatcatacaaatatgatgattattactcttgctctaggtacggtacttggagagttgctatcactagattcgtatattgataaatttgggaactatcttaagcaaaaaacaggaagtggtaacgatattaaatttgtggaggcattcgtcacctcaacttgtaccgtttgtattggagcaatggccgttgttggtagcattcaagatggtatagcagcagatcattcgattttatttgctaagggaatgttagacatgattattattgcaattatgacagtgtctttagggaaaggagctctattttctgcacttcctgtcgctttactacaaggtagccttacgattgttgcttttttcatggggagcctacttaatccatcatctttagattaccttaacttagtaggaaatatgcttatattctgtgtcggtgttaatttactctttaacctaaatattaaagttatcaatatgttgccagcaattattttagctatattatggggaagttttata

SEQ ID NO: 5994 - protein, 238 aa, Streptococcus agalactiae; identical to SEQ ID NO: 1524

SEQ ID NO: 5995 - DNA, 816 bp, Streptococcus agalactiae
atgaatctattattttctattgatgatatgtacgtagatcattttaaagtgatgctttattcgcttgtccgacaaaccaagaatcgtaagttagagatatatgtcttacaaaaaacattactcaagcgtcatacagaacttattcaatatactcaaaatttagaagttggctatcatccaataattgtaggtaccgaagtatttgctcaggcacctacaactgatcgctatccagatacaatatattatcgacttttggctcataaatttttacctgagaccttagataggatactttatttagatgcagatatgctttgcttaaatgatttctcaagtttatatgatatggagttaggtgatcaactatatgcagcggcaagtcataatactgatggtaagtttctagattatgtcaataaattacggttaaaaaatgtagagctagaatcctcttatttcaatacaggggtactcttgatgaacttgcctgctatacgaaaagttgttcatcaacaaactatcttagattacatgatgcaaaaccgtggtcgtctaatcttaccagatcaggatatcttaaatggcttatacgctaatttggttaaaccaatacctgatgaaatttataattatgatgctaggtatagtcttatttatcaattaaaaagtcgcaatgaatgggatttagagtgggttattaaccatactgttttcttgcattttgcaggacgagataaaccatggaaaaaagattatagaggacgttactcgggcctttataagtttatggccaaagaggctttaactaaaaat

SEQ ID NO: 5996 - protein, 272 aa, Streptococcus agalactiae
MNLLFSIDDMYVDHFKVMLYSLVRQTKNRKLEIYVLQKTLLKRHTELIQYTQNLEVGYHPIIVGTEVFAQAPTTDRYPDTIYYRLLAHKFLPETLDRILYLDADMLCLNDFSSLYDMELGDQLYAAASHNTDGKFLDYVNKLRLKNVELESSYFNTGVLLMNLPAIRKVVHQQTILDYMMQNRGRLILPDQDILNGLYANLVKPIPDEIYNYDARYSLIYQLKSRNEWDLEWVINHTVFLHFAGRDKPWKKDYRGRYSGLYKFMAKEALTKN

SEQ ID NO: 5997 - DNA, 192 bp, Streptococcus agalactiae
atggaattttttggcttaatggctttttttatggtcatgatgtatattggtgtacctaaagagcaaaaggcactcagtcgtagagttaaacaattagaaaaaataaatcagggaggaaaaacaaatgattcaagatttagtaggaagcacatgtatgatttatttagaggatggttttcaaacgcatcctta

SEQ ID NO: 5998 - protein, 64 aa, Streptococcus agalactiae
MEFFGLMAFFMVMMYIGVPKEQKALSRRVKQLEKINQGGKTNDSRFSRKHMYDLFRGWFSNASL

SEQ ID NO: 5999 - DNA, 186 bp, Streptococcus agalactiae
atgattcaagatttagtaggaagcacatgtatgatttatttagaggatggttttcaaacgcatccttatgagattttaaaggtagatgaggattgggtacagattcgtcgcaacttgaaacgaagtaaagaggaggtacgtattgtccgtattcatgatatcaaggaattgcgtccagtcaataaa

SEQ ID NO: 6000 - protein, 62 aa, Streptococcus agalactiae
MIQDLVGSTCMIYLEDGFQTHPYEILKVDEDWVQIRRNLKRSKEEVRIVRIHDIKELRPVNK

SEQ ID NO: 6001 - protein, 213 aa, Streptococcus agalactiae
ATGGGATTAATTTTAAAAAATAGGCTCAAAGAATTGCGTGCACGAGATGGTATCAATCAAACAGAACTCGCCAAATTAACGGGAGTCTCAAGACAAACAATTAGCCTAATTGAACGCGGAGAATATACGCCATCTGTTATTATTGCTATGAAGGTTTCTCAAGTATTTAAAGAATCCCTAGAGAATGTTTTTAGTTTAGTGTCAACGGAGGAA

SEQ ID NO: 6002 - protein, 71 aa, Streptococcus agalactiae
MGLILKNRLKELRARDGINQTELAKLTGVSRQTISLIERGEYTPSVIIAMKVSQVFKESLENVFSLVSTEE

SEQ ID NO: 6003 - protein, 756 aa, Streptococcus agalactiae
ATGAAAGATTTTATAAAACAAAGTGATACTACATTTGTTCGAATTATCAAAAGCCTTTTAATTGGTGGTTTTATAGGGGCCATACTTGGTTCCGTAGGAGCTCTTTTTATCATATTTGGTCAAAATAAGTACTTATCTGAAATTAATATTATTCAATATTTCCTATGGGTTAGTCGTATTGTTGTAATTATAACAGCTCTCTTTAGTCTCATCTACCTCTATCAGATTCAAAAATATCAGAAAGTTTTTTTCAATGTTGATGAAAGTCAATCTGAAGAAATTTATCGCCAGATTAATTTAAGACATTCTTATGGGATGACTTTTGTGTCAATTTCAATAGTACTCAGTATAGTTAATACTTTATTTAACTATAAACTAAATATTTTTGATGATTCAGTTACTTTAGTTATTCCAATATATGATTTATCACTGCTATTTGTTTTATGGGGTTTACATATATATTTTTTAAAGGTATATCAGAATATCCGAGGTATAAAAATGACAGTCGCTCCAACTTTAAAAGAGTTGAAAAACAATGTCTTACAATTGGACGAAGCAGAGTTGGAATCAAATTATAAGATGTGTTTTGATATTGTCATGAATTTAAGTGGTTTTATTTTCCCTACGATCTATTTTGTATTATTCTTTATCTCATTTGTTTTTCAAAAAGTGGAGATTGTAGCAATTATTATAACAACATCTATTCATATCTACATTCTCATTAAGTCTTTAAAAGCAGCGCGTCATTTTTATAGA

SEQ ID NO: 6004 - protein, 252 aa, Streptococcus agalactiae
MKDFIKQSDTTFVRIIKSLLIGGFIGAILGSVGALFIIFGQNKYLSEINIIQYFLWVSRIVVIITALFSLIYLYQIQKYQKVFFNVDESQSEEIYRQINLRHSYGMTFVSISIVLSIVNTLFNYKLNIFDDSVTLVIPIYDLSLLFVLWGLHIYFLKVYQNIRGIKMTVAPTLKELKNNVLQLDEAELESNYKMCFDIVMNLSGFIFPTIYFVLFFISFVFQKVEIVAIIITTSIHIYILIKSLKAARHFYR

SEQ ID NO: 6005 - protein, 365 aa, Streptococcus agalactiae
TTGTTCTTTCCAAAGTATATTACCTTAGTTTATCCCAAGTTTTTATAGAATACATCTTAGCATTTATAAGTATGGGACTTGCAGGCGTATTTTCTGCTAAATTTAAAGATGCACTTAGCAGCAGCTCTAAAACTAAAGCTTTATCATTAGCATTATCTGGAGCAATATTAGCAACATTTGTTCGTTATGTTTGGCATTATATCGCTGGTGTTATTTTTTGGGCTAGTTATGCACCAAAAGGTATGTCTGCTACATTATACTCATTAAGCGTCAATGGTACTGCTGGTTTGTTAACTCTATTTTTTGTAGTCATTAGTATTATTATTTTAGTTATCAGCTACCCTAGCTTCTTTTTACCTAAGAAA

SEQ ID NO: 6006 - protein, 122 aa, Streptococcus agalactiae
MFFPKVYYLSLSQVFIEYILAFISMGLAGVFSAKFKDALSSSSKTKALSLALSGAILATFVRYVWHYIAGVIFWASYAPKGMSATLYSLSVNGTAGLLTLFFVVISIIILVISYPSFFLPKK

SEQ ID NO: 6007 - protein, 266 aa, Streptococcus agalactiae
ATGACAAAAGAATCTCCTTTGCTGTATAAAAAAAGGAGATTTTTTATGTCAAAAAATAACAACACTACCTGTCTTATTGAAACTGCTATTTTTGCAGCGCTTGCTATGGCTTTATCAATGATTCCTGATTTTGCGTCATGGTTCACTCCCTCTTTTGGAGCAATTCCTCTGATACTTTTTGCATTACGTCGTGGTACAAAATACGGTCTATTTGCTGGCTTAATTTGGGGCTTATTGCACTTTGTTCTTTCCAAAGTATATTACCT

SEQ ID NO: 6008 - protein, 89 aa, Streptococcus agalactiae
MTKESPLLYKKRRFFMSKNNNTTCLIETAIFAALAMALSMIPDFASWFTPSFGAIPLILFALRRGTKYGLFAGLIWGLLHFVLSKSILP

SEQ ID NO: 6009 - protein, 957 aa, Streptococcus agalactiae
ATGACAACTTACTACGAAGCTATAAACTGGAACGAAATTGAAGATGTTATTGATAAATCAACTTGGGAAAAACTAACCGAACAATTTTGGCTCGATACACGTATCCCTTTATCAAATGACTTAGACGATTGGCGCAAACTTTCTGCTCAAGAAAAAGATCTTGTTGGCAAGGTTTTTGGAGGCTTAACCCTACTTGATACCATGCAATCAGAAACTGGTGTTGAAGCTATTCGTGCCGATGTTCGCACGCCTCACGAAGAAGCTGTCTTAAACAATATTCAATTCATGGAATCTGTTCACGCTAAATCTTATTCTTCAATTTTCTCAACTTTAAATACTAAATCAGAAATTGAAGAAATTTTCGAGTGGACTAATAATAATGAGTTCCTTCAAGAAAAAGCACGTATTATCAATGACATTTATGCTAATGGAAATGCCCTTCAAAAAAAGGTGGCTTCCACCTACCTCGAAACTTTCCTTTTTTATTCTGGCTTTTTCACACCTCTTTACTATTTGGGAAATAATAAGTTAGCAAATGTTGCTGAAATCATTAAATTAATTATTCGTGATGAATCTGTACATGGTACTTATATCGGTTACAAATTCCAGCTTGGTTTTAACGAATTACCAGAAGATGAGCAAGAGAATTTTCGTGATTGGATGTATGACCTCCTTTATCAGCTGTATGAAAACGAAGAAAAATACACCAAGACACTTTATGATGGCGTAGGATGGACTGAAGAAGTTATGACCTTTTTACGCTACAATGCTAATAAAGCTCTTATGAATTTAGGACAAGATCCTTTATTCCCAGATACAGCAAATGATGTCAACCCAATTGTTATGAATGGTATTTCAACAGGAACATCAAACCATGACTTCTTCTCTCAAGTAGGTAATGGTTACCTACTTGGTAGCGTTGAAGCTATGCATGATGATGACTATAACTATGGATTA

SEQ ID NO: 6010 - protein, 319 aa, Streptococcus agalactiae; identical to SEQ ID NO: 1534

SEQ ID NO: 6011 - protein, 2157 aa, Streptococcus agalactiae
ATGAGTTTAAAAAATATTGGCGATGTATCTTACTTTCGCCTAAATAATGAAATTAACCGTCCTGTTAATGGACAAATCCCACTCCATAAAGATAAAGAAGCCTTAACTGCTTTTTTCAAAGAAAACGTACAGCCTAATTCAAAAGCTTTTGACTCAATCACTGATAAAATTGCTTACCTCCTTAAGTATGATTATCTTGAAGAAGCTTTCCTCAATAAATATCGTCCTGAATTTATTGAAGAATTATCTACCAAACTCTTCGATAAAAAGTTTCGTTTTAAATCCTTCATGGCAGCCTATAAGTTTTATCAGCAGTACGCATTAAAAACAAATGATGGAGAATACTATTTAGAAAGTATTGAAGATCGCGTTCTCTTTAACGCTCTTTATTTTGCAGACGGTGATGAAAAACTAGCAACTGACTTAGCTCTAGAAATGATTTCACAACGCTATCAACCTGCAACACCAAGTTTTTTAAATGCTGGTCGAAGTCGTCGCGGAGAATTAGTCTCATGTTTCTTAATCCAAGTAACTGATGATATGAATGCTATTGGTCGTTCAATTAATTCAGCTCTTCAATTATCTCGTATTGGTGGTGGGGTTGGAATATCACTTAGCAACCTTCGTGATGCTGGAGCTCCTATCAAAGGTTTTGCTGGTGCTGCTTCTGGAGTTGTTCCAGTCATGAAATTATTTGAAGACAGTTTTTCTTACTCCAACCAACTTGGACAACGCCAAGGTGCTGGAGTTGTTTACCTTGACGTTTTCCATCCAGATATTATTTCATTCTTATCAACTAAAAAAGAAAATGCTGATGAAAAAGTACGTGTAAAAACATTGTCATTAGGGATTACTGTACCCGATAAATTCTATGAACTAGCACGTAACAATCAAGAAATGTACTTGTTTAGTCCTTATAGTATCGAACGTGAATATGGTGTTCCTTTCAGCTATATTGATATTACCGAAAAATACGATGAATTAGTCGCTAACCCTAATATCACTAAAACAAAAATCAATGCTCGTGATTTAGAAACAGAGATTTCTAAACTTCAACAAGAATCAGGTTATCCTTACATCATCAATATTGACACTGCTAATCGTACTAATCCTATTGACGGAAAAATTATCATGTCAAATCTTTGCTCTGAGATTTTGCAAGTACAAAAACCAAGTCTTATCAATGATGCTCAAGAATACCTTGAAATGGGAACTGATATTTCTTGTAACCTTGGCTCAACTAATGTTTTAAATATGATGACATCTCCTGATTTTGGAAAATCAATTAAAACAATGACTCGTGCTCTAACTTTCGTTACTGACTCATCAAATATTGAAGCTGTTCCAACTATTAAGAACGGAAATGCTCAAGCACATACATTTGGACTTGGAGCAATGGGACTCCACTCCTATTTGGCAAAAAATCATATCGAATATGGTAGTCCAGAATCAATTGAATTTACTGATATTTATTTCATGCTAATGAACTACTGGACCTTAGTAGAATCAAACAATATTGCCCGCGAACGTCAAACAACATTTGTAGGTTTTGAAAAATCAAAATACGCTGACGGTACATACTTTGATAAATATGTATCTGGAAAATTTGTTCCACAATCTGACAAAGTAAAATCCCTATTTGCTAATCATTTTATCCCCGAAGCTAAAGATTGGGAAAACCTTAGATACGCAGTTATGAAAGACGGATTATATCATCAAAATCGGCTTGCAGTTGCTCCGAATGGTTCTATTTCGTATATCAACGATTGTTCAGCATCTATCCATCCTATTACACAACGTATTGAAGAGCGTCAAGAGAAAAAAATCGGGAAAATTTATTATCCAGCTAATGGCTTAGCTACAGATACTATCCCTTATTACACTTCTGCCTATGATATGGATATGCGTAAAGTAATAGACGTCTATGCCGCAGCAACTGAGCACGTAGACCAAGGTCTCTCAATGACACTCTTTTTACGAAGCGAATTACCAAAGGAGTTGTACGAGTGGAAAACAGAAAGTAAGCAGACTACTCGCGACCTTTCAATCCTACGTAACTATGCTTTCAACAAAGGTGTGAAATCAATCTACTATATCCGTACTTTTACAGATGATGGTAGCGAAGTCGGAGCTAATCAATGCGAAAGTTGTGTCATC

SEQ ID NO: 6012 - protein, 719 aa, Streptococcus agalactiae
MSLKNIGDVSYFRLNNEINRPVNGQIPLHKDKEALTAFFKENVQPNSKAFDSITDKIAYLLKYDYLEEAFLNKYRPEFIEELSTKLFDKKFRFKSFMAAYKFYQQYALKTNDGEYYLESIEDRVLFNALYFADGDEKLATDLALEMISQRYQPATPSFLNAGRSRRGELVSCFLIQVTDDMNAIGRSINSALQLSRIGGGVGISLSNLRDAGAPIKGFAGAASGVVPVMKLFEDSFSYSNQLGQRQGAGVVYLDVFHPDIISFLSTKKENADEKVRVKTLSLGITVPDKFYELARNNQEMYLFSPYSIEREYGVPFSYIDITEKYDELVANPNITKTKINARDLETEISKLQQESGYPYIINIDTANRTNPIDGKIIMSNLCSEILQVQKPSLINDAQEYLEMGTDISCNLGSTNVLNMMTSPDFGKSIKTMTRALTFVTDSSNIEAVPTIKNGNAQAHTFGLGAMGLHSYLAKNHIEYGSPESIEFTDIYFMLMNYWTLVESNNIARERQTTFVGFEKSKYADGTYFDKYVSGKFVPQSDKVKSLFANHFIPEAKDWENLRYAVMKDGLYHQNRLAVAPNGSISYINDCSASIHPITQRIEERQEKKIGKIYYPANGLATDTIPYYTSAYDMDMRKVIDVYAAATEHVDQGLSMTLFLRSELPKELYEWKTESKQTTRDLSILRNYAFNKGVKSIYYIRTFTDDGSEVGANQCESCVI

SEQ ID NO: 6013 - protein, 222 aa, Streptococcus agalactiae
ATGGCAACTATTACTGTTTTTTCGAAAAACAACTGTATGCAATGTAAAATGACTAAGAAATTTCTTGACCAGCACGGTGCTGATTTTGAAGAAATTAATATTGATGAAAAACCAGAAAAAATTGAATATGTGAAAAATCTCGGCTTTTCTGCGGCTCCAGTGATTGAAGCTGGTAATGTTGTTTTTTCAGGTTTCCAACCAAGCAAACTAAAAGAACTTGTT

SEQ ID NO: 6014 - protein, 74 aa, Streptococcus agalactiae
MATITVFSKNNCMQCKMTKKFLDQHGADFEEINIDEKPEKIEYVKNLGFSAAPVIEAGNVVFSGFQPSKLKELV

SEQ ID NO: 6015 - protein, 98 aa, Streptococcus agalactiae
ATGGCTTCAAAGATTTCCACATTGTTGCAGAAACAGGTATTCACGCACGTCCAGCTACTTTGCTTGCAAACAGCTAGAATTTGCTTCAGAATCACGCT

SEQ ID NO: 6016 - protein, 34 aa, Streptococcus agalactiae
MASKDFHIVAETGIHARPATLLVKQLAICFRHHA

SEQ ID NO: 6017 - protein, 119 aa, Streptococcus agalactiae
ATGGGTGTTATGAGTCTGGTGTTGGTCAAGGTGCTGATGTTACTATTTCAGCAGAAGGTGCAGATGCAGATGATGCAATTGCAGCTATCGAAGAAACAATGACAAAAGAAGGATTGGCA

SEQ ID NO: 6018 - protein, 40 aa, Streptococcus agalactiae
MGVMSLGVGQGADVTISAEGADADDAIAAIEETMTKEGLA

SEQ ID NO: 6019 - protein, 1731 aa, Streptococcus agalactiae
ATGACAGAAATGCTTAAAGGAATCGCAGCCTCTGATGGTGTTGCAGTTGCTAGAGCATATCTACTTGTCCAACCGGATTTGTCATTTGAGACTGTAACAGTCGAAGATACAAACGCAGAAGAAGCTCGCCTTGATGTTGCACTCCAAGCTTCACAAGACGAGCTTTCTGTTATCCGTGAGAAGGCAGTAGAAAGCTTAGGCGAAGAAGCCGCAGCTGTATTTGATGCTCATTTAATGGTTCTTTCTGACCCAGAAATGATTAATCAAATTAAAGAGACTATTCGTGCAAAACAAGTAAATGCAGAAACAGGTCTTAAAGAAGTGACTGATATGTTCATCACTATCTTTGAAGGTATGGAAGATAACCCATACATGCAAGAACGTGCAGCAGATATCCGTGATGTTGCCAAACGTGTCTTAGCACATCTTTTGGGTGTTAAATTACCAAACCCAGCAACTATCAATGAAGAATCAATCGTTATTGCACACGATTTGACACCTTCTGATACAGCTCAATTAAATAAACAATTTGTTAAAGCTTTTGTAACAAATATTGGAGGGCGTACAAGTCACTCAGCTATTATGGCACGTACACTCGAAATCGCAGCTGTTCTTGGTACAAATGATATTACTGAACGTGTTCAAGATGGTCAGTTGATTGCTGTTAATGGTATTACTGGTGAAGTTATCATTGAACCAACTGAAGCTCAAATTTCAGCCTTCAAGGCAGCAGGTGAAGCTTATGCCAAGCAAAAAGCTGAATGGGCACTTCTTAAGGATGCACAAACAGTTACTGCTGATGGTAAACATTTTGAATTAGCTGCTAATATCGGTACACCTAAAGATGTTGAGGGTGTTAACGAAAATGGAGCAGAAGCAGTTGGTCTTTACCGTACAGAGTTCTTATATATGGATTCACAAGATTTCCCAACAGAAGATGAGCAATATGAAGCATATAAAGCAGTTCTTGAGGGTATGAATGGTAAACCAGTTGTTGTTCGTACAATGGATATCGGTGGAGATAAAGAGCTTCCTTACTTTGATCTTCCAAAAGAGATGAACCCATTCTTAGGATTCCGTGCATTGCGTATTTCAATTTCTGAAACTGGTGATGCAATGTTCCGCACACAAATCCGAGCACTTCTTCGTGCTTCAGTTCATGGACAGCTACGCATCATGTTCCCAATGGTTGCTTTGCTTAAAGAATTCCGTGCTGCTAAAGCTATATTTGAAGAAGAGAAAGCGAACTTGTTAGCTGACGGTGTAGCAGTAGCTGAAGGCATTGAAGTTGGTATTATGATTGAAATCCCAGCGGCAGCTATGCTTGCAGACCAATTTGCAAAAGAAGTTGATTTCTTCTCAATTGGTACTAATGATCTTATCCAATACACAATGGCTGCGGACCGTATGAATGAGCAAGTTTCATACCTCTATCAACCATACAATCCATCAATCCTTCGTTTGATTAACAACGTTATCAAAGCTGCTCATGCTGAAGGTAAATGGGCAGGTATGTGTGGTGAGATGGCCGGTGATCAAACTGCGGTTCCACTTCTTGTTGGTATGGGATTGGATGAATTCTCAATGTCAGCAACCTCAGTACTTCGTACACGTAGCTTAATGAAAAAATTGGACACAGCTAAAATGGAAGAATACGCTAATCGTGCTCTTTCAGAGTGTTCAACTATGGAAGAAGTTATCGAACTTCAAAAAGAATACGTTGACTTTGAC

SEQ ID NO: 6020 - protein, 577 aa, Streptococcus agalactiae
MTEMLKGIAASDGVAVARAYLLVQPDLSFETVTVEDTNAEEARLDVALQASQDELSVIREKAVESLGEEAAAVFDAHLMVLSDPEMINQIKETIRAKQVNAETGLKEVTDMFITIFEGMEDNPYMQERAADIRDVAKRVLAHLLGVKLPNPATINEESIVIAHDLTPSDTAQLNKQFVKAFVTNIGGRTSHSAIMARTLEIAAVLGTNDITERVQDGQLIAVNGITGEVIIEPTEAQISAFKAAGEAYAKQKAEWALLKDAQTVTADGKHFELAANIGTPKDVEGVNENGAEAVGLYRTEFLYMDSQDFPTEDEQYEAYKAVLEGMNGKPVVVRTMDIGGDKELPYFDLPKEMNPFLGFRALRISISETGDAMFRTQIRALLRASVHGQLRIMFPMVALLKEFRAAKAIFEEEKANLLADGVAVAEGIEVGIMIEIPAAAMLADQFAKEVDFFSIGTNDLIQYTMAADRMNEQVSYLYQPYNPSILRLINNVIKAAHAEGKWAGMCGEMAGDQTAVPLLVGMGLDEFSMSATSVLRTRSLMKKLDTAKMEEYANRALSECSTMEEVIELQKEYVDFD

SEQ ID NO: 6021 - protein, 1425 aa, Streptococcus agalactiae
TTGACAAAAGAATATCAAAATTATGTCAATGGCGAATGGAAATCATCTGTTAATCAGATTGAGATTTTGTCACCAATTGATGATTCTTCATTGGGATTCGTGCCAGCGATGACTCGAGAAGAAGTTGATCATGCCATGAAAGCGGGTCGTGAAGCTTTACCAGCCTGGGCTGCTTTGACAGTATATGAACGTGCACAATACCTTCATAAAGCCGCAGACATTATTGAACGTGATAAAGAAGAAATTGCTACTGTTTTAGCAAAAGAAATTTCTAAAGCTTACAATGCTTCAGTAACTGAGGTTGTAAGGACAGCTGATCTTATTCGTTATGCAGCAGAAGAAGGAATTCGTTTATCAACTTCAGCTGACGAAGGTGGAAAAATGGATGCTTCAACAGGTCATAAGTTGGCTGTTATTCGTCGTCAACCAGTAGGTATCGTTTTAGCAATCGCACCTTATAATTACCCTGTTAACCTCTCAGGATCAAAAATTGCGCCAGCTCTAATTGGTGGAAACGTTGTGATGTTTAAACCACCAACACAAGGTTCAGTCTCAGGACTTGTTTTAGCAAAAGCTTTTGCAGAAGCAGGTCTTCCAGCAGGTGTCTTTAATACTATTACAGGACGCGGTTCTGAGATTGGAGATTACATTGTTGAGCATGAAGAAGTTAATTTTATTAACTTTACAGGATCAACGCCAGTTGGACAACGTATTGGTAAGTTGGCAGGAATGCGTCCAATTATGCTTGAGTTGGGCGGTAAGGATGCAGGTATCGTCTTAGCTGATGCTGACCTTGACAACGCTGCTAAACAAATCGTTGCAGGTGCTTATGATTACTCTGGACAACGCTGTACGGCAATTAAGCGTGTGCTTGTCGTTGAAGAAGTTGCAAATGAATTGGCAGAAAAAATATCTGAAAATGTAGCAAAATTATCAGTAGGTGATCCATTTGATAATGCAACAGTGACGCCGGTTATTGATGATAATTCAGCTGACTTTATTGAAAGCTTAGTAGTAGATGCACGTCAAAAAGGTGCGAAAGAATTGAATGAATTTAAACGTGATGGTCGTCTATTAACTCCAGGATTGTTTGATCATGTTACTTTAGATATGAAACTAGCTTGGGAAGAGCCTTTTGGACCAATTCTCCCAATTATTCGTGTCAAGGATGCAGATGAAGCTGTTGCTATTGCCAACAAATCTGATTTTGGATTACAATCATCAGTCTTTACACGTGATTTCCAAAAAGCATTTGATATAGCAAATAAACTTGAAGTTGGTACAGTTCACATTAACAATAAGACTGGACGTGGTCCTGATAACTTCCCATTCTTAGGACTCAAAGGATCTGGTGCAGGTGTTCAAGGTATCAGATATTCAATTGAAGCAATGACAAATGTAAAATCGATTGTTTTTGATATGAAA

SEQ ID NO: 6022 - protein, 475 aa, Streptococcus agalactiae
MTKEYQNYVNGEWKSSVNQIEILSPIDDSSLGFVPAMTREEVDHAMKAGREALPAWAALTVYERAQYLHKAADIIERDKEEIATVLAKEISKAYNASVTEVVRTADLIRYAAEEGIRLSTSADEGGKMDASTGHKLAVIRRQPVGIVLAIAPYNYPVNLSGSKIAPALIGGNVVMFKPPTQGSVSGLVLAKAFAEAGLPAGVFNTITGRGSEIGDYIVEHEEVNFINFTGSTPVGQRIGKLAGMRPIMLELGGKDAGIVLADADLDNAAKQIVAGAYDYSGQRCTAIKRVLVVEEVANELAEKISENVAKLSVGDPFDNATVTPVIDDNSADFIESLVVDARQKGAKELNEFKRDGRLLTPGLFDHVTLDMKLAWEEPFGPILPIIRVKDADEAVAIANKSDFGLQSSVFTRDFQKAFDIANKLEVGTVHINNKTGRGPDNFPFLGLKGSGAGVQGIRYSIEAMTNVKSIVFDMK

SEQ ID NO: 6023 - protein, 1251 aa, Streptococcus agalactiae
ATGAAGAAATTAATTATAGGTATTTTTAGTCTAATTATTATAGCGATTCTTGCTTGGCAAGGTTTTTCGTTTTTGAAACATAAGGAAATAAAACTTCAACAAGCTGTTGTTGAAAAAGAAATTCGCATAGCCGAGAAAACGGTAGAAGTGGTGAAAAGACAGAAAACTGAACGTGTTCTTTTTCTTGAACCTAAAGGATATGACAAAAGTCTAAGCGCTGATATTTTAAAGTGGAATCAAAAAAGCTTTGAGCATAAAAAATTTTATGACAATCAATACATTATTCTACGTCCTCAATTAGCAGATTCTAACTTTGCAAATGTTAAAAAATTATCCATTTATCAAATCTTATATCAAAAAGAAAAAGGAAGTATGTTTCAAAAATCAAGTCGCCTTTTGAGAACCTACTTACTTGATCAAAATAAGAAACCTTTTGAATTAGATGAGCTTTTAGCTCATAATATATCTGGATTTAAGGCTATTTTAGAAAATATAGCTCCAGGAACTCAACTAAAGGAACATGATAGCAATAAAGAATTTTTAAAAACTGGAAGAGTAACAGATGGGCTAGATGTTAAAGATGGTAAGTTAATTATTAATGATTTAAAATTACCACTTGATAAATTATATAATGTGATCGATGAGTCATATTTAAAATCAAGTGATCTAGATTTAGTTTCTAACTTAAAAGCTAAAGCACCACGTGTTGCACTTACCTTTGATGATGGACCAAATGAAAAAACGACTCCTAAAGCCTTAGAAATCCTTAAAAGATATAATGCTAAAGCGACTTTCTTTGTAATGGGACAAAGTGCTGTAGGGCACACAGATATTTTAAAAAGGATGCATGCTGAAGGTCATGAGATTGGTAATCATACATGGGATCATCCTAATTTAACCAAACTACCAGCGGAGAAAATCAAGGAAGAGATTCATAAGACTAATGATCTGATCATGAAAGCAACAGGACAAAAACCGGTGTACTTACGTCCCCCTTACGGAGCAACAAATGCTACTGTAAAAACAGTGACAGGATTGAAAGAAATGTTGTGGTCAGTTGATACAGAAGACTGGAAAAATCATAATACGCAAGCAATGATGACCAATATCAAAAAACAATTACGTCCTGGGGGAGTGATTTTGATGCACGATATTCACCAGACATCCATAGATGCTCTGCCTACAATTATGGATTATCTGATAACCCAGGGTTATTATTTTGTTACTGTAGGTGAATTATATTCAACGCCT

SEQ ID NO: 6024 - protein, 417 aa, Streptococcus agalactiae
MKKLIIGIFSLIIIAILAWQGFSFLKHKEIKLQQAVVEKEIRIAEKTVEVVKRQKTERVLFLEPKGYDKSLSADILKWNQKSFEHKKFYDNQYIILRPQLADSNFANVKKLSIYQILYQKEKGSMFQKSSRLLRTYLLDQNKKPFELDELLAHNISGFKAILENIAPGTQLKEHDSNKEFLKTGRVTDGLDVKDGKLIINDLKLPLDKLYNVIDESYLKSSDLDLVSNLKAKAPRVALTFDDGPNEKTTPKALEILKRYNAKATFFVMGQSAVGHTDILKRMHAEGHEIGNHTWDHPNLTKLPAEKIKEEIHKTNDLIMKATGQKPVYLRPPYGATNATVKTVTGLKEMLWSVDTEDWKNHNTQAMMTNIKKQLRPGGVILMHDIHQTSIDALPTIMDYLITQGYYFVTVGELYSTP

SEQ ID NO: 6025 - protein, 1080 aa, Streptococcus agalactiae
ATGATAACAAAATTTCCAGACCAATGGCAGGATAAATTAACCCAGCGTCAATTTGATGATCTAACAGATATTCAAAATAAACTTTTTCAAGCTATTACTGATGGTGATAATATCCTTGGAATTAGCCCTACAGGTACTGGTAAAACTCTAGCATACCTTTTTCCAACGCTTCTTAAGTTGCAACCTAAAAAGAGCCAACAACTCTTAATTTTAGCTCCAAATTCAGAATTAGCTGGACAAATCTTCGACGTTACAAAAGAATGGGCTGAACCATTAGGACTGACAGCACAACTATTCCTTTCAGGGTCTAGTCAAAAACGCCAAATTGAGCGACTAAAAAAAGGACCAGAAATCCTTATAGGAACTGCTGGACGCGTATTTGAACTTGTGAAACTAAAAAAAATAAAAATGATGAACATTAATACTATCGTCCTTGATGAGTTCGATGAATTACTCGGCGACTCACAATATCATTTTGTGGACAATATTATTAATCGCGTTCCTCGTGATCAGCAAATGATTTACATTAGTGCCACCAACAAACTGGACAATAGTAAACTTGCCGATAACACTATAACAATCGATCTATCTGATCAAAAACTTGATACTATAAAACATTATTATATTACAGTTGATAAAAGAGAGCGTACTGACCTACTTCGTAAATTTTCAAATATTCCTGATTTTAGAGGTCTCGTCTTTTTTAACAGCTTATCAGACTTAGGTGCATGTGAAGAACGTTTACAATTTAATAGGGCCTCGGCAGTTTCTTTAGCAAGCGATATTAATATTAAATTCCGTAAAGTTATCTTAGAGAAATTTAAAAACCATGATATTTCATTACTCCTAGGAACCGATTTGGTAGCTCGTGGCATTGATATCGACAACCTAGAATATGTGATTAATTTTGATATCGCACGCGACAAAGAAACATACACACATCGTTCTGGACGAACTGGTCGTATGGGGAAAGAGGGATGTGTTATTACATTTGTAACACATAAAGAAGAGCTCAAACAACTTAAAAAATACGCTACCGTTGCAGAACTTGTACTTCACAATCAAAAATTACATTTAAAA

SEQ ID NO: 6026 - protein, 360 aa, Streptococcus agalactiae
MITKFPDQWQDKLTQRQFDDLTDIQNKLFQAITDGDNILGISPTGTGKTLAYLFPTLLKLQPKKSQQLLILAPNSELAGQIFDVTKEWAEPLGLTAQLFLSGSSQKRQIERLKKGPEILIGTAGRVFELVKLKKIKMMNINTIVLDEFDELLGDSQYHFVDNIINRVPRDQQMIYISATNKLDNSKLADNTITIDLSDQKLDTIKHYYITVDKRERTDLLRKFSNIPDFRGLVFFNSLSDLGACEERLQFNRASAVSLASDINIKFRKVILEKFKNHDISLLLGTDLVARGIDIDNLEYVINFDIARDKETYTHRSGRTGRMGKEGCVITFVTHKEELKQLKKYATVAELVLHNQKLHLK

SEQ ID NO: 6027 - protein, 627 aa, Streptococcus agalactiae
ATGCGTAAAAAACCTATTATTATTGGTGTTACAGGTGGATCTGGTGGTGGTAAAACCAGTGTTTCTCGGGCGATTTTATCAAATTTCCCAGATCAAAAAATTACCATGATTGAACATGATTCTTACTATAAAGATCAAAGTCATTTGACTTTTGAAGAACGTGTAAAAACCAATTATGATCATCCCCTTGCTTTTGATACCAATTTGATGATTGAGCAATTGAACGAATTGATTGAGGGACGTCCGGTCGATATTCCGGTTTATGATTACACAAAACATACCCGTAGTGATAGAACTATCCGCCAAGAACCCCAGGATGTCATTATTGTTGAGGGAATTTTAGTATTAGAAGATCAGCGTTTGCGTGATTTAATGGATATCAAATTATTTGTTGATACAGATGATGATATTCGTATTATTCGTCGTATTAAGCGTGATATGGAAGAGCGCGATAGAAGTTTAGATAGTATTATTGAACAGTATACAGAAGTTGTAAAACCTATGTATCATCAATTTATCGAACCAACAAAGCGTTATGCGGATATTGTAATTCCAGAAGGAGTAAGTAATATTGTCGCTATTGATTTAATCAATACCAAAGTGGCTAGCATCTTAAATGAAGCAAAA

SEQ ID NO: 6028 - protein, 209 aa, Streptococcus agalactiae
MRKKPIIIGVTGGSGGGKTSVSRAILSNFPDQKITMIEHDSYYKDQSHLTFEERVKTNYDHPLAFDTNLMIEQLNELIEGRPVDIPVYDYTKHTRSDRTIRQEPQDVIIVEGILVLEDQRLRDLMDIKLFVDTDDDIRIIRRIKRDMEERDRSLDSIIEQYTEVVKPMYHQFIEPTKRYADIVIPEGVSNIVAIDLINTKVASILNEAK

SEQ ID NO: 6029 - protein, 495 aa, Streptococcus agalactiae
ATGAACAAGTCTAAGAAAATCGAAAATTATCAATTATTATTACTACAAGCGCAAGCTCTATTCTCAGATGAAACAAATGCTCTTGCCAACTTATCAAATGCTTCAGCTATGCTAAATGCTATGCTTCCAAATTCTGTATTTACAGGCTTTTATTTATTTGATGGAAAGGAGTTAATTCTTGGCCCTTTCCAGGGTGGTGTATCATGTGTGCATATTACTTTAGGAAAAGGTGTTTGTGGTGAATCTGCACAAACTGCTAAGACGCTGATTGTTGATGATGTTACAAAGCATGCTAACTATATCTCCTGTGATTCAAAAGCTATGAGTGAAATCGTAGTACCTATGTTTAAAAATGGCAAACTTCTAGGAGTTCTAGATTTAGATTCTTCTTTAGTAGCAGATTATGATGAGATTGATCAAGAATACTTAGAAAAATTTGTAGGTATTCTAGTAGAACATACGATTTGGAATTTGGATATGTTTGGAGTTGAAAAG

SEQ ID NO: 6030 - protein, 165 aa, Streptococcus agalactiae
MNKSKKIENYQLLLLQAQALFSDETNALANLSNASAMLNAMLPNSVFTGFYLFDGKELILGPFQGGVSCVHITLGKGVCGESAQTAKTLIVDDVTKHANYISCDSKAMSEIVVPMFKNGKLLGVLDLDSSLVADYDEIDQEYLEKFVGILVEHTIWNLDMFGVEK

SEQ ID NO: 6031 - protein, 1662 aa, Streptococcus agalactiae
ATGTATCAGGCCCTTTATCGGAAATATCGTAGCCAAACATTTGATGAAATGGTTGGACAAAGTGTTATTTCAACTACTTTAAAGCAAGCTGTGTCCAGCAAAAAAATTAGCCATGCTTACCTTTTTTCAGGACCTAGGGGAACTGGAAAAACAAGTGCTGCTAAAATATTTGCAAAAGCGATGAATTGCCCAAATCAAATTAATGGCGAACCTTGTAATCATTGTGATATTTGTCGAGATATTACAAATGGTAGTTTAGAGGATGTCATTGAAATTGATGCTGCGTCAAATAATGGTGTCGATGAAATTCGTGATATCAGGGACAAATCAACTTATGCTCCAAGTAGGGCAACCTATAAAGTTTATATTATTGATGAGGTTCATATGTTGTCTACAGGTGCCTTCAATGCACTATTGAAAACACTTGAAGAGCCAACAGAAAATGTTGTTTTTATATTAGCAACAACAGAACTCCATAAGATCCCTGCAACAATCTTATCTCGTGTCCAGCGCTTTGAATTTAAAGCGATTAAATTATTAGCTATTCGAGATCATTTAGCACAGATTTTAGATAAAGAAGCTATTTCATATGATTTGGATGCTCTGACACTAGTCGCTAGACGAGCCGAAGGTGGTATGCGTGATGCTTTATCAATTCTCGATCAAGCCTTGAGTTTAGCGAAAGATAACCACATTTCTTTAGATGTAGCAGAAGAAATTACAGGGAGCATTTCCTTATCTGCTATAGATGATTATGTATCGAATATATTGGCTCACGATACAACTGAAGCACTCGCTAAACTTGAAGTAATCTTTGATAGTGGCAAAAGTATGAGTCGTTTTGCAACAGATTTATTGATGTACTTAAGAGATTTACTTGTTGTTCAAGCAGGTGGTGAAGATAGTCATTCAAGTGATACTTTTATAGCCAATCTTAATGTTAAACAAGATATTTTATTTGAAATGATTGATAAAGTGACATCTGTTCTTCCTGAGATAAAAAATGGTAGCCATCCTAAAGTTTATGCAGAGATGATGACCATCCAATTGTCTGAAATGGTAGAAAAAAATTCGTCAAACATACCCGCAGATGTGACAGCAGAATTAGATAGTCTTCGTCGAGAGTTAAAATCGTTAAAAAACGAAATGAGCCAACTCTCTCGAGCAGATCAAAGTTCATCAACTCAAAAAGTAAAGGTTAATAATAAGACATTCACATTCAAAGTTGACCGTACAAAGATTTTGACCATTATGGAAGAAACGGTTGTAGATAGCCAACGTTCACGTGAATATTTAGAAGCTTTAAAGAGTGCTTGGAACGAGATATTAGATAATATTACGGCTCAAGATAGAGCCTTATTAATGGGATCTGAACCTGTCTTAGCTAATAGCGAGAATGCTATTTTGGCATTTGATGCGGCCTTTAATGCTGAACAAGCTATGAAACGTACCGATCTCAATGATATATTTGGTAATATTATGAGTAAAGCAGCAGGTTTTTCACCTAATATTTTAGCTGTACCTAGAAATGATTTTAATCAAATTCGGAGCGATTTTGCAAAGAAAATGAAAGCTCAAAAGACGGAAACAGAACCTGAAGTTAATCATCAGATTCCAGAAGACTTTTCTTATCTAGCAGAACGAATAGCAATCGTTGAAGAT

SEQ ID NO: 6032 - protein, 554 aa, Streptococcus agalactiae; identical to SEQ ID NO: 1560

SEQ ID NO: 6033 - protein, 192 aa, Streptococcus agalactiae
ATGACAAAACGACAATTTATTTTTATGGCGCTTTTATGCTCTTTTGAAACTTATTTTTTCAATCAATCCGTTATGGATGGCTCCTGGATTTTTGCTATTTTTTGGGGAGTTTTATTACTTCGAGATCTTCAAAAGGTGTATGCGATTTCAAAATTCACAAAAGAGCTTATCAAATCTACCAAGAAGAAAGAC

SEQ ID NO: 6034 - protein, 64 aa, Streptococcus agalactiae; identical to SEQ ID NO: 1564

SEQ ID NO: 6035 - protein, 867 aa, Streptococcus agalactiae
ATGGCAAATCAACTTAATATTTCCCGCACAGCTATTTGGAAAGGTATAAAAACGCTAGAAGAATTAGGCCTAGAGATTGAGTCTGTCACTAACAAGGGCTACCGATTGGTATCAGGTGACATATTATTACCAGAACAACTCGAACAAGAAATTGGTATTAAGGTTAGTCTTAATAATAATAGTGCTTCAACCCAACTAGATGCTAAAATGGGGATAGAAAGCAAATTAAAGACTCCACACCTTTTTTTAGCTCCTAATCAAAAAAAAGCCAAAGGACGTTTTGATAGACCTTTCTTTACATCAAATCAAGGCGGCATCTATATGTCTCTTTTATTACAACCTAATGTACCGATTGAAGATATAAAACCTTATACTGTCATGGTAGCCTCTAGTGCTGTAAAAGCTATCTCACGGTTAACAGGAATTACTCCTGAAATTAAGTGGGTCAATGATATTTATTTAGATAATAAAAAAATAGCTGGTATTTTAACCGAGGCTATCGCTTCTGTTGAGAGTGGATTGGTAACGAATGTTATTATAGGATTAGGTATCAATTTCTATATCAAAGAGTTCCCTAGGGCGTTAACTAAGCGCGCAGGTAGTCTCTTTACAGAGCAACCAACCATAACTAGAAATCAATTGATTACAGAAATCTGGAATCTCTTTTTCAATATTCCACTAGAGGATCACTTAAAGGTATATAGAGAAAAATCCCTAGTCTTAGATAAAACCGTTAGCTTTATGGATGGTCAAACAATGTATTCTGGGAAAGCTATTGATATTACTGATAAAGGATATTTAGTGGTTGAGTTAGATGATGGTCAGTTGAAAACACTTCGCAGTGGCGAAATCAGTCTTTCTTCTTGG

SEQ ID NO: 6036 - protein, 289 aa, Streptococcus agalactiae
MANQLNISRTAIWKGIKTLEELGLEIESVTNKGYRLVSGDILLPEQLEQEIGIKVSLNNNSASTQLDAKMGIESKLKTPHLFLAPNQKKAKGRFDRPFFTSNQGGIYMSLLLQPNVPIEDIKPYTVMVASSAVKAISRLTGITPEIKWVNDIYLDNKKIAGILTEAIASVESGLVTNVIIGLGINFYIKEFPRALTKRAGSLFTEQPTITRNQLITEIWNLFFNIPLEDHLKVYREKSLVLDKTVSFMDGQTMYSGKAIDITDKGYLVVELDDGQLKTLRSGEISLSSW

SEQ ID NO: 6037 - protein, 1194 aa, Streptococcus agalactiae
ATGTCAGAACGTAAACTTTTCACGTCTGAGTCAGTATCTGAGGGACATCCCGATAAGATTGCTGACCAAATTTCCGATGCGATTTTAGATGCAATTTTAGAGCAAGATCCAGATGCCCACGTAGCAGCCGAAACAGCTGTTTATACAGGGTCGGTTCATGTATTTGGCGAGATATCAACGACAGCCTATGTTGATATTAACCGAGTTGTCCGTAACACAATCGCTGAAATTGGCTATGATAAAGCTGAATATGGCTTCTCAGCTGAATCTGTCGGAGTGCATCCGTCACTCGTTGAACAGTCGCCAGACATTGCACAGGGAGTTAATGAAGCTCTTGAGGTACGTGGTTCTCTTGAACAAGATCCTTTAGATTTAATTGGTGCAGGTGACCAAGGTTTGATGTTTGGGTTTGCTGTTGATGAAACACCTGAGTTAATGCCATTGCCAATTTCTTTAGCTCATCAGTTAGTTAAGAAGTTGACAGATCTACGTAAGTCTGGGGAACTCACCTATCTTCGACCAGATGCAAAATCTCAAGTAACGGTTGAATATGATGAAAATAATCAACCAATTCGTGTGGATGCAGTAGTTATTTCGACACAGCATGATCCTAATGTAACTAATGACCAACTCCATAAGGACGTGATTGAGAAAGTTATCAATGAAGTTATTCCAAGCCATTATTTAGATGACCAAACAAAATTCTTTATCAATCCTACAGGGCGCTTTGTTATTGGAGGCCCTCAAGGAGATTCAGGACTAACAGGTCGTAAGATTATTGTAGATACTTATGGTGGTTATTCTCGTCATGGTGGTGGTGCATTTTCAGGTAAAGATGCTACTAAAGTAGATCGTTCAGCATCTTATGCAGCTCGTTATATTGCAAAAAATATTGTTGCAGCTGATTTAGCTAAAAAAGTAGAAGTACAACTTGCTTATGCAATTGGTGTTGCCCAGCCTGTCTCTGTGCGTGTAGATACATTTGGAACAGGTGTTATAGCAGAAGCAGACCTAGAGGCAGCTGTACGTCAAATATTTGATTTGCGACCAGCAGGCATTATTAATATGTTGGACCTCAAACGACCTATTTATCGACAAACAGCAGCCTATGGGCATATGGGACGTACTGATATCGATTTGCCATGGGAGCGAGTTGATAAAGTCCAGGCCTTAAAGGATTTTATTGCTAGCAAA

SEQ ID NO: 6038 - protein, 398 aa, Streptococcus agalactiae
MSERKLFTSESVSEGHPDKIADQISDAILDAILEQDPDAHVAAETAVYTGSVHVFGEISTTAYVDINRVVRNTIAEIGYDKAEYGFSAESVGVHPSLVEQSPDIAQGVNEALEVRGSLEQDPLDLIGAGDQGLMFGFAVDETPELMPLPISLAHQLVKKLTDLRKSGELTYLRPDAKSQVTVEYDENNQPIRVDAVVISTQHDPNVTNDQLHKDVIEKVINEVIPSHYLDDQTKFFINPTGRFVIGGPQGDSGLTGRKIIVDTYGGYSRHGGGAFSGKDATKVDRSASYAARYIAKNIVAADLAKKVEVQLAYAIGVAQPVSVRVDTFGTGVIAEADLEAAVRQIFDLRPAGIINMLDLKRPIYRQTAAYGHMGRTDIDLPWERVDKVQALKDFIASK

SEQ ID NO: 6039 - protein, 1905 aa, Streptococcus agalactiae
ATGAAAAAACAATTTTTAAAATCAGCAGCGATTCTATCGCTAGCAGTAACAGCAGTATCTACAAGTCAGCCGGTAGCCGGGATAACTAAAGATTATAATAACCGAAATGAAAAAGTAAAAAAGTATTTACAAGAAAATAATTTCGGTCATAAAATAGCGTATGGATGGAAAAATAAAGTAGAATTTGATTTTCGTTATTTATTGGATACTGCTAAATATTTAGTAAATAAAGAAGAATTTCAAGATCCTTTATATAATGATGCGCGCGAAGAATTGATAAGTTTTATTTTTCCTTATGAGAAATTTTTAATTAACAATCGTGACATAACTAAATTAACAGTTAATCAGTATGAAGCGATTGTGAATAGAATGAGTGTTGCTTTACAAAAATTTTCAAAGAATATTTTTGAGAAACAGAAAGTAAATAAAGATTTAATCCCTATTGCGTTTTGGATTGAGAAAAGTTACAGAACTGTTGGAACGAATGAAATCGCCGCTTCTGTAGGCATTCAAGGAGGATTTTATCAAAACTTCCATGATTATTATAATTATTCATATCTATTAAATTCTTTATGGCATGAAGGAAATGTAAAAGAAGTAGTTAAGGATTATGAAAACACTATTCGTCAAATACTATCTAAAAAGCATGAGATTGAAAAAATTCTTAATCAGAGCACTTCTGATATCTCTATAGATGATGATGATTACGAAAAAGGAAATAAAGAATTGCTAAGGGAAAAATTAAATATTATTCTAAATCTTTCAAAGAGAGATTACAGAGTAACTCCATACTATGAAGTGAATAAACTACATACAGGGCTTATTTTATTGGAGGATGTCCCTAATTTAAAGATTGCTAAGGATAAGTTGTTCTCATTAGAGAATTCTTTAAAGGAATACAAAGGAGAGAAAGTTAATTATGAGGAACTAAGATTCAATACGGAACCTTTAACTAGTTACTTAGAAAATAAAGAAAAATTTTTAGTCCCCAATATTCCATATAAAAATAAATTAATTTTAAGGGAAGAAGATAAATATAGTTTTGAAGATGATGAAGAAGAGTTTGGAAATGAACTTCTAAGTTACAATAAGCTTAAGAATGAAGTTTTACCTGTTAATATTACAACTTCTACTATATTAAAACCGTTTGAACAGAAGAAAATTGTGGAAGATTTTAATCCTTATTCTAATTTAGACAATTTAGAAATAAAAAAAATAAGGTTGAATGGCTCCCAAAAACAAAAAGTAGAACAGGAAAAAACTAAATCGCCAACTCCTCAAAAAGAGACTGTGAAAGAACAAACTGAGCAAAAAGTATCTGGAAATACTCAAGAGGTAGAAAAGAAATCTGAAACTGTGGCAACTTCACAACAAAGTTCAGTTGCGCAAACTTCTGTCCAACAGCCGGCTCCGGTTCAATCAGTTGTTCAAGAATCCAAAGCTTCTCAAGAGGAGATTAATGCAGCACACGATGCTATTTCGGCGTATAAATCAACAGTCAATATTGCTAATACAGCCGGTGTAACAACTGCGGAAATGACCACGCTCATTAATACTCAAACTTCTAATCTTTCTGATGTTGAGAAAGCTTTAGGAAATAATAAGGTTAATAATGGTGCAGTCAATGTATTGAGAGAAGATACAGCTCGTCTTGAGAATATGATTTGGAATCGTGCTTACCAAGCTATTGAAGAATTCAACGTCGCTCGTAATACTTATAATAACCAAATCAAGACAGAAACAGTTCCAGTTGATAATGATATTGAAGCTATTTTAGCAGGTTCTCAAGCTAAAATTAGCCATTTGGACAATCGTATCGGAGCGCGCCACATGGATCAAGCTTTTGTAGCTAGTTTATTAGAAGTTACTGAGATGAGTAAATCAATCTCATCGCGTATAAAAGAG

SEQ ID NO: 6040 - protein, 635 aa, Streptococcus agalactiae
MKKQFLKSAAILSLAVTAVSTSQPVAGITKDYNNRNEKVKKYLQENNFGHKIAYGWKNKVEFDFRYLLDTAKYLVNKEEFQDPLYNDAREELISFIFPYEKFLINNRDITKLTVNQYEAIVNRMSVALQKFSKNIFEKQKVNKDLIPIAFWIEKSYRTVGTNEIAASVGIQGGFYQNFHDYYNYSYLLNSLWHEGNVKEVVKDYENTIRQILSKKHEIEKILNQSTSDISIDDDDYEKGNKELLREKLNIILNLSKRDYRVTPYYEVNKLHTGLILLEDVPNLKIAKDKLFSLENSLKEYKGEKVNYEELRFNTEPLTSYLENKEKFLVPNIPYKNKLILREEDKYSFEDDEEEFGNELLSYNKLKNEVLPVNITTSTILKPFEQKKIVEDFNPYSNLDNLEIKKIRLNGSQKQKVEQEKTKSPTPQKETVKEQTEQKVSGNTQEVEKKSETVATSQQSSVAQTSVQQPAPVQSVVQESKASQEEINAAHDAISAYKSTVNIANTAGVTTAEMTTLINTQTSNLSDVEKALGNNKVNNGAVNVLREDTARLENMIWNRAYQAIEEFNVARNTYNNQIKTETVPVDNDIEAILAGSQAKISHLDNRIGARHMDQAFVASLLEVTEMSKSISSRIKE

SEQ ID NO: 6041 - protein, 543 aa, Streptococcus agalactiae
ATGAAAAAAATAACAACTTTAATCTTAGCTAGTAGCTTATTACTAGTTGCAACGACATCGGTTAAAGCTGATGATAACTTTGAAATGCCAACGCGTTATGTTAAAATGAGTGAAAAATCAAAAGCATTTTATCAAAGACTACAAGAAAAACAACGTAAGGCACATACTACTGTGAAGACTTTTAATAATTCAGAAATAAGGCATCAACTACCTCTTAAACAAGAAAAGGCTAGAAATGATATCTACAATTTAGGCATTCTTATTTCTCAGGAGTCTAAAGGGTTCATCCAACGTATTGATAATGCCTATTCTTTGGAAAATGTCTCAGATATTGTTAATGAAGCTCAGGCTTTGTATAAACGTAACTATGATTTATTTGAAAAAATCAAATCTACACGTGATAAGGTTCAAGTCTTACTTGCATCGCATCAAGATAATACAGACTTAAAAAACTTTTATGCTGAGTTAGATGATATGTATGAACATGTTTATCTCAATGAAAGTAGAGTGGAGGCGATAAACAGAAATATCCAAAAATATAAT

SEQ ID NO: 6042 - protein, 181 aa, Streptococcus agalactiae; identical to SEQ ID NO: 1570

SEQ ID NO: 6043 - protein, 126 aa, Streptococcus agalactiae
TTGGGGTGCGTAACAGCTGAGATTATACCCATTGAACTTGATACAGTTAGTACTGTCGAAGGGAAATGTGTGCCATTACAAGTTTTTTGTGGTGGAAAAGGGCGTAGTGTCTTCTTAGGAGACAGC

SEQ ID NO: 6044 - protein, 42 aa, Streptococcus agalactiae
MGCVTAEIIPIELDTVSTVEGKCVPLQVFCGGKGRSVFLGDS

SEQ ID NO: 6045 - protein, 522 aa, Streptococcus agalactiae
ATGATTGCTTTAGATGTTTTTCTAACGCCCATTTTTAGAATAGAAGGCATGGCCTTTATGTCTAGTGTGGTTAATATTATCGCTGGAGTTATAATGGGACCAATCTATGCATTAGTTATGGCACTTGTAACGGCTTTTATTCGTATTTTAACTCAAGCAGGAGTAGCATCTGTTGCACCCTTAGCTATTCTAGGAGCTGGTCCAGGAGCTTTCTTAGCGGGTTGGCTTTATCAGTTTTATGCGAAAGACTGGATGTCTTGGGTGGGTGAGTTTATAGGAACAGGGATAATTGGAGCACTTTTATCAGCTCCAATTATGGTCTGGTTTTGGACTTGGACAGCGGATGGAAATCACGAAGTGTTAGCTAAAGCATCTGCAGCTCAATCCATTTTTCTTTTTATGCCAAGGTTTATAGGGGCGACTATAATTGGCGGTGTTATTGCTTTGTTGCTACTTCAGGGATTAAAGCGGGTTCCTGTATTTATGACAATACAAGCATTATTTAAAGGAGAAAAAGTAAAA

SEQ ID NO: 6046 - protein, 174 aa, Streptococcus agalactiae
MIALDVFLTPIFRIEGMAFMSSVVNIIAGVIMGPIYALVMALVTAFIRILTQAGVASVAPLAILGAGPGAFLAGWLYQFYAKDWMSWVGEFIGTGIIGALLSAPIMVWFWTWTADGNHEVLAKASAAQSIFLFMPRFIGATIIGGVIALLLLQGLKRVPVFMTIQALFKGEKVK

SEQ ID NO: 6047 - protein, 552 aa, Streptococcus agalactiae
ATGAAATTGGGTTTAAAAGATGTATTATTGATTGCTTTATTAGCGGTTGTTCTGGGCGTTGTTTACTTTGGAGCAGGCTATATTTCAAATGCTTTTGTACCTTTTGTAGGTCCTATAGCGCATGAAGTTATTTATGGTATTTGGTTTGTGGCAGGTCCAATGGCTCTTTATATATTGAGGAAACCAGGAACCGCTATTGTAGCAGAATTGTTAGCTGCTTTGATAGAGGTTTTAATTGGATCAATTTATGGACCAAGTGTACTCGTTATTGGTACCCTTCAAGGTTTAGGGTCAGAATTAGGCTTTACGCTGTTTAGGTATCATAATTACAAGTTGCCAGCTTTTATATTGTCTGCTATTTTGACATCAATTTTTAGTTTTGCATGGAGTTTTTATGCCAATGGACTTAGTGCATTTTCATTTTCATATAACATTCTGATGCTTATAGTAAGAACTGTTTCATCTATTATTTTCTTCTTATTAACAAAGAATATATGTGACCAATTGCATAGAAGTGGTGTACTGAATGCTTATGGGATTCATGAAGGGAAG

SEQ ID NO: 6048 - protein, 184 aa, Streptococcus agalactiae
MKLGLKDVLLIALLAVVLGVVYFGAGYISNAFVPFVGPIAHEVIYGIWFVAGPMALYILRKPGTAIVAELLAALIEVLIGSIYGPSVLVIGTLQGLGSELGFTLFRYHNYKLPAFILSAILTSIFSFAWSFYANGLSAFSFSYNILMLIVRTVSSIIFFLLTKNICDQLHRSGVLNAYGIHEGK

SEQ ID NO: 6049 - protein, 1284 aa, Streptococcus agalactiae
ATGCTATCTGTTGAAAAATTAGCTTACACCCATGGCGATAGTCATTATTTATTTGATGAAGTGACTTTTAGTCTTAACCCAGGAGAACGAATTTTAATTAGTGGCTATTCAGGGTGTGGTAAGAGTACATTGGCTCTTTTACTATCAGGGTTAAAAGAAAGTGGGAAAGGTCAAGTTTTATTAAACGGCTCATTAATAGAACCAAGCGATGTAGGTTTTCTTTTTCAAAATCCTGATTTACAATTTTGTATGGATACTGTGGCGCATGAGTTGTATTTTATTTTAGAAAATTTACAAATAGAACCGGAGCAAATGCAAGATAGAAGTGAGTTTGTATTGGCACAAGTTGGTTTAAAAGGATTTCAGAATCGGTTGATTTATACTTTATCTCAAGGTGAAAAACAGCGATTAGCATTGGCGACCATTTTTTTAAAATCTCCTAAACTTATTATTTTAGATGAAGCTTTTGCGAATTTGGATCAAGAGAGTGCCAGTCAACTATTACAATTAGTTCTTAATTATCAAGCAAACAATCAATCAATGCTGATTGTAATCGATCATTTGATTACTTATTATCAAGATATAATGGATCACTATTTTTGGTTGAAAAAACGGTTGACAAGGGTCGATTTTGATTATATGCTCAATCGTTTGAATGTCTTCGAATTAGAAAAGAAAAGTCATAATACAGGTGACAAACTGTTATCAATTAAAGATTTCCAAGTTAAACTTTCAAAAAACAAATTCATCTCTTACCTTGATTTTGATTTAGCAAGTGGGGAGAGGTTGTGCTTAGATGGACCAAGTGGCGTGGGGAAGTCTAGTTTCTTTATGGGATTGTTAGGGCTTTATAGGACTAAAGGGAAAAAACAATTTACTCATAGAAAGCAAATTCCTATAAGCTTTTTATTTCAAAATCCCTTAGACCAATTTATTTTTTCAACAGTTTATGACGAAATTTTTCAGGTTTGCAAGGATAGTAACAAAGCGAGGGATATTTTGGAAACCATAAATCTTTGGGATAAGAAACAGTTTTCACCATTTCAACTAAGTCAAGGGCAACAGAGGCGATTAGCTATTGGCAGTATTTTAGCTAGTGATAGTAAACTTCTATTATTAGATGAACTAACTTATGGACAAGATGCCTATCACGCTAATATGATTACGACTCTTCTTTTGAGTTATTGTCACAAAAATCATTGTGGGGTTATTTTTACTAGCCATGATCCTCACTTAAAAGAGTGTTTTGCAACACGTTTCTTGGAGGTGTCATCTTGTTCAATT

SEQ ID NO: 6050 - protein, 428 aa, Streptococcus agalactiae
MLSVEKLAYTHGDSHYLFDEVTFSLNPGERILISGYSGCGKSTLALLLSGLKESGKGQVLLNGSLIEPSDVGFLFQNPDLQFCMDTVAHELYFILENLQIEPEQMQDRSEFVLAQVGLKGFQNRLIYTLSQGEKQRLALATIFLKSPKLIILDEAFANLDQESASQLLQLVLNYQANNQSMLIVIDHLITYYQDIMDHYFWLKKRLTRVDFDYMLNRLNVFELEKKSHNTGDKLLSIKDFQVKLSKNKFISYLDFDLASGERLCLDGPSGVGKSSFFMGLLGLYRTKGKKQFTHRKQIPISFLFQNPLDQFIFSTVYDEIFQVCKDSNKARDILETINLWDKKQFSPFQLSQGQQRRLAIGSILASDSKLLLLDELTYGQDAYHANMITTLLLSYCHKNHCGVIFTSHDPHLKECFATRFLEVSSCSI

SEQ ID NO: 6051 - protein, 690 aa, Streptococcus agalactiae
TTGCAACACGTTTCTTGGAGGTGTCATCTTGTTCAATTTGAAAAACTATCATCTATTACCTTCCTATGTTTATTAATACCAACCTTTTCGTTTAGTTTCACATTGAGGTTAAGAACGTCTTTGTTATTTCTGATTATAGTAGTAACACTGCAATGCTTCGTAAAGGTTTCTTTAAAAACTTGGGCGAAGGTCAATCTGATCTCATTTGTGATGGGACTCTCTTTATTTCTAGGGACGTATTTTTGGGGGAAATTACCCCATCAATTCGTCTTAGCTAGTCTAGTAGCCTGTCGTCCGCTTATTTTCATGAACGTGGGTTTGTTATTTCATGCATCACATTCTAATTATGATTTTATAGACTCTCTTTATCAAACTTTCAAAGTGCCTAGTCATTTTGCATATGGTATTTTTGCGGTCTTTAATCTTCTACCATTAATTAAATTACAATACCAACGTAATCGACTCGCATTCCGACTGAAGAATCAGGTAACTTGGGCATTATCGCCTAGACTAATATTGTCAGTTTTATTAAAGACGATATATTGGGTAGAACAGTTAGAGTTAGCAATGCTTTCTAAAGGTTTTGAAGTGGGGAAAGAGCGAACCCATGCTTTAACTTATCCCGTTCGTTTTCGAGATTATAGTTTACTTGGTATGAGTATTTTATTGTCTATAGGAATGATTTTTAAA

SEQ ID NO: 6052 - protein, 230 aa, Streptococcus agalactiae
MQHVSWRCHLVQFEKLSSITFLCLLIPTFSFSFTLRLRTSLLFLIIVVTLQCFVKVSLKTWAKVNLISFVMGLSLFLGTYFWGKLPHQFVLASLVACRPLIFMNVGLLFHASHSNYDFIDSLYQTFKVPSHFAYGIFAVFNLLPLIKLQYQRNRLAFRLKNQVTWALSPRLILSVLLKTIYWVEQLELAMLSKGFEVGKERTHALTYPVRFRDYSLLGMSILLSIGMIFK

SEQ ID NO: 6053 - protein, 654 aa, Streptococcus agalactiae
ATGTTAAAAGATGAGATGATTACTAAAGGAGCAAAATATATCCAATCCATCTATCAAGATCCATTTATTCAAGGAATTATAAAAGGGCGTTTAGACCATGACGTAATCTGCCATTATTTACAGGCAGATAATATCTACCTTGGGAAATTTGCTGATATTTATGCCCTGTGCTTGGCAAAATCTGATAATTTACGAGATAAACAATTTTTCCTTGAACAAATTGACTTTACATTAAATCGGGAGTTAGCAGATGGTGAAGGCCCACATCAAGCCTTAGCCGCTTATACTAATCGATCTTATCAGGATATTATCGAAAAGGGTGTATGGTACCCGTCAGCAGATCATTACATTAAACATATGTATTTTCATTTTTACGAAAATGGTATTGCTGGTGCTTTAGCTGCAATGAGCCCATGTCCATGGATTTACCATCAATTGGCTAAAAAAATAATTGAGGAGAACCAGTTTTTGAATGGTAACCCTTTTAATAATTGGATAACTTTTTATGCTAACGATACAGTTGAAGAGTTAATGGAAAACTATTTTCGTATGATGGATTATTATGCGCAGAATTTGTCAAAAGAGAAGCAAGCTGATTTGGTAGATGCTTTTGTGAAATCTTGTCAGATGAAAGACGTTTTTTTCAAATGGCAA

SEQ ID NO: 6054 - protein, 218 aa, Streptococcus agalactiae
MLKDEMITKGAKYIQSIYQDPFIQGIIKGRLDHDVICHYLQADNIYLGKFADIYALCLAKSDNLRDKQFFLEQIDFTLNRELADGEGPHQALAAYTNRSYQDIIEKGVWYPSADHYIKHMYFHFYENGIAGALAAMSPCPWIYHQLAKKIIEENQFLNGNPFNNWITFYANDTVEELMENYFRMMDYYAQNLSKEKQADLVDAFVKSCQMKDVFFKWQ

SEQ ID NO: 6055 - protein, 795 aa, Streptococcus agalactiae
ATGACTTATTTAGCACCAGTTTTAACTATTGCAGGAACTGATCCTAGCGGTGGAGCAGGGATTATGGCAGATTTAAAGACATTTCAAGCTCGTCGGACTTACGGGATGGCTGTTGTGACTAGTGTTGTTGCTCAGAACACTTGTGGGGTTAGAGGCGTTCAGCATATAGAAACAGCTATCATTGATCAACAACTAGCTTGTGTTTATGATGATATTAAGCCAAAGGCGGTCAAAACAGGAATGTTAGCGGAGAGGGAAACGATTAGTTTAGTCGCTTCATATTTAAAAAAATATCCGCAACCTTATGTATTAGATCCTGTTATGGTGGCAACTAGCGGACATCGTTTAATTGATTCAGTTGCCGTAGAAGCATTAAAAGAAGACTTATTGCCATTAGCAACTATTATCACACCAAATTTACCAGAAGCTGAGATTTTAGTGGGATATGACTTATCAGATGAAGTAAGTATTATTAAAGCAGGTTACGATATTCAAAAACAATATTCTGTTAGAAATGTTCTTATAAAGGGAGGACATCTAGATGGTTTGGCTAAAGATTATTTATTTTTGGAAAAAGAAGGGTTGATAACTCTTAGTAATCAACGTATCAATACTATTCATACTCATGGGACTGGGTGTACATTTGCAGCAGTCGTTGCAGCGGAGTTAGCTAAAGGGCAATCAATTCTAAACGCGGTAAGTACTGCTAAATCATTTATTACTTCAGCTATCGAAACAGCGCCTGAGTTGGGTCTTGGAAACGGTCCTGTCAATCATACTAGCTATCAAGGAGAC

SEQ ID NO: 6056 - protein, 265 aa, Streptococcus agalactiae
MTYLAPVLTIAGTDPSGGAGIMADLKTFQARRTYGMAVVTSVVAQNTCGVRGVQHIETAIIDQQLACVYDDIKPKAVKTGMLAERETISLVASYLKKYPQPYVLDPVMVATSGHRLIDSVAVEALKEDLLPLATIITPNLPEAEILVGYDLSDEVSIIKAGYDIQKQYSVRNVLIKGGHLDGLAKDYLFLEKEGLITLSNQRINTIHTHGTGCTFAAVVAAELAKGQSILNAVSTAKSFITSAIETAPELGLGNGPVNHTSYQGD

SEQ ID NO: 6057 - protein, 768 aa, Streptococcus agalactiae
ATGTATTTAGAACAATTAAAAGAGGTAAATCCTTTAACCATTTGTATCACTAATAATGTGGTCAAAAACTTTACAGCTAATGGTTTATTAGCTTTAGGAGCTTCTCCGGCTATGAGCGAGTGCATAGAGGACTTAGAAGACCTGTTAAAAGTTGCAAATGCATTATTAATTAATATAGGAACACTAACAAAAGAAAGTTGGCAACTTTACCAAGAAGCAATCAAAATAGCAAATAAAAACCAAGTTCCAGTTGTATTAGATCCTGTAGCGGCAGGAGCAAGTCGTTTTCGATTAGAAGTGTCACTTGATTTATTGAAGAATTATTCTATTAGTTTACTTAGAGGAAATGGTAGTGAAATCGCTGCTTTGGTTGGTGAAAAACAAGCGTCTAAAGGGGCAGATGGGGGAAAAGTGGCTGATTTAGAATCAATTGCTGTAAAAGCCAATCAAGTTTTTGATGTGCCAGTGGTTGTCACAGGAGAAACTGATGCTATCGCTGTTAGAGGAGAAGTTCGCTTATTACAAAATGGTAGTCCTTTAATGCCACTTGTTACAGGAACTGGATGTCTATTAGGGGCAGTATTGGCTGCTTTTATTGGTAGTTCTGACAGAAGCGATGATCTTGCTTGTCTGACAGAGGCCATGACTGTTTATAATGTTTCTGGAGAAATTGCAGAGAAAGTGGCAAAAGGTAAGGGAGTGGGAAGTTTCCAAGTTGCATTTTTAGATGCCCTTTCCCAGATGAAATCAGAAATGATTATGGACAAA

SEQ ID NO: 6058 - protein, 256 aa, Streptococcus agalactiae
MYLEQLKEVNPLTICITNNVVKNFTANGLLALGASPAMSECIEDLEDLLKVANALLINIGTLTKESWQLYQEAIKIANKNQVPVVLDPVAAGASRFRLEVSLDLLKNYSISLLRGNGSEIAALVGEKQASKGADGGKVADLESIAVKANQVFDVPVVVTGETDAIAVRGEVRLLQNGSPLMPLVTGTGCLLGAVLAAFIGSSDRSDDLACLTEAMTVYNVSGEIAEKVAKGKGVGSFQVAFLDALSQMKSEMIMDK

SEQ ID NO: 6059 - protein, 669 aa, Streptococcus agalactiae
ATGAAAGATACATTGAAATTATATTTTGTTTGTGGGACTGTGGATTGCTCTAGGAAGAATATATTGACTGTTGTTGAAGAAGCCTTACAAGCAGGTATAACTCTATTTCAATTTAGAGAAAAAGGTTTTACAGCATTACAAGGTAAGGAAAAAATTGCTATGGCTAAGCAACTCCAAATACTTTGTAAGCAATATCAGGTTCCTTTTATTATTGATGATGACATTGACTTAGTTGAGTTAATTGATGCTGATGGTCTTCATATTGGACAAAATGATTTACCTGTTGATGAGGCACGGAGACGTTTACCAGATAAAATCATCGGTTTATCTGTGAGTACAATGGCTGAATATCAGAAATCACAATTATCTGTTGTTGATTACATCGGAATTGGGCCTTTTAATCCGACACAATCAAAAGCAGATGCTAAGCCTGCTGTTGGCAATAGGACAACAAAGGCAGTTAGAGAAATTAATCAAGATATTCCAATCGTTGCAATAGGCGGAATCACTAGTGATTTTGTTCATGATATTATAGAATCAGGTGCAGATGGGATTGCTGTTATATCGGCTATTTCAAAAGCAAATCATATTGTAGATGCAACCAGACAATTGCGCTATGAAGTTGAAAAAGCTCTGGTTAATAGGCAAAAACGCAGTGATGTAATCAAA

SEQ ID NO: 6060 - protein, 223 aa, Streptococcus agalactiae
MKDTLKLYFVCGTVDCSRKNILTVVEEALQAGITLFQFREKGFTALQGKEKIAMAKQLQILCKQYQVPFIIDDDIDLVELIDADGLHIGQNDLPVDEARRRLPDKIIGLSVSTMAEYQKSQLSVVDYIGIGPFNPTQSKADAKPAVGNRTTKAVREINQDIPIVAIGGITSDFVHDIIESGADGIAVISAISKANHIVDATRQLRYEVEKALVNRQKRSDVIK

SEQ ID NO: 6061 - protein, 1257 aa, Streptococcus agalactiae
ATGCGTAAAATTATTATTAACGGTGGCAAGCAACTGACGGGAGAAGTTGCTGTATCGGGTGCTAAAAATAGTGTAGTTGCCTTGATTCCTGCTACTATACTTGCTGATGATATTGTGGTCTTAGATGGAGTTCCAGCTATTTCTGATGTTGACAGTTTAGTTGACATTATGGAAACTATGGGAGCTAAGATTAAGCGTTATGGTGAGACGCTTGAAATTGATCCACGTGGCGTTAAAGATATTCCAATGCCTTATGGCAAAATCAATAGTCTTCGTGCATCCTATTATTTCTATGGAAGCTTATTGGGGCGTTATGGTCAAGCAACAGTAGGTTTACCTGGTGGTTGTGATTTAGGCCCCCGTCCGATTGATTTACATTTAAAAGCTTTTGAAGCGATGGGAGCTAGTGTTTCTTATGAAGGTGATTCAATGCGTCTAGCAACAAACGGAAAGCCTTTGCAAGGAGCAAATATTTATATGGATACTGTCAGTGTTGGTGCGACAATTAACACTATGATCGCAGCAGCTAAGGCAAATGGTCGTACGGTTATTGAAAATGCTGCGCGTGAACCAGAAATTATTGACGTGGCTACTCTTTTAAATAATATGGGAGCTCATATTCGTGGTGCTGGGACTGATGTTATTACAATTGAAGGTGTGAAATCGCTCCATGGCACGCGTCATCAAGTAATTCCAGATCGTATTGAAGCAGGAACTTATATTGCTATGGCAGCAGCTATCGGACGAGGAATAAAAGTGACCAATGTGTTATATGAACACCTTGAGAGTTTCATTGCTAAGTTAGATGAGATGGGAGTTCGAATGACAGTTGAAGAGGATTCAATTTTTGTCGAAGAACAAGAAAAGTTAAAAGCTGTATCCATAAAAACCTCACCTTACCCAGGATTTGCTACAGATTTACAACAACCTCTAACCCCTTTATTACTAACAGCAGAAGGAAACGGGAGTTTATTAGATACTATCTATGAGAAACGTGTTAATCATGTTCCCGAATTAGCACGTATGGGAGCTAATATTTCTACCCTAGGGGGCAAAATAGTTTATAGTGGTCCTAATCAATTATCTGGTGCACCTGTAAAAGCGACAGATTTGCGTGCAGGCGCAGCTTTAGTTATCGCTGGCTTAATGGCAGAGGGACGAACTGAAATTACGAACATCGAGTTTATTTTACGTGGATATTCTAATATCATCGAGAAACTAACATCATTGGGTGCGGATATCCAATTGGTTGAGGAA

SEQ ID NO: 6062 - protein, 419 aa, Streptococcus agalactiae
MRKIIINGGKQLTGEVAVSGAKNSVVALIPATILADDIVVLDGVPAISDVDSLVDIMETMGAKIKRYGETLEIDPRGVKDIPMPYGKINSLRASYYFYGSLLGRYGQATVGLPGGCDLGPRPIDLHLKAFEAMGASVSYEGDSMRLATNGKPLQGANIYMDTVSVGATINTMIAAAKANGRTVIENAAREPEIIDVATLLNNMGAHIRGAGTDVITIEGVKSLHGTRHQVIPDRIEAGTYIAMAAAIGRGIKVTNVLYEHLESFIAKLDEMGVRMTVEEDSIFVEEQEKLKAVSIKTSPYPGFATDLQQPLTPLLLTAEGNGSLLDTIYEKRVNHVPELARMGANISTLGGKIVYSGPNQLSGAPVKATDLRAGAALVIAGLMAEGRTEITNIEFILRGYSNIIEKLTSLGADIQLVEE

SEQ ID NO: 6063 - protein, 570 aa, Streptococcus agalactiae
TTGTGGTATAATATTATCATGGATATATGGACAAATTTAGGACGGTTTGCATTCATTGAAACAGAACATGTTAACCTACGTCCTGTTGCCTACACTGATAGGGAAGCTTTTTGGCGAATAGCTTCAAAAAGGACAAATTTACAATTTATTTTTCCTGTTCAAACCAGTAAGAAGGAAAGTGATTTTCTTTTAGTTCATTCTTTTATGAAAGAGCCGTTGGGAGTTTGGGCGATTGAAGATAAAGTTAGTCATAAAATGTTTGGAGTTATCCGTTTTGAAAACATTGATTTATCTAAAAAGACAGCTGAAATTGGCTATTTTTTGAAAGAAAGTTCTTGGGGTCAAGGCATTATGACTGAATGTCTAAAGACACTTTCTTTTTTTGCTTTTCAAGAGTTTGGGATGGACAAATTGATCATAGTAACACATAAAGAGAATATTGCTAGTCAGAAGGTTGCTTTGAAGGCGCATTTCAAACAATCTAGGAGTTTTAAAGGAAGCGACCGTTATACACGCCGTATAAGAGACTATATTGAGTTTCAATTAACTAGGGGTGATTATCGTTATGAG

SEQ ID NO: 6064 - protein, 190 aa, Streptococcus agalactiae
MWYNIIMDIWTNLGRFAFIETEHVNLRPVAYTDREAFWRIASKRTNLQFIFPVQTSKKESDFLLVHSFMKEPLGVWAIEDKVSHKMFGVIRFENIDLSKKTAEIGYFLKESSWGQGIMTECLKTLSFFAFQEFGMDKLIIVTHKENIASQKVALKAHFKQSRSFKGSDRYTRRIRDYIEFQLTRGDYRYE

SEQ ID NO: 6065 - protein, 1281 aa, Streptococcus agalactiae
ATGAGTAAACATCAAGAAATTTTGGAGTACCTAGAAAATTTAGCTGTTGGTAAGAGGGTTAGTGTACGCAGTATTTCAAATCATTTAAAGGTGAGTGATGGCACTGCATACCGCGCTATAAAAGAGGCAGAAAATAGGGGGATTGTTGAGACTAGACCGCGTAGTGGGACAGTACGTGTTGCTCAAAAAGCAAAGGTTAATATTGAAAAACTGACTTATGCTGAAATTGCAAGGATTAGTGACTCACAAGTTGTTGCAGGAACAGAGGGACTCAGCAAGGAGTTTAGTAAATTTTCTATAGGTGCAATGACTCACAGAAATATTGAAAAATATTTGGTGCAAGGAGGGTTATTGATTGTTGGCGACCGTGATGAAATACAACATTTAGCCTTACAACATCAAAACGCTATCTTAGTTACAGGTGGCTTTAATGTTTCCCCATCTGTTTGTCGTTTAGCAGATAAACTTCAAATTCCCGTAATGGTAACACACTATGATACATTCACAGTATCAACGATGATTAATCACACTTTGTCAAATGCCAAAATTCGTACTGATTTAAAGACCGTTGAACAAGTCTATCAGTCGCAAATGGATTACGGTTTCTTAGCGCAGGATGATACCGTAAAAGAATTTAATCTTCTTGTTAAACAAACTAAAAATGTTCGTTTTCCAATAGTCAACCAAGCTAATGTTGTCGTTGGTGTTGTTAGTGTTCAAGATATTCTTGGAAAAGATAAAGAAGTAAAATTGGCAACAGTCATGTCAAAAAATATCATTGTTGCTAAACCTCGAATGAGTCTAGCTAATATCAGTCAAAAAATGATTTTTGAAGATTTGAATATGATGCCAGTAGTATCGGATGACTTTGAATTATTAGGCGTTATTACAAGACGACAAGCTGTAGAAAATTTATCGATGTCGCAAGGGACAGATTTATACACCTATAGTGATCAAATCTTGTCTAATTTACAAATTGAAGATGGTCACTTTTCGTTTTTAGTAGAACCCGCTATGATTGACCATACAGGTAGCTTAACACAAGGAGTTTTGACGGAGTTCTTAAAAGAAATTTGTATTCGTGTCTTAACTCGTAAGCATCAACGCAGTATTGTTGTTAAACAAATGACACTTTATTTCTTGCAACCTGTTCAAATTGATGAAATAATAATGGTAACGCCAACAATTATTTCAGAAAAACGGCGCGAAGCTACACTCGATTTAGAATTAAAATTAGAAAATAAAATTATTGCTAAAGCTATGATAGCGGTAAAAATTAAT

SEQ ID NO: 6066 - protein, 427 aa, Streptococcus agalactiae
MSKHQEILEYLENLAVGKRVSVRSISNHLKVSDGTAYRAIKEAENRGIVETRPRSGTVRVAQKAKVNIEKLTYAEIARISDSQVVAGTEGLSKEFSKFSIGAMTHRNIEKYLVQGGLLIVGDRDEIQHLALQHQNAILVTGGFNVSPSVCRLADKLQIPVMVTHYDTFTVSTMINHTLSNAKIRTDLKTVEQVYQSQMDYGFLAQDDTVKEFNLLVKQTKNVRFPIVNQANVVVGVVSVQDILGKDKEVKLATVMSKNIIVAKPRMSLANISQKMIFEDLNMMPVVSDDFELLGVITRRQAVENLSMSQGTDLYTYSDQILSNLQIEDGHFSFLVEPAMIDHTGSLTQGVLTEFLKEICIRVLTRKHQRSIVVKQMTLYFLQPVQIDEIIMVTPTIISEKRREATLDLELKLENKIIAKAMIAVKIN

SEQ ID NO: 6067 - protein, 750 aa, Streptococcus agalactiae
ATGTGGGAAGTTGAAGAATACGTTCGTAGACGTTGTAAAGAAGAAAACGTATTGCCATTGCAAATCGGGGTTGATGGTGCAGTTATGGATTACCCATATGCTACTTGTTGTGGGCTTAATGATGAAGTGGCTCATGCCTTTCCTCGTCATTATACCCTAAAACAAGGTGACCTTTTAAAAGTAGATATGGTTTTAAGCGAACCTTTAGATAAATCAATTGTTGATGTTTCATCGTTAAACTTTGACAACGTAGCTCAAATGAAAAAGTACACGGAAACATATAGTGGTGGTTTGGCAGACTCGTGTTGGGCTTATGCTGTAGGTGAAGTTTCACAAGAGGTGAAAGACTTAATGTCTGTGACAAGAGAAGCAATGTATATTGGGATTGAAAAAGCAGTTATCGGAAACCGTATTGGTGATATTGGAGCTGCTATTCAGGATTATGCAGAGAGTCGTGGTTATGGAGTTGTTCGTGATTTGGTTGGTCACGGTGTTGGTCCAACGATGCATGAAGAGCCTATGGTGCCTAACTATGGTACAGCAGGTCGAGGTCTCCGTCTTCGTGAGGGGATGGTTTTAACCATCGAACCAATGATTAATACTGGTACTTGGGAAATTGATACAGACATGAAAACTGGTTGGGCACATAAAACCTTAGATGGTGGTCTTTCTTGTCAATATGAACATCAATTTGTTATCACTAAAGATGGTCCTGTTATTTTAACGAGTCAAGGAGAAGAAAGAACTTAC

SEQ ID NO: 6068 - protein, 250 aa, Streptococcus agalactiae; identical to SEQ ID NO: 1606

SEQ ID NO: 6069 - protein, 336 aa, Streptococcus agalactiae
ATGAAATTAAAAAAATTCTTTGAGGATTTGCTGGCTAAACTAGAATATAGACCCATTCAAGTTTTTATGCGTCATTTTCAAAGTGCAGAGATGGACTTATCAGCCATAGCAGTTGCTTATTATCTATTAGTGACAGCTTTTCCATTACTAGTTATTGCTGCTAATATTTTTCCTTATTTTCATATTAATGTGTCGGATTTATTGTCACTTATGCAAAAAAATCTTCCGAAAAATATTTATGAACCTGCCTCACGCTTAGCAGTAGATGCTTTTTCGAAACCGTCTACCGGCATTTTGGGATTCGCTTCATTAACAGCTTTTTGGACNNNNNTTAAT

SEQ ID NO: 6070 - protein, 112 aa, Streptococcus agalactiae
  VARIANT 110, 111: Xaa = Any Amino Acid
MKLKKFFEDLLAKLEYRPIQVFMRHFQSAEMDLSAIAVAYYLLVTAFPLLVIAANIFPYFHINVSDLLSLMQKNLPKNIYEPASRLAVDAFSKPSTGILGFASLTAFWTXXN

SEQ ID NO: 6071 - protein, 578 aa, Streptococcus agalactiae
TTGACCTCTCTTCAAAAAGCCATTAATAAAGCATACGGTGTTGACCAACACAGAGACTTTGTGATTAGTCGTTTAGTGGGTGTGGGGACTGGGCTGATCATCCTATTTTTACTGACTTTTGTTTAATTTTTTCAACTTTTTCAAAACCAGTTTTACAGATAATTGTAAACATGTATGATTTGGGAGATACTCTAACGGCGTGGCTTTTAAATCTTGCACAACCAGTTACATTTTTGACTATATTTTTAGGTATTGGAATTTTATACTTTATTTTACCTAACGCACGAATTAGAAAAGTACGTTATGTCATTCCAGGGACATTATTTTCAACGTTTGTTATTGGTTTTTTTAGTAATTTAATTAGCCAATACGTCTTAAATAGGGTTGAGAAAATGGTAGATATTAAAACGTTTGGTTCGGTCGTTATCTTTATCTTAATGCTATGGTTTATTTTCTTAGCCCACATTATGATTTTAGGTGCAATACTGAATGCCAGCGTTCAAGAAATTGCGACAGGAAAAATTGAATCAAGGCGTGGAGATATTATGTCTCTTATCCAAAAATCCAAAGAAGAAAAA

SEQ ID NO: 6072 - protein, 193 aa, Streptococcus agalactiae
MTSLQKAINKAYGVDQHRDFVISRLVGVGTGLIILFLLTFVLIFSTFSKPVLQIIVNMYDLGDTLTAWLLNLAQPVTFLTIFLGIGILYFILPNARIRKVRYVIPGTLFSTFVIGFFSNLISQYVLNRVEKMVDIKTFGSVVIFILMLWFIFLAHIMILGAILNASVQEIATGKIESRRGDIMSLIQKSKEEK

SEQ ID NO: 6073 - protein, 453 aa, Streptococcus agalactiae
ATGGTTAAATTAAAATCGTTACTGAAAAAAAGTATTCAAAATGAAGTCAGCTTATATTTACTGTTCGGACTATTAACATCCCTTCTTTATTTAGTTATTCGACAAGGGATTTTTAATTTCTCGCAGAACGCTCCATTCTCTGCAATAGTTGCTAACATAATAGCTATACTTTTTGCTTTTTTTACAAATGATCGATTTGTTTTTAAACAAACTAAAATTGGACAGTTTCAACGCTTACAAACATTTGTCATCGCTAGATTAGGCACATTAGGATTAGATTTGATATTAGCTGTTATTTTTGTTGATCAATTTCCTTCTATTATCGGACAATTCGTTCAGCACAATTTAAATAAAATCAACACCATTGAAAGCCTTGTATCTCAAATATTAATTATTTTACTCAACTACATCTTGAGCAAATTTGTTATTTTTAAAGACAAAAAAAGGCAACTC

SEQ ID NO: 6074 - protein, 151 aa, Streptococcus agalactiae
MVKLKSLLKKSIQNEVSLYLLFGLLTSLLYLVIRQGIFNFSQNAPFSAIVANIIAILFAFFTNDRFVFKQTKIGQFQRLQTFVIARLGTLGLDLILAVIFVDQFPSIIGQFVQHNLNKINTIESLVSQILIILLNYILSKFVIFKDKKRQL

SEQ ID NO: 6075 - protein, 507 aa, Streptococcus agalactiae
ATGAACACATTTACAACTCGCGATTACGCTCACATGGCTATTGTAACAGCTATCTATATCGTTTTAACCATAACGCCACCTTTTAATGCTATTGCTTATGGTGCTTATCAATTCCGTGTTTCAGAAATGCTAAATTTCTTGGCCTTTTATCACCGAAAATACCTTTTTGCGGTAACGTTAGGATGTATGATTTCTAATCTTTATAGTTTTGGAATGATTGATGTCTTTGTAGGTGGTGGTTCAACCTTACTTTTTGTTTATCTTGGAACCATTTTATTCAAGCAATATCAAAAAGATTATCTATTTAATGGTCTTATTAACAAAGCATTCTTTTTCTTTTCTTTCTTCTTTGCTGCTTCAATGATTACGGTAGCAGTTGAATTGAAAATTGTAGCAGGATTACCTTTATTATTAACATGGTTAACGACAGCTGTTGGTGAATTGGCTTCACTTTTGGTTGGAGCAGTCCTTGTGGATAAGTTGAGTAGACACGTCGATTTTACAAAA

SEQ ID NO: 6076 - protein, 169 aa, Streptococcus agalactiae; identical to SEQ ID NO: 1612

SEQ ID NO: 6077 - protein, 1944 aa, Streptococcus agalactiae
ATGAATGAATTAGTATCTTTGTTGAATCAGTACGCAAAAGAGTATTATACACAAGATAATCCCACAGTTTCTGACAGTCAATATGACCAGTTATATCGAGAATTAGTAGAATTAGAAGAGCAACATCCAGAAAACATTTTGCCAAATAGTCCCACACATCGAGTGGGTGGTTTAGTTTTAGAAGGCTTTGAAAAATACCAACATGAATATCCTTTGTATTCATTGCAGGATGCTTTCTCAAAAGAAGAATTGATAGCCTTTGATAAACGTGTTAAAGCAGAGTTTCCAACTGCTTCTTATATGGCAGAGCTGAAAATTGATGGTCTATCTGTCTCGTTGACTTATGTAAATGGTATTTTACAGGTTGGGGCAACACGTGGTGATGGCAATATTGGAGAAAATATTACTGAAAATTTAAAGCGTGTTCATGATATTCCTCTACATTTAGACCAAAGTTTAGATATTACTGTTCGCGGAGAGTGCTACCTTCCCAAAGAATCTTTTGAAGCTATTAACATAGAAAAACGTGCAAATGGTGAGCAGGAATTTGCTAATCCTAGGAATGCAGCAGCAGGAACCTTGCGCCAATTAAACACAGGGATTGTTGCGAAACGTAAATTAGCAACTTTTCTTTATCAAGAAGCTAGCCCTACGCAAAAAGAAACACAAGATGATGTTTTAAAAGAGCTAGAAAGCTATGGCTTTTCAGTCAATCATCATCGTTTAATTAGCTCTTCTATGGAGAAAATTTGGGATTTTATCCAAACTATAGAAAAAGATAGAATTTCCCTCCCTTATGATATCGATGGTATTGTTATTAAGGTTAATAGCTTAGCAATGCAAGAAGAGTTGGGCTTCACTGTAAAGGCACCTCGTTGGGCGATTGCATATAAATTCCCTGCTGAAGAAAAGGAAGCAGAAATATTATCTGTTGATTGGACAGTTGGGCGAACAGGAGTTGTAACACCAACAGCTAACCTAACTCCAGTTCAACTAGCAGGGACAACCGTTAGTAGGGCCACTCTGCATAATGTAGATTATATTGCCGAAAAAGATATCCGTATTGGAGATACTGTTGTTGTATACAAAGCAGGGGATATCATCCCTGCAGTCTTAAATGTCGTTATGAGTAAGCGAAACCAGCAAGAAGTCATGCTTATTCCTAAACTATGTCCTTCTTGTGGTAGTGAATTAGTTCATTTTGAAGATGAGGTGGCTTTACGTTGTATTAATCCGCTGTGCCCCAACCAAATCAAAGAACGTTTAGCTCATTTTGCTAGCCGGGATGCTATGAATATTACAGGTTTTGGTCCATCCTTAGTCGAAAAATTATTTGATGCTCATTTAATAGCAGATGTTGCAGATATTTATCGTTTAAGTATAGAGGATTTATTAACTTTAGATGGTATTAAAGAGAAATCTGCAACTAAGATTTATCATGCAATCCAATCTTCAAAAGAAAATTCTGCTGAAAAACTTCTTTTTGGCCTAGGTATTCGTCATGTGGGAAGCAAGGCGAGCCGCCTTTTATTGGAGGAATTTGGTAATTTGAGGCAACTAAGTCAAGCAAGTCAAGAAAGTATTGCCTCAATTGATGGACTAGGAGGTGTTATTGCCAAATCACTTCATACGTTCTTTGAAAAAGAAGAGGTAGATAAACTACTAGAGGAATTAACTTCCTATAACGTTAATTTTAATTATCTAGGAAAACGAGTTAGTACAGATGCACAACTTTCAGGTTTAACAGTCGTTTTAACCGGAAAACTTGAAAAGATGACTCGTAATGAAGCAAAAGAGAAATTACAAAACCTTGGTGCTAAGGTGACAGGTAGCGTTTCTAAAAAGACTGATTTAATTGTTGCAGGAAGCGATGCAGGAAGTAAACTAACCAAGGCTCAAGATTTAGGGATTACAATACAAGATGAAGACTGGTTACTCAACCTT

SEQ ID NO: 6078 - protein, 648 aa, Streptococcus agalactiae
MNELVSLLNQYAKEYYTQDNPTVSDSQYDQLYRELVELEEQHPENILPNSPTHRVGGLVLEGFEKYQHEYPLYSLQDAFSKEELIAFDKRVKAEFPTASYMAELKIDGLSVSLTYVNGILQVGATRGDGNIGENITENLKRVHDIPLHLDQSLDITVRGECYLPKESFEAINIEKRANGEQEFANPRNAAAGTLRQLNTGIVAKRKLATFLYQEASPTQKETQDDVLKELESYGFSVNHHRLISSSMEKIWDFIQTIEKDRISLPYDIDGIVIKVNSLAMQEELGFTVKAPRWAIAYKFPAEEKEAEILSVDWTVGRTGVVTPTANLTPVQLAGTTVSRATLHNVDYIAEKDIRIGDTVVVYKAGDIIPAVLNVVMSKRNQQEVMLIPKLCPSCGSELVHFEDEVALRCINPLCPNQIKERLAHFASRDAMNITGFGPSLVEKLFDAHLIADVADIYRLSIEDLLTLDGIKEKSATKIYHAIQSSKENSAEKLLFGLGIRHVGSKASRLLLEEFGNLRQLSQASQESIASIDGLGGVIAKSLHTFFEKEEVDKLLEELTSYNVNFNYLGKRVSTDAQLSGLTVVLTGKLEKMTRNEAKEKLQNLGAKVTGSVSKKTDLIVAGSDAGSKLTKAQDLGITIQDEDWLLNL

SEQ ID NO: 6079 - protein, 1017 aa, Streptococcus agalactiae
ATGAAGAAACAAAAAAAAGCGCGTTTAATTTATAACCCAACTTCTGGTCAAGAAATTATGAAAAAAAATGTAGCGGAAGTTCTTGATATACTTGAAGGATTTGGGTATGAAACATCAGCCTTTCAAACAACGCCAACTAAAAATTCTGCCAGAGATGAAGCTGCTAGAGCTGCTCAAGCTGGTTTTGATTTAATTGTTGCAGCAGGTGGAGATGGTACTATTAATGAAGTTGTTAATGGTATTGCTCCTTTGAAACGTCGTCCTAAGATGGCAATTATTCCAACTGGAACAACTAATGATTTTGCTCGTGCCTTAAAAATACCGCGAGGTAATCCTATTGAAGCAACTAAATTAATTGGTAAAAATCAAATCGTTAAGATGGACATTGGTCAAGCTCAAGAGGACAATTATTTTATTAATATTGCAGCTGCAGGTAGTTTGACAGAGTTAACTTATAGTGTACCAAGTCAATTGAAAACAACGTTTGGCTATCTTGCTTATCTAGCAAAGGGTGTTGAATTATTACCTCGAGTTCGAAAAGTACCAGTCAAAATTACTCACGATAAGGGTGAATTTATCGGTGATGCTTCAATGATTTTTGTTGCCATCACAAATTCTGTAGGAGGGTTTGAACAAATTGCACCTGATGCCAAATTGGATGATGGGAAATTTACCCTTATTTTAGTAAAAACTGCAAATCTTATTGAGATTATGCATCTCATTCGTTTGGTGCTAGCAGGTGGAAAACATATTAATGATAAACGAGTAGAGTATATTAAAACGTCTTATCTAACTATCGAACCCCTATCAGACGAGCGTATGATGATTAACTTAGATGGAGAATATGGAGGAGATGCTCCCATTACTCTAGCAAACCTTAAAAATCATATTAGGTTCTTTGCTAATACTGATGAAATTTCGGATGATGCTTTAGTTTTAGATAAAGATGAATTAGCGATAGAAGCTATTGCACAGAAGTTTGCTAATGAGGTAGATGATTTAGAAGGATTAGGAGAT

SEQ ID NO: 6080 - protein, 339 aa, Streptococcus agalactiae
MKKQKKARLIYNPTSGQEIMKKNVAEVLDILEGFGYETSAFQTTPTKNSARDEAARAAQAGFDLIVAAGGDGTINEVVNGIAPLKRRPKMAIIPTGTTNDFARALKIPRGNPIEATKLIGKNQIVKMDIGQAQEDNYFINIAAAGSLTELTYSVPSQLKTTFGYLAYLAKGVELLPRVRKVPVKITHDKGEFIGDASMIFVAITNSVGGFEQIAPDAKLDDGKFTLILVKTANLIEIMHLIRLVLAGGKHINDKRVEYIKTSYLTIEPLSDERMMINLDGEYGGDAPITLANLKNHIRFFANTDEISDDALVLDKDELAIEAIAQKFANEVDDLEGLGD

SEQ ID NO: 6081 - protein, 2298 aa, Streptococcus agalactiae
ATGGATAATACTGTCATTGTACATTACCATAGCCGAAAGAAAAATTACTTTAATTTAAGTTTATGGCAGTGGCGCGATGGCTCAGAGGGTCAAGATGCTCATTTTTCACGGTTTGACAGTTTCGGTGCTGTTGCGATACTAAAATATCCCTTGCCATATTTTTTAAGCCATTATTATGTGATTGTTAAGGATAAAAATTGGCATCATAAAACAATAGATTATCGCATTGATTGTACTAAAGGTGGTGCACGTAAAGAAGTTTGGATTGTAGATGGGGATGACAATCTGTATTATTCTCGTCAAGCAGCAGTTAGTAGCCATCATTATAGTAGACGCCAACCTCATGCCTACGATATGGCAATCAATAGTAGAGCGTTTGATAAAAAATGGGGATTTGATGGTTGGTTAGGTTTTGAATATTCAGAAACTAAAACGGCTTTTAGATTGTGGGCCCCTACTGCGGAACGTGTAGAACTGATTTTATATCATTCGACAGATGAAACAGCAAGTGTATCAAAAGTTCTTTCTATGAAAAGAGGGACAGCCGTCAATTATAAAAATCATAAAGAAAACACCCATGGCGTCTGGTTTACTGAACTTGAAGGAAACTATAATTACCAAGCATATACTTATCGAGTCTACTATAGACGACGTACCTTTAAAATTACGAGAGACCCTTATTCCATTGCAACGACTGCAAATGGTAAAAGGTCTATTGTTATTGCTCCAGAAGCATTAACTCCGGAAGGGTTTAAAATAAGTCATGGAAAAGAAGCTAAGTGGCGGCTCGAAAACCCCAATCAAGCAGTCATTTACGAAATGCATGTGCGTGATTTTTCGATATCTGAGACTTCAGGAGTTAAGACAGATTATCAAGGAAAATTTAAGGGATTGCATCAAAAAGATACAGTTAATCAGCATGGTGATAAAACGACCTTTGATTATGTGCAAGACTTAGGAGTTAACTATATCCAACTTCAACCAATTTTCGATCATCATCAGACATTTGATGATGATGGTCACTATGCTTATAATTGGGGATATGATCCTGAAAACTACAATGTTCCAGAAGCAAGCTTCTCTAGTAATCCACATGAACCTGCAACGCGTATTTTAGAATTAAAATCTGCTATCCAAGCGTACCATGATGCAGGCATTGGTGTTATTATGGATGTTGTCTATAATCATACTTTTTCATCAACTGATTCTGCATTTCAACTAACGGTTCCAGATTATTATTATCGAATGAATCACAATGGAACATTTCAAAATGGGTCAGGCTGTGGTAATGAAACAGCTAGTGAAAAAGAAATGTGTCGTAAGTATATTCTTGATTCAGTTTTGTATTGGGTGAAAGAATATAATATCGATGGTTTTCGATTTGATTTGATGGGACTACATGATGTAGAAACGATGAACATTATAAGAAATGAGCTAAATAAAATCGACCCTCGTATTTTGGTTTATGGAGAAGGATGGGACATGGGAGCTGGTCTCACGCCTCAAAATAAAGCTAAAAAAGATAATGCTTATCAGATGCCTGGAATTGGCTTTTTCAATGATGATGTAAGAGACGCTGTCAAAGGTGCGGAAATTTACGGAGAATTTAAAAAAGGCTTAGTTTCTGGAAACAGTACAGAAGATATTGTTGCAAAAGGCATTTTAGGAAGTGATGAGTTAGTATCATACATTGATCCTAGTCAAGTTTTAAATTATGTTGAAGCACATGACAACTACAACTTAAATGATTTGCTATGGGAATTACATCCTAATGACAACGAGAAACAACATATTTACCGAGTTGAAGTAGCTAGTGCTATGAATCTATTGATGCAAGGGATGGCTTTCATGCAATTAGGTCAGGAGTTTCTTCGAACAAAGTGTTATCCTACAGGTGATAAAGGTCAACTTACTCAAGCAGATAAAGAAAGGGCTATGAATTCTTACAATGCCCCAGACCAAGTTAATCAGGTCAACTGGGATAATGTTACCTTTCATAAGAGTACTATTAATTTTATTAGGAAAATAATTACTTTGAAGACAAACTCTCCTTACTTTTCTTACTCTAGCTTTGAAGAGATTCGCAAACATGTTTTTGTAGAGTCTGCTCAATACCATTCAGGTTTCATAAGTTTTACAGTTGAAGAACATAAGAAAATAAAAATAATTTTCAATATTAAAGGAAAACGCTTGCAGAATCCTTTCATAGGTGATATAATAATATCAAATCATGAAGAAGGAAAAGCGATAGATTCATTAGATGATGAGCTTTCTGTAATGATCTTTGATATCACAAAA

SEQ ID NO: 6082 - protein, 766 aa, Streptococcus agalactiae
MDNTVIVHYHSRKKNYFNLSLWQWRDGSEGQDAHFSRFDSFGAVAILKYPLPYFLSHYYVIVKDKNWHHKTIDYRIDCTKGGARKEVWIVDGDDNLYYSRQAAVSSHHYSRRQPHAYDMAINSRAFDKKWGFDGWLGFEYSETKTAFRLWAPTAERVELILYHSTDETASVSKVLSMKRGTAVNYKNHKENTHGVWFTELEGNYNYQAYTYRVYYRRRTFKITRDPYSIATTANGKRSIVIAPEALTPEGFKISHGKEAKWRLENPNQAVIYEMHVRDFSISETSGVKTDYQGKFKGLHQKDTVNQHGDKTTFDYVQDLGVNYIQLQPIFDHHQTFDDDGHYAYNWGYDPENYNVPEASFSSNPHEPATRILELKSAIQAYHDAGIGVIMDVVYNHTFSSTDSAFQLTVPDYYYRMNHNGTFQNGSGCGNETASEKEMCRKYILDSVLYWVKEYNIDGFRFDLMGLHDVETMNIIRNELNKIDPRILVYGEGWDMGAGLTPQNKAKKDNAYQMPGIGFFNDDVRDAVKGAEIYGEFKKGLVSGNSTEDIVAKGILGSDELVSYIDPSQVLNYVEAHDNYNLNDLLWELHPNDNEKQHIYRVEVASAMNLLMQGMAFMQLGQEFLRTKCYPTGDKGQLTQADKERAMNSYNAPDQVNQVNWDNVTFHKSTINFIRKIITLKTNSPYFSYSSFEEIRKHVFVESAQYHSGFISFTVEEHKKIKIIFNIKGKRLQNPFIGDIIISNHEEGKAIDSLDDELSVMIFDITK

SEQ ID NO: 6083 - protein, 1866 aa, Streptococcus agalactiae
ATGTCCAATAAAGATGAGTTATATACTTTTGGAATAGGTGAAAATTTTCATCTCCAGAATTATTTAGGCGTACATAGCGAAAATGAAAGCTTTTGTTTCAGAGTTTGGGCTCCTAATGCTGAAAATGTTCAAGTTATTGGAGATTTTACAGATTGGCGAAATCGTCCTCTCCAAATGAACAAAAATCAAGCAGGAGTTTGGGAAGCTAATAGTTTGGATGCGCGCGAAGGTGATTTATATAAATATTTGGTTACTCGTAAAGGTGGTCAAGTAGTTGAGAAAATCGATCCTATGGCAGTTTATATGGAAAGACGTCCTGGAACTGCAAGTGTTATTAAAGTGCTTAGAAATAAAAAGTGGGAAGATGGCCTTTGGATGGGAAGGCGCAAACGTCTGGGGTTTCAGAAGCGTCCAATTAATATTTACGAAGTTCATGCTGGTTCATGGAAAAAAGATGATTTTGGACATCCTATGACTTTTTCTCAGTTAAAAGACTACTTAATCCCCTACCTTGTTGAGATGAATTATACTCATGTTGAATTTATGCCCTTAATGGCACATCCGCTTGATATGAGTTGGGGATATCAATTAATGGGGTATTTTGCTTTTGAACATACCTATGGTACTCCAGAAGAATTTCAAGACTTTGTAGAAGCATGTCATAAAAATAATATAGGAGTTCTTGTAGATTGGGTTCCAGGACACTTTATTCAGAATGATGATGCTTTAGCCTATTTCGATGGAACTGCTACTTATGAGTATCAAAATCATGATCGTGCGCATAACTATCGATGGGGAGCTCTGAACTTTGATTTAGGAAAAAATCAAGTACAATCCTTTTTGATTTCGAGTGCCTTATTCTGGATTGAACATTATCATATTGATGGTATTCGTGTTGATGCGGTTAGTAATATGTTATATCTCGATTATGATGAAGGACCATGGGAAGCTAACCAATTTGGGGATAATCGTAATTTGGAAGGGTATTACTTTTTAAGGAAACTTAACAAAGTAATTAAAGAGCGTCATCCTAATGTTATGATGATTGCTGAAGAGTCAACAGCTTCTACCCCAATAACTAAAGACTTAGAGTCTGGAGGATTGGGTTTTGACTTTAAATGGAATATGGGCTGGATGAATGATATCCTACGTTTTTATGAAGAAGATCCTCTCTATAGGCAATATGATTTTAATTTAGTGACTTTTAGTTTTATGTATATATTCAATGAGAACTTTGTACTAGCTTTTTCACATGATGAAGTAGTACATGGTAAAAAGAGTATGATGCATAAAATGTGGGGTGACCGTTATAATCAATTTGCTGGTTTACGTAACTTATATGCATATCAAATGTGTCATCCTGGAAAAAAACTTCTCTTTATGGGAAGTGAGTTCGGTCAATTTTTAGAATGGAAATATAATGATCAACTAGAATGGGAAAACTTAAATGATGATATGAACCAAAAGATGCAACGCTATACTAAACAATTGAATCAATTTTATAAAGATCATAAGTGCCTATGGCGTATTGATGATTCCTTTGATGGGATAGAAATTATTGATGCAGATAATAAATCTGAAACTGTTTTATCTTTTATACGAAAAGATGATAAAGGGGATTTGTTACTTTGTGTCTTTAATATGACTCCTGTAGAACGCCCTAACTTTACTATTGGTGTTCCACAAGCGGGTATTTATGAAGAAGTTTTAAATACTGAAATGGAAGAGTTTGGAGGTGTCTGGAAAAACCACAATCCTGTAACGAAAACACAAGTGGCTACATGGAAAGATTATGATCATACTTTAAGTTTTACATTACCAGCCCTTGGGGCAAGTGTTTGGAGAATAAAACGTCGGCTTCGTAAA

SEQ ID NO: 6084 - protein, 622 aa, Streptococcus agalactiae
MSNKDELYTFGIGENFHLQNYLGVHSENESFCFRVWAPNAENVQVIGDFTDWRNRPLQMNKNQAGVWEANSLDAREGDLYKYLVTRKGGQVVEKIDPMAVYMERRPGTASVIKVLRNKKWEDGLWMGRRKRLGFQKRPINIYEVHAGSWKKDDFGHPMTFSQLKDYLIPYLVEMNYTHVEFMPLMAHPLDMSWGYQLMGYFAFEHTYGTPEEFQDFVEACHKNNIGVLVDWVPGHFIQNDDALAYFDGTATYEYQNHDRAHNYRWGALNFDLGKNQVQSFLISSALFWIEHYHIDGIRVDAVSNMLYLDYDEGPWEANQFGDNRNLEGYYFLRKLNKVIKERHPNVMMIAEESTASTPITKDLESGGLGFDFKWNMGWMNDILRFYEEDPLYRQYDFNLVTFSFMYIFNENFVLAFSHDEVVHGKKSMMHKMWGDRYNQFAGLRNLYAYQMCHPGKKLLFMGSEFGQFLEWKYNDQLEWENLNDDMNQKMQRYTKQLNQFYKDHKCLWRIDDSFDGIEIIDADNKSETVLSFIRKDDKGDLLLCVFNMTPVERPNFTIGVPQAGIYEEVLNTEMEEFGGVWKNHNPVTKTQVATWKDYDHTLSFTLPALGASVWRIKRRLRK

SEQ ID NO: 6085 - protein, 1137 aa, Streptococcus agalactiae
ATGAAAAATGAAATGTTAGCACTCATTCTCGCCGGAGGACAAGGCACTCGACTCGGAAAATTGACTCAAAGCATTGCGAAACCCGATGTTCAATTTGGAGGTCGTTACCGTATTATTGACTTTGCGCTTTCAAATTGTGCGAATTCAGGTATTAATAATGTTGGGGTTATTACTCAGTATCAACCGCTGGAACTCAATACTCATATTGGAAACGGATCTAGCTGGGGACTAGATGGTATCGATTCGGGAGTAACTGTATTACAACCATATTCTGCAACAGAAGGTAATCGTTGGTTCCAAGGTACCAGCCACGCTATCTATCAAAATATTGACTACATTGATCGTATTAATCCAGAATATGTGCTCATTCTCTCTGGGGACCACATCTATAAAATGGACTATGATGACATGCTACAGACACATAAAGATAATTTAGCAAGCCTAACAGTCGCTGTTTTAGATGTTCCTTTAAAAGAAGCAAGCCGTTTTGGAATTATGAATACTGATTCAAACGACCGTATTGTCGAATTTGAAGAAAAACCTGAACATCCTAAGTCAACAAAAGCTTCAATGGGAATATACATTTTTGACTGGAAGAGATTACGGACAGTTTTAATTGATGGTGAAAAGAACGGCATAGACATGTCAGACTTTGGTAAAAATGTTATACCAGCATACCTTGAATCGGGTGAACGTGTTTATACCTATAATTTTGATGGGTATTGGAAAGATGTTGGTACTATTGAATCCCTTTGGGAAGCTAATATGGAATATATTGGAGAAGATAACAAATTACATAGTCGTGATCGTTCATGGAAAATCTATTCTAAAAATTTGATTGCACCACCTAATTTCATGACAGAAGATGCAAATGTTAAAGATTCTTTAGTTGTAGATGGATGCTTTGTTGCAGGGAATGTTGAGCACTCCATTTTGTCAACTAATGTCCAGGTAAAACCAAATGCTATTATTAAAGACTCCTTTGTTATGAGTGGCGCGACTATCGGTGAAGGTGCAAAGATAAATCGAGCTATTATCGGTGAGGATGCTGTTATTGGTGATGGTGTTGTGATTGATGGAAGTAAAGAAGTAGAAGTTATTGGTTATAAAGAAGTAGTGGGGGTTCCAAATGAAGAT

SEQ ID NO: 6086 - protein, 379 aa, Streptococcus agalactiae
MKNEMLALILAGGQGTRLGKLTQSIAKPDVQFGGRYRIIDFALSNCANSGINNVGVITQYQPLELNTHIGNGSSWGLDGIDSGVTVLQPYSATEGNRWFQGTSHAIYQNIDYIDRINPEYVLILSGDHIYKMDYDDMLQTHKDNLASLTVAVLDVPLKEASRFGIMNTDSNDRIVEFEEKPEHPKSTKASMGIYIFDWKRLRTVLIDGEKNGIDMSDFGKNVIPAYLESGERVYTYNFDGYWKDVGTIESLWEANMEYIGEDNKLHSRDRSWKIYSKNLIAPPNFMTEDANVKDSLVVDGCFVAGNVEHSILSTNVQVKPNAIIKDSFVMSGATIGEGAKINRAIIGEDAVIGDGVVIDGSKEVEVIGYKEVVGVPNED

SEQ ID NO: 6087 - protein, 1131 aa, Streptococcus agalactiae
ATGAAGATTGATAAATATACTGCGATTTTAGGAAATACTGTTAGTTACCCAGATATGCACAGTTTGACGGATAATCGTCCGCTTGCTTCTCTACCTTTTGATGGTAAGTATCGTTTAATTGATTTTCAATTATCCTCTTTAGCTAATGCAGGCGTTAGAAGTATTTATGGTATTTTTCGTGGGAATAATGTTCGCTCTGTTTTTGACCATATTAGAAGTGGTCGTGAGTGGGGCTTAGGTACATTGTTGAGTCACTATTCTTTAGGATTTTATGATACAGACGATGATATTCGTACAGTCAATGGGGATTATTACGATCAAATTTTAACTTACTTGAGGCGTTCGGGTAGCGACCAGACGATATATATGAGTTGTGATATGCTTTGTAATATTGACTTAAGTCAAGTAATCCACTTGCATAATGCAAATGGTACGCAAGCCACCGTGGTTTATAAAAAAATGCCGAGATCAGCTATTGCAGAGGCTAATCAAGTCTTGACCATTGATGAATCTGATCATGTAGTGAGTCTAGGTAAAGCTGTAGATAATGACGATAACCAAAAAATGTCTGCTGAGATTTATGTTATCAACACACCTTGGTTAATCGAAAAAATGGAAGAGGAAGCTCAAAATAATGAACCACGTAAACTCCGCTTCTTACTTCGTGATTTAATTGTTGAAAGTAATGCTTTGGCTTTTGAATACACTGGTTATTTGTCAAACATTTCTTCTATTAAATCCTATTATGATGCTAACATGGACATGTTAACACCAAATAAATTTTATTCGCTCTTCTTTTCAAACCAAAAAGTTTATACTAAGGTGAAAAATGAGGAAGCTACTTATTTTGATAAACAATCAAATGTCTCTAATTCGCAACTAGCTTCTGGAAGTATTATTAAAGGTTATTTAGACCATTCTATCGTTTCTAGAAATTGTCTCCTTGAAAATGGGACTCGAGTAGTCAATAGTATTATCTTTCCAAAAGTAAAAATCGGGGAAGGGGCAACCATTGAAAATACTATTATTGACAAATGCGTTAAGGTTGCACCCGGAGTTACATTGAAAGGTAGTTTAGATAAACCGTTAGTGATTCCTAAATTTTCAGAGATTAATGAGGATATTATACAA

SEQ ID NO: 6088 - protein, 377 aa, Streptococcus agalactiae
MKIDKYTAILGNTVSYPDMHSLTDNRPLASLPFDGKYRLIDFQLSSLANAGVRSIYGIFRGNNVRSVFDHIRSGREWGLGTLLSHYSLGFYDTDDDIRTVNGDYYDQILTYLRRSGSDQTIYMSCDMLCNIDLSQVIHLHNANGTQATVVYKKMPRSAIAEANQVLTIDESDHVVSLGKAVDNDDNQKMSAEIYVINTPWLIEKMEEEAQNNEPRKLRFLLRDLIVESNALAFEYTGYLSNISSIKSYYDANMDMLTPNKFYSLFFSNQKVYTKVKNEEATYFDKQSNVSNSQLASGSIIKGYLDHSIVSRNCLLENGTRVVNSIIFPKVKIGEGATIENTIIDKCVKVAPGVTLKGSLDKPLVIPKFSEINEDIIQ

SEQ ID NO: 6089 - protein, 1427 aa, Streptococcus agalactiae
ATGAAAATAATGTTTGTTGCGGCAGAGGGTGCTCCCTTTGCTAAAACAGGTGGTTTGGGAGATGTGATTGGCGCACTCCCAAAATCACTTAGTAAAAAAGGTCATGATGTCGTTGTTGTCATGCCATATTATGATATGGTAGACCAAAAATTGGAGACCAAATAGAAAACCTCATGTATTTCTATACAGATGTTGGCTGGCGTCATCAATATGTAGGAGTTAAGAGACTTTCTCAAGATAATGTTACGTTCTACTTTATTGATAATCAATATTATTTTTATAGAGGTCATGTCTATGGTGATTGGGATGATGGGGAGCGTTTTGCTTATTTCCAATTAGCTGCTTTAGAGTTGATGGAGAAAATCAATTTTATTCCCGATGTCTTACACGTCCATGATTATCATACAGCAATGATTCCTTTCTTATTGAAAGAGAAGTACCACTGGATTCAGGCCTATAATAATATAAGAACAGTTTTTACTATTCACAATATTGAATTTCAAGGGCAGTTTGGTCCAGAAATGTTAGGAGATTTATTTGGAGTTGGCGCTGAGAGATATGAAGATGGAACTCTTAGATGGAATAATTGTCTTAATTGGATGAAAGCAGCAATTCTTTACTCAGATAGAGTGACAACGGTATCACCAAGCTACGCAAATGAAATAAAAACTCCAGAATTTGGTAAAGGTTTAGACCAAATTATGCGTATGGAAGCAGGCAAATTATCTGGAATTGTAAATGGTATTGACAGCGATTTGTTAAATCCAGAAACAGATGCTTTTTTGCCATATCATTTTTCAAAAAGCAACTTAGAGGGCAAAATTAAAAATAAGTTGGCTTTACAGGAAAATTTGGGCTTACCTCAAGATAAAAATGTACCATTAATTGGTATTGTTTCACGACTTACCGATCAAAAAGGATTTGATATTATTGCTTCTGAATTGGACAATATGCTTCAACAAGATATTCAAATGGTTATTTTAGGAACAGGCTATCACCATTTTGAAGAAACGTTCTCTTATTTTGCTAGTCGTTACCCTGAAAAACTATCTGCTAATATTACTTTTGACTTAAGATTAGCGCAACAGATTTATGCGGCTTCAGATATCTTCATGATGCCAAGTGCTTTTGAACCTTGTGGTCTCTCGCAGATGATGGCTATGAGATATGGTAGCTTGCCCTTGGTACATGAAGTTGGAGGATTAAAAGATACTGTGGTAGCCTTCAATCAATTTGATGGTAGTGGTACAGGTTTTTCATTTAATCATTTTTCAGGCTATTGGTTAATGCAAACTCTAAAACTAGCATTAGAAGTTTATAATGATTATCCTGAAGCGTGGAAAAAGTTACAATGGCAAGCTATGTCAAAAGATTTTTCATGGGATACAGCATGTGTTGCTTACGAACAACTGTATCAGCAACTACAA

SEQ ID NO: 6090 - protein, 476 aa, Streptococcus agalactiae
MKIMFVAAEGAPFAKTGGLGDVIGALPKSLSKKGHDVVVVMPYYDMVDQKFGDQIENLMYFYTDVGWRHQYVGVKRLSQDNVTFYFIDNQYYFYRGHVYGDWDDGERFAYFQLAALELMEKINFIPDVLHVHDYHTAMIPFLLKEKYHWIQAYNNIRTVFTIHNIEFQGQFGPEMLGDLFGVGAERYEDGTLRWNNCLNWMKAAILYSDRVTTVSPSYANEIKTPEFGKGLDQIMRMEAGKLSGIVNGIDSDLLNPETDAFLPYHFSKSNLEGKIKNKLALQENLGLPQDKNVPLIGIVSRLTDQKGFDIIASELDNMLQQDIQMVILGTGYHHFEETFSYFASRYPEKLSANITFDLRLAQQIYAASDIFMMPSAFEPCGLSQMMAMRYGSLPLVHEVGGLKDTVVAFNQFDGSGTGFSFNHFSGYWLMQTLKLALEVYNDYPEAWKKLQWQAMSKDFSWDTACVAYEQLYQQLQ

SEQ ID NO: 6091 - protein, 198 aa, Streptococcus agalactiae
ATGAATTTAGCTATTTTAGCACTTGGTTTCGCCGTGATGGGTGTTTCAATCGGTGAAGGAATTTTGGTTGCAAATATTGCCAAATCAGCGGCTCGTCAGCCTGAAATGTTTAGCAAACTGCAAACATTGATGTTTACAGGTGTGGCCTTCATTGAAGGTACCTTCTTCGTTCTATTTGCGTTTACATTCTTAGTAAGA

SEQ ID NO: 6092 - protein, 66 aa, Streptococcus agalactiae; identical to SEQ ID NO: 1632

SEQ ID NO: 6093 - protein, 714 aa, Streptococcus agalactiae
TTGGAATCTACAAGTAATCCAACCGTATCTTTTTTAGGCATTGATTTTGATTTAACCATCCTAGCTATGTCTCTCTTGACAATTACTATTATCTTTATCTTAGTCTTCTGGGCTAGTCGTAAGATGACAATAAAACCAAAAGGTAAGCAGAATGTCTTAGAATATGTCTATGAGCTTGTTAATAATACAATCTCACAAAATTTAGGACATTATACTAAAAATTATAGTTTATTGATGTTTATTTTATTCAGTTTTGTCTTCGTTGCTAACAACTTAGGATTGATGACATCATTGAAAACACATGAGCATAATTTTTGGACATCTCCGACCGCTAATTTTGGTGTAGATATTACATTATCATTATTAGTAGCATTTATTTGTCATATTGAAGGTATTCGCAAAAAAGGAATTGGTGGTTATCTCAAAGGTTTCTTATCACCAACTCCAGCAATGCTTCCGATGAATTTATTGGAAGAAGTTACTAATGTTGCTTCATTAGCATTGCGTCTTTTTGGTAATATCTTTTCTGGTGAAGTTGTCACTGGATTACTTTTACAACTTGCAGTTTTATCACCATTTACAGGTCCACTAGCTTTTGCATTGAATATCGTTTGGACAGCATTCTCAATGTTTATTGGTTTCATCCAAGCGTATGTGTTCATTATCTTGAGCTCAAGTTATATTGGACACAAAGTTCATGGTGACGAAGAAGAA

SEQ ID NO: 6094 - protein, 238 aa, Streptococcus agalactiae
MESTSNPTVSFLGIDFDLTILAMSLLTITIIFILVFWASRKMTIKPKGKQNVLEYVYELVNNTISQNLGHYTKNYSLLMFILFSFVFVANNLGLMTSLKTHEHNFWTSPTANFGVDITLSLLVAFICHIEGIRKKGIGGYLKGFLSPTPAMLPMNLLEEVTNVASLALRLFGNIFSGEVVTGLLLQLAVLSPFTGPLAFALNIVWTAFSMFIGFIQAYVFIILSSSYIGHKVHGDEEE

SEQ ID NO: 6095 - protein, 495 aa, Streptococcus agalactiae
ATGTCAATACTTATTAATAGTACAACGATTGGTGATATCATTATCGTATCTGGCTCTGTGCTTCTCTTATTTATCTTAATTAAGACTTTTGCATGGAAACAAATCACAGGTATTTTTGAAGCCCGTGAACAAAAGATAGCTAATGATATTGATACTGCTGAACAGGCACGTCAACAAGCTGAAGCTTTTGCAACTAAGCGTGAGGAAGAACTATCTAACGCTAAAACTGAAGCTAATCAAATCATTGATAACGCTAAAGAGACAGGTCTTGCAAAAGGTGATCAAATTATTTCAGAAGCAAAAACTGAAGCTGATCGATTAAAAGAAAAAGCACATCAAGATATTGCCCAAAATAAGGCAGAAGCACTAGCAGATGTTAAGGGTGAAGTAGCAGATTTAACAGTTTTATTAGCTGAAAAAATTATGGTATCAAATCTTGATAAAGAAGCTCAGAGTAATCTCATTGATAGCTATATTAAAAAGCTAGGAGATGCC

SEQ ID NO: 6096 - protein, 165 aa, Streptococcus agalactiae; identical to SEQ ID NO: 1640

SEQ ID NO: 6097 - protein, 534 aa, Streptococcus agalactiae
ATGAATAAAAAGACGCAGGCTCTAATTGAGCAATATTCAAAAAGCCTTGTTGAAGTTGCCATTGAACATAAAATTGTTGAAAAAATCCAACAAGAAGTAGCAGCTTTAATTGATATTTTTGAAACAAGCGAGCTTGAGGGTGTCCTGTCAAGTCTTGCCGTTTCACATGATGAAAAACAACATTTTGTGAAGACATTGCAAACATCATGTTCAACTTATCTTGTTAATTTCCTTGAGGTTATTGTACAAAATGAACGTGAAGCACTTCTATATCCTATTTTGAAATCAGTTGATCAGGAACTTATCAAAGTGAATGGTCAATATCCAATTCAAATTACAACTGCAGTTGCTTTGTCTCCAGAACAAAAAGAACGTCTTTTTGATATTGCTAAAACTAAATTAGCTTTACCAAATGGACAGTTAGTTGAGCACATTGACCCATCTATTGTTGGTGGATTTGTTGTCAATGCAAACAATAAAGTAATTGATGCAAGTGTTCGTAATCAATTACATCAATTTAAAATGAAATTAAAA

SEQ ID NO: 6098 - protein, 178 aa, Streptococcus agalactiae; identical to SEQ ID NO: 1642

SEQ ID NO: 6099 - protein, 1503 aa, Streptococcus agalactiae
TTGGCAATTAATGCACAAGAAATTAGCGCTTTAATTAAAAAGCAAATTGAAGACTTCCAGCCAAATTTTGACGTCACAGAAACTGGTATTGTTACATATATCGGTGATGGTATTGCTCGTGCTCGTGGGCTAGATAATGCTATGAGTGGAGAACTTCTTGAATTTTCAAATGGTGCGTACGGTATGGCTCAAAACCTTGAGTCTAATGACGTGGGTATCATTATTTTGGGTGATTTCTCAGAAATTCGTGAAGGTGATGTGGTAAAACGTACTGGTAAAATTATGGAAGTACCAGTAGGGGAAGCTATGATTGGACGTGTCGTCAATCCGCTTGGTCAACCAGTTGATGGACTAGGTGAAATTGAGACGACAGCAACACGCCCAGTTGAAACACCAGCACCTGGTGTTATGCAACGTAAATCAGTTTTTGAGCCTCTTCAAACAGGTCTCAAAGCGATTGATGCTTTGGTTCCTATCGGACGTGGTCAACGCGAATTGATTATCGGTGACCGCCAAACTGGTAAGACGTCTGTAGCGATTGATGCAATCTTGAATCAAAAAGGTCAAGATATGATCTGTATCTATGTGGCTATCGGTCAAAAAGAGTCTACAGTACGTACACAAGTTGAAACTTTGCGTAAATACGGTGCCCTTGATTATACAATCGTTGTGACAGCTTCAGCATCACAACCATCTCCATTACTTTTCATTGCTCCATATGCAGGAGTAGCAATGGCTGAGGAATTCATGTATAACGGGAAACACGTTTTGATTGTTTATGATGATTTATCAAAACAAGCCGTAGCTTATCGTGAACTTTCGCTTCTTCTTCGCCGTCCTCCAGGTCGCGAAGCTTACCCAGGGGATGTTTTCTACCTTCATAGTCGTCTTTTGGAACGTTCAGCTAAAGTATCAGATGCTTTAGGTGGAGGTTCGATTACAGCGCTTCCGTTCATTGAAACACAAGCAGGTGATATCTCAGCATATATTGCTACAAACGTTATTTCAATTACTGACGGCCAAATTTTCTTGCAAGAAAATCTCTTTAACTCAGGTATTCGTCCAGCGATTGATGCAGGTTCATCAGTATCTCGTGTTGGTGGTGCAGCGCAAATTAAAGCGATGAAGAGAGTTGCAGGTACGCTTCGTCTAGATCTTGCTTCTTATCGCGAACTTGAGGCATTCACTCAATTTGGTTCAGACCTTGATGCAGCAACACAAGCAAAACTAAATCGTGGTCGTCGCACAGTGGAAGTGTTAAAACAACCATTACACAAACCATTACCAGTTGAGAAACAAGTTGTGATTTTATATGCTCTAACACATGGATTCCTTGATGATGTACCTGTAAATGATATTTTAGCTTTTGAAGAAGCTTTGTATGATTACTTTGATGCTCATTATGATAATCTCTTCGAAACAATCCGCACAACAAAAGATTTACCAGAAGAAGCAGAATTAGATGCTGCTATTCAAGCATTTAAAGATCAATCACAATTTAAA

SEQ ID NO: 6100 - protein, 501 aa, Streptococcus agalactiae; identical to SEQ ID NO: 1644

SEQ ID NO: 6101 - protein, 879 aa, Streptococcus agalactiae
ATGGCAGGCTCTCTTAGTGAAATTAAAGACAAGATTCTCTCTACAGAAAAAACAAGTAAGATTACTAGTGCGATGCAGATGGTCTCATCTGCCAAGTTGGTTAAATCTGAACAAGCTGCTAGAGATTTTCAAGTGTATGCCTCTAAAATTCGTCAAATTACTACTAACCTCTTGAAGTCAGACTTAGTATCTGGATCAGATAACCCTATGTTAGCTTCACGTCCGGTGAAGAAAACAGGTTATATTGTTATTACTTCTGATAAGGGTTTAGTTGGTGGTTACAATTCAAAAATCTTAAAAGCGATGATGGACACTATAACTGACTATCATACTGAGAATGATGATTATGCCATTATTTCAATTGGTAGCGTTGGTTCTGATTTTTTCAAAGCACGTGGAATGAATGTTTCTTTCGAATTACGTGGTTTAGAGGACCAACCAAGTTTTGATCAAGTTGGTAAAATTATTGCTCAAGCAGTTGAAATGTACAAAAATGAGTTGTTCGATGAATTATATGTTTGCTACAATCACCATGTTAACAGTTTAACTAGCCAAGTCAGAATGCAACAAATGCTTCCTATCAAAGAATTGGATGCAGACGAGGCTTCTGAGGATAGAGTGATTACTGGTTTTGAACTTGAGCCAAACCGTGAAGTTATATTGGAGCAATTATTGCCTCAATATACTGAGAGTTTGATTTATGGAGCTATTATTGATGCTAAAACAGCAGAGCATGCGGCTGGTATGACAGCTATGCAGACTGCAACTGATAATGCTAAAAATGTTATCAATGATTTAACTATTCAATATAACCGTGCTCGTCAAGCAGCTATCACACAGGAAATTACAGAAATTGTTGCAGGTGCTAATGCACTTGAA

SEQ ID NO: 6102 - protein, 293 aa, Streptococcus agalactiae
MAGSLSEIKDKILSTEKTSKITSAMQMVSSAKLVKSEQAARDFQVYASKIRQITTNLLKSDLVSGSDNPMLASRPVKKTGYIVITSDKGLVGGYNSKILKAMMDTITDYHTENDDYAIISIGSVGSDFFKARGMNVSFELRGLEDQPSFDQVGKIIAQAVEMYKNELFDELYVCYNHHVNSLTSQVRMQQMLPIKELDADEASEDRVITGFELEPNREVILEQLLPQYTESLIYGAIIDAKTAEHAAGMTAMQTATDNAKNVINDLTIQYNRARQAAITQEITEIVAGANALE

SEQ ID NO: 6103 - protein, 1404 aa, Streptococcus agalactiae
ATGAGCTCAGGCAAAATTGCTCAGGTAGTTGGACCTGTCGTTGACGTTGTATTTGCAAGTGGCGACAAACTTCCTGAGATTAATAATGCATTGATTGTCTATAAAAATGGCGATAAGTCACAAAAAGTAGTACTTGAAGTTGCTCTTGAACTTGGTGACGGCCTCGTTCGTACAATCGCTATGGAATCAACTGATGGGCTTACACGTGGTTTGGAAGTATTAGATACTGGTCGCGCAATTAGTGTGCCGGTTGGTAAGGATACTTTGGGTCGTGTCTTCAACGTTCTTGGAGATGCTATTGACCTTGAAGAGCCTTTTGCAGAAGATGCAGAACGTCAACCAATCCATAAAAAAGCACCATCGTTTGATGAATTATCAACATCATCAGAAATCTTAGAAACAGGTATTAAAGTTATTGACTTATTAGCACCTTACTTAAAAGGTGGTAAAGTTGGACTTTTCGGTGGTGCAGGTGTTGGTAAAACCGTTCTTATTCAAGAATTAATCCACAACATCGCCCAAGAACATGGTGGTATTTCAGTATTTACTGGTGTAGGAGAACGTACTCGTGAAGGGAATGACCTTTATTGGGAAATGAAAGAATCTGGCGTTATTGAAAAAACGGCTATGGTCTTTGGTCAAATGAATGAACCACCAGGAGCACGTATGCGTGTGGCACTTACTGGTCTTACAATAGCTGAGTACTTCCGTGATGTAGAAGGACAAGATGTGCTTCTCTTCATTGATAATATCTTCCGTTTCACACAAGCTGGGTCAGAAGTGTCAGCGCTTTTAGGTCGTATGCCTTCAGCCGTTGGTTATCAACCAACACTTGCTACAGAAATGGGACAATTACAAGAGCGTATCACTTCAACTAAAAAAGGTTCTGTTACCTCAATCCAAGCTATTTATGTGCCAGCAGATGACTATACTGACCCTGCGCCAGCTACAGCCTTTGCTCACTTAGATTCAACAACTAACCTTGAACGTAAATTGACACAAATGGGGATTTATCCAGCCGTTGACCCATTAGCTTCAAGTTCTCGTGCACTCACACCAGAAATTGTTGGAGATGAGCACTATGAAGTTGCAACAGAAGTACAGCGTGTTCTTCAACGTTACCGTGAGTTGCAAGATATCATTGCGATTTTAGGTATGGATGAATTATCAGATGAGGAAAAAACGTTAGTTGGACGTGCACGTCGTATCCAATTCTTCCTTTCTCAAAACTTCAATGTTGCAGAAACATTTACTGGTCAACCAGGTTCATATGTTCCGGTTGAAGAAACTGTTCGCGGATTCAAAGAAATCTTAGATGGTAAACATGATCAAATTCCAGAAGATGCCTTCCGTATGGTTGGTGGTATTGAGGATGTTATCGCAAAAGCAGAAAAAATGAACTAT

SEQ ID NO: 6104 - protein, 468 aa, Streptococcus agalactiae; identical to SEQ ID NO: 1648

SEQ ID NO: 6105 - protein, 411 aa, Streptococcus agalactiae
ATGGCACAATTGACTGTTCAAGTAGTAACACCAGATGGTATTAGATATGACCATCACGCTAGTCTCATTACTGTTAGAACGCCAGATGGTGAAATGGGAATTTTACCAGGTCACATAAATTTGATTGCTCCCCTTATTGTTCATCAGATGAAGATTAATCGTTCTCATCAAGAAGGTGTAGACTGGGTAGCTGTTAATGGTGGTATAATTGAAGTTAATGAGGATCAGGTGACAATTGTTGCGGATTCAGCAGAACGAGCACGTGATATAGACCTTAACCGTGCAGAACGGGCTAAGGAACGCGCAGAGCGTGCATTAGAAAAAGCTCAAACAACTCAGAATATTGATGAGATGCGTAGAGCTGAGGTTGCTCTTCGTCGCGCAATTAACCGTATTAGCGTCGGTAAAAAG

SEQ ID NO: 6106 - protein, 137 aa, Streptococcus agalactiae
MAQLTVQVVTPDGIRYDHHASLITVRTPDGEMGILPGHINLIAPLIVHQMKINRSHQEGVDWVAVNGGIIEVNEDQVTIVADSAERARDIDLNRAERAKERAERALEKAQTTQNIDEMRRAEVALRRAINRISVGKK

SEQ ID NO: 6107 - protein, 719 aa, Streptococcus agalactiae
ATGGATAAAATTATTGTGGAAGGTGGGCAAACACGGCTTCAAGGTCAAGTTGTTATTGAAGGAGCTAAAAATGCAGTTTTACCTCTTTTAGCAGCCACAATTTTACCAAGCCAAGGGAAAACATTATTGACCAATGTTCCTATCTTGTCTGATGTATTTACAATGAACAATGTTGTTCGTGGTTTAGATATTCAAGTTGATTTTAATTGCGATAAAAAAGAAATCTTAGTGGATGCCTCAGGTGATATTTTAGATGTTGCACCTTATAAATTTGTTAGTCAAATGAGAGCTTCTATTGTTGTTTTGGGACCTATTTTAGCTAGAAATGGCCATGCTAAGGTTTCAATGCCAGGCGGTTGTACAATTGGTAGCCGACCAATTGACCTTCATCTTAAAGGTTTAGAAGCTATGGGAGCTACGATTACACAAAATGGTGGTGATATTACTGCCCAAGCTGAAAAGCTTAAGGGGGCTAATATATACATGGATTTTCCCTCAGTCGGTGCCACTCAAAACTTGATGATGGCTGCTACACTTGCTTCAGGCACAACAACGATAGAGAATGCTGCACGTGAACCAGAAATTGTAGACCTTGCGCAGTTACTAAATAAAATGGGAGCTAAAGTCAAGGGTGCTGGTACGGAAACATTAACGATCATTGGTGTTGATGCTTTACATGGTACAAACATGATGTTGTCCAAGACTCGTANNNNNTTAAT

SEQ ID NO: 6108 - protein, 240 aa, Streptococcus agalactiae
  VARIANT 237, 238, 239: Xaa = Any Amino Acid
MDKIIVEGGQTRLQGQVVIEGAKNAVLPLLAATILPSQGKTLLTNVPILSDVFTMNNVVRGLDIQVDFNCDKKEILVDASGDILDVAPYKFVSQMRASIVVLGPILARNGHAKVSMPGGCTIGSRPIDLHLKGLEAMGATITQNGGDITAQAEKLKGANIYMDFPSVGATQNLMMAATLASGTTTIENAAREPEIVDLAQLLNKMGAKVKGAGTETLTIIGVDALHGTEHDVVQDSXXXN

SEQ ID NO: 6109 - protein, 453 aa, Streptococcus agalactiae
ATGGGTGTTGAAGTGTCAGAGGAAGAAGATGGTATTCGTGTAAAAGCTGATACTAAAAAATTGAAGCCAGTGACTGTGAAAACACTCCCTCATCCAGGATTTCCTACTGATATGCAAGCTCAATTTACAGCTCTAATGGCAGTAGTTAATGGCGAATCAACTATGATTGAGACAGTTTTTGAAAATCGTTTTCAACATTTGGAAGAAATGCGTCGCATGGGATTACAAACGGAAATTTTACGAGATACTGCAATGATTCATGGTGGGAGAGCTTTACAAGGTGCACCGGTCATGTCTACTGACTTACGAGCTAGTGCAGCTTTAATCTTGGCAGGAATGGTTGCGCAAGGGCAAACAGTAGTTGGCCAATTAACCCATTTAGACCGTGGTTATTATCAATTCCATGAAAAATTAGCGGCTCTTGGTGCTAATATTAAACGTGTAAGTGAGGCG

SEQ ID NO: 6110 - protein, 151 aa, Streptococcus agalactiae
MGVEVSEEEDGIRVKADTKKLKPVTVKTLPHPGFPTDMQAQFTALMAVVNGESTMIETVFENRFQHLEEMRRMGLQTEILRDTAMIHGGRALQGAPVMSTDLRASAALILAGMVAQGQTVVGQLTHLDRGYYQFHEKLAALGANIKRVSEA

SEQ ID NO: 6111 - protein, 201 aa, Streptococcus agalactiae
GTGAGGCGTAATATGGCATCTAGTGGTTGGAAATATGTATTAAAACAAATCGGTCTAATAGTATTAGTCATACTATTAGCCTTGCTGTTTTTAGCGGTTGGATTGATGTTGGGTTATAGTGTTTTTGGTGACGGAGAGCATGCTTACTCTATTTTATCGCTGGATAAATGGCAAAATATTATTGGAAAATTTTTAGGAAAA

SEQ ID NO: 6112 - protein, 67 aa, Streptococcus agalactiae; identical to SEQ ID NO: 1658

SEQ ID NO: 6113 - protein, 855 aa, Streptococcus agalactiae
ATGACAAAAAAACAAAAACAAATAACAGCTTCGATTGTAACTTTGCTTTTTTCATTACTAGCAATAGGGTTAGGTGAAAGCAAATCTTTGCCTAATGATCACATTTTAAAACAGGTGACAGATTTAATTATTAGTAATGAATCTGGCAAAAATACTTCCCTTAAAAATGTATCAGGAACCCCTAGTAGAGAGTTATCTGAATCTGTTTTGACTAGCAATGTTAAAAAACAATTGGGAACAAATATAGCTTGGAACCAGTCAGGTGCTTTTATCATTAATCAAAATAAAACAGATTTGAATGCTAAAGTGTCAAGTGCACCATATGCTATTAATGAAATAAAGAAGGTTAATAACCAAATTGTTCCGACTAAAGCAAATGCCTTATTAACAAAGGCAACTCGTCAATATCGAAATCGAGAAGAAACAGGGAATGGTAGAACTTATTGGAAACCAGCTGGATGGCATCAGATAAATGGATTAAAAGGGAGCTATAACCATGCTGTGGACAGAGGCCATTTAATTGGTTATGCTTTAGTAGGGAGTTTAAGAGGATTTGATGCCTCCACAAGTAATCCTAAAAATATTGCCACACAAGCAGCTTGGGCAAACCAAGCTAATAGCAACCAATCAACAGGGCAAAATTATTATGAAACTTTAGTTCGTAAAGCATTGGATCGTCATAAAACTATTAGGTATCGTGTGACTTTAATTTATGATAGAGATAATCTTTTATCTTCGGGATCACATATTGAGGCTAAATCTTCAGATGGAAGTTTAGAATTTAACGTTTTTATTCCTAATGTACAATCGGGATTATTATTTGATTATGCAACAGGAAAAGTGAAGCAGACAAAG

SEQ ID NO: 6114 - protein, 285 aa, Streptococcus agalactiae
MTKKQKQITASIVTLLFSLLAIGLGESKSLPNDHILKQVTDLIISNESGKNTSLKNVSGTPSRELSESVLTSNVKKQLGTNIAWNQSGAFIINQNKTDLNAKVSSAPYAINEIKKVNNQIVPTKANALLTKATRQYRNREETGNGRTYWKPAGWHQINGLKGSYNHAVDRGHLIGYALVGSLRGFDASTSNPKNIATQAAWANQANSNQSTGQNYYETLVRKALDRHKTIRYRVTLIYDRDNLLSSGSHIEAKSSDGSLEFNVFIPNVQSGLLFDYATGKVKQTK

SEQ ID NO: 6115 - protein, 1038 aa, Streptococcus agalactiae
ATGGATTTACAAAAACAATTAGAAGAGTTGAAAATATCAACTCAAGAAAAGCTTAAAGAAATGACTGGGAACCACACTAAAGAATTACAAGACTTACGTGTACAAGTTTTAGGAAAAAAAGGTTCTCTAACAGAATTACTAAAAGGTCTGAAAGATTTATCTAATGATTTACGACCAGTTGTTGGAAAACAAGTCAATGAAGTACGTGATATTTTAACAAAAGCGTTTGAGGAACAAGCTAAAGTAGTGGAAGCTGCGAAGATTCAAGCACAGTTAGAGTCTGAGAGTGTTGACGTTACCTTGCCTGGTCGTCAAATGACATTAGGTCACCGTCATGTCTTAACACAAACTAGTGAAGAGATTGAAGATATCTTTTTAGGTATGGGATTCCAAGTGGTTGGTGGTTTTGAAGTTGAGAAAGACTACTATAATTTTGAACGAATGAATTTACCCAAAGATCATCCAGCCCGTGATATGCAAGATACTTTTTATATTACAGAAGAAATCTTGCTACGTACTCATACTTCGCCTGTTCAAGCACGAACAATGGACCAACATGATTTTTCTAAAGGGCCTTTAAAAATGATTTCTCCTGGACGTGTTTTCCGTCGTGATACTGATGATGCTACTCATAGCCATCAATTCCATCAAATTGAAGGCTTAGTTGTTGGAGAAAATATTTCAATGGGCGATCTCAAAGGAACACTTCAACTGATTTCTCAAAAAATGTTTGGAGCAGAGCGTAAAATCCGACTTCGTCCTTCATATTTCCCATTCACAGAACCTTCAGTTGAAGTTGATGTCTCTTGCTTCAAGTGCGGAGGTAAAGGATGTAATGTCTGCAAACAGACAGGTTGGATTGAGATATTGGGTGCTGGTATGGTTCACCCAAGTGTTTTGGAAATGTCTGGTATTGATTCTGAGAAATACTCCGGTTTTGCCTTTGGTTTAGGTCAAGAACGTATTGCAATGTTACGCTACGGTATCAATGACATTCGTGGCTTCTATCAAGGTGATGTTCGCTTCACAGATCAATTT

SEQ ID NO: 6116 - protein, 346 aa, Streptococcus agalactiae
MDLQKQLEELKISTQEKLKEMTGNHTKELQDLRVQVLGKKGSLTELLKGLKDLSNDLRPVVGKQVNEVRDILTKAFEEQAKVVEAAKIQAQLESESVDVTLPGRQMTLGHRHVLTQTSEEIEDIFLGMGFQVVGGFEVEKDYYNFERMNLPKDHPARDMQDTFYITEEILLRTHTSPVQARTMDQHDFSKGPLKMISPGRVFRRDTDDATHSHQFHQIEGLVVGENISMGDLKGTLQLISQKMFGAERKIRLRPSYFPFTEPSVEVDVSCFKCGGKGCNVCKQTGWIEILGAGMVHPSVLEMSGIDSEKYSGFAFGLGQERIAMLRYGINDIRGFYQGDVRFTDQF

SEQ ID NO: 6117 - protein, 321 aa, Streptococcus agalactiae
ATGTCTCAAATTACTTTTAAAAAGGTTGGCCTTGATAATGTGAATATTTTACAGAATCTTGCTATAGAAACCTTTCGGCAGACGTTTTCTCATGATAATAGTGAGGAACAACTTCAAGCATTTTTCAATGAGTCTTACACTTTACCAGTATTAAAATCGGAAATTACCCATGCTGAATCTGATACTTATTTTGTTTATCTTGATACAGATTTAGTGGGTTATTTAAAAGTAAACTGGGGAAGTCAGCAAACTGAAAAAGATCTTGATAAAGCATTTGAAATTCAAAGGATTTATCTTCTAGATGCCTACCAGGGAAAGGTA

SEQ ID NO: 6118 - protein, 107 aa, Streptococcus agalactiae
MSQITFKKVGLDNVNILQNLAIETFRQTFSHDNSEEQLQAFFNESYTLPVLKSEITHAESDTYFVYLDTDLVGYLKVNWGSQQTEKDLDKAFEIQRIYLLDAYQGKV

SEQ ID NO: 6119 - protein, 91 aa, Streptococcus agalactiae
TTTTTAGGTCAAGACGTATTGAATGTTACGCTACGGTATCAATGACATTCGTGGCTTCTATCAAGGTGATGTTCGCTTCACAGATCAATTT

SEQ ID NO: 6120 - protein, 31 aa, Streptococcus agalactiae
LFRSRRIAMLRYGINDIRGFYQGDVRFTDQF

SEQ ID NO: 6121 - protein, 519 aa, Streptococcus agalactiae
ATGTCTCAAATTACTTTTAAAAAGGTTGGCCTTGATAATGTGAATATTTTACAGAATCTTGCTATAGAAACCTTTCGGCAGACGTTTTCTCATGATAATAGTGAGGAACAACTTCAAGCATTTTTCAATGAGTCTTACACTTTACCAGTATTAAAATCGGAAATTACCCATGCTGAATCTGATACTTATTTTGTTTATCTTGATACAGATTTAGTGGGTTATTTAAAAGTAAACTGGGGAAGTCAGCAAACTGAAAAAGATCTTGATAAAGCATTTGAAATTCAAAGGATTTATCTTCTAGATGCCTACCAAGGGAAAGGTATAGGTAAGGCTACTTTCGAATTCGCTTTGGATTTAGCTTATAAATCAGGCTTAGATTGGGCTTGGTTAGGTGTTTGGGAGTTTAATCATAAAGCTCAGGCATTTTACGCTAAATACGGATTTGAAAAATTTTCTGAGCACCAATTTTCAGTAGGTGATAAAGTGGATACGGATTGGTTATTAAGAAAAAGTTTACAC

SEQ ID NO: 6122 - protein, 173 aa, Streptococcus agalactiae
MSQITFKKVGLDNVNILQNLAIETFRQTFSHDNSEEQLQAFFNESYTLPVLKSEITHAESDTYFVYLDTDLVGYLKVNWGSQQTEKDLDKAFEIQRIYLLDAYQGKGIGKATFEFALDLAYKSGLDWAWLGVWEFNHKAQAFYAKYGFEKFSEHQFSVGDKVDTDWLLRKSLH

SEQ ID NO: 6123 - protein, 1095 aa, Streptococcus agalactiae
ATGTTAGTATCGTATAAATGGTTAAAAGAGTTAGTGGATGTTGATGTTACAACAGCAGAACTAGCTGAGAAAATGTCAACCACTGGTATTGAGGTTGAAGGTGTGGAGACACCAGCGGAAGGTTTATCAAAATTAGTTGTAGGTCATATTGTTTCGTGTGAAGATGTTCCAGATACCCACTTACATTTGTGTCAAGTTGATACAGGGGATGATGAACTTCGTCAAGTTGTCTGTGGTGCTCCAAATGTCAAGACTGGTATTAATGTTATCGTAGCGGTTCCTGGTGCTCGTATTGCAGATAACTATAAGATTAAAAAAGGTAAAATCCGTGGTATGGAGTCACTTGGAATGATTTGTTCACTTCAAGAGTTGGGCTTATCGGAAAGTATCATTCCAAAAGAGTTTTCTGATGGTATCCAAATTTTACCTGAGGGAGCTATACCTGGTGATAGTATTTTCTCTTATCTTGACTTAGATGATGAAATTATTGAATTATCAATTACACCAAACCGTGCAGATGCTCTTTCAATGCGTGGTGTTGCCCATGAGGTAGCAGCAATTTATGGGAAAAAAGTTCATTTTGAAGAAAAAAATCTCATTGAAGAAGCAGAAAGAGCAGCTGATAAGATTTCTGTTGTCATTGAATCAGATAAAGTTTTATCTTACTCGGCTCGTATTGTTAAGAATGTAACAGTTGCACCAAGTCCACAATGGCTTCAAAATAAACTGATGAATGCTGGTATACGTCCAATTAATAATGTTGTTGATGTGACAAACTATGTTCTTTTGACTTATGGTCAACCAATGCATGCTTTTGATTTTGATAAATTTGATGGGACAACTATAGTAGCACGTAATGCTGAGAATGGGGAAAAGTTAATTACTCTTGATGGTGAAGAGCGTGACTTAATAGCTGATGACTTGGTCATTGCGGTAAATGATCAACCAGTTGCTTTGGCAGGCGTTATGGGAGGACAATCAACTGAAATTGGTAGTTCTTCTAAGACAGTGGTCCTTGAAGCGGCAGTATTTAATGGAACAAGTATCCGCAAAACAAGTGGAAGACTCAACCTTCGTTCAGAATCATCTTCTCGG

SEQ ID NO: 6124 - protein, 365 aa, Streptococcus agalactiae
MLVSYKWLKELVDVDVTTAELAEKMSTTGIEVEGVETPAEGLSKLVVGHIVSCEDVPDTHLHLCQVDTGDDELRQVVCGAPNVKTGINVIVAVPGARIADNYKIKKGKIRGMESLGMICSLQELGLSESIIPKEFSDGIQILPEGAIPGDSIFSYLDLDDEIIELSITPNRADALSMRGVAHEVAAIYGKKVHFEEKNLIEEAERAADKISVVIESDKVLSYSARIVKNVTVAPSPQWLQNKLMNAGIRPINNVVDVTNYVLLTYGQPMHAFDFDKFDGTTIVARNAENGEKLITLDGEERDLIADDLVIAVNDQPVALAGVMGGQSTEIGSSSKTVVLEAAVFNGTSIRKTSGRLNLRSESSSR

SEQ ID NO: 6125 - protein, 1389 aa, Streptococcus agalactiae
GTGTCCCTGAAAGCGGCAGTATTTAATGGACCAAGTATCCGCAAAACAAGTGGAAGACTCACCCTTCGTTCAGAATCATCTTCTCGCTTTGAAAAAGGTATCAATTATGATACAGTTTCAGAGGCTATGGATTTTGCGGCTGCAATGTACAAGAATGGCAGGTGGTCAAGTTCTTTCTGGTCAAGTTACAGAAGGAGTCTTCCAACTGAGCCGGTAGAGGTATCAACGACTCTTGGTTACGTAATACTCGTTTGGGAACAGACTACCTATACTGATATTGAAGAAGTATTTGAAAAACTCGGCTTTGCTATTTCTGGTTCAGAAGTGAAATTTACTGTGTTGGTACCGCGTCGTAGATGGGATATTGCCATTCAAGCTGACTTAGTTGAAGAGATTGCCCGTATTTATGGTTACGAAAAATTACCAACAACATTGCCAGAAGCCGGAGCGACTGCAGGAGAATTAACGAGTATGCAACGCTTACGTCGTAGAGTCCGTACGGTTGCTGAAGGAGCAGGATTATCTGAAATTATCACCTATGCTTTAACAACTCCAGAAAAAGCAGTGCAGTTCTCAACTCAAGCAACTAATATAACTGAACTTATGTGGCCGATGACTGTTGATCGCTCAGCACTTCGCCAAAATGTTGTTTCAGGAATGCTTGATACAATTGCTTATAACGTTGCTCGCAAAAACAGTAACCTTGCAGTTTATGAGATAGGAAAAGTTTTTGAACAAACTGGTAATCCAAAAGAAGATTTACCAACTGAAGTAGAGACGTTTACTTTTGCCTTAACAGGTCTAGTAGAGGAAAAAGATTTCCAAACAAAAGCCAAGCCAGTTGATTTCTTCTACGCCAAAGGTATTGTAGAGGCGCTCTTTATTAAATTAAAATTAGATGTTACTTTTGTAGCACAAAAAGGTTTAGCAAGTATGCACCCAGGTCGTACAGCAACTATCTTATTAGATGGGAAAGAGATTGGTTTTGTTGGTCAAGTACACCCACAAACTGCAAAACAATATGATATTCCTGAAACTTATGTTGCTGAAATCAATCTATCAACTATTGAAAGTCAAATGAACCAAGCGTTGATTTTTGAAGATATTACGAAGTATCCGTCTGTATCTCGCGATATTGCATTATTACTTGCAGAATCTGTTAGTCATCATGATATTGTGTCAGCAATTGAGACATCAGGGGTAAAACGTCTAACAGCGATTAAACTGTTTGATGTCTACGCTGGAAATAATATTGCAGAAGGGTATAAATCAATGGCTTATAGCTTAACTTTCCAAAACCCTAATGACAATCTAACGGACGAAGAAGTGGCTAAATATATGGAAAAAATCACTAAATCACTCGTTGAGAAAGTTAATGCAGAAATAAGA

SEQ ID NO: 6126 - protein, 465 aa, Streptococcus agalactiae
  VARIANT 53: Xaa = Any Amino Acid
MSLKAAVFNGPSIRKTSGRLTLRSESSSRFEKGINYDTVSEAMDFAAAMLQEXAGGQVLSGQVTEGVLPTEPVEVSTTLGYVNTRLGTELTYTDIEEVFEKLGFAISGSEVKFTVLVPRRRWDIAIQADLVEEIARIYGYEKLPTTLPEAGATAGELTSMQRLRRRVRTVAEGAGLSEIITYALTTPEKAVQFSTQATNITELMWPMTVDRSALRQNVVSGMLDTIAYNVARKNSNLAVYEIGKVFEQTGNPKEDLPTEVETFTFALTGLVEEKDFQTKAKPVDFFYAKGIVEALFIKLKLDVTFVAQKGLASMHPGRTATILLDGKEIGFVGQVHPQTAKQYDIPETYVAEINLSTIESQMNQALIFEDITKYPSVSRDIALLLAESVSHHDIVSAIETSGVKRLTAIKLFDVYAGNNIAEGYKSMAYSLTFQNPNDNLTDEEVAKYMEKITKSLVEKVNAEIR

SEQ ID NO: 6127 - protein, 899 aa, Streptococcus agalactiae
ATGAAAATAGATGACCTAAGAAAAAGCGACAATGTTGAAGATCGTCGCTCCAGTAGCGGAGGTTCATTCTCTAGCGGAGGAAGTGGATTACCGATTCTTCAACTTTTATTGATGCGAGGGAGTTGGAAAACCAAGCTTGTGGTTTTAATCATCTTACTGCTACTTGGCGGAGGGGGACTAACCAGCATTTTTAATGACTCATCTCACCTTCTAGTTACCAATCTCAGAATGTCTCACGTTCTGTTGATAATAGCGCAACGAGAGAACAAATCGATTTCGTTAATAAAGTCCTTGGCTCAACTGAGGATTTCTGGTCACAAGAATTCCAAACCCAAGGTTTTGGAAATTATAAGGAACCAAAACTTGTTCTTTACACCAATTCAATTCAAACAGGTTGTGGTATAGGTGAATCTGCTTCAGGACCATTTTATTGTTCAGCAGATAAAAAAATCTATCTTGATATTTCTTTTTACAATGAATTATCACATAAATATGGTGCTACTGGTGATTTTGCTATGGCCTACGTCATCGCCCACGAAGTTGGTCACCACATTCAAACAGAGTTAGGCATTATGGATAAGTATAATACAATGCGACACGGACTTACTAAGAAAGAAGCAAATGCTTTAAATGTTCGGCTAGAACTTCAAGCAGATTATTATGCAGGGGTATGGGCTCACTACATCAGGGGAAAAAATCTCTTAGAACAAGGAGACTTTGAAGAGGCCATGAATGCTGCCCACGCCGTCGGAGACGATACCCTTCAGAAAGAAACCTACGGAAAATTAGTGCCTGATAACTTTACCCATGGAACAGCTGAACAACGCCAACGTTGGTTTAACAAAGGCTTTCAATATGGTGACATCCAACACGGTGATACTTTCTCCGTAGAACATCTA

SEQ ID NO: 6128 - protein, 300 aa, Streptococcus agalactiae
MKIDDLRKSDNVEDRRSSSGGSFSSGGSGLPILQLLLMRGSWKTKLVVLIILLLLGGGGLTSIFNDSSSPSSYQSQNVSRSVDNSATREQIDFVNKVLGSTEDFWSQEFQTQGFGNYKEPKLVLYTNSIQTGCGIGESASGPFYCSADKKIYLDISFYNELSHKYGATGDFAMAYVIAHEVGHHIQTELGIMDKYNTMRHGLTKKEANALNVRLELQADYYAGVWAHYIRGKNLLEQGDFEEAMNAAHAVGDDTLQKETYGKLVPDNFTHGTAEQRQRWFNKGFQYGDIQHGDTFSVEHL

SEQ ID NO: 6129 - protein, 3231 aa, Streptococcus agalactiae
ATGAAATTACTTTATACTGATATTAATCATGATATGACAGAAATCTTAGTCAATCAGGCCGCGCATGCTGCTGAAGCTGGATGGCGTATTTTTTATATTGCTCCAAACTCTTTATCTTTTGAAAAAGAGCGTGCAGTATTAGAGAACCTTCCTCAAGAAGCCTCTTTTGCTATTACAATTACTCGCTTTGCTCAATTGGCACGTTATTTTACTTTAAACCAGCCTAATCAAAAAGAAAGTTTAAACGATATTGGATTAGCAATGATCTTTTATCGTGCTTTAGCAAGTTTTGAAGATGGACAATTAAAAGTTTTTGGACGATTGAAGCAAGATGCTTCCTTTATCAGTCAATTGGTAGACCTATACAAAGAATTGCAGACAGCAAATCTGAGTATTTTAGATTTAAAATATTTACATTCTCCTGAAAAATTTGAAGATTTATTAGCTATTTTTCTAGTGGTTTCAGATCTTTTAAGAGAAGGAGAATACGACAATCAATCTAAAATTGCCTTTTTTACAGAACAAGTAAGGTCAGGCCAGCTAGATGTGGATTTAAAGAACACTATCCTTATAGTCGATGGTTTTACCCGTTTCTCAGCTGAAGAAGAAGCTTTAATTAAAAGTCTGAGTTCACGTTGTCAAGAGATTATCATCGGAGCTTATGCTAGCCAAAAAGCGTATAAGGCTAACTTTACTAATGGAAATATTTATTCTGCAGGGGTTGATTTTTTAAGATATCTAGCAACGACATTTCAAACAAAACCAGAATTTATCTTGTCTAAGTGGGAAAGTAAGTCTGGTTTTGAAATGATTTCGAAAAATATCGAAGGTAAACATGATTTTACAAATAGTAGTCACATTTTAGACGACACTGCTAAAGATTGTATAACAATTTGGGAGTGCATTAATCAAAAAGATGAAGTGGAACATGTGGCTAGAGCTATACGTCAGAAACTTTATCAGGGATATCGCTACAAAGATATTTTAGTTTTACTAGGAGATGTAGATAGTTATAAACTACAATTAAGCAAGATTTTTGAGCAGTATGATATTCCTTATTATTTCGGTAAAGCTGAAACAATGGCTGCGCACCCTTTAGTTCATTTTATGGATTCCTTGTCTCGAATAAAACGTTATCGATTTAGAGCTGAAGATGTTTTAAATCTTTTTAAGACAGGTATTTATGGAGAGATTAGTCAAGATGATTTAGATTATTTTGAGGCTTATATCTCATATGCAGACATTAAAGGTCCTAAGAAGTTCTTTACAGATTTTGTTGTGGGGGCTAAAAAATTTGATTTAGGGCGTCTTAACACTATTCGTCAGTCCCTCCTTGCTCCACTGGAAAGTTTTGTTAAAACGAAAAAACAAGACGGTATAAAAACACTCAACCAATTCATGTTTTTCCTTACTCAGGTAGGTTTGAGTGACAATTTATCGCGATTAGTTGGTCAAATGTCTGAAAATGAACAAGAAAAACATCAAGAAGTTTGGAAAACATTTACAGATATTTTAGAGCAGTTTCAAACAATATTTGGTCAAGAAAAATTAAATTTAGATGAATTTTTATCGTTATTAAATTCAGGTATGATGCAAGCCGAGTATCGTATGGTCCCTGCTACTGTTGATGTGGTTACTGTTAAGTCTTACGACTTGGTAGAACCACATAGTAATCAATTTGTCTATGCCCTAGGCATGACACAATCACATTTTCCAAAGATTGCTCAAAACAAATCTTTAATATCTGATATTGAACGTCAGCTTATAAATGATGCCAATGACACTGATGGTCATTTTGACATTATGACGCGAGAAAATTTGAAGAAAAACCATTTTGCTGCTCTCTCTCTTTTTAATGCTGCTAAACAAGCATTAGTGTTGACTATACCACAATTATTGAATGAGTCTGAAGATCAGATGTCACCATATCTTATCGAACTAAGAGATATAGGTGTTCCTTTTAATCATAAAGGACGCCAATCGTTAAAAGAAGAAGCTGATAATATTGGGAATTACAAAGCTTTATTATCGCGTGTTGTTGACTTGTATCGCTCTGCTATTGACAAAGAGATGACTAAAGAAAAACAAACTTTTTGGTCAGTTGCTGTTCGTTATTTGCGTCGTCAATTAACTTCTAAAGGGATTGAGATACCAATAATTACAGATAGTCTTGATACTGTGACAGTTTCATCAGATGTGATGACCAGACGCTTCCCAGAAGATGACCCACTTAAATTATCCTCATCTGCTTTGACAACTTTTTATAATAATCAATATAAGTATTTTTTACAATATGTGTTAGGTTTGGAAGAACAAGACTCAATTCATCCAGATATGCGGCACCATGGAACGTACCTTCATCGTGTTTTTGAAATTCTGATGAAAAACCAAGGGATAGAATCTTTTGAAGAGAAACTCAACTCTGCAATTAATAAAACCAATCAAGAAGATGTTTTCAAATCCTTGTATTCAGAAGATGCAGAAAGTCGTTATTCTTTAGAAATTTTAGAAGATATCGCGCGTGCAACTGCAACCATATTACGACAAGATAGTCAGATGACTGTTGAAAGTGAAGAAGAACGATTTGAACTAATGATTGATAATACTATAAAAATTAACGGTATTATTGACCGTATCGATCGTTTATCTGATGGTTCTTTGGGTGTCGTGGACTATAAATCAAGCGCTCAAAAATTCGATATCCAAAAATTTTATAACGGTCTAAGTCCACAATTAGTTACCTACATTGATGCTATCAGTCGTGACAAGGAGGTTGAACAAAAACCACCGATTTTTGGAGCTATGTATTTACATATGCAAGAACCTAAACAAGACTTGTCTAAAATTAAAAATTTAGATGATTTAGTAACAAAAAATCATCAAGCTTTAACTTATAAAGGATTATTTTCAGAAGCTGAAAAAGAATTTTTAGCAAATGGGAAATACCATCTCAAAGATTCCCTTTATTCAGAGGCTGAAATTGCTATTTTACAAGCACATAACCAATTGCTTTACAAAAAAGCATCTGAGACTATTAAGTCAGGTAAGTTTTTGATCAATCCATATACAGAAGATGCTAAAACAGTTGACGGTGATCAGTTTAAGAGTATTACGGGGTTCGAGGCGGATAGGCATATGGCGCGTGCCAGAGCGCTTTATAAATTACCTGCTAAGGAAAAACGTCAAGGTTTCTTAACATTAATGCAGCAAGAGGAGGAAAATGATGACCTT

SEQ ID NO: 6130 - protein, 1077 aa, Streptococcus agalactiae
MKLLYTDINHDMTEILVNQAAHAAEAGWRIFYIAPNSLSFEKERAVLENLPQEASFAITITRFAQLARYFTLNQPNQKESLNDIGLAMIFYRALASFEDGQLKVFGRLKQDASFISQLVDLYKELQTANLSILDLKYLHSPEKFEDLLAIFLVVSDLLREGEYDNQSKIAFFTEQVRSGQLDVDLKNTILIVDGFTRFSAEEEALIKSLSSRCQEIIIGAYASQKAYKANFTNGNIYSAGVDFLRYLATTFQTKPEFILSKWESKSGFEMISKNIEGKHDFTNSSHILDDTAKDCITIWECINQKDEVEHVARAIRQKLYQGYRYKDILVLLGDVDSYKLQLSKIFEQYDIPYYFGKAETMAAHPLVHFMDSLSRIKRYRFRAEDVLNLFKTGIYGEISQDDLDYFEAYISYADIKGPKKFFTDFVVGAKKFDLGRLNTIRQSLLAPLESFVKTKKQDGIKTLNQFMFFLTQVGLSDNLSRLVGQMSENEQEKHQEVWKTFTDILEQFQTIFGQEKLNLDEFLSLLNSGMMQAEYRMVPATVDVVTVKSYDLVEPHSNQFVYALGMTQSHFPKIAQNKSLISDIERQLINDANDTDGHFDIMTRENLKKNHFAALSLFNAAKQALVLTIPQLLNESEDQMSPYLIELRDIGVPFNHKGRQSLKEEADNIGNYKALLSRVVDLYRSAIDKEMTKEKQTFWSVAVRYLRRQLTSKGIEIPIITDSLDTVTVSSDVMTRRFPEDDPLKLSSSALTTFYNNQYKYFLQYVLGLEEQDSIHPDMRHHGTYLHRVFEILMKNQGIESFEEKLNSAINKTNQEDVFKSLYSEDAESRYSLEILEDIARATATILRQDSQMTVESEEERFELMIDNTIKINGIIDRIDRLSDGSLGVVDYKSSAQKFDIQKFYNGLSPQLVTYIDAISRDKEVEQKPPIFGAMYLHMQEPKQDLSKIKNLDDLVTKNHQALTYKGLFSEAEKEFLANGKYHLKDSLYSEAEIAILQAHNQLLYKKASETIKSGKFLINPYTEDAKTVDGDQFKSITGFEADRHMARARALYKLPAKEKRQGFLTLMQQEEENDDL

SEQ ID NO: 6131 - protein, 3621 aa, Streptococcus agalactiae
ATGACCTTTAAGCCTTTCTTAAATCCAGAAGATATTGCTGTTATTCAGACAGAAGAAAAAAATTCTGATAAAAAACAAAAGCGAACGCCTGAACAAATTGAAGCCATTTATACTTTTGGTAACAATGTCCTGGTATCAGCTTCGGCTGGTTCTGGAAAGACTTTTGTAATGGTTGAGCGGATTTTAGATAAACTTTTAAGAGGGGTTCCGATTGACTCTTTGTTTATCTCAACATTTACAGTAAAAGCGGCAGGTGAGCTCAAAGAACGTTTAGAAAAGAAAATAAACGAGTCTTTGAAATCCGCAGAATCAGATGATTTAAAACAGTTTCTCACCCAGCAACTTGTAGGCATTCAAACAGCTGATATTGGTACTATGGATGCTTTTACGCAAAAAATAGTTAACCAATATGGTTATACTTTGGGCATATCACCTATATTTAGGATTTTACAAGATAAAAATGAGCAAGACGTCATAAAGAATGAGGTCTATGCTGATTTATTTTCTGACTACATGACTGGGAAGAATGCAGCTTCATTCATAAAATTAGTCAAAAATTTCTCAGGTAATCGTAAAGATAGCAAAGCTTTTCGAGAAATGGTTTATAAAGTTTATGCTTTTAGCCAGTCCACCGATAACCCCAAGCGCTGGATGCAAACAGTTTTTCTAAAAGGTGCACAAACTTACACTGATTTTGAAGCTATTCCAGATCAAGAAGTTTCAAGCCTTTTAAATGTAATGCAAACAACTGCTAATCAATTACGTGATTTAACGGATCAAGAAGATTATAAGCAATTAACTGCTAAAGGGGTTCCGACAGCAAATTACAAAAAACACCTTAAAATAATTGAAAATTTAGTCCATTGGTCTCAAGACTTTAATTTGCTGTATGGAAAAAAAGGATTGGCTAATTTGGCACGTGATATCACTAATGTGATTCCTTCAGGCAATGATGTTACAGTTGCTGGCGTTAAATATCCTATCTTTAAACAATTGCATAATCGTATCGTTGGACTTAAGCACTTAGAAGTTATTTTTAAGTATCAAGGAGAATCTCTTTTCTTGTTAGAATTATTGCAATCCTTTGTTCTAGATTTCTCAGAACAATATTTACAGGAGAAGATTCAAGAAAATGCTTTTGAATTTTCTGATATTGCCCATTTTGCAATTCAAATATTGGAAGAAAATCATGATATTAGGCAACTTTATCAAGATAAGTATCATGAAGTAATGGTTGATGAGTATCAGGACAATAACCATACCCAAGAGAGAATGTTAGAATTATTGTCTAATGGACATAATCGTTTCATGGTTGGAGACATAAAACAATCAATTTACCGTTTTCGTCAGGCTGATCCACAAATTTTTAATGATAAATACAAAGCTTACCAAGACAATCCAAGTCAAGGGAAATTAATTATTCTGAAAGAGAATTTTCGGAGTCAATCAGAGGTTTTAGACAGTACAAATAGTGTGTTTACACATCTTATGGATGAAGAAGTAGGAGACATTCTTTATGATGAAAGTCACCAATTAAAAGCTGGTAGTCCAAGACAGCAAGAAAGACATCCGAATAATAAAACACAAGTTTTACTATTAGATACTGATGAAGATGATATAAATGACAGTGATAGTCAACAATATGATATTAGCCCAGCTGAAGCAAAGTTAGTCGCAAAAGAAATTATTCGATTGCATAAAGAAGAGAATGTTCCCTTTCAAGATATCACCCTCTTAGTTTCTTCAAGGACAAGGAATGATGGTATCTTACAAACTTTTGACCGTTATGGTATTCCTTTGGTAACTGACGGTGGGGAGCAAAATTACTTAAAATCAGTCGAAGTGATGGTAATGCTTGATACTTTGCGGTCAATTGATAATCCCTTAAATGATTATGCTCTAGTTGCTCTTTTGAGATCTCCCATGTTTGGCTTTAATGAAGATGATTTAACAAGAATTGCTATTCAGGATGTCAAAATGGCTTTTTATCATAAAGTGAAATTGTCTTATCATAAAGAAGGTCATCATAGTGATTTAATTACTCCAGAATTATCTTCTAAAATAGATCACTTTATGAAAACATTCCAGACTTGGCGTGATTTTGCTAAATGGCATTCGCTTTATGATTTAATATGGAAAATATATAATGACCGTTTTTATTATGATTATGTAGGAGCTCTGCCTAAAGCTGAGCAACGTCAAGCCAATCTATATGCCTTGGCACTTCGAGCAAATCAGTTTGAAAAAACAGGTTTCAAGGGTTTATCACGCTTTATTCGAATGATTGATAAAGTTTTAGAAAATGAAAATGATTTGGCAGATGTTGAGGTGGCATTACCGCAAAATGCTGTTAACCTAATGACTATACACAAATCAAAGGGTCTTGAGTTTAAGTATGTATTTATTTTAAATATTGATAAGAAATTTTCAATGGTAGACATAACTTCCCCTCTTATTTTAAGCCGAAATCAAGGGATTGGTATTAAATATGTTGCTGATATGCGACATGAACTCGAAGAAGAGCTACTGCCTGCAGTAAAGGTTAGCATGGAAACACTTCCTTACCAACTTAATAAAAGAGAGTTACGCTTAGCTACTTTATCAGAGCAAATGCGTTTACTTTACGTAGCTATGACACGTGCAGAGAAAAAATTATATCTGGTTGGTAAGGCTAGTCAAACCAAATGGGCTGATCATTATGACTTAGTATCTGAAAATAATCATCTCCCATTAGCTAGTCGTGAGACTTTTGTGACCTTTCAAGATTGGTTACTGGCTGTTCATGAAACCTATAAGAAACAAGAGTTGTTTTATGACATCAACTTCGTATCATTAGAGGAATTAACAGATCACCACATAGGGATGGTTAATCCTAGTCTACCTTTCAATCCCGATAATAAGGCAGAGAATCGTCAGTCTGAAGATATCGTGCGCGCGATTAGCGTGTTAGAATCTGTTGAACAGATTAATCAAACTTATAAAGCGGCTATTGAGTTACCGACAGTAAGAACACCAAGTCAAGTCAAAAAATTCTATGAGCCTATTCTAGATATAGAAGGCGTTGATGTGATGGAAACTATTACTAAAACATCAGTAGATTTTAAGTTACCTGATTTTTCTACAAGTAAAAAGCAAGACCCAGCAGCTTTAGGATCTGCTGTACATGAATTAATGCAACGCATAGAGATGTCATCTCATGTCAAAATGGAAGATATTCAAAAAGCCTTGACAGAAGTGAATGCTGAAACAAGTGTCAAAGCGGCTATTCAGATTGAAAAAATCAACTATTTTTTCCAAGAAACCTCACTCGGTAAGTATATACAAGAAGAAGTAGAACATCTGCATCGAGAGGCACCTTTTGCCATGTTAAAAGAAGATCCGGAGAGTGGTGAGAAATTCGTTGTACGTGGTATTATTGATGGGTATCTACTATTAGAAAATCGGATAATTCTATTTGATTATAAGACTGATAAATTTGTCAATCCTCTGGAATTAAAAGAACGCTATCAGGGACAAATGGCTTTATATGCAGAAGCTTTAAAAAAATCTTACGAGATAGAAAAGATAGACAAATACTTAATTCTTTTAGGTGGTAAACAGCTAGAAGTGGTAAAAATGGAT

SEQ ID NO: 6132 - protein, 1207 aa, Streptococcus agalactiae
MTFKPFLNPEDIAVIQTEEKNSDKKQKRTPEQIEAIYTFGNNVLVSASAGSGKTFVMVERILDKLLRGVPIDSLFISTFTVKAAGELKERLEKKINESLKSAESDDLKQFLTQQLVGIQTADIGTMDAFTQKIVNQYGYTLGISPIFRILQDKNEQDVIKNEVYADLFSDYMTGKNAASFIKLVKNFSGNRKDSKAFREMVYKVYAFSQSTDNPKRWMQTVFLKGAQTYTDFEAIPDQEVSSLLNVMQTTANQLRDLTDQEDYKQLTAKGVPTANYKKHLKIIENLVHWSQDFNLLYGKKGLANLARDITNVIPSGNDVTVAGVKYPIFKQLHNRIVGLKHLEVIFKYQGESLFLLELLQSFVLDFSEQYLQEKIQENAFEFSDIAHFAIQILEENHDIRQLYQDKYHEVMVDEYQDNNHTQERMLELLSNGHNRFMVGDIKQSIYRFRQADPQIFNDKYKAYQDNPSQGKLIILKENFRSQSEVLDSTNSVFTHLMDEEVGDILYDESHQLKAGSPRQQERHPNNKTQVLLLDTDEDDINDSDSQQYDISPAEAKLVAKEIIRLHKEENVPFQDITLLVSSRTRNDGILQTFDRYGIPLVTDGGEQNYLKSVEVMVMLDTLRSIDNPLNDYALVALLRSPMFGFNEDDLTRIAIQDVKMAFYHKVKLSYHKEGHHSDLITPELSSKIDHFMKTFQTWRDFAKWHSLYDLIWKIYNDRFYYDYVGALPKAEQRQANLYALALRANQFEKTGFKGLSRFIRMIDKVLENENDLADVEVALPQNAVNLMTIHKSKGLEFKYVFILNIDKKFSMVDITSPLILSRNQGIGIKYVADMRHELEEELLPAVKVSMETLPYQLNKRELRLATLSEQMRLLYVAMTRAEKKLYLVGKASQTKWADHYDLVSENNHLPLASRETFVTFQDWLLAVHETYKKQELFYDINFVSLEELTDHHIGMVNPSLPFNPDNKAENRQSEDIVRAISVLESVEQINQTYKAAIELPTVRTPSQVKKFYEPILDIEGVDVMETITKTSVDFKLPDFSTSKKQDPAALGSAVHELMQRIEMSSHVKMEDIQKALTEVNAETSVKAAIQIEKINYFFQETSLGKYIQEEVEHLHREAPFAMLKEDPESGEKFVVRGIIDGYLLLENRIILFDYKTDKFVNPLELKERYQGQMALYAEALKKSYEIEKIDKYLILLGGKQLEVVKMD

SEQ ID NO: 6133 - protein, 915 aa, Streptococcus agalactiae
ATGATAGTCGAACAAAAATTTGGAAATGGTTTTACTTGGATTAATATTGAAGCAGAGCAATTGCGAACAGAAACATCGGAAATTCAAGCAAAATATTTGGATAGTGAGATTATTACATATGCTCTGGATGATTATGAACGAGCCTTTATGGAATGTTCTCATATTAAAGGAAAAGAAGTCTTGACGATTATTTTTAATACTATTGATCTAAAGCAGAAAGAAAGTTATTATGAGACCGTTCCGATGACCTTTTGCTTATCACACGACCGTTTGATAACGGTGACACGGTCTCGAAATAGTTATATGCTAGAACTATTGCAAAAATATCTAGACCGTAATCCAGATGTCTCTCCTAAAAAATTTTTATTTGCAGCTTTAACTTTGATTACAAAACAATATTTTAATGTTGTATCGAAAATTGATAGAGAAAAGGATATTCTCAACCGTCAATTGAGAGAACAAACAACCAATAAGCGCTTATTAGCCATGAGTGACCTAGAGACAGGATCCGTTTATCTTTTGACAGCTGCCAATCAAAATGCATTGGTATTAGAGCAATTAGATGTTCATCCTAGTCAGCGATTTAATTCTGAAGTGGAAAAAGAACAGTTATCAGATGCTCTCATTGAAGCGCATCAGTTAGTCAGTATGACACAATTAAACAGTCAGGTACTTTCACAATTATCATCTACTTTTAACAATGTCTTAAATAATAACTTGAACGAAAACTTAACAGGTTTGAATATCATTTCGATTAATTTAGCGATTATTGCAGCAATTACTGGCTTTTTTGGGATGAATATTCCATTACCTCTTACAGAATCACGGAGTTCATGGTTAATTGTTATTGCTACTTCGGTCTTACTTTGGGTTATTATTGCTCAAATTTTAAAACGAGTTTTTAACTTAAGAAAA

SEQ ID NO: 6134 - protein, 305 aa, Streptococcus agalactiae
MIVEQKFGNGFTWINIEAEQLRTETSEIQAKYLDSEIITYALDDYERAFMECSHIKGKEVLTIIFNTIDLKQKESYYETVPMTFCLSHDRLITVTRSRNSYMLELLQKYLDRNPDVSPKKFLFAALTLITKQYFNVVSKIDREKDILNRQLREQTTNKRLLAMSDLETGSVYLLTAANQNALVLEQLDVHPSQRFNSEVEKEQLSDALIEAHQLVSMTQLNSQVLSQLSSTFNNVLNNNLNENLTGLNIISINLAIIAAITGFFGMNIPLPLTESRSSWLIVIATSVLLWVIIAQILKRVFNLRK

SEQ ID NO: 6135 - protein, 1374 aa, Streptococcus agalactiae
ATGTCTATTACAAAAGAATTTGATACCATCGCAGCTATTTCAACTCCTCTCGGTGAGGGAGCTATTGGTATTGTCCGTATATCTGGTACAGATGCCTTAAAGATAGCATCAAAAATTTATCGTGGAAAAGATTTATCCGCTATCCAATCCCATACCTTAAACTATGGTCATATTGTGGACCCAGATAAAAATGAAATCTTGGATGAAGTTATGTTAGGCGTTATGCTTGCTCCAAAAACATTCACAAGAGAAGATGTTATTGAAATTAATACGCATGGAGGAATTGCAGTTACTAACGAAATTCTTCAGTTAATTTTACGACATGGAGCACGAATGGCTGAACCAGGAGAATTTACTAAACGTGCTTTTTTAAATGGTCGAGTTGACTTGACTCAGGCTGAAGCTGTTATGGATCTTATTAGAGCTAAAACAGATAAAGCAATGGATATTGCCGTTAAGCAATTAGATGGTTCTCTAAAGACACTAATCAATAACACTCGACAAGAAATTCTAAATACTCTAGCCCAAGTTGAAGTTAATATCGATTACCCTGAATATGATGACGTTGAAGAGATGACTACAACACTGATGCGTGAAAAAACACAAGAGTTTCAAGCACTTATGGAAAATTTACTTCGAACTGCCCGACGTGGAAAAATTCTTCGAGAAGGACTTTCAACAGCAATCATTGGTCGTCCAAATGTCGGTAAATCCAGCTTACTAAATAACCTCTTACGTGAAGAAAAGGCGATTGTGACAGATATTGAAGGAACAACTCGTGATGTTATTGAAGAATACGTCAATATTAAAGGAGTTCCTTTAAAACTAGTTGACACTGCTGGTATCCGTGATACAGATGATATCGTTGAAAAAATTGGTGTTGAACGTTCAAAGAAGGCTTTAGAAGAAGCCGACCTTGTGTTGTTGGTTCTCAATAGTTCCGAACCACTAACATTACAAGACCGCTCCCTTCTAGAACTAAGTAAAGAAAGTAATCGTATCGTATTACTCAATAAAACGGATCTTCCTCAAAAAATAGAAGTTAACGAATTACCTGAAAATGTTATTCCAATTTCGGTTTTAGAAAATGAAAACATCGATAAAATCGAAGAACGTATTAACGATATTTTCTTTGACAATGCTGGTATGGTAGAACATGACGCTACTTATCTATCGAATGCTCGCCATATCTCACTAATTGAAAAAGCCGTTGATAGTTTAAAAGCTGTCAATGAGGGCTTGGAATTAGGAATGCCTGTTGATCTCTTACAAGTCGATATGACTAGAACTTGGGAAATACTTGGAGAAATCACTGGGGATGCAGCTCCAGATGAACTAATAACTCAGCTCTTCAGCCAATTCTGCTTAGGTAAA

SEQ ID NO: 6136 - protein, 458 aa, Streptococcus agalactiae
MSITKEFDTIAAISTPLGEGAIGIVRISGTDALKIASKIYRGKDLSAIQSHTLNYGHIVDPDKNEILDEVMLGVMLAPKTFTREDVIEINTHGGIAVTNEILQLILRHGARMAEPGEFTKRAFLNGRVDLTQAEAVMDLIRAKTDKAMDIAVKQLDGSLKTLINNTRQEILNTLAQVEVNIDYPEYDDVEEMTTTLMREKTQEFQALMENLLRTARRGKILREGLSTAIIGRPNVGKSSLLNNLLREEKAIVTDIEGTTRDVIEEYVNIKGVPLKLVDTAGIRDTDDIVEKIGVERSKKALEEADLVLLVLNSSEPLTLQDRSLLELSKESNRIVLLNKTDLPQKIEVNELPENVIPISVLENENIDKIEERINDIFFDNAGMVEHDATYLSNARHISLIEKAVDSLKAVNEGLELGMPVDLLQVDMTRTWEILGEITGDAAPDELITQLFSQFCLGK

SEQ ID NO: 6137 - protein, 1907 aa, Streptococcus agalactiae
ATGATTATACTACAAGGAAACAAAATTGAGCGCTCATTTTCAGGTGATGTGCTTTTTGATAATATTAATATTCAAGTTGATCAACGTGATCGTATTGCTCTTGTTGGACGTAATGGTGCTGGCAAATCAACGCTTCTTAAATTTTAGTTGGTGAAGAGACTCCGACAAAAGGAGAAATAAATAAAAAGCGTGATTTGAGTTTGTCCTACTTGGCACAAGATAGTCGTTTTCAATCTGAAAATACAATTTTCCAAGAAATGTTACAAGTTTTTGACTCATTAAGAGAAGTAGAGAAACGCTTACGTGAATTGGAATTACAAATGGGGCAAGTTTCAGGAAGTGACCTGGAACAATTGATGAAAACATACGATATTTTGTCAGAAGAGTTTCGTGAAAAAGGTGGCTTTACCTATGAATCAGATATAAAGGCTATTTTAAATGGCTTTAAGTTTAACAGTGATATGTGGGAAATGCCTATTAGTGAATTGTCTGGCGGGCAAAATACACGATTAGCGCTTGCAAAAATGCTACTTGAAAAGCCAGAATTACTTGTTTTAGATGAACCAACGAACCATTTAGACATTGATACGATTGCTTGGTTAGAAAATTATCTTGTAAATTATCAAGGAGCCCTTATTATTGTCAGCCATGACCGCTATTTTTTAGACAAGGTAGCTACAGTAACTTATGATTTAACGACACATTCTCTAGACCGCTATGTAGGCAATTATTCGAAATTTATGGATCTTAAGGCAGAGAAAATAGCGACTGAAGAAAAGAATTTTGAAAAGCAACAAAAAGAAATTGCTAAGTTAGAAGATTTTGTACAACGTAACATTGTTAGGGCTTCAACCACTAAACGAGCACAAGCTCGTCGTAAACAATTAGAAAAGATGGAACGACTCGACAAACCGAATGTAGAGCAAAAATCAGCTAATATGACTTTTCATGCTGGGAAAGTCTCAGGGAATGTTGTTTTAACACTTGAGAATGCAGCTATTGGTTATGAAGGTGTTTCTTTATCGGAGCTAATCGATTTGGACGTGAAGAAATTTGATGCTATTGCAATTGTAGGTCCAAATGGTATCGGGAAATCAACTTTAATCAAATCGCTTGTTGGGCAAATTCCTTTTATCAAAGGAGAAGCAAAATTAGGAGCAAATGTCGAAACTGGGTATTACGATCAAAGTCAAAGTAATTTAACAAAAACGAATACTGTTTTAGATGAGTTATGGAATGCTTTTTCAACAACGCCAGAAGTTGAAATTAGAAACCGTTTAGGAGCTTTTCTTTTTTCAGGTGATGATGTTAAAAAATTAGTTTCAATGCTATCCGGTGGTGAACGAGCGCGTTTGCTATTGGCAAAATTATCTATGGAAAATAATAATTTCCTCATATTAGATGAGCCAACAAACCACTTGGATATTGATAGTAAAGAAGTCTTAGAAAATGCACTCATCGAATTTGATGGCACATTACTTTTTGTTAGTCACGATCGCTATTTTATTAATCGTGTGGCAACTAAGGTTCTCGAAATTTCTGATAAGGGAAGTACTCTCTATCTAGGAGATTATGATTATTACCTCACTAAGAAAGCCGAACTAGAGGAATTAGCACGTTTAAATGAAGAAGAAGTGAGTGCTTCAAAAACAGAAATCGACGTTACATCAGATTATGAGACACAAAAAGCAAATCAAAAGGAATTTAGGAAAATTACCCGTCGCATTGCAGAAATTGAGGCGCGTTTGGAAGTTCTTGAAAATAATGAAAACAATATCAATGGTTTAATGTTAGAAACCAATGACATCGGAAAACTCTCTGACTTACAAAAAGAGCTGGAATCAATCCAAGAAGAACAATTGCTATTAATGGAAGAATGGGAAAATCTAAATATGAGACTAGATTTG

SEQ ID NO: 6138 - protein, 636 aa, Streptococcus agalactiae
MIILQGNKIERSFSGDVLFDNINIQVDQRDRIALVGRNGAGKSTLLKILVGEETPTKGEINKKRDLSLSYLAQDSRFQSENTIFQEMLQVFDSLREVEKRLRELELQMGQVSGSDLEQLMKTYDILSEEFREKGGFTYESDIKAILNGFKFNSDMWEMPISELSGGQNTRLALAKMLLEKPELLVLDEPTNHLDIDTIAWLENYLVNYQGALIIVSHDRYFLDKVATVTYDLTTHSLDRYVGNYSKFMDLKAEKIATEEKNFEKQQKEIAKLEDFVQRNIVRASTTKRAQARRKQLEKMERLDKPNVEQKSANMTFHAGKVSGNVVLTLENAAIGYEGVSLSELIDLDVKKFDAIAIVGPNGIGKSTLIKSLVGQIPFIKGEAKLGANVETGYYDQSQSNLTKTNTVLDELWNAFSTTPEVEIRNRLGAFLFSGDDVKKLVSMLSGGERARLLLAKLSMENNNFLILDEPTNHLDIDSKEVLENALIEFDGTLLFVSHDRYFINRVATKVLEISDKGSTLYLGDYDYYLTKKAELEELARLNEEEVSASKTEIDVTSDYETQKANQKEFRKITRRIAEIEARLEVLENNENNINGLMLETNDIGKLSDLQKELESIQEEQLLLMEEWENLNMRLDL

SEQ ID NO: 6139 - protein, 966 aa, Streptococcus agalactiae
ATGGTAACTCTATCTAAAGAACAACACTTGGATATGTTTCTAAAAATGCAACGTATTCGTGATGTTGATATGAAATTTAACAAATTGGTTCGTCGTGGTTTCGTCCAAGGGATGACTCACTTCTCTGTTGGTGAAGAAGCTGCTTCAGTAGGTGCTATCCAAGATTTAACAGATTCAGATATCATTTTCTCAAACCACCGTGGACACGGACAAACTATTGCAAAAGGTATTGATATTGGTGGAATGTTTGCTGAACTTGCTGGTAAAGCAACAGGAACATCAAAAGGTCGTGGAGGCTCAATGCACTTAGCAAACCTTGAAAAAGGTAACTATGGAACAAACGGTATCGTCGGTGGAGGATATGCGCTTGCAGTAGGTGCTGCCCTTACACAGCAATATGAAGGAACTGATAACATTGTTATCGCCTTTTCGGGTGACTCAGCGACTAACGAGGGCTCATTCCATGAGTCAGTTAACTTAGCTGCTGTTTGGAACTTACCAGTTATCTTCTTTATCATCAACAACCGTTATGGTATCTCAACAGACATCACATACTCAACTAAAATTCCTCACCTTTACATGCGTGCTGATGCGTACGGTATTCCAGGGCATTACGTTGAAGATGGTAATGACCTTATGGCTGTTTACGAGAAAATGCATGAAGTTATCAATTACGTGCGTTCAGGAAATGGACCAGCTATTGTAGAGGTTGAATCATACCGTTGGTTTGGTCATTCAACTGCTGATGCTGGGGTATACCGTACTAAAGAAGAAGTTGATTCATGGAAAGCTAAAGATCCAGTAAAACGCTACCGTGCATACTTAATTGAAAATGAAATCGCTACTGAAGAAGAGCTTGCAGCTATTGAAGCACAAGTGATTAAAGAAGTTGAAGAAGGGGTTAAATTCGCTGAAGAAAGTCCATTCCCTGATATGTCTGTTGCATTTGAAGACGTTTTTGTGGAC

SEQ ID NO: 6140 - protein, 322 aa, Streptococcus agalactiae; identical to SEQ ID NO: 1690

SEQ ID NO: 6141 - protein, 858 aa, Streptococcus agalactiae
ATGTTAGAAGAGTTTGGTGCTAAGCGCGTTCGCGACACACCAATCTCAGAGGCTGCGATTGCAGGTTCAGCTATCGGTGCTGCACAAACAGGTTTGCGTCCTATCGTTGATTTGACATTCATGGATTTCGTAACAATCGCAATGGATGCTATCGTTAACCAAGGTGCTAAAACGAATTATATGTTTGGTGGAGGTCTATCAACTCCAGTTACTTTCCGTGTGGCATCAGGGTCAGGTATTGGTTCGGCTGCACAACACTCACAATCATTAGAAGCTTGGTTAACACACATTCCAGGTCTAAAAGTTGTTGCACCTGGTACTGTTAATGAGTCAAAAGCACTTTTGAAATCTTCTATTCTTGACAATAACCCAGTTATCTTCTTAGAGCCAAAAGCTCTCTATGGTAAGAAAGAAGAAGTTAACATGGATCCTGATTTCTATATTCCACTTGGTAAAGGGGATATTAAGCGTGAGGGTACTGACTTAACAATTGTTTCTTATGGCCGTATGCTTGAGCGTGTTATGCAAGCTGCTGAAGAAGTTGCTGAGGAAGGTATTAACGTTGAGGTTGTTGATCCACGTACACTTATTCCGCTTGATAAAGAATTAATTATCGATTCTGTTAAGAAAACTGGTAAATTGATTTTGGTTAACGATGCTTATAAAACTGGTGGTTTCACTGGTGAAATTGCAACTATGGTTGCTGAAAGTGAAGCATTTGATTACCTTGATCATCCTATCGTGCGTCTTGCAAGTGAAGATGTTCCAGTACCGTATTCACGTGTACTTGAACAAGGAATCTTACCTGATGTAGCAAAAATTAAAGATGCTATCTACAAAGTAGTTAACAAAGGTAAA

SEQ ID NO: 6142 - protein, 286 aa, Streptococcus agalactiae; identical to SEQ ID NO: 1692

SEQ ID NO: 6143 - protein, 1385 aa, Streptococcus agalactiae
ATGGCTGTCGAAATTATTATGCCTAAACTCGGGGTTGATATGCAAGAAGGCGAAATCCTTGAGTGGAAAAAACAGGTAGGTGATGTTGTTAATGAAGGTGACGTCCTACTTGAAATTATGTCAGATAAAACAAATATGGAGATTGAAGCAGAAGACTCAGGTGTTTTACTAAAAATCACACATGGGAATGGAGATGTTGTTCCTGTAACTGAGACAATTGGCTATATCGGTGCTGAAGGTGAAGAAGTAACAGAAGCATCTTCTTCTGAAAATACATCAGTTGAAGAAAACGCGACACAAGTAACTTCAGAACCAGAAAAAGTTGAAGAAACATCAGAACCAAGTGTGCCAGCAGCTACAAGTGGTGAAAAAGTACGTGCCACTCCTGCAGCTCGTAAATTAGCAAGAGAGATGTCTATTGACCTTGCACTAGTATCTGGAACAGGGGCAAATGGTCGCGTTCACAGAGAAGATGTTGAAAGCTTCAAGGGTGCTCAACCACGTATTACACCATTGGCACGTCGAATTGCTGAAGATCAAGGAGTTGATATAGCAGAAATCACTGGCAGTGGTATTCGTGGTAAAATTGTTAAAAATGATGTTTTGGCTGCTATGTCACCGCAAGCAGCAGAGGCTCCTGTAGAAACGAAAGCTACACCAACAACAGAAGAAAAACAATTCCAGAAGGTGTTGAAGTCATTAAGATGTCTGCAATGCGTAAGGCTATTTCTAAAGGTATGACTAACTCTTACCTCACTGCTCCAAGCTTTACACTTAACTATGACATTGATATGACTGAAATGATGGCTCTTCGCAAGAAATTAATTGATCCAATCATGGCTAAAACAGGCTTGAAAGTCAGCTTTACTGATTTGATTGGAATGGCCGTTGTTAAGACATTGATGAAACCAGAGCATCGATACCTAAATGCTTCATTAATTAACGATGCACAAGAAATTGAGCTTCATAATTTTGTTAATATTGGAATCGCAGTTGGTCTTGATGATGGCTTGATTGTTCCTGTTGTTCACAATGCTGATCAAATGTCACTTTCTGACTTTGTTATAGCATCTAAAGATGTTATTAAGAAAACTCAAGAAGGTAAATTAAAATCAGCTGAAATGTCAGGTTCAACATTCTCAATTACTAACTTAGGTATGTTTGGTACTAAGACGTTTAACCCAATTATCAATCAACCGAACTCAGCAATCCTTGGAGTAGGCGCTACTATTCCGACTCCAACAGTGGTTGATGGTGAAATTGTAGCTCGACCAATCATGGCAATGTGTTTAACAATTGACCACCGTATTGTTGATGGAATGAATGGTGCTAAGTTTATGGTTGATCTTAAGAACTTAATGGAAAACCCATTTGGTTTACTTATT

SEQ ID NO: 6144 - protein, 462 aa, Streptococcus agalactiae
MAVEIIMPKLGVDMQEGEILEWKKQVGDVVNEGDVLLEIMSDKTNMEIEAEDSGVLLKITHGNGDVVPVTETIGYIGAEGEEVTEASSSENTSVEENATQVTSEPEKVEETSEPSVPAATSGEKVRATPAARKLAREMSIDLALVSGTGANGRVHREDVESFKGAQPRITPLARRIAEDQGVDIAEITGSGIRGKIVKNDVLAAMSPQAAEAPVETKATPTTEEKQLPEGVEVIKMSAMRKAISKGMTNSYLTAPSFTLNYDIDMTEMMALRKKLIDPIMAKTGLKVSFTDLIGMAVVKTLMKPEHRYLNASLINDAQEIELHNFVNIGIAVGLDDGLIVPVVHNADQMSLSDFVIASKDVIKKTQEGKLKSAEMSGSTFSITNLGMFGTKTFNPIINQPNSAILGVGATIPTPTVVDGEIVARPIMAMCLTIDHRIVDGMNGAKFMVDLKNLMENPFGLLI

SEQ ID NO: 6145 - protein, 1755 aa, Streptococcus agalactiae
ATGGCTTTTGATGTAATTATGCCAAAACTTGGGGTTGACATGCAAGAAGGCGAAATCCTTGAGTGGAAAAAAAATGAAGGTGACACCGTTAATGAAGGTGATGTCCTTCTTGAAATCATGTCTGATAAAACCAATATGGAAATTGAAGCAGAAGACACTGGTGTACTTTTAAAAATTGTACATCAGGCAGGAGATGTTGTTCCCGTCACTGAAGTGATTGCCTATATCGGAGAAGAAGGTGAAGAAGTAGGTACGTCATCACCTTCAGCTGATGCAACTATCACAGCTGAAGATGGTCAATCAGTTTCTGGACCTGCTGCTCCTTCACAAGAGACAGTTGCAGCAGCAACTCCTAAAGAAGAACTTGCAGCTGATGAGTACGATATCGTAGTCGTAGGTGGTGGACCTGCAGGTTATTACGCAGCAATCCGCGGTGCTCAACTTGGAGGAAAAATTGCCATTGTTGAGAAAACTGAATTTGGTGGTACGTGTTTGAATGTTGGTTGTATCCCTACAAAAACATATCTTAAAAATGCTGAAATCCTAGATGGTTTGAAAGTAGCAGCTGGACGTGGTATCAACCTTGCTTCAACTAACTATGCAATTGATATGGATAAGACTGTTGCCTTTAAAAATTCTGTAGTTAAGACACTGACTGGCGGTGTACGTGGTCTCTTGAAAGCGAACAAAGTTGAAATTTTCAATGGACTTGGACAAGTAAACCCTGATAAGTCTGTTGTTATTGGCGATAAAGTTATCAAAGGTCGTAACGTCGTTCTTGCGACTGGTTCTAAGGTATCTCGTATTAATATTCCAGGTATTGAATCACCATTAGTATTAACATCAGATGATATTCTTGATTTACGTGAAATTCCTAAGTCACTTGCTGTTATGGGTGGTGGTGTCGTAGGTATTGAGCTTGGTCTTGTATGGGCTTCATATGGTGTTGACGTAACTGTTATTGAAATGGCTGATCGCATCATTCCAGCAATGGATAAAGAAGTATCGCTAGAACTTCAAAAAATCCTTGCTAAGAAGGGAATGAAGATTAAAACATCAGTTGGTGTTTCTGAAATTGTTGAAGCCAATAATCAATTAACGCTTAAATTAAACAACGGCGAAGAAGTTGTTGCTGATAAAGCTCTTCTTTCAATTGGACGTGTTCCACAAATGAATGGTCTTGAAAATCTTGAGCCTGAACTTGAGATGGAACGTGGACGTATTAAAGTTAATGCTTATCAAGAAACTTCAATTCCAGGTATCTATGCACCAGGTGATGTTAATGGAACTCGTATGTTAGCTCATGCTGCATACCGTATGGGTGAAGTAGCTGCTGAAAACGCACTCGGCGGTAATAAGCGTAAAGCACATCTAGATTTCACTCCAGCAGCTGTTTATACTCATCCTGAAGTAGCAATGGTGGGGATGACAGAAGAGCAAGCACGTGAACAATATGGTGACATATTAGTTGGTAAAAATAGCTTTACAGGCAATGGTCGTGCTATCGCTTCAAACGAAGCACATGGTTTTGTAAAAGTAATTGCTGAACCTAAGTATAAAGAGATTCTTGGTGTTCACATTATTGGTCCAGCTGCAGCGGAATTGATTAATGAAGCTTCTACGATTATGGAAAATGAGTTGACTGTCTATGATGTAGCACAATCTATCCATGGTCACCCAACATTCTCTGAAGTTATGTACGAAGCTTTCTTAGATGTTCTCGGTGAAGCTATTCACAACCCTCCAAAACGCAAA

SEQ ID NO: 6146 - protein, 585 aa, Streptococcus agalactiae; identical to SEQ ID NO: 1698

SEQ ID NO: 6147 - protein, 987 aa, Streptococcus agalactiae
ATGAAATATATCGTTAACACGTCTAATGATCCGGCTTACAATGTTGCTTTAGAAGCTTACGCCTTTCAAAAGTTGACAGATATCGATGAAATTTTTATTCTTTGGATTAATGAACCGGCTATCATTATTGGACGCCATCAAAATACAATTCAAGAAATTAACAAAGAGTTCATTGATAAAAATGGCATCCATGTTGTCCGTCGTTTGTCAGGAGGCGGAGCAGTTTATCATGACTTGAATAATTTAAACTACACTATTATTTCTAATAATACACAAGAAGGTGCCTTTGATTTCCAAACTTTTTCAAAACCAGTTATTGATACTCTTGCTAAATTAGGTGTTAAAGCAGAATTTACTGGTCGTAATGATTTAGAAATCAATGGACAAAAATTTGCAGGAAATGCTCAAGCTTATTACAAAGGTCGTATGATGCATCATGGTTGTCTTTTATTTGATGTTGATATGTCAGTCTTAGGGCAAGCACTCAAAGTATCTAAAGACAAAATTGAATCTAAAGGGATAAAATCTGTACGCGCACGTGTTACAAATATTGTTGACCATCTTTCAGATAAAATTACAGTACAAGAATTTAGCGATGCCATTTTAGCTCAAATGAAGGAAGAATATCCAGAGATGGATGAATATGTTTTGAGTGATGCCGAGTTATCAGAAATCCAAGCTATGCGCGATAATCAATTTGCTACATGGGATTGGACGTATGGTAAAGCACCTGAATACACCATTGAACGTGGTGTCCGTTATCCAGCTGGAAAAATTACGACTTATGCTAATGTTGAAAATTCAACGATAAAATCTGTCAAAATCTTTGGTGACTTCTTTGGAGTGAAACCTGTAGATGATATTGAAAAAATGTTGGAGGGTGTCCGCTACGATTACAAAGATGTTTTAGCAGCGCTTAAAACAGTTGATACAAGTCAATACTTCTCACGTATGACACCCGAAGAGATTACAAAAGCTATTGTAGAC

SEQ ID NO: 6148 - protein, 329 aa, Streptococcus agalactiae; identical to SEQ ID NO: 1700

SEQ ID NO: 6149 - protein, 783 aa, Streptococcus agalactiae
ATGACTTATACCTCACTAAAATCTCCTACTACCAAAGATTATAAATACACTCTTAATGTAGCTCATCTTTATGGTAACCTATTAAATACTTATGGCGATAATGGGAATATCTTAATGATGAAATATGTGGGAGAAAAACTAGGATGTCAAATGACATTTGATATCGTTTCATTAGAAGATAGATTTGATCCCAACTATTATCAGATGGCATTTTTTGGTGGTGGACAAGACTACGAACAAGCCATTGTTGCACGCGATCTTCCCAGTAAGAAAGAAGACATTAACAAATTCATTCAAAATAATGGTGTAGTACTTGCTATTTGTGGAGGTTTCCAACTTTTAGGACAATACTATATTCAAGCTAATGGAGAACGAATAGAGGGCATTGGCGTTATGGGACACTATACGCTAAACCAAAATAATAATCGCTATATTGGTGATATCAAGATTCACAACGATGAATTCAATGAAACATATTATGGCTTTGAGAATCATCAAGGACGTACCTTTTTATCAGAAGATGAAAAACCTTTAGGAGCTGTCATTTATGGAAATGGGAATAACAAAGAAGATGATACTGAAGGGGTTCATTATAAGAATGTTTTTGGGTCATACTTTCACGGTCCAATCCTTTCTCGTAATGCTAATCTAGCTTACCGTCTTGTGGCAACTGCCCTCCGTAACAAATACGGTAAAGAGATTGTCCTCCCTAGTTATGAAGAAATTTTATCTTTAGAGATTCCTGAGGAATACGGCGACGTTAAATCAAAAGCAGATTTTGAA

SEQ ID NO: 6150 - protein, 261 aa, Streptococcus agalactiae
MTYTSLKSPTTKDYKYTLNVAHLYGNLLNTYGDNGNILMMKYVGEKLGCQMTFDIVSLEDRFDPNYYQMAFFGGGQDYEQAIVARDLPSKKEDINKFIQNNGVVLAICGGFQLLGQYYIQANGERIEGIGVMGHYTLNQNNNRYIGDIKIHNDEFNETYYGFENHQGRTFLSEDEKPLGAVIYGNGNNKEDDTEGVHYKNVFGSYFHGPILSRNANLAYRLVATALRNKYGKEIVLPSYEEILSLEIPEEYGDVKSKADFE

SEQ ID NO: 6151 - protein, 1278 aa, Streptococcus agalactiae
ATGGGACGTGGCTCTACTTATCCGGGTAGTTTAGCACTCAAATTCGATAAAGATATACTAGATACAATTGCCAAAGATTATGAAATTGTAGTTGTGACTGGTACTAACGGTAAAACCTTAACAACAGCTTTAACAGTTGGTATTTTAAAGGAAGCCTTCGGTCAGGTGGTAACCAACCCAAGTGGAGCAAATATGATTACAGGTATTGTTTCGACCTTCCTAACAGCTAAGAAAAGTAAATCTGGTAAAAAAATAGCTGTTCTTGAAATAGACGAAGCGAGTTTACCCCGTATTACACAGTATATAAAGCCTAGTTTGTTCGTCTTTACCAATATTTTCCGTGATCAAATGGACCGTTATGGCGAAATCTACACAACTTATCAAATGATTTTAGATGGAGCTGCTAACGCTCCGCAAGCTACTATCTTAGCTAACGGTGACAGTCCACTTTTTAATTCTAAAAGCGTGACTAACCCTGTGCAATTCTATGGATTTGATACCGACAAACATGAGCCACGATTAGCACACTATAATACTGAGGGTATTCTCTGTCCAAAGTGTCAAGCAATTTTAACTTATCGATTGAACACATATGCCAACCTTGGTGACTACACTTGTCCTAATTGTGATTTTGAACGTCCAAACCTTGATTATGCCTTAACAAGGCTAACACATCTGACAAATACTTCATCAGGTTTCGTTATTGATGGCCAACAATATAATATCAACGTGGGTGGCCTTTATAATATTTACAATGCTTTGGCGGCAGTATCTGTTGCTGAATATTTTGGTGTAGAACCAAGTCAAATTAAGGATGGATTTGATAAAAGCCGTGCCGTTTTTGGTCGTCAAGAAACCTTTACAATTGGAAATAAAAAATGTACTTTAGTTCTGATTAAAAATCCGGTAGGAGCTAGTCAAGCTCTTGATATGATTAAACTTGCTCCATACCCGTTCTCTCTCTCAGTACTACTGAATGCCAATTATGCTGACGGTATTGATACTTCTTGGATTTGGGACGCTAATTTTGAAACTATTCTCACGATGAATATCCCAGAAATATTTGCTGGTGGTGTTCGCCACTCTGAAATTGCTCGTCGCTTACGTGTAACTGGTTATGATGAGAAACGCATAAAACAAGCTGATAAACTGCAAGATATTATGGCAATGATTGAGCAGCAAGAGACTGAGCATGCTTATATTTTAGCAACATATACAGCTATGCTGGAGTTTCGTGAAATTCTTGCTAACCACAACGCTATCAGAAAGGAGATGAAT

SEQ ID NO: 6152 - protein, 426 aa, Streptococcus agalactiae
MGRGSTYPGSLALKFDKDILDTIAKDYEIVVVTGTNGKTLTTALTVGILKEAFGQVVTNPSGANMITGIVSTFLTAKKSKSGKKIAVLEIDEASLPRITQYIKPSLFVFTNIFRDQMDRYGEIYTTYQMILDGAANAPQATILANGDSPLFNSKSVTNPVQFYGFDTDKHEPRLAHYNTEGILCPKCQAILTYRLNTYANLGDYTCPNCDFERPNLDYALTRLTHLTNTSSGFVIDGQQYNINVGGLYNIYNALAAVSVAEYFGVEPSQIKDGFDKSRAVFGRQETFTIGNKKCTLVLIKNPVGASQALDMIKLAPYPFSLSVLLNANYADGIDTSWIWDANFETILTMNIPEIFAGGVRHSEIARRLRVTGYDEKRIKQADKLQDIMAMIEQQETEHAYILATYTAMLEFREILANHNAIRKEMN

SEQ ID NO: 6153 - protein, 849 aa, Streptococcus agalactiae
ATGGATATTTTTTCAGCTATTGATTCAAAGTTTTGGGCGAGCATTATGGAAAATCCATGGATGATCCTTATTCATCTCATGGATATTATCATAGTAGCTGTTCTGATTTATAAATTTATCAAAGCGCTAGCAGGCACAAAAATTATGTCCTTAATTCAGGGCGTTATTTTGTTTATCATCATTAGATTTGTGTCAGAATGGATAGGGCTAACAACGATTACATTTTTGATGAATCAGATTGTTACTTATGGTGTAATTGCAGGTGTTGTCATCTTTGCTCCAGAGATTAGAACAGGTCTCGAAAAATTTGGGCGAACACCACAACTATTTACGCAACGTTCTCAATTAAGCAGTGATGAAAAGCTAGTAGATGCCCTTGTTAAGGCAGTTGCTTATATGAGTCCGCGTAAAATAGGAGCCTTGATTTCAATTGAACGTACCCAAACTTTGCAAGAGTATATAGCTACAGGTATCCCATTAGATGCAGATATTTCCAGTGAATTGTTAATTAATATTTTCATTCCTAATACACCACTGCATGATGGTGCTGTTATTGTAAAAGATAAAAAAATTGCTACAGCATGTTCGTACTTACCTCTATCAGAATCATCTTCGATTTCAAAAGAATTTGGAACACGCCACAGAGCAGCGATTGGTCTATCAGAGAATTCAGATGCACTAACAGTTATTGTTTCTGAAGAGACTGGTGGTATTTCTGTCGCTTTGAAAGGTGAATTTTTACATGATCTTTCTAAAGATAGCTTTGAAGCAATTCTGAGAACTCAGTTGATTCAAAATCAAGAGGAAAACTCAAAATTAGCTTGGTATAATCAACTATTGAGGAGGAAG

SEQ ID NO: 6154 - protein, 283 aa, Streptococcus agalactiae
MDIFSAIDSKFWASIMENPWMILIHLMDIIIVAVLIYKFIKALAGTKIMSLIQGVILFIIIRFVSEWIGLTTITFLMNQIVTYGVIAGVVIFAPEIRTGLEKFGRTPQLFTQRSQLSSDEKLVDALVKAVAYMSPRKIGALISIERTQTLQEYIATGIPLDADISSELLINIFIPNTPLHDGAVIVKDKKIATACSYLPLSESSSISKEFGTRHRAAIGLSENSDALTVIVSEETGGISVALKGEFLHDLSKDSFEAILRTQLIQNQEENSKLAWYNQLLRRK

SEQ ID NO: 6155 - protein, 957 aa, Streptococcus agalactiae
ATGAAAAAATTTTTTACAAATAAATTTTGGTTAGGCGTTGTCTCACTCTTTCTGGCTATTTTATTATTTTTAACGGCAACTGCAACAAGTATGAACCATCAAGACAATAGTAAGATTGCAGGAGCGTCTGAGACATATACACATACCCTAACAGATGTGCCAATAGACATCAAATACGATAGTGATGATTACTTTATTAGTGGATATTCTTATGGGGCAGATGTCTATATGTCATCGGTTAATCGTGTTAAGTTAGATTCTGAAATAAATGAGGATACACGAAAATTTAAAGTAGTCGCTGATTTGACAAATATGAAACCAGGGACTCACAAAGTGCCACTAAAGGTAGTAAATTTGCCATCTGGTGTAAATGCTACGGTTTCTCCAACAACAATTACAGTAACTATGGGTAAAAAGAAAACAAAAGAGTTTCCGGTTTATGGACATGTTAATGATAAGCAAATTAAAGCTGGTTATGCAGTCGATAAGATGTCAGTTGATGTGTCAAAAGTTAAAGTTACTAGTGATGAATCTATTATAGATCGTATTGACCATGTCGCTGCCAATATCCCTGATGATAAAGTTCTTGATGATGATTTTAACAAGACAGTTACTTTACAAGCTGTAACAGCAGATGGTACAGTATTAGCAAGTATTATTCACCCTTCTAAAGCAACTTTATCTGTCAAAGTAAAAAAATTGACCAAGACAGTACCGATTAATTTGATACCAGTAGGACAATTCAGCGATAGTATTTCAAAAATTAACTACAAGTTGAGTCAAGAAAAAGCAGTAATTTCAGGAACAAAAGAGGCTTTAGAAGCTATTTCTGTTATTAATGCTGAGGTAGATATTTCAGACGTAACTAAAAATACAGAAAAGAAAATTAATCTTTCTGCAAACAATGTTTCAGTTGATCCTGCTCAAGTAACAGTTCAATTGACAACTACTAAAAAA

SEQ ID NO: 6156 - protein, 319 aa, Streptococcus agalactiae
MKKFFTNKFWLGVVSLFLAILLFLTATATSMNHQDNSKIAGASETYTHTLTDVPIDIKYDSDDYFISGYSYGADVYMSSVNRVKLDSEINEDTRKFKVVADLTNMKPGTHKVPLKVVNLPSGVNATVSPTTITVTMGKKKTKEFPVYGHVNDKQIKAGYAVDKMSVDVSKVKVTSDESIIDRIDHVAANIPDDKVLDDDFNKTVTLQAVTADGTVLASIIHPSKATLSVKVKKLTKTVPINLIPVGQFSDSISKINYKLSQEKAVISGTKEALEAISVINAEVDISDVTKNTEKKINLSANNVSVDPAQVTVQLTTTKK

SEQ ID NO: 6157 - protein, 1350 aa, Streptococcus agalactiae
ATGGGAAAATATTTTGGTACAGATGGTGTTCGCGGTGAAGCTAATGTTGAACTGACGCCAGAATTGGCTTTTAAATTAGGACGTTTTGGAGGATATGTTCTAAGTCAACACGAAACTGATCGTCCGAGAGTTTTTGTAGCTCGTGATACTCGTATTTCTGGTGAAATGCTGGAATCTGCTTTGATTGCTGGTCTACTTTCAGTAGGTATTGAGGTTTATAAACTTGGTGTTTTAGCCACTCCTGGAGTGTCTTACCTTGTCCGTACAGAAAAAGCTAGTGCAGGGGTTATGATTTCAGCAAGCCACAATCCAGCACTTGATAATGGTATTAAGTTCTTTGGTAGTGATGGTTTTAAACTTGATGATGATCGTGAATTAGAAATTGAAGCTTTACTTGATGCGAAGGAAGACACTTTACCACGTCCATCAGCACAAGGTTTAGGTACTTTAGTAGATTATCCTGAAGGACTTCGGAAATATGAGAAGTTTATGGAATCAACTGGTATTGATTTAGAAGGTATGAAGGTTGCGTTGGATACAGCAAATGGAGCAGCAACAGCCTCAGCTCGGAATATCTTTTTAGACTTGAATGCTGATATAAGTGTTATTGGTGATCAACCAGATGGTTTGAATATCAATGATGGTGTTGGTTCGACACATCCTGAGCAATTACAAAGTTTAGTTAGAGAAAATGGTTCCGATATCGGTCTAGCTTTTGATGGTGATAGTGATCGTTTGATCGCTGTTGATGAAAATGGAGAGATTGTAGATGGTGATAAAATTATGTTTATCATTGGGAAATATCTTTCTGATAAAGGGCAGCTTGCTCAGAATACAATCGTAACAACGGTTATGTCAAATCTCGGCTTTCATAAAGCGCTCGACCGTGAAGGTATTCATAAAGCGATTACCGCTGTAGGAGACCGCTACGTGGTTGAAGAAATGCGTAAATCAGGATATAATCTTGGCGGGGAGCAATCAGGCCACGTTATTATCATGGATTACAATACTACAGGGGATGGACAATTAACAGCCATCCAATTGACTAAGGTCATGAAAGAAACTGGTAAGAAATTATCAGAGTTAGCTAGTGAAGTGACGATTTATCCTCAAAAATTAGTAAATATTCGTGTTGAAAATAACATGAAAGATAAAGCGATGGAAGTTCCTGCAATTGCGGAAATTATTGCTAAAATGGAAGAAGAGATGGATGGCAATGGTCGTATTCTAGTACGTCCTAGTGGTACTGAGCCTCTTCTTAGAGTTATGGCAGAAGCGCCAACAAATGAAGCAGTTGATTATTATGTTGATACTATCGCAGATGTCGTTCGTACAGAAATTGGTTTAGAT

SEQ ID NO: 6158 - protein, 450 aa, Streptococcus agalactiae
MGKYFGTDGVRGEANVELTPELAFKLGRFGGYVLSQHETDRPRVFVARDTRISGEMLESALIAGLLSVGIEVYKLGVLATPGVSYLVRTEKASAGVMISASHNPALDNGIKFFGSDGFKLDDDRELEIEALLDAKEDTLPRPSAQGLGTLVDYPEGLRKYEKFMESTGIDLEGMKVALDTANGAATASARNIFLDLNADISVIGDQPDGLNINDGVGSTHPEQLQSLVRENGSDIGLAFDGDSDRLIAVDENGEIVDGDKIMFIIGKYLSDKGQLAQNTIVTTVMSNLGFHKALDREGIHKAITAVGDRYVVEEMRKSGYNLGGEQSGHVIIMDYNTTGDGQLTAIQLTKVMKETGKKLSELASEVTIYPQKLVNIRVENNMKDKAMEVPAIAEIIAKMEEEMDGNGRILVRPSGTEPLLRVMAEAPTNEAVDYYVDTIADVVRTEIGLD

SEQ ID NO: 6159 - protein, 369 aa, Streptococcus agalactiae
ATGACTAAAGAAGCAAAATTATTATGGGCTAAACACAAGTATTTAGTCTTAAGTAAATCTCAGAAAATTTATTTGGATATTAGACAAACTTTGAAATCACCAAATTGTACCGTTTTAGACGTTCAGTCACTCATTGACCAAGCAGTGCTTTTAGAAGAATCACCATCACAAGTGACTAATGCTTATATGCATATATGGGGCTATTTTAAAAATAAGGCAGAGCGTCAAGAAAAAGAAGAATTTTTAACCTTGCTGGAAAAATACAGGAAAACAGGTTATCAACGAAGAAAACTGTTAGCTTTTCTAAAACAGCTATTAGCTAAATACCCAAATTCTTATTTACAAAACTCTTCTATTTTCGAAGAAGAG

SEQ ID NO: 6160 - protein, 123 aa, Streptococcus agalactiae
MTKEAKLLWAKHKYLVLSKSQKIYLDIRQTLKSPNCTVLDVQSLIDQAVLLEESPSQVTNAYMHIWGYFKNKAERQEKEEFLTLLEKYRKTGYQRRKLLAFLKQLLAKYPNSYLQNSSIFEEE

SEQ ID NO: 6161 - protein, 378 aa, Streptococcus agalactiae
ATGAGATTATGGCATCAAGATATTATTGAGTTATTGCCTAGGCAGCAACTTTTAGGACAGCATAGAGAGTGTTGTGCATTGAGAGGGAATGGGTGGGGGAGAAAACATGAGACTGTTGATTATGTTTTTCGATATTCACCTTATAGGTTATTTGCATATCATCAATTAGTTATGGAAGAAATGATGGAGCGTGGGTATCGTGTATCTAAAGAATGGCTAATTGCAGAATATAGGGGAATGAAGTGCCCAAGATATGATACACTTAATCCTGTTGACTTGGAGACACCTATCTATCCTGAGCACAATCAAGACTATCTACAAGAATGTCTATGGAATTTAAAAGCAAAAGGAATTGACCTTCCTATAAATAAGATAAAA

SEQ ID NO: 6162 - protein, 126 aa, Streptococcus agalactiae
MRLWHQDIIELLPRQQLLGQHRECCALRGNGWGRKHETVDYVFRYSPYRLFAYHQLVMEEMMERGYRVSKEWLIAEYRGMKCPRYDTLNPVDLETPIYPEHNQDYLQECLWNLKAKGIDLPINKIK

SEQ ID NO: 6163 - protein, 1128 aa, Streptococcus agalactiae
ATGTTAAAGAAACCAACCTCAGCATATGTACACATTCCATTTTGTACCCAAATATGTTATTATTGTGATTTTTCAAAAGTTTTTATTAAAAATCAGCCTGTAGACGCTTATCTTCAGGCTCTTATCCGTGAATTTCGGTCTTATGATATTACAGAATTGCGCACCTTATATATTGGAGGAGGGACACCTACATCTATAAGCGCTGTGCAACTGGACTATTTATTGACGGAGTTAATTAGAGATTTAAACCTAAATACTTTAGAGGAGTTCACTATCGAAGCTAATCCAGGAGATTTAACCGTTGATAAAATAGAGGTGCTTCAAAAGTCAGCTGTCAATAGAGTTTCTCTAGGAGTTCAGACCTTTAATGATAAACATTTAAAGCGTATTGGACGCAGTCACAATGAGGCACAAATTTATTCTACAATTGATGCTCTTAAAACAGCCGGTTTTCAAAATATCTCTATTGACCTAATTTATGCCTTACCTGGACAAACGATGGATGATGTTAGAAGTAATGTAGCCAAAGCTCTCTCTCTAAATATTCCTCATTTGAGTTTATATAGTTTAATTTTAGAACACCATACTGTATTTATGAATAAAATGCGTCGTGGGAAATTACATTTGCCAACAGAAGATTTAGAAGCCGAGATGTTTGAATATATCATTTCTGAAATGGAAAGAAATGGTTTTGAGCATTATGAAATTTCTAATTTTACAAAGCCGGGTTTTGAAAGTCGTCATAATTTGATGTACTGGGATAATGTAGAATATTATGGTGTTGGTGCAGGTGCTTCTGGTTATCTTGATGGTATTCGTTATCGTAATAGAGGGCCAATACAACATTATCTAAAGGGTGTTTCAGAAGGTAATGCAAGGTTATCTGAAGAAGTATTATCAAAAAATGAAATGATGGAAGAGGAGCTTTTCCTCGGTCTTCGTAAAAAAGAGGGTGTTTCCATCGGAAAATTTGAACAAAAATTTGGAACGTCCTTTGAGAAACGTTACGGTCAGATTGTTCAAGAACTCCAAAGTGATGGGCTTTTGAAAGAAAATAATGGTTTTATCCAGATGACTAAAAAAGGTCTCTTCTTAGGAGATACGGTTGCCGAGAAATTTATTGTGGAG

SEQ ID NO: 6164 - protein, 376 aa, Streptococcus agalactiae
MLKKPTSAYVHIPFCTQICYYCDFSKVFIKNQPVDAYLQALIREFRSYDITELRTLYIGGGTPTSISAVQLDYLLTELIRDLNLNTLEEFTIEANPGDLTVDKIEVLQKSAVNRVSLGVQTFNDKHLKRIGRSHNEAQIYSTIDALKTAGFQNISIDLIYALPGQTMDDVRSNVAKALSLNIPHLSLYSLILEHHTVFMNKMRRGKLHLPTEDLEAEMFEYIISEMERNGFEHYEISNFTKPGFESRHNLMYWDNVEYYGVGAGASGYLDGIRYRNRGPIQHYLKGVSEGNARLSEEVLSKNEMMEEELFLGLRKKEGVSIGKFEQKFGTSFEKRYGQIVQELQSDGLLKENNGFIQMTKKGLFLGDTVAEKFIVE

SEQ ID NO: 6165 - protein, 735 aa, Streptococcus agalactiae
ATGGGTTTATTATATCGAGAAACTTACGAAGTGCCTTTTTATGAATCAGACACTAATCATTATATGAAATTACCGCAGTTGTTGGCTTTAGCGTTACAAATTTCAGCCAAACAATCTTTAAAATTAGGAATAGGCGATGACATCGTTTTTAAAAGATACGGATTGGTTTGGGTCGTTACAGATTATATTATTGATATTGAGCGTTTACCCAAGCATGCTGAAAAGATAGTCATTGAGACTGAAGCCAAAGCTCATAATAAATTATTGTGTTACCGCTATTTTTATATTTATGGTGAAGACGGGCAAAAAATAATAACGATTTCATCTGCTTTTGTCTTAATGGATTTTAAAACACGGAAGATTCATCCTGTTCTTGATGATATTACTTCAATTTACCAATCCCAAAGAATCAAAAAAGTTATTCGAGGGCCGAAATATCATCCCATTGGAGATAGTAAGGTTAAACAATACCATGTTCGTTATTTTGATTTAGATATGAATGGACATGTTAATAATAGTAAGTACCTAGAATGGATGTATGATGTGTTGGACTTAGATTTTCTAAGTAGCCACATTCCTAAAAAAATTGATTTAAAATATATTAAGGAAATCCAATATGGTACGGATATTAAGTCTCATTGGTATCAAGATGGTCTTGTGACACGTCATGATATTATTGGTGGCGATGCTATTCATGCTCAAGCTAGGATTGAATGGCAGGAAAAAAAGGAGGAT

SEQ ID NO: 6166 - protein, 245 aa, Streptococcus agalactiae; identical to SEQ ID NO: 1716

SEQ ID NO: 6167 - protein, 768 aa, Streptococcus agalactiae
ATGGCTTATAAAGGATATCTTATTGATTTAGATGGTACTATTTACAAAGGGAAAAGTCGTATCCCAGCAGGAGAGCGTTTTATCGAACGCTTGCAAGAAAAAGGCATTCCTTATATGTTAGTAACTAATAACACGACTCGCACACCAGAAAGCGTTCAGGAAATGCTTCGAGGTTTCAATGTTGAAACACCACTTGAAACAATCTATACCGCAACTATGGCTACGGTTGACTATATGAATGATATGAACCGTGGAAAAACAGCTTACGTTATTGGTGAAGAAGGGCTTAAAAAAGCTATTGCAGATGCAGGTTATGTGGAGGATACAAAAAATCCAGCCTATGTGGTTGTTGGTTTAGATTGGAATGTTACTTATGATAAATTGGCAACTGCTACGTTAGCAATTCAAAATGGTGCTTTATTTATTGGAACCAATCCAGATCTGAATATTCCTACTGAACGTGGTTTGTTACCCGGTGCTGGCTCCTTAAATGCTTTATTAGAAGCCGCAACGCGTATAAAACCAGTCTTTATTGGAAAGCCAAATGCCATCATTATGAATAAGGCACTTGAAATTTTAAATATCCCTAGGAATCAAGCAGTCATGGTCGGTGATAATTATTTGACAGATATCATGGCTGGTATTAATAATGATATTGATACTTTGTTAGTAACAACGGGTTTTACAACAGTTGAAGAAGTACCAGATTTACCAATTCAACCAAGTTATGTTTTAGCAAGTTTAGATGAATGGACATTTAATGAAGGA

SEQ ID NO: 6168 - protein, 256 aa, Streptococcus agalactiae; identical to SEQ ID NO: 1718

SEQ ID NO: 6169 - protein, 669 aa, Streptococcus agalactiae
ATGAATGGACATTTAATGAAGGATAAGTTATTAATAGTTTTAACTTGGATTTGGATTATATCGTTAGCAACTCTAGCTACAATTTATATTGCTTGGTTGATCTATCCTATAGAAATTCAGTTTTTAAAATTAGAAAAGGTTGTGTATTTAAAGGCTGAAACAATTTATTATAATTTTAATAAGTTGATGATATATCTGACTCATCCTTTTATCTCTGATTTAAATATGCCTAGCTTTCCTTCTTCAGAGGATGGTTTAAAGCATTTTGCGGATGTAAAATATCTTTTTACTCTAGCGCATGGGCTTTTTGTTATACTAACTTTTCCAGTTATTTATTTTTTAAGACGTGGATGGAAGCAAAAAAGTATCTTTCTATATGAAGGCTTCTTCAAGATAGCTATTATGTTGCCTATTTTTATTGTAGTATGTGCTTTTCTGTTGGGTTTTGATCAGTTTTTCACTCTATTTCATGAGGTGCTTTTTCCAGGAGATTCTACTTGGCAATTTAATCCTCTAACGGATCCAGTAATTTGGATACTTCCTGAAACTTTTTTCCTCCATTGTTTCATCATTTTTTTGTTAATCTATGAAACAATAACTATAATTCTTTTGATAATAGGTAGAAAACATTTAAAATTAAGAAAATATAAAAACAAAATGCAAGCCTTA

SEQ ID NO: 6170 - protein, 223 aa, Streptococcus agalactiae
MNGHLMKDKLLIVLTWIWIISLATLATIYIAWLIYPIEIQFLKLEKVVYLKAETIYYNFNKLMIYLTHPFISDLNMPSFPSSEDGLKHFADVKYLFTLAHGLFVILTFPVIYFLRRGWKQKSIFLYEGFFKIAIMLPIFIVVCAFLLGFDQFFTLFHEVLFPGDSTWQFNPLTDPVIWILPETFFLHCFIIFLLIYETITIILLIIGRKHLKLRKYKNKMQAL

SEQ ID NO: 6171 - protein, 4131 aa, Streptococcus agalactiae
ATGAATAAGCCATATTCAATAGGCCTTGACATCGGTACTAATTCCGTCGGATGGAGCATTATTACAGATGATTATAAAGTACCTGCTAAGAAGATGAGAGTTTTAGGGAACACTGATAAAGAATATATTAAGAAGAATCTCATAGGTGCTCTGCTTTTTGATGGCGGGAATACTGCTGCAGATAGACGCTTGAAGCGAACTGCTCGTCGTCGTTATACACGTCGTAGAAATCGTATTCTATATTTACAAGAAATTTTTGCAGAGGAAATGAGTAAAGTTGATGATAGTTTCTTTCATCGATTAGAGGATTCTTTTCTAGTTGAGGAAGATAAGAGAGGTAGCAAGTATCCTATCTTTGCAACAATGCAGGAGGAGAAATATTATCATGAAAAATTTCCGACAATCTATCATTTGAGAAAAGAATTGGCTGACAAGAAAGAAAAAGCAGACCTTCGTCTTGTTTATCTGGCTCTAGCTCATATCATTAAATTCAGAGGGCATTTCCTAATTGAGGATGATAGATTTGATGTGAGGAATACCGATATTCAAAAACAATATCAAGCCTTTTTAGAAATTTTTGATACTACCTTTGAAAATAATCATTTGTTATCTCAAAATGTAGATGTAGAAGCAATTCTAACAGATAAGATTAGCAAGTCTGCGAAGAAGGATCGCATCTTAGCGCAGTATCCTAACCAAAAATCTACTGGTATTTTTGCAGAATTTTTGAAATTGATTGTCGGAAATCAAGCTGACTTCAAGAAACATTTCAATTTGGAGGATAAAACACCGCTTCAATTCGCTAAGGATAGCTACGATGAAGATTTAGAAAATCTTCTTGGACAGATTGGTGATGAATTTGCAGACTTATTCTCAGTAGCGAAAAAGCTATATGATAGTGTTCTTTTATCTGGCATTCTTACAGTAACTGATCTCAGTACCAAGGCGCCACTTTCTGCCTCTATGATTCAGCGTTATGATGAACATCATGAGGACTTAAAGCATCTAAAACAATTCGTAAAAGCTTCATTACCTGAAAATTATCGGGAAGTATTTGCTGATTCATCAAAAGATGGCTACGCTGGCTATATTGAAGGCAAAACTAATCAAGAAGCTTTTTATAAATATCTGTTAAAATTGTTGACCAAACAAGAAGGTAGCGAGTATTTTCTTGAGAAAATTAAGAATGAAGATTTTTTGAGAAAACAGAGAACCTTTGATAATGGCTCAATCCCGCATCAAGTCCATTTGACAGAATTGAGGGCTATTATTCGACGTCAATCAGAATACTATCCATTCTTGAAAGAGAATCAAGATAGGATTGAAAAAATCCTTACCTTTAGAATTCCTTATTATGTCGGGCCACTAGCACGTGAGAAGAGTGATTTTGCATGGATGACTCGCAAAACAGATGACAGTATTCGACCTTGGAATTTTGAAGACTTGGTTGATAAAGAAAAATCTGCGGAAGCTTTTATCCATCGCATGACCAACAATGACCTCTATCTTCCAGAAGAAAAAGTTTTACCAAAGCATAGTCTTATTTATGAAAAATTTACTGTTTACAATGAATTAACGAAGGTTAGATTTTTGGCAGAAGGCTTTAAAGATTTTCAATTTTTAAATAGGAAGCAAAAAGAAACTATCTTTAACAGCTTGTTTAAGGAAAAACGTAAAGTAACTGAAAAGGATATTATTAGTTTTTTGAATAAAGTTGATGGATATGAAGGAATTGCAATCAAAGGAATTGAGAAACAGTTTAACGCTAGCCTTTCAACCTATCATGATCTTAAAAAAATACTTGGCAAGGATTTCCTTGATAATACAGATAACGAGCTTATTTTGGAAGATATCGTCCAAACTCTAACCTTATTTGAAGATAGAGAAATGATTAAGAAGTGTCTTGACATCTATAAAGATTTTTTTACAGAGTCACAGCTTAAAAAGCTCTATCGCCGTCACTATACTGGCTGGGGACGATTGTCTGCTAAGCTAATAAATGGCATCCGAAATAAAGAGAATCAAAAAACAATCTTGGACTATCTTATTGATGATGGAAGTGCAAACCGAAACTTCATGCAGTTGATAAATGATGATGATCTATCATTTAAACCAATTATTGACAAGGCACGAACTGGTAGTCATTCGGATAATCTGAAAGAAGTTGTAGGTGAACTTGCTGGTAGCCCTGCTATTAAAAAAGGGATTCTACAAAGTTTGAAAATAGTTGATGAGCTGGTTAAAGTCATGGGCTATGAACCTGAACAAATCGTGGTTGAAATGGCACGTGAGAACCAAACGACAGCAAAAGGATTAAGTCGTTCACGACAACGCTTGACAACCTTGAGAGAATCTCTTGCTAATTTGAAGAGTAATATTTTGGAAGAGAAAAAGCCTAAGTATGTGAAAGATCAAGTTGAAAATCATCATTTATCTGATGACCGTCTTTTCCTTTACTACTTACAAAACGGAAGAGATATGTATACAAAAAAGGCTCTGGATATTGATAATTTAAGTCAATATGATATTGACCACATTATTCCTCAAGCTTTCATAAAAGATGATTCTATTGATAATCGTGTTTTGGTATCATCTGCTAAAAATCGTGGAAAATCAGATGATGTTCCTAGCATTGAAATTGTAAAAGCTCGCAAAATGTTCTGGAAAAATTTACTGGATGCTAAGTTAATGAGTCAGCGTAAGTATGATAATTTGACTAAGGCAGAGCGCGGAGGCCTAACTTCCGATGATAAGGCAAGATTTATCCAACGTCAGTTGGTTGAGACTCGACAAATTACCAAGCATGTAGCTCGTATCTTGGATGAACGCTTCAATAATGAAGTTGATAATGGTAAAAAGATTTGCAAGGTTAAAATTGTAACCTTGAAGTCAAATTTGGTTTCAAATTTCCGAAAAGAATTTGGATTCTATAAAATTCGTGAAGTTAATGATTATCACCATGCACACGATGCTTATCTTAATGCAGTAGTTGCCAAAGCTATTCTAACCAAATATCCACAGTTAGAGCCAGAGTTTGTCTACGGAATGTATAGACAGAAAAAACTTTCGAAAATCGTTCATGAGGATAAGGAAGAAAAATATAGTGAAGCAACCAGGAAAATGTTTTTCTACTCCAACTTGATGAATATGTTCAAAAGAGTTGTGAGGTTAGCAGATGGTTCTATTGTTGTAAGACCAGTAATAGAAACTGGTAGATATATGGGAAAAACTGCATGGGATAAAAAGAAACACTTTGCGACAGTTAGAAAAGTCTTGTCATACCCTCAGAACAATATCGTGAAGAAGACAGAGATTCAGACAGGTGGTTTCTCTAAGGAATCAATCTTGGCGCATGGTAACTCAGATAAGTTGATTCCAAGAAAAACGAAGGATATTTATTTAGATCCTAAGAAATATGGAGGTTTTGATAGTCCGATAGTAGCTTACTCTGTTTTAGTTGTAGCTGATATCAAAAAAGGTAAAGCACAAAAACTAAAAACAGTTACGGAACTTTTAGGAATTACCATCATGGAGAGGTCCAGATTTGAGAAAAATCCATCAGCTTTCCTTGAATCAAAAGGTTATTTAAATATTAGGGACGATAAATTAATGATTTTACCGAAGTATAGTCTGTTCGAATTAGAAAATGGGCGTCGTCGATTACTTGCTAGTGCTGGTGAATTACAAAAAGGTAACGAGCTAGCCTTACCAACACAATTTATGAAGTTCTTATACCTTGCAAGTCGTTATAATGAGTCAAAAGGTAAACCAGAGGAGATTGAGAAGAAACAAGAATTTGTAAATCAACATGTCTCTTATTTTGATGACATCCTTCAATTAATTAATGATTTTTCAAAACGAGTTATTCTAGCAGATGCTAATTTAGAGAAAATCAATAAGCTTTACCAGGATAATAAGGAAAATATACCAGTAGATGAACTTGCTAATAATATTATCAATCTATTTACTTTTACCAGTCTAGGAGCTCCAGCAGCTTTTAAATTTTTTGATAAAATAGTTGATAGAAAACGCTATACATCAACTAAAGAAGTACTTAATTCTACTCTAATCCATCAATCTATTACTGGACTTTATGAAACACGTATTGATTTGGGTAAATTAGGAGAAGAT

SEQ ID NO: 6172 - protein, 1377 aa, Streptococcus agalactiae
MNKPYSIGLDIGTNSVGWSIITDDYKVPAKKMRVLGNTDKEYIKKNLIGALLFDGGNTAADRRLKRTARRRYTRRRNRILYLQEIFAEEMSKVDDSFFHRLEDSFLVEEDKRGSKYPIFATMQEEKYYHEKFPTIYHLRKELADKKEKADLRLVYLALAHIIKFRGHFLIEDDRFDVRNTDIQKQYQAFLEIFDTTFENNHLLSQNVDVEAILTDKISKSAKKDRILAQYPNQKSTGIFAEFLKLIVGNQADFKKHFNLEDKTPLQFAKDSYDEDLENLLGQIGDEFADLFSVAKKLYDSVLLSGILTVTDLSTKAPLSASMIQRYDEHHEDLKHLKQFVKASLPENYREVFADSSKDGYAGYIEGKTNQEAFYKYLLKLLTKQEGSEYFLEKIKNEDFLRKQRTFDNGSIPHQVHLTELRAIIRRQSEYYPFLKENQDRIEKILTFRIPYYVGPLAREKSDFAWMTRKTDDSIRPWNFEDLVDKEKSAEAFIHRMTNNDLYLPEEKVLPKHSLIYEKFTVYNELTKVRFLAEGFKDFQFLNRKQKETIFNSLFKEKRKVTEKDIISFLNKVDGYEGIAIKGIEKQFNASLSTYHDLKKILGKDFLDNTDNELILEDIVQTLTLFEDREMIKKCLDIYKDFFTESQLKKLYRRHYTGWGRLSAKLINGIRNKENQKTILDYLIDDGSANRNFMQLINDDDLSFKPIIDKARTGSHSDNLKEVVGELAGSPAIKKGILQSLKIVDELVKVMGYEPEQIVVEMARENQTTAKGLSRSRQRLTTLRESLANLKSNILEEKKPKYVKDQVENHHLSDDRLFLYYLQNGRDMYTKKALDIDNLSQYDIDHIIPQAFIKDDSIDNRVLVSSAKNRGKSDDVPSIEIVKARKMFWKNLLDAKLMSQRKYDNLTKAERGGLTSDDKARFIQRQLVETRQITKHVARILDERFNNEVDNGKKICKVKIVTLKSNLVSNFRKEFGFYKIREVNDYHHAHDAYLNAVVAKAILTKYPQLEPEFVYGMYRQKKLSKIVHEDKEEKYSEATRKMFFYSNLMNMFKRVVRLADGSIVVRPVIETGRYMGKTAWDKKKHFATVRKVLSYPQNNIVKKTEIQTGGFSKESILAHGNSDKLIPRKTKDIYLDPKKYGGFDSPIVAYSVLVVADIKKGKAQKLKTVTELLGITIMERSRFEKNPSAFLESKGYLNIRDDKLMILPKYSLFELENGRRRLLASAGELQKGNELALPTQFMKFLYLASRYNESKGKPEEIEKKQEFVNQHVSYFDDILQLINDFSKRVILADANLEKINKLYQDNKENIPVDELANNIINLFTFTSLGAPAAFKFFDKIVDRKRYTSTKEVLNSTLIHQSITGLYETRIDLGKLGED

SEQ ID NO: 6173 - protein, 866 aa, Streptococcus agalactiae
ATGGCAGGTTGGCGAACTGTTGTTGTAAATACACATTCTAAGCTCTCTTATAAAAATAATCATCTGATTTTTAAAGATTCTTATCAGACGGAAATGATTCATCTTTCAGAGATTGATATTCTAATCATGGAAACGACAGATATTGTTTTGTCGACTATGCTGATTAAACGTTTGGTTGATGAAAATATTTTAGTCATATTTTGTGATGATAAACGCTTGCCAACAGCTATGTTAATGCCGTACTATGCTAGACATGATTCGAGTTTACAATTATCTAGGCAGATGTCATGGATTGAGGATGTCAAAGCGGATGTTTGGACATCAATTATTGCACAAAAAATTTTGAATCAGTCCTTTTATCTCGGTGAGTGTTCTTTCTTTGAAAAATCCCAGTCTATTATGAATCTCTATCATGATTTAGAATCTTTTGACCCTTCCAATCGTGAAGGTCATGCAGCTAGGCTTTATTTCAATACACTTTTTGGAAATGATTTTCAAGAGAGCAGGATAATCCAATAAATGCTGGTTTAGACTATGGATATTCTCTGATTTTGAGTATGTTTGCGCGTGAAGTTGTTAAGTGTGGTTGCATGACACAATTTGGCTTAAAGCATGCTAATCAATTTAATCAGTTCAACCTAGCAAGCGATATTATGGAACCATTTCGCCCAATCGTTGATAGGATTATTTATGAAAATAGGCAGAGTGATTTTGTCAAAATGAAAAGAGAACTCTTTTCTATGTTTTCAGAGACATACAGCTACAACGGTAAAGAAATGTATCTTTCAAATATTGTCAGCGATTACACCAAAAAAGTTATTAAGTCGCTAAATAGTGATGGGAATGGAATTCCGGAGTTTAGGATA

SEQ ID NO: 6174 - protein, 289 aa, Streptococcus agalactiae
MAGWRTVVVNTHSKLSYKNNHLIFKDSYQTEMIHLSEIDILIMETTDIVLSTMLIKRLVDENILVIFCDDKRLPTAMLMPYYARHDSSLQLSRQMSWIEDVKADVWTSIIAQKILNQSFYLGECSFFEKSQSIMNLYHDLESFDPSNREGHAARLYFNTLFGNDFSREQDNPINAGLDYGYSLILSMFAREVVKCGCMTQFGLKHANQFNQFNLASDIMEPFRPIVDRIIYENRQSDFVKMKRELFSMFSETYSYNGKEMYLSNIVSDYTKKVIKSLNSDGNGIPEFRI

SEQ ID NO: 6175 - protein, 324 aa, Streptococcus agalactiae
ATGAGAATGATTTTAATGTTTGATATGCCTACTGAAACAGTAGAAGAACGTAAGGCGTATCGTAAGTTTAGAAAGTTTCTGTTGAGCGAAGGTTTTATTATGCATCAGTTCTCTGTTTATAGTAAATTATTGCTCAATAATACAGCTAATAATGCCATGATAGGTCGGCTTAAAGTGAATAATCCTAAGAAAGGGAGTATAACTCTTTTGACAGTTACCGAGAAGCAGTTTGCAAGGATGGTTTATCTACATGGTGAACATAATATGAGTGTTGCCAACTCTGATAGTCGCTTGGTTTTCCTAGGAGATTCTTATGATCAAGAT

SEQ ID NO: 6176 - protein, 108 aa, Streptococcus agalactiae
MRMILMFDMPTETVEERKAYRKFRKFLLSEGFIMHQFSVYSKLLLNNTANNAMIGRLKVNNPKKGSITLLTVTEKQFARMVYLHGEHNMSVANSDSRLVFLGDSYDQD

SEQ ID NO: 6177 - protein, 663 aa, Streptococcus agalactiae
ATGATCAAGATTAATTTTCCAATTTTAGATGAACCATTAGTGTTAAGTAATGCTACGATTTTAACGATAGAAGATGTTTCAGTTTATTCTTCATTGGTGAAACATTTTTATCAATATGACGTAGATGAACATTTGAAATTATTTGATGATAAGCAGAAAAGTCTGAAGGCAACGGAGTTAATGTTAGTTACAGATATCTTAGGATACGATGTCAACTCAGCACCTATTCTAAAGTTGATACATGGTGACTTAGAAAATCAATTCAACGAAAAGCCAGAAGTGAAATCAATGGTAGAAAAATTAGCAGCTACTATTACAGAACTTATCGCATTTGAGTGTCTAGAGAATGAGCTTGATTTAGAATACGATGAAATTACGATTTTAGAACTCATTAAGGCACTGGGAGTCAAAATTGAGACACAGAGCGACACTATCTTTGAAAAATGTTTTGAAATTATACAAGTTTACCATTATTTAACGAAAAAGAATCTCTTAGTTTTTGTTAATAGCGGAGCTTATCTTACCAAAGATGAAGTTATAAAATTATGTGAATACATCAATTTAATGCAAAAGTCAGTACTCTTTCTAGAACCTAGAAGACTCTATGATTTACCGCAATATGTTATTGATAAGGATTATTTCTTGATAGGCGAAAATATGGTA

SEQ ID NO: 6178 - protein, 221 aa, Streptococcus agalactiae; identical to SEQ ID NO: 1730

SEQ ID NO: 6179 - protein, 270 aa, Streptococcus agalactiae
GTGAGTACACACAATCTCCTGAGTTTTGGAACCATTCGAAACAGCACAGCTCTAAAACAGAAGAAAAGATTACTTCCTCAGCTGAAAAGTTTTGGAACCATTCGAAACAGCACAGCTCTAAAACAAATAAGCACTTCTTTATGTTTAATTGTGTGTTTTGGAACCATTCGAAACAGCACAGCTCTAAAACTTTGTTCTATATTATCCATTAGAGGTTTGTGTTTTGGAACCATTCGAAACAGCACAGCTCTAAAACATAATCATCCATCA

SEQ ID NO: 6180 - protein, 90 aa, Streptococcus agalactiae
MSTHNLLSFGTIRNSTALKQKKRLLPQLKSFGTIRNSTALKQISTSLCLIVCFGTIRNSTALKLCSILSIRGLCFGTIRNSTALKHNHPS

SEQ ID NO: 6181 - protein, 468 aa, Streptococcus agalactiae
TTGATATTTTCCCCTCTGTTTTGGAACCATTCGAAACAGCACAGCTCTAAAACGCAAGAAATGGCAAAACGGACAGTTATTAAGTTTTGGAACCATTCGAAACAGCACAGCTCTAAAACGTCGACTTTATATTACAACAAAAACAATTTGTTTTGGAACCATTCGAAACAGCACAGCTCTAAAACTGATTGCAGCATCAGTTGCATTTCCCGAGAGTTTTGGAACCATTCGAAACAGCACAGCTCTAAAACAAAAATTCGTGAGTACACACAATCTCCTGAGTTTTGGAACCATTCGAAACAGCACAGCTCTAAAACAGAAGAAAAGATTACTTCCTCAGCTGAAAAGTTTTGGAACCATTCGAAACAGCACAGCTCTAAAACAAATAAGCACTTCTTTATGTTTAATTGTGTGTTTTGGAACCATTCGAAACAGCACAGCTCTAAAACTTTGTTCTATATTATCCAT

SEQ ID NO: 6182 - protein, 156 aa, Streptococcus agalactiae
MIFSPLFWNHSKQHSSKTQEMAKRTVIKFWNHSKQHSSKTSTLYYNKNNLFWNHSKQHSSKTDCSISCISREFWNHSKQHSSKTKIREYTQSPEFWNHSKQHSSKTEEKITSSAEKFWNHSKQHSSKTNKHFFMFNCVFWNHSKQHSSKTLFYIIH

SEQ ID NO: 6183 - protein, 141 aa, Streptococcus agalactiae
ATGAAAGGCTATAATTCCAACCTTATGGTTAAAGGGCAAGATTGTTCTACGCTTTACTTAATTATTAGTTTGACAGCGTTGGTTCTTTTAGTGATTGCTGGTGTTTCTTTGTCACTAATACTTGCAAGCTTACAAGGAAAG

SEQ ID NO: 6184 - protein, 47 aa, Streptococcus agalactiae
MKGYNSNLMVKGQDCSTLYLIISLTALVLLVIAGVSLSLILASLQGK

SEQ ID NO: 6185 - protein, 414 aa, Streptococcus agalactiae
ATGGAACAAACCTTTTTTATGATAAAACCTGATGGTGTAAAACGTGGTTTTATTGGAGAAGTTATTAGTCGTATTGAGCGTCGAGGCTTCTCTATTGATCGCTTAGAGGTTAGACATGCAGATGCAGATATTTTGAAAAGACATTATGCAGAACTGACGGATAGACCATTCTTTCCAACGTTAGTAGATTATATGACTAGTGGTCCAGTAATCATTGGAGTTATTTCGGGAGAAGAGGTCATTTCAACTTGGCGCACCATGATGGGGAGTACTAACCCCAAAGATGCCCTTCCAGGAACTATTCGAGGAGATTTTGCACAAGCTCCCTCTCCAAATCAAGCGACATGTAATATTGTTCATGGGTCAGACTCACCTGAATCTGCAACTCGCGAGATAGCCATTTGGTTCAATAAC

SEQ ID NO: 6186 - protein, 138 aa, Streptococcus agalactiae
MEQTFFMIKPDGVKRGFIGEVISRIERRGFSIDRLEVRHADADILKRHYAELTDRPFFPTLVDYMTSGPVIIGVISGEEVISTWRTMMGSTNPKDALPGTIRGDFAQAPSPNQATCNIVHGSDSPESATREIAIWFNN

SEQ ID NO: 6187 - protein, 1830 aa, Streptococcus agalactiae
ATGAATATTGAAGATTTGAAGAAACGTCAAGAAAAGATTAGAAACTTTTCGATTATCGCTCATATTGACCATGGAAAATCAACCTTAGCAGACCGTATTTTAGAGAAAACAGAAACGGTTTCTAGTCGTGAAATGCAGGCGCAGCTGTTGGACTCTATGGATCTAGAACGTGAGCGTGGGATTACTATAAAGTTAAATGCTATTGAGCTTAATTATACTGCTAAAGATGGTGAAACTTACATTTTTCACTTGATTGACACGCCAGGGCATGTTGACTTCACATATGAAGTATCACGTTCATTAGCAGCTTGTGAGGGTGCTATACTGGTTGTTGACGCAGCTCAAGGAATTGAAGCTCAAACTCTGGCAAATGTTTATTTGGCTCTAGACAATGATTTAGAGATACTACCAGTTATTAATAAAATTGATTTACCAGCAGCAGATCCAGAACGTGTACGTGCAGAAGTAGAGGATGTTATTGGTCTAGATGCTTCAGAAGCTGTGCTTGCCTCAGCTAAGGCAGGGATTGGTATTGAAGAAATTTTAGAGCAGATCGTTGAAAAAGTTCCTGCTCCGACTGGGGAAGTAGATGCTCCTCTGCAAGCTTTAATTTTTGATTCTGTTTACGATGCTTATCGTGGGGTAATTCTGCAAGTAAGGATTGTAAATGGTATGGTTAAGCCAGGAGATAAAATTCAAATGATGTCTAATGGTAAAACCTTCGACGTTACTGAGGTTGGTATTTTCACTCCCAAAGCAGTTGGACGTGATTTTTTAGCAACTGGAGATGTAGGGTATATTGCTGCCTCAATTAAAACGGTTGCTGATACACGTGTTGGTGATACCATTACCCTTGCTAATAACCCAGCAATAGAACCTTTGCATGGCTATAAGCAAATGAACCCGATGGTTTTTGCCGGTCTTTATCCAATTGAATCAAATAAGTATAACGATCTGCGTGAAGCCCTTGAAAAATTACAATTGAATGATGCTAGTCTACAGTTTGAACCGGAAACATCACAAGCATTAGGGTTTGGTTTCCGTTGTGGTTTCTTAGGACTTTTACATATGGACGTTATCCAAGAGCGCTTGGAACGAGAGTTCAATATTGATCTTATTATGACTGCACCATCAGTAGTTTATCATGTTAATACAACTGACGGTGAAATGCTTGAAGTTTCGAATCCATCTGAATTTCCTGATCCTACTCGTGTTGACAGCATTGAAGAACCATATGTTAAGGCGCAAATTATGGTTCCTCAAGAATTTGTCGGTGCTGTAATGGAGTTAGCACAACGTAAACGTGGTGACTTTGTAACAATGGATTATATTGATGATAATCGTGTTAATGTTATTTACCAAATTCCTTTAGCTGAAATTGTGTTTGACTTCTTTGATAAGCTTAAATCATCAACACGAGGCTATGCTAGTTTTGATTATGAAATTTCCGAATATCGTCGCTCACAGTTAGTTAAAATGGATATTCTTTTAAATGGTGATAAAGTTGATGCTTTAAGCTTTATTGTTCACAAAGAATTTGCTTATGAACGTGGTAAATTGATCGTTGATAAGTTGAAAAAAATCATTCCTCGTCAGCAGTTTGAAGTTCCTATCCAAGCAGCTATTGGACAAAAAATTGTGGCTCGTTCTGATATAAAAGCACTACGCAAAAATGTCTTAGCAAAATGTTATGGTGGTGACGTTTCACGTAAACGTAAGTTGCTTGAAAAACAAAAAGCTGGTAAAAAGCGCATGAAAGCAATTGGTTCCGTCGAAGTTCCTCAGGAAGCTTTCTTAAGTGTTTTATCAATGGACGATGATGACAAAAAA

SEQ ID NO: 6188 - protein, 610 aa, Streptococcus agalactiae; identical to SEQ ID NO: 1736

SEQ ID NO: 6189 - protein, 2345 aa, Streptococcus agalactiae
ATGAAAGGTCAAAAAATTATTGCTCTAGCTGGTCTTGTCCTGTCATGCCATTTTGCTCTTACGGCATGTCATACTCAAGAACACAAAAATTCTCATCATATTAAAACAAAGCAGGTTGCTAAGAAAAAAGCTAATAAAAAGAAAGTCTCTGTTAAGGAAAGTCATAAAAAACGCAAGGGTGTTGCAGGGGTTGACTTTCCAACTGATGATGGCTTTTTACTGACTAAAGATTCGAAGATTTTATCTCATACCGATTCTGGAATCGTTGTAGCACATGGAAATCATTCTCATTTTATTTTTTACTCTGATTTAAAAGGTTCAAAATTTAGCTATTTAATTCCTAATGCAAATGCAAAAACTAATAAAAAGCAAGCGGTAAGAAACTTTAAAGCAGGGGCGGTAGCTGTTAATACATTAAATGATGGCTATGTTTTTAATCCCGCAGATATTGTTTCAGAAGATGCTAATGGCTACGTGGTCAGACATGGTGATCATTTCCACTATATTCCAAAAGCAAGTTTATCTCAGCAAAAGCAAGTACAAGCAAGTAGAGCTGTTTCACGTTTAGGAAATCAAAATAATAGCCATTACAGAGTTAATAGTTCTAAAATTGCAGGGCTTCACCACCCAACAAGTGATGGTTTCTTATTCAATGGACAAGGAATAAAAGGCACTACCCCAACAGGTATTTTAGTAGAACATCATAATCATCTGCATTTTATTAGTTTTGCTGATTTAAGAAAAGGGGGATGGGGATCAATTGCTGACCGTTACCAACCACAAAAGAAAGTTGATTCTAAAAAACAGTCACCATCAAGTAAAAAGCCAAGAACTGAAAATACTTTACCTAAGGACATCAAAGATAAGCTAGCTTACCTTGCTCGTGAATTACATTTAGATATTTCACGTATCAGAGTCCTTAAAACACTAAATGGTGAAATTGGATTTGAATACCCACATGATGATCATACACATGTTATTATGGCCAAAGATATTGATCTAAGTAAGCCAATTCCAAATCCACATCATGATGACGAAGATCATCACAAAGGTCATCACCATGATGAGTCCGACCATAAGCATGAAGAACACGAGCACACTAAGTCAAATAAATTATCTGATGAAGATCAAAAGAAATTAATTTATTTAGCAGAGAAGCTTGGTTTAAATCCTAATCAAATTGAAGTATTAACGTCAGAGGATGGGAGTATCATCTTTAAATATCCACATGATGACCACTCACACACTATAGCAAGTAAGGATATTGAAATTGGGAAGCCTATCCCAGATGGACACCACGATCACTCTCATGCAAAAGATAAAGTTGGTATGGCAACTCTAAAACAAATTGGTTTTGATGATGAGATTATTCAGGATATTCTGCATGCAGATGCTCCAACACCATTCCCATCCAATGAAACTAATCCTGAAAAAATGCGTCAGTGGCTTGCAACTGTTACTAAGATTAACATTGGACAAAGAACCAATCCATTCCAGCGTTTTGGTCTATCATTGATGCCTAATATTGAAGTTCTAGGAATTGGGTTTACTCCGATTAATGATATGACGCCAGTTTTGCAATTCAAAAAACTTAAACAGCTTTGGATGACAAATACTGGTATTACAGATTATTCTTTCCTTGATAAGATGCCACTATTAGAAGGATTGGATATTTCACAAAACGGTATTAAGGATTTATCTTTCCTTACAAAATATAAACAATTAAGTCTTATTGCTGCAGCTAATAATGGCATTACTTCGCTAAAACCATTGGCTGAATTACCAAACCTTCAATTCTTAGTTTTGAGTCATAACAATATCTCTGACTTGACACCGTTATCAAACTTGACAAAACTCCAAGAATTGCACCTTGATCATAATAATGTGAAGAATTTAAGTGCACTTTCTGGTAAAAAAGATTTGAAAGTTCTAGATTTATCAAACAATAAATCCGCAGACTTATCGACTCTAAAAACAACTAGTCTTGAGACGCTTCTTTTAAATGAGACGAATACAAGCAATCTAAGTTTCTTAAAGCAAAATCCTAAGGTATCTAATTTAACAATTAATAATGCGAAATTAGCATCATTAGATGGTGTTGAAGAGAGCGATGAAATTGTTAAAGTAGAAGCTGAAGGGAACCAAATTAAGTCACTAGTATTGAAAAATAAACAAGGTTCGTTAAAATTCTTGAATGTGACTAATAATCAGTTAACATCACTTGAAGTGTTAATAATTATACTTCACTTGAGACCTAAGTGTTTCTAAAAATAAACTTGAATCTTTAGATATTAAACACCTAACAACAGTTACATCTGATTAGCCATAACATGTTCACATCACAT

SEQ ID NO: 6190 - protein, 784 aa, Streptococcus agalactiae
  VARIANT 743: Xaa = Any Amino Acid
MKGQKIIALAGLVLSCHFALTACHTQEHKNSHHIKTKQVAKKKANKKKVSVKESHKKRKGVAGVDFPTDDGFLLTKDSKILSHTDSGIVVAHGNHSHFIFYSDLKGSKFSYLIPNANAKTNKKQAVRNFKAGAVAVNTLNDGYVFNPADIVSEDANGYVVRHGDHFHYIPKASLSQQKQVQASRAVSRLGNQNNSHYRVNSSKIAGLHHPTSDGFLFNGQGIKGTTPTGILVEHHNHLHFISFADLRKGGWGSIADRYQPQKKVDSKKQSPSSKKPRTENTLPKDIKDKLAYLARELHLDISRIRVLKTLNGEIGFEYPHDDHTHVIMAKDIDLSKPIPNPHHDDEDHHKGHHHDESDHKHEEHEHTKSNKLSDEDQKKLIYLAEKLGLNPNQIEVLTSEDGSIIFKYPHDDHSHTIASKDIEIGKPIPDGHHDHSHAKDKVGMATLKQIGFDDEIIQDILHADAPTPFPSNETNPEKMRQWLATVTKINIGQRTNPFQRFGLSLMPNIEVLGIGFTPINDMTPVLQFKKLKQLWMTNTGITDYSFLDKMPLLEGLDISQNGIKDLSFLTKYKQLSLIAAANNGITSLKPLAELPNLQFLVLSHNNISDLTPLSNLTKLQELHLDHNNVKNLSALSGKKDLKVLDLSNNKSADLSTLKTTSLETLLLNETNTSNLSFLKQNPKVSNLTINNAKLASLDGVEESDEIVKVEAEGNQIKSLVLKNKQGSLKFLNVTNNQLTSLEXVNNYTSLETLSVSKNKLESLDIKHLTNSYNLDLAITCSTSH

SEQ ID NO: 6191 - protein, 441 aa, Streptococcus agalactiae
ATGAAAATCATTATTCAACGTGTTAATCAAGCAAGTGTTTCTATTGAAGATGATGTAGTCGGATCTATTGAGAAGGGTTTAGTACTTCTAGTTGGGATTGCTCCAGAAGATACAACAGAAGATATTGCTTATGCAGTTCGTAAAATTACTAGCATGCGTATTTTTTCTGATGATGAGGGGAAAATGAACCTTTCAATTCAAGACATTAAAGGAAGCGTCTTATCTATCTCACAATTTACACTCTTTGCAGATACCAAAAAAGGAAATCGTCCAGCTTTTACTGGGGCAGCTGATCCTGTTAAAGCGAATCAGTTTTATGATATCTTTAATCAAGAATTAGCAAATCATGTTTCGGTAGAAACAGGTCAATTTGGAGCTGATATGCAAGTCAGTCTGATTAATGATGGACCAGTAACTATCGTTTTAGATACTAAAAATAAA

SEQ ID NO: 6192 - protein, 147 aa, Streptococcus agalactiae; identical to SEQ ID NO: 3494

SEQ ID NO: 6193 - protein, 2213 aa, Streptococcus agalactiae
ATGGTCAAAGAAATTAATTTAACAGGAGAAGAGGTTGTTGCAATCACATCCCAGTACATGAGTGAGACGGATGTTGCTTTTGTAAAATTTGCCTTAAATTACGCAACCGCAGCTCATTATTATCAAGCAAGAAAGTCGGGCGAGCCCTACATTATTCATCCAATTCAAGTAGCAGGTATTCTTGCAGATTTACACCTTGATGCCGTTACGGTAGCTTGTGGTTTTTTACATGATGTTGTAGAAGATACGGAAATTACCCTTGATGAGATTGAAACTGATTTTGGCAAGGATGTTCGCGATATTATTGACGGCGTAACAAAATTGGGTAAAGTGGAGTACAAATCTCATGAAGAACAGTTAGCAGAAAATCACCGTAAAATGTTAATGGCTATGTCTAAGGATATCCGTGTTATTTTGGTTAAGCTCGCTGACCGCTTACATAATATGAGAACCCTTAAACACCTCAGAAAAGATAAACAAGAGCGTATTTCACGTGAGACTATGGAAATATACGCTCCTTTAGCGCATCGTTTGGGGATTAGTCGTATCAAGTGGGAATTAGAAGATTTATCTTTTCGTTACTTGAATGAGACGGAATTTTATAAGATTTCTCATATGATGAGTGAAAAACGTCGTGAACGCGAAGAGTTGGTTGATATAATTGTCGATAAAATCAGATCCTATACTGAGGAACAGGGTTTATATGGTGATATTTATGGTAGACCAAAACACATTTATTCTATTTACAGAAAAATGCGTGATAAAAAGAAACGCTTTGATCAGATTTATGATTTAATTGCGATACGCTGTATCATGGAAACTGCTAGTGATGTTTATGCCATGGTGGGGTATATCCATGAGTTATGGCGTCCTATGCCAGGAAGGTTTAAAGATTATATTGCGGCACCAAAGGCCAATGGTTATCAATCTATTCACACGACGGTTTATGGACTAAAGGGCCAATTGAAATTCAGATTCGAACTAAAGAAATGCATCAAGTTGCCGAGTTTGGTGTTGCAGCCCATTGGGCCTATAAAAAAGGAATCACCAGTAAGGTTAATCAAGCAGAGCAATCGGTTGGTATGGGATGGATTCAAGAATTAGTTGAGCTTCAAGATGAATCAAAAGACGCCAAGGATTTTGTTGACTCTGTTAAGGAAGATATCTTTACAGAACGCATCTATGTTTTTACCCCAAATGGTGCTGTTCAGGAATTGCCAAGGGAATCTGGACCAATTGATTTTGCTTATGCTATTCACACGCAAGTTGGAGAAAAAGCTACTGGCGCTAAAGTAAATGGACGTATGGTTCCATTGACTGCTAAGTTAAAAACAGGAGATGTTGTTGAGATTATCACAAACCCTAATTCATTTGGACCAAGTCGTGACTGGATTAAGATTGTTAAGACCAATAAAGCTCGCAATAAAATTCGTCAGTTCTTCAAAAACCAAGATAAAGAAACTTCTATTAATAAAGGTAGAGAATTACTGGTTGATTATTTCCAAGAACAAGGTTATGTGCCTAACAAATATTTAGATAAGAAACATATTGAAGAAATCCTTCCACGTGTCAGTGTTAAAAGTGAGGAAGCTTTGTATGCAGCCGTAGGTTTTGGTGATTTGAGTCCGATTAGTATTTTTAATAAACTGACGGAAAAAGAACGCCGTGAGGAGGAACGTGCTAAGGCTAAAGCGGAAGCAGACGAACTTATTAACGGTGGTGAAATCAAAACCGATAAGCGTGATGTTCTCAAAGTTAAGAGTGAAAATGGTGTTATCATTCAAGGAGCTTCAGGTTTATTAATGCGTATTGCAAAATGTTGTAATCCCGTTCCTGGAGATCTCATTGAAGGCTATATAACTAAAGGTAGAGGCGTGGCTATCCATCGTTCAGATTGTCAAAATTTAAAGAGTCAGGAGAACTACGAACAACGTTTGATTGATGTTGAGTGGGATGATGATGGATCTAAAAAAGAGTACATGGCTGAAATCGATATTTATGGTTTGAATCGTAGTGGCCTCCTTAATGATGTTCTTCAAACCTTATCAAATGCAACAAAGCTAGTATCGACAGTAAATGCACAACCAACAAAAGATATGAAATTTGCTAATATTCATGTTAGCTTTGGAATTTCAAATTTAGCACAATTGACAACTGTGGTTGATAAAATCAAAATTATCCCAGATGTTTATTCTGTTAAACGTACGAATGGT

SEQ ID NO: 6194 - protein, 738 aa, Streptococcus agalactiae
  VARIANT 318: Xaa = Any Amino Acid
MVKEINLTGEEVVAITSQYMSETDVAFVKFALNYATAAHYYQARKSGEPYIIHPIQVAGILADLHLDAVTVACGFLHDVVEDTEITLDEIETDFGKDVRDIIDGVTKLGKVEYKSHEEQLAENHRKMLMAMSKDIRVILVKLADRLHNMRTLKHLRKDKQERISRETMEIYAPLAHRLGISRIKWELEDLSFRYLNETEFYKISHMMSEKRREREELVDIIVDKIRSYTEEQGLYGDIYGRPKHIYSIYRKMRDKKKRFDQIYDLIAIRCIMETASDVYAMVGYIHELWRPMPGRFKDYIAAPKANGYQSIHTTVYGXKGPIEIQIRTKEMHQVAEFGVAAHWAYKKGITSKVNQAEQSVGMGWIQELVELQDESKDAKDFVDSVKEDIFTERIYVFTPNGAVQELPRESGPIDFAYAIHTQVGEKATGAKVNGRMVPLTAKLKTGDVVEIITNPNSFGPSRDWIKIVKTNKARNKIRQFFKNQDKETSINKGRELLVDYFQEQGYVPNKYLDKKHIEEILPRVSVKSEEALYAAVGFGDLSPISIFNKLTEKERREEERAKAKAEADELINGGEIKTDKRDVLKVKSENGVIIQGASGLLMRIAKCCNPVPGDLIEGYITKGRGVAIHRSDCQNLKSQENYEQRLIDVEWDDDGSKKEYMAEIDIYGLNRSGLLNDVLQTLSNATKLVSTVNAQPTKDMKFANIHVSFGISNLAQLTTVVDKIKIIPDVYSVKRTNG

SEQ ID NO: 6195 - protein, 1215 aa, Streptococcus agalactiae
ATGTCAGAAAAAAGACGTGACAATAAAGGTCGAATCTTAAAGACTGGAGAGAGCCAACGAAAAGACGGAAGATACTTATACAAATATATAGATTCATTTGGAGAACCGCAATTTGTTTACTCGTGGAAACTTGTGGCTACAGACCGAGTACCAGCAGGAAAGCGTGATTGTATCTCACTTAGAGAGAAAATCGCAGAGTTACAGAAAGACATTCATGATGGTATTGATGTTGTAGGAAAGAAAATGACACTCTGCCAGCTTTACGCAAAACAGAACGCTCAAAGACCAAAGGTTAGAAAAAACACTGAAACTGGACGCAAATATCTTATGGATATTTTGAAGAAAGACAAGTTAGGTGTAAGAAGTATTGACAGTATTAAGCCATCAGACGCTAAAGAATGGGCTATTAGAATGAGTGAAAATGGTTATGCTTATCAAACCATCAATAACTACAAACGTTCTTTAAAGGCTTCATTCTATATTGCTATACAAGATGATTGTGTTCGGAAGAATCCATTTGACTTTCAACTGAAAGCAGTTCTTGATGATGATACTGTCCCTAAGACCGTACTAACAGAAGAACAGGAAGAAAAACTGTTAGCCTTTGCAAAAGCTGATAAAACCTACAGCAAAAATTATGATGAAATTCTGATACTCTTAAAAACAGGTCTTCGTATTTCAGAGTTTGGTGGTTTGACACTTCCAGATTTAGATTTTGAGAATCGTCTTGTCAATATAGACCATCAGCTATTGAGAGATACTGAAATTGGGTACTACATTGAAACACCAAAGACCAAAAGTGGCGAACGTCAAGTTCCTATGGTTGAAGAAGCCTATCAAGCATTTAAGCGAGTGTTAGCGAATCGAAAGAATGATAAGCGTGTTGAGATTGATGGATATAGTGATTTCCTCTTTCTTAATAGAAAGAACTATCCAAAAGTGGCAAGTGATTACAACGGCATGATGAAAGGTCTTGTTAAGAAATACAATAAGTATAACGAGGATAAATTGCCACACATCACTCCACATAGTTTGCGACATACATTCTGTACCAACTATGCAAATGCAGGAATGAATCCAAAGGCATTACAGTACATTATGGGACATGCTAATATAGCCATGACGCTGAACTATTACGCACATGCAACATTCGATTCTGCAATGGCAGAAATGAAACGCTTGAATAAAGAGAAGCAACAGGAGCGTCTTGTTGCT

SEQ ID NO: 6196 - protein, 405 aa, Streptococcus agalactiae
MSEKRRDNKGRILKTGESQRKDGRYLYKYIDSFGEPQFVYSWKLVATDRVPAGKRDCISLREKIAELQKDIHDGIDVVGKKMTLCQLYAKQNAQRPKVRKNTETGRKYLMDILKKDKLGVRSIDSIKPSDAKEWAIRMSENGYAYQTINNYKRSLKASFYIAIQDDCVRKNPFDFQLKAVLDDDTVPKTVLTEEQEEKLLAFAKADKTYSKNYDEILILLKTGLRISEFGGLTLPDLDFENRLVNIDHQLLRDTEIGYYIETPKTKSGERQVPMVEEAYQAFKRVLANRKNDKRVEIDGYSDFLFLNRKNYPKVASDYNGMMKGLVKKYNKYNEDKLPHITPHSLRHTFCTNYANAGMNPKALQYIMGHANIAMTLNYYAHATFDSAMAEMKRLNKEKQQERLVA

SEQ ID NO: 6197 - protein, 201 aa, Streptococcus agalactiae
ATGAAGCAGACTGACATTCCTATTTGGGAACGTTATACCCTAACCATTGAAGAAGCGTCAAAATATTTTCGTATTGGCGAAAACAAGCTACGACGCTTGGCAGAGGAAAATAAAAATGCAAATTGGCTGATTATGAATGGCAATCGTATTCAGATTAAACGAAAACAATTTGAAAAAATTATAGATACATTGGACGCAATC

SEQ ID NO: 6198 - protein, 67 aa, Streptococcus agalactiae
MKQTDIPIWERYTLTIEEASKYFRIGENKLRRLAEENKNANWLIMNGNRIQIKRKQFEKIIDTLDAI

SEQ ID NO: 6199 - protein, 420 aa, Streptococcus agalactiae
ATGAAACCATCTTCTTTTCAGACCACAATAGAAAATCAGTTTGACTATATCTGTAAACGTGCTATGGAAGACGAGCGAAAGAATTATATGCTTTATCTTTCAAGGATTGCAAAGCGTGAGGTGTCCTTTTCGGATGTTGGCGATTATCTTGTTAGCCAGTTTGCGACAACAGATAACTATTCAACTGACTTTCAGATTTTTACACTCAATGGGTTATCAGTAGGCGTTGAAAATGATTTGTTGAGTGAAGCATTACGTGAGTTGCCAGACAAGAAACGTGAAATTCTACTGCTGTTTTACTTTATGGACATGAGCGATTCAGAAATTGCAGACCTGTTGAAATTGAACCGTTCTACTGTCTATCGGCATAGAACCAGTGGACTAGCCTTAATTAAAAAGTTTATGGAGGAATTTGAAGAA

SEQ ID NO: 6200 - protein, 140 aa, Streptococcus agalactiae
MKPSSFQTTIENQFDYICKRAMEDERKNYMLYLSRIAKREVSFSDVGDYLVSQFATTDNYSTDFQIFTLNGLSVGVENDLLSEALRELPDKKREILLLFYFMDMSDSEIADLLKLNRSTVYRHRTSGLALIKKFMEEFEE

SEQ ID NO: 6201 - protein, 351 aa, Streptococcus agalactiae
ATGCGTAAAAAAGAAGATAAATATGATTTTAGAGCCTTTGGTTTAGCCATTAAAGAAGCTCGATTGAAACGAGGTTTAACTCGTGAACAAGTGGGAGCATTGATTGAAATTGACCCACGGTACTTAACTAATATTGAAAATAAAGGGCAACACCCCAGCATACAAGTTCTTTATGACCTTGTATCGTTACTTCATGTTTCCGTTGATGAATTTTTCTTACCTGCTAATAACTTGGTAAAAAGCACCCGACGATTACAGATAGAGAAATACATGGATAGCTTTACAGACAAAGAACTATCCTTAATGGAATCTTTAGCCAGCGGTATCAACGAAGCAAGAAACATCGAAGAC

SEQ ID NO: 6202 - protein, 117 aa, Streptococcus agalactiae
MRKKEDKYDFRAFGLAIKEARLKRGLTREQVGALIEIDPRYLTNIENKGQHPSIQVLYDLVSLLHVSVDEFFLPANNLVKSTRRLQIEKYMDSFTDKELSLMESLASGINEARNIED

SEQ ID NO: 6203 - protein, 1917 aa, Streptococcus agalactiae
ATGAAAATTATTAATATTGGAGTTTTAGCTCATGTTGATGCAGGAAAAACTACCTTAACAGAAAGCTTATTATATAACAGTGGAGCGATTACAGAATTAGGAAGCGTGGACAAAGGTACAACGAGGACGGATAATACGCTTTTAGAACGTCAGAGAGGAATTACAATTCAGACAGGAATAACCTCTTTTCAGTGGGAAAATACGAAGGTGAACATCATAGACACGCCAGGACATATGGATTTCTTAGCAGAAGTATATCGTTCATTATCAGTTTTAGATGGGGCAATTCTACTGATTTCTGCAAAAGATGGCGTACAAGCACAAACTCGTATATTATTTCATGCACTTAGGAAAATGGGGATTCCCACAATCTTTTTTATCAATAAGATTGACCAAAATGGAATTGATTTATCAACGGTTTATCAGGATATTAAAGAGAAACTTTCTGCCGAAATTGTAATCAAACAGAAGGTAGAACTGTATCCTAATATGTGTGTGACGAACTTTACCGAATCTGAACAATGGGATACGGTAATAGAGGGAAACGATGACCTTTTAGAGAAATATATGTCCGGTAAATCATTAGAAGCATTGGAACTCGAACAAGAGGAAAGCATAAGATTTCATAATTGTTCCCTGTTCCCTGTTTATCACGGAAGTGCAAAAAACAATATAGGGATTGATAACCTTATAGAAGTGATTACGAATAAATTTTATTCATCAACACATCGAGGTCCGTCTGAACTTTGCGGAAATGTTTTCAAAATTGAATATACAAAAAAAAGACAACGTCTTGCATATATACGCCTTTATAGTGGAGTACTACATTTACGAGATTCGGTTAGAGTATCAGAAAAAGAAAAAATAAAAGTTACAGAAATGTATACTTCAATAAATGGTGAATTATGTAAGATTGATAGAGCTTATTCTGGAGAAATTGTTATTTTGCAAAATGAGTTTTTGAAGTTAAATAGTGTTCTTGGAGATACAAAACTATTGCCACAGAGAAAAAAGATTGAAAATCCGCACCCTCTACTACAAACAACTGTTGAACCGAGTAAACCTGAACAGAGAGAAATGTTGCTTGATGCCCTTTTGGAAATCTCAGATAGTGATCCGCTTCTACGATATTACGTGGATTCTACGACACATGAAATTATACTTTCTTTCTTAGGGAAAGTACAAATGGAAGTGATTAGTGCACTGTTGCAAGAAAAGTATCATGTGGAGATAGAACTAAAAGAGCCTACAGTCATTTATATGGAGAGACCGTTAAAAAATGCAGAATATACCATTCACATCGAAGTGCCGCCAAATCCTTTCTGGGCTTCCATTGGTTTATCTGTATCACCGCTTCCGTTGGGAAGTGGAATGCAGTATGAGAGCTCGGTTTCTCTTGGATACTTAAATCAATCATTTCAAAATGCAGTTATGGAAGGGATACGCTATGGTTGCGAACAAGGATTATATGGTTGGAATGTGACGGATTGTAAAATCTGTTTTAAGTATGGCTTATACTATAGCCCTGTTAGTACCCCAGCAGATTTTCGGATGCTTGCTCCTATTGTATTGGAACAAGTCTTAAAAAAAGCTGGAACAGAATTGTTAGAGCCATATCTTAGTTTTAAAATTTATGCGCCACAGGAATATCTTTCACGAGCATACAACGATGCTCCTAAATATTGTGCGAACATCGTAGACACTCAATTGAAAAATAATGAGGTCATTCTTAGTGGAGAAATCCCTGCTCGGTGTATTCAAGAATATCGTAGTGATTTAACTTTCTTTACAAATGGACGTAGTGTTTGTTTAACAGAGTTAAAAGGGTACCATGTTACTACCGGTGAACCTGTTTGCCAGCCCCGTCGTCCAAATAGTCGGATAGATAAAGTACGATATATGTTCAATAAAATAACT

SEQ ID NO: 6204 - protein, 639 aa, Streptococcus agalactiae
MKIINIGVLAHVDAGKTTLTESLLYNSGAITELGSVDKGTTRTDNTLLERQRGITIQTGITSFQWENTKVNIIDTPGHMDFLAEVYRSLSVLDGAILLISAKDGVQAQTRILFHALRKMGIPTIFFINKIDQNGIDLSTVYQDIKEKLSAEIVIKQKVELYPNMCVTNFTESEQWDTVIEGNDDLLEKYMSGKSLEALELEQEESIRFHNCSLFPVYHGSAKNNIGIDNLIEVITNKFYSSTHRGPSELCGNVFKIEYTKKRQRLAYIRLYSGVLHLRDSVRVSEKEKIKVTEMYTSINGELCKIDRAYSGEIVILQNEFLKLNSVLGDTKLLPQRKKIENPHPLLQTTVEPSKPEQREMLLDALLEISDSDPLLRYYVDSTTHEIILSFLGKVQMEVISALLQEKYHVEIELKEPTVIYMERPLKNAEYTIHIEVPPNPFWASIGLSVSPLPLGSGMQYESSVSLGYLNQSFQNAVMEGIRYGCEQGLYGWNVTDCKICFKYGLYYSPVSTPADFRMLAPIVLEQVLKKAGTELLEPYLSFKIYAPQEYLSRAYNDAPKYCANIVDTQLKNNEVILSGEIPARCIQEYRSDLTFFTNGRSVCLTELKGYHVTTGEPVCQPRRPNSRIDKVRYMFNKIT

SEQ ID NO: 6205 - protein, 912 aa, Streptococcus agalactiae
ATGATGAAATTTAGAAAAAATCAGAATAAAGAAAAACAGATACCAAAGGAAAAGAAACCTCGTGTCTATAAGGTCAATCCTCATAAAAAGGTTGTGATTGCCTTGTGGGTACTTTTAGGGCTTAGTTTCAGCTTTGCGATATTCAAGCACTTTACAGCTATAGATACTCATACTATTCACGAAACAACTATCATAGAAAAGGAATACGTTGATACTCATCATGTAGAAAATTTTGTAGAGAACTTTGCGAAAGTCTACTATTCATGGGAGCAATCCGATAAGTCCATTGATAATCGAATGGAAAGTCTAAAAGGCTATCTGACAGATGAACTTCAAGCTCTCAATGTTGATACAGTACGCAAAGATATTCCTGTATCGTCTTCTGTAAGAGGATTTCAGATATGGACGGTAGAGCCAACTGGCGACAATGAGTTTAATGTAACCTACAGTGTAGACCAGCTCATTACAGAGGGAGAAAATACAAAGACCGTCCACTCTGCTTATATAGTGAGTGTCTATGTAGATGGTTCTGGAAATATGGTACTGGTTAAGAATCCGACCATTACCAACATACCTAAGAAATCAAGTTATAAACCAAAAGCCATTGAAAGTGAGGGGACGGTTGATTCCATTACAACCAATGAAATCAATGAGTTTTTAACGACGTTCTTCAAGCTCTATCCTACAGCGACAGCCAGTGAACTTTCCTACTATGTGAATGACGGGATATTAAAACCAATCGGAAAAGAGTACATCTTTCAAGAACTGGTAAATCCTATTCACAATCGTAAGGATAATCAAGTCACGGTATCGCTGACAGTGGAGTATATCGACCAGCAGACCAAAGCAACGCAGGTATCTCAATTTGATTTGGTACTTGAAAAGAACGGGAGTAATTGGAAGATTGTAAAA

SEQ ID NO: 6206 - protein, 304 aa, Streptococcus agalactiae
MMKFRKNQNKEKQIPKEKKPRVYKVNPHKKVVIALWVLLGLSFSFAIFKHFTAIDTHTIHETTIIEKEYVDTHHVENFVENFAKVYYSWEQSDKSIDNRMESLKGYLTDELQALNVDTVRKDIPVSSSVRGFQIWTVEPTGDNEFNVTYSVDQLITEGENTKTVHSAYIVSVYVDGSGNMVLVKNPTITNIPKKSSYKPKAIESEGTVDSITTNEINEFLTTFFKLYPTATASELSYYVNDGILKPIGKEYIFQELVNPIHNRKDNQVTVSLTVEYIDQQTKATQVSQFDLVLEKNGSNWKIVK

SEQ ID NO: 6207 - protein, 999 aa, Streptococcus agalactiae
ATGAAGTTGAAAACTTTAGTGATTGGTGGTTCTGGATTATTCTTGATGGTCTTCTCACTGCTTCTGTTTGTTGCCATTTTATTTTCAGATGAACAGGACAGCGGAATTTCCAATATTCATTATGGAGGTGTGAATGTTTCCGCAGAAGTGCTGGCTCATAAGCCTATGGTAGAAAAATATGCCAAAGAATATGGCGTTGAAGAATATGTCAACATACTTCTTGCGATTATACAGGTGGAATCGGGCGGTACTGCGGAAGATGTTATGCAGTCCTCGGAATCCCTCGGTCTTCCACCTAATTCATTGAGTACAGAAGAATCCATTAAGCAAGGTGTGAAGTATTTCAGTGAATTATTAGCCAGTAGCGAAAGGCTCAGTGTAGATTTAGAATCGGTTATCCAGTCCTACAATTATGGTGGTGGTTTCTTAGGGTATGTGGCTAATCGTGGAAATAAATATACCTTTGAACTGGCTCAAAGTTTCTCAAAAGAGTATTCAGGTGGCGAAAAAGTGTCTTACCCCAATCCCATAGCCATACCTATCAATGGGGGCTGGCGATACAACTATGGCAATATGTTTTATGTGCAACTGGTAACGCAGTATCTTGTCACAACAGAGTTTGATGATGATACGGTACAAGCCATCATGGACGAAGCACTGAAATATGAGGGCTGGCGATACGTTTACGGTGGAGCTTCCCCGACTACTTCTTTTGATTGTAGCGGACTGACACAATGGACGTATGGAAAAGCTGGAATTAACTTACCACGAACCGCACAACAGCAATATGATGTGACCCAGCATATCCCACTATCGGAAGCACAAGCTGGCGATTTGGTTTTCTTTCATTCTACCTATAACGCTGGCTCTTATATTACTCATGTTGGGATATACCTTGGCAATAACCGTATGTTTCATGCAGGCGACCCAATCGGTTATGCCGACTTAACAAGCCCCTACTGGCAACAGCATTTAGTGGGAGCAGGACGAATCAAACAA

SEQ ID NO: 6208 - protein, 333 aa, Streptococcus agalactiae
MKLKTLVIGGSGLFLMVFSLLLFVAILFSDEQDSGISNIHYGGVNVSAEVLAHKPMVEKYAKEYGVEEYVNILLAIIQVESGGTAEDVMQSSESLGLPPNSLSTEESIKQGVKYFSELLASSERLSVDLESVIQSYNYGGGFLGYVANRGNKYTFELAQSFSKEYSGGEKVSYPNPIAIPINGGWRYNYGNMFYVQLVTQYLVTTEFDDDTVQAIMDEALKYEGWRYVYGGASPTTSFDCSGLTQWTYGKAGINLPRTAQQQYDVTQHIPLSEAQAGDLVFFHSTYNAGSYITHVGIYLGNNRMFHAGDPIGYADLTSPYWQQHLVGAGRIKQ

SEQ ID NO: 6209 - protein, 525 aa, Streptococcus agalactiae
GTGGACGCAAGGAACAGCAGGAACAAAGGCGAAAAACCATTGCGAAGCGTCGCTCTGAAATGGAACAGGTCAAACAGAAAAAACAGCCTGCTTCTTCTGTTCATGAAAGACCGACTACAAGACAAGAACAATATCATGATGAACAGACCTCAAAACAGTCTAATATTCAGACTTCATATAAGGAATCTCAACAAGCCAAACAAGAGCGTCCAGCAGTTAAGTCCGATTTTTCAAGTCCAAAAGTGGAACGCCAAGGCAATACCGTTCAAGAAAAAACCGTTCAAAAGCCAGCAACTTCAACCACTACAGCAGATAGAACTTCACAACGTCCAATCACAAAAGAACGTCCGTCTACTGTTCAAAGAGTACCACTACAAAATACAAGAAGTAGACCACCAATCAAAACCGCCACCATTAAGAAAGTCGGTAAGAAACCATGAAGTTGAAAACTTTAGTGATTGGTGGTTCTGGATTATTCTTGATGGTCTTCTCACTGCTTCTGTTTGTTGCCATTTTATTTTCAGA

SEQ ID NO: 6210 - protein, 175 aa, Streptococcus agalactiae
MDARNSRNKGEKPLRSVALKWNRSNRKNSLLLLFMKDRLQDKNNIMMNRPQNSLIFRLHIRNLNKPNKSVQQLSPIFQVQKWNAKAIPFKKKPFKSQQLQPLQQIELHNVQSQKNVRLLFKEYHYKIQEVDHQSKPPPLRKSVRNHEVENFSDWWFWIILDGLLTASVCCHFIFR

SEQ ID NO: 6211 - protein, 2445 aa, Streptococcus agalactiae
ATGGCATATCCAATTAAATACATTGAAAACAATCTCGTCTGGAATAAAGACGGGGAATGTTATGCTTACTATGAGCTTGTTCCTTACAATTACTCATTTCTAAGTCCAGAACAGAAAATACAAGTGCATGATTCTTTCAGACAGCTTATCGCACAAAATCGTGATGGCAAAATTCATGCTTTACAAATCAGTACAGAATCCAGCATACGTTCTGCACAAGAGCGTTCCAAAAATGAAGTCACTGGCAAGCTCAAAGCGGTTGCCTATGACAAAATCGACCAACAGACAGACGCTTTAATATCCATGATTGGCGAAAATCAAGTGAACTACCGTTTCTTTATCGGCTTTAAGTTGCTTCTCAACGATCAGGAGTTTTCTATGAAAAGTCTTACCGTTGAAGCAAAAAATGCTTTGTCTGATTTTGTCTATGATGTGAACCATAAGCTGATGGGCGATTTTGTTAGTATGAGTAATGATGAAATCCTGCGTTTTCAGAAGATGGAAAAGCTCTTAGAAAATAAAATCTCTCGTCGTTTCAAAATCCGCAGGTTAGATAAGGACGACTTCGGCTATCTGATTGAACACCTTTACGGACAGACAGGCACTGCCTATGAAGAGTATGAGTACCATCTATCAAAGAAAAAGCTGGATAATGAAACGCTGATTAAATACTATGACTTGATTAAGCCTACTCGCTGTTTGGTGGAAGAAAAACAGCGATATTTGAAAATCCAGCAGGAAGATGAAACCGTCTATGTAGCTTACTTTACCATTAACAGCATTGTCGGAGAACTGGACTTCCCGTCCTCTGAAATCTTCTACTACCAGCAACAGCAATTTACATTCCCGATTGATACGTCAATGAATGTGGAAATTGTAGCGAATCGTAAAGCCCTATCTACTGTCCGCAATAAAAAGAAAGAACTGAAAGACTTGGATAACCACGCTTGGCAAAGTGATAATGAAACCAGCTCCAATGTGGCGGAAGCTCTGGAAAGTGTGAATGAGCTGGAAACCAATTTAGACCAAAGCAAGGAATCTATGTACAAGCTGTCTTATGTGGTAAGGGTATCAGCAAATGATCTTGACGAACTCAAACGTCGTTGTAATGAAGTGAAAGATTTTTATGACGATTTAAGCGTAAAACTGGTACGACCATTTGGGGATATGCTCGGCTTACATGAAGAATTTTTACCTGCCAGCAAGCGTTATATGAATGATTATATTCAATACGTGACCTCTGATTTCCTCGCTGGTTTAGGTTTTGGTGCTACTCAAATGCTGGGGGAAAATGAGGGGATTTATGTTGGCTACAGCTTAGATACTGGACGCAATGTCTATCTGAAACCTGCTCTTGCCAGTCAAGGGGTTAAGGGTTCAGTAACCAATGCGTTAGCGTCGGCTTTTGTTGGTTCGCTGGGTGGTGGTAAATCCTTTGCGAATAACCTTATCGTCTATTATGCGGTGCTTTATGGGGCACAAGCAGTGATTGTAGACCCAAAAGCAGAACGTGGCAGATGGAAAGAAACCTTGCCAGAGATTTCCCATGAAATCAATATCGTCACTCTGACTTCTGATGAGAAAAACAAAGGCTTACTTGACCCTTATGTGATTATGAAAAATCCCAAAGATTCTGAATCACTGGCTATTGATATTCTGACATTCCTTACGGGGATTTCCTCTCGTGATGGGGAACGCTTCCCAATCCTTAGAAAAGCCATTCGTGCAGTAACCAATAGTGAAGTACGAGGGTTGATGAAAGTGATTGAGGAATTACGGGTTGAGAATACGCCACTAAGTACCAGTATAGCCGACCATATCGAAAGTTTTACAGACTATGACTTTGCACATTTATTATTCAGTAATGGTTATGTGGAGCAGTCTATCAGCTTAGAAAAACAACTGAACATTATACAGGTTGCGGACTTGGTACTTCCCGACAAGGAAACTTCCTTTGAGGAATATACCACTATGGAGCTTTTATCCGTTGCTATGCTGATTGTCATTAGTACCTTTGCTTTAGACTTTATCCATACAGACCGAAGCATTTTCAAGATTGTAGATTTAGACGAAGCATGGAGCTTTTTACAGGTAGCACAAGGAAAAACACTATCTATGAAGCTGGTTCGGGCTGGTCGTGCTATGAACGCTGGGGTATATTTCGTGACCCAAAATACAGACGACCTCTTAGATGAAAAACTGAAAAATAACCTCGGCTTAAAATTTGCATTTCGTTCCACTGACCTTAACGAGATTAAAAAGACCTTAGCCTTTTTTGGTGTAGACCCAGAGGACGAAAACAATCAGAAGCGATTGCGTGATTTGGAAAACGGGCAATGCCTTATCAGTGATTTATATGGTCGTGTCGGTGTGATACAGTTCCACCCTGTATTTGAAGAACTGCTCCATGCCTTTGATACCAGACCACCTGTGCGAAAAGAGGTG

SEQ ID NO: 6212 - protein, 815 aa, Streptococcus agalactiae
MAYPIKYIENNLVWNKDGECYAYYELVPYNYSFLSPEQKIQVHDSFRQLIAQNRDGKIHALQISTESSIRSAQERSKNEVTGKLKAVAYDKIDQQTDALISMIGENQVNYRFFIGFKLLLNDQEFSMKSLTVEAKNALSDFVYDVNHKLMGDFVSMSNDEILRFQKMEKLLENKISRRFKIRRLDKDDFGYLIEHLYGQTGTAYEEYEYHLSKKKLDNETLIKYYDLIKPTRCLVEEKQRYLKIQQEDETVYVAYFTINSIVGELDFPSSEIFYYQQQQFTFPIDTSMNVEIVANRKALSTVRNKKKELKDLDNHAWQSDNETSSNVAEALESVNELETNLDQSKESMYKLSYVVRVSANDLDELKRRCNEVKDFYDDLSVKLVRPFGDMLGLHEEFLPASKRYMNDYIQYVTSDFLAGLGFGATQMLGENEGIYVGYSLDTGRNVYLKPALASQGVKGSVTNALASAFVGSLGGGKSFANNLIVYYAVLYGAQAVIVDPKAERGRWKETLPEISHEINIVTLTSDEKNKGLLDPYVIMKNPKDSESLAIDILTFLTGISSRDGERFPILRKAIRAVTNSEVRGLMKVIEELRVENTPLSTSIADHIESFTDYDFAHLLFSNGYVEQSISLEKQLNIIQVADLVLPDKETSFEEYTTMELLSVAMLIVISTFALDFIHTDRSIFKIVDLDEAWSFLQVAQGKTLSMKLVRAGRAMNAGVYFVTQNTDDLLDEKLKNNLGLKFAFRSTDLNEIKKTLAFFGVDPEDENNQKRLRDLENGQCLISDLYGRVGVIQFHPVFEELLHAFDTRPPVRKEV

SEQ ID NO: 6213 - protein, 504 aa, Streptococcus agalactiae
ATGGGATTTTTGAAATCGTCTATTAAATCTGTCGGTACATTACTACTGGCAGATTTTCTATTTTACGGGGTGGCTCAATCAGCTACCCCTATTTTTTATGAAAGGATTGATTACATGAAGAAAATACGAAGCTATACCAGTATCTGGTCTGTGGAAAAGGTACTGTATTCTATCAATGATTTTAGACTTCCGTTTCCCATAACCTTTACGCAAATGACATGGTTTGTCGTGTCACTCTTTGCAGTGATGATACTTGGCAACTTGCCCCCTCTTTCCATGATAGAGGGAGCATTTCTCAAATACTTTGGGATTCCTGTGGCTTTCACATGGTTTATGTCTACAAAAACTTTTGATGGTAAAAAGCCTTATGGATTTTTGAAGTCTGTCATTGCTTATGCACTGCGACCAAAGCTGACCTATGCAGGAAAAAAAGTAACGCTTGGCAGAAACCAGCCACAAGAAGCCATTACAGCAGTTAGGAGTGAATTTTATGGCATATCCAAT

SEQ ID NO: 6214 - protein, 168 aa, Streptococcus agalactiae
MGFLKSSIKSVGTLLLADFLFYGVAQSATPIFYERIDYMKKIRSYTSIWSVEKVLYSINDFRLPFPITFTQMTWFVVSLFAVMILGNLPPLSMIEGAFLKYFGIPVAFTWFMSTKTFDGKKPYGFLKSVIAYALRPKLTYAGKKVTLGRNQPQEAITAVRSEFYGISN

SEQ ID NO: 6215 - protein, 495 aa, Streptococcus agalactiae
ATGGACGATATGCAAGTCTATATTGCGAATTTAGGCAAATACAATGAGGGCGAATTGGTCGGTGCGTGGTTTACCTTTCCCATTGACTTTGAGGAAGTCAAAGAGAAAATCGGCTTGAATGATGAATATGAGGAATACGCCATTCATGACTACGAGTTACCCTTTACGGTTGACGAATACACTTCCATTGGCGAACTCAATCGACTATGGGAAATGGTATCGGAATTACCCGAAGAATTACAATCGGAGCTATCTGCTCTGCTCACTCATTTTTCAAGCATTGAAGAACTAAGCGAACATCAAGAGGATATTATCATTCATTCCGATTGTGATGATATGTATGACGTGGCACGCTACTACATTGAAGAAACGGGTGCTTTAGGCGAAGTACCAGCTAGTCTTCAAAACTATATTGATTATCAAGCCTATGGTCGGGATTTAGACCTTTCAGGAACGTTTATCTCAACCAATCATGGGATTTTTGAAATCGTCTAT

SEQ ID NO: 6216 - protein, 165 aa, Streptococcus agalactiae
MDDMQVYIANLGKYNEGELVGAWFTFPIDFEEVKEKIGLNDEYEEYAIHDYELPFTVDEYTSIGELNRLWEMVSELPEELQSELSALLTHFSSIEELSEHQEDIIIHSDCDDMYDVARYYIEETGALGEVPASLQNYIDYQAYGRDLDLSGTFISTNHGIFEIVY

SEQ ID NO: 6217 - protein, 152 aa, Streptococcus agalactiae
ATGGGATTTTTGAAATCGTCTATTAAATCTGTCGGTACATTACTACTGGCAGATTTTCTATTTTACGGGGTGGCTCAATCAGCTACCCCTATTTTTTATGAAAGGATTGATTACATAAGAAATACGAAGCTATACCAGTATCTGGTNNNNNT

SEQ ID NO: 6218 - protein, 51 aa, Streptococcus agalactiae
  VARIANT 50, 51: Xaa = Any Amino Acid
MGFLKSSIKSVGTLLLADFLFYGVAQSATPIFYERIDYMKKYEAIPVSGXX

SEQ ID NO: 6219 - protein, 495 aa, Streptococcus agalactiae; identical to SEQ ID NO: 6215

SEQ ID NO: 6220 - protein, 165 aa, Streptococcus agalactiae; identical to SEQ ID NO: 6216

SEQ ID NO: 6221 - protein, 219 aa, Streptococcus agalactiae
ATGAATTTTGGACAAAACCTTTATAACTGGTTTCTATCAAACGCTCAATCACTGGTGCTTTTAGCAATCGTTGTGATTGGCTTGTATCTTGGCTTCAAGCGTGAGTTTAGCAAACTGATTGGCTTTTTAATTATTGCGATTATTGCGGTTGGCTTAGTCTTCAACGCTGCTGGAGTAAAAGACATTTTACTAGAGCTATTCAATCGCATTATTGGTGCT

SEQ ID NO: 6222 - protein, 73 aa, Streptococcus agalactiae
MNFGQNLYNWFLSNAQSLVLLAIVVIGLYLGFKREFSKLIGFLIIAIIAVGLVFNAAGVKDILLELFNRIIGA

SEQ ID NO: 6223 - protein, 801 aa, Streptococcus agalactiae
GTGGAATTGAAAGGTCGTGGGTGCAGACAATTTGAAAGCTATCTTCTGGCACAACAAAGAAGCTGGTATGAGTTCTTTATGGACGTTTTGGTGGCTGGCGGTGTGATGAAACGCCTTGACCTTGCCATTAACGATAAGACAGGGATTTTAAATATCCCTGTACTCACTGAAAAGTGCCAACAGGAAGAATGTATCTCCGTCTTCCGCAGTTTTAAAAGCTATCGCAGTGGCGAACTGGTACGCAAAGAGGAAAAGGAATGTATGGGAAACACCCTCTATATCGGTTCATTACAAAGTGAAGTTTATTTCTGTATCTATGAAAAGGACTACGAGCAGTACAAGAAAAATGATATTCCCATTGAAGACGCAGAAGTAAAAAACCGTTTTGAGATTCGATTGAAAAATGAGCGTGCCTATTATGCAGTCCGTGATTTACTCGTCTATGACAATCCAGAGCATACCGCCTTTAAAATTATCAATCGGTATATCCGTTTTGTAGATAAAGACGATTCCAAACCTCGTTCTGATTGGAAACTGAATGAAGAATGGGCTTGGTTTATTGGGAACAATCGTGAACGATTAAAACTAACCACAAAACCAGAGCCTTACTCCTTCCAAAGGACGCTGAACTGGCTATCTCATCAAGTTGCCCCGACCTTAAAGGTTGCGATTAAACTTGATGAAATCAACCAGACGCAGGTTGTAAAAGACATTCTCGACCATGCGAAACTGACAGACCGACACAAGCAGATTTTGAAGCAACAGTCAGTAAAAGAACAGGACGTGATAACAACAAAAAAA

SEQ ID NO: 6224 - protein, 267 aa, Streptococcus agalactiae
MELKGRGCRQFESYLLAQQRSWYEFFMDVLVAGGVMKRLDLAINDKTGILNIPVLTEKCQQEECISVFRSFKSYRSGELVRKEEKECMGNTLYIGSLQSEVYFCIYEKDYEQYKKNDIPIEDAEVKNRFEIRLKNERAYYAVRDLLVYDNPEHTAFKIINRYIRFVDKDDSKPRSDWKLNEEWAWFIGNNRERLKLTTKPEPYSFQRTLNWLSHQVAPTLKVAIKLDEINQTQVVKDILDHAKLTDRHKQILKQQSVKEQDVITTKK

SEQ ID NO: 6225 - protein, 861 aa, Streptococcus agalactiae
TTGGCTGAATTACCAAACCTTCAATTCTTAGTTTTGAGTCATAACAATATCTCTGACTTGACACCGTTATCAAACTTGACAAAACTCCAAGAATTGCACCTTGATCATAATAATGTGAAGAATTTAAGTGCACTTTCTGGTAAAAAAGATTTGAAAGTTCTAGATTTATCAAACAATAAATCCGCAGACTTATCGACTCTAAAAACAACTAGTCTTGAGACGCTTCTTTTAAATGAGACGAATACAAGCAATCTAAGTTTCTTAAAGCAAAATCCTAAGGTATCTAATTTAACAATTAATAATGCGAAATTAGCATCATTAGATGGTGTTGAAGAGAGCGATGAAATTGTTAAAGTAGAAGCTGAAGGGAACCAAATTAAGTCACTAGTATTGAAAAATAAACAAGGTTCGTTAAAATTCTTGAATGTGACTAATAATCAGTTAACATCACTTGAAGGTGTTAATAATTATACTTCACTTGAGACCTTAAGTGTTTCTAAAAATAAACTTGAATCTTTAGATATTAAAACACCTAACAAAACAGTTACAAATCTTGATTTTAGCCATAACAATGTTCCAACATCACAATTGAAATTGAATGAAAAAAATATTCCTGAAGCAGTAGCTAAGAATTTTCCAGCAGTTGTAGAAGGTTCAATGGTTGGAAATGGTAGTCTTGCTGAAAAAGCAGCTATGGCTTCTAAAGAGGACAAACAAGTTTCAGATAATACTAATCACCAAAAAAACACTGAAAAATCTGCTCAAGCGAATGCTGATAGTAAAAAAGAAAACCCTAAAACACATGATGAACATCATGACCATGAAGAAACAGATCATGCACATGTAGGTCATCATCACCAT

SEQ ID NO: 6226 - protein, 287 aa, Streptococcus agalactiae
MAELPNLQFLVLSHNNISDLTPLSNLTKLQELHLDHNNVKNLSALSGKKDLKVLDLSNNKSADLSTLKTTSLETLLLNETNTSNLSFLKQNPKVSNLTINNAKLASLDGVEESDEIVKVEAEGNQIKSLVLKNKQGSLKFLNVTNNQLTSLEGVNNYTSLETLSVSKNKLESLDIKTPNKTVTNLDFSHNNVPTSQLKLNEKNIPEAVAKNFPAVVEGSMVGNGSLAEKAAMASKEDKQVSDNTNHQKNTEKSAQANADSKKENPKTHDEHHDHEETDHAHVGHHHH

SEQ ID NO: 6227 - protein, 657 aa, Streptococcus agalactiae
ATGACTATGGTTAAAAGAGAAGATGTGATTTTAAATGCAACTGAAAATATGGTTTACCATAAATTAAAAAATGATCCAAGTGGCCATGACTGGTTTCATATTGTTAGAGTAAGAAATCTTGCAGTAGAATTAGCACACAAAGAAGGTGCTAATACCTTTATTTGTCAAATGGCTGCACTTTTGCATGATATTATTGATGACAAAATCTGCCAAGATAGTAAGCAAGCGTCGTATGAATTGACTCAATGGTTATATAGTCAAGATCTTGCCATAGCAGAAGTAGAACATATCCTTGATATTCTTGAAAATATTTCATTCAAAGCAGGAACTGGATTGACTATGAAAACATTGGAAGGTCAAATTGTTCAAGATGCAGATCGCCTAGATGCTATGGGGGCTATTGGTATTGCAAGAACGATGGCTTATTCAGGGAGTAAAGGACGTTTAATTCATGACCCTAACTTAAAACCACGAGAAAACCTCACTTTAGAAGAGTATCGTAATGGTCAGGATACAGCTATCATGCATTTTTACGAAAAATTATTAAAGTTAAAAGACCTTATGAATACAAAACAAGGGAAAATGCTTGCTCAAAAACGTCATGATTTTTTAGAACTATATTTAGCCGAATTTTATGCTGAATGGAATGGTAAAGGT

SEQ ID NO: 6228 - protein, 219 aa, Streptococcus agalactiae
MTMVKREDVILNATENMVYHKLKNDPSGHDWFHIVRVRNLAVELAHKEGANTFICQMAALLHDIIDDKICQDSKQASYELTQWLYSQDLAIAEVEHILDILENISFKAGTGLTMKTLEGQIVQDADRLDAMGAIGIARTMAYSGSKGRLIHDPNLKPRENLTLEEYRNGQDTAIMHFYEKLLKLKDLMNTKQGKMLAQKRHDFLELYLAEFYAEWNGKG

SEQ ID NO: 6229 - protein, 462 aa, Streptococcus agalactiae
ATGATTCGTAGAGCGAAAGAAAAAGATTTGCCTGCTATTGCAGAGCTATTGAAACAAATTTTAGTGTTACATCATGGGGTTCGCCCAGATATTTTTCATACAAGAGGAAGTAAGTTTTCTAAAGAACAATTGAAAGAAATGCTGATGGACGAATCAAGGCCTATCTTTGTTTATGAATCAGACGAGGGTAAAGTTGTTGCCCACTTGTTTCTTCAATTACAAGAAAAACGTGACTTACCTCGAAAGTCCTTTAAAACTCTCTATATAGATGATTTGTGCATTGATGAGGAAGTAAGAGGTCAGCAAATTGGACAAAAGTTGATGGATTTTGCAAGACAATATGCTAAGAAACATGGGTGTTATAATATAACTTTAAATGTTTGGAATGATAATCAGAGAGCGGTCTCTTTTTATGAAAAATTAGGTTTTAAACCTCAACAAACTCAAATGGAGGAGATACTA

SEQ ID NO: 6230 - protein, 154 aa, Streptococcus agalactiae
MIRRAKEKDLPAIAELLKQILVLHHGVRPDIFHTRGSKFSKEQLKEMLMDESRPIFVYESDEGKVVAHLFLQLQEKRDLPRKSFKTLYIDDLCIDEEVRGQQIGQKLMDFARQYAKKHGCYNITLNVWNDNQRAVSFYEKLGFKPQQTQMEEIL

SEQ ID NO: 6231 - protein, 432 aa, Streptococcus agalactiae
ATGAAAGAAACACAAGAAGAATTGCGTCAGCGTATTGGACATACAGCTTATCAAGTAACCCAAAATTCAGCTACGGAACATGCTTTTACTGGGAAGTATGATGATTTTTTTGAAGAGGGTATATATGTAGATATCGTCAGTGGAGAGGTTTTATTCTCTTCTTTAGATAAATTTCAATCTGGTTGTGGTTGGCCAGCATTTTCAAAACCAATTGAGAATCGAATGGTGACAAATCATCAAGATCACTCTCATGGAATGCATCGTATTGAGGTTAGGAGTCGTCAAGCTGACTCTCATTTAGGGCATGTATTTAATGATGGACCGGTTGATGCAGGTGGTTTACGCTATTGTATCAATTCAGCTGCCTTAGATTTTATTCCTTATGACCAGATGGCAAAGAGAGGCTATGGGGACTACTTATCACTTTTTGAT

SEQ ID NO: 6232 - protein, 144 aa, Streptococcus agalactiae; identical to SEQ ID NO: 1742

SEQ ID NO: 6233 - protein, 2790 aa, Streptococcus agalactiae
ATGGCTTCTACAAATAATGTTTCAGATACAAACACATGTTTTGCTAAAGAGGAGTTAGAAGAGATTTTCGAAGAATTAGGGACAACTCAAGGTGGTTTATCAGATGAAGAGGTTGCTGTACGTCAGAAAAAATATGGTTTAAACCTGTTATCTGAAGTAGAGCAAGAATCAATTATTTTATTGTTTCTGAAAAATTTTACTAGTCTTATGGCAATACTATTATGGGTTGGAGGATTTGTGGCTATTGTTTCTAATAGCTTAGAGCTAGGTCTTGCCATTTGGATGGTTAATGTGATTAATGGTATTTTTAGTTTCATTCAGGAATACCGTGCAAGCCAAGCAACACAAGCTCTCAAGAAAATGTTACCATCTTATTCACGTGTTCTTAGAAAAAGCTCAGAAGAAAAGATATTATCAGAGCAACTAGTCCCAGGCGATATTGTTCTTATTGAAGAAGGAGATCGTATTTCAGCAGATGGTCGCTTGATTAAAACAACAGATTTGCAAGTAAACCAATCAGCTTTGACAGGGGAATCAAATCCTATTTATAAAGATAGCAATGTTGAAAACGACCAGTCTAAAACATTGATTGAATGTGATAATATGGTTTTCGCAGGAACGACGGTCTCCAGTGGTAGCGCAACAATGGTTGTTACGGCAATTGGAATGCAAACTCAATTTGGTCAAATCGCTGATTTAACACAAGGGATGAAATCAGAAAAAAGCCCTCTTCAAAGAGAACTTGATCGGTTGACCAAACAGATTTCTATCATTTCAATTACGGTAGGAATTATCTTTTTCTTAGCAGCGACTTTTTTTGTTAAGGAGCCAGTGTCAAAATCATTTATCTTTGCCTTGGGGATGATCGTTGCATTTATCCCAGAAGGTTTACTACCTACCGTTACACTTTCTCTAGCTATGGCAGTCCAACGAATGGCTAAAGAACACGCACTTGTCAAAAAACTTTCTTCAGTTGAAACTCTTGGAGCAACCTCAGTTATCTGTTCTGATAAGACTGGTACATTAACGCAAAATGAAATGACCGTCAATCATTTGTGGCAAAATGGAAAGAGTTACCAAGTGACAGGACTGGGTTATGCTCCAGAAGGACAGATTCTTTTTGAAGGTGACAATATTTGCTTTGGTAATAGTGATAGAGGAGACTTAGAAAAACTTATTCGTTTTGCTCATCTCTGTAGCAACGCTCAAGTATTACCACCAAATGATGAACGTTCAACTTATACTGTACTTGGAGATCCGACAGAAGCTTGTTTGAATGTTTTATTGGAAAAATCAGGGATAAACAGACAAGAAAATCGTAAGTTTGCACCACGTTTGAAAGAATTACCTTTTGACTCGGTTAGAAAACGCATGACAACTATTCATAGCTTAGGAGGCGATGAAAAGGATAAAAAAATTTCAATCACAAAAGGTGCGCCGAAAGAAATACTTGATTTATCAGATTATGTCTTATCTGATGGCAAAGTTATCCCCTTAAATAAGGAAGAACGTAATAAAATACAGTTGGCTAATGATACATTTGCTAAAGATGGACTTCGCGTCTTAGCTGTTTCATACTGCGATATTGAAGGCTTTTCAAAAGAACAATGGACGCAAGAAAATTTGGAACAACACATGGTGTTCATAGGGTTGATAGCAATGAGTGATCCACCTCGTGAAGGCGTTCGCGAAGCTATTGATAAATGTCATGCAGCAAGCATTCGTATTATTATGGTGACTGGAGATTACGGATTAACGGCACTGAGTATCGCTAAAAATATTGGTATTATTCGTAACGATGGTGCTAAAGTAATTTCAGGTTTAGAGTTATCAGAAATGACGGATAGCCAATTGAAAAAAGAATTGTCAGGTGAAGCCGTTTTTGCTCGTGTAGCACCAGAACAAAAATATCGAGTAGTAACGATATTACAGGAGATGGGTGAAGTAGTAGCAGTTACAGGAGACGGGGTCAATGATGCGCCTGCGCTAAAAAAATCCGATATTGGTGTAGCCATGGGTGTTACCGGTACTGATGTTGCTAAAGAATCAGCTGATATGATTCTGACAGATGATCATTTTGCTTCTATTGTACATGCCGTGGAAGAAGGGCGGGCTGTTTATCAAAACATTAAGAAATTCTTGACGTATATTTTTAATAGTAATACTCCTGAGGCGGTTCCGTCGGCATTCTTCCTTTTTTCTAAAGGTTTTATTCCTTTACCATTGACTGTAATGCAAATACTTGCTGTTGATTTGGGAACCGATATGCTTCCCGCTTTAGGTCTAGGCGTGGAACCACCAGAAACAGATGTTATGAATCGTCCTCCAAGACGGCTAACAGATCGCTTATTGGACAAAGGGCTACTTATAAAATCTTTCCTTTGGTACGGCACTATTGAATCCGTATTAGCTATGGGTGGTTTTTTCTGGGCTCATTACTTACGTTATGGTAATTTTACTTTTTTCGTCGCAAACGGCATACCGTACAGGGAAGCGACAACTATGACACTTGGAGCTATTATCTTTAGCCAGATAGGTATGGTTATGAATAGCAGAACGAGCTATCAATCTATTAAAACACTATCTATTTTTGGTAATAAATTAATTAATTTTGGTATAATAATGGAGATTTTAGCATTTTTAGTCTTAGTATACGTGCCACTATTCCATAACTTATTCAACACAGCAAGCCTAGGTTTATCACATTGGCTCTATTTAATAGGCTGCCCGTTTATCATGATAGGTTTAGATGAAGTTCGGAAATTATTCAGCAGTAGAAAGAATAAACGG

SEQ ID NO: 6234 - protein, 930 aa, Streptococcus agalactiae
MASTNNVSDTNTCFAKEELEEIFEELGTTQGGLSDEEVAVRQKKYGLNLLSEVEQESIILLFLKNFTSLMAILLWVGGFVAIVSNSLELGLAIWMVNVINGIFSFIQEYRASQATQALKKMLPSYSRVLRKSSEEKILSEQLVPGDIVLIEEGDRISADGRLIKTTDLQVNQSALTGESNPIYKDSNVENDQSKTLIECDNMVFAGTTVSSGSATMVVTAIGMQTQFGQIADLTQGMKSEKSPLQRELDRLTKQISIISITVGIIFFLAATFFVKEPVSKSFIFALGMIVAFIPEGLLPTVTLSLAMAVQRMAKEHALVKKLSSVETLGATSVICSDKTGTLTQNEMTVNHLWQNGKSYQVTGLGYAPEGQILFEGDNICFGNSDRGDLEKLIRFAHLCSNAQVLPPNDERSTYTVLGDPTEACLNVLLEKSGINRQENRKFAPRLKELPFDSVRKRMTTIHSLGGDEKDKKISITKGAPKEILDLSDYVLSDGKVIPLNKEERNKIQLANDTFAKDGLRVLAVSYCDIEGFSKEQWTQENLEQHMVFIGLIAMSDPPREGVREAIDKCHAASIRIIMVTGDYGLTALSIAKNIGIIRNDGAKVISGLELSEMTDSQLKKELSGEAVFARVAPEQKYRVVTILQEMGEVVAVTGDGVNDAPALKKSDIGVAMGVTGTDVAKESADMILTDDHFASIVHAVEEGRAVYQNIKKFLTYIFNSNTPEAVPSAFFLFSKGFIPLPLTVMQILAVDLGTDMLPALGLGVEPPETDVMNRPPRRLTDRLLDKGLLIKSFLWYGTIESVLAMGGFFWAHYLRYGNFTFFVANGIPYREATTMTLGAIIFSQIGMVMNSRTSYQSIKTLSIFGNKLINFGIIMEILAFLVLVYVPLFHNLFNTASLGLSHWLYLIGCPFIMIGLDEVRKLFSSRKNKR

SEQ ID NO: 6235 - protein, 1101 aa, Streptococcus agalactiae
ATGTCAAATATAATAACTTATTTAAAAAATAATTCAAACTTAACTTTTGATGAATTAGCATTAAACGATGTTGACATTCTTTGTTTAAATGAATTTGGCTATATTTCTTTTGAAAAACTTATAAACACTACAGAAATGAAGTCAGTTTTAGTCTGTGAGTTATATCATGAGTACCTTCAAACTATGGCTAAATCATATAGCTTTATGTTCACGTCACAACGACATGATTTATGTCAGTTAATGATGACCTCGAAACGTTTTAAAAACTTAACTTTATCTTATTATCGAGCTGAGATTAGTTTAGAATTTGAAAAACAATTTGCAGCTATGGTTTTTACTATTCCTAACATTAATTATCATCAGGTTGTATTTCGTGGTACTGATGCCAACCTTATTGGTTGGAAAGAAGATTTTAAATTGACGTATATGAGAGAAATATCGGCTCATCGTTCAGCGATTAAATACTTAAATACAATATTGCCTTATTTTGATAAAGTAGTTCTCTCAGGTCATTCTAAGGGTGGTAATTTAGCCTTGTACGCTGCAATGTTTACAAAGCCAGATTTAAAAGCAAAAATTGATTTGATTTGGCTTATTGACTCCCCAGGACTACAAAAAACTTTGTTACCTACTACAGAGTATAAAACTACTAAACAAAAGTGCATTCGCTTACTACCAGAAGAATCTATTGTTGGTATGATGCTTTATAGTGATATAGAGCCGCTAATTATTAGTAGCAATGCGCGTGGAATTCTGCAACACGATGTTACAACTTGGGAAATTCAAGAACCAGCTATTTTAAAGACTGGAACAGGACTATCGCTAAAAAGTATTTGTTTTGAAAAGACATTTCAACAGTGGATGGCTGAATTAAAAAGTCAAGAAAGAAAATTATTTTTTGATTTATTATTTGATAGCTTCCTATCAAGTGGCGTATCTAGTTTGGATGACTTCAACTTGGCTTCCAGAGCAAAAATGATGAAAGCTTTTCATAGCTTTAGAGAACTAGATGATGATAAAAAAAGGTTATTTAACAAATCTTTAAAATTATTAGTAACCATATTTTTGGGAGCTTATCATGATAATAGCAGAGAGACTAAG

SEQ ID NO: 6236 - protein, 367 aa, Streptococcus agalactiae
MSNIITYLKNNSNLTFDELALNDVDILCLNEFGYISFEKLINTTEMKSVLVCELYHEYLQTMAKSYSFMFTSQRHDLCQLMMTSKRFKNLTLSYYRAEISLEFEKQFAAMVFTIPNINYHQVVFRGTDANLIGWKEDFKLTYMREISAHRSAIKYLNTILPYFDKVVLSGHSKGGNLALYAAMFTKPDLKAKIDLIWLIDSPGLQKTLLPTTEYKTTKQKCIRLLPEESIVGMMLYSDIEPLIISSNARGILQHDVTTWEIQEPAILKTGTGLSLKSICFEKTFQQWMAELKSQERKLFFDLLFDSFLSSGVSSLDDFNLASRAKMMKAFHSFRELDDDKKRLFNKSLKLLVTIFLGAYHDNSRETK

SEQ ID NO: 6237 - protein, 567 aa, Streptococcus agalactiae
ATGAGTACTGGTGCCAGTTACCCTAAATATAGATTCTCGGTAGGAAAGTACACATATGGATATCAACAATTCTTTTACGAAGGCGTTAACTTAAAAGAAATTGGAGCATTTTGCTCAATAGCCCAGAACGTTACTATTACTGGTATGAATCATCCAACCGATCACATTACCACTAACCCTTTTATTTACTATAAGTCAAGGGGATTTATAAATGAGGATAGGGCGGACTTAATAGATGAAAAGAAAAATGGAAAAGTTATTATTGGCAACGATGTCTGGATAGGAACTAATGTCACTATACTTCCATCTGTTACAATAGGTAATGGAGCAATTATTGGAGCAGGTTCAGTTATTACCAAAGACATTCCTGACTATGCTGTTGTCGCTGGAACACCTGCTAAAATTATCAAATATCGCTTTTCAGAGGAAGAAATAACATTATTAAATGCATCTCAGTGGTGGAATTGGTCAGATGAAGCTATTAAGGAACATATTAGCGAATTTTCAGATAAGAAGGAATTCTTCAATACTCTAAAAAGTATTTCCGAAAACAAAAATCATAAACTC

SEQ ID NO: 6238 - protein, 189 aa, Streptococcus agalactiae
MSTGASYPKYRFSVGKYTYGYQQFFYEGVNLKEIGAFCSIAQNVTITGMNHPTDHITTNPFIYYKSRGFINEDRADLIDEKKNGKVIIGNDVWIGTNVTILPSVTIGNGAIIGAGSVITKDIPDYAVVAGTPAKIIKYRFSEEEITLLNASQWWNWSDEAIKEHISEFSDKKEFFNTLKSISENKNHKL

SEQ ID NO: 6239 - protein, 609 aa, Streptococcus agalactiae
ATGAATATGAAATTATCAAAACGTTACCGCTTTTGGCAGAAGGTCATTAAGGCTTTGGGTGTCTTAGCGTTAATAGCGACCCTTGTCTTAGTTGTTTATTTGTACAAACTTGGTATTTTGAATGATAGCAATGAATTAAAAGACCTAGTACACAAGTATGAATTTTGGGGTCCAATGATTTTTATTGTGGCTCAAATTGTACAGATTGTTTTTCCAGTAATTCCTGGAGGTGTTACAACAGTAGCAGGTTTCTTAATTTTTGGTCCTACCTTAGGCTTTATTTATAACTATATTGGGATTATCATCGGAAGTGTCATCCTTTTTTGGTTAGTCAAATTTTATGGACGAAAATTCGTTTTGCTATTTATGGATCAGAAGACATTTGATAAATATGAGTCTAAGCTAGAAACATCCGGATATGAAAAGTTTTTTATCTTTTGTATGGCATCTCCCATTTCACCAGCGGACATCATGGTGATGATTACCGGTCTATCTAATATGTCTATTAAGCGCTTTGTGACAATCATTATGATAACGAAACCTATTTCTATCATCGGTTATAGCTATTTGTGGATTTATGGTGGTGATATTTTGAAAAATTTTTTGAAT

SEQ ID NO: 6240 - protein, 203 aa, Streptococcus agalactiae
MNMKLSKRYRFWQKVIKALGVLALIATLVLVVYLYKLGILNDSNELKDLVHKYEFWGPMIFIVAQIVQIVFPVIPGGVTTVAGFLIFGPTLGFIYNYIGIIIGSVILFWLVKFYGRKFVLLFMDQKTFDKYESKLETSGYEKFFIFCMASPISPADIMVMITGLSNMSIKRFVTIIMITKPISIIGYSYLWIYGGDILKNFLN

SEQ ID NO: 6241 - protein, 780 aa, Streptococcus agalactiae
ATGTTTGGAAAATTATTAAAATATGAATTAAAATCAGTTGGTAAGTGGTATCTAACACTCAACGCTGCGGTTTTATTAGTATCTATTATTTTAGGACTGGTATTAAAGGCACTTGGCGGCAATGTTTCTACTGATACTAATAGTACTAGCGCCCAAATATTCACTATAATACTCGTTTTATTGTTAGCGATGGTTATTTCAGGATCTCTGTTATCCACCCTTGCTATTATTATCAAACGTTTTTATAGCAATATCTTCGGCCGTCAAGGATATCTAACCTTAACGCTCCCAGTAACTACGAATCAGATTATTTGTTCAAAGCTACTAGCTTCTCTTCTTTGGAGTATTTTTAATATTTTTATTGTCATTATTGGAATCATATTGGTCATATTACCTTTAGTAGGTATTGGTCAGTTCGTTGTCGCTTTTCCAGAAATCTATAAAATTATTTCATCTTCGAACGCTCCACTTTTTATCGCCTATTTCTTTCTATCGTACGTTGCAGGGACATTACTGATTTATCTCTCTATCGCTGTAGGGCAATTATTTACAAACAAACGTGTATTGATGGGAATTGTTTCTTATTTTGGAATATCACTCTTAATTACTTTCTTAACATTAATAATAGATAGTATTTTTCATATTGATTTATTCAACTCTCATGCAAATGCAACATTCTCTCAACCTGTATTGCTCTACAATATACTTGTTAGCATTGTTGAAATTGCTATATTCTATATGTTGACACACTCTATTATTAAGTACAAACTTAATATACAA

SEQ ID NO: 6242 - protein, 260 aa, Streptococcus agalactiae
MFGKLLKYELKSVGKWYLTLNAAVLLVSIILGLVLKALGGNVSTDTNSTSAQIFTIILVLLLAMVISGSLLSTLAIIIKRFYSNIFGRQGYLTLTLPVTTNQIICSKLLASLLWSIFNIFIVIIGIILVILPLVGIGQFVVAFPEIYKIISSSNAPLFIAYFFLSYVAGTLLIYLSIAVGQLFTNKRVLMGIVSYFGISLLITFLTLIIDSIFHIDLFNSHANATFSQPVLLYNILVSIVEIAIFYMLTHSIIKYKLNIQ

SEQ ID NO: 6243 - protein, 696 aa, Streptococcus agalactiae
ATGACACAGTTATTACAACTTCATCATGTTACAAAGAAATATCACAAACATACTGCTGTTAATGATGTGACTGTAAGTATTCCAACAGGAAAGATTATAGGTTTATTAGGTCCAAATGGTAGCGGAAAAACAACAATCATCAAAATGATAAATGGATTACTTCAGCCAGATAAGGGAGATATCGTTATTGATGGTTACAGACCGTCTGTTGAAACCAAAAAAATTATTTCATATCTCCCTGATACTTCATATTTACAAGAAAATATGAAAATCAAAGACGTCGTTACATTATTTGAAGATTTCTATAACGATTTTGATTCAAAGGTAGCATATCAACTATTTGAGGATCTTAACCTAAATCCTAGGGAACGTCTAAAAAACCTATCAAAAGGGAACAAGGAAAAAGTTCAATTAATACTTGTTATGAGTCGTAAAGCTAGGCTCTACATCCTTGATGAACCTATTGGTGGTGTAGACCCTGCAGCGCGTGACTACATTTTAAAAACAATCATTAGTAACTACTCTAATGATGCTTCTGTTTTAATTTCGACTCACTTAATTTCTGACATTGAACCTATCCTTGATGAAGTTATCTTCCTTAAAGAAGGAGAAATTGACCTACAAGGCAATGCTGATGACTTAAGAGAAGAGCACAACTGTTCGATTGATGCTCTCTTTCGTGAAAGATTCAAGAAA

SEQ ID NO: 6244 - protein, 232 aa, Streptococcus agalactiae; identical to SEQ ID NO: 1754

SEQ ID NO: 6245 - protein, 366 aa, Streptococcus agalactiae
ATGGCTTGGGAATTCAATGAAAAATCACCTATTTATTCACAAATTGCTGAACATATAAAGATGCAAATTGTTAGTCAAGAAATAAAAAGTGGTGACCAATTGCCTACCGTGAGAGAGTTAGCTCAAGAAGCTGGTGTTAACCCAAATACCATGCAACGTGCCTTCACTGAATTGGAACGTGAAGGAATGGTATTCTCACAACGTACTTCCGGACGCTTTGTTACAGAAGACAACTTACTAATTGGTAAAATTCGTCAACAAGTTGCAAAAGCAGAGTTAGCAACTTTTGTCAACAACATGAAAAAAATAGGATATAAATTAGATGAAATTACGGTTGCTCTCGATCATTTTATAAAGGAGATTAAT

SEQ ID NO: 6246 - protein, 122 aa, Streptococcus agalactiae
MAWEFNEKSPIYSQIAEHIKMQIVSQEIKSGDQLPTVRELAQEAGVNPNTMQRAFTELEREGMVFSQRTSGRFVTEDNLLIGKIRQQVAKAELATFVNNMKKIGYKLDEITVALDHFIKEIN

SEQ ID NO: 6247 - protein, 3102 aa, Streptococcus agalactiae
ATGTTTGCACAACTTGATACAAGAACCGTTTATTCTTTTATGGATAGCTTGGTTGATTTAAAGACATATGTCTCTAAATCGAAATCATTAGGATATCAAACTATTGGTATCTTGGACCACAGTAATCTTTATGCAGCATATCATTTTATTCAAGAGGCGCAAAAGGCAAACCTAAGACCAATAGTTGGATTTAGCTTTGATATAGTGGTTGAAAATAGATCAATAGAAGTTTACTGTATTGCGATAAATACAGTTGGTTATAAGAATCTCTTGAAGTTGTCAACGGCTCAAATGTCTGAGAAGATGTCTCTAAATTTATTGACAGAACATCTTGAAGGGGTGCAATTGATTCTTCCCTATCAAGATGTTCTTGATCAGCTCAATTTACCCTTTGATTATGTTATTGGTGTTAATTTGACCTCTCCGCAGATTCCATATACCAAACCCATTATAGCCATAGATACTGTTCGATATTTTCAAAAAAATGATATTGAGACATTACAGATGCTTCATGCTATAAGAGATAATGTCCTGTTAAAAGACGCACAATATGCGAGCAAAAATCAAGAATTAAAACCTTGTCAAGAAATGACTCTAGCATTCAAGGAACGTTTTCCTGAAGCTTTAGCTAACCTAGAATCTTTGGTAGAGAATGTTGCTTATCACTTTGATTCTGACTTTAAGTTACCTATTTTTAATAGAGAAATTCCTGCTGGAGAAGAATTAAGAACCTTAACTCAAAATAACTTAAAAAGTAAAGGTTTATGGAGCGATGCTTATCAAGAGCGTCTCGAAAAAGAATTAACAATCATTCACAAAATGGGCTTTGATGACTATTTCCTTATTGTGTGGGATTTATTAAGATTTGGTCGTAGTAAGGGCTACTATATGGGAATGGGACGTGGTTCAGCAGCGGGAAGTTTAGTCTCATATGCTTTAAATATTACCGGTATCGATCCTGTCAAACATAATTTAATTTTTGAACGTTTTTTAAATGAAGAGCGTTATTCGATGCCAGATATTGATATTGATCTTCCGGATATTTATCGTGGAGAATTCTTGCGCTATGTACGTAATCGATATGGTTCAATGCATTCTGCACAGATTGTAACCTTCTCAACTTTTGGTGCGAAACAGGCTATTCGAGATGTTTTTAAACGCTTTGGTGCATCAGAGTATGAGTTAACAAACATAACTAAAAAAATTCATTTCAGAGATAATTTGACCAGTGTTTATAACCGCAACTTAGCTTTCAGACAAATAATAGATAGTAAAATTGAATACCAAAAAGCCTATGATATTGCTAAGCGTATTGAAGGAAATCCTAGACAGACTTCTATTCATGCCGCTGGGGTAGTAATGAGTGACGATTTGTTAACAGATCATATTCCTTTAAAAAACGGTGAGGATATGATGATAACGCAATATGATGCTAGTTCTGTTGAGGATAATGGTCTTCTAAAAATGGACTTTCTAGGTCTTCGAAATTTGACATTTGTTCAGAAAATGAAGGAGAAAGTCGATAAGGACTACGGTATCTCTATACAATTAGAAACTATTGATTTAGAAGATAAAGAGACTCTAAAACTATTTGCAGCTGGTCAAACAAAGGGGATTTTTCAATTTGAGCAAAGTGGAGCTATTAATTTGTTGCGACGTATTAGGCCAGAGTGTTTTGAAGATGTGGTAGCTACCACCAGCTTGAATAGGCCTGGTGCAAGTGATTATACTGAGAATTTTATAAACCGTCGTTTTGGTAAAGAAAAAATCGATTTAGTAGATCCTGTCATAGCTCCAATTTTACAACCTACCTATGGCATAATGCTCTATCAAGAACAGGTTATGCAGATTGCCCAGACCTACGCAGGTTTTACGCTAGGCAAGTCTGATTTGCTCAGACGTGCTATGTCTAAGAAAAATTCTAAGGAGATGCAAAAGATGTCTCAATCCTTCTTAGAGGGTGCAGTATCTAAGGGACATCGTCAAGAAGATGCTCGACTTATATTTGAACGCATGGCTAAATTTGCAGGTTATGGGTTTAATCGCAGCCATGCGTTTGCTTATTCGGCTTTAGCTTTTCAATTAGCCTATTTCAAAGCCCATTATTCCGATGTCTTTTATGACATCATGATAAATTATTCAAATAGTGATTATCTAATCGATGCTATTGATTTTGGTTTTGTTATTGAAAAACCTTCAATTAATACTATTTCATACAGAGACCGCATCTATAAAAAGAAAATTTATTTAGGTTTAAAAAATATTAAGGGTGTTCCTAACGATTTGGCTTATTGGATTTCTAAAAATCAACCGTTTCAGAGTATTGAAGATTTTCTAATGAGGCTGCCACAGCAGTTTCAAAAAAGTGGTTTTATTTCTCCGCTAATTGCTATTGGAGCATTTGACGAATTTGATAATAATAGACGGAAAATCACCTCTAATCTTGATTCTTTATTTACATTTGTAAATGAACTAGGTAGTTTATTTGCAGATACCTCATATCATTGGCTAGAAGTAGAAGATTTCTCTAATTCTGAGAAATATGAAATGGAACAAGATATCTTAGGAGTAGGAATCAGCCCGCACCCTTTAGTGGGGATTTCACAAAAAGCTAGCCGTCCGTTTATACCAATTAGTCAAGTTCAAGAAAATAGCGAAGCTACTATTTTAGTTCAGCTAAAGCAGGTCAAAGTTATTAGGACAAAAAGTTCTGGGCAACAAATGGCTTTCTTGACTGTTATGGATATTAATTCAAAAATGGATATTACTGTTTTTCCTGAAACTTTCAATATTGTAAGAGATGATTTACAAGAAGGGAAATATTATTACTTGCATGGAAAAATTCAGAAGCGAGATGAGCGATTACAGATGGTTTTAAACGGTGTTCAAGAAGCAACGGAGGAACGTTTTTGGATACTTCTAAAAAATCATGATAACGACAAAAAAATATCGGAAATATTGTCCAAATATAAAGGGCATATTCCTGTCTATTTGCATTATGAAACAACTAAAGAAACTATCCAAAGCAAAGTACATTTGGTTAGAAAAGATAGTGGCTTAGCCCTTGATTTATCTGAATTTGTTGTGAAAACGGTTTATCAA

SEQ ID NO: 6248 - protein, 1034 aa, Streptococcus agalactiae
MFAQLDTRTVYSFMDSLVDLKTYVSKSKSLGYQTIGILDHSNLYAAYHFIQEAQKANLRPIVGFSFDIVVENRSIEVYCIAINTVGYKNLLKLSTAQMSEKMSLNLLTEHLEGVQLILPYQDVLDQLNLPFDYVIGVNLTSPQIPYTKPIIAIDTVRYFQKNDIETLQMLHAIRDNVLLKDAQYASKNQELKPCQEMTLAFKERFPEALANLESLVENVAYHFDSDFKLPIFNREIPAGEELRTLTQNNLKSKGLWSDAYQERLEKELTIIHKMGFDDYFLIVWDLLRFGRSKGYYMGMGRGSAAGSLVSYALNITGIDPVKHNLIFERFLNEERYSMPDIDIDLPDIYRGEFLRYVRNRYGSMHSAQIVTFSTFGAKQAIRDVFKRFGASEYELTNITKKIHFRDNLTSVYNRNLAFRQIIDSKIEYQKAYDIAKRIEGNPRQTSIHAAGVVMSDDLLTDHIPLKNGEDMMITQYDASSVEDNGLLKMDFLGLRNLTFVQKMKEKVDKDYGISIQLETIDLEDKETLKLFAAGQTKGIFQFEQSGAINLLRRIRPECFEDVVATTSLNRPGASDYTENFINRRFGKEKIDLVDPVIAPILQPTYGIMLYQEQVMQIAQTYAGFTLGKSDLLRRAMSKKNSKEMQKMSQSFLEGAVSKGHRQEDARLIFERMAKFAGYGFNRSHAFAYSALAFQLAYFKAHYSDVFYDIMINYSNSDYLIDAIDFGFVIEKPSINTISYRDRIYKKKIYLGLKNIKGVPNDLAYWISKNQPFQSIEDFLMRLPQQFQKSGFISPLIAIGAFDEFDNNRRKITSNLDSLFTFVNELGSLFADTSYHWLEVEDFSNSEKYEMEQDILGVGISPHPLVGISQKASRPFIPISQVQENSEATILVQLKQVKVIRTKSSGQQMAFLTVMDINSKMDITVFPETFNIVRDDLQEGKYYYLHGKIQKRDERLQMVLNGVQEATEERFWILLKNHDNDKKISEILSKYKGHIPVYLHYETTKETIQSKVHLVRKDSGLALDLSEFVVKTVYQ

SEQ ID NO: 6249 - protein, 1020 aa, Streptococcus agalactiae
ATGAAACGTATTGCTGTTTTAACTAGTGGTGGTGACGCCCCTGGTATGAACGCTGCTATCCGTGCAGTTGTTCGTAAAGCAATTTCTGAAGGTATGGAAGTTTACGGCATCAACCAAGGTTACTATGGTATGGTGACAGGGGATATTTTCCCTTTGGATGCTAATTCTGTTGGGGATACTATCAACCGTGGAGGAACGTTTTTACGTTCAGCACGTTATCCTGAATTTGCTGAACTTGAAGGTCAGCTTAAAGGGATTGAACAGCTTAAAAAACACGGCATTGAAGGTGTAGTAGTTATCGGTGGTGATGGTTCTTATCATGGTGCTATGCGTCTAACTGAGCACGGTTTCCCAGCTGTTGGTTTGCCGGGTACAATTGATAATGATATCGTTGGCACTGACTATACTATTGGTTTTGACACAGCAGTTGCGACAGCAGTTGAGAATCTTGACCGTCTTCGTGATACATCAGCAAGTCATAACCGTACTTTTGTTGTTGAGGTTATGGGAAGAAATGCAGGAGATATCGCTCTTTGGTCAGGTATCGCTGCAGGTGCAGATCAAATTATTGTTCCTGAAGAAGAGTTCAATATTGATGAAGTTGTCTCAAATGTTAGAGCTGGCTATGCAGCTGGTAAACATCACCAAATCATCGTCCTTGCAGAAGGTGTTATGAGTGGTGATGAGTTTGCAAAAACAATGAAAGCAGCAGGAGACGATAGCGATCTTCGTGTGACGAATTTAGGACATCTGCTCCGTGGTGGTAGTCCGACTGCTCGTGATCGTGTCTTAGCATCTCGTATGGGAGCGTACGCTGTTCAATTGTTGAAAGAAGGTCGTGGCGGTTTGGCCGTTGGTGTCCACAACGAAGAAATGGTTGAAAGTCCAATTTTAGGTTTAGCAGAAGAAGGTGCTTTGTTCAGCTTGACTGATGAAGGAAAAATCGTTGTTAATAATCCGCATAAAGCGGACCTTCGCTTGGCAGCACTTAATCGTGACCTTGCCAACCAAAGTAGTAAA

SEQ ID NO: 6250 - protein, 340 aa, Streptococcus agalactiae; identical to SEQ ID NO: 1760

SEQ ID NO: 6251 - protein, 1296 aa, Streptococcus agalactiae
ATGGCTACTGTTCGTAAAGCAGAAGAGATTGCAGGACAAAAAGTTGGCTTCCTCCTTGATACTAAAGGACCTGAAATTCGTACAGAACTTTTTGAAGATGGTTCAGATTTCCATTCATATACAACAGGTACAAAATTACGTGTTGCTACTAAGCAAGGTATCAAATCAACTCCAGAAGTGATTGCATTGAATGTTGCTGGTGGACTTGACATCTTTGATGACGTTGAAGTTGGTAAGCAAATCCTTGTTGATGATGGTAAACTAGGTCTTACTGTGTTTGCAAAAGATAAAGACACTCGTGAATTTGAAGTAGTTGTTGAGAATGATGGCCTTATTGGTAAACAAAAAGGTGTAAACATCCCTTATACTAAAATTCCTTTCCCAGCACTTGCAGAACGCGATAATGCTGATATCCGTTTTGGACTTGAGCAAGGACTTAACTTTATTGCTATCTCATTTGTACGTACTGCTAAAGATGTTAATGAAGTTCGTGCTATTTGTGAAGAAACTGGCAATGGACATGTTAAGTTGTTTGCTAAAATTGAAAATCAACAAGGTATCGATAATATTGATGAGATTATCGAAGCAGCAGATGGTATTATGATTGCTCGTGGTGATATGGGTATCGAAGTTCCATTTGAAATGGTTCCAGTTTACCAAAAAATGATCATTACTAAAGTTAATGCAGCTGGTAAAGCAGTTATTACAGCAACAAATATGCTTGAAACAATGACTGATAAACCACGTGCGACTCGTTCAGAAGTATCTGATGTCTTCAATGCTGTTATTGATGGTACTGATGCTACAATGCTTTCAGGTGAGTCAGCTAATGGTAAATACCCAGTTGAGTCAGTTCGTACAATGGCTACTATTGATAAAAATGCTCAAACATTACTCAATGAGTATGGTCGCTTAGACTCATCTGCATTCCCACGTAATAACAAAACTGATGTTATTGCATCTGCGGTTAAAGATGCAACACACTCAATGGATATCAAACTTGTTGTGACAATTACTGAAACAGGTAATACAGCTCGTGCCATTTCTAAATTCCGTCCAGATGCAGACATTTTGGCTGTTACATTTGATGAAAAAGTACAACGTTCATTGATGATTAACTGGGGTGTTATCCCTGTCCTTGCAGACAAACCAGCATCTACAGATGATATGTTTGAGGTTGCAGAACGTGTAGCACTTGAAGCAGGACTTGTTGAATCAGGCGATAATATCGTTATCGTTGCAGGTGTTCCTGTAGGTACAGGTGGAACTAACACAATGCGTGTTCGTACTGTTAAA

SEQ ID NO: 6252 - protein, 432 aa, Streptococcus agalactiae
MATVRKAEEIAGQKVGFLLDTKGPEIRTELFEDGSDFHSYTTGTKLRVATKQGIKSTPEVIALNVAGGLDIFDDVEVGKQILVDDGKLGLTVFAKDKDTREFEVVVENDGLIGKQKGVNIPYTKIPFPALAERDNADIRFGLEQGLNFIAISFVRTAKDVNEVRAICEETGNGHVKLFAKIENQQGIDNIDEIIEAADGIMIARGDMGIEVPFEMVPVYQKMIITKVNAAGKAVITATNMLETMTDKPRATRSEVSDVFNAVIDGTDATMLSGESANGKYPVESVRTMATIDKNAQTLLNEYGRLDSSAFPRNNKTDVIASAVKDATHSMDIKLVVTITETGNTARAISKFRPDADILAVTFDEKVQRSLMINWGVIPVLADKPASTDDMFEVAERVALEAGLVESGDNIVIVAGVPVGTGGTNTMRVRTVK

SEQ ID NO: 6253 - protein, 555 aa, Streptococcus agalactiae
ATGGTTAAACGCGATTTTATTAGAAATATTATTTTAGCATTGATTGCTGTATTGATTTTGATTCTCTTGAGATATTTTGTTTTTGCAACCTTTAAAGTACATAAGGATGCTACAAATTCTTATTTTAGCAACGGAGATGTTGTTGTTGTTAATCGTAATAGGACGCCTAAGTACAAAGACTTTATTGTCTATAAGGTTGGAAAGATTTTCTATATTAGTCGTGTTATTGGTGAGCCAAATCAAAAAGTGAGAGTAATGGATGATATTTTATATTTGAATGATGTTTTCAAGGATGAGCCTTACATTGAAAAAATGAAAAATGCTTATTCTGAAAAGAAAGACGGTCAAATGCCCTTTACTTCCGACTTCTCAGTTGAAACATTAACACGAAATAAAGAAAGCAGAGTTCCTAAGGGTTCTTATCTTGTGTTAAATGATAATCGACAAAATAAAAATGATAGTCGAAAATTTGGATTAATCAAAGAGAAAGATATTCGTGGTGTTATTACCTTTAAAGTATACCCTCTAAGTGAATTTGGTTTTACAGCATCAGAG

SEQ ID NO: 6254 - protein, 185 aa, Streptococcus agalactiae; identical to SEQ ID NO: 1764

SEQ ID NO: 6255 - protein, 129 aa, Streptococcus agalactiae
TTGATACCATTCTTTTTATGTAATAAAATGGCTAAGATTAAGATAGATAGAATTTTTGATAGCGTTTATCTCGTTATCACAGAAAATCAAAAAGACTATACCAATTTTTTTATTGACAAACAAAAACAT

SEQ ID NO: 6256 - protein, 43 aa, Streptococcus agalactiae
MIPFFLCNKMAKIKIDRIFDSVYLVITENQKDYTNFFIDKQKH

SEQ ID NO: 6257 - protein, 1812 aa, Streptococcus agalactiae
ATGTGTGGTATCGTAGGTGTAGTTGGAAATACAAATGCAACGGATATTTTAATTCAAGGCTTAGAAAAGCTAGAGTACCGAGGATATGACTCAGCAGGTATTTTTGTAGTAGGTGATAACAAAAGTCAACTTGTGAAGTCAGTCGGTCGAATCGCGGAGCTTCAGGCAAAAGTAGGAGATTCTGTTAGTGGTACGACAGGTATCGGTCATACACGTTGGGCAACCCATGGTAAACCTACTGAAGGAAATGCACATCCTCACACTTCAGGATCTGGTCGTTTTGTATTGGTACACAATGGTGTTATTGAAAATTACCTTCAAATTAAAGAAACTTACTTAACAAAACATAACCTCAAGGGTGAAACTGATACAGAAATAGCTATTCATTTAGTTGAACACTTTGTTGAAGAAGATAACTTATCAGTGCTTGAAGCCTTTAAAAAAGCCTTACATATTATAGAAGGATCATACGCATTTGCTCTTATTGATTCTCAAGATGCTGATACGATTTACGTAGCTAAAAATAAATCACCTCTTCTAATAGGTTTGGGAAATGGTTATAATATGGTGTGTTCAGATGCCATGGCTATGATACGTGAGACAAGTGAATATATGGAGATCCACGATAAAGAACTCGTTATTGTTAAAAAAGATAGCGTTGAAGTTCAAGATTATGATGGTAATGTCATTGAACGTGGTAGCTACACAGCAGAGCTTGACTTATCAGATATTGGTAAGGGGACTTATCCATTCTACATGCTTAAAGAAATTGATGAGCAACCAACTGTGATGCGTAAGTTGATTTCAACTTATGCGAACGAATCTGGAGATATGAATGTGGATTCTGATATTATAAAATCAGTCCAAGAAGCAGATCGTCTTTACATATTGGCTGCAGGGACGTCATATCATGCTGGTTTTGCTGCTAAGACCATGATCGAAAAATTAACTGACACACCTGTTGAACTTGGAGTTTCTTCAGAATGGGGTTACAACATGCCACTTTTGAGTAAGAAGCCAATGTTTATTTTACTTAGTCAATCGGGAGAAACAGCAGATAGTAGACAAGTTTTAGTTAAAGCAAACGAAATGGGAATCCCTAGTTTAACTATAACAAATGTGCCTGGCTCAACACTTTCTCGTGAAGCAACCTATACGATGCTCATTCATGCAGGACCTGAAATCGCTGTCGCTTCTACAAAAGCATATACTGCTCAAGTTGCAACGTTAGCTTTCTTAGCAAAAGCGGTAGGAGAAGCAAATGGTAAGGCAGAAGCAAAAGATTTTGATTTGGTTCATGAATTGTCAATTGTAGCACAATCAATTGAAGCGACCTTATCAGAAAAAGATGTTATCTCTGAGAAAGTAGAGCAGTTGTTAATCTCGACACGTAATGCCTTCTACATTGGTCGTGGTAACGACTATTATGTTACAATGGAGGCTGCACTGAAGCTAAAAGAGATTTCTTATATTCAGACAGAAGGTTTTGCTGCAGGTGAATTAAAACATGGTACAATTTCGTTGATTGAAGACAATACTCCTGTTATTGCTTTAATATCTGCTGATTCAACTATTGCAGCGCATACTCGTGGAAATATCCAAGAAGTTGTTTCTCGCGGAGCAAATGCTTTGATTATTGTAGAAGAAGGGTTGGAACGTGAAGGTGATGATATTATTGTTAATAAAGTTCACCCATTCTTATCAGCCATTTCAATGGTTATTCCGACTCAATTAATTGCTTACTATGCTTCATTACAACGTGGTTTAGATGTTGATAAACCACGTAACTTGGCAAAAGCTGTAACTGTTGAA

SEQ ID NO: 6258 - protein, 604 aa, Streptococcus agalactiae
MCGIVGVVGNTNATDILIQGLEKLEYRGYDSAGIFVVGDNKSQLVKSVGRIAELQAKVGDSVSGTTGIGHTRWATHGKPTEGNAHPHTSGSGRFVLVHNGVIENYLQIKETYLTKHNLKGETDTEIAIHLVEHFVEEDNLSVLEAFKKALHIIEGSYAFALIDSQDADTIYVAKNKSPLLIGLGNGYNMVCSDAMAMIRETSEYMEIHDKELVIVKKDSVEVQDYDGNVIERGSYTAELDLSDIGKGTYPFYMLKEIDEQPTVMRKLISTYANESGDMNVDSDIIKSVQEADRLYILAAGTSYHAGFAAKTMIEKLTDTPVELGVSSEWGYNMPLLSKKPMFILLSQSGETADSRQVLVKANEMGIPSLTITNVPGSTLSREATYTMLIHAGPEIAVASTKAYTAQVATLAFLAKAVGEANGKAEAKDFDLVHELSIVAQSIEATLSEKDVISEKVEQLLISTRNAFYIGRGNDYYVTMEAALKLKEISYIQTEGFAAGELKHGTISLIEDNTPVIALISADSTIAAHTRGNIQEVVSRGANALIIVEEGLEREGDDIIVNKVHPFLSAISMVIPTQLIAYYASLQRGLDVDKPRNLAKAVTVE

SEQ ID NO: 6259 - protein, 327 aa, Streptococcus agalactiae
ATGTCATTACCAAATTGCCCTAAGTGTAACTCTGAATATGTCTATGAAGACGGTATTTTACTGGTTTGTCCAGAATGTGCTTACGAGTGGAATCCAGAAGAAGTCGAAGAAGAAGTAGGTTTAATTGTATTGGATAGCAATGGAACTCGCTTATCAGATGGAGATACTGTGACAGTTATTAAGGATTTAAAAGTAAAAGGAGCGCCTAAGGATATTAAGCAAGGCACTCGTGTTAAAAATATTCGTTTAGTTGATGGCGATCATAATATCGATTGTAAAATTGATGGTTTTGGAGCTATGAAACTAAAATCTGAGTTTGTAAAAAAA

SEQ ID NO: 6260 - protein, 109 aa, Streptococcus agalactiae
MSLPNCPKCNSEYVYEDGILLVCPECAYEWNPEEVEEEVGLIVLDSNGTRLSDGDTVTVIKDLKVKGAPKDIKQGTRVKNIRLVDGDHNIDCKIDGFGAMKLKSEFVKK

SEQ ID NO: 6261 - protein, 639 aa, Streptococcus agalactiae
ATGTCTTATATTTTAGAAATCTTACCTAGCTTATTAGTAGGTGCGCAAGTAACATTGCAAGTTTTCTTTATTGTTATTTGTTTATCAATTCCACTTGGTATTGTTGTAGCCTTCCTAATGAAAGTTCATTTTAAGCCGCTTCAATGGCTACTGACAACTTATATTTGGATTATGCGAGGCACGCCTCTGTTATTACAGCTTATCTTTTTTTATTACTTTTTACCAAGTGTAGGGATTTCTTTTGATCGTATGCCAGCTGCTATTATTGCTTTTACGATGAATTATGCAGCTTATTTTGCAGAGATTTTTCGAGGAGGTATTGAGTCTATTCCTAAAGGGCAATATGAAGCTGCAAAGGTATTAAAGTTTTCTAAGTTTCAAACGGTTTGGTACATAGTATTACCTCAAGTCTTCAAAATAGTCTTACCGAGTGTTTTCAATGAAACGATTACTTTAGTGAAAGATTCCTCATTGGTTTACATACTTGGTGTGGGCGACTTACTTCTAGAAAGTAAGACAGCCGCAAATAGGGATGCAACACTTGCACCAATGTTTATAGCAGGTGGTATTTACCTATTATTAATTGGTCTTTTAACTATTTTATCTAAACAAGTTGAAAAGCGTTTTAACTACTATAAA

SEQ ID NO: 6262 - protein, 213 aa, Streptococcus agalactiae; identical to SEQ ID NO: 1772

SEQ ID NO: 6263 - protein, 627 aa, Streptococcus agalactiae
ATGTTAGAATTAAAAAATATTTCTAAATGCTATGGGCAAAAAGAAATCTTCAAAGATTTCAATCTGACTGTAGAAGAAGGTAAAATTCTCTCTTTAGTAGGACCTTCTGGAGGTGGAAAAACAACACTATTACGTATGTTAGCTGGACTGGAAAAGATTGACTCAGGGACTATTGTTCACGATAGTAAAGAAGTATCTGTTGATCATTTGGAAACACTAAATCTTTTAGGATTCGTCTTCCAAGACTTTCAATTATTCCCACATTTAACAGTATTAGATAATTTGATTCTCTCTCCAGTTAAAACGATGGGATTATCAAAAGAACTTGCTAAAGCAAAAGCCTTAGTATTACTTGAACGCTTGGGACTTAAAGACCATGCTTTAGTCTATCCATTTTCATTATCTGGGGGGCAAAAGCAACGTGTCGCACTAGCTCGTGCGATGATGATTGATCCACAGATTATTGGTTATGATGAGCCAACTAGCGCTCTTGATCCAGAGTTGCGTCAAGAAGTAGAAAAACTAATTTTACAAAATAGAGAAACAGGTATGACACAAATTGTAGTAACACATGATCTTCAATTTGCTGAAAGTATATCTGATACGATTCTCAAAATTAATCCTAAG

SEQ ID NO: 6264 - protein, 209 aa, Streptococcus agalactiae
MLELKNISKCYGQKEIFKDFNLTVEEGKILSLVGPSGGGKTTLLRMLAGLEKIDSGTIVHDSKEVSVDHLETLNLLGFVFQDFQLFPHLTVLDNLILSPVKTMGLSKELAKAKALVLLERLGLKDHALVYPFSLSGGQKQRVALARAMMIDPQIIGYDEPTSALDPELRQEVEKLILQNRETGMTQIVVTHDLQFAESISDTILKINPK

SEQ ID NO: 6265 - protein, 903 aa, Streptococcus agalactiae
ATGATCTTCAATTTGCTGAAAGTATATCTGATACGATTCTCAAAATTAATCCTAAGTAGACTTGGGGGTAGATTGTTGACTCACAAAAATATATTATTAACCATTATATTTGGATTATTTATGATTATATTATCAGCATGTGGTATGTCTAATAAGGAAATGGCTGGTATTGATAATTGGGAACATTATCAAAAGGAAAAGAAAATTACTATTGGATTTGATAATACTTTTGTTCCTATGGGATTTGAAAGCCGTTCTGGTGACTATACCGGCTTTGATATTGATTTAGCTAATGCTGTTTTTAAAGAATACGGTATTTCAGTGAAATGGCAGCCTATTAACTGGGATATGAAAGAAACTGAACTTAATAATGGTAATATAGACCTTATTTGGAATGGTTATTCAAAAACGACAGAACGTGCTAAAAAAGTCGCTTTTACAAACCCATATATGAATAATCATCAAGTAATTGTTACTAAAACTTCATCACATATTAATAGTATTAAGGATATGAAGGGGAAAAAACTAGGAGCCCAGTCGGGTTCATCTGGTTTTGATGCTTTTAATGCTAAACCTGATATTTTAAAAAAGTTTGTAAAAGGAAAAGAAGCAGTTCAATACGATACTTTCACTCAGGCTTTGATTGATTTAAAAAATAACCGTATTGATGGTCTTTTGATTGATGAAGTTTATGCTAACTATTATTTAAAGCAAGAAGGAAATATAAAAGCTTATTATTTTGTTAAAACTGCTTATCAAGGAGAAAATTTTGTAGTAGGAGCTCGCAAAGTTGATCGTAGACTAATTGAAAAGATTAACAAAGCTTTCAAACAGCTTCATAATAAGGGAAAATTTCAAAAAATCTCTTACAAATGGTTTGGTGAAGATGTTTATAGTAAAGAA

SEQ ID NO: 6266 - protein, 301 aa, Streptococcus agalactiae
MIFNLLKVYLIRFSKLILSRLGGRLLTHKNILLTIIFGLFMIILSACGMSNKEMAGIDNWEHYQKEKKITIGFDNTFVPMGFESRSGDYTGFDIDLANAVFKEYGISVKWQPINWDMKETELNNGNIDLIWNGYSKTTERAKKVAFTNPYMNNHQVIVTKTSSHINSIKDMKGKKLGAQSGSSGFDAFNAKPDILKKFVKGKEAVQYDTFTQALIDLKNNRIDGLLIDEVYANYYLKQEGNIKAYYFVKTAYQGENFVVGARKVDRRLIEKINKAFKQLHNKGKFQKISYKWFGEDVYSKE

SEQ ID NO: 6267 - protein, 240 aa, Streptococcus agalactiae
GTGAAAACATTGGCAAATATTAAATCAGCTATCAAACGCGCTGAACTTAACGTTAAACAAAACGAAAAAAACTCAGCACAAAAATCAGCTATGCGTACTGCTATTAAAGCATTTGAAGCTAACCCTTCAGAAGAACTTTACCGCGCTGCTTCTTCAAGCATCGACAAAGCTGCTTCTAAAGGTTTAATTCACACAAACAAAGCAAGCCGCGATAAAGCACGTCTTGCAACTAAACTTGGT

SEQ ID NO: 6268 - protein, 80 aa, Streptococcus agalactiae; identical to SEQ ID NO: 1778

SEQ ID NO: 6269 - protein, 918 aa, Streptococcus agalactiae
ATGAATAATGAATTTATTAATTTCGACCGTATTTCCAGAGAAAATTGGAAGGACTTACATCAGCAATCCCAAGCTTTACTAACTGAAAAAGAGCTTGAATCTATCAAAAGCTTAAACGATAATATTAATATTCAAGATGTTATTGACATCTACCTTCCTTTAATTAACCTTATTCAAATCTATAAACGTAGTCAAGAAAATTTATCTTTTTCTAAAGCAATATTTCTTAAAAAGGAAAATTATCAACGTCCTTTTATTATCGGCATATCAGGGTCAGTTGCTGTTGGAAAATCAACTACCAGTCGCTTACTACAATTACTAATTTCACGAACTTTTAAAGATAGTCACGTCGAATTAGTCACTACTGATGGCTTTTTATATCCTAACGAGAAACTCATACAAAATGGAATTTTAAACCGTAAAGGTTTCCCGGAATCCTATGATATGGAGTCACTTCTAAATTTCTTAGATACTATAAAGAACGGTATAACCGCGAAAATCCCAATTTATTCTCATGAAATCTACGATATCGTTCCAAATCAATTGCAAACTATTGAAACACCAGATTTTTTAATTTTAGAAGGAATAAATGTCTTTCAAAACCAACAAAACCATCGACTTTACATGAATGATTATTTTGATTTTTCAATATACATCGATGCTGAAAATAAACAAATTGAAGAATGGTATTTACAACGATTTAACAGTCTTCTACAATTAGCCGAAGCAGACCCTAGTAATTACTATCATAAATTCACACAAATACCGCCACATAAAGCTATGGAACTAGCTAAAGATATTTGGAAAACTATTAATTTAGTCAACCTTGAAAAATATATAGAACCAACCAGAAATAGGGCTGATTTTATTATTCATAAAGGGAAACATCATAAAATTGATGAAATTTATCTCAAAAAG

SEQ ID NO: 6270 - protein, 306 aa, Streptococcus agalactiae
MNNEFINFDRISRENWKDLHQQSQALLTEKELESIKSLNDNINIQDVIDIYLPLINLIQIYKRSQENLSFSKAIFLKKENYQRPFIIGISGSVAVGKSTTSRLLQLLISRTFKDSHVELVTTDGFLYPNEKLIQNGILNRKGFPESYDMESLLNFLDTIKNGITAKIPIYSHEIYDIVPNQLQTIETPDFLILEGINVFQNQQNHRLYMNDYFDFSIYIDAENKQIEEWYLQRFNSLLQLAEADPSNYYHKFTQIPPHKAMELAKDIWKTINLVNLEKYIEPTRNRADFIIHKGKHHKIDEIYLKK

SEQ ID NO: 6271 - protein, 588 aa, Streptococcus agalactiae
ATGGCTAATATGTATTATACAGAGAATCCTAATGTTGAACATGATATTCATGAGCTAAATGTCAAATTATTAGGAGAATCATTCAGTTTTTTAACTGATGCAGGAGTTTTCTCTAAAAGAATGATAGATTATGGTAGTCAAGTCCTTCTAAATAGTTTACATTTTGAAAAAAATAAATCCTTGTTAGATCTTGGGTGTGGATACGGTCCGCTGGGAATTTCTCTAGCCAAAGTGCAAGGAGTTAAAGCGACTATGGTTGACATTAATACGAGAGCATTGGAATTAGCTAAGAAAAATGCAACACGCAATGGAGTAGTAGTTGAAGTCTTTCAGTCAAACATTTATGAAAATATTTCTAAAACTTTCGACTATATTATAAGCAACCCCCCTATTCGTGCTGGAAAGCAAGTTGTTCATTCTATTATCGAAGAAAGTATCTGTTACCTTAATACAGGCGGTAGCCTTACCATTGTCATTCAAAAGAAACAAGGCGCTCCAAGTGCAAAAGCTAAAATGCTAGATACTTTTGGTAATTGCGATATTTTAAAAAAAGATAAGGGATATTATATATTGAGAAGTGAAAAAGTC

SEQ ID NO: 6272 - protein, 196 aa, Streptococcus agalactiae
MANMYYTENPNVEHDIHELNVKLLGESFSFLTDAGVFSKRMIDYGSQVLLNSLHFEKNKSLLDLGCGYGPLGISLAKVQGVKATMVDINTRALELAKKNATRNGVVVEVFQSNIYENISKTFDYIISNPPIRAGKQVVHSIIEESICYLNTGGSLTIVIQKKQGAPSAKAKMLDTFGNCDILKKDKGYYILRSEKV

SEQ ID NO: 6273 - protein, 414 aa, Streptococcus agalactiae
ATGAAGCGAAAGGTGCAGCTACTAAAAATGGGAAATATAGAGTTGAAAAAATTGGCTGTAAAAGCGAGTGAAAATGCATACGTTCCTTACTCGAAATTTCCAGTAGGCGCAGCATTGCGTACAGCAGAAGGAAAAATATTTACAGGATGTAACGTTGAAAATATCAGTTATGGATTAGCAAACTGTGCTGAGCGTACTGCAATTTTTAAAGCTGTTTCAGAAGGTTATAAAGATTTTTCGGAAATTGCTATTTATGGAAATACTGAAGAACCAATTTCTCCTTGCGGTGCATGCCGTCAAGTGATGGTGGAATTTTTTAATAAGAATGCTAAAGTTACATTGATTGCTAAAAATGGTAAGACGGTCGAGACGACGGTCGGTGAGTTGTTACCATACTCGTTTGTTGATTTAAAA

SEQ ID NO: 6274 - protein, 138 aa, Streptococcus agalactiae
MKRKVQLLKMGNIELKKLAVKASENAYVPYSKFPVGAALRTAEGKIFTGCNVENISYGLANCAERTAIFKAVSEGYKDFSEIAIYGNTEEPISPCGACRQVMVEFFNKNAKVTLIAKNGKTVETTVGELLPYSFVDLK

SEQ ID NO: 6275 - protein, 1047 aa, Streptococcus agalactiae
ATGAACAAAAAAATTGCCGGGATCGGCTTGGCTTCGATTGCAGTACTTAGTTTAGCTGCATGTGGACATCGTGGTGCTTCTAAATCTGGTGGTAAATCAGATAGCTTGAAGGTTGCAATGGTAACAGATACCGGTGGTGTTGATGATAAATCATTTAACCAATCTGGTTGGGAAGGTATGCAAGCTTGGGGCAAGAAGAATGGCCTTAAAAAAGGAGCTGGTTTTGACTATTTCCAATCGGCAAGTGAATCTGATTATGCAACTAACTTAGATACAGCTGTGTCTAGTGGTTATAAATTGATTTTCGGTATTGGATTTTCTCTTCATGATGCTATTGATAAAGCAGCAGACAATAACAAAGATGTTAATTACGTCATCGTTGATGATGTTATTAAAGGGAAAGATAATGTTGCAAGTGTTGTCTTTGCGGATAATGAATCAGCTTACTTAGCAGGTATTGCAGCCGCTAAAACTACCAAAACAAAAACAGTTGGCTTTGTAGGTGGTATGGAATCTGAGGTTATTACCCGTTTTGAAAAAGGTTTTGAAGCAGGTGTCAAATCAGTTGATAAATCAATTAAAATTAAAGTTGACTATGCTGGTTCATTCGGTGATGCTGCTAAGGGTAAGACAATTGCAGCCGCACAATATGCTTCTGGCGCAGATATTGTTTATCAAGTAGCTGGTGGAACTGGTGCAGGTGTATTCAGTGAAGCAAAATCACGCAATGAATCTCTAAAAGAAGCTGACAAAGTTTGGGTATTAGGTGTAGACCGTGACCAAGCAGCAGAAGGTAAGTATACTTCTAAAGATGGTAAGGCTTCTAACTTTGTTTTGGCTTCATCAATTAAAGAAGTTGGAAAATCAGTTGAATTGATTGCTACTAAAACAAGTAAAGGTAAATTCCCAGGTGGTAATGTAACAACTTATGGTTTGAAGGATGGTGGAGTTGATATAGCAACTACAAACCTTTCAGATGACGCCGTTAAAGCGATTAAAGAGGCTAAAGCTAAAATTATTTCAGGAGATATCAAAGTTCCTAGCAAA

SEQ ID NO: 6276 - protein, 349 aa, Streptococcus agalactiae
MNKKIAGIGLASIAVLSLAACGHRGASKSGGKSDSLKVAMVTDTGGVDDKSFNQSGWEGMQAWGKKNGLKKGAGFDYFQSASESDYATNLDTAVSSGYKLIFGIGFSLHDAIDKAADNNKDVNYVIVDDVIKGKDNVASVVFADNESAYLAGIAAAKTTKTKTVGFVGGMESEVITRFEKGFEAGVKSVDKSIKIKVDYAGSFGDAAKGKTIAAAQYASGADIVYQVAGGTGAGVFSEAKSRNESLKEADKVWVLGVDRDQAAEGKYTSKDGKASNFVLASSIKEVGKSVELIATKTSKGKFPGGNVTTYGLKDGGVDIATTNLSDDAVKAIKEAKAKIISGDIKVPSK

SEQ ID NO: 6277 - protein, 1533 aa, Streptococcus agalactiae
ATGACACAGAATGTCATTGAAATGAAAGAAATCACTAAGAAATTCGGTGATTTTGTGGCAAATGATCATATCAATTTGACGGTTGAAAAAGGTGAGATACATGCTCTGCTTGGCGAAAACGGTGCAGGAAAATCAACTTTAATGAACATGTTAGCAGGTTTACTAGAACCAACAGACGGTCAAATTTTTATTAATGGTCAGCCTGTAACTATTGATTCACCTTCCAAATCGTCACAATTGGGGATTGGTATGGTACATCAGCATTTCATGCTTGTTGAAGCATTTACTGTAGCTGAAAATATTGTTCTAGGAAATGAAACCACCCAAAATGGTGTTTTAGACATTAAGACAGCAGCTAAAGAAATAAAGGAACTATCAGAGAAATATGGTTTGTCAGTAAATCCAAATGCTAAAATATCTGATATTTCTGTAGGAGCACAGCAGCGTGTTGAAATTTTAAAGACACTTTATCGCGGTGCAGATATTTTAATTTTTGATGAGCCGACGGCGGTACTTACACCATCAGAAATAAAAGAATTGATGACAATTATGAAGAGCCTTGTTAAAGAAGGCAAATCCATTATACTAATTACCCATAAATTGGATGAAATTCGGGCAGTTGCTGATAAAGTTACTGTGATTCGCCGTGGTAAAAGTATTGAAACAGTCCCCGTTGCAGGCGCAAGTTCTCAACAACTGGCAGAAATGATGGTTGGACGATCTGTTTCCTTCAGAACTGAAAAAAAGGAAGCTAAACCGACTGACATAATCCTTTCTGTAAAGGATTTAGTTGTAGAAGAAAATAGAGGCGGCGTTCTAGCTGTTAAAAATCTGTCGTTAGATGTTCGGGCAGGTGAAATTGTAGGTATAGCTGGTATTGATGGTAATGGACAAAGTGAATTAATTCAAGCTATTACAGGCTTAAGAAAGGTAACTTCTGGTCAAATTGTAATTAAAGGTAAAGATGTCACAAAATTTTCAAGTCGACAAATTACAGAATTAAGTGTAGGTCATGTTCCAGAAGATCGTCATAGAGATGGTTTGGTTTTAGATATGACGATGGCAGAAAATTTAGCTTTACAAACTTATTATAAAGAGCCATTGAGTCATAAAGGCATCCTTAATTTTGCTAAAATTAAAGAGTATGCTCGTCAATTAATGACAGAATTTGATGTGCGTGGTGCTGGTGAACATGTTTTAGCAAGAGGATTTTCTGGTGGTAATCAACAAAAAGCTATTATTGCACGTGAAGTGGATCGCGATCCAGACCTACTCATTGTTAGCCAACCGACTCGTGGTCTAGATGTTGGTGCTATCGAGTATATTCATAAACGTTTGATTGAAGAGCGCGATAAAGGGAAAGCGGTCTTAGTAGTTAGCTTTGAGTTAGATGAAATCTTAAACTTATCAGATCGTATTGCAGTTATTCATGATGGTAAAATTCAAGGAATTGTTAAACCCGACCAAACCAACAAGCAAGAATTGGGTATTTTGATGGCTGGTGGAAAAATTGAAAAGGAGGAGAGAGATGTC

SEQ ID NO: 6278 - protein, 511 aa, Streptococcus agalactiae
MTQNVIEMKEITKKFGDFVANDHINLTVEKGEIHALLGENGAGKSTLMNMLAGLLEPTDGQIFINGQPVTIDSPSKSSQLGIGMVHQHFMLVEAFTVAENIVLGNETTQNGVLDIKTAAKEIKELSEKYGLSVNPNAKISDISVGAQQRVEILKTLYRGADILIFDEPTAVLTPSEIKELMTIMKSLVKEGKSIILITHKLDEIRAVADKVTVIRRGKSIETVPVAGASSQQLAEMMVGRSVSFRTEKKEAKPTDIILSVKDLVVEENRGGVLAVKNLSLDVRAGEIVGIAGIDGNGQSELIQAITGLRKVTSGQIVIKGKDVTKFSSRQITELSVGHVPEDRHRDGLVLDMTMAENLALQTYYKEPLSHKGILNFAKIKEYARQLMTEFDVRGAGEHVLARGFSGGNQQKAIIAREVDRDPDLLIVSQPTRGLDVGAIEYIHKRLIEERDKGKAVLVVSFELDEILNLSDRIAVIHDGKIQGIVKPDQTNKQELGILMAGGKIEKEERDV

SEQ ID NO: 6279 - protein, 1059 aa, Streptococcus agalactiae
ATGTCTAAGAAGGCGCAAAAAATTGCAGTTCCTCTGATTTCAGTTGTACTAGGAATCATTCTAGGAGCTATTATTATGCTGATATTTGGTTATGATCCACTTTGGGGTTATGAGGGGTTGTTCCAAACAGCATTCGGTAGTATAAAAAATATTGGTGAAATTTTCCGTGCAATGGGACCATTAATTTTAATTGCTCTAGGTTTCTCAGTTGCCAGTTGTGCAGGTTTCTTTAATATTGGACTTCCAGGGCAAGCTTTATCAGGATGGATTGCCGCAGGTTGGTTCGCTCTTTCACACCCAGATATGCCACGTCCAGCAATGATTCTTTGTACTATTATTATTGGTATCGTTGCTGGGGGAATCACTGGAGCTATTCCAGGTATTCTCAGAGCATATCTTGGAACAAGTGAAGTTATTGTAACTATTATGATGAACTATATTGTTCTTTATTCAGGAAATTCTATTGTACAACGTGTTTTCCCAAAAAGCATTATGCGTACAAGTGACTCGAGTGTATATGTTTCTGCCAATGCATCATACCAGACAGATTGGTTATCTAGTTTAACGAATAATTCACGTATCAATATTGGTATCTTCATTGCTATTATTGCAGTTGTGTTAGTTTGGTTCCTATTAAATAAAACAACGCTTGGATTTGAAATTCGTTCAGTTGGCTTAAATCCAAATGCTAGTGAGTACGCTGGTATGTCTGCAAAGCGTACAATTATTCTATCAATGATTATTTCTGGAGCTTTTGCAGGACTTGGTGGTGTTGTTGAAGGATTAGGTACATTTGAGAATGTATTTGTACAGCCATCCTCGTTAGCTATTGGCTTTGACGGTATGGCAGTAAGTCTACTCGCAGCGAATAGTCCAATAGGTATTTTATTTGCAGCATTTCTATTTGGTGTTCTAAGTGTTGGTGCGCCTGGTATGAACATTGCAGGTATTCCACCTGAGTTAATTAAAGTTGTAACAGCTTCAATCATCTTCTTCGTAGGTGTCCATTACATTATTGAGTATGTTATTAAACCTAAAAAACAAATGAAAGGTGGTAAG

SEQ ID NO: 6280 - protein, 353 aa, Streptococcus agalactiae
MSKKAQKIAVPLISVVLGIILGAIIMLIFGYDPLWGYEGLFQTAFGSIKNIGEIFRAMGPLILIALGFSVASCAGFFNIGLPGQALSGWIAAGWFALSHPDMPRPAMILCTIIIGIVAGGITGAIPGILRAYLGTSEVIVTIMMNYIVLYSGNSIVQRVFPKSIMRTSDSSVYVSANASYQTDWLSSLTNNSRINIGIFIAIIAVVLVWFLLNKTTLGFEIRSVGLNPNASEYAGMSAKRTIILSMIISGAFAGLGGVVEGLGTFENVFVQPSSLAIGFDGMAVSLLAANSPIGILFAAFLFGVLSVGAPGMNIAGIPPELIKVVTASIIFFVGVHYIIEYVIKPKKQMKGGK

SEQ ID NO: 6281 - protein, 954 aa, Streptococcus agalactiae
TTGAGTTTAACAACGATTTTTGCATTGCTATTTTCATCAATGCTAATTTACGCAACACCTCTTATCTTTACAAGTATTGGGGGAACCTTCTCTGAACGTGGTGGTATCGTCAACGTTGGTTTAGAAGGAATTATGGTAATTGGAGCTTTCTCAGGCGTTGTATTTAATTTAGAGTTTGCTTCTGTTTTTGGTGATGCGACTCCATGGATTTCTGTACTAGTTGGTGGCTTAGTTGGTTTAATTTTTTCTGTTATCCATGCCGTTGCGACAGTTAATTTCCGTGCAGATCATATTATCAGCGGAACCGTTCTTAATTTAATGGCACCTTCATTAGCTGTTTTCTTGATTAAGGTTCTTTATAATAAAGGTCAAACTGATAATATTCAAGAATCATTTGGAAAATTTAATTTCCCTATACTATCAGATATTCCTTTTGTTGGTGATATCTTCTTTAAAGGAACAAGCTTAGTCGGTTATATTGCTATTCTTTTCTCATTCCTTGCTTGGTTTATTCTATATAAAACTCGCTTTGGATTAAGATTACGCTCAGTTGGAGAACATCCTCAAGCAGCAGACACCTTAGGTATTAATGTTTATCTTATGCGTTACTCTGGTGTCTTGATTTCAGGTTTCCTTGGTGGAATAGGAGGAGCTGTATATGCTCAATCTATTTCTGTTAACTTTGCAGCGACAACTATATTAGGACCGGGCTTTATCTCCTTAGCAGCGATGATTTTTGGTAAGTGGAATCCAATTGGTGCAATGCTTGCTAGTCTATTCTTTGGTTTATCGCAAAGTTTAGCAGTTATCGGTAGCCATTTACCACTTTTGAGCAATATTCCAACAGTTTATCTACAAATTGCTCCATATGTTCTCACTATCATTGTATTAGCAGCTTTCTTTGGACAAGCAGTAGCTCCTAAGGCGGATGGTATTAATTATATTAAAACGAAA

SEQ ID NO: 6282 - protein, 318 aa, Streptococcus agalactiae; identical to SEQ ID NO: 1790

SEQ ID NO: 6283 - protein, 1368 aa, Streptococcus agalactiae
ATGAGTAAAATCGTTGTCGTAGGGACAAACCACGCTGGTACAGCAGCAATTAAAACAATGCTTAGTAATTATGGTGAAGCCAATGAAATTGTAACATTTGATCAAAATTCCAATATCTCTTTCTTAGGATGTGGTATGGCTCTTTGGATTGGTGAACAGATTGATGGTCCAGAAGGATTGTTCTACTCTGATAAAGAGCAGTTGGAAAGTATGGGAGCTAAGGTTTACATGAACTCTCCAGTACTTAATATTGACTACGATAAAAAAGAAGTTACAGCTTTAGTAGATGGAAAAGAACATGTTGAAAGTTATGAAAAACTTATTTTAGCAACTGGTTCACAACCTATCATTCCACCAATTAAAGGTGTTGAAATTCAAGAAGGATCTCGTGAATTTAAAGCTACTCTTGAAAACCTTCAATTTGTGAAACTTTATCAAAATTCAGAAGAAGTTATTGAAAAGTTAGCTAAACCTGGTATCAATCGTGTTGCTGTTGTTGGGGCTGGGTATATTGGTGTAGAATTAGCAGAAGCTTTCCAACGTATTGGAAAAGAAGTAACACTTGTTGATGTTGCTGATACTTGTATGGGTGGTTACTATGATCGTGACTTTACTGATATGATGAGTAAAAACCTTGAAGACCATGGTATTCGTCTTGCTTTCGGACAAGCTGTTCAAGCAGTTGAAGGTGATGGTAAAGTAGAACGTCTTGTTACTGATAAAGAAACATTTGATGTTGATATGGTGATCTTAGCTGTTGGATTCCGTCCAAATACAGAACTCGGTGCAGGTAAATTAGATACATTCCGTAATGGCGCTTGGGTAGTTGATAAGAAGCAAGAAACAAGCGTGAAAGATGTTTATGCTATAGGTGATTGTGCGACAATTTGGGATAATTCTCGTGATGATATCAATTATATTGCTCTTGCTTCAAACGCCGTTCGTACTGGTATTGTAGCAGCTCACAATGCATGTGGTACAGAGCTTGAAGGTGCTGGTGTCCAAGGGTCAAATGGTATCTCAATCTATGGCCTTAACATGGTATCAACTGGTTTGACTTTAGAAAAAGCAAAACAAGCTGGGTACAATGCAGTTGAAACAGGCTTTAATGACCTTCAAAAACCAGAATTTATCAAACACAATAATCATGAAGTAGCTATTAAGATTGTCTATGATAAAGATAGCCGAGTTATCCTTGGTTGCCAAATGGTCTCACACGAAGATGTATCTATGGGAATTCATATGTTCTCACTTGCTATTCAAGAAAAAGTTACTATTGAAAAACTTGCTTTGACCGATATCTTCTTCTTACCACATTTTAATAAGCCATATAACTATATTACAATGGCTGCATTAGGCGCTAAAGAT

SEQ ID NO: 6284 - protein, 456 aa, Streptococcus agalactiae; identical to SEQ ID NO: 1792

SEQ ID NO: 6285 - protein, 987 aa, Streptococcus agalactiae
ATGACTGCAACTAAACAACATAAAAAAGTTATCCTCGTTGGTGATGGTGCCGTAGGTTCTTCTTACGCTTTTGCACTTGTTAACCAAGGTATTGCGCAAGAGTTAGGTATCATTGAAATCCCAGCTTTATTTGATAAAGCTGTTGGTGATGCTGAAGATCTTTCACATGCCCTTGCATTTACATCACCTAAAAAAATCTACGCAGCTACTTATGCAGACTGCGCAGATGCTGACCTTGTTGTCATTACTGCTGGCGCACCTCAAAAACCAGGTGAAACTCGACTTGACCTTGTTGGTAAAAACTTAGCAATTAACAAATCAATCGTAACTCAAGTTGTTGAATCAGGTTTCAACGGTATCTTCTTAGTAGCGGCTAACCCTGTAGATGTACTTACATATTCAACTTGGAAATTCTCAGGTTTCCCTAAGGAACGCGTTATTGGTTCAGGTACTTCACTTGACTCTGCACGTTTCCGTCAAGCTTTAGCAGATAAAATTGGTGTTGATGCTCGTTCAGTTCACGCATACATCATGGGTGAACACGGTGACTCAGAATTTGCCGTTTGGTCACATGCTAACGTTGCTGGTGTCCAACTTGAACAATGGTTACAAGAAAATCGCGATATTGATGAACAAGGACTTGTTGATTTGTTTATTTCAGTTCGTGACGCTGCATACTCAATCATCAACAAAAAAGGTGCTACATATTACGGTATTGCTGTCGCACTTGCTCGTATTACTAAAGCTATCCTTGATGATGAAAATGCAGTTCTTCCATTATCTGTATATCAAGAAGGCCAATACGGTGATGTTAAAGATGTCTTTATCGGTCAGCCTGCAATCGTAGGTGCACATGGTATCGTTCGTCCAGTTAATATCCCATTAAATGATGCTGAACTTCAAAAAATGCAAGCCTCAGCTGAACAATTAAAAGATATTATTGACGAAGCTTGGAAAAACCCAGAATTCCAAGAAGCATCAAAAAAC

SEQ ID NO: 6286 - protein, 329 aa, Streptococcus agalactiae; identical to SEQ ID NO: 1794

SEQ ID NO: 6287 - protein, 2457 aa, Streptococcus agalactiae
ATGCAAGATAAAAATTTAGTAGATGTTAATCTAACTAGTGAAATGAAAACGAGTTTTATCGATTACGCCATGAGTGTCATTGTTGCTCGTGCACTTCCAGATGTTAGAGATGGTTTAAAACCTGTTCATCGTCGTATTTTATATGGTATGAATGAACTAGGTGTGACACCTGATAAACCTCATAAGAAATCAGCACGTATTACTGGTGATGTTATGGGTAAATACCATCCACATGGTGATTCATCTATTTACGAAGCAATGGTGCGTATGGCACAATGGTGGTCATATCGTCATATGCTCGTTGATGGTCATGGAAACTTTGGTTCAATGGATGGGGATGGTGCTGCCGCACAGCGTTATACAGAAGCACGTATGAGTAAAATTGCTCTTGAGATGCTTCGTGATATCAATAAAAATACAGTTGATTTTCAAGATAACTATGATGGCAGTGAACGTGAACCTCTTGTTTTACCAGCGCGTTTCCCTAATTTATTAGTCAATGGTGCAACTGGTATTGCTGTAGGTATGGCAACAAATATTCCACCACATAATCTAGGTGAGTCTATAGATGCTGTCAAGTTGGTTATGGATAACCCTGATGTTACTACACGGGAGTTAATGGAAGTTATTCCTGGTCCAGATTTTCCTACTGGTGCCTTGGTGATGGGACGTTCAGGTATTCACCGTGCCTATGAAACTGGAAAGGGATCAATTGTCTTACGTTCACGGACTGAAATTGAAACAACTTCAAATGGGAAAGAGCGTATTGTTGTCACAGAGTTTCCATACGGTGTTAATAAAACAAAAGTACACGAGCATATTGTACGTTTAGCACAAGAAAAGCGTATTGAAGGTATTACTGCTGTTCGTGATGAATCAAGTCGTGAAGGCGTTCGTTTTGTTATTGAAGTTCGTCGTGATGCTTCAGCAAATGTGATTTTAAATAATCTTTTCAAATTAACTAGCTTGCAGACAAATTTTAGCTTCAATATGCTTGCTATTGAAAAAGGTGTTCCGAAAATTTTGTCATTACGACAAATCATTGATAACTATATTGAACACCAAAAGGAAGTTATTGTCCGTCGTACTCAGTTTGACAAAGCTAAAGCAGAAGCTCGTGCTCATATCTTAGAAGGTTTACTTGTGGCGCTTGATCACTTGGATGAAGTTATCACGATTATTCGTAATAGTGAGACAGACACCATTGCTCAAGCAGAGTTGATGTCACGTTTTGAATTATCGGAGCGTCAGAGTCAAGCAATTTTAGATATGCGTCTTCGTCGTTTAACTGGATTAGAACGCGATAAAATCCAATCAGAATACAATGACTTGCTAGCTTTAATTGCTGATTTAGCAGATATCTTAGCTAAGCCTGAACGTGTTGTTACCATTATAAAAGAAGAGATGGATGAGGTTAAGCGTAAGTATGCTGATGCCCGTCGTACAGAATTAATGATTGGTGAAGTTTTATCACTTGAAGATGAAGACCTTATTGAGGAAGAAGATGTTCTTATTACTCTCTCAAACAAGGGATATATCAAGCGTCTCGCTCAAGATGAGTTTAGAGCACAAAAACGTGGAGGACGCGGTATTCAAGGGACTGGAGTTAATAACGATGATTTTGTTCGTGAATTGGTTTCAACAAGTACTCACGATACTGTGCTTTTCTTTACAAATTTAGGGCGTGTGTATCGTTTGAAAGCATATGAAATTCCAGAATATGGACGTACAGCTAAAGGCCTCCCTATCGTTAACCTTTTAAAACTTGACGAAGGTGAAACAATTCAAACAATTATTAATGCTAGAAAAGAAGATGTCGCTAATAAATATTTCTTTTTCACAACTCAGCAAGGTATAGTGAAACGTACAAGTGTTTCTGAATTTAGTAACATTCGTCAAAATGGACTTCGTGCTATTAATTTGAAAGAGAATGACGAGTTGATTAACGTCCTCTTGATTGACGAAAATGAAGATGTTATTATCGGGACACGTACAGGCTACTCTGTTCGCTTCAAAGTGAACGCTGTACGTAATATGGGACGCACAGCGACTGGGGTACGAGGCGTTAATCTTCGTGAAGGTGATAAAGTTGTGGGAGCTTCTCGTATCGTTAATGGACAAGAAGTACTGATCATCACTGAAAAAGGTTATGGCAAGAGAACAGAAGCTTCGGAATATCCTACAAAGGGTCGTGGTGGTAAAGGAATAAAAACCGCTAATATTACTGCTAAAAATGGGCCATTAGCACGCTTAGTGACGATTAATGGAAATGAGGACATCATGGTCATTACAGATACAGGCGTTATTATTCGAACCAATGTTGCTAATATTTCTCAAACTGGTCGTTCTACTATGGGTGTTAAAGTGATGAGACTTGATCAAGAAGCTAAAATCGTTACTGTTGCGCTAGTGGAACAAGAAATTGAAGATAAGTCTAATATAGAGGATACAAAAGAA

SEQ ID NO: 6288 - protein, 819 aa, Streptococcus agalactiae
MQDKNLVDVNLTSEMKTSFIDYAMSVIVARALPDVRDGLKPVHRRILYGMNELGVTPDKPHKKSARITGDVMGKYHPHGDSSIYEAMVRMAQWWSYRHMLVDGHGNFGSMDGDGAAAQRYTEARMSKIALEMLRDINKNTVDFQDNYDGSEREPLVLPARFPNLLVNGATGIAVGMATNIPPHNLGESIDAVKLVMDNPDVTTRELMEVIPGPDFPTGALVMGRSGIHRAYETGKGSIVLRSRTEIETTSNGKERIVVTEFPYGVNKTKVHEHIVRLAQEKRIEGITAVRDESSREGVRFVIEVRRDASANVILNNLFKLTSLQTNFSFNMLAIEKGVPKILSLRQIIDNYIEHQKEVIVRRTQFDKAKAEARAHILEGLLVALDHLDEVITIIRNSETDTIAQAELMSRFELSERQSQAILDMRLRRLTGLERDKIQSEYNDLLALIADLADILAKPERVVTIIKEEMDEVKRKYADARRTELMIGEVLSLEDEDLIEEEDVLITLSNKGYIKRLAQDEFRAQKRGGRGIQGTGVNNDDFVRELVSTSTHDTVLFFTNLGRVYRLKAYEIPEYGRTAKGLPIVNLLKLDEGETIQTIINARKEDVANKYFFFTTQQGIVKRTSVSEFSNIRQNGLRAINLKENDELINVLLIDENEDVIIGTRTGYSVRFKVNAVRNMGRTATGVRGVNLREGDKVVGASRIVNGQEVLIITEKGYGKRTEASEYPTKGRGGKGIKTANITAKNGPLARLVTINGNEDIMVITDTGVIIRTNVANISQTGRSTMGVKVMRLDQEAKIVTVALVEQEIEDKSNIEDTKE

SEQ ID NO: 6289 - protein, 741 aa, Streptococcus agalactiae
ATGCGTAATAAAAAAAAATTACATGGTTTCTTTAACTTTGTTAGATGGTTATTGGTTGTATTGCTAATTATTGTTGGGTTGGCTTTGGTGTTCAATAAACCAATTCGCAATGCTTTCATAGCTCATCAATCAAATCATTATCAAATTTCACGAGTTAGTAAAAAAACAATTGAAAAAAATAAGAAATCTAAAACAAGTTATGACTTTTCATCAGTCAAATCTATTAGTACAGAATCGATTTTATCTGCTCAAACGAAATCACATAATTTGCCTGTAATAGGAGGGATTGCTATACCAGATGTCGAAATCAATCTCCCAATTTTCAAAGGACTAGGCAATACAGAGTTGAGTTATGGTGCAGGAACGATGAAGGAAAACCAGATTATGGGAGGCCAAAATAACTATGCTTTAGCTAGTCACCATGTCTTTGGTTTGACAGGTTCTTCTAAGATGCTCTTTTCGCCTTTAGAACATGCTAAGAAAGGTATGAAAGTTTACCTCACTGATAAAAGCAAAGTATACACTTACACTATTACTGAAATTTCAAAGGTAACACCAGAACATGTTGAGGTTATTGATGATACACCTGGCAAGAGCCAACTCACTTTAGTGACCTGTACGGATCCAGAAGCCACAGAACGTATTATTGTGCATGCTGAATTAGAAAAAACAGGTGAATTTTCAACAGCAGATGAGTCGATATTAAAAGCATTTTCGAAAAAATATAATCAAATTAATCTC

SEQ ID NO: 6290 - protein, 247 aa, Streptococcus agalactiae
MRNKKKLHGFFNFVRWLLVVLLIIVGLALVFNKPIRNAFIAHQSNHYQISRVSKKTIEKNKKSKTSYDFSSVKSISTESILSAQTKSHNLPVIGGIAIPDVEINLPIFKGLGNTELSYGAGTMKENQIMGGQNNYALASHHVFGLTGSSKMLFSPLEHAKKGMKVYLTDKSKVYTYTITEISKVTPEHVEVIDDTPGKSQLTLVTCTDPEATERIIVHAELEKTGEFSTADESILKAFSKKYNQINL

SEQ ID NO: 6291 - protein, 411 aa, Streptococcus agalactiae
ATGAAATTAAAGGCTGTTCATCATATTGCGATAATTGTTTCTGACTATGAAAAGTCAAAAGACTTCTATGTTAATAAGCTAGGTTTTGAAATTATTCGTGAAAACCATCGTCCGGAGCGTCATGATTATAAATTAGATTTACGGTGCGGTGATATTGAGCTTGAAATATTTGGAAATCGTCTTGATGATCCAGAATATGAAACCCCTCCTCAGAGAATAGGTAGGCCGAATTGGCCACGTGAAGCATGTGGTTTACGACACCTTGCCTTTTACGTTCCAGATGTGGAAGCGTACAAGATAGAACTGGAGAATTTAGGAATTTTTGTAGAGCCTATTCGTTACGATGACTATACTGGCAAAAAGATGACCTTTTTCTTTGATCCAGATGGTTTACCTTTAGAATTACATGAA

SEQ ID NO: 6292 - protein, 137 aa, Streptococcus agalactiae
MKLKAVHHIAIIVSDYEKSKDFYVNKLGFEIIRENHRPERHDYKLDLRCGDIELEIFGNRLDDPEYETPPQRIGRPNWPREACGLRHLAFYVPDVEAYKIELENLGIFVEPIRYDDYTGKKMTFFFDPDGLPLELHE

SEQ ID NO: 6293 - protein, 960 aa, Streptococcus agalactiae
ATGAGTATTAAAAAACTATTGTTTGCAGGCCTTGCTTTTATTTTATTTACCCTAGCGAGTCCAGCATATGCTGCATCAGATGTTCAGAAAGTTATTGATGAAACTTATGTTCAACCTGATTATGTCTTAGGTTATTCGCTAAATCAAGAACAGCGTGCACAGACATTACAACTTCTGAATTATGATGAATCTAGAGACACGAAAGTTAAAACGCTAAATACTAGCTCATATGCTAAAATAATGAATATAGCTGATGATGCAAGCATCCAATTATATTCATCTGTTAAAATAAAAAAATTAGGGTCTAACGATACCTTAGCAGTAAACATTGTTACACCTGAGAATATCACTAAAGTTACAGAAGATATGTATCGCAATGCTGCAGTTACATTAGGTATTGAGCATGCAACGATATCAGTGGCTGCTCCAATAAAAGTAACTGGGGAGAGTGCTCTTGCAGGTATCTATTATTCATTAGAGAAAAATGGAGCAAGTGTATCATCAGAAAATAAACAACTAGCACAAGAAGAGTTAAGTACTTTATCTGGTATTAATGCTGAGAATAAGGGTAAGGAAGGTTATGACGCCGACAAGCTTAATGTAGCTTTAACGGATATTAAGTCAGCCGTAGCTAAAGGAGGATCTGATCTTTCAAAAGATGATATTCGAAAAATTGTTGAGGAAACATTGAAAAATTATCATCTTGATAACGCTGTAACGGAAAATCAAATAAATTTAATTGTTAATTTTGCAGTTAATCTTTCACAAAGTAATGTCATCAAAAATAGTGATTTCACGAACACCTTGAATAATTTGAAAGACAACATTGTTTCGAAAGCAGGATCTAAATTTAAAAATATCAATGTCAATTTTAATGCTAATAAAGCTGTTGAATCAGGTAAGGGATTTTTAGCTAATATTTGGCAACAAATTGTTAATTTTTTCCAGCAGTTTGGTAGT

SEQ ID NO: 6294 - protein, 320 aa, Streptococcus agalactiae; identical to SEQ ID NO: 1802

SEQ ID NO: 6295 - protein, 933 aa, Streptococcus agalactiae
ATGTTTTTAGCGGGTCTTGAAGCTAATTTTGATCTTTTAAAGAAGTATCTTAAGCCCAGTCTACTAGTCGCAATTACTGGTGTTATTGTTCCTATGGCTCTTTTCTACTTCTTGACACGCTTGTTTGGGTTCCAAATCAATACTGCTATCTTTTACGGGCTCGTATTTGCTGCAACTAGTATTTCTATCACAGTTGAAGTTTTACAAGAATACAATCGTGTAAAGACAGATACTGGTGCTATTATTTTAGGTGCTGCTGTTGCTGATGATGTCTTAGCTGTTTTGCTTCTAAGTGTCTTTATTGCAACAAATGGAAGCTCTTCTAATATCGGATTACAAATTATCATTCAATTGTTATTCTTTGTTTTCTTATTTATTTGTATGAAATACCTTGTACCCGCTCTTTTCAAATTAATCGAAAAGGTTCATTTCTTTGAGAAATACACTATTCTTGCTATCCTTATCTGTTTTTCTCTATCAATTTTAGCTGATAAAGTTGGAATGAGTTCTATCATTGGTTCGTTTTTTGCAGGATTAGCTATTGGACAAACTTCTTTTGTTGATAAGGTAGAACATAAAATTTCACTTCTTAGTTACACCTTCTTTATCCCAATTTTCTTCGCTTCAATTGCACTACCTCTTAAATTCGATGGAATGATGTCTCACCTTCACACGATATTAATCTTTACTGCTTTGGCTGTTTTATCAAAATTAATTCCAGGGTACTTTGTCGGTCGAGGCTTTAATTTTTCAAAATTAGAATCTTTAACAATTGGTGGTGGAATGGTCAGTCGTGGCGAGATGGCTCTCATTATAGTTCAAGTTGGATTAGCTGCTAAAATTATTTCAAGCACTACTTATTCCGAGCTTGTTATTGTTGTTATACTATCAACTATTATTGCGCCATTTATTCTTAAATATTCATTTAAAGAT

SEQ ID NO: 6296 - protein, 311 aa, Streptococcus agalactiae
MFLAGLEANFDLLKKYLKPSLLVAITGVIVPMALFYFLTRLFGFQINTAIFYGLVFAATSISITVEVLQEYNRVKTDTGAIILGAAVADDVLAVLLLSVFIATNGSSSNIGLQIIIQLLFFVFLFICMKYLVPALFKLIEKVHFFEKYTILAILICFSLSILADKVGMSSIIGSFFAGLAIGQTSFVDKVEHKISLLSYTFFIPIFFASIALPLKFDGMMSHLHTILIFTALAVLSKLIPGYFVGRGFNFSKLESLTIGGGMVSRGEMALIIVQVGLAAKIISSTTYSELVIVVILSTIIAPFILKYSFKD

SEQ ID NO: 6297 - protein, 780 aa, Streptococcus agalactiae
ATGTGTTACAATAACAGTATGAATGAAAGATATATCCGATTTAACCCTAATATCGCGAAACAAAAACCCAGTAATAAAGACAAATGTCCATTTTGTGATAAAAGCCAATTAGGAAAAATCCTAGACGTGAAAGACGATATGATCTGGGTAGAAAATAAATACCCAACTTTAGAAGAAACCTATCAAACATTGGTGATTGAATCAAATGATCACAATGGGGATATTTCAGTTTATAGTGAGTCAAAGATGCGCCAATTGTTAGATTATCTTTTGTCAAAATGGCAATTAATGGAAGAAAGTGGTCATTACCGTTCGGTCGTTCTTTATCGAAATTTTGGGCCCTTATCTGGCGGAAGTTTACGACATCCTCATAGCCAAATTGTTGGCTTAAAAAACGTAGATGCTTATGAAACGTTGAACTTAGATTGGTTTGATGGTATCGAGGTTTGTTCGGAAACGAGTCAACAAGCAGAGATTAGTATTGCCAATCGTCCTATGCTTGATTTCACAGAGTTCACAATTAAAGTATCCAAATTGGAAAACGCTATTTTGATTGCAGATAGTTTACCAATTTTGTGTCATTATATTTTAAATGAATTCTTGGGAGGGCGCTGTAAATCTTATAATCTCTTTTTCTATAAGCATGATGGGGGTCTTATTTGTAAAATTGTTCCTCGTTTTATAGTATCCCCTTATCAGATTGGGTATGCTATTCATCAGGTAAATTTACCAGATGAATTGGAAAAAATCAAAGAAGCCTTAAGAGCCAAATATTATCTT

SEQ ID NO: 6298 - protein, 260 aa, Streptococcus agalactiae
MCYNNSMNERYIRFNPNIAKQKPSNKDKCPFCDKSQLGKILDVKDDMIWVENKYPTLEETYQTLVIESNDHNGDISVYSESKMRQLLDYLLSKWQLMEESGHYRSVVLYRNFGPLSGGSLRHPHSQIVGLKNVDAYETLNLDWFDGIEVCSETSQQAEISIANRPMLDFTEFTIKVSKLENAILIADSLPILCHYILNEFLGGRCKSYNLFFYKHDGGLICKIVPRFIVSPYQIGYAIHQVNLPDELEKIKEALRAKYYL

SEQ ID NO: 6299 - protein, 266 aa, Streptococcus agalactiae
ATGGCTAAGAAATCAAAAATTGCTAAATTTCAAAAACAGCAAAAACTCGTAGAACAATATGCTGAACTACGTCGTGAGTTAAAAGAAAAGGGTGATTACGAAGCACTTCGTAAACTTCCTAAAGATTCTAACCCTAACCGACTTAAAAATCGTGATTTAATCGATGGCCGTCCTCACGCTTACATGCGTAAATTCGGTATGAGTGTATTAACTTCCGTAACCTAGCTTACAAAGGCCAAATTCCTGGCATTAAAAAAGCAAGCTGG

SEQ ID NO: 6300 - protein, 89 aa, Streptococcus agalactiae
  VARIANT 69: Xaa = Any Amino Acid
MAKKSKIAKFQKQQKLVEQYAELRRELKEKGDYEALRKLPKDSNPNRLKNRDLIDGRPHAYMRKFGMSXINFRNLAYKGQIPGIKKASW

SEQ ID NO: 6301 - protein, 1023 aa, Streptococcus agalactiae
ATGTTACATTTTGAAAATGATTATAATAAAGGAGCTCATCCAGAGCTTTTGAATGCCCTTATTGAAACTAATGATCAAGGTCTATCGGGATATGGGACAGATAGTTACTGTCAACAAGCGGCAGATAAAATTCGAGAAGTCTGTTCCTGTCCACAAGCTGAAGTTGAGTTTTTAGTGGGTGGTACTCAAACAAATCAAGTAGTTATCAGTAGTATGCTTGCTTCTTATGAAGGAGTTATTGCTGCAGAAACAGGTCATGTGAGTAGTCATGAAGCAGGAGCCATAGAATTTTCAGGTCATAAGGTATTGACTTTACCTTCTCATAATGGGAAATTACTCGCAAGCGAAGTTGCAACTTATATTGAGACTTTTTATGCTGATGGTAATTACCAACACATGGTTTTTCCAGGAATGGTTTATATATCACATCCAACAGAATATGGAACACTTTATAGTAAAGCAGAACTAGAAGAGTTATCGAAGATTTGTAAACATTATCAAATCCCCTTATTTATTGACGGTGCTCGTCTGGGGTATGGTTTGGCTGCGAAAGATACAGATGTTGATTTCCCAACGATTGCAGCCTTATCAGATGTTTTTTACATTGGTGGAACCAAAATGGGGGCTCTTGCTGGGGAAGCAGTTGTTTTCACAAAGAAAAATCGTCCAAAACAGTTTACTACAATTGTAAAGCAGCATGGTGCGTTATTAGCCAAGGGAAGATTGCTGGGGCTTGCTTTTGATCGTTTCTTTACGGATGACCTTTACTTAAAGATTGGAAAGCATGCGATTGACTTAGCAGAGGAATTAAAAATCATTTTAGAAGAAAAAGGTTACTCGTTCTATTTAAAATCACCAACTAATCAACAATTTGTTATTGTAGAAAATACAAAACTAGCAGATTTAGCAAAGAATGTAGCTTATAGTTTTTGGGAAAAATATGATGACCATCATACTGTAATACGTCTAGCAACTAGTTGGTCAACTAGTCGCGAAGATGTAACTGCTTTAAGAAATGTCTTG

SEQ ID NO: 6302 - protein, 341 aa, Streptococcus agalactiae
MLHFENDYNKGAHPELLNALIETNDQGLSGYGTDSYCQQAADKIREVCSCPQAEVEFLVGGTQTNQVVISSMLASYEGVIAAETGHVSSHEAGAIEFSGHKVLTLPSHNGKLLASEVATYIETFYADGNYQHMVFPGMVYISHPTEYGTLYSKAELEELSKICKHYQIPLFIDGARLGYGLAAKDTDVDFPTIAALSDVFYIGGTKMGALAGEAVVFTKKNRPKQFTTIVKQHGALLAKGRLLGLAFDRFFTDDLYLKIGKHAIDLAEELKIILEEKGYSFYLKSPTNQQFVIVENTKLADLAKNVAYSFWEKYDDHHTVIRLATSWSTSREDVTALRNVL

SEQ ID NO: 6303 - protein, 1008 aa, Streptococcus agalactiae
ATGAAAGATAGATATATTTTAGCAGTGGAAAGTTCATGTGATGAAACTAGTGTTGCTATTTTAAAAAATGATAAAGAGTTACTAGCTAATATTATTGCAAGTCAAGTTGAAAGTCACAAACGTTTTGGTGGTGTTGTTCCTGAAGTGGCAAGCCGTCATCACGTTGAAGTAGTAACAACCTGTTTTGAGGATGCTCTTCAAGAAGCAGGTATTGTTGCTAGCGATTTGGATGCTGTTGCTGTAACATATGGTCCGGGATTAGTAGGAGCCTTATTGGTAGGTATGGCTGCAGCAAAAGCTTTCGCTTGGGCAAATAAATTACCTCTAATTCCTGTAAACCACATGGCAGGTCATTTAATGGCAGCACGTGACGTTAAGGAACTTCAATACCCATTGTTAGCTTTGCTTGTCAGTGGGGGACATACAGAATTAGTATATGTTTCTGGACCGGGAGATTACAAAATAGTAGGAGAAACTCGGGATGATGCTGTTGGAGAAGCTTATGATAAAGTAGGCCGTGTTATGGGCTTAACTTATCCAGCAGGTCGCGAGATTGATCAGTTAGCTCATAAGGGTCAAGATACTTACCATTTTCCTAGAGCGATGATCAAAGAAGATCATCTTGAATTTTCTTTTTCTGGATTAAAATCTGCATTTATCAATTTACATCATAATGCAGAACAAAAGGGTGAAGCATTGGTTCTTGAAGATTTATGTGCTTCCTTTCAGGCGGCTGTTTTGGATATTTTATTGGCCAAAACTCAAAAAGCTTTGTTAAAGTATCCAGTGAAAACTTTAGTCGTTGCTGGTGGAGTTGCAGCTAATCAAGGACTTCGGGAACGCTTGGCTACTGATATTTCTCCTGATATTGATGTGGTTATTCCTCCTCTTAGATTATGTGGGGATAATGCAGGAATGATTGCATTAGCAGCAGCGATAGAGTTTGAAAAAGAGAATTTTGCTTCTTTAAAATTGAATGCCAAACCTAGCTTAGCTTTTGAAGGTTTA

SEQ ID NO: 6304 - protein, 336 aa, Streptococcus agalactiae
MKDRYILAVESSCDETSVAILKNDKELLANIIASQVESHKRFGGVVPEVASRHHVEVVTTCFEDALQEAGIVASDLDAVAVTYGPGLVGALLVGMAAAKAFAWANKLPLIPVNHMAGHLMAARDVKELQYPLLALLVSGGHTELVYVSGPGDYKIVGETRDDAVGEAYDKVGRVMGLTYPAGREIDQLAHKGQDTYHFPRAMIKEDHLEFSFSGLKSAFINLHHNAEQKGEALVLEDLCASFQAAVLDILLAKTQKALLKYPVKTLVVAGGVAANQGLRERLATDISPDIDVVIPPLRLCGDNAGMIALAAAIEFEKENFASLKLNAKPSLAFEGL

SEQ ID NO: 6305 - protein, 405 aa, Streptococcus agalactiae
ATGGAATCATCAGAACAAGCACTGGCTATATGGAGCGTACTATCTGATGTCTATGACAAATCTCCGTGGAGTTTATCGCAGATTTCAGAAGATTTAAAAAAAGATTCAACAGATTATTTTTTTGTTTATAATGACGGTGAGGTCATTGGTTTTTTGGCTCTTCAACAATTGGTAGGTGAAGTAGAAATTACTAATATTGCTGTTAAAAAAAATTATCAAGGTAAAGGTTATGCTTACCAGTTAATGTCAATGATTGCTGATATAGAGGTGCCAGTTTTTCTTGAGGTTCGTTATTCAAATATCGTAGCACAAAAACTTTATGAGAGGTGTGGTTTTGTAGTTTTAGGAAAGCGCAAAAATTATTACCATGATCCAATTGAAGGTGCTATAGTGATGCGCAAGGGA

SEQ ID NO: 6306 - protein, 135 aa, Streptococcus agalactiae
MESSEQALAIWSVLSDVYDKSPWSLSQISEDLKKDSTDYFFVYNDGEVIGFLALQQLVGEVEITNIAVKKNYQGKGYAYQLMSMIADIEVPVFLEVRYSNIVAQKLYERCGFVVLGKRKNYYHDPIEGAIVMRKG

SEQ ID NO: 6307 - protein, 690 aa, Streptococcus agalactiae
ATGATGAAAGTTTTAGCCTTTGATACTTCAAGCAAAGCACTATCAGTGGCTGTACTAAACAATATGGAATGTTTAGCGACTGTCACTATCAATATCAAAAAGAATCATAGCATTAATTTGATGCCAGCCATTGATTTTTTAATGCAATCAATTGATTTAGAACCTCAAGATTTGGACCGTATCGTAGTGGCAGAGGGTCCAGGATCTTATACGGGCTTACGTGTAGCTGTTGCTACAGCAAAAATGCTAGCTTATACGCTTAAGATTGACTTAGTTGGAGTATCTAGCCTGTACGCTTTAACAAATGGATTTTCAGAAAATGATTTGTTGGTACCACTTATAGATGCACGACGTAACAATGTTTATGTTGGTTTCTATCAAAATGGTGATACTGTTAAACCAGACTGTCACACTTCTCTTGAAGAAGTCTTACAAGAGGTGGGGAATAAAGCCAATGTTCATTTTGTCGGAGAGGTTGCAGCATTTTTTGATCAGATTAAGAAAGCCTTACCACATGCTAAAATTACAGAAACTTTACCTTGTGCAGTGGCAATTGGGCGCAAAGGACAAAAAATGGAAAGCGTTAATGTAGATGCGTTTGTTCCACGATACTTAAAACGAGTTGAAGCTGAGGAAAATTGGTTAAAAAACCACTGTGAAACGAATACAGAAGAATATATTAAGAGAGTT

SEQ ID NO: 6308 - protein, 230 aa, Streptococcus agalactiae
MMKVLAFDTSSKALSVAVLNNMECLATVTINIKKNHSINLMPAIDFLMQSIDLEPQDLDRIVVAEGPGSYTGLRVAVATAKMLAYTLKIDLVGVSSLYALTNGFSENDLLVPLIDARRNNVYVGFYQNGDTVKPDCHTSLEEVLQEVGNKANVHFVGEVAAFFDQIKKALPHAKITETLPCAVAIGRKGQKMESVNVDAFVPRYLKRVEAEENWLKNHCETNTEEYIKRV

SEQ ID NO: 6309 - protein, 228 aa, Streptococcus agalactiae
ATGATTTATAAAGTTTTCTATCAAGAAACAAAAGAACGCAACCCACGTCGTGAGCAAACCAAAACACTTTACGTTACTATTGATGCAGCTAATGAATTAGAAGGTCGCATTGCTGCACGTAAACTAGTTGAAGAAAATACAGCTTACAATATCGAATTCATCGAGTTACTTTCAGACAAACACCTTGAATATGAAAAAGAAACTGGTGTTTTCGAGCTCACTGAGTTC

SEQ ID NO: 6310 - protein, 76 aa, Streptococcus agalactiae; identical to SEQ ID NO: 3218

SEQ ID NO: 6311 - protein, 1677 aa, Streptococcus agalactiae
ATGTCAAATATCAACTTAAAACCCGAAGAAGTTGGGGTTTATGCGATTGGTGGTCTCGGTGAAATCGGAAAAAATACTTACGGTATCGAATATCAAGACGAAATTATTATTGTAGACGCTGGTATTAAATTCCCTGAAGATGATCTTTTGGGAATAGATTATGTTATCCCAGACTATTCATATATCGTTGAAAACATTGACCGTATCAAGGCCCTTGTTATAACTCATGGGCACGAGGACCACATCGGTGGTATTCCTTTTCTATTAAAACAAGCTAATTTACCGATTTATGCAGGTCCTCTCGCTCTTGCTCTAATCAAAGGTAAGTTAGAAGAACATGGTTTACTTCGTGACGCTACATTATACGAAATCCACGCTAATACAGAGCTGACTTTTAAAAACTTAAGCGTTACATTTTTCCGCACTACTCACTCCATTCCTGAACCATTAGGTATTGTTATTCATACCCCTCAAGGTAAGGTTATTTGTACAGGTGACTTCAAATTTGACTTTACACCTGTTGGGGAGCCCGCTGACTTACATCGTATGGCTGCTCTAGGTGAAGATGGTGTCCTCTGCCTTTTATCAGACTCGACAAATGCTGAAGTTCCAACCTTCACTAATTCCGAAAAAATTGTTGGGCAATCTATTATGAAGATTATCGAAGGTATCGACGGACGTATTATTTTCGCCTCTTTTGCTTCAAACATCTTCCGACTCCAACAGGCTGCTGAAGCTGCTGTTAAAACTGGTCGTAAAATTGCTGTTTTTGGACGGTCAATGGAAAAGGCAATTGTTAACGGTATTGAACTTGGCTATATTAAAGTTCCAAAAGGTACCTTCATTGAGCCAAGCGAACTTAAAAATCTTCATGCTAGTGAAGTTTTAATTATGTGTACAGGTAGTCAAGGTGAGTCTATGGCAGCACTTGCTCGTATCGCTAACGGTACTCATCGTCAAGTTACTTTGCAACCTGGTGATACTGTGATTTTCTCATCAAGCCCAATCCCTGGTAATACAACAAGTGTCAATAAATTAATCAATACCATTCAAGAAGCTGGTGTCGATGTTATTCATGGTAAAATTAACAATATCCATACCTCCGGCCATGGTGGTCAACAAGAACAAAAATTAATGTTACGCTTGATTAAACCAAAGTATTTCATGCCCGTACACGGTGAGTATCGCATGCAAAAAGTCCATGCTGGTTTAGCAGTTGACACAGGTATTCCTAAAGAGAATATCTTCATTATGGAAAACGGTGATGTTTTAGCTTTAACGAGCGACTCTGCTCGCATTGCTGGACATTTCAATGCTCAAGATATCTACGTTGATGGGAATGGTATTGGCGATATTGGTGCGGCAGTTCTACGTGATCGCCACGACTTATCTGAAGATGGTGTTGTCCTTGCCGTTGCTACCGTTGATTTCGATTCAAAAATGATTTTAGCTGGACCAGACATCCTTAGCCGAGGCTTTATCTATATGAGAGAATCTGGGGACCTTATTCGCGAAAGCCAACATATCTTATTCAATGCTATTCGTATTGCACTGAAAAATAAAGATGCAAGTATCCAATCAGTAAATGGAGCTATTGTTAATGCCTTACGACCATTCTTATATGAAAAAACTGAGCGTGAGCCTATCATTATTCCTATGGTCCTTACCCCTGATAAA

SEQ ID NO: 6312 - protein, 559 aa, Streptococcus agalactiae
MSNINLKPEEVGVYAIGGLGEIGKNTYGIEYQDEIIIVDAGIKFPEDDLLGIDYVIPDYSYIVENIDRIKALVITHGHEDHIGGIPFLLKQANLPIYAGPLALALIKGKLEEHGLLRDATLYEIHANTELTFKNLSVTFFRTTHSIPEPLGIVIHTPQGKVICTGDFKFDFTPVGEPADLHRMAALGEDGVLCLLSDSTNAEVPTFTNSEKIVGQSIMKIIEGIDGRIIFASFASNIFRLQQAAEAAVKTGRKIAVFGRSMEKAIVNGIELGYIKVPKGTFIEPSELKNLHASEVLIMCTGSQGESMAALARIANGTHRQVTLQPGDTVIFSSSPIPGNTTSVNKLINTIQEAGVDVIHGKINNIHTSGHGGQQEQKLMLRLIKPKYFMPVHGEYRMQKVHAGLAVDTGIPKENIFIMENGDVLALTSDSARIAGHFNAQDIYVDGNGIGDIGAAVLRDRHDLSEDGVVLAVATVDFDSKMILAGPDILSRGFIYMRESGDLIRESQHILFNAIRIALKNKDASIQSVNGAIVNALRPFLYEKTEREPIIIPMVLTPDK

SEQ ID NO: 6313 - protein, 507 aa, Streptococcus agalactiae
ATGGAGGAAAACATGAACATAAAACAATTAAAGTCTAAAACAATGCTTGGAACAGTGGCTTTGGTGTCCGCTTTTTCATTTGCTTCAACAAATGCAGATGCGAATACATATAACTATGCAGTAGATGTAGACTACCTAGCAAGTGCGGAGGAAATTGCTCAAGCACATCCAGCTAGTAATACGTTTCCACTAGGTCAATGCACATGGGGTGTAAAGGAGATGGCAACATGGGCAGGTAACTGGTGGGGAAACGGTGGTGATTGGGCTGCGAGCGCCACATCAGCTGGTTATACAGTAGGAACACAACCTCGCGTGGGTTCTATCGTATGTTGGACTGATGGTAGTTATGGACATGTGGCTTATGTTACAGCTGTAGATCCTGTCACTAATAAAATTCAGGTTTTAGAATCTAATTATGCAGGTCATCAATGGATTGATAATTATCGTGGTTGGTTTGATCCACAAAATACAGCGACACCAGGGGTAGTTAGCTACATTTATCCGAAT

SEQ ID NO: 6314 - protein, 169 aa, Streptococcus agalactiae
MEENMNIKQLKSKTMLGTVALVSAFSFASTNADANTYNYAVDVDYLASAEEIAQAHPASNTFPLGQCTWGVKEMATWAGNWWGNGGDWAASATSAGYTVGTQPRVGSIVCWTDGSYGHVAYVTAVDPVTNKIQVLESNYAGHQWIDNYRGWFDPQNTATPGVVSYIYPN

SEQ ID NO: 6315 - protein, 1344 aa, Streptococcus agalactiae
ATGACTATCACAGCAGAAGATATTCGTCGCGAAGTTAAGGAAAAAAATGTTACCTTCCTCCGTTTGATGTTCACAGATATCTTAGGAGTAATGAAAAATGTCGAAATTCCGGCTACAGATGAACAATTAGACAAAGTTTTATCAAATAAAGCAATGTTTGATGGATCTTCTATTGAGGGCTTTGTTCGTATCAATGAATCTGATATGTATTTATATCCTGATTTAGATACTTGGATTGTTTTTCCTTGGGGAGATGAAAATGGAGCTGTTGCAGGTCTAATCTGTGATATCTATACAGCAGAAGGAGAACCTTTTGCCGGAGATCCACGTGGAAATCTTAAGCGTAATATGAAACGTATGCAAGAGATGGGCTATAAGTCATTTAACTTAGGACCAGAACCTGAATTTTTCCTATTTAAAATGGATGAAAATGGTAACCCAACACTTGATGTTAATGACAAAGGAGGCTACTTTGACTTAGCTCCAACAGACTTAGCAGATAATACACGTCGTGAAATTGTTAATGTCTTAACACAAATGGGCTTTGAAGTTGAAGCTAGTCATCATGAAGTAGCAGTTGGACAGCATGAGATTGACTTTAAATATGATGATGTTTTAAAAGCCTGTGACAACATTCAATTATTTAAACTGGTTGTTAAAACAATTGCTCGTAAGCATGGTTTATATGCTACTTTTATGGCAAAACCTAAGTTTGGTATCAATGGTTCAGGTATGCATTGTAATATGTCTCTTTTTGATAATGAAGGGAACAATGCTTTCTTTGATCCAGAAGATCCACGTGGAATGCAATTATCAGAGGATGCCTACTACTTTTTAGGTGGGTTAATGGAACACGCTTACAATTACACAGCTATCATTAATCCAACTGTTAATTCTTATAAACGTTTGGTACCAGGATACGAAGCACCAGTTTACATTGCTTGGGCAGGTCGCAATCGTTCGCCACTTATTCGTGTACCTGCATCTCGAGGTATGGGAACACGCCTAGAATTGCGCTCGGTTGACCCAACAGCAAATCCTTATCTTGCTTTATCAGTACTTTTGGGATCAGGACTTGAGGGAATCGAGAATAAAATTGAAGCACCAGAACCAATTGAGACAAATATCTATGCTATGACTGTAGAAGAACGTCGTCAAGCAGGTATTGTTGATTTACCATCTACTCTTCATAATGCTCTTAAAGCACTTGAAGAAGATGAAGTGGTAAAAGCGGCCCTAGGAACTCATATCTATACTAATTTCTTAGATGCTAAGCGTATTGAATGGGCAAGTTATGCGACTTATGTTTCACAATGGGAAATTGATAATTACCTAGATTTATAT

SEQ ID NO: 6316 - protein, 448 aa, Streptococcus agalactiae
MTITAEDIRREVKEKNVTFLRLMFTDILGVMKNVEIPATDEQLDKVLSNKAMFDGSSIEGFVRINESDMYLYPDLDTWIVFPWGDENGAVAGLICDIYTAEGEPFAGDPRGNLKRNMKRMQEMGYKSFNLGPEPEFFLFKMDENGNPTLDVNDKGGYFDLAPTDLADNTRREIVNVLTQMGFEVEASHHEVAVGQHEIDFKYDDVLKACDNIQLFKLVVKTIARKHGLYATFMAKPKFGINGSGMHCNMSLFDNEGNNAFFDPEDPRGMQLSEDAYYFLGGLMEHAYNYTAIINPTVNSYKRLVPGYEAPVYIAWAGRNRSPLIRVPASRGMGTRLELRSVDPTANPYLALSVLLGSGLEGIENKIEAPEPIETNIYAMTVEERRQAGIVDLPSTLHNALKALEEDEVVKAALGTHIYTNFLDAKRIEWASYATYVSQWEIDNYLDLY

SEQ ID NO: 6317 - protein, 369 aa, Streptococcus agalactiae
ATGAAAGAAAGAGAACTTAGGCGTACAATGGCTGTATTCCCAATTGGAACTGTTATGAAGTTGACAGATTTGACTGCCAGACAAATTCGCTATTATGAGGATCAAGGGTTAATCACACCTGAACGTACTGAAGGTAACCGCCGCATGTTTTCACTGAATGATATGGACCGCTTACTGGAAATAAAAGACTTCATTAGCGATGGTTTGCATATTTCTGATATTAAAAATGAATACATGCAAAGACAACATAAGTCCAAAGAGAAACAAAAGTCATTATCAGATGCCGAGGTTCGTCGACTTTTACAAGATGAGCTCCGTAATCAAGGGCGTTTTTCAAGTCCTTCACAGCACATTGGAAATATGCATTTG

SEQ ID NO: 6318 - protein, 123 aa, Streptococcus agalactiae
MKERELRRTMAVFPIGTVMKLTDLTARQIRYYEDQGLITPERTEGNRRMFSLNDMDRLLEIKDFISDGLHISDIKNEYMQRQHKSKEKQKSLSDAEVRRLLQDELRNQGRFSSPSQHIGNMHL

SEQ ID NO: 6319 - protein, 537 aa, Streptococcus agalactiae
ATGAAAACGTTAAAAAAATTATTATCTAATTACAAATTTGATATTAAAAAGTTTAAATTGGGAATGAGAACATTTAAAACAGGCTTATCGGTCTTTTTAGTTTTATTGGTTTTTCATTTATTTGGTTGGAAAGGGCTTCAAATTGGTGCTCTAACTGCTGTATTTAGTTTAAGAGAAGACTTTGATAAAAGCGTGCACTTTGGTTTTTCTAGAATTATTGGTAATAGTATAGGTGGCTTACTCTCCTTAGTATTTTTTGCATTCAATGAGATATTTCATCAAGCTTTTTGGGTTACATTATTAATTGTTCCTATTTGTACCATGTTATGTATCATGATTAATGTTGCTTGTAACAATAAATCAGGTATTATTGGGGGGACAGCCGCATTACTTATTATAACTTTATCAATCCCAAGCGGAGAGACAATTCTATATGTTTTTGCACGTATTTTTGAAACTTTTTGTGGTGTTTTTATTGCAATGATGGTTAATACAGATATTGAAATACTTCGGAAAAAACTAAAAAATAACAAATTA

SEQ ID NO: 6320 - protein, 179 aa, Streptococcus agalactiae
MKTLKKLLSNYKFDIKKFKLGMRTFKTGLSVFLVLLVFHLFGWKGLQIGALTAVFSLREDFDKSVHFGFSRIIGNSIGGLLSLVFFAFNEIFHQAFWVTLLIVPICTMLCIMINVACNNKSGIIGGTAALLIITLSIPSGETILYVFARIFETFCGVFIAMMVNTDIEILRKKLKNNKL

SEQ ID NO: 6321 - protein, 1194 aa, Streptococcus agalactiae
ATGGCTAAATTGACTGTTAAAGACGTTGATTTGAAAGGTAAAAAAGTCCTCGTTCGTGTTGACTTTAATGTGCCTTTGAAAGACGGCGTTATCACTAACGACAACCGTATCACTGCGGCTCTTCCAACAATCAAGTATATCATCGAACAAGGTGGTCGTGCTATCCTCTTCTCTCACCTTGGACGTGTTAAAGAAGAAGCTGACAAAGAAGGAAAATCACTTGCACCGGTAGCTGCTGATTTAGCTGCTAAACTTGGTCAAGATGTTGTATTCCCAGGTGTTACTCGTGGTGCAAAATTAGAAGAAGCAATCAATGCTTTGGAAGATGGACAAGTTCTTTTGGTTGAAAACACTCGTTTTGAAGATGTTGACGGTAAGAAAGAATCTAAGAATGACGAAGAACTTGGTAAATACTGGGCTTCACTTGGAGATGGAATCTTCGTTAACGATGCATTTGGTACAGCACACCGTGCTCATGCATCAAACGTAGGTATTTCAGCAAACGTTGAAAAAGCTGTAGCTGGTTTCCTTCTTGAAAACGAAATTGCTTACATCCAAGAAGCAGTTGAAACTCCAGAACGCCCATTCGTAGCTATTCTTGGTGGCTCAAAAGTTTCTGATAAGATTGGTGTTATCGAAAACCTTCTTGAAAAAGCTGATAAAGTTCTTATCGGTGGTGGTATGACTTACACATTCTACAAAGCTCAAGGTATCGAAATCGGTAACTCACTTGTAGAAGAAGACAAATTGGATGTTGCTAAAGACCTCCTTGAAAAATCAAACGGTAAATTGATCTTGCCAGTTGACTCAAAAGAAGCAAACGCATTTGCTGGTTATACTGAAGTTCGCGACACTGAAGGTGAAGCAGTTTCAGAAGGGTTCCTTGGTCTTGACATCGGTCCTAAATCAATCGCTAAATTTGATGAAGCACTTACTGGTGCTAAAACAGTTGTATGGAACGGACCTATGGGTGTCTTTGAAAACCCTGACTTCCAAGCTGGTACAATCGGTGTAATGGACGCTATCGTTAAACAACTAGGCGTTAAATCAATCATCGGTGGTGGTGATTCAGCAGCAGCTGCTATCAACCTTGGCCGTGCTGACAAATTCTCATGGATCTCTACTGGTGGTGGAGCAAGCATGGAATTGCTCGAAGGTAAAGTATTACCAGGTTTGGCAGCATTGACTGAAAAA

SEQ ID NO: 6322 - protein, 398 aa, Streptococcus agalactiae
MAKLTVKDVDLKGKKVLVRVDFNVPLKDGVITNDNRITAALPTIKYIIEQGGRAILFSHLGRVKEEADKEGKSLAPVAADLAAKLGQDVVFPGVTRGAKLEEAINALEDGQVLLVENTRFEDVDGKKESKNDEELGKYWASLGDGIFVNDAFGTAHRAHASNVGISANVEKAVAGFLLENEIAYIQEAVETPERPFVAILGGSKVSDKIGVIENLLEKADKVLIGGGMTYTFYKAQGIEIGNSLVEEDKLDVAKDLLEKSNGKLILPVDSKEANAFAGYTEVRDTEGEAVSEGFLGLDIGPKSIAKFDEALTGAKTVVWNGPMGVFENPDFQAGTIGVMDAIVKQLGVKSIIGGGDSAAAAINLGRADKFSWISTGGGASMELLEGKVLPGLAALTEK

SEQ ID NO: 6323 - protein, 297 aa, Streptococcus agalactiae
TTGCTTTTCCTTAAAAAAGGAATGAAATCTAAAGAGAGTCGCCGTCAGGCAGTTCAAAAAGATACTAATTTAATTATGCTTTTTGGAGATAATTTAGTTGATTTTGCTGATTTTTCTAAATCATCTAGTACAGATAGAGAACAACTACTAACTAAACTTCAAAGTGAGTTTGGTAGTAAATTTATTGTTTTCCCAAATCCTATGTACGGTTCTTGGGAAAGTGCTATTTATCAAGGAAAACATCTGGATGTTCAAAAACAATTGAAAGAACGACAAAAAATGTTGCATTCGTATGAT

SEQ ID NO: 6324 - protein, 99 aa, Streptococcus agalactiae
MLFLKKGMKSKESRRQAVQKDTNLIMLFGDNLVDFADFSKSSSTDREQLLTKLQSEFGSKFIVFPNPMYGSWESAIYQGKHLDVQKQLKERQKMLHSYD

SEQ ID NO: 6325 - protein, 447 aa, Streptococcus agalactiae
ATGAAACGTATTGCTGTTTTAACTAGTGGTGGTGACGCCCCTGGTATGAACGCTGCTATCCGTGCAGTTGTTCGTAAAGCAATTTCTGAAGGTATGGAAGTTTACGGCATCAACCAAGGTTACTATGGTATGGTGACAGGGGATATTTTCCCTTTGGATGCTAATTCTGTTGGGGATACTATCAACCGTGGAGGAACGTTTTTACGTTCAGCACGTTATCCTGAATTTGCTGAACTTGAAGGTCAGCTTAAAGGGATTGAACAGCTTAAAAAACACGGCATTGAAGGTGTAGTAGTTATCGGTGGTGATGGTTCTTATCATGGTGCTATGCGTCTAACTGAGCACGGTTTCCCAGCTGTTGGTTTGCCGGGTACAATTGATAATGATATCGTTGGCACTGACTATACTATTGGTTTTGACACAGCCAGTTGCGACACNNNNNTTAAT

SEQ ID NO: 6326 - protein, 149 aa, Streptococcus agalactiae
  VARIANT 147, 148: Xaa = Any Amino Acid
MKRIAVLTSGGDAPGMNAAIRAVVRKAISEGMEVYGINQGYYGMVTGDIFPLDANSVGDTINRGGTFLRSARYPEFAELEGQLKGIEQLKKHGIEGVVVIGGDGSYHGAMRLTEHGFPAVGLPGTIDNDIVGTDYTIGFDTASCDTXXN

SEQ ID NO: 6327 - protein, 228 aa, Streptococcus agalactiae
ATGTATTCACAAGCGCAAACTCCGAGGAAATCAAGCAAACTTAAGCCACTAACTCTTGAAGATAAAACCTATAACCATACGCTATCCAAAGAGAGAATCAAGGTTGAGAATATTTTTGCCAAAGTAAAAACGTTTAAAATATTTTCAACAACCTATCGAAATCGACGCAAACGGTTTGGATTACGAATGAATTTGATTGCTGGAATGATCAACCGTGAACTAGGATTT

SEQ ID NO: 6328 - protein, 76 aa, Streptococcus agalactiae
MYSQAQTPRKSSKLKPLTLEDKTYNHTLSKERIKVENIFAKVKTFKIFSTTYRNRRKRFGLRMNLIAGMINRELGF

SEQ ID NO: 6329 - protein, 1559 aa, Streptococcus agalactiae
ATGACTGATATTTCTATATTGAATGATATCCAAAAAATTATCGTTCTAGATTACGGTAGTCAATATAACCAGCTTATCGCACGTCGTATCCGTGAATTTGGTGTATTTTCTGAGTTAAAATCACATAAAATTACGGCTGATGAAATTCGCGATATTAATCCTATTGGTATCGTACTTTCAGGTGGTCCAAATTCCGTATACGCTGATGGCGCTTTTGGAATCGATGAAGAAATTTTTGAATTAGGAATTCCAATCTTAGGAATTTGTTATGGTATGCAACTGATTACCCATAAACTCGGTGGTAAGGTTCTTCCTGCGGGAGAAGCTGGTCATCGTGAGTATGGTCAATCAGCACTTCGCCTACGCTCAGAATCAGCACTCTTTGCTGGCACTCCTCAAGAACAACTTGTTTTGATGAGCCATGGTGATGCTGTCACTGAAATTCCTGAGGGTTTCCATCTCGTTGGTGACTCTGTTGACTGTCCATTTGCTGCAATGGAAAATACTGAAAAACAATTTTATGGTATCCAATTCCACCCCGAAGTTCGTCACTCAGTATATGGCAATGATATCCTTAAAAATTTTGCTGTTAATATCTGTGGCGCACGTGGTGATTGGTCAATGGATAACTTCATTGATATGAAATTGCAAAAATACGTGAAACTGTAGGCGATCGTAAAGTACTTCTTGGACTATCTGGCGGTGTTGATTCATCTGTTGTCGGAGTACTCCTACAACGTGCTATCGGTGATCAATTAACATGTATTTTTGTAGATCATGGTTTATTACGTAAAAATGAAGGTGACCAAGTTATGGATATGCTTGGTGGTAAATTTGGACTTAATATTATCCGTGTTGATGCTTCAAAACGCTTCCTAGACCTTCTTTCTGGTGTTGAAGATCCCGAGAGAAAACGAAAAATCATCGGAAATGAGTTCGTGTACGTTTTTGATGATGAGGCAAGTAAACTTAAAGGCGTTGATTTCCTTGCTCAAGGTACCCTCTACACAGATATTATTGAATCTGGGACAGAAACAGCCCAAACAATCAAGTCACACCATAATGTTGGTGGATTGCCAGAAGATATGCAATTTGAATTGATTGAGCCACTTAACACATTATTCAAAGATGAGGTTCGCGCTCTTGGTACTGCACTTGGAATGCCTGATGAAGTTGTATGGCGTCAACCATTCCCTGGACCTGGTCTTGCTATTCGCGTTATGGGTGAAATTACCGAAGAAAAACTTGAAACAGTCCGCGAATCAGATGCTATTCTTCGTGAAGAAATCGCTAAAGCTGGTCTAGATCGTGACGTATGGCAGTATTTCACAGTTAATACTGGCGTACGTTCTGTCGGTGTTATGGGAGATGGTCGTACTTATGACTATACAATTGCTATCCGTGCAATTACTTCAATTGATGGCATGACAGCTGATTTTGCGCAACTTCCTTGGGATGTACTTAAGAAAATTTCGATACGTATTGTTAACGAAGTTGATCACGTTAACCGTATTGTTTATGATATCACAAGTAAACCACCTGCAACTGTTGAGTGGGAA

SEQ ID NO: 6330 - protein, 520 aa, Streptococcus agalactiae
  VARIANT 215: Xaa = Any Amino Acid
MTDISILNDIQKIIVLDYGSQYNQLIARRIREFGVFSELKSHKITADEIRDINPIGIVLSGGPNSVYADGAFGIDEEIFELGIPILGICYGMQLITHKLGGKVLPAGEAGHREYGQSALRLRSESALFAGTPQEQLVLMSHGDAVTEIPEGFHLVGDSVDCPFAAMENTEKQFYGIQFHPEVRHSVYGNDILKNFAVNICGARGDWSMDNFIDMXIAKIRETVGDRKVLLGLSGGVDSSVVGVLLQRAIGDQLTCIFVDHGLLRKNEGDQVMDMLGGKFGLNIIRVDASKRFLDLLSGVEDPERKRKIIGNEFVYVFDDEASKLKGVDFLAQGTLYTDIIESGTETAQTIKSHHNVGGLPEDMQFELIEPLNTLFKDEVRALGTALGMPDEVVWRQPFPGPGLAIRVMGEITEEKLETVRESDAILREEIAKAGLDRDVWQYFTVNTGVRSVGVMGDGRTYDYTIAIRAITSIDGMTADFAQLPWDVLKKISIRIVNEVDHVNRIVYDITSKPPATVEWE

SEQ ID NO: 6331 - protein, 696 aa, Streptococcus agalactiae
TTGTTACCAGCATATATTAAAATTCACGACGCTATTAAAAAGGAAATCGATAAAGGGACTTGGAAGATTGGGCAGCGGTTACCTAGCGAAAGAGATTTAGCGGATGATTATAGTGTAAGTCGTATGACACTTCGCCAATCAATTACATTGTTAGTTGAAGAAGGTATTTTGGAGAGACGAGTTGGTAGTGGCACCTATGTTGCTAGTCATCGTGTTCAAGAAAAAATGCGGGGAACAACTAGTTTTACAGAAATTGTCAATTCTCAAGGGCGTAAGCCATCCAGTAAACTAATCTCATTTCAAAGAAAACTAGCAAATGAAACCGAAATTCAAAAATTAAATTTATCACAGTCAGATTATGTGGTTCGTATGGAAAGGGTACGTTATGCTGATAAGGTACCGTTGGTTTATGAGATAGCCTCTATACCAGAGAATTTAATTAAAGGTTTTGAACAATCAGAGGTTACAGAACATTTCTTTAAAACCTTAACAGAGAATGGCTACGAAATTGGGAAAAGCCAACAAACTATATATGCTAGAAATGCTAGTGAACGTGTTGCTTCGCATTTAGAAGTTAACGCAGGCCATGCTATTTTGGCATTGACACAAGTTTCATACTTTACTGATGGTAAGCCTTTTGAATATGTTCATGGGCAATATGTTGGAGATCGTTTTGAGTTTTATTTAGAGAATAAC

SEQ ID NO: 6332 - protein, 232 aa, Streptococcus agalactiae
MLPAYIKIHDAIKKEIDKGTWKIGQRLPSERDLADDYSVSRMTLRQSITLLVEEGILERRVGSGTYVASHRVQEKMRGTTSFTEIVNSQGRKPSSKLISFQRKLANETEIQKLNLSQSDYVVRMERVRYADKVPLVYEIASIPENLIKGFEQSEVTEHFFKTLTENGYEIGKSQQTIYARNASERVASHLEVNAGHAILALTQVSYFTDGKPFEYVHGQYVGDRFEFYLENN

SEQ ID NO: 6333 - protein, 1332 aa, Streptococcus agalactiae
ATGTCTCAATCTTACATTAATGTTATCGGCGCTGGTTTGGCTGGTTCTGAAGCAGCTTATCAAATTGCTAAACGTGGAATACCAGTTAAGCTTTATGAAATGCGTGGGGTTAAATCAACCCCTCAACATAAAACAGATAATTTTGCAGAATTAGTATGTTCCAATTCATTCCGCGGTGATTCTCTAACAAATGCAGTTGGTCTTTTAAAAGAAGAAATGCGTCGTTTGGATTCTATCATTATGAGAAATGGGGAGGCACATCGAGTTCCAGCAGGTGGAGCCATGGCCGTTGATAGAGAAGGTTATTCTGAAGCTGTTACTGAGGAAATCCATAAACATCCATTAATCGAAGTAATTCGTGATGAAATCACAGATATCCCTGGAGATGCTATTACAGTTATCGCTACAGGACCATTAACAAGTGATAGTCTGGCAGCTAAAATTCATGAACTTAATGGTGGTGACGGTTTTTATTTTTACGATGCCGCCGCTCCAATTGTCGATAAAAATACGATTGACATGAATAAAGTTTACCTTAAGTCTAGGTATGACAAAGGTGAAGCAGCTTATCTAAATTGTCCAATGACCAAAGAAGAATTTATGGCATTTCACGAAGCTTTAACTACAGCAGAGGAAGCACCACTAAATTCTTTTGAGAAAGAAAAATACTTCGAAGGTTGTATGCCTATCGAAGTGATGGCTAAGCGTGGTATTAAAACGATGCTTTATGGTCCAATGAAACCAGTTGGTTTGGAGTATCCTGAGGACTACAAAGGACCGCGAGATGGTGAATTTAAAACACCATATGCTGTTGTTCAATTACGTCAAGATAATGCTGCAGGCTCTCTTTATAACATAGTTGGTTTCCAAACTCATCTTAAGTGGGGAGAACAAAAACGTGTATTTCAAATGATTCCTGGTCTTGAAAATGCTGAATTTGTCCGGTATGGTGTTATGCATCGCAATTCTTATATGGATTCACCAAATCTTTTAGACCAAACCTTTGCTACACGTAAGAACCCAAATCTTTTCTTTGCTGGACAAATGACCGGTGTTGAAGGTTATGTAGAATCGGCAGCAAGTGGTCTTGTAGCGGGAATCAATGCTGCCCGTCGCTTTAATGGGGAGAGTGAAGTAGTTTTCCCACAAACTACTGCTATTGGTGCACTGCCACATTATATTACACATACAGACAGCAAACATTTCCAACCAATGAATGTTAACTTTGGTATCATCAAAGAATTAGAAGGCCCACGAATCCGTGATAAGAAAGAGCGTTATGAAGCTATTGCTACACGAGCTTTGAAAGATTTAGAAAAATTTCTCAACTAT

SEQ ID NO: 6334 - protein, 444 aa, Streptococcus agalactiae
MSQSYINVIGAGLAGSEAAYQIAKRGIPVKLYEMRGVKSTPQHKTDNFAELVCSNSFRGDSLTNAVGLLKEEMRRLDSIIMRNGEAHRVPAGGAMAVDREGYSEAVTEEIHKHPLIEVIRDEITDIPGDAITVIATGPLTSDSLAAKIHELNGGDGFYFYDAAAPIVDKNTIDMNKVYLKSRYDKGEAAYLNCPMTKEEFMAFHEALTTAEEAPLNSFEKEKYFEGCMPIEVMAKRGIKTMLYGPMKPVGLEYPEDYKGPRDGEFKTPYAVVQLRQDNAAGSLYNIVGFQTHLKWGEQKRVFQMIPGLENAEFVRYGVMHRNSYMDSPNLLDQTFATRKNPNLFFAGQMTGVEGYVESAASGLVAGINAARRFNGESEVVFPQTTAIGALPHYITHTDSKHFQPMNVNFGIIKELEGPRIRDKKERYEAIATRALKDLEKFLNY

SEQ ID NO: 6335 - protein, 741 aa, Streptococcus agalactiae
ATGCACTATAAAGAATTACTTGAGTCATCCGAAAAACCTTATTTGGAAACTAATCGGTATAAACATTTTAAGAATATAATCACTTCAGAGCGTTATTTTTCAAACTATATTAGCTACAAAATAATGCCTACAGTAAGTGAGTTTTTACAGGATATGATCTATTTAGCAGATGAACAAAAAGATTATCAGTCTGATTTTGCTTTTGTGTTTTTTGAGGAAAATGCTGAATTGAGCAGTGAATTACAGAGAACTTTATCACAACAAGGCTTTGAATCAGAGAAACATATCATATTTACAAATTCATTAAATCATCTTAAACTTTTTGAAAAAGAATTTGATGACATCACATTTACTAAACTTAATGAAAATTACCTAGAAAAATACCTAAAGTTCAAATATGAACAAAGTATAGTTTACGGAGAAACTTACGCTAAGCAAATGTATAATGATAATCGTGCTAATCTTTTAAATAATAATGCTAAAGTTTACCTAGCTATTAAAGATAATCAAATTATTGGAGATGTAACAGCTTGGGACTATGGTGAATACGTGGAAATAGATGATTTTTATGTCCAAGAATCCTACAGAGGACAAGGAATTGGTACGCGCCTACAATTTGATGCAAGTAGGGGGTTTAAGAAAGTTATCTTAATTTCAGAAGAAGAAAACAGAAAAATGTATGAGCACCAAGGTTATGAGGAAGTCGCCTATTATTGGACCGCTTTACGGAGCCCTCGAAAG

SEQ ID NO: 6336 - protein, 247 aa, Streptococcus agalactiae
MHYKELLESSEKPYLETNRYKHFKNIITSERYFSNYISYKIMPTVSEFLQDMIYLADEQKDYQSDFAFVFFEENAELSSELQRTLSQQGFESEKHIIFTNSLNHLKLFEKEFDDITFTKLNENYLEKYLKFKYEQSIVYGETYAKQMYNDNRANLLNNNAKVYLAIKDNQIIGDVTAWDYGEYVEIDDFYVQESYRGQGIGTRLQFDASRGFKKVILISEEENRKMYEHQGYEEVAYYWTALRSPRK

SEQ ID NO: 6337 - protein, 846 aa, Streptococcus agalactiae
ATGAAAATCAAAAAGCTATTAGGATTAACGACAACAGTAGTAATTTCAGCACTTATTCTAGGAGCCTGTGGTCAGTCTAAAAATGAAGACGCCAAAGTCGTTAGAGTTGGAACAATGGTAAAGAGTAAAACTGAAAAAGCTCGTTGGGATAAAATCGAAGAATTAGTTAAGAAAAAAGGCGTTAAGCTAAAATTTACGGAATTCACAGATTATACACAACCTAATAAAGCTTTAGAAAGTGATGAGATTGATATTAATGCTTTCCAGCATTATAATTACTTAAACAATTGGAATAAAGCAAATAAGACCAATCTTGTTTCCGTTGCTGAGACATACTTTACTTCCTTTAGATTATACTCTGGTACTAAGAACGGTAAAGGTAAATACCAAACAGTTTCTGAAATTCCAAATAAAGCAACTATTACTATCCCAAACGATGCAGTTAACGAAAGTCGCTCTCTCTACTTGTTACAATCAGCAGGCTTGCTAAAATTGAAAGTATCAGGTGATACATTAGCAACAATGTCAGATGTTGTTTCCAATCCTAAATCTTTAGATTTAAAAGAAGTAGATGCAGCACAGACCGCACGTTCTTTGGATTCCACAGATGCAGCAGTTATTAATAATGATTTTGTGACAGAAGCAGGAATAAATCCTAAATCAGCTATTTTTATTGAACCAAAAAGTAAAAATGCAAAACAATGGTACAACCTTTTAGTTGCTCAAAAAGGTTGGCAAGACAAATCAAAAGCTAAAGCCATTAAAGAAGTTGTGAAAGCTTACCATACAGATGCGGTTAAAAAAGTTATCGAAAAAACATCTCAAGGTTTAGATCAACCTGTTTGG

SEQ ID NO: 6338 - protein, 282 aa, Streptococcus agalactiae
MKIKKLLGLTTTVVISALILGACGQSKNEDAKVVRVGTMVKSKTEKARWDKIEELVKKKGVKLKFTEFTDYTQPNKALESDEIDINAFQHYNYLNNWNKANKTNLVSVAETYFTSFRLYSGTKNGKGKYQTVSEIPNKATITIPNDAVNESRSLYLLQSAGLLKLKVSGDTLATMSDVVSNPKSLDLKEVDAAQTARSLDSTDAAVINNDFVTEAGINPKSAIFIEPKSKNAKQWYNLLVAQKGWQDKSKAKAIKEVVKAYHTDAVKKVIEKTSQGLDQPVW

SEQ ID NO: 6339 - protein, 177 aa, Streptococcus agalactiae
ATGGCCAAGACAAGTAAAAAATTGACAAAATCTTTAGGGCCTATTGGTAAATTAATTTCAATAATCCCTGACACAACTGAACTTATTGGAAAAGCAATTGATAATTCTCGTCCAATTATTGAAAAAGAACTTGATCGTCGTCATGAAAAAAACAGACTTATACTCAGCTTGATAATG

SEQ ID NO: 6340 - protein, 59 aa, Streptococcus agalactiae
MAKTSKKLTKSLGPIGKLISIIPDTTELIGKAIDNSRPIIEKELDRRHEKNRLILSLIM

SEQ ID NO: 6341 - protein, 960 aa, Streptococcus agalactiae
ATGCGGCGAAAAATAGTTTTACTTTTTGTAGTTCCAATGCTTATAGTTTTAGGAATTTTAGGAGTGGTAGTTCATTATTATGGTTCAGCATTAAATATTTATCTATTACCTCCTAGTAGCGAACGTTATGGACGTGTTATTTTAGATCGTGTTGAACAGCGTGGTTTGTATTCGCAAGGTCGTCAATGGCAAATTATAAGACAACGATCAGAAAAAAAGTTGAAAACGTCAAAATCTTACCAAGAGAGTCGCAACATTGTACAGGAAGCAGTACGGTATGGAGGAGGTAAACATAGTCAAATATTATCCAAAGAGACTGTACGAAGAGATACCCTAGATAGTCGATATCCAGAATATCGAAGATTAAACGAAGACATTCTCTTAATTACTATTCCTTCTATAAGTAAGTTAGATAAACGATCTATTAGCCATTATAGTGGTAAATTACAAAATATATTGATGGAAAAAAGTTATAAGGGACTCATTTTAGACTTATCGAATAATACTGGCGGCAATATGATCCCTATGATTGGGGGGTTAGCCTCTATTTTACCAAATGATACCCTATTTCATTATACTGATAAGTATGGAAATAAGAAAACAATCACGATGAAAAATATACCGCTAGAAGCATTAAAAATATCTAGGAAAACAATCAATACTAAGCATGTTCCAATCGCTATTATAACTAATCATAAAACTGCTAGTTCGGCAGAAATGACTTTTTTATCATTTAAAGGATTACCTAATGTTAAAAGCTTTGGTCAAGCCACAGCAGGATATACGACTGTTAATGAAACTTTCATGCTTTACGACGGTGCTAGATTAGCTTTAACTACAGGAATAGTTAGTGATCGACAAGGATATAAATACGAGAACACCCCTATCTTACCAGATCAAGTAACCAGCCTTCCTTTACAAGAGTCACAGTCTTGGTTAAAGAGTAGAATCAATCAAAAT

SEQ ID NO: 6342 - protein, 320 aa, Streptococcus agalactiae
MRRKIVLLFVVPMLIVLGILGVVVHYYGSALNIYLLPPSSERYGRVILDRVEQRGLYSQGRQWQIIRQRSEKKLKTSKSYQESRNIVQEAVRYGGGKHSQILSKETVRRDTLDSRYPEYRRLNEDILLITIPSISKLDKRSISHYSGKLQNILMEKSYKGLILDLSNNTGGNMIPMIGGLASILPNDTLFHYTDKYGNKKTITMKNIPLEALKISRKTINTKHVPIAIITNHKTASSAEMTFLSFKGLPNVKSFGQATAGYTTVNETFMLYDGARLALTTGIVSDRQGYKYENTPILPDQVTSLPLQESQSWLKSRINQN

SEQ ID NO: 6343 - protein, 750 aa, Streptococcus agalactiae
ATGTTATTAGAAATCAATCACTTAGAAAAAGTTTTTCGTACACGTTTTTCAAAAGAAGAGACAAGGGCTCTACAAGACGTCGATTTTAAAGTTGAACAAGGGGAATTCATTGCTATTATGGGAGAGTCTGGTTCGGGAAAAACAACTCTGCTAAATATTTTAGCTACTTTAGAAAAACCGACAAATGGACAAGTGATTTTAAATGGGGAAGATATTACGAAAATTAAAGAGGCAAAATTAGCGAGTTTTCGTTTGAAAAATCTTGGTTTCGTCTTTCAGGACTTCAACCTTTTGGATACTCTCTCTGTAAGAGATAATATCTATCTTCCTTTAGTTCTTGATCGTAAACGTTACAAAGAAATGGATCATCGTTTGTCAGAATTATCTTCTCATCTGAGAATTGATGACTTATTAGATAAGAGACCTTTCGAGCTTTCTGGTGGTCAAAAGCAACGTGTAGCGATTGCTCGTAGTTTGATAACCAACCCTCAAATTTTATTAGCAGATGAACCAACAGCAGCGTTAGATTACCGTAATTCAGAAGACTTGCTGAATTTATTTGAAACTATTAACTTGGATGGACAAACTATTTTGATGGTAACCCATTCAGCAAATGCTGCTAGTCATGCCAAACGCGTTTTATTTATCAAAGATGGACGTATTTTTCACCAACTTTATCGTGGTAATAAGAATAATAGCGAATTCAATAAAGATATTTCTTTAACAATGTCTGCCATATTAGGGGGTGAA

SEQ ID NO: 6344 - protein, 250 aa, Streptococcus agalactiae; identical to SEQ ID NO: 1826

SEQ ID NO: 6345 - protein, 1953 aa, Streptococcus agalactiae
ATGTTTTATCTCAAAATAGCCTGGCATAATTTAAAACATTCTATAGACCAGTACATACCATTCCTCTTAGCCAGTTTATTACTTTATTCATTGACTTGTTCTACGCTACTAATCTTAATGAGTGCTGTTGGAAGAGATATGGGGACAGCGGCAACGGTTCTTTTTCTTGGAGTGATTGTTTTGTCAATCTTTGCGGTAGTCATGGAACATTATAGCTACAATATCTTGATGAAACAGCGTAGTAGTGAATTTGGACTGTATAACATTTTGGGGATGAATAAACGTCAAGTTGCGCGTGTAGCTAGTCTAGAGCTGTTTATTATTTATATATTTCTTATTTCTATAGGAAGTTTGTTTAGTGCTTTTTTTGCTAAATTTATTTATTTAATTTTTGTCAACATTATTAACTATCATGCACTAAATCTTAGTTTAAGTTTATGGCCATTTATTATTTGTATTGTTATATTTACAGGTATTTTTCTGACTTTAGAAGTTCCAGTTATTCGACATGTTCATTTATCATCCCCATTAAGTCTCTTTAGGAAGAAACAACAGGGAGAAAAAGAACCAAAAGGTAATCTTATATTTGCAATTTTAGCGTTAGTAGCTATCGCCATCGCTTATACAATGGCTCTTACTTCAGGTAAAGCACCTGCATTAGCTGTTATCTATCGTTTCTTCTTTGCAGTACTTTTAGTTATTGCTGGTACTTATCTTTTTTATATTAGTTTTATGACATGGTACTTAAAAAGGTTACGTCAAAACAAGCATTATTATTATAAATCTGAGCATTTTGTATCAACTTCGCAAATGATTTTTCGAATGAAGCAAAATGCAGTGGGGTTGGCAAGTATCACTTTATTAGCTGTTATGGCTCTAGTTACTATTGCTACAACAGTCTCACTCTATTCAAATACACAAAATGTTGTTACCGGACTATTTCCAAAATCAGTAAGTTTATCAATAGATAATTCAAAAGGTGACGCGAAAAATATATTTGAAGAAAAGATTTTGAAGAAACTAGGTAAGTCATCTAAGGAAGCTATCACTTATAATCAGACAATGATTTCAATGCCAGTTAGTCAATCAAGTGAACTTAATATCACATCTAAAAACGTCAAACATGTTGATATCACAAAAACGGGTTTTATGTACCTAATTACTCAGAATGATTTCCGTCGTTTAGGTCACCGATTACCAAAATTAAAAGATAACCAAGTGGCTTACTTTGTTCAAAAAGGTGATAGTCGTTTGAAAAAAATAAATCTATTGGGAAATAAATTTGACGTTGTAAAAAATTTAAAAGAGGCTTATGTTCCAGAGACTACAAATACTTATAACCCGGGTTTAATTATATTTGCAAACAACAAACAAATTGACAATATTAGAAAAGCATATTTACCTTATACTAAGAACATCAATACTTTTCCAAAAACCTTTAAGGCATATTTGGATTTGAATAGTCAAGAGATAAATTCAATTTCTAAAAACGACATAATAGAGGTAGATGGTAAGTATGTTGGAAATATTAGCACTAAACAGAGTTTTCTAAAAGAAGGTTATCAAATGTTTGGTGGGTTATTATTTACTGGATTTCTGTTAGGTATAAGCTTTTTGCTAGGTATAGCTCTAATTGTTTACTATAAGCAATACTCAGAAGGTCATGAAGATAAGAGATCTTATCGTATCTTACAAGAAGTAGGTATGAGCAAAAAATTAGTTAAACGGACTATTAATTCTCAAATTATGATTTTCTTCTTCCAACCTTTAGTGGTAGCAGTTATTCACTTTGGAGTTGCTATTCCAATGCTAAAACAGATGCTTTTGGTATTTGGGGTGCTTAACTCAACAATCGTATATGTAGTAAGTGGTTTGACAGTACTTGCGATTTCTATAATTTACTTTATCATTTACCGTATAACTAGTCGAACTTATTATCATATTATTGAACGC

SEQ ID NO: 6346 - protein, 651 aa, Streptococcus agalactiae
MFYLKIAWHNLKHSIDQYIPFLLASLLLYSLTCSTLLILMSAVGRDMGTAATVLFLGVIVLSIFAVVMEHYSYNILMKQRSSEFGLYNILGMNKRQVARVASLELFIIYIFLISIGSLFSAFFAKFIYLIFVNIINYHALNLSLSLWPFIICIVIFTGIFLTLEVPVIRHVHLSSPLSLFRKKQQGEKEPKGNLIFAILALVAIAIAYTMALTSGKAPALAVIYRFFFAVLLVIAGTYLFYISFMTWYLKRLRQNKHYYYKSEHFVSTSQMIFRMKQNAVGLASITLLAVMALVTIATTVSLYSNTQNVVTGLFPKSVSLSIDNSKGDAKNIFEEKILKKLGKSSKEAITYNQTMISMPVSQSSELNITSKNVKHVDITKTGFMYLITQNDFRRLGHRLPKLKDNQVAYFVQKGDSRLKKINLLGNKFDVVKNLKEAYVPETTNTYNPGLIIFANNKQIDNIRKAYLPYTKNINTFPKTFKAYLDLNSQEINSISKNDIIEVDGKYVGNISTKQSFLKEGYQMFGGLLFTGFLLGISFLLGIALIVYYKQYSEGHEDKRSYRILQEVGMSKKLVKRTINSQIMIFFFQPLVVAVIHFGVAIPMLKQMLLVFGVLNSTIVYVVSGLTVLAISIIYFIIYRITSRTYYHIIER

SEQ ID NO: 6347 - protein, 666 aa, Streptococcus agalactiae
ATGTCACAAGAGCAAGGAAAAATTTATATTGTAGAAGATGATATGACGATTGTGTCACTTTTAAAAGATCATTTATCAGCTAGCTATCATGTCTCTAGTGTCAGCAATTTTCGTGATGTGAAACAAGAAATTATCGCATTTCAACCCGATTTGATACTAATGGATATTACGTTACCCTATTTTAATGGTTTTTACTGGACTGCAGAATTGCGTAAGTTTTTAACAATTCCTATTATTTTCATTTCATCTAGTAATGATGAAATGGATATGGTTATGGCATTAAATATGGGGGGGGATGACTTTATTTCAAAACCATTCTCTCTAGCTGTATTAGATGCTAAGCTAACTGCTATTTTAAGGAGAAGTCAACAATTTATCCAACAGGAATTAACTTTTGGGGGATTTACGTTGACAAGAGAAGGGTTATTGTCTAGCCAAGATAAAGAGGTTATTTTATCGCCAACAGAAAATAAAATCCTATCTATCTTGCTCATGCATCCTAAACAAGTAGTCTCAAAAGAGTCTCTATTAGAGAAACTTTGGGAAAATGATAGTTTTATTGATCAAAATACACTTAATGTTAATATGACACGCTTACGTAAAAAAATTGTCCCAATAGGTTTTGATTACATTCATACAGTGAGAGGAGTTGGGTATTTACTACAA

SEQ ID NO: 6348 - protein, 222 aa, Streptococcus agalactiae; identical to SEQ ID NO: 1830

SEQ ID NO: 6349 - protein, 936 aa, Streptococcus agalactiae
ATGATACGCCAGTTTTTAAGAGAACACTTGATTTGGTATATTTTATATATCATGATGTTTGTCCTATTTTTTATTAGTTTCTATCTATATCATTTACCAATGCCCTATTTGTTTAATTCCTTAGGTTTAAATGTTATTGTTTTACTAGGAATTAGTATTTGGCAATACAGTCGTTACAGGAAAAAAATGTTACATCTCAAATATTTTAATAGTAGTCAGGACCCCTCTTTCGAACTTCAACCGAGTGATTACGCTTATTTTAATATTATTACACAATTAGAAGCTAGAGAAGCGCAAAAAGTTTCTGAAACAATTGAACAAACCAATCATGTTGCACTTATGATAAAGATGTGGTCGCACCAAATGAAAGTTCCATTGGCAGCTATTTCATTAATGGCCCAGACAAATCATCTCGATCCTAAGGAAGTTGAACAACAATTATTGAAATTGCAACATTATCTTGAAACGTTGTTAGCATTTTTGAAATTTAGACAATATCGTGACGATTTTCGTTTTGAAGCTGTTAGCCTTAGAGAAGTAGTAGTAGAAATTATAAAATCGTATAAGGTTATTTGTCTATCCAAAAGCTTATCTATCATAATTGAAGGCGATAATATCTGGAAAACAGACAAAAAGTGGTTAACTTTTGCTCTTTCACAGGTGCTAGATAATGCCATAAAATATTCTAATCCTGAGTCAAAGATAATAATAAGCATAGGAGAAGAGAGTATTAGAATACAAGACTACGGTATCGGCATACTCGAAGAAGATATCCCTAGACTTTTTGAAGATGGCTTTACGGGTTACAACGGTCATGAGCACCAAAAGGCAACAGGCATGGGGTTATATATGACAAAAGAAGTCTTATCTAGTCTGAATTTGTCCATTTCGGTGGATAGCAAAATTAATTATGGGACTGCCGTTTCTATACATAAA

SEQ ID NO: 6350 - protein, 312 aa, Streptococcus agalactiae; identical to SEQ ID NO: 1832

SEQ ID NO: 6351 - protein, 1068 aa, Streptococcus agalactiae
ATGAAACGTGAATTACTACTCGAAAAAATCGATGAACTAAAAGAAATTATGCCTTGGTATGTTCTAGAATACTATCAATCAAAGCTTTCTGTTCCTTATAGTTTCACAACGCTCTACGAATATTTAAAAGAATATAGACGTTTTCTTGAATGGTTATTGGATTCTGGTGTTGCTAATTGTCATCACATTGCAGAAATTGAGCTTTCAGTTTTAGAAAACCTTACTAAAAAAGATATGGAAGCTTTTATACTATATTTACGAGAACGCCCTTTATTAAATGCTAACACAAGGCAAAATGGGGTGTCTCAAACCACCATTAACAGAACTCTATCTGCCTTATCTAGTCTTTTCAAATACCTTACTGAAGAGGTTGAAAATGCTGACGGGGAGCCTTACTTTTATCGCAATGTCATGAAAAAAGTCTCAACCAAAAAGAAAAAGGAAACTTTAGCTTCTCGGGCAGAAAATATTAAACAAAAGTTATTTTTGGGCAATGAAACGATAGAATTCTTAGAGTATATAGATTGTGAATATCAAAACAAACTTTCCAAACGTGCTTTAGCTTTTTTCAACAAAAATAAAGAGAGAGATTTAGCTATTATTGCTTTGCTACTAGCTTCAGGGGTGCGTCTATCTGAGGCAGTAAACTTAGATTTAAAGGATATTAACCTTAATGTAATGGTTATTGATGTCACACGAAAAGGGGGGAAAAGGGACTCTGTCAATGTCGCTAGCTTTGCGAAGCCCTACCTTGCTAATTATTTAGACATCCGTAAAAATAGATACAAAGCAGAAAATCAGGACATTGCACTATTTTTATCAGAATACCGTGGGGTGCCAAATCGTATTGATGCTTCAAGTGTTGAGAAAATGGTCGCTAAATATTCCCAGGATTTTAAGGTTCGTGTAACACCTCATAAACTAAGGCATACTCTTGCTACTAGGCTATATGATGCTACAAAATCTCAAGTATTAGTTAGCCACCAATTAGGTCATGCTTCCACTCAAGTTACTGACCTATATACCCATATTGTTAACGATGAACAAAAGAACGCTTTAGATAAACTA

SEQ ID NO: 6352 - protein, 356 aa, Streptococcus agalactiae; identical to SEQ ID NO: 1834

SEQ ID NO: 6353 - protein, 942 aa, Streptococcus agalactiae
ATGTCTAGTTTTAATAGAAAAAAACTTAAGTTTTTGGGTATATCTTTGGCGACTCTAACAGCCACCACAGTTACCCTGGTTGCCTGTGGTAATGAGTCAAAGAACTCTGGAGATAATAAAGTTATTAATTGGTATATTCCTACTGAAATCAGTACATTGGACATTTCAAAGAATACAGATGCTTATTCAAACTTAGCTATAGGTAATTCAGGCAGCAATTTACTTAGAATTGATAAAGAGGGCAAACCAAAACCCGATTTAGCTAAAAAAGTATCCGTTTCTTCTGATGGTCTTACTTATACTGCTACACTTCGTGATAATTTAAAATGGTCAGATGGAAGCAAACTAAGCGCTGAAGATTTTTTTTACACATGGCGGAGAATAGTTGATCCTAAAACTGCATCTGAATATGCTTACTTGGCGACAGAATCGCACCTTTTAAATGCTGATAAGATTAATTCTGGAGATATTAAAGATTTAAATAAACTTGGTGTAACAGCTAAAGGCAATCAAGTGACCTTTAAATTGACAAGTCCATGCCCTCAATTTAAATATTATTTAGCCTTCTCTAATTTTATGCCTCAAAAACAATCGTATGTTGAAAAAGTTGGTAAAGATTATGGTACAACATCAAAAAATCAAATTTACTCAGGTCCTTACCTTGTTAAGGATTGGAATGGTTCAAATGGTAAATTTAAATTAGTCAAAAATAAATATTATTGGGATTCTAAACATGTTAAAACAAATAGTGTCATAGTTCAAACTATCAAAAAACCAGATACTGCAGTTCAAATGTACAAGCAAGGTCAGATTGATTTTGCTGAAATATCAGGAACTTCTGCTATTTATCAAGCTAATAAAAATAATAAAGATGTAGTAGATGCGTCTGATGCACGTACTACATCTTTATTATTTATAACCAAACTGGTTCGGTTAAAGCAT

SEQ ID NO: 6354 - protein, 314 aa, Streptococcus agalactiae
MSSFNRKKLKFLGISLATLTATTVTLVACGNESKNSGDNKVINWYIPTEISTLDISKNTDAYSNLAIGNSGSNLLRIDKEGKPKPDLAKKVSVSSDGLTYTATLRDNLKWSDGSKLSAEDFFYTWRRIVDPKTASEYAYLATESHLLNADKINSGDIKDLNKLGVTAKGNQVTFKLTSPCPQFKYYLAFSNFMPQKQSYVEKVGKDYGTTSKNQIYSGPYLVKDWNGSNGKFKLVKNKYYWDSKHVKTNSVIVQTIKKPDTAVQMYKQGQIDFAEISGTSAIYQANKNNKDVVDASDARTTSLLFITKLVRLKH

SEQ ID NO: 6355 - protein, 720 aa, Streptococcus agalactiae
TTGACAAATCAGAAAATTAGGCAAGCTTTGAATTTAGCGACTGATCGTAAAGGTGTTGTTAAAGCGGCAGTTGATACAGGTTCAACTCCTGCTGAATCTCTGGTCCCTAAAAAATTAGCCAAATTACCTAATGGTGAGGATCTTTCCAAGTATACTGCCCCAGGTTATACGTATAATACAAGTAAAGCTCAAAAACTTTTTAAAGAAGGTCTTGCTGAGGTTGGTCAGTCATCTCTCAAGTTAACAATCACAGCTGATTCGGACTCTCCAGCAGCTAAAAATGCTGTTGACTATGTGAAATCTACATGGGAGAGTGCTTTGCCTGGTCTAACTGTTGAAGAAAAATTTGTTACTTTCAAGCAACGCCTTGAAGATGCAAAAAATGAAAATTTTGATGTCGTGCTCTTCTCATGGGGAGGAGATTATCCAGAAGGATCAACTTTCTATGGGTTATTCACGACTAATTCTGCGTATAATTATGGTAAATTTTCTTCTAAAGAGTATGACAATGCCTATCAAAAGGCAATTACTACTGACGCCTTGAAACCAGGAGATGCCGCTAATGATTACAAAACTGCTGAAAAAGCTTTATTTGATCAATCATATTATAACCCAGTTTATTACCTAGGGAAAAAAGGACTCCAAAATTCTAAATTAAAGGGGTTGGTAAGAAATTCAACTGGTTTGAATGTTGATTTTACTTATGCTTATAAGACAGAA

SEQ ID NO: 6356 - protein, 240 aa, Streptococcus agalactiae
MTNQKIRQALNLATDRKGVVKAAVDTGSTPAESLVPKKLAKLPNGEDLSKYTAPGYTYNTSKAQKLFKEGLAEVGQSSLKLTITADSDSPAAKNAVDYVKSTWESALPGLTVEEKFVTFKQRLEDAKNENFDVVLFSWGGDYPEGSTFYGLFTTNSAYNYGKFSSKEYDNAYQKAITTDALKPGDAANDYKTAEKALFDQSYYNPVYYLGKKGLQNSKLKGLVRNSTGLNVDFTYAYKTE

SEQ ID NO: 6357 - protein, 771 aa, Streptococcus agalactiae
ATGATTTCTGATTTTTTAAGGGATAATCCAATCCTAACTTTATTATTTTGTGCACATTTTTTAGCTGACTTTCAGTGGCAAAGTCAATCCTTAGCAGATAGTAAATCACATAGTTGGAGGGGACTCTGGAGACATCTCTTGATTGTTTTCCTCCCCCTAGCAGCTTTAATGATATTGATACCAGAAACTACTTTGTTAAATTTAAGCATATGGGGAAGTCATATTGTTATTGATAGTATAAAGAAATTGAGTTACCCTTGGGTAGAGGAAGGGCATTTCCAAAAAGCAGCTTTTATTATAGACCAACTAGCCCACTATACTTGCATTATCGTTTTTTACCATGCGCTTCCTACATATTTACCGCCTAATCATTGGCTTTTGCCTATCAAGCACTTTATTGTCATAGCTCTGGTTTTTATCATTATCACCAAACCCATTAATATTGTGTTTAAAATTTTCTTTAATAAATTTCAAGCTAAAGAATTATCATCATTATTAACACAAGAAAAAACAAAAATAATGAAAGAAAAATCTGAAGATCATGAAGAAACAATTGAAGGAGCAGGAGCTATGATTGGTAATTTAGAGCGTCTAATTATGGCTATATTACTAATCTCAGGACAGTATGCTGCTATAGGTCTTGTTTTTACTGCAAAATCCATTGCACGTTACGATAAAATTTCTAAAAGTCAGGTTTTTGCCGAATATTATTTAATTGGATCATTGTTCTCAATTATAAGTGTTTTGATAACTCATTGGTTACTTTTGGTA

SEQ ID NO: 6358 - protein, 257 aa, Streptococcus agalactiae; identical to SEQ ID NO: 1838

SEQ ID NO: 6359 - protein, 684 aa, Streptococcus agalactiae
ATGTATTTAGCATTAATCGGTGATATCATTAATTCAAAACAGATACTTGAACGTGAAACTTTCCAACAGTCTTTTCAGCAACTAATGACCGAACTATCTGATGTATATGGTGAAGAGCTGATTTCTCCATTCACTATTACAGCTGGTGATGAATTTCAAGCTTTATTGAAACCATCAAAAAAGGTATTTCAAATTATTGACCATATTCAACTAGCTCTAAAACCTGTTAATGTAAGGTTCGGCCTCGGTACAGGAAACATTATAACATCCATCAATTTAAATGAAAGTATCGGTGCTGATGGTCCTGCCTACTGGCATGCTCGCTCAGCTATTAATCATATACATGATAAAAATGATTATGGAACAGTTCAAGTAGCTATTTGCCTTGATGATGAAGACCAAAACCTTGAATTAACACTAAATAGTCTCATTTCAGCTGGTGATTTTATCAAGTCAAAATGGACTACAAACCATTTTCAAATGCTTGAGCACTTAATACTTCAAGATAATTATCAAGAACAATTTCAACATCAAAAGTTAGCCCAACTGGAAAATATTGAACCTAGTGCGCTGACTAAACGCCTTAAAGCAAGCGGTCTGAAGATTTACTTAAGAACGAGAACACAGGCAGCCGATCTATTAGTTAAAAGTTGCACTCAAACTAAAGGGGGAAGCTATGATTTC

SEQ ID NO: 6360 - protein, 228 aa, Streptococcus agalactiae
MYLALIGDIINSKQILERETFQQSFQQLMTELSDVYGEELISPFTITAGDEFQALLKPSKKVFQIIDHIQLALKPVNVRFGLGTGNIITSINLNESIGADGPAYWHARSAINHIHDKNDYGTVQVAICLDDEDQNLELTLNSLISAGDFIKSKWTTNHFQMLEHLILQDNYQEQFQHQKLAQLENIEPSALTKRLKASGLKIYLRTRTQAADLLVKSCTQTKGGSYDF

SEQ ID NO: 6361 - protein, 1563 aa, Streptococcus agalactiae
ATGGCTTTCGAAAGTTTAACAGAGCGCCTGCAAGGAGTTTTTAAAAATATTCGTGGTAAGAAAAAGTTATCTGAAAAAGATGTGCAAGAAGTCACCAAGGAGATTCGTCTAGCTCTTTTAGAAGCTGACGTTGCTCTTCCAGTTGTTAAAACCTTTATTAAACATGTTCGTGAACGTGCTGTTGGACATGAAATCATTGATACACTAGATCCTACGCAACAAATTGTTAAGATTGTCAATGAAGAGCTAACAGATTTATTAGGGGCTGAGACCTCTGAAATTGAAAAATCCCCTAAAATTCCAACCATCATTATGATGGTTGGTCTACAAGGTGCTGGTAAAACAACTTTTGCCGGTAAGTTAGCAAACAAACTAATCAAAGAAGACAATGCTCGTCCTATGATGATAGCAGCTGATATTTATCGACCAGCTGCTATTGATCAGTTAAAAACCCTTGGTAGCCAGATTAATGTTCCTGTCTTTGATATGGGAACTAACCATTCAGCAGTTGAGATTGTCACTAAAGGTTTAGAACAGGCTCGTGAAAATCGTAATGACTATGTTCTTATTGATACAGCCGGACGCCTACAAATTGATGCAACCCTTATGCAGGAATTGCATGATGTCAAAGCCATAGCTCAACCTAATGAAATACTCCTTGTCGTTGACAGCATGATTGGACAGGAAGCTGCAAATGTCGCTGAAGAATTTAACCGTCAGCTCAGCATTAGTGGTGTTGTTCTGACAAAGATTGACGGTGATACACGCGGTGGTGCTGCCCTTTCAGTACGCGAAATTACTGGAAAACCAATTAAATTTACAGGGACAGGGGAAAAAATCACTGATATTGAAACTTTCCATCCCGATCGTATGGCAAGCCGTATATTGGGGATGGGAGACCTGCTAACACTTATTGAGCGCGCTAGTCAAGAATACGACGAAAAACGTTCAATGGAATTAGCGGAGAAAATGCGTGAAAACACCTTTGACTTCAACGATTTTATTGATCAATTAGATCAAGTTCAAAATATGGGGCCAATGGAAGATCTCCTTAAAATGCTTCCAGGAATGGCTAACAATCCAGCAATGAAAAACTTCAAAGTGGATGAAAACGAAATTGCTCGCAAAAGAGCCATTGTGTCATCAATGACTCCAGAAGAGAGAGAAAATCCAGATCTCCTCAATCCAAGTCGTAGACGTCGTATTGCTGCTGGATCAGGTAATACTTTCGTTGATGTTAATAAATTCATTAAAGATTTTAACCAGGCAAAACAAATGATGCAAGGCGTGATGTCCGGTGATATGAATAAAATGATGAAAAAAATGGGAATTGATCCTAATAACCTCCCTAAAGATATGCCTGGAATGGACGGAATGGATATGTCTAATTTAGAAGGTATGATGGGGCAAAATGGCATGCCTGACTTATCTAGTTTAGGTGGCGATATGGACTTCAGCCAAATGTTTGGTGGTGGCTTAAAAGGAAAAGTAGGAGCCTTTGCAGCTAAACAATCAATGAAACGTATGGCTAATAAAATGAAGAAAGCTAAGAAGAAACGCAAA

SEQ ID NO: 6362 - protein, 521 aa, Streptococcus agalactiae; identical to SEQ ID NO: 1842

SEQ ID NO: 6363 - protein, 306 aa, Streptococcus agalactiae
ATGAATGCCCTTTTTGAGTTTTATGCGGCATTATTAACAGATAAACAAATGAATTATATCGAGTTATACTACGCCGATGACTACAGCCTTGCTGAAATAGCTGAAGAATCCGGTGTTAGCCGACAAGCTGTCTATGATAATATCAAACGAACTGAAAAAATTCTTGAGGCGTACGAAATGAAACTACATATGTATTCAGATTATATTGTCCGTAGTCAGATTTTTGATGACATTCTAGAAAAATATACCGATGATGCCTTTTTACAAGAAAAAATTTCCATTCTAAGTAGCATTGATAATAGAGAT

SEQ ID NO: 6364 - protein, 102 aa, Streptococcus agalactiae
MNALFEFYAALLTDKQMNYIELYYADDYSLAEIAEESGVSRQAVYDNIKRTEKILEAYEMKLHMYSDYIVRSQIFDDILEKYTDDAFLQEKISILSSIDNRD

SEQ ID NO: 6365 - protein, 1311 aa, Streptococcus agalactiae
ATGTCGAAACCGATTAAGATAAGTAAATTCAAAAAAAATGTCTCAGATAGTCATTTTATCCATTTTTTCACAGTTTTTAGTGGTATTTTTCTGGTTATGACTGTTATCATCCTCCAAGTCATGCGCTATGGTGTTTATTCTTCTGTTGATAGTAGTTTAAAGTATATCAGTACCCATCCTAAAAATTACATCAATATGGTTATGTCACGTACTGCTGCCTACCTAGATAACTCCAATATCGCAAGTGTCAAGTTAAAACCCGGCGGTCAGACAGTAGCTAATACTGATATTATTCTTTTTACATCAGAAGAAGAAGTCATTAACTATTTTGACGCATTTTCAAACTATCAGTTTTTAAAACCTAATAAAAAAAATCTAGGTGGCATTAGTGAATTAACTTTAACCAACATCTTTGGTCAAGATGAGACATATCATGCTGTCACCGTAAAAGTTAATAACCCTGCTTATCCTAATGTGACTTACATGACAGCTATTGTTAATATTGATCAATTAGTAAATGCTAAAGAACGCTATGAAAAAATTATTATATTTGTCATGACTACTTTTTGGATTATTTCAATTGGAGCAAGTATCTACTTAGCTAAATGGGCACAAAAACCGATTATAGAAAACTACGAAAGACAGAAGGCTTTTGTCGAAAATGCTAGCCACGAGCTGCGTACTCCCCTAGCTGTCTTACAAAATCGCCTAGAAACGCTATTCAGAAAACCGAATGCCACCATTTTAGAAAATAGTGAAAATATCGCTTCAAGTCTAGATGAAGTACGAAATATGCGTATTTTAACCACTAATCTTTTAAACTTAGCAAGACGTGATGATGGAATCAAACCAGAATTAGCTGTTATTAAGCCTACACTTTTTGATAGTATCTTTGAGAATTATGATCTAATCGCCCAAGAGAATGGTAAAAATTTTACTGGACATAATATGATCCAAGATAGTTTCAAAACAGATAAGACACTGCTAAAACAACTCATGACTATTTTATTTGATAATGCTATAAAATATACTGACAATGATGGTAGCATTGACTTTACCATATCTGAAACTGATAAGTATCTCTTTTTAGAAATCGCTGATAATGGACCAGGAATTTCAGAGGAGGATAAAGTCAGAATTTTTGATCGTTTTTACCGTGTTGACAAAGCAAGAACACGACAACAAGGAGGGTTTGGCCTCGGCCTTTCTTTAGCTCAACAAATCGTTAACTCACTGCGAGGTAATATTACAGTAATTGATAATAAACCTAGAGGCAGTATTTTTAAGATAAAACTACCAAAAGTAAAAGGT

SEQ ID NO: 6366 - protein, 437 aa, Streptococcus agalactiae
MSKPIKISKFKKNVSDSHFIHFFTVFSGIFLVMTVIILQVMRYGVYSSVDSSLKYISTHPKNYINMVMSRTAAYLDNSNIASVKLKPGGQTVANTDIILFTSEEEVINYFDAFSNYQFLKPNKKNLGGISELTLTNIFGQDETYHAVTVKVNNPAYPNVTYMTAIVNIDQLVNAKERYEKIIIFVMTTFWIISIGASIYLAKWAQKPIIENYERQKAFVENASHELRTPLAVLQNRLETLFRKPNATILENSENIASSLDEVRNMRILTTNLLNLARRDDGIKPELAVIKPTLFDSIFENYDLIAQENGKNFTGHNMIQDSFKTDKTLLKQLMTILFDNAIKYTDNDGSIDFTISETDKYLFLEIADNGPGISEEDKVRIFDRFYRVDKARTRQQGGFGLGLSLAQQIVNSLRGNITVIDNKPRGSIFKIKLPKVKG

SEQ ID NO: 6367 - protein, 678 aa, Streptococcus agalactiae
ATGATAAAAATTTTATTAATTGAAGATGACTTGAGTCTTTCCAATTCCGTTTTTGATTTCCTTGATGACTTTGCCGATGTCATGCAAATTTTTGATGGAGAAGAGGGTCTTTACGAAGCCGAAAGTGGAGTCTATGATCTGATTCTTCTAGATCTCATGTTACCTGAAAAAAACGGCTTCCAAGTGTTGAAAGAGCTACGTGAAAAAGGTATTACAACCCCTGTATTAATAATGACCGCTAAAGAAAGCATTGATGATAAGGGACAAGGTTTCGACTTAGGTGCTGATGATTATCTAACAAAACCTTTTTACCTAGAAGAACTAAAAATGCGAATTCAGGCTCTTTTAAAGCGTTCTGGAAAATTTAATGATAACAGCCTAATTTATGGTGATATTCGCGTAGACATGTCTACTAACTCAACCTTTGTTAATCAAACAGAAGTTGAGCTCTTAGGTAAAGAGTTTGATCTTTTAGTCTATTTCCTTCAAAATCAAAATGTTATCTTACCGAAATCTCAAATCTTTGATCGTATTTGGGGATTTGATAGTGATACAACGATTTCAGTTGTAGAAGTCTATGTCTCTAAGGTTCGGAAAAAATTAAAAGGAACACTTTTTTCAGAAAACCTTCAAACTTTGCGTAGTGTAGGATATATTTTAAAGCATGTCGAAACCGAT

SEQ ID NO: 6368 - protein, 226 aa, Streptococcus agalactiae; identical to SEQ ID NO: 1848

SEQ ID NO: 6369 - protein, 2547 aa, Streptococcus agalactiae
ATGAAAACTGTAGAACATTTTGTTACCAAATTTGTCCCTGAAAACTATAACCTTTTCTTGGATATTAATCGTCAAACTAAAACCTTTTCAGGTAACGTTGCTGTGTCTGGCGAAGCCTTAGATAACAATATCTCTTTTCACCAAAAAGGGTTAACCATTAAATCTGTCTTATTAGATAATCAACCATTAGATTTCCAACTAGATGAAGACAATGAAGCTATGCATATTCAATTGCATGAAACTGGTAGCATGGTATTAGTCTTTGAATTCAGCGGTCACATTACCGATAATATGACAGGTATGTATCCATCTTACTATACAGTTAATGGCATCAAAAAAGAGGTTATCTCCACACAATTTGAAAGTCATTTTGCTCGTGAAGTATTCCCAAGTATTGACGAACCAGAAGCAAAAGCAACCTTTGATTTGAGCCTAAAATTCGATCAAAAAGAAGGAGAGATTGCTCTTTCAAATATGCCGGAAATCAATGCTGAACAACGTCAAGAAACAGGTTTATGGACATTTGACACCACACCTAAAATGTCCTCATATTTATTAGCTTTTGCCTTGGGGGAATTGCATGGTAAAACAACACATACCAAAAACGGCACTCTTGTTGGCTCATATGCCACAAAAGCCCATCAGTTAAATGAATTAGATTTTTCTTTAGATATCGTTGTGCGTGTTATTGAGTTTTATGAGGACTACTTTGGTGTACGTTATCCTATTCCTCAGTCACTCCACGTTGCTCTACCTGATTTTTCTGCTGGAGCTATGGAAAATTGGGGATTAGTAACATATCGTGAAGTCTATCTTTTAGTAGATGAGAACTCTAGTGTTTCCAGCCGTCAGCAAGTAGCATTAGTTGTAGCACATGAAATAGCTCACCAGTGGTTTGGTAACCTCGTTACTATGAAATGGTGGGATGATTTATGGTTAAATGAATCATTTGCTAATATGATGGAATATGTATCAATTGATTATATTGAACCAAAACTTAATATATTTGAAGACTTTCAAACAGGTGGTCTACCATTAGCTCTTAAGCGTGATGCCACAGATGGCGTCCAATCTGTTCACGTTGAGGTCAATCATCCTGATGAAATTAACACACTTTTTGATCCAGCTATCGTTTATGCAAAAGGTAGCCGCCTCATGCACATGTTACGTCGCTGGTTAGGCGATACAGATTTTGCCGCAGGACTAAAAATTTATTTTGAAAAACATCAATATCAAAATACTATTGGTCGTGACCTTTGGAATGCACTTTCTCAAACCTCAGGAAAAGATGTTGCAGCTTTCATGGATTCTTGGTTAGAGCAACCAGGATACCCTGTGATGGCAGCCAAAATAGAAGAAGATGAGCTCATTTTAACTCAAAAACAATTCTTTATTGGTGAACACGAAGATAAGTCTCGCTTGTGGCAAATTCCTCTTAATAGTAATTGGGAAGGAATCCCAGAGATATTAACCGAGGAAACGGTAGTAATCCCCAATTTTAGTCAGTTAGCTGAAAAGAACAAAGAAAATGGTGCACTGCGTTTCAATACTGAAAATACTGCACATTACATTACTAACTATCAAGGTCAACTCTTAGAGCATATCATTTCTGATCTTCCTCTTATGGATAACATTTCTAAACTACAAATTGTACAAGAACGTCATTTACTTGCTGAAAGTGGTATGATTTCATATAGTAGTTTAATACCTTTAGTCTCTCTTTTGAGCCAAGAGACATCATATCTTGTTAACTCTGCTATTAAGAGTGTTATTGATGGTTTATCCTTATTCGTCCAGGAAGATAGCCAAGATGAATTCGACTTTAAAGAATTTGTTAATAAATTATCAGCATTTAATTTTAATAGACTTGGCTTTGAAAAAAGAGAAGGAGAAGGAGATGATAGCGAAATGGTCCGTCATCTATCCCTAAGCCTTGCTCTCTACTCAGATAATGAACATGCTATTGAAGAAGCTCACCATATTTTTAAAGCCCACGAAAATAATATCGCTGCTATACCAGCTGCAATTCGCCTGTTAGTTCTTACCAATGAAATGAAGCATTTCGAATCCAAAGAACTTAGCCACTTGTTATTAGAGACTTATAGTACTACTACCGATGGGAATTTCAAACGACAACTAGCGAGTGCTTTATCTCATACTACAGATAGCAAGACACTCAAGAAATTATTGTCAGATTGGAAAAATAAAGATATTGTGAAACCACAAGACTTAGCTATGAGTTGGTATGCTACTTTCCTTAAAAATTCTTTTACACAACAAAGTGTCTGGGAGTGGGCCCAAGAAAACTGGGAATGGATCAAAGCAACTCTAGGTGGTGATATGAGTTTTGATAAATTTGTGATTTATCCCTCAAGTAGTTTCAAAACAGAAGAACGCCTTGAACAATATAAAAACTTTTTCGAGCCTCAATTAAGCGATATGGCGATTAGCCGTAATATTTCAATGGGAATTAAAGAAATTTCTGCTCGTGTCCTTTTAATCACGAAGCAAAAAGAAGAAGTTATCAATACTATCAAAAAATATATC

SEQ ID NO: 6370 - protein, 849 aa, Streptococcus agalactiae
MKTVEHFVTKFVPENYNLFLDINRQTKTFSGNVAVSGEALDNNISFHQKGLTIKSVLLDNQPLDFQLDEDNEAMHIQLHETGSMVLVFEFSGHITDNMTGMYPSYYTVNGIKKEVISTQFESHFAREVFPSIDEPEAKATFDLSLKFDQKEGEIALSNMPEINAEQRQETGLWTFDTTPKMSSYLLAFALGELHGKTTHTKNGTLVGSYATKAHQLNELDFSLDIVVRVIEFYEDYFGVRYPIPQSLHVALPDFSAGAMENWGLVTYREVYLLVDENSSVSSRQQVALVVAHEIAHQWFGNLVTMKWWDDLWLNESFANMMEYVSIDYIEPKLNIFEDFQTGGLPLALKRDATDGVQSVHVEVNHPDEINTLFDPAIVYAKGSRLMHMLRRWLGDTDFAAGLKIYFEKHQYQNTIGRDLWNALSQTSGKDVAAFMDSWLEQPGYPVMAAKIEEDELILTQKQFFIGEHEDKSRLWQIPLNSNWEGIPEILTEETVVIPNFSQLAEKNKENGALRFNTENTAHYITNYQGQLLEHIISDLPLMDNISKLQIVQERHLLAESGMISYSSLIPLVSLLSQETSYLVNSAIKSVIDGLSLFVQEDSQDEFDFKEFVNKLSAFNFNRLGFEKREGEGDDSEMVRHLSLSLALYSDNEHAIEEAHHIFKAHENNIAAIPAAIRLLVLTNEMKHFESKELSHLLLETYSTTTDGNFKRQLASALSHTTDSKTLKKLLSDWKNKDIVKPQDLAMSWYATFLKNSFTQQSVWEWAQENWEWIKATLGGDMSFDKFVIYPSSSFKTEERLEQYKNFFEPQLSDMAISRNISMGIKEISARVLLITKQKEEVINTIKKYI

SEQ ID NO: 6371 - protein, 651 aa, Streptococcus agalactiae
ATGTTAAGATCAAAATTTGATGAAGAATTAGATAAACTGCATAACCAATTCTATGCAATGGGAATTGAAGCTATCGGACAAATCAAAAAAACAGTTCGTGCTTTTGTCAGTCATGATCGAGAGTTAGCTAAAGAAGTGATAGAAGATGATGTAACGCTTAACAACTTTGAAACGAAGTTAGAGAAAAAATCATTGGAAATTATTGCACTCCAGCAGCCTGTATCACAAGACTTACGCACCGTTATTACCGTTTTAAAAGCTACTAGTGATGTTGAGCGTATGGGAGACCATGCAGCAGCAGTTGCAAAAGCAACCATCCGTATGAAGGGCGAGGAAAGAATCCCAGCAGTAGAATTAGAAATCAATAATATGGGAAAAGCAGTTAAAAACATGCTTGAAGAAGCCTTAACAGCTTATATCAATGGTGATGATGAAAAAGCTTACGAAGTAGCAGCAATGGATGAAATAGTTGATGATTACTTCCGTGATATCCAAAAAATGGTAGTTGAAACAATTCAAAAGCATCCTGACGTAGCATTTGCCGCCAAAGAATACTTCCAAGTATTGATGCACTTGGAGCGAATTGGAGATTATGGCAAAAATATCTGTGAATGGATTGTTTATTTAAAAACTGGAAAAATTATCGAGTTA

SEQ ID NO: 6372 - protein, 217 aa, Streptococcus agalactiae; identical to SEQ ID NO: 1852

SEQ ID NO: 6373 - protein, 555 aa, Streptococcus agalactiae
ATGTATAACGGACATAATGTTTATAGCCCGCGCACTGATACCGTAGAACTTCGTAAAGAAATTGGGATGGTTTTTCAGCAGCCTAATCCATTTCCTATGTCAGTATTTGAAAATGTTGTTTATGGTCTTAGACTCAAAGGAATAAAAGACAAAGCTACGTTAGATGAAGCCGTAGAGACTTCATTGAAGGGCGCGTCTATCTGGGACGAGGTCAAAGATAGATTACACGACTCTGCTCTTGGTTTATCTGGTGGTCAACAACAACGTGTTTGTATTGCCAGAACCCTTGCTACCAAGCCTAAAATTATCCTTCTAGATGAGCCAACCTCTGCACTTGACCCAATTTCTGCTGGTAAAATTGAAGAGACTTTACATGGTCTAAAAGATCAATATACCATGTTACTTGTTACACGTTCTATGCAGCAAGCCTCACGTATTTCTGATCGTACAGGTTTCTTCTTAGACGGTAACTTAATTGAATATGGCAATACAAAAGAAATGTTTATGAATCCTAAACATAAAGAAACTGAAGATTACATTACAGGTAAATTCGGT

SEQ ID NO: 6374 - protein, 185 aa, Streptococcus agalactiae; identical to SEQ ID NO: 1854

SEQ ID NO: 6375 - protein, 801 aa, Streptococcus agalactiae
ATGGCAGAATATAATTGGGACGAACGCCATATCATTACCTTCCCTGAAGAAAATTCAGCTCTCACCACAAAAGATTTACACGTTTACTACGGTGAGAAAGAAGCTATCAAGGGAATTGATATGCAATTTGAAAAAAATAAAATTACAGCCTTAATCGGCCCATCTGGATGTGGAAAATCAACATATCTTCGTAGCTTAAATCGTATGAACGATACGATTGATATTGCACGCGTGACTGGACAAATCATGTATGAAGGAATTGATGTTAACGCTCAAGATATCAATGTTTACGAGATGCGAAAACATATCGGAATGGTTTTCCAACGTCCAAACCCGTTTGCAAAATCAATTTATAAAAACATTACCTTTGCATATGAGCGTGCTGGTGTAAAAGATAAAAAATTCTTAGATGAAGTTGTCGAAACCTCACTAAAACAAGCTGCTCTATGGGATCAAGTAAAAGATGACCTTCATAAATCAGCATTCACTTTATCTGGCGGTCAACAGCAGCGATTATGTATTGCACGTGCTATCGCAGTTAAACCAGAAATTCTCTTAATGGATGAACCTGCTTCAGCACTCGATCCGATTGCAACTATGCAACTAGAAGAGACAATGTTTGAACTCAAGAAAAATTACACTATAATTATCGTAACACATAATATGCAACAAGCAGCACGTGCTAGTGATTATACTGCATTTTTCTATCTTGGAGACTTAATCGAATACGATAAAACGAATAACATTTTCCAAAATGCTAAATGTCAATCTACTAGCGATTATGTTTCTGGTCGATTTGGA

SEQ ID NO: 6376 - protein, 267 aa, Streptococcus agalactiae; identical to SEQ ID NO: 1856

SEQ ID NO: 6377 - protein, 885 aa, Streptococcus agalactiae
ATGAACGCTAAAAAGGCTGACAAATTAGCAACTACAATACTCTATAGTATTGCAGCTATCATCGTTACAATCCTCGCCTCTCTTTTAATTTTTATTCTTGTTCGCGGATTGCCACACGTATCTTGGTCATTTTTAACTGGGAAATCATCATCATATGAAGCAGGAGGCGGTATTGGAATACAATTATACAATTCCTTTTTCCTACTTATTGTTACTCTGATTATTTCTATTCCTCTATCTTTAGGAGCTGGAATATACCTCTCAGAATATGCTAAAAAAGGACGTTTAACAAACTTTGTTAGAACATGTATCGAAATTTTGTCATCTCTTCCTTCTGTTGTAGTTGGTCTGTTTGGTTACCTAATCTTCGTTGTTCAATTTCAATATGGCTTCTCAATTATCTCAGGTGCCTTAGCACTTACTGTTTTTAACTTACCCCAAATGACACGTAGTGTTGAAGATAGCCTTCAAAATGTACACCACACACAGCGTGAAGCAGGATTGGCCCTAGGTATTTCTCGTTGGGAAACGGTCATTTACGTCGTTGTCCCTGAAGCTCTGCCAAGTATTGTAACTGGTGTTGTGCTAGCTTCAGGACGTATTTTCGGTGAGGCAGCAGCACTTATTTATACAGCTGGTCAATCTGCTCCAGCACTTGATTGGTCAAATTGGAACGTCCTTAGTGTTACAAGTCCAATCTCAATTTTCCGTCAAGCAGAAACTTTAGCTGTTCATATTTGGAAAGTTAATAGCGAAGGGACAATCCCTGATGCAACACAAGTATCTGCCGGTAGCGCCGCAGTCTTATTGGTTGTTATTCTTATTTTCAACCTTTCAGCTCGCTCGATCGGTAAGAAACTTCATTCGAAATTAACCTCGTCTAAT

SEQ ID NO: 6378 - protein, 295 aa, Streptococcus agalactiae; identical to SEQ ID NO: 1858

SEQ ID NO: 6379 - protein, 915 aa, Streptococcus agalactiae
ATGAAAAATCAAGAATTAGCTAAAAAATTAACATCTCCTTCAAAAAACTCTCGATTAGAAAAATTTGGTAAAGGAATAACTTTTCTTTCGCTTGCCCTAATCGTCTTCATTGTTGCGATGATTTTGATTTTTGTTGCTCAAAAAGGACTATCTACATTTTTTGTTGATGGCGTTAAATTAACAGACTTCTTATTTAATACAAAATGGGAACCAAGTGCTAAGTCATTTGGTGCTTTTCCAATGATAGCTGGATCATTTATTGTTACTATTCTATCAGCTATCATTGCTACACCATTTGCTATCGGTGCTGCCGTATTTATGACTGAAATCTCACCTAAATATGGTTCTAAAATTTTACAACCTGCAGTTGAATTACTAGTTGGGATTCCTTCTGTTGTTTACGGTTTTATTGGTTTACAGATTATTGTTCCCTTCGTTCGCTCTATTTTTGGGGGAACAGGTTTTGGCATTTTATCTGGGGTCTGTGTCCTCTTCGTCATGATTCTACCAACTGTTACTTTCATGACAGTAGATAGCCTTAGAGCTGTGCCACGTCACTATAAAGAAGCAAGTTTAGCCATGGGGGCAACTCGTTGGCAAACAATTTGGCGTGTTATATTAAACGCTGCACGTCCAGGAATTTTCACTGCAATTGTTTTTGGTATGGCACGTGCATTTGGTGAAGCTCTAGCAATTCAGATGGTTGTCGGAAACTCTGCAATTTTACCAACGTCATTGACAACACCAGCAGCAACATTAACGTCTGTTCTAACAATGGGTATTGGTAATACTGTAATGGGAACTGTACAAAACAATGTCCTCTGGTCGCTAGCCTTAGTACTTTTAATTATGAGTTTAGCATTTAATACAGTTATTAAGTTAATTACAAGGGAAGGAAAGAAAAACTATGAACGC

SEQ ID NO: 6380 - protein, 305 aa, Streptococcus agalactiae; identical to SEQ ID NO: 1860

SEQ ID NO: 6381 - protein, 441 aa, Streptococcus agalactiae
GTGGGAGGACAAGATTTAGATATTTCCATCATCAATCGAGCAGCAAGTTCTGGATCCCGTGCAACCTTCGATAATACTATTATGGGAAATGTTGCTCCTATTCAAAGCCAAGAACAAGATTCAAATGGTATGGTGAAATCAATTGTTTCTCAAACACCTGGTGCGATTTCATACCTCGCTTTTGCATACGTTGATAAATCTGTCGGAACATTAAAACTAAATGGTTTTGCGCCAACAGCTAAAAATGTTACTACCGACAACTGGAAACTTTGGTCATATGAACATATGTATACAAAAGGTAATGAAACAGGTCTAACAAAAGAATTCTTAGACTACATGAAAAGTGATAAAGTTCAAAGTAGTATCGTACAACATATGGGATATATCTCTATTAACGACATGAAAGTTGTTAAAGATGCTGAAGGTAAAGTAACCCCAAAA

SEQ ID NO: 6382 - protein, 147 aa, Streptococcus agalactiae
MGGQDLDISIINRAASSGSRATFDNTIMGNVAPIQSQEQDSNGMVKSIVSQTPGAISYLAFAYVDKSVGTLKLNGFAPTAKNVTTDNWKLWSYEHMYTKGNETGLTKEFLDYMKSDKVQSSIVQHMGYISINDMKVVKDAEGKVTPK

SEQ ID NO: 6383 - protein, 609 aa, Streptococcus agalactiae
ATGGCAAGCCGTATATTGGGGATGGGAGACCTGCTAACACTTATTGAGCGCGCTAGTCAAGAATACGACGAAAAACGTTCAATGGAATTAGCGGAGAAAATGCGTGAAAACACCTTTGACTTCAACGATTTTATTGATCAATTAGATCAAGTTCAAAATATGGGGCCAATGGAAGATCTCCTTAAAATGCTTCCAGGAATGGCTAACAATCCAGCAATGAAAAACTTCAAAGTGGATGAAAACGAAATTGCTCGCAAAAGAGCCATTGTGTCATCAATGACTCCAGAAGAGAGAGAAAATCCAGATCTCCTCAATCCAAGTCGTAGACGTCGTATTGCTGCTGGATCAGGTAATACTTTCGTTGATGTTAATAAATTCATTAAAGATTTTAACCAGGCAAAACAAATGATGCAAGGCGTGATGTCCGGTGATATGAATAAAATGATGAAAAAAATGGGAATTGATCCTAATAACCTCCCTAAAGATATGCCTGGAATGGACGGAATGGATATGTCTAATTTAGAAGGTATGATGGGGGCAAATGGCATGCCTGACTTATCTAGTTTAGGTGGCGATATGGACTTCAGCCCAATGGTTGGTGGGTGGCCT

SEQ ID NO: 6384 - protein, 203 aa, Streptococcus agalactiae
MASRILGMGDLLTLIERASQEYDEKRSMELAEKMRENTFDFNDFIDQLDQVQNMGPMEDLLKMLPGMANNPAMKNFKVDENEIARKRAIVSSMTPEERENPDLLNPSRRRRIAAGSGNTFVDVNKFIKDFNQAKQMMQGVMSGDMNKMMKKMGIDPNNLPKDMPGMDGMDMSNLEGMMGANGMPDLSSLGGDMDFSPMVGGWP

SEQ ID NO: 6385 - protein, 267 aa, Streptococcus agalactiae
ATGAAAAAAAACATTTTTTTGTTAACCTTGCTAGCCACCGTCTTATTGACGCTGTCTGGTTGTGCTAATTGGATTGATAAAGGTCAATCAATCACCAGCGTTGGTTCAACCGCCTTACAGCCACTTGTAGAAGCTGCAGCAGATGAGTTTGGTAAGACAAACCTCGGTAAGACTATCAATGTCCAAGGAGGAGGCTCAGGAACAGGCTTATCACAAGTACAGTCTGGAGCTGTTCAAATTGGTAATAGCGACTTATTTGCANNNNNT

SEQ ID NO: 6386 - protein, 89 aa, Streptococcus agalactiae
  VARIANT 88, 89: Xaa = Any Amino Acid
MKKNIFLLTLLATVLLTLSGCANWIDKGQSITSVGSTALQPLVEAAADEFGKTNLGKTINVQGGGSGTGLSQVQSGAVQIGNSDLFAXX

SEQ ID NO: 6387 - protein, 309 aa, Streptococcus agalactiae
ATGGTCTCCCCCGATTTGTCTAAATTAAAAATAGCACGCAATGGTCTCCATCTAGGCACTTTCAAGAAGAATCGTTTTGAGCCATCGTTTGCTTTAGGAATGGCACTTAGCGAACATGACCTAGTACAGTCTATTGAAATTGATATAGAACAGTTTGAGGTGTACGTATCTGGAAATGTAGTCAAACTAGACAAGACTGTTCCAAACGGTTGGTATCAAATTCTTGTAAAAGGCAATGGATTAGGTTTTGCAAAAGTGACAAATAATACTCTTAAAAATTATTACCCTAAAGGACTACGATTTCAGACA

SEQ ID NO: 6388 - protein, 103 aa, Streptococcus agalactiae
MVSPDLSKLKIARNGLHLGTFKKNRFEPSFALGMALSEHDLVQSIEIDIEQFEVYVSGNVVKLDKTVPNGWYQILVKGNGLGFAKVTNNTLKNYYPKGLRFQT

SEQ ID NO: 6389 - protein, 363 aa, Streptococcus agalactiae
GTGACTAATGAAAGCTCCCAACGACTAGCCAAATGTTTTAATTCTTTTTTTGATCTTATTGTTTTTGACGGTCCGTGTTCTGGTGAGGGAATGTTCCGCAAAGATCCTCAAGCAATACAATATTGGCACAAAGATTACCCCACTGAATGTGCACAGTTACAAAGAGATATTTTAAAAGAAGCAATCAAAATGCTAGCTCATGGTGGTATACTTGTATACTCTACTTGTACATGGTCACCAGAAGAGAACGAAGAAGTGGTTAATTGGCTCCTTCAAGAGTATGATTACTTAGAACTTGTTGATATTCCTAAACTAAATGGGATGGTTGAAGGGATTAATGTACCACAAGTTGCAAGGNNNNNT

SEQ ID NO: 6390 - protein, 121 aa, Streptococcus agalactiae
  VARIANT 120, 121: Xaa = Any Amino Acid
MTNESSQRLAKCFNSFFDLIVFDGPCSGEGMFRKDPQAIQYWHKDYPTECAQLQRDILKEAIKMLAHGGILVYSTCTWSPEENEEVVNWLLQEYDYLELVDIPKLNGMVEGINVPQVARXX

SEQ ID NO: 6391 - protein, 153 aa, Streptococcus agalactiae
TTGGGGGCATTATGGGAAAATATCAGGAAAATCATAGAACACACAACTGGCCTTGTTTATTCTCAAGAACCTGCTGCTCAGATAGTGGCTCAGATTGCTGAACCACAAGAAGGAATGAAAGTGCTAGATTTAGCAGCTGNNNNNTTAATTAAT

SEQ ID NO: 6392 - protein, 51 aa, Streptococcus agalactiae
  VARIANT 47, 48: Xaa = Any Amino Acid
MGALWENIRKIIEHTTGLVYSQEPAAQIVAQIAEPQEGMKVLDLAAXXLIN

SEQ ID NO: 6393 - protein, 193 aa, Streptococcus agalactiae
ATGAAATTACCGAATGAATTTATTGAAAAATATCAGACTATACTTAAAGATGAAGCAGAAGCTTTTTTTGACAGTTTTGAAAAAACCCATATCGGCATATCGCACCAATCCTCTCAAAGAAAAGCAACTTGATTTTCCAAATGCCATCCCAAGTACCCCTTGGGGGCATTATGGGAAAATATCAGGAAAATCA

SEQ ID NO: 6394 - protein, 65 aa, Streptococcus agalactiae
MKLPNEFIEKYQTILKDEAEAFFDSFEQKPISAYRTNPLKEKQLDFPNAIPSTPWGHYGKISGKS

SEQ ID NO: 6395 - protein, 1031 aa, Streptococcus agalactiae
ATGATTAGTAGTAATTATAGTTATCCTCTTGATCCTTCATGGAATACGGAAGATATTACTAAGGTACTTCGCTTTTTAAATCAAGTTGAACACGCCTATGAAAATAGTGTTAAAGTTGATGATTTGCTAGATAGCTATAAAGAATAAAAAAGTTGTTAAATCCAAGGCGCAGGAAAAACAAATTGACCGTGAATTCCAGAGAACTAGCGGTTATTCCACTTATCAAGCTGTTAAAGCAGCACAACAAAAAGCGAAAGGATTTATTTCACTTGGACGCTAAATTTGATTTCGCTAAACTATTAGTGTATAAAGCTGGTCAATTCATTAAATCTGAGATGCAAAATACTTTTGATGTTGAGGAAAAGTCTCGATTTGATGATTTAGTGACAAGTCTTGATAAAAAAACACAAAAATTATTAATTCAAGAAATTATTCAACATTACCCAGATGATAATATACTTGCCGAAGAAGATGATGTGCGCTCACCCATTGCACAAGGTAATGTTTGGGTTTTAGACCCTATTGATGGAACTGTTAATTTTATTGTTCAAAAAGATAACTTTGCTGTTATGTTAGCTTATTACGAAGAAGGCGTTGGACAATTTGGTATCATCTACGACGTTATGGCTGATATTCTTTACAGCGGGGGAGGACATTTTGATGTCTATGCTAACGATAAAAAAATTGTTCCTTTTCAAGAGTGTCCTTTAGAACGTTGCTTACTTGGAGTAAATTCTGCTATGTATGCAGAAAATGATTGCGGTATTGCCCATTTAGCTTCTGAAACCTTAGGTGTTCGTATCTATGGTGGTGCTGGAATTAGCATGGCAAAAGTCATGCAGGGCAAATTATTAGCTTATTTTTCGTATATTCAACCTTGGGATTATGCTGCAGCAAAAATCATGGGGGAGACATTAGGATTTACCTTATTAACGCTTGACGGGGAAGAACCCAACTATTCAACAAGACAAAAAGTAATGTTCCTACCAAAGTCGAAATTAAATCTTATCCAATCCTACCTTACCAAAAAA

SEQ ID NO: 6396 - protein, 344 aa, Streptococcus agalactiae
MISSNYSYPLDPSWNTEDITKVLRFLNQVEHAYENSVKVDDLLDSYKELKKLLNPRRRKNKLTVNSRELAVIPLIKLLKQHNKKRKDLFHLDAKFDFAKLLVYKAGQFIKSEMQNTFDVEEKSRFDDLVTSLDKKTQKLLIQEIIQHYPDDNILAEEDDVRSPIAQGNVWVLDPIDGTVNFIVQKDNFAVMLAYYEEGVGQFGIIYDVMADILYSGGGHFDVYANDKKIVPFQECPLERCLLGVNSAMYAENDCGIAHLASETLGVRIYGGAGISMAKVMQGKLLAYFSYIQPWDYAAAKIMGETLGFTLLTLDGEEPNYSTRQKVMFLPKSKLNLIQSYLTKK

SEQ ID NO: 6397 - protein, 411 aa, Streptococcus agalactiae
ATGATTACCTTATTTTTATCACCCAGCTGTACTAGTTGTCGAAAAGCGCGTGCTTGGCTAAGTAAGCATGAGGTTGCTTTTGAAGAGCATAACATTATTACAAGTCCACTCAATAAAGAAGAACTATTACAAATTCTATCGTTTACAGAAAATGGTACAGAAGACATTATTTCCACACGTTCAAAAGTCTTTCAAAAACTTGCTATTGATGTAGACGAATTATCAACGTCTTCATTAATGGAATTAATTTCAGAAAATCCAAGTCTTTTACGACGCCCAATTATTTTAGACAAAAAACGTATGCAGATTGGTTTTAATGAGGATGAAATTCGTGCCTTCTTACCGCGTGACTATCGTAAACAAGAACTGAAACAGGCCACTATTCGTGCTGAAATTGAGGGAAAACATGAT

SEQ ID NO: 6398 - protein, 137 aa, Streptococcus agalactiae
MITLFLSPSCTSCRKARAWLSKHEVAFEEHNIITSPLNKEELLQILSFTENGTEDIISTRSKVFQKLAIDVDELSTSSLMELISENPSLLRRPIILDKKRMQIGFNEDEIRAFLPRDYRKQELKQATIRAEIEGKHD

SEQ ID NO: 6399 - protein, 930 aa, Streptococcus agalactiae
ATGAAAATCCATTACATTAATGATTATAAAGATATTCAAGCTAAAGAAGATTGCGTCTTAGTTTTGGGCTATTTTGATGGCTTACATCTGGGACATAAAGCCCTCTTTGATAAAGCTAAAAAAATCGCGACCGAAAAAAATTTGAAAATTGTCGTCTTAACGTTTAATGAGACACCTCGTCTAACCTTCGCTCGCTTCCAACCTGAATTATTGCTACATCTTACCTCTCCAGAAAAACGTTCTGAAAAATTTCAAGAGTATGGCGTCGATGAGTTATATTTAATGAATTTTACCAGTCATTTTTCAAAAGTATCTTCTGACCTTTTTATTAAGAAATATATTTATGGTCTCAGAGCAAAAGCTGCTGTTGTCGGTTTTGATTATAAGTTCGGTCATAATCGTACCAGTGGTGATTATCTAGCGCGTAATTTCAAGGGACCAGTCTATATTATTGATGAAATTTCTGAAGGTGGTGAAAAAATCTCTTCTACACGTATTCGTCAATTGATTACAGAGGGTAATGTTGAGAAAGCTAACCAACTTTTGGGTTATGAGTTTTCAACCTGTGGCATGGTAGTACATGGAGATGCTAGAGGACGAACTATAGGGTTCCCAACTGCTAATCTAGCTCCTATTAATCGCACTTACTTACCTGCAGACGGTGTTTATATTTCCAATGTTCTGATTAATGGAAAATATTATAGAGCAATGACGAGCATTGGAAAAAATATCACTTTTGGTGGTACAGAACTTCGTTTAGAAGCTAATATCTTTGATTTTGATGGCGACATTTATGGAGAAACTATTGAAATTTTCTGGTTAAAAAGAATCAGAGAAATGGTAAAGTTTAATGGTATTGACGATCTTGTAAAACAACTTAAAAAAGATAAAGAAATTGCTTTAAATTGGAAAAAAGATAGTCAAACTCTT

SEQ ID NO: 6400 - protein, 310 aa, Streptococcus agalactiae
MKIHYINDYKDIQAKEDCVLVLGYFDGLHLGHKALFDKAKKIATEKNLKIVVLTFNETPRLTFARFQPELLLHLTSPEKRSEKFQEYGVDELYLMNFTSHFSKVSSDLFIKKYIYGLRAKAAVVGFDYKFGHNRTSGDYLARNFKGPVYIIDEISEGGEKISSTRIRQLITEGNVEKANQLLGYEFSTCGMVVHGDARGRTIGFPTANLAPINRTYLPADGVYISNVLINGKYYRAMTSIGKNITFGGTELRLEANIFDFDGDIYGETIEIFWLKRIREMVKFNGIDDLVKQLKKDKEIALNWKKDSQTL

SEQ ID NO: 6401 - protein, 843 aa, Streptococcus agalactiae
ATGACATCACACGATGCTGTATTCAAGCTTCGAAAGATATTACATACAAAAAAAATAGGACACGGCGGAACTCTTGATCCAGATGTTGTTGGGGTTTTACCAATTGCGGTTGGAAAAGCCACTCGTGTTATTGAATATATGACAGAAAGTGGCAAAATTTATGAAGGAGAAATCACTTTAGGATATGCCACAAGTACAGAAGATTCTAGTGGAGAGGTCATTTCAAGAACTCCACTAACTCAATCCGATCTTAGCGAGGATGTTGTGGATCATGCGATGAAAAGTTTTACCGGTCCAATTACACAAGTTCCTCCTATGTATTCAGCAGTTAAAGTAAATGGTAAAAAACTCTATGAATATGCTCGTTCAGGAGAAGAAGTAGAGCGACCTAAACGACAAATAACAATTTCTGAATTTAGACGCACAAGCCCATTGTACTTCGAAAAAGGCATCTGCCGTTTTAGTTTCTATGTCTCATGCAGTAAAGGTACCTATGTTAGGACGTTAGCTGTTGATCTAGGAATAAAACTAGGATATGCTAGCCATATGTCTTTCCTAAAAAGAACCTCATCTGCAGGATTATCTATTACACAATCATTAACGCTTGAAGAAATTAATGAAAAATATAAGCAAGAAGATTTTTCATTTTTACTTCCAATTGAATATGGTGTTTTAGATCTCCCAAAAGTTAACCTAACTGAGGAAGATAAAGTTGAAATCTCATACGGACGTCGTATCTTATTAGAAAATGAAGCAGATACCTTAGCAGCTTTTTATGAAAATAGAGTTATCGCTATACTAGAAAAACGTGGCAATGAATTTAAACCACACAAAGTATTGTTA

SEQ ID NO: 6402 - protein, 281 aa, Streptococcus agalactiae
MTSHDAVFKLRKILHTKKIGHGGTLDPDVVGVLPIAVGKATRVIEYMTESGKIYEGEITLGYATSTEDSSGEVISRTPLTQSDLSEDVVDHAMKSFTGPITQVPPMYSAVKVNGKKLYEYARSGEEVERPKRQITISEFRRTSPLYFEKGICRFSFYVSCSKGTYVRTLAVDLGIKLGYASHMSFLKRTSSAGLSITQSLTLEEINEKYKQEDFSFLLPIEYGVLDLPKVNLTEEDKVEISYGRRILLENEADTLAAFYENRVIAILEKRGNEFKPHKVLL

SEQ ID NO: 6403 - protein, 429 aa, Streptococcus agalactiae
ATGAAGATTAGAACTGCTACACTAGACGATAGTGAAAAATTAGTCCCTTTGTATCAAGAATTAGGATACGCAATATCATTATCAGAGATTCAATCTATTTTAAAGGTTATTCTTACTCATTCAGATTATGGCTTTTTGATAGCTGAGGATAATGGCAAACTACTCGCCTTCGTTGGATATCATAAACTTTACTTTTTTGAAAAAAGTGGGACTTACTATCGTATTTTAGCACTAGTAGTTAATGAAAAGCACCGTCGTAAAGGCATCGCTAGTCAACTTATTAATCACGTTAAACAGCTAGCTAAAACAGATGGAAGTGAAGTACTGGCTTTAAATAGCAGTTTAAAAGAATATCGTCAGGAAGCTTATCATTTTTATGAAAACCTAGGGTTCAAGAAGGTTAGTACAGGCTTTTCATACTATTTAGAT

SEQ ID NO: 6404 - protein, 143 aa, Streptococcus agalactiae
MKIRTATLDDSEKLVPLYQELGYAISLSEIQSILKVILTHSDYGFLIAEDNGKLLAFVGYHKLYFFEKSGTYYRILALVVNEKHRRKGIASQLINHVKQLAKTDGSEVLALNSSLKEYRQEAYHFYENLGFKKVSTGFSYYLD

SEQ ID NO: 6405 - protein, 1269 aa, Streptococcus agalactiae
ATGAACGAAATCAAATGCCCTCATTGTGGAACAGCTTTTGCCATCAACGAGTCTGAATACCATCAATTACTAGAACAAATTCGTGGAGATGCTTTTGACAAAGAAGTAAGTGAACGGTTGGAAAAAGAACGTCTAATATTAGGGGAGCAAGCAAAAAATCAATTACAGGAAGTTGTTGTAGAAAAAGACAAGGAGATAGCTAAACTTCAGTACAAAGTCAAACAATTTCTTATAGAAAAAGACAATCTTCTCAAAGACAATGAGTACCAACTCGCTGAGCAATTAAATCAAAAAGACATGATGCTTCGCGACCTTGAAAACCAAATCGATAGACTACGTTTAGAGCATGAAAATAGCTTGCAAGAGGCGCTAACAAAAGTCGAACGAGAAAGAGATGCAATACAAAATCAGTTGCACATTCAAGAAAAAGAAAAAGATTTAGCTTTAGCTTCAGTAAAAAGTGATTATGAAGTACAACTAAAGGCAGCCAATGAACAAGTAGAATTCTATAAAAACTTCAAAGCTCAACAGTCTACTAAAGCAGTAGGAGAAAGTTTAGAACATTATGCTGAAACAGAATTTAATAAAGTGCGACATTTGGCCTTTCCTAATGCTTATTTTGAGAAGGACAATACATTATCAAGTCGTGGCTCAAAGGGGGACTTTATCTATCGAGAAAAGGATGAAAATGACCTTGAGTTTTTAAGTATCATGTTTGAAATGAAAAATGAGTCTGATGATACTATCAAGAAGCATAAAAATGAAGATTTTTTCAAAGAATTAGATAAAGATCGTCGTGAAAAATCTTGCGAATACGCAGTTTTAGTAACTATGCTTGAAGCAGACAATGACTATTATAATACTGGAATTGTTGATGTTAGTCACAAATACCCTAAAATGTACGTTATACGTCCACAATTTTTTATCCAATTAATTGGTATTCTAAGAAATGCAGCACTCAATACCTTAAAATATAAACAAGAGCTTGCTTTGATGAAAGAACAAAATATTGACATCACACATTTTGAAGAAGATTTAGATATTTTCAAAAATGCATTTGCTAAAAATTATAATTCTGCAAGCAAAAATTTCCAGAAAGCAATCGATGAAATAGATAAATCTATTAAACGTATGGAAGCTGTTAAGGCTGCTTTAACAACGTCTGAAAATCAACTACGTCTTGCAAATAATAAATTAGACGATGTTTCTGTCAAGAAATTAACAAGAAAAAATCCAACAATGAAAGCAAAATTCGATGCTCTAAAAGAC

SEQ ID NO: 6406 - protein, 423 aa, Streptococcus agalactiae
MNEIKCPHCGTAFAINESEYHQLLEQIRGDAFDKEVSERLEKERLILGEQAKNQLQEVVVEKDKEIAKLQYKVKQFLIEKDNLLKDNEYQLAEQLNQKDMMLRDLENQIDRLRLEHENSLQEALTKVERERDAIQNQLHIQEKEKDLALASVKSDYEVQLKAANEQVEFYKNFKAQQSTKAVGESLEHYAETEFNKVRHLAFPNAYFEKDNTLSSRGSKGDFIYREKDENDLEFLSIMFEMKNESDDTIKKHKNEDFFKELDKDRREKSCEYAVLVTMLEADNDYYNTGIVDVSHKYPKMYVIRPQFFIQLIGILRNAALNTLKYKQELALMKEQNIDITHFEEDLDIFKNAFAKNYNSASKNFQKAIDEIDKSIKRMEAVKAALTTSENQLRLANNKLDDVSVKKLTRKNPTMKAKFDALKD

SEQ ID NO: 6407 - protein, 588 aa, Streptococcus agalactiae
GTGCCACAAAATCCAACAAGTAACCCAGAGAAAAAAACTTATTTATTATCTGAATTGGTAGACTGCTTTAAAGGTAAAGCTGTGCCTTCAAAAGCAGAAGCAGGTGATATCCGTATTATTAATTTGAGTGATATGTCTCCTTTAGGAATTGACTACCATAACTTAAGAACATTCCAAGATGAACAACGATCGCTTTTAAAATATCTACTTCAGGAAGGCGATGTTTTAATCGCTTCAAAAGGAACTGTCAAGAAAGTTGCTATTTTTGAAGAGCAAGATTACCCTGTCGTTGCCTCTGCTAATATTACAATACTAAGGCCTACACAACACATTAGAGGGTACTACTTAAAGCTTTTTTTTGATTCAGAAGAAGGTCAACAGGCACTTGAGAATGCTAACAAAGGAAAAGCTGTGATGAATATTAGCACAAAGGAACTGTTAAATATTGCAATACCAAGTATCCCGCTTTTTAGACAGGATTATCTTATCCAACGTTATAAACAGGGGCTCAACGATTACAAACGTAAGATAGCACGTGCAGAGCAGGAGTGGGAACGTATCCAAAATGACATCAGACAACAACTTAGC

SEQ ID NO: 6408 - protein, 196 aa, Streptococcus agalactiae
MPQNPTSNPEKKTYLLSELVDCFKGKAVPSKAEAGDIRIINLSDMSPLGIDYHNLRTFQDEQRSLLKYLLQEGDVLIASKGTVKKVAIFEEQDYPVVASANITILRPTQHIRGYYLKLFFDSEEGQQALENANKGKAVMNISTKELLNIAIPSIPLFRQDYLIQRYKQGLNDYKRKIARAEQEWERIQNDIRQQLS

SEQ ID NO: 6409 - protein, 827 aa, Streptococcus agalactiae
ATGTCTTCTTTAACTATATTATTGGCTTTGATATTACTATTTACAGCAGATTTCCTTACCTATATTATTATTGAATTGATTATCTCGCTTGATTTTTGGAACTAGAGTGGGATAGCGATATCGTCCAGTTAATCATTTTACTAGCAACTTCAATTAGTACGGTAATGTTATTTATGTGGGTGAAATTTAAAGAGAAGCGTCCAATTAGTTCTCTAGGGCTATTTAAAGAAGGAGCCCTAACAGAATTATCTAGAGGATGGTTAGTCGGGAGCGTTCTCTTTGGAGCCTGCTTAATATTAACAATAATTTCAGGCTCTGGAGTTATCGAAACTGTTCGTTTTACAGCTGATAAATTGATTTGGTTTCTTATTTTTGCTGTTGGATGGCAGGTACAAAGCGCATCTGTTGAAATATTGTGTCGTGGATGGTTACTTCCGGTGAGTGCCACAAAGTATAGTAAGATAGTTTCTGTCAGTATCAGTTCAATCTTTTTCGGTCTTCTGCATAGCGCTAATAATCATGTAAGCCTTATCTCGATTTTCAATCTGTGTCTCTTTGGACTATTTCTATCGCTCTATGTTATTTTAAAAGGTAACATCTGGGGGGCGTGTGGTATTCATGGCGCCTGGAACTGTGTACAAGGGAGTGTCTTTGGAATCGAAGTTAGTGGAGAGCCAATGTTGTCTAACTCCCTAGTCCATGTTAAAACCTATGGTGCTGACTGGATTAGCGGTGGAAAATTTGGTGTGGAAGGAAGCATGATTACCAGTATTGTTCTTATCGTAGCATGTTATTGGCTTTATCAAAAATCGAATTTTCCTTACGAC

SEQ ID NO: 6410 - protein, 276 aa, Streptococcus agalactiae
MSSLTILLALILLFTADFLTYIIIELIISLDFWKLEWDSDIVQLIILLATSISTVMLFMWVKFKEKRPISSLGLFKEGALTELSRGWLVGSVLFGACLILTIISGSGVIETVRFTADKLIWFLIFAVGWQVQSASVEILCRGWLLPVSATKYSKIVSVSISSIFFGLLHSANNHVSLISIFNLCLFGLFLSLYVILKGNIWGACGIHGAWNCVQGSVFGIEVSGEPMLSNSLVHVKTYGADWISGGKFGVEGSMITSIVLIVACYWLYQKSNFPYD

SEQ ID NO: 6411 - protein, 2628 aa, Streptococcus agalactiae
ATGGGAAAGACATTTTGGAAAGATATCTATCGATCAATTACGACTTCAAAAGGTAGATTTTCATCAATCCTCTTACTTATGATGTTAGGCTCATTTGCTTTTATAGGACTGAAGGTCTCAGCACCTAATATGCAAAGAACAGCACAAAATTACCTTGCTCATCATCATGTTATGGATATTACCGTTTTCAATTCTTGGGGACTTGACAAACATGATCAAACTGTTTTAGAAAGCTTAAAAGGATCACAAGTTGAATTTTCTTACTTTGTAGATACAACCCCTCAACAGAATAGTAAATCTTATCGATTGTATTCCAATACCAAAACGATATCAACCTTTGATCTTGTTAAGGGACGTCTCCCTTTAAATAAATCAGAAATTGCTCTCTCATTTCAGGAACGAAAAAAATATGCAATAGGTGATAAAATTAATTTTAAACAAGATAAAAACAAACTGTTTTCAAATACAGGTCCTCTAACTATTGTAGGTTTTGTTAATTCTACCGAGATTTGGTCTAAGACAAACCTTGGTAGTTCTCAAACAGGGGACGGCGACTTAGATAGTTATGGCGTATTAGATAAGACAGCATTTCACTCTCCAGTATATACAATGGCAAGGGTAACTTTTAAAGATCTTAGGTTGATTAACCCTTTCTCAATAAGTTACAAAGAAAAAGTAGCGAAATACCAAGAAAAGGTATCGCGAAAATTAAATATTCACAATAAAATAAGATATACCAAAACAAAAAAAGAGAGCCTACGTAAAATCGATGAGGAGGAAAAAAGCCTACTAAAAGCTCAAAAACAAATCAATCGGTTAGATAATGATAGCCTAGCGATGCCACTATCTCAAAGACAAGCTATTCAAATGAAAATTAAACAAGACCGACTATCTCTTTTGAAACGAACAAAAGAGCTTCTAAAATTGAGACATAACACCCAAATAATGGAATCGCCTCAAATTATTGTCTACAACCGTACTACCTTTCCTGGAGGACAAGGATATAACACTTTTGACTCCAGTACAAATAGCACTTCTAAAATCAGTAATCTTTTCCCCATTATTTTATATTTAGTCGCAGCATTAGTAACCTTAACAACAATGACTAGGTTCGTCGAGGAAGAAAGAACCAACGCAGGCATATTAAAAGCACTAGGCTATAGTGACCGCCAAGTTATCTTTAAATTTATTATTTATGGTTTTATAGCAGGAACATTAGGGACTACTTTGGGTATCATTGGAGGGCATTATCTTTTACCTCGTATTATTTCTGATATCATTTCCAAAGACCTGACTATTCCAAACACACAGTATCATCTTTTCTTAAATTACAGTTTACTAGCCTTTGTTTTTTCATTATTAAGCATTGTTCTTCCAGTTTTTGTTATCACTCGACGTGAGTTGAAAGAAAAAGCAGCATTTTTATTATTACCAAAACCACCAGCTAAAGGATCTAAAATAGCTTTAGAGTATATCAATTGGATTTGGAAAAAACTGTCCTTCACACAAAAAGTAACTGCTAGAAATATTTTTCGTTACAAACAAAGGATGATTATGACCATATTTGGAGTTGCTGGATCAGTAGCGCTCTTATTTTCAGGTCTAGGAATACAATCCTCCTTAAAGCAAACCGTCAATGAACATTTCGGTCGTATTATGCCCTATGATATATTGCTAACATATAACACAAATGCTTCTCCCCCAAAAATACTTGAACTACTTTCAAAAGATTCAAAAATAGACAAATACCAACCAATACACCTTGAAAATCTTGACGAATCCATTCCTGGACAAATTAATAAACAGTCAATTTCCCTATTCATAACAGACAAAAAACAATTACTACCTTTTATTTATTTACAAGAAGCAACAACTAATAAGTCATTGCACTTGAATAATAAAGGGATTATTATTTCTAAAAAATTAGCTCAATTTTATCATGTTAATACCGGTGATTTTATCCATTTATCTCATTCACAAACACTTCCTTCTAGAAAATTAAAAATAACAGGAGTTGTCAATGCGAATGTTGGTCACTATATTTTTATGACAAAACAATACTATCGAACTATTTTTAAGAAAGAAGCTAAAGATAACGCTTTTTTGGTTAAGTTAACCAAACATAAAATCGCAAATAACTTAGCAGAAAAACTTTTAGAAATTAATGGAGTTGAGTCTCTTACGCAAAATGCTCTTCAGCTGGCTAGTGTAGAAGCCGTTGTGCGTTCTTTAGATGGCTCTATGACTATTTTAGTTGTCGTATCTTTATTGTTAGCCATTGTAATTCTCTATAATCTCACTAATATTAATTTAGCAGAACGTAAGCGGGAGCTATCAACTATAAAGGTATTAGGTTTTTATAATGAAGAAGTAACTTTATACATTTACCGCGAAACCATTATTTTATCAACCATCGGTGTGATTCTAGGCACCATTAGCGGTACTTATTTACACCGTCAAATGATGTTGCTAATTGGTTCAGATCAAATACTTTTTGGTGAAAAAGTATCACCAACTACATTTATAATACCAATAAGCGTAGTAGTCATCATTCTAATAAGTCTAGGTTTTATAGTTAACCATCAATTAAAAAAACTCAATATGTTAGATGCCTTGAAATCAGTAGAT

SEQ ID NO: 6412 - protein, 876 aa, Streptococcus agalactiae
MGKTFWKDIYRSITTSKGRFSSILLLMMLGSFAFIGLKVSAPNMQRTAQNYLAHHHVMDITVFNSWGLDKHDQTVLESLKGSQVEFSYFVDTTPQQNSKSYRLYSNTKTISTFDLVKGRLPLNKSEIALSFQERKKYAIGDKINFKQDKNKLFSNTGPLTIVGFVNSTEIWSKTNLGSSQTGDGDLDSYGVLDKTAFHSPVYTMARVTFKDLRLINPFSISYKEKVAKYQEKVSRKLNIHNKIRYTKTKKESLRKIDEEEKSLLKAQKQINRLDNDSLAMPLSQRQAIQMKIKQDRLSLLKRTKELLKLRHNTQIMESPQIIVYNRTTFPGGQGYNTFDSSTNSTSKISNLFPIILYLVAALVTLTTMTRFVEEERTNAGILKALGYSDRQVIFKFIIYGFIAGTLGTTLGIIGGHYLLPRIISDIISKDLTIPNTQYHLFLNYSLLAFVFSLLSIVLPVFVITRRELKEKAAFLLLPKPPAKGSKIALEYINWIWKKLSFTQKVTARNIFRYKQRMIMTIFGVAGSVALLFSGLGIQSSLKQTVNEHFGRIMPYDILLTYNTNASPPKILELLSKDSKIDKYQPIHLENLDESIPGQINKQSISLFITDKKQLLPFIYLQEATTNKSLHLNNKGIIISKKLAQFYHVNTGDFIHLSHSQTLPSRKLKITGVVNANVGHYIFMTKQYYRTIFKKEAKDNAFLVKLTKHKIANNLAEKLLEINGVESLTQNALQLASVEAVVRSLDGSMTILVVVSLLLAIVILYNLTNINLAERKRELSTIKVLGFYNEEVTLYIYRETIILSTIGVILGTISGTYLHRQMMLLIGSDQILFGEKVSPTTFIIPISVVVIILISLGFIVNHQLKKLNMLDALKSVD

SEQ ID NO: 6413 - protein, 699 aa, Streptococcus agalactiae
ATGTCCTATATTGAAATGAAGCATTCCTATAAGCGTTATCAAACAGGTGAAACCGAAATTGTTGCTAACAATGATATTAGTTTCAGTATTGAAAGAGGTGAGTTGGTGGTTATTCTTGGTGCATCCGGCGCTGGCAAATCTACTGTTCTCAATATACTAGGAGGGATGGATAGTAATAGTGAAGGTGAAGTTTTAATTGATGGTAAGAATATTGCTAATTATACCATCAGGGAATTGACTCGTTACCGTAGATATGATGTCGGGTTTGTTTTTCAATTCTATAACTTAGTCCCTAATCTAACAGCACTAGAGAATGTAGAATTGGCTTCAGAAATTGTTCCAAAGGCATTAGATGCCCAACAGGCATTAGAAAACGTAGGTTTGGGACACCGTATCAATCATTTTCCAGCACAGCTTTCCGGTGGCGAACAGCAACGCGTTGCAATAGCACGAGCTATTGCCAAAAAACCTAAACTGTTACTTTGTGATGAACCTACTGGTGCTTTAGATTACCAAACTGGAAAACAAGTACTAGCCATCCTGCAAAAGATGGCGCAATCAAAAGAAACAACTGTGATCATTGTTACTCATAATACTGCCTTAGCGCCAATTGCAAATCGCGTGATCCATATGCATGATTCAAAAATCAGTGATATTGTAATAAACGAGAATCCAAGTGATATTCAGAACATAGAATAT

SEQ ID NO: 6414 - protein, 233 aa, Streptococcus agalactiae; identical to SEQ ID NO: 1880

SEQ ID NO: 6415 - protein, 327 aa, Streptococcus agalactiae
ATGGTAATAAAACTAGGACGTTATGGAAAGTTTTATGCGTGTAGCAATTTCCCTGAATGTCATAACACAAAAGCTATCACTAAGGAAATAGGTGTTATTTGTCCTATCTGTCAAAAAGGACAAGTTATTGAGCGAAAAACAAAACGCAATCGTATCTTTTATGGCTGTGACCGCTACCCAGAATGTGAGTTTACATCTTGGGACAAACCTATTGGACGAACTTGCCCCAAATCAAATGATTTCTTAGTGGAGAAAAAAGTACGCGGTGGTGGTAAACAAGTTGTTTGCTCAAATGAAAAATGCGACTACCAAGAAGAGAAAATTAAA

SEQ ID NO: 6416 - protein, 109 aa, Streptococcus agalactiae
MVIKLGRYGKFYACSNFPECHNTKAITKEIGVICPICQKGQVIERKTKRNRIFYGCDRYPECEFTSWDKPIGRTCPKSNDFLVEKKVRGGGKQVVCSNEKCDYQEEKIK

SEQ ID NO: 6417 - protein, 1278 aa, Streptococcus agalactiae
ATGAAACTTCAAAAACCAAAAGGGACTCAGGATATCTTACCTGGAGAATCAGCAAAGTGGCAATACGTTGAAAATGTTATACGCAATCTCTTTAAACAATATCATTATGATGAAATTCGTACACCAATGTTTGAACATTACGAGGTTATTAGTCGCTCAGTTGGGGATACAACGGATATCGTTACAAAAGAGATGTATGATTTTCATGATAAAGGAGATCGTCACATTACGCTTCGTCCAGAAGGAACAGCACCTGTTGTACGTTCTTATGTTGAAAATAAACTATTTGCACCAGAAGTTCAAAAACCAACCAAAATGTATTATATTGGATCAATGTTCCGATATGAGCGCCCACAGGCTGGTCGTTTACGAGAATTTCATCAAGTAGGCGTTGAGTGCTTTGGATCAAATAATCCAGCAACTGATGTTGAAACAATCGCAATGGGACATCATCTATTTGAAGATTTAGGTATCAAAAACGTTAAACTTCATCTTAATAGTTTAGGGAATCCAGAAAGTCGTCAGGCCTATCGCCAAGCTCTTATTGATTACTTAACACCCATACGTGAACAATTGTCTAAGGATAGTCAACGTCGTTTGAATGAAAATCCATTGCGCGTACTAGACTCTAAGGAGCCAGAAGACAAACTAGCAGTTGAAAATGCTCCTTCTATTTTAGATTATTTAGATGAGTCAAGCCAAGCCCACTTTGATGCTGTGTGTCATATGCTTGATGCTCTAAATATTCCATACATCATTGATACTAATATGGTTCGTGGTCTTGATTATTATAGTCATACTATTTTTGAGTTTATCACTGAGATTGAAGATAATGAATTAACGATCTGTGCTGGAGGCCGTTATGACGGCTTAGTATCCTATTTTGGTGGACCAGAAACACCAGCATTTGGTTTTGGATTAGGATTAGAACGCTTGCTCTTAATATTAGATAAGCAAGGGATTTCTTTACCAATAGAAAATACTATAGATCTGTATATAGCTGTATTAGGATCAGAGGCTAATCTAGCTGCCTTAGATTTGGCACAATCAATACGTCATCAGGGTTTTAAAGTAGAGCGTGATTATTTGGGTCGTAAAATCAAAGCACAATTTAAGTCTGCAGATACTTTTAATGCTAAAGTGATTATGACATTAGGTAGCAGTGAAGTAGATTCGAAAGAGGTCGGTTTAAAAAATAATCAAACACGTCAAGAAGTTAAAGTTAGTTTTGAAAACATTAAAACAGATTTTTCATCTGTGCTTAAACAATTAGGATTG

SEQ ID NO: 6418 - protein, 426 aa, Streptococcus agalactiae
MKLQKPKGTQDILPGESAKWQYVENVIRNLFKQYHYDEIRTPMFEHYEVISRSVGDTTDIVTKEMYDFHDKGDRHITLRPEGTAPVVRSYVENKLFAPEVQKPTKMYYIGSMFRYERPQAGRLREFHQVGVECFGSNNPATDVETIAMGHHLFEDLGIKNVKLHLNSLGNPESRQAYRQALIDYLTPIREQLSKDSQRRLNENPLRVLDSKEPEDKLAVENAPSILDYLDESSQAHFDAVCHMLDALNIPYIIDTNMVRGLDYYSHTIFEFITEIEDNELTICAGGRYDGLVSYFGGPETPAFGFGLGLERLLLILDKQGISLPIENTIDLYIAVLGSEANLAALDLAQSIRHQGFKVERDYLGRKIKAQFKSADTFNAKVIMTLGSSEVDSKEVGLKNNQTRQEVKVSFENIKTDFSSVLKQLGL

SEQ ID NO: 6419 - protein, 1749 aa, Streptococcus agalactiae
ATGAAACGTAGTATGTATGCTGGGCGTGTTCGTAGTGAGCACATAGGAACATCGATTACTTTAAAAGGATGGGTTGGTCGTCGTCGTGACCTTGGAGGCCTTATTTTTATTGATCTTCGCGATCGCGAGGGAATCATGCAATTAGTTATTAATCCTGAAGAAGTATCAGCCTCAGTTATGGCAACCGCAGAAAGTCTCCGTAGTGAATTTGTTATAGAGGTTAGCGGTGTAGTGACAGCACGAGAACAAGCTAATGATAATTTACCAACAGGAGAAGTTGAATTAAAAGTGCAAGAATTATCGATTCTTAATACCTCGAAAACAACACCATTTGAAATTAAAGATGGTATTGAGGCAAATGATGATACACGCATGCGTTACCGTTACTTGGATCTTCGTCGTCCGGAAATGCTTGAAAATTTCAAATTACGTGCGAAAGTAACACACTCAATCCGTAATTACCTTGACAACTTAGAGTTTATTGATGTCGAAACTCCGATGCTAACAAAATCAACTCCAGAGGGGGCACGAGACTATTTGGTTCCATCACGTGTCAACCAAGGACATTTTTATGCCCTTCCACAAAGCCCTCAAATTACAAAACAGCTATTGATGAATGCGGGATTTGATCGTTATTATCAAATTGTCAAATGTTTCCGTGATGAGGATTTACGTGGAGACCGTCAACCTGAGTTTACACAAGTTGACTTAGAGACATCATTCCTTAGTGATCAAGAAATTCAAGACATTGTTGAGGGTATGATTGCTAAAGTAATGAAAGACACTAAAGGTTTAGAGGTTTCTTTACCATTCCCAAGGATGGCATATGATGATGCAATGAATAACTACGGGTCTGATAAGCCTGATACAAGGTTTGATATGCTTTTACAAGACTTGACAGAAATTGTCAAAGAAGTTGACTTCAAGGTGTTCTCAGAAGCTTCAGTAGTTAAAGCGATTGTTGTCAAAGATAAGGCGGACAAGTACTCTCGAAAAAATATTGATAAATTAACAGAAATTGCAAAACAATACGGTGCCAAAGGTTTAGCATGGCTAAAATATGCAGATAATACTATTTCAGGTCCGGTTGCTAAGTTCTTGACAGCTATTGAAGGTAGGTTGACAGAAGCTTTACAGCTAGAGAATAATGACTTAATTCTATTTGTAGCAGATAGTCTTGAAGTAGCTAACGAGACTTTAGGAGCGCTTCGTACACGCATTGCAAAAGAACTTGAACTCATTGATTATTCTAAATTTAATTTCCTATGGGTTGTTGATTGGCCAATGTTTGAGTGGTCAGAAGAAGAGGGACGATATATGTCGGCTCATCATCCATTCACCTTGCCAACAGCGGAGACAGCGCATGAGTTGGAAGGGGATTTGGCTAAAGTACGTGCAGTTGCCTATGATATTGTTTTGAATGGATATGAGTTAGGCGGTGGTAGCCTACGTATTAACCAAAAAGATACACAAGAGCGTATGTTCAAGGCTTTAGGATTTAGCGCTGAATCAGCTCAGGAACAGTTTGGTTTCTTACTTGAAGCTATGGATTACGGCTTCCCACCACATGGTGGATTGGCAATAGGCCTTGACCGCTTTGTTATGTTGTTAGCAGGCAAGGACAATATTCGAGAAGTTATTGCATTCCCTAAAAACAATAAGGCTAGTGATCCAATGACTCAAGCTCCTAGTCTCGTTTCAGAACAACAATTAGAAGAATTATCACTTACTGTAGAAAGTTATGAAAAC

SEQ ID NO: 6420 - protein, 583 aa, Streptococcus agalactiae; identical to SEQ ID NO: 3802

SEQ ID NO: 6421 - protein, 942 aa, Streptococcus agalactiae
ATGAAAACTAGACGAACCCCTTTAGAAAAAAAGGTAAAATATATTATCAGTGTATGGGCTAAAAAATTTGGTCTCTTACACACTTTAAAAAGTATCTCACGAGAAAAATATGCAGAGAAAATTTCGGCTTCATTGCTGTATGGTATTCTATCCAGTGTTGCTGTCAATTTCTTTTTTCAACCTGGACATGTTTATTCAAGTGGAGCAACTGGTTTAGCTCAGGTTATTTCAGCTGTCAGTAAACACTGGTTTTCTTTTGAAATACCAGTTGCTTTAGCTTTTTATGCCATTAATATCCCTTTGCTGATATTATCTTGGCGTAAGATTGGACATAAATTTACTATTTTTACGTTTATCACAGTAACTGTAAGCTCTATCTTCATTCAACTAATGCCTCAAATCACCCTTACAACTGATCCCTTAATCAATGCTATCTTTGGTGGTTTAATTATGGGAGCTGGTGTTGGTTTTAGCTTTAAGTCTAGAATTTCTAGTGGGGGAACAGATATTATCAGTTTGACAATTAGAAAGAAAACAGGCAGAGATGTAGGTAGTATTTCTTTTATTATTAATGGTATTATTTTATTATTTGCAGGTCTTTTATTTGGTTGGAAGTACGCTTTGTACTCGATGGTGACCATTTTTGTATCAAGTAGAGTTACAGATGCCATTTTTACAAAGCAAAAAAAGATGCAAGCGATGATTGTTACCAGTAAGCCTGATTGCGTCATTAAACGTATCCATCGTGATTTACATCGTGGTGTAACCTGTATCAATGATGCTGAAGGTACTTATAATCATGAGAAAAAAGCAGTTTTAATAACTATATTAACACGTGAAGAATTTAGTGATTTTAAATATTTAATGCTAAAAGCGGATCCAAAAGCCTTTGTTTCCGTTGCAGAAAATGTTCATATTATTGGACGATTCGTTGATGATGAT

SEQ ID NO: 6422 - protein, 314 aa, Streptococcus agalactiae; identical to SEQ ID NO: 3800

SEQ ID NO: 6423 - protein, 870 aa, Streptococcus agalactiae
ATGTTGAAACTGGATTTAAAAACAAAGATAAAAGAAACTATTTTAATTGCCTTTGGTGTGGCTCTCTATACTTTCGGCTTTGTCAAATTTAATATGGCTAATCATTTGGCTGAAGGAGGTATTTCCGGTGTCACTTTGATTATCCATGCACTTTTCGGAGTTAATCCAGCACTTTCATCACTTCTCCTTAATATCCCGTTATTTATATTAGGGGCTAGGATTTTAGGGAAAAAATCCTTATTGTTAACTATATATGGTACAGTGTTAATGTCTTTTTTCATGTGGTTTTGGCAACAAATCCCTGTAACAGTCCCTTTGAAAAACGATATGATGTTAGTTGCAGTAGCTGCTGGAATTTTAGCAGGAACTGGTAGTGGTTTAGTATTTAGATATGGTGCAACTACAGGTGGTGCAGATATTATTGGTCGTATTGTAGAGGAAAAATCTGGAATAAAATTAGGGCAAACCTTATTGTTTATTGATGCTATAGTTCTAACGTCTTCACTTGTTTATATTAATTTACAACAGATGCTATATACGTTAGTAGCTAGCTTTGTATTTAGTCAAGTGTTAACAAATGTTGAAAATGGGGGCTACACTGTTCGTGGAATGATCATTATTACCAAAGAATCAGAATCTGCAGCAGCAACCATTTTGCATGAAATTAATAGGGGTGTAACTTTTTTACGGGGCCAAGGTGCCTACTCAGGTAGAGAGCATGATGTCTTGTACGTAGCTCTTAACCCAAGTGAAGTGCGTGATGTGAAAGAAATCATGGCTGATTTAGACCCAGATGCTTTTATTTCTGTTATAAATGTAGATGAAGTTATTAGCTCAGATTTTAAAATTCGACGAAGAAATTACGATAAA

SEQ ID NO: 6424 - protein, 290 aa, Streptococcus agalactiae; identical to SEQ ID NO: 3798

SEQ ID NO: 6425 - protein, 306 aa, Streptococcus agalactiae
ATGCCATCAGAAAAAGAAATATTAGATGCTCTTAGTAAAGTTTATAGCGAAGAAGTAATACAAGCAGATGATTATTTTCGTCAAGCTATTTTCGAGCTCGCTAGTCAACTTGAAAAAGAGGGGATGAACTCACTCCTAGCTACAAAAATTGACTCACTTATCAATCAATACGTCTTAACACATCAATTTGATGCTCCTAAAAGCATATTTGATCTTAGTCGCTTGGTAAAAACAAAAGCTAGCCATTACAAGGGAACTGCTATCTCAGCTATTATGCTTGGTAGTTTCTTAAGTGGAGGACCAAAA

SEQ ID NO: 6426 - protein, 102 aa, Streptococcus agalactiae; identical to SEQ ID NO: 3796

SEQ ID NO: 6427 - protein, 1689 aa, Streptococcus agalactiae
ATGGATACAAAACATCTAATTGCGAGTGAAATTCAAAAAGTTGTTCCAGATATGGAACAATCGACCATTCTTTCTTTATTAGAAACCCCAAAAAATTCGAGCATGGGAGATTTAGCTTTCCCAGCATTCTCTTTGGCTAAAACTCTACGCAAAGCACCTCAAATAATTGCTAGTGACATTGCTGAACAAATTAAAAGCGACCAATTTGAAAAGGTGGAAGCTGTTGGACCTTACGTTAACTTTTTCCTTGATAAAGCCGCAATCTCAAGTCAAGTTTTAAAACAAGTCTTATCTGATGGTTCTGCCTATGCTACTCAAAATATTGGTGAAGGACGAAATGTTGCCATTGACATGTCTAGTCCAAATATTGCTAAGCCATTCTCAATTGGACACCTTCGTTCAACAGTTATTGGTGATAGTTTAGCTAATATTTTTGATAAAATTGGCTATCATCCTGTTAAAATTAATCACCTTGGCGACTGGGGTAAACAATTTGGAATGTTAATCGTTGCCTATAAAAAATGGGGCAATGAAGAGGCTGTCCGTGCTCATCCCATCGATGAACTTTTAAAACTTTATGTCCGTATTAATGCTGAAGCCGAGACAGACCCTAGCGTTGATGAAGAGGCACGTGAGTGGTTTCGTAAACTTGAAGCTAACGATCCTGAAGCAACTGAATTATGGCAATGGTTCCGTGACGAGTCATTATTAGAATTCAACCGTCTTTACGATCAAATGAATGTTACATTTGATAGCTATAACGGCGAGGCATTCTACAACGACAAAATGGATGAAGTGCTTGAACTGCTAGAATCTAAAAACCTCCTAGTCGAATCTAAAGGTGCACAAGTTGTTAACCTAGAAAAATACGGTATTGAACATCCTGCCCTCATTAAAAAATCCGATGGAGCAACTCTCTACATTACACGTGACTTAGCTGCTGCACTTTACCGTAAACGTACCTACGATTTTGCAAAATCAATCTACGTTGTAGGAAACGAACAGTCTGCACACTTTAAGCAACTAAAAGCTGTGCTTAAAGAAATGGACTACGATTGGTCCGATGATATGACTCATGTTCCTTTTGGCCTTGTAACAAAAGGAGGAGCAAAATTATCAACTCGTAAAGGAAATGTAATTCTACTTGAACCTACTGTTGCAGAAGCTATTAATCGTGCGGCATCTCAGATTGAAGCTAAAAACCCTAACCTAGCAGATAAAGATAAAGTTGCTCAAGCAGTTGGTGTAGGTGCTATTAAATTTTACGATTTGAAAACTGATCGTACAAATGGTTATGACTTTGACTTAGAAGCAATGGTATCATTTGAAGGTGAAACTGGGCCATATGTACAATATGCACATGCTCGTATTCAATCAATCTTACGTAAAGCTAACTTTAGCCCATCTAATAGCGATAATTACAGTCTCAACGATGTTGAAAGCTGGGAAATCATCAAACTCATCCAAGATTTTCCTCGTATTATTGTACGTGCGGCAGATAATTTTGAGCCCTCTATTATTGCAAAATTCGCTATTAATTTAGCTCAGTGCTTCAATAAATATTACGCCCACACACGTATTTTAGATGAAGACGCTGAAATCAGTAGTCGTCTAGCACTTTGCTATGCAACTGCTACAGTATTAAAAGAATCTCTTCGCCTCCTAGGAGTTGATGCTCCGAATGAAATG

SEQ ID NO: 6428 - protein, 563 aa, Streptococcus agalactiae; identical to SEQ ID NO: 3794

SEQ ID NO: 6429 - protein, 435 aa, Streptococcus agalactiae
ATGAATAAAATAGAACGCCAAAAACGTATTAAACGTTTGATCCAATCAGGGCAGATTGGCACACAAGAAGAAATTAAATTACATTTAAAAAATGAAGGAATCGATGTCACGCAAGCGACTCTATCAAGAGACTTGCGTGAGATTGGTCTTTTAAAATTACGTAGCCCAGAAGGTAAGCTATATTATAGTTTATCAACAGCTACTTCAAATCGATTTAGCCCAGCCTTACGCTCATATATTTTGAAAGTATCGCGAGCAAGTTTTATGTTAGTTTTAAATACTAATTTAGGGGAGGCTAGCGTTTTAGCAAACTTTATTGATGAGAAAGGGCTGCCAGAGATTTTAGGAACAATGGCAGGAGCAGACACCTTGTTGGTGATTTGTCAAAATGAAGATATTGCCAAAGTTTTTGAAAAAGAACTATCAGTAGGTTTA

SEQ ID NO: 6430 - protein, 145 aa, Streptococcus agalactiae; identical to SEQ ID NO: 3792

SEQ ID NO: 6431 - protein, 2574 aa, Streptococcus agalactiae
ATGGCCAAGCCAACGATATCACCGGGAATGCAACAGTATCTGGATATAAAAGAGAATTATCCAGATGCTTTTTTGCTTTTTAGAATGGGTGATTTTTATGAATTATTTTATGATGATGCGGTAAAAGCAGCACAAATCCTGGAAATTAGCTTGACTAGTCGAAATAAGAACGCAGAAAAGCCAATCCCAATGGCAGGAGTTCCCTATCACTCAGCTCAACAGTATATTGACGTTTTAGTTGAATTAGGTTACAAAGTAGCCATTGCTGAGCAGATGGAAGATCCTAAAAAAGCTGTGGGAGTGGTCAAGCGTGAGGTAGTGCAAGTTGTTACCCCAGGAACGGTTGTGGAGTCAACGAAGCCGGATAGTGCTAATAATTTCTTAGTAGCGATTGATTCGCAAGATCAACAAACATTTGGTCTAGCATATATGGATGTCTCAACTGGAGAGTTTCAGGCAACCCTTTTAACAGATTTTGAGTCCGTCCGTAGTGAAATACTAAATTTAAAAGCTCGTGAGATTGTAGTAGGATATCAATTGACGGACGAAAAAAATCACCTACTGACGAAGCAGATGAACTTGCTTTTATCATACGAAGACGAACGACTTAATGATATTCATTTGATTGATGAGCAGTTAACTGATTTGGAAATATCTGCTGCGGAAAAACTTTTACAATATGTGCATAGAACACAAAAGCGTGAACTTAGTCATTTACAGAAAGTAGTTCATTATGAAATAAAGGACTATTTACAAATGTCATATGCAACGAAAAATAGTCTAGATTTACTGGAGAATGCTAGAACAAGCAAGAAGCATGGAAGTCTTTACTGGTTGTTAGATGAGACTAAAACAGCGATGGGAACTCGAATGCTGAGAACTTGGATTGACAGGCCTTTGGTAAGTATGAATCGAATCAAGGAACGTCAAGATATTATTCAAGTGTTTCTTGATTATTTTTTTGAGAGAAACGATCTCACAGAAAGTTTAAAGGGTGTATATGATATTGAACGCCTAGCAAGTCGAGTATCTTTCGGAAAAGCCAACCCTAAAGATCTATTGCAACTCGGACAGACCTTATCACAAATTCCTCGGATTAAAATGATTTTACAGTCCTTCAATCAACCTGAGCTTGACATCATTGTCAACAAAATTGACACTATGCCTGAATTAGAAAGTTTAATTAATACGGCGATAGCCCCAGAAGCACAGGCTACTATCACTGAGGGAAACATTATCAAGTCTGGATTTGATAAGCAATTGGATAATTATCGAACAGTGATGCGTGAAGGTACAGGTTGGATTGCTGATATTGAAGCTAAGGAAAGAGCAGCAAGTGGTATCGGTACTCTTAAAATTGATTATAATAAAAAAGACGGTTATTACTTCCATGTTACCAATTCCAATTTATCACTAGTACCGGAGCATTTTTTCCGTAAAGCGACATTAAAAAATTCTGAACGCTATGGAACAGCAGAACTAGCCAAAATTGAAGGTGAAATGCTCGAAGCTCGCGAGCAATCTTCAAATTTAGAATATGATATTTTTATGCGTGTTCGTGCCCAAGTAGAATCTTATATTAAACGTCTTCAAGAGTTAGCAAAGACGATTGCAACCGTTGATGTTCTACAGAGTTTGGCAGTAGTTGCAGAAAATTATCACTATGTTCGTCCCAAATTTAATGATCAACATCAGATTAAGATTAAGAATGGGCGTCATGCAACTGTTGAAAAAGTGATGGGAGTGCAAGAATATATTCCCAATAGCATCTATTTTGATAGTCAGACAGATATCCAGTTGATTACAGGACCAAATATGAGTGGTAAGTCGACCTATATGCGCCAGTTAGCTTTGACAGTTATTATGGCACAAATGGGAGGTTTTGTATCGGCAGACGAAGTTGATTTGCCTGTATTTGATGCAATATTTACTAGGATTGGTGCTGCTGACGACTTAATTTCTGGGCAATCAACCTTTATGGTAGAAATGATGGAAGCGAATCAAGCTGTAAAACGAGCCAGTGATAAATCTTTGATTCTTTTTGATGAATTAGGTCGAGGGACAGCCACTTATGATGGTATGGCATTAGCTCAATCGATTATAGAATATATTCATGACCGTGTTAGGGCAAAAACAATGTTTGCGACTCATTACCATGAGTTGACAGATTTATCTGAACAGTTGACAAGGCTTGTCAATGTACACGTGGCTACTTTAGAGAGAGATGGAGAAGTTACCTTCTTACATAAAATTGAATCTGGACCTGCGGATAAGTCTTATGGGATACACGTCGCAAAAATAGCTGGTTTACCAATTGACTTATTGGATAGGGCAACTGATATTTTATCACAGTTGGAAGCTGATGCAGTACAGTTGATCGTATCGCCCTCCCAAGAAGCTGTTACTGCTGACTTAAATGAGGAACTAGATTCTGAGAAGCAACAAGGACAATTATCGCTTTTTGAAGAACCTTCAAATGCAGGTAGGGTTATTGAGGAGTTAGAAGCGATAGATATAATGAATCTAACTCCAATGCAAGCTATGAATGCTATATTTGACTTAAAGAAATTATTA

SEQ ID NO: 6432 - protein, 858 aa, Streptococcus agalactiae; identical to SEQ ID NO: 3790

SEQ ID NO: 6433 - protein, 201 aa, Streptococcus agalactiae
ATGACACAAGGTACAGTGAAATGGTTTAACTCAGAAAAAGGTTTTGGCTTTATTTCTAGCGAAACTGGAACAGACGTCTTCGCTCATTTTTCAGAGATTAAAGTTGATGGCTTCAAAACTCTTGAAGAAGGACAAAAAGTAACATTTGATATTCAAGATGGTCAACGTGGACCACAAGCAACAAATATCAATCTTGTTAAA

SEQ ID NO: 6434 - protein, 67 aa, Streptococcus agalactiae
MTQGTVKWFNSEKGFGFISSETGTDVFAHFSEIKVDGFKTLEEGQKVTFDIQDGQRGPQATNINLVK

SEQ ID NO: 6435 - protein, 99 aa, Streptococcus agalactiae
GTGTCATTTGTTTATTACCTTTCTAAAAATGTTACTGTAAAAAATAAAAAAGGTAAAAATGTTAAACAAAAATACAACTTCAAAACTTATTACGCTCCC

SEQ ID NO: 6436 - protein, 33 aa, Streptococcus agalactiae
MSFVYYLSKNVTVKNKKGKNVKQKYNFKTYYAP

SEQ ID NO: 6437 - protein, 1977 aa, Streptococcus agalactiae
ATGAACTTGTCTAAAATTATTGAATTACCGGATATATTAGCTAACCAGATTGCTGCTGGTGAGGTTGTTGAAAGGCCTAGTAGCGTCGTTAAAGAATTAGTTGAAAATGCCATAGATGCAGGAAGTAGCCAAATTACCATAGAGGTTGAAGAATCTGGTCTTAAAAAGATTCAAATAACGGATAACGGTGAAGGGATGACTAGTGAGGATGCCGTTCTCAGTTTACGACGTCACGCTACATCCAAAATCAAAAGCCAGAGTGACCTTTTTCGTATTCGGACCTTAGGTTTTCGTGGTGAAGCTCTACCATCAATCGCTTCGATTAGTTTAATGACGATAAAAACAGCTACAGAGCAAGGGAAACAAGGGACGTTACTTGTTGCTAAAGGGGGAAACATTGAAAAACAGGAAGTTGTTTCAAGTCCTCGTGGAACAAAAATTTTAGTTGAAAATTTATTCTTTAACACGCCTGCCAGATTGAAATACATGAAGAGTTTACAGTCTGAACTAGCTCATATTATTGATATTGTTAATAGACTCAGTCTAGCGCATCCGGAAGTTGCTTTTACACTGATAAATGATGGTAAAGAAATGACTAAAACTAGTGGGACTGGCGATTTGAGACAGGCGATTGCAGGTATTTATGGTTTAAATACTGCAAAAAAAATGATTGAGATTTCAAATGCAGATTTAGATTTTGAAATTTCGGGTTATGTAAGTTTGCCTGAATTGACACGAGCTAACCGAAACTATATTACCCTATTAATTAACGGTCGTTACATTAAAAATTTTCTTTTGAACCGCTCAATTCTAGATGGTTATGGTTCAAAGTTGATGGTTGGAAGATTTCCAATTGCTGTCATTGATATTCAGATAGATCCTTATCTAGCAGATGTCAACGTTCATCCGACTAAGCAAGAGGTGAGAATTTCTAAGGAACGAGAATTAATGAGTTTAATAAGCACAGCAATTTCTGAGAGTCTTAAACAATATGACTTGATTCCGGATGCTTTAGAGAATTTAGCTAAAACTAGTACCCGAAGTGTAGATAAGCCTATACAAACAAGCTTCTCACTAAAACAGCCTGGTTTGTATTACGATAGGGCTAAAAATGACTTTTTTATAGGTGCAGATACTGTATCTGAACCTATTGCTAACTTTACAAACCTTGACAAAAGTGACGGTTCAGTTGACAATGATGTAAAAAACTCTGTTAATCAAGGAGCAACGCAGTCTCCTAATATAAAGTATGCTAGTAGAGATCAAGCTGATAGTGAGAACTTCATTCATTCTCAGGATTACCTTAGTAGTAAACAGTCACTTAACAAACTTGTTGAAAAATTAGATTCGGAAGAAAGTTCGACTTTTCCAGAGCTCGAATTTTTTGGTCAAATGCATGGGACCTACTTATTTGCTCAAGGGAATGGTGGGTTGTATATTATTGATCAACATGCAGCTCAAGAGCGTGTAAAATACGAGTATTACCGTGAAAAGATAGGTGAGGTTGATAATAGTCTTCAACAATTGTTAGTACCATTTCTATTTGAATTTTCAAGTTCAGATTTTCTTCAATTACAAGAAAAAATGTCATTATTACAAGATGTTGGTATTTTCTTGGAACCGTATGGTAATAATACTTTCATTTTAAGGGAACATCCAATTTGGATGAAAGAAGAAGAGGTAGAGTCTGGCATTTATGAAATGTGTGATATGTTGTTGCTCACTAATGAAGTATCAGTGAAAAAATATCGCGCAGAGTTGGCTATTATGATGTCTTGCAAGCGATCTATTAAAGCAAACCATACGCTAGACGATTACTCAGCACGTCATTTATTAGATCAGTTAGCGCAATGTAAAAATCCTTATAATTGCCCTCATGGAAGACCTGTTTTAGTTAATTTTACAAAAGCTGATATGGAGAAAATGTTTAAACGAATCCAAGAAAATCATACAAGCCTCAGGGATTTAGGAAAATAT

SEQ ID NO: 6438 - protein, 659 aa, Streptococcus agalactiae
MNLSKIIELPDILANQIAAGEVVERPSSVVKELVENAIDAGSSQITIEVEESGLKKIQITDNGEGMTSEDAVLSLRRHATSKIKSQSDLFRIRTLGFRGEALPSIASISLMTIKTATEQGKQGTLLVAKGGNIEKQEVVSSPRGTKILVENLFFNTPARLKYMKSLQSELAHIIDIVNRLSLAHPEVAFTLINDGKEMTKTSGTGDLRQAIAGIYGLNTAKKMIEISNADLDFEISGYVSLPELTRANRNYITLLINGRYIKNFLLNRSILDGYGSKLMVGRFPIAVIDIQIDPYLADVNVHPTKQEVRISKERELMSLISTAISESLKQYDLIPDALENLAKTSTRSVDKPIQTSFSLKQPGLYYDRAKNDFFIGADTVSEPIANFTNLDKSDGSVDNDVKNSVNQGATQSPNIKYASRDQADSENFIHSQDYLSSKQSLNKLVEKLDSEESSTFPELEFFGQMHGTYLFAQGNGGLYIIDQHAAQERVKYEYYREKIGEVDNSLQQLLVPFLFEFSSSDFLQLQEKMSLLQDVGIFLEPYGNNTFILREHPIWMKEEEVESGIYEMCDMLLLTNEVSVKKYRAELAIMMSCKRSIKANHTLDDYSARHLLDQLAQCKNPYNCPHGRPVLVNFTKADMEKMFKRIQENHTSLRDLGKY

SEQ ID NO: 6439 - protein, 1230 aa, Streptococcus agalactiae
GTGAAAGAGTTTTTTGCTTTGCCAAAACAGCTACAGTTAAGAGAATTATTGCGTTTTATTTCCATTACGGTTGGTTCAGCTATTTTTCCTTTTATGGCAATGTATTATGTTCAATATTTTGGAAATCTAGTTACAGGAATCTTGATCATCATAACTCAACTATCAGGGTTTGTAGCGACCTTATATGGAGGCCATTTGTCAGATGCTATGGGGAGGAAAAAAGTTGTGATTATAGGTTCACTGCTGGCAACCATTGGTTGGGCTATAACTATAGCTGCAAATGTTCCAAATCATATTACGCCACACTTGACCTTTGTAGGTATCCTTATCATTGAAATAGCTCACCAATTTTATTTCCCTGCCTATGAAGCTATGACCATTGATTTGACGAACGAACAGAATCGTCGCTTTGTTTACACTATAGGTTATTGGTTGGTTAACATCGCTGTAATGCTAGGTTCTGGAATTGCTGGGATTTTCTATGATCACCATTTTTTTGAATTATTAATAGTTCTTCTTATTATTTCAGCGATTTGTTGTTTCGTGGTCTACTTCAAGTTTGATGAGACAAAACCACAGGAGGGAACCTTCAAGCATGATAAAGGAGTTTTAGGAACTTTTAAAAATTATAGTCAGGTTTTAGTGGATAAAGCGTTTGTTGTTTATACTTTAGGAGCAATTGGTTCCAGTGTTGTCTGGCTCCAGGTTGATAATTATTTCTCGGTCAATCTTAAGCAAAATTTTGAAGTAGTGTCCATTTTAGGACATACAATCACAGGTGCTAAAATGCTTAGTTTAGCAGTCTTTACAAACACTCTATTAATTGTCTTACTAATGACAACTATAAATAAATTCATAGAGAATTGGCCTTTGAAACGTCAACTAATATTAGGGAGCTTGATTTGTGGTTTTGGAATGCTTTTTAATATTTCTCTAAACACTTTTGGAGCTATTTTGATTGCCATGACGTTTTTCACCTTTGGCGAAATGATTTATGTTCCAGCTAGTCAGGTTCTAAGGGCGGAGATGATGGTGGAGGGAAAAATTGGATCATATTCTGGATTTTTAGCTATCGCACAACCTGTTGCAAGTGTATTAGCAGGTGCCATGGTTTCGCTCAGCTATTTTACAGGAAAAATAGGTGTTCAAATAACATTGACCATTTTTATGTTAGCAGGTCTGGTTTTAATCTTATATGCTACCAAAATGAAAAATATTGAGATAGGAAAA

SEQ ID NO: 6440 - protein, 410 aa, Streptococcus agalactiae
MKEFFALPKQLQLRELLRFISITVGSAIFPFMAMYYVQYFGNLVTGILIIITQLSGFVATLYGGHLSDAMGRKKVVIIGSLLATIGWAITIAANVPNHITPHLTFVGILIIEIAHQFYFPAYEAMTIDLTNEQNRRFVYTIGYWLVNIAVMLGSGIAGIFYDHHFFELLIVLLIISAICCFVVYFKFDETKPQEGTFKHDKGVLGTFKNYSQVLVDKAFVVYTLGAIGSSVVWLQVDNYFSVNLKQNFEVVSILGHTITGAKMLSLAVFTNTLLIVLLMTTINKFIENWPLKRQLILGSLICGFGMLFNISLNTFGAILIAMTFFTFGEMIYVPASQVLRAEMMVEGKIGSYSGFLAIAQPVASVLAGAMVSLSYFTGKIGVQITLTIFMLAGLVLILYATKMKNIEIGK

SEQ ID NO: 6441 - protein, 588 aa, Streptococcus agalactiae
ATGTACGATTATATTAAAGGAAAATTGAGTAAAATAACGGCTAAATTTATTGTTGTGGAAACAGCTGGATTGGGATACATGATATATGTGGCAAATCCCTACTCTTTTTCAGGTTACGTTAATCAAGAAGTTACCATCTACTTACATCAAGTCATTCGCGATGATGCACATCTTTTATTTGGTTTTCATACGGAAAATGAAAAAGAAATTTTTCTTAATTTAATTTCAGTATCAGGAATTGGTCCAACGACCGCTTTAGCAATTATTGCAGTCGATGACAATGAAGGTCTCGTAAGTGCCATTGATAATAGTGATATTAAGTATTTGACTAAATTTCCAAAGATAGGAAAAAAAACAGCACAACAGATGATCCTTGATTTGTCAGGGAAGTTTGTAGAAGCTTCTGGTGAGAGTGCGACTAGTCGTAAGGTTAGCTCTGAGCAGAATAGCAATCTTGAAGAAGCTATGGAAGCTTTGTTAGCGTTGGGGTATAAGGCGACTGAATTGAAAAAAGTAAAAGCCTTTTTTGAAGGTACGAACGAGACTGTGGAGCAATACATCAAATCTAGTTTGAAGATGTTGATGAAA

SEQ ID NO: 6442 - protein, 196 aa, Streptococcus agalactiae; identical to SEQ ID NO: 3782

SEQ ID NO: 6443 - protein, 549 aa, Streptococcus agalactiae
ATGAAACGATGTTCTTGGGTGAATTTAGATAATCCATTATATGTAGCTTACCATGATAAAGAGTGGGGGAGAGCTGTTCATGACGATCATGTACTCTTTGAGTTACTATGTTTAGAAACTTATCAATCGGGTTTATCTTGGGAAACAGTATTAAATAAACGTCAGGAGTTCAGACAAGTTTTTCATCACTATAATATTGAAAAGGTAGCTGCAATGTCAGATGCGGATTTAGAGATAATCTTACAAAATCCTAGGGTTATTCGTCATCGTCTAAAACTTTTCTCAACACGACAAAATGCTAGGTCAATTATATTAATTCAGAAAGAATTCGGAAGTTTTGATCGCTACATTTGGTCTTTTGTAGATAATAAAGTACAGGTTAACTCAGTTAACAACTACAACGATGTGCCTGCAAGTACTACCTTATCCGAACGCTTATCTAAGGATTTAAAAAAACGCGGTTTTAAATTTGTTGGTCCAACTTGCCTCTATTCTTTTATTCAGGCCGCGGGTATGGTTAATGACCATGAAAATATATGTGATTTCAAG

SEQ ID NO: 6444 - protein, 183 aa, Streptococcus agalactiae; identical to SEQ ID NO: 3780

SEQ ID NO: 6445 - protein, 330 aa, Streptococcus agalactiae
GTGAGGGCTGAAATTATCGCTGTAGGAACAGAAATTTTAACAGGACAGATCGTTAATACAAACGCACAATTTTTGTCGGAGAAAATGGCAGAATTGGGAATTGATATTTATTTCCAGACAGCTGTAGGAGACAATGAGGAACGTTTATTATCGCTTTTAGATATAGCTAGTCAGCGCAGTCAATTGGTTATCCTATGTGGTGGACTTGGCCCTACAGAGGATGACTTAACGAAGCAAACTTTGGCTAAATTTTTAGGTAAATCATTAACAGTAGATTTATTAGCTAGTCGAAAATTGGATCGTTTTTTTTGCAAGTCGTCCTCAGTTTGC

SEQ ID NO: 6446 - protein, 110 aa, Streptococcus agalactiae; identical to SEQ ID NO: 3778

SEQ ID NO: 6447 - protein, 816 aa, Streptococcus agalactiae
ATGGTTTTACCAGGTCCGCCTAGTGAATTAAAGCCAATGGTTATGGAGCAGGTAGTACCTATTTTGTCAAATAATGGCACAAAATTATATTCACGTGTATTGAGATTCTTTGGTATCGGTGAGAGTCAGTTAGTCACAATCTTAGAAGACATAATTAAGAATCAGACAGACCCAACTATAGCACCATATGCAAAGGTTGGTGAGGTAACTTTAAGGTTATCAACGAAAGCTGAAAATCAGGATGAGGCCGACTTTAAATTAGATAGCTTAGAAAAAGAAATACTTGCTCTTAAGACATTAGATAACCGTAAATTAAAAGATTTATTATATGGTTATGGTGATAATAATAGTATGGCACGTACTGTTTTAGAATTATTGAAAGTACAAAATAAAACGATTACTGCCGCAGAGAGCTTAACAGCAGGGTTATTTCAATCTCAGTTAGCAGAATTTTCTGGTGCTTCGCAAGTTTTTAATGGTGGTTTTACGACCTATAGTATGGAAGCAAAATCACAACTTCTCGGCATCCCTAAGAAAAAATTGCAAGAATATGGAGTTGTCAGTCATTTTACAGCTGAGGCAATGGCTCAGCAAGCTCGCCAACTTTTAAAAGCAGATTTTGGTATCGGTTTAACGGGAGTTGCTGGTCCTGATGAGTTGGAAGGATACCCTGCAGGTACAGTTTTTATTGGGATTGCAACCCCTGAAGGCGTTTCTTCTATTAAAGTATCGATTGGAGGGAAGAGTCGCTCAGATGTCCGTCATATCAGTACTTTACATGCTTTTGACTTGGTGCGTAGGGCTTTATTAAAGATA

SEQ ID NO: 6448 - protein, 272 aa, Streptococcus agalactiae; identical to SEQ ID NO: 3776

SEQ ID NO: 6449 - protein, 344 aa, Streptococcus agalactiae
TTGGCTAAAAAAACGAAAAAAGCAGAAGAAATTACTAAGAAATTCGGTGATGAACGTCGAAAAGCCTTAGATGATGCTTGAAAAATATTGAAAAAGATTTTGGTAAGGGCGCAGTGATGCGCTTAGGTGAGCGAGCTGAACAAAAGGTTCAAGTAATGAGTTCAGGTTCTCTTGCTTTAGATATCGCTTTAGGAGCAGGTGGATATCCTAAAGGACGTATCGTCGAAATTTATGGACCAGAGTCATCTGGTAAAACAACGGTTGCCCTTCATGCCGTAGCTCAAGCCCAAAAGGAAGGTGGGATTGCTGCCTTTATTGATGCTGAGCACGNNNNNTTAATTAAT

SEQ ID NO: 6450 - protein, 115 aa, Streptococcus agalactiae
  VARIANT 111, 112: Xaa = Any Amino Acid
MAKKTKKAEEITKKFGDERRKALDDALKNIEKDFGKGAVMRLGERAEQKVQVMSSGSLALDIALGAGGYPKGRIVEIYGPESSGKTTVALHAVAQAQKEGGIAAFIDAEHXXLIN

SEQ ID NO: 6451 - protein, 207 aa, Streptococcus agalactiae
TTGTCCTATCTGTCAAAAGGACAAGTTATTGAGCGAAAAACAAAACGCAATCGTATCTTTTATGGCTGTGACCGCTACCCAGAATGTGAGTTTACATCTTGGGACAAACCTATTGGACGAACTTGCCCCAAATCAAATGATTTCTTTAGTGGAGAAAAAGTACGCGCTGGTGGTAAACAAAGTGTTTGCTCAAATGAAAAATGCGAC

SEQ ID NO: 6452 - protein, 69 aa, Streptococcus agalactiae
MSYLSKGQVIERKTKRNRIFYGCDRYPECEFTSWDKPIGRTCPKSNDFFSGEKVRAGGKQSVCSNEKCD

SEQ ID NO: 6453 - protein, 2111 aa, Streptococcus agalactiae
ATGGCAACTACGACAAAAACGTCGACCAAAAAAACAAGTAAAAAAAAATCAGCTACTGCTAAAAAAAATCTAGTTATTGTGGAGTCTCCTGCAAAAGCAAAGACTATCGAAAAATACTTAGGACGTAACTATAAAGTTGTAGCCTCAGTAGGTCATATCCGTGATTTAAAAAAGTCAAGTATGTCCATTGATTTTGAGAATAATTACGAACCACAATATATTAATATTCGTGGTAAAGGACCTCTCATTAATGATTTAAAAAAAGAAGCTAAAAAGGCTAAAAAAGTTTACCTCGCGAGTGACCCGGACCGTGAAGGAGAAGCTATTTCCTGGCATTTAGCGCATATTTTAGATTTAGACAAAGAAGACAGAAACCGTGTTGTTTTCAATGAAATCACAAAAGATGCTGTTAAAAATGCTTTTGTGGAACCTCGTCAGATTAACATGGATCTCGTTGATGCTCAGCAAGCACGACGTGTTTTAGATCGCATTGTTGGTTATTCTATCTCACCTATTTTATGGAAAAAAGTAAAAAAAGGGCTATCAGCTGGACGTGTACAATCAGTTGCTCTTAAACTAATCATTGATCGTGAAAATGAGATTAAGGCTTTCCAACCGGAGGAGTATTGGACTATTGACGGTTCCTTTAAAAAAGGAACACGTAAATTCAATGCCACTTTCTACGGTTTAGACGGAAAGAAATTCAAATTATCGAATAATGAAGACGTCAAAACAGTTCTAAAACGTATTAAAACTGATGAATTCTTAGTTGAAAAAGTTGAAAAAAAAGAGCGTCGTCGTAATGCACCATTACCGTATACAACTTCTTCATTGCAACAAGATGCAGCTAATAAAATCAATTTTCGAACTCGTAAAACCATGATGATTGCGCAACAGCTGTACGAAGGACTTAGCTTAGGCACAGCAGGTCATCAAGGTCTGATTACCTATATGCGTACTGATTCTACACGTATTAGTCCGTTAGCACAAAATGAAGCAACAGAATTTATTACTAACCGTTTTGGTGCAAATTATTCTAAACATGGGAATAAAGTTAAAAATGCTTCTGGAGCACAAGACGCTCACGAAGCTATTCGCCCATCTAGTGTTAATCATACACCCGAAAGTATTGCTAAGTATTTAGACAAAGATCAACTAAAACTTTACACTCTTATCTGGAACCGTTTTATTGCAAGCCAAATGACAGCAGCAGTCTTTGACACAATGAAAGTTAATTTAACGCAAAATGGTGTTACTTTTATTGCTAATGGTAGCCAAGTCAAGTTTGATGGTTACATGGCTGTTTATAACGATACTGACAAAAATAAAATGTTACCAGATATGGAGGAAGGAGAAAGTGTTAAAAAGGTTAATACGAATCCTGAACAACACTTCACTCAACCTCCTGCAAGGTTTTCAGAAGCAAGTCTCATTAAAACACTTGAAGAAAACGGTGTAGGTCGTCCTTCAACTTATGCCCCAACGCTTGAGACTATTCAAAAACGTTATTATGTTAAGCTTGCAGCTAAACGCTTCGAACCAACTGAACTTGGTGAAATTGTTAATAGCCTTATTGTAGAATTTTTCCCAGATATTGTTGATGTTACCTTCACTGCCGAAATGGAAGGGAAACTAGACGAAGTTGAGATTGGTAAAGAGCAGTGGCAAAAGATTATCGATGAATTTTATAAACCATTTGAAAAAGAACTTGCAAAAGCAGAAACTGAAATGGAGAAATTCAAATAAAGGATGAACCTGCTGGATTTGATTGCGAGCTATGTGGATCACCAATGGTAATAAAACTAGGACGTTATGGAAAGTTTTATGCGTGTAGCAATTTCCCTGAATGTCATAACACAAAAGCTATCACTAAGGAAATAGGTGTTATTTGTCCTATCTGTCAAAAGGACAAGTTATTGAGCGAAAAACAAAACGCAATCGTATCTTTTATGGCTGTGACCGCTACCCAGAATGTGAGTTTACATCTTGGGACAAACCTATTGGACGAACTTGCCCCAAATCAAATGATTTCTTTAGTGGAGAAAAAGTACGCGCTGGTGGTAAACAAAGTGTTTGCTCAAATGAAAAATGCGACTANNNNNTTAATTAAT

SEQ ID NO: 6454 - protein, 704 aa, Streptococcus agalactiae
  VARIANT 700, 701: Xaa = Any Amino Acid
MATTTKTSTKKTSKKKSATAKKNLVIVESPAKAKTIEKYLGRNYKVVASVGHIRDLKKSSMSIDFENNYEPQYINIRGKGPLINDLKKEAKKAKKVYLASDPDREGEAISWHLAHILDLDKEDRNRVVFNEITKDAVKNAFVEPRQINMDLVDAQQARRVLDRIVGYSISPILWKKVKKGLSAGRVQSVALKLIIDRENEIKAFQPEEYWTIDGSFKKGTRKFNATFYGLDGKKFKLSNNEDVKTVLKRIKTDEFLVEKVEKKERRRNAPLPYTTSSLQQDAANKINFRTRKTMMIAQQLYEGLSLGTAGHQGLITYMRTDSTRISPLAQNEATEFITNRFGANYSKHGNKVKNASGAQDAHEAIRPSSVNHTPESIAKYLDKDQLKLYTLIWNRFIASQMTAAVFDTMKVNLTQNGVTFIANGSQVKFDGYMAVYNDTDKNKMLPDMEEGESVKKVNTNPEQHFTQPPARFSEASLIKTLEENGVGRPSTYAPTLETIQKRYYVKLAAKRFEPTELGEIVNSLIVEFFPDIVDVTFTAEMEGKLDEVEIGKEQWQKIIDEFYKPFEKELAKAETEMEKIQIKDEPAGFDCELCGSPMVIKLGRYGKFYACSNFPECHNTKAITKEIGVICPICQKDKLLSEKQNAIVSFMAVTATQNVSLHLGTNLLDELAPNQMISLVEKKYALVVNKVFAQMKNATXXLIN

SEQ ID NO: 6455 - protein, 839 aa, Streptococcus agalactiae
ATGAATCATTTTGAACTATTAAGCTTAAAAAAGCTGGATTAACAAATCTTAATATCAACAATATTATCAACTATCTCAAAAAGAATAGTTTAACTTCTCTATCTGTTCGCAATATGGCCGTAGTATCAAAATGTAAAAATCCTACTTTCTTTATAGAAAATTATAAACAGCTAGACCTTAAAAAACTTCGACAAGAATTCAAAAAATTTCCAGTTCTATCGATTTTGGATTCTAACTATCCTTTAGAGTTAAAAGAAATATATAATCCACCAGTTCTACTTTTTTATCAGGGTAATATTGAACTTCTATCTAAACCTAAATTAGCTGTAGTGGGGGCAAGACAGGCATCTCAGATAGGTTGTCAGTCTGTTAAAAAGATTATCAAGGAGACTAACAATCAATTTGTTATCGTAAGTGGTTTAGCGCGTGGCATTGATACAGCAGCACATGTTAGTGCTTTAAAAAATGGCGGCAGTAGTATAGCTGTTATCGGGAGTGGTTTAGATGTTTATTATCCAACGGAGAATAAGAAACTTCAAGAATATATGTCATATAATCATCTCGTATTATCAGAATATTTTACCGGAGAACAACCCTTGAAATTTCATTTCCCCGAACGTAACCGTATTATTGCAGGGCTGTGTCAAGGTATTGTGGTTGCCGAAGCTAAGATGAGATCTGGAAGTTTAATTACCTGTGAAAGAGCATTAGAAGAGGGACGAGAAGTTTTTGCCATTCCCGGAAATATTATCGATGGCAAATCAGATGGATGCCACCATCTTATCCAAGAAGGAGCTAAATGCATTATTTCAGGAAAAGATATCCTTTCTGAATATCAG

SEQ ID NO: 6456 - protein, 280 aa, Streptococcus agalactiae; identical to SEQ ID NO: 1884

SEQ ID NO: 6457 - protein, 1026 aa, Streptococcus agalactiae
ATGACAAAAAAACTTATTATTGCTATATTAGCACTATGCACTATCTTAACCACTTCTCAAGCTGTTTTAGCTAAAGAAAAATCACAAACTGTTACCATAAAAAACAACTATTCGGTCTATATTAAAAAAGAAAAAAGAGACAAGCCGGATAATAAAAAGCAAATCAGCGAGACACTTAAAGTTCCTTTAAAACCCAAAAAAGTAGTTGTTTTTGATATGGGAGCTTTGGATACTATCACAGCTTTAGGAGCTGAAAAATCTGTTATTGGTATCCCGAAGGCTAAAAATGCTCTAAGTTTATTGCCCAATAACGTCAAATCTGTTTATAAAGCTAAGAGATACCAAGACGTAGGAAGTCTCTTCGAACCAAACTTTGAAGCTATTGCTCGTATGCAACCTGATGTGGTTTTCCTAGGAGCACGTATGGCTTCTGTTGATAATATTGAAAAATTAAAGGAGGCTGCACCTAAAGCAGCATTAGTATATGCTGGAGTCGACTCAAAAAAAGTATTTGACAAAGGAGTTGCTGAGCGTGTCACAATGTTAGGGAAAATCTTCGACCAAAATAAAAAGGCAAAAACCTTTAATAAAGATATCGCACAAGCTGTTCTTAAATTGCAGAAAACTATTGAGAAAAAAGGTAAACCTACAGCTCTATTTGTAATGGCAAACAGCGGTGAACTTTTAACTCAATCACCTTCTGGTCGTTTTGGTTGGATTTTCTCTGTAGGTGGATTTAAAGCAGTCAATGAAAATGAAAAACTAAGTTCACATGGTACTCCCGTATCTTATGAATACATCGCTGAAAAAAATCCTAACTATCTCTTTGTTTTAGATCGTGGAGCGACTATTGGACAAGGAGCTTCATCAAAAGAACTTTTTAATAACGATGTTATTAAAGCAACTGATGCTGTCAAAAACAAACGTGTTCATGAGGTAGATGGAAAAGATTGGTATATCAATTCAGGCGGAAGCCGAGTAACACTCCGTATGATTAAAGATGTACAGAACTTTGTTGATAATCGT

SEQ ID NO: 6458 - protein, 342 aa, Streptococcus agalactiae; identical to SEQ ID NO: 1886

SEQ ID NO: 6459 - protein, 757 aa, Streptococcus agalactiae
ATGATTCAAATAAACAATTTACATAAGTTCTATGGCCAAAAGGAAATATTAAAAGACATTAATATTTCGATTCCTAAAGGAAAAGTAACAGCTATTTTAGGTCCAAATGGATCTGGAAAGAGTACATTGCTGAGTTGTATCAGTCGACTTGAACCTTATGATAATGGTGAAATTTTCCTTGATAAAGTACCATTAGCCCACTACAGTTCAAATGACTTAGCCAAAACATTAGCCATATTAAGACAATCTAATCACTTAACACTCAAGATAAAGGTGAGAGACTTGATAGGATTCGGTAGATTTCCTTATAGTAAAGGACGGTTAAGTCAAAAAGATAAAGCTGTCATAGAATCAGTTATATCTTATATGGATTTAAACGATATAGCTGACGAGTTCATTAATAACCTCAGCGGAGGTCAAATTCAAAGAGCTTTTATCGCAATGACAATGGCACAAGATACTCAATATATTTGCTTAGATGAGCCACTCAACAATTTAGATATGAAATATGTTGTTCAAATGATGGATCTTATCAAACGATATGCGTATGAGTTTAATAAAACTATAGTGATTATTATTCACGACATCAATTTTGCAACTCACTACGCTGACAATGTTGTCGCTTTAAAAGAAGGACAAGTGGTGACTTGTGGGACTGTCGAAGATGTTATGCAAGAAAAAATCCTTTCTCATTTATTTGATATGCCTATCCGTATCGAAACTGTGATGTAAACCAATTATCCTTTTTTGTACAACG

SEQ ID NO: 6460 - protein, 253 aa, Streptococcus agalactiae
MIQINNLHKFYGQKEILKDINISIPKGKVTAILGPNGSGKSTLLSCISRLEPYDNGEIFLDKVPLAHYSSNDLAKTLAILRQSNHLTLKIKVRDLIGFGRFPYSKGRLSQKDKAVIESVISYMDLNDIADEFINNLSGGQIQRAFIAMTMAQDTQYICLDEPLNNLDMKYVVQMMDLIKRYAYEFNKTIVIIIHDINFATHYADNVVALKEGQVVTCGTVEDVMQEKILSHLFDMPIRIETVDGKPIILFCTT

SEQ ID NO: 6461 - protein, 972 aa, Streptococcus agalactiae
ATGATTAAGGATTTAGAGATACCAAAATTACTTATTTTACTGATACTACTAATTGCTGCTATTATTTTGTTTTTAATTTATGGTATTCCAACTGACGCAAATGAATTTTTGATTATCTATATCCTAAAAACACGTTATCAAAAACTGATTGCATTAATTTTGGTTGGTATCTGCATTGGTAGTTCTAGTCTTATTTTTCAAACTCTAACCAATAACCGACTTTTAACTCCGTCCATTATTGGTTTAGATAGCTTATATATCCTTATCCAAACAGGATTAATGTATTTAATCGGAGCTCAGCGTGTCATAAAATTTTCATCTTTTAGTAGCTTCCTCCTTTCATTATTATTAATGGTTGGATTTGCTTACTTATTATTTACGATACTTTTTCGAAATAAAAAACAGTCTTTGTATTTTGTTCTATTAGCTGGACTCATATTTAATACATTATTTTCTTCTATCTCATCCTTTATTCAAGCCATTATGGACCCCAACGATTTTATGATTTTACAAAATCAGCTCTTTGCTAGTTTCAATGCTATTAACACCAAGATCCTTTGGATTTCTTTCATTATCATTGTCGTTAGCTTTGTCATTAATTGGCCTTTTATAAAGGAATTGGATGTCTTACTATTGGGTAAAGAAAATGCGATATCACTCGGCATCTCATATCAAAAGCTTACTACTAGATTTTTTTTATGGTTAGCATTGATGGTAGCTATAGCAACAGCATTAGTTGGGCCGATTACTTTTTTAGGCTTACTTGTAGCACATATTACCTATCACAGTTTTCATACCTTTAGACATCAAATATTAGTTCCTATAGCCATTGTTATCTGTATCTTTACACTTGTCTTAGGGCAGCATCTCGTTCAAAATCTATTACACCTCACTGTTCAACTAAGTGTTCTCCTCAACCTTATCGGGGGAAGTTATTTTATATTCACCTTAATCAAAGGAAGGAAAAACTTA

SEQ ID NO: 6462 - protein, 324 aa, Streptococcus agalactiae; identical to SEQ ID NO: 1890

SEQ ID NO: 6463 - protein, 516 aa, Streptococcus agalactiae
ATGGTAGCAGCAGCAACAGTATTTTTAGGAACACATTTTCAAGTACTACAATCTGTCAACAGTTGGCTTCAAGGTAATTTTTCCATCATGACTAGCCATCGCTACGAAATTCTTTACTTAGCATTGCCATGTTTGTTTTTAGTATATTTTTTTGCTCATCAGTTTACCATTGTTGGGCTTGGAGAAAGCTTCGCTAAGAATTTAGGGGTTGCTTATGAAAAGATGATTTACTTTGGTTTAGTTTTGGTTTCAATTATGACATCCCTAGTCATTATTATCGTAGGAGCTTTACCTTTCTTAGGTTTAATCGTACCTAATCTAATTAGCATAACTAAAGGAGATCATATGTCCTCAACTATCTTAGAGACATCGCTTTTAGGGGCTTGTATCGTCATGATATGTGATCTTTTTGGTCGCTTAGTTATTTTTCCTTATGAAGTCTCAATAGGAGTTACGCTAGGAGTATTAGGTAGTGCCTTTTTCCTGATTTCAATTATAAGAAATGAGGGAAAATCA

SEQ ID NO: 6464 - protein, 172 aa, Streptococcus agalactiae
MVAAATVFLGTHFQVLQSVNSWLQGNFSIMTSHRYEILYLALPCLFLVYFFAHQFTIVGLGESFAKNLGVAYEKMIYFGLVLVSIMTSLVIIIVGALPFLGLIVPNLISITKGDHMSSTILETSLLGACIVMICDLFGRLVIFPYEVSIGVTLGVLGSAFFLISIIRNEGKS

SEQ ID NO: 6465 - protein, 215 aa, Streptococcus agalactiae
ATGATTAAGGATTTAGAGATACCAAAATTACTTATTTTACTGATACTACTAATTGCTGCTATTATTTTGTTTTTAATTTATGGTATTCCAACTGACGCAAATGAATTTTTGATTATCTATATCCTAAAAACACGTTATCAAAAACTGATTGCATTAATTTTGGTTGGTATCTGCATTGGTAGTTCTAGTCTTATTTCAAACTTCCNNNNNTTAAT

SEQ ID NO: 6466 - protein, 72 aa, Streptococcus agalactiae
  VARIANT 70, 71: Xaa = Any Amino Acid
MIKDLEIPKLLILLILLIAAIILFLIYGIPTDANEFLIIYILKTRYQKLIALILVGICIGSSSLIFKLPXXN

SEQ ID NO: 6467 - protein, 960 aa, Streptococcus agalactiae
ATGAAAAAGCTATTAACCACTCCTGTAATGGGTTGTACTTTGGTTATACTTTCTCTAACGTCCCTATTTGTTGGTGTGAAATCTATCCCACTGGAGCAAATAACACACCTTGATCAATCACAGGTAGATATTTTTTTAACGAGTCGCTTACCAAGAACCATTAGTATCCTAATATCTGGTGCAAGTTTGTCAGTCTGTGGCCTGCTGATGCAACAACTAACCCAAAACAAGTTCGTTTCACCGACAACTTCAGGGACTATGGATTGGGCGAAATTAGGAGTAGTTGTTACGCTGATTTTCTTTAAAAATACCTCTATTTTTATTCAACTATGTATAGCTTCAGGTTTTGCCATTTTAGGATCGCTTCTTTTTGTAACCATTTTAAAAATGATTACTTTTAAGGATAATATTTTTATACCTCTTATCGGACTGATGCTTGGACAAATTGTAGCAGCAGCAACAGTATTTTTAGGAACACATTTTCAAGTACTACAATCTGTCAACAGTTGGCTTCAAGGTAATTTTTCCATCATGACTAGCCATCGCTACGAAATTCTTTACTTAGCATTGCCATGTTTGTTTTTAGTATATTTTTTTGCTCATCAGTTTACCATTGTTGGGCTTGGAGAAAGCTTCGCTAAGAATTTAGGGGTTGCTTATGAAAAGATGATTTACTTTGGTTTAGTTTTGGTTTCAATTATGACATCCCTAGTCATTATTATCGTAGGAGCTTTACCTTTCTTAGGTTTAATCGTACCTAATCTAATTAGCATAACTAAAGGAGATCATATGTCCTCAACTATCTTAGAGACATCGCTTTTAGGGGCTTGTATCGTCATGATATGTGATCTTTTTGGTCGCTTAGTTATTTTTCCTTATGAAGTCTCAATAGGAGTTACGCTAGGAGTATTAGGTAGTGCCTTTTTCCTGATTTCAATTATAAGAAATGAGGGAAAATCA

SEQ ID NO: 6468 - protein, 320 aa, Streptococcus agalactiae; identical to SEQ ID NO: 1892

SEQ ID NO: 6469 - protein, 129 aa, Streptococcus agalactiae
GTGACTATTTTACCAGGTGTTGTATTAGGAGATAATGTCGTCGTTGGCGCTGGAAGTGTCGTTACGAAATCATTTGAAAATAACGTTGTTATAGCAGGAAACCCTGCTAAGATAATCAAAAAATTAGCT

SEQ ID NO: 6470 - protein, 43 aa, Streptococcus agalactiae
MTILPGVVLGDNVVVGAGSVVTKSFENNVVIAGNPAKIIKKLA

SEQ ID NO: 6471 - protein, 126 aa, Streptococcus agalactiae
ATGCTTGGACAAATTGTAGCAGCAGCAGCAGTATTTTTAGGAACTCATTTTCAAGTATTACAATCTGTCAGCAGTTGGGTTCAAGGTAATTTTTCCATCATGACTAGCCATCNNNNNTTAATTAAT

SEQ ID NO: 6472 - protein, 42 aa, Streptococcus agalactiae
  VARIANT 38, 39: Xaa = Any Amino Acid
MLGQIVAAAAVFLGTHFQVLQSVSSWVQGNFSIMTSHXXLIN

SEQ ID NO: 6473 - protein, 236 aa, Streptococcus agalactiae
ATGACCGAAAAAGAAAAAATGTTAGCAGGACAATATTATCGTCCATCAGCACCTGAACTACGCAAGGATAGAGAAGTTGCACTAAAAAATATGCAAGCCTTTAACAATGARATTAGTAGCAAACGTAACGTCATTTTACAAAAATGGTTGGTGCTACTGGGAAGAGTATCCATATGGACCGTTTTGTCTGCGATATGGTTGTAATATTTATGTTGGTGAAAACTCTACGCAATTTT

SEQ ID NO: 6474 - protein, 81 aa, Streptococcus agalactiae
  VARIANT 38, 51, 67: Xaa = Any Amino Acid
MTEKEKMLAGQYYRPSAPELRKDREVALKNMQAFNNEXYSSKRNVILQKWXGATGKSIHMEHVLSAXMVVIFMLVKTLRNF

SEQ ID NO: 6475 - protein, 759 aa, Streptococcus agalactiae
ATGGCAACAATTAAAGAAATCAAAGCAATTTTAGAGACTATTGTTGATTTAAAAGACAAACGTTGGCAAGAATATCAAACAGATTCACGCGCAGGTGTTCAAAAAGCAATCCTTCAACGAAAAAAAAATATTCAGTCAGATTTAGACGAAGAAGCGCGCTTAGAACAAATGTTGGTCTACGAAAAAAAACTTTACATTGAACATATAAACCTTATTGCAGGAATCGATGAAGTAGGTAGAGGTCCTTTAGCGGGACCAGTAGTAGCTGCTGCTGTTATTCTTCCACCAAACTGTAAAATAAAACATCTCAATGACTCCAAAAAAATTCCAAAGAAAAAGCATCAAGAAATCTATCAAAATATTTTAGATCAAGCGTTAGCAGTTGGTATTGGTATTCAAGACAGCCAATGTATTGATGATATCAACATTTATGAAGCTACAAAACATGCTATGATTGATGCAGTTTCTCATTTATCTGTGGCTCCTGAACATCTTTTAATTGATGCTATGGTTTTAGATCTATCAATTCCACAAACTAAAATTATCAAAGGTGATGCTAATTCACTCTCTATTGCAGCAGCTTCAATCGTAGCTAAAGTGACCAGAGATAAAATAATGTCTGATTATGATAGCACATATCCTGGATATGCATTTTCTAAAAATGCTGGCTATGGTACTAAAGAGCATTTAGAAGGTTTGCAAAAATACGGTATTACTCCGATACATCGTAAAAGTTTTGAACCTATAAAATCAATGTTG

SEQ ID NO: 6476 - protein, 253 aa, Streptococcus agalactiae; identical to SEQ ID NO: 1896

SEQ ID NO: 6477 - protein, 849 aa, Streptococcus agalactiae
ATGGCTACTATTCAATGGTTCCCAGGACACATGTCCAAAGCTCGCCGTCAAGTTCAAGAAAATATTAAGCATGTTGATTTTGTTACAATTTTAGTGGATGCAAGGTTACCTCTTTCTAGTCAAAATCCAATGCTAACCAAAATCGTCGGAGACAAACCCAAACTAATGATCCTCAATAAAGCTGATCTAGCAGATCCTATTCGAACTAAAGAATGGAGAGATTTTTATGAATCTCAAGGTTTAAAGACATTAGCTATTAATTCTAAAGAACAATCAACAGTTAAAAAAGTAACCGACATCGCTAAAATATTAATGTCCGATAAAATTGCTAAGCTACGGGGACGTGGTATTCAAAAAGAGACACTTCGTACGATGATTATTGGAATTCCGAATGCAGGTAAATCGACTCTAATGAATCGCCTAGCAGGTAAAAAAATTGCAGTGGTTGGTAATAAACCAGGTGTCACAAAAGGTCAGCAATGGCTCAAATCTAATAAGGAACTGGAAATTTTGGACACTCCTGGTATCTTGTGGCCCAAATTTGAAGATGAATTAGTTGGATTAAAGCTAGCATTAACAGGGGCAATCAAAGATCAATTATTGCCTATGGATGAGGTAACAATATTTGGATTGAATTACTTTAAAACCTATTATCCTGATCGTCTCAAAGAGCGTTTTAAAAGCATTAATTTAGAGGATGAAGCTCCTGAAATCATCATGGCCTTAACACAAAAATTAGGTTATCGTGACGATTACGATCGCTTTTATAATTTATTTGTCAAAGAAGTTCGCGATGGTAAATTAGGACGCTATACGTTAGATATCGTCGGAGAACATGATGGCAACAAT

SEQ ID NO: 6478 - protein, 283 aa, Streptococcus agalactiae; identical to SEQ ID NO: 1898

SEQ ID NO: 6479 - protein, 570 aa, Streptococcus agalactiae
ATGAGAAAACGTTCAATTTTGCCAATATTAGCTGTCTTATTTGTTTTCATGAGTATCTTTAGCGTATATTCTATTTTTCGTGGTGATAAAGCCAAAGAAAAAGCAAGTGTCATAAAACAAGCATCTCAAACAAGTCAAACTTCAAAAAAAGAGGTCTTACAAAAGAAGACTTATCCAAATCTAAATAAATATTCAAATCTAGAAATTCATGTTTCATCTACGAGGCAAACAATGACAATAACCTCGAATGACAAGGTCATCTTTAAAACGATTGTTTCAACAGGAGCAAAAGAGAGCCCTACCCCAAAAGGAACTTTTGTCATAGAACCGGAACGAGGAGATTTTTTCTATAACGCCTCATCAAAAGAAGGAGCCTATTATTGGGTCTCCTTTAAAGAACATGGTATTTATCTCTTTCATAGCGTTCCGACTGATCAACAAGGAAATGAGATTCCAGAAGAAGCAAAGCAATTAGGAAAAGCCGCCTCACATGGCTGTGTGCGTATGTCAAGGGCGGATGCAAAATGGTTCTATGAAAATATTCCTCAAGGAACGACTGTTACCATCAAA

SEQ ID NO: 6480 - protein, 190 aa, Streptococcus agalactiae; identical to SEQ ID NO: 1900

SEQ ID NO: 6481 - protein, 1482 aa, Streptococcus agalactiae
ATGGTAACATTTTTAGGAGGGGTAGCCCTTTTAATTGTTGGTTATTTCACGTACGGTAGATACATTGAAAAGAATTTTCAAATTGATGAAAATCGCCAAACACCTGCAGAAGCATTAAGGGATGGATATGATTTTGTTCCTATGCCAAAATGGAAGAATGGGATGATTGAGTTATTGAACATCGCAGGAACCGGACCTATCTTTGGACCTATTTTAGGAGCACTCTATGGTCCAGTTGCTTATATCTGGATAGTCTTAGGATGTATTTTTGCAGGGGCTGTTCATGATTATATGATTGGAATGATTTCTCTTAGAAATAATGGTGCATATCTTCCTGAATTAGCTAGTCGCTATCTTGGAAAGTCAATGAAGCATGTGATCAACATTTTTTCAATGCTATTACTTATTTTAGTTGCAACCGTATTTGTGGTAACTCCAGCTAATCTTATCCTAAGTATTTTACCAGCTGGGACACTATCTTTACCTTGGATAATCGGTCTTATTTTCGTTTATTACCTTATTTCTACAGTCTTACCTATTGATAAAGCACTTGGTAAAGTTTATCCTGTATTCTGCGTCATCTTAATGGTTAGTACGGCAGCAGTTGGCTTCCGTTTATTAACTGGTGGCTTTGATATGCCAAACTTAACTTTTGAAACCTTTAAAAATATGCATCCAGCTGGGCTTGGGATATTCCCTGCTTTATTCTTTACCATTTCATGTGGAGCCATCTCTGGTTTCCATGCTACCCAAGCACCTATGGTCTCAAGAACAACTGTTAATGAGAGAGAAGGGCGTTTCACTTTCTACGGCATGATGATTGCAGAAGGAGTAATTGCGATGATTTGGGCAGGTGCTTCAATGAGCTTGTTCAAAGGTCAAAATCTCTATGAAATGATTGCTGCTGGGACACCTTCTGCAGTTGTCAATCAAGTAATGTTAATGTTACTCGGTAGTGTAATTGGAACTATCGCTATCATTGGTGTTATTGTTCTCCCTGTTTCATCTGGTTTATCAGCTTTCCGTAGCTTACGTACTATCGTTGCTGATTATATCCATGTCAAACAAGATACTCTTCCAAAAATCTTTGCTGTAACTATCCCATTATATGTTATTTCATTTGTCCTTACACACGTTGATTTTAATCTCCTATGGCGTTACTTTAACTGGGCAAATCAAGTAACTGCTGTTATTGGTTTATTAGTTGCTACAAGATATCTCATCCTAAAAAGACGAAATTATTGGGTAACATTTGTACCAGCTATGTTCATGTTGTATGCAGTAGTTGTTTATATTTTATCTCAACCAATTGGATTTAATATGGGCTTAGGCATCTTAACTTATTCACTTGCTTTAGTGTTAACAGGTATTCTTGTTGGACTTTTCTGGAAATCTGGTCAAAAACAATTAAAAACTGTTCATCCTGAAGCATTCCTGTTTAACGATCATAGACCAATTAATTATTACAGTAGTTTAGATTCT

SEQ ID NO: 6482 - protein, 494 aa, Streptococcus agalactiae; identical to SEQ ID NO: 1902

SEQ ID NO: 6483 - protein, 732 aa, Streptococcus agalactiae
ATGAAAGTTTTAGTAGTTGATGATGAACCAGTTGCACGTAACGAATTAATTTACCTTCTTAATAAGTATGATTCTAACCTCGTTATAGCAGAGGCGCATGATATGGCTACTGCATTAGCTATTTTACTTAGAGAAACTTTTGATGTAGCACTGTTAGATATCCATCTCAGAGATGATTCTGGGTTGCAATTAGCAGAGTATATCAATAAAATGCCCAAACCACCATTATTGATATTTGCGACTGCTTATGATCAATATGCTATTCAGGCTTTTGAGCATGATGCGCGTGATTATTTGTTAAAACCCTATGATTTTGATAGGCTAAAGCAAGCTATGGATAGAGTAAAAGGAGCGCTAAGTACATCTACAATTATAGAGAGCGTAACTTCCGGTCCTCTCTTCAAGCAACAGTATCCATTGACAGTAGAAGATCGAATCTATCTGGTGTCGGCGGATGATATCCTTTTGATTGAAGCTATGCAAGGAAAACTGATTATACAAACACCTGATAAAAATTATGAAATTGATGGCTCTCTACAACAATGGCAAGATAAACTACCATCATCTCAATTTGTACGGGTACATCGCTCTTACATTGTGAACATTAATGCTATTAAAACGATTGAACCTTGGTTTAACCAAACACTTCAGTTACACCTTTGTAATAAAATAACAGTTCCTGTTAGCAGAGCAAATGTAAAACCCCTAAAACAAATGTTAGGCATATCTACC

SEQ ID NO: 6484 - protein, 244 aa, Streptococcus agalactiae; identical to SEQ ID NO: 1904

SEQ ID NO: 6485 - protein, 1737 aa, Streptococcus agalactiae
ATGACACTCTTTTTAATTATGATGGAGCGAGCGGGGTTAATCATATTATTAGCCTATGCCTTTGTGCATATCCCCTTTATAAAACAAACTTTGAAGCAACCCGAATTAAAAAAACACCAGTATATTCTGCTTATCTTATTTAGCTTATTTGCTATTATTTCTAATTTTACAGGGGTAGAAATTCAGTCAGATTTATCTATCATTCCACAAACTCTTAATCATATAGCAGATCAATCATCGGTTGCCAACACACGTGTTTTAACCATTGGTGTATCAGGTCTAATCGGTGGCCCCATAGTCGGTATTATAGTTGGTCTCTTATCTGTATTCGTTAGGTACTTGCAAGGAGGATTAGCCCCTCATATTTATGTCATTTCTTCCTTACTAATTGGTTTATGCTCTGGGTTATCAGGCAATTATCTTCGTAAAAATTATAATAAAATTCGTGTTTTAGATGCAATGGTTGTTGGTTTCGGTATGGAAATTCTACAAATGATCTGTATCCTCATTTTTAGTGTTGACTTTAATCAGGCGTTTCGATTAGTATCTTTTATCAGCATGCCAATGATTTTAAGTAATACTTTAGGTTTAGGTATATTTATATCCATTATTTCATCTACTCAAAAATTAGAAGAACATGCTAAAGCATTTCAAACCCATCAAGTACTTGAATTAGCAAATTTAACCCTTCCTTACCTTAGAAAGGGACTGACAACAGAATCTTGTCAACCAGTAGCTGAAATTATTCATAAACATATGGATGTGAGTGCTGTTAGCCTGACTAGTCAATCAGCCATTTTAGCCTATGTAGGAGATGGAGCTGACCATCATCTTCCTAATACTCAAATATTAACAAAGCTTGCTAAAAGAGCAATAGATACTGGTAAAGTTAGTGTCGCAACTGATAAAAGTGAAATCGAATGCGACCATAACAATTGCCCACTTAGTTCAGCAATTGTTATTCCATTACACATCCACGATGTTATAGTGGGTACTTTGAAATTATATTTTTCAGACGCACAACATATGACTTACGTTGACCGTCAATTAGCTGAAGGATTAGGCAATATCTTTTCCACTCAGTTAGCTTTGGGACAAGCTGAGGAAGCAACAAGGCTACTACAGGATGCGGAAATGAAGTCTCTCCAAGCGCAGGTTAATCCGCATTTTCTTTTTAATGCACTCAATACTATTTATGGTTTAATTCGCATGGATAGCGAAAAAGCAAGAAAGCTCGTCCAAGATTTTAGCAAGGTTATTCGTGCTAATCTTCAACGGGCAAAGCAAAATTTAATTCCTCTCCATGATGAATTGGAACAGGTTAACGCCTATTTAGCCCTTGAAGAAGCAAGATTTCCTAACATGGTGGCCTTTAATTTAGACAACCAAACAAATTCAGATGACAACTTAATGATTCCTCCCTTTACATTGCAGGTCTTGATTGAAAACTCTTATAAACACGCTTTTAAGCATATTAATAAAAATAATCAGCTAAAGGTTACTATTACAAGAAATAATGATAGGCTTCATATCATTGTCCAAGACAATGGTATTGGGATTCCAAAAGAAAAATTAATAACGCTTGGAAAAAAAACTCAAATTTCAAAACAAGGTTCTGGTACAGCTATTGAGAATCTCGTTCGTCGCTTGAATATTATTTATGATGGACAAGCAAGTTTAAAATTTGAATCAAATGATTCAGGAACTTGTGCTATTGTTAATATCCCCATTAAAAAT

SEQ ID NO: 6486 - protein, 579 aa, Streptococcus agalactiae
MTLFLIMMERAGLIILLAYAFVHIPFIKQTLKQPELKKHQYILLILFSLFAIISNFTGVEIQSDLSIIPQTLNHIADQSSVANTRVLTIGVSGLIGGPIVGIIVGLLSVFVRYLQGGLAPHIYVISSLLIGLCSGLSGNYLRKNYNKIRVLDAMVVGFGMEILQMICILIFSVDFNQAFRLVSFISMPMILSNTLGLGIFISIISSTQKLEEHAKAFQTHQVLELANLTLPYLRKGLTTESCQPVAEIIHKHMDVSAVSLTSQSAILAYVGDGADHHLPNTQILTKLAKRAIDTGKVSVATDKSEIECDHNNCPLSSAIVIPLHIHDVIVGTLKLYFSDAQHMTYVDRQLAEGLGNIFSTQLALGQAEEATRLLQDAEMKSLQAQVNPHFLFNALNTIYGLIRMDSEKARKLVQDFSKVIRANLQRAKQNLIPLHDELEQVNAYLALEEARFPNMVAFNLDNQTNSDDNLMIPPFTLQVLIENSYKHAFKHINKNNQLKVTITRNNDRLHIIVQDNGIGIPKEKLITLGKKTQISKQGSGTAIENLVRRLNIIYDGQASLKFESNDSGTCAIVNIPIKN

SEQ ID NO: 6487 - protein, 120 aa, Streptococcus agalactiae
ATGTTTAAAGGATTTAAAAAATTGATTATTATTATGGGAGGGATAAGCTTAATGATGATTTTAACAGCATGTGACTTAGTAAAAAAAATCACCAATGGGTTCAAGAACATTGAAAATACT

SEQ ID NO: 6488 - protein, 40 aa, Streptococcus agalactiae; identical to SEQ ID NO: 1908

SEQ ID NO: 6489 - protein, 117 aa, Streptococcus agalactiae
TTGATTATCTGGCAGGATTTTTCCAGAGAGCTCAATTTAGAACAAGTATATTATTTCAATGAGGAAGATATTGATGAAGTAATTTTTGGAGGTACCATGACGAAGAGCAAGAAAGAG

SEQ ID NO: 6490 - protein, 39 aa, Streptococcus agalactiae
MIIWQDFSRELNLEQVYYFNEEDIDEVIFGGTMTKSKKE

SEQ ID NO: 6491 - protein, 681 aa, Streptococcus agalactiae
TTGAAACAGAGCAACCATAGATATCATGGACCGTTAATTGAGTTTGAAATAGAATATTCATATATTAAAATTTTTCCATGGATTGGACTATTTATATCTTGCATAGGGTTATATGCAAGTAATTTTGGTGATCCTTTAGGTTTTATAAAATTCATATTTTCTGTATGCATTTTTGTTAATTTGGTCTCAATAATTATTTCGCTTTTTTTTAAAAAAATATCTAATTTTTTAAAAAAAATTTCTTATATTTTATTATCATTAGTATTCCTAACACTTATTATAGGTTTTGATTTTATAGGCTTGGCAATGTTTTTAAATAATAGAAATTTTGGACATGTTCAATCAATTTATTATACTGAGATGGCAAAAATGTATATTATGATAATGTTAATTATTTTTATTGTATTTTCTGGAATATATTATTTCTATTATTTACCAAAAAATCAGGGGAAAAAATGGAAATTTAATCAGTGGAAATTACAAAAAGGAAAAAAGGAACAATTAAAAATTAATTATGGAATTATTTTTGGTTTAGTGATGCTTTCTCCAGTCTTTCTTGTAGGTAGTATTGAAAATATTTTTGGTTTGATTGGAGGTGTATTATTTACGGCAACTTTTCCAGCTCTGATTGTCGATTCCCTTTATGCAACATATTATATTCATAAGCATCCCGAATATGAG

SEQ ID NO: 6492 - protein, 227 aa, Streptococcus agalactiae
MKQSNHRYHGPLIEFEIEYSYIKIFPWIGLFISCIGLYASNFGDPLGFIKFIFSVCIFVNLVSIIISLFFKKISNFLKKISYILLSLVFLTLIIGFDFIGLAMFLNNRNFGHVQSIYYTEMAKMYIMIMLIIFIVFSGIYYFYYLPKNQGKKWKFNQWKLQKGKKEQLKINYGIIFGLVMLSPVFLVGSIENIFGLIGGVLFTATFPALIVDSLYATYYIHKHPEYE

SEQ ID NO: 6493 - protein, 321 aa, Streptococcus agalactiae
TTGAATAATGCAGCAATAAAATCCCTTAAAAATGAAGTCCTTGAATTAAATCCCAAAAATGCTTTTAAAGGATGGGGAAAATTAGGAAGAATTGCTAAAGCTGGTAAAGTATTAGGTTGGACTGGGAAAATAGTCAATATAGAAACTAATGCCAAAAAAGACTTTTTTGATGATAAGACTTCTACACTAGATCAAAAAATCAAAAACTTTGCTATAGATTCAGGTGTAGATGCATTGTCCGGTGCAGCAATAGGAACTTTGGTAGGAGGACCTGTGGGAACCGTTGTTGGAGCAGTGCAGGGCTGGCATTTGATTTTGCTT

SEQ ID NO: 6494 - protein, 107 aa, Streptococcus agalactiae; identical to SEQ ID NO: 1912

SEQ ID NO: 6495 - protein, 531 aa, Streptococcus agalactiae
ATGGGAAATGATAATGTAACTATAAAACTAGAACATCGGGTTAAAACATCAGCAGATTTATCAGATTATGTATACAAATATGAGAGGGCTTATACAGATGCTTTAAATAATGGTGATGACATAAAAGAAGCAAGTGAAAGTACTAAAAAAGAGTTAAATCAACTAATTGATAGAACTGATTTAACTTATAGTGACGGTATGTATGACAAAGAGACTGGTATTGCAGCTATTGCTGTAAAAGATAAAAATACTGGTGAGACTTATATAGCTTATGCGGGTACTAATAAGGATGCTGATGGGGCAACCGACTTTATTTCAGATGCAAATATCGGTGCTAATAACTCTGCTTATTTAAAACGATTAGGAGACAAAGCTACTAGCTTTTATGATCGTGTTCAAAGTAATGGCGATAATATTACTGTCACAACAGGTCATTCTTATGGTGACTTTCTCGCTTCTAGAGTGGCAATTGAGCTAATTCCATTCTTTATTAACTTTAGAAAAGTTAATGATTCATTTCACTTTTGTTAT

SEQ ID NO: 6496 - protein, 177 aa, Streptococcus agalactiae; identical to SEQ ID NO: 1914

SEQ ID NO: 6497 - protein, 144 aa, Streptococcus agalactiae
ATGAGAGATAAATTTAAAATATCTGATATTAAGGAAGCAGATATTACTTTTACAAAAAGTGGAAAAAATAATTTTGACTATACACTAAGGATAAAAACTAAAAACAAGAGATACTATTTGGGTGAGACCTATAGTTTTAGAAAA

SEQ ID NO: 6498 - protein, 48 aa, Streptococcus agalactiae
MRDKFKISDIKEADITFTKSGKNNFDYTLRIKTKNKRYYLGETYSFRK

SEQ ID NO: 6499 - protein, 540 aa, Streptococcus agalactiae
ATGAAAAAACAAAAACTATTACTGCTTATTGGAGGCTTATTAATAATGATAATGATGACAGCATGTAAGGATTCAAAAATCCCAGAAAACCGCACAAAGGAAGAGTACCAAGCTGAACAAAATTTTAAACCGTTTTTTGAGTTTTTAGCACAAAAAGATAAAGATTTGAGCAAAATACAAAAATACTTACTATTAGTATCGGATTCAGGTGATGCATTAGATTTAGAATATTTCTATAGTATTCAAGATTTAAAAAAAAATAAGGATTTAGGGAAGTTTGAAACAAGAAAAAGTCAAATAGAAAAGCCGGGTGGCTATAATGAGTTAGAAAATAAAGAGGTCCCATTTGAATATTTTAAAAATAATATAGTTTATCCAAAAGGGAAACCGAATATTACATTTGATGACTTTATTATCGGAGCAATGGATACTAAAGAATTAAAAAAATTAAAAGTAAAAAGTTATTTATTAAAACATCCGGAAACTGAGTTGAAAGATATAACATATGAATTGCCGACACAGTCGAAGCTTATTAAAAAA

SEQ ID NO: 6500 - protein, 180 aa, Streptococcus agalactiae
MKKQKLLLLIGGLLIMIMMTACKDSKIPENRTKEEYQAEQNFKPFFEFLAQKDKDLSKIQKYLLLVSDSGDALDLEYFYSIQDLKKNKDLGKFETRKSQIEKPGGYNELENKEVPFEYFKNNIVYPKGKPNITFDDFIIGAMDTKELKKLKVKSYLLKHPETELKDITYELPTQSKLIKK

SEQ ID NO: 6501 - protein, 447 aa, Streptococcus agalactiae
TTGACAGAACAACAAATTGAATATATCAATAATCGAAGTGAAATAGCAGGGCATTTAGAAGCTATTGTTTCAGAAATCTATTTAAGAGAAGAATCTGGTAAAATAGAATCATGGTTTGTTACTATTCCTGATATGAATAGTTTTGTGGCAGAAACAAATATGGATAGAGAACAGATTTTATTCTTACTTGACTCGGCTCACAAATATCATATTTATTTCTTATTTGGTGGTTTAGCATCATACCTTATGACTAATATCTCAGATGTTCCAAAAGCTATTAGAACACAGGCACAGTATGTTCTCTTAGGAATGAGAGTTATGGATCAGTCAGTATTACCGAAATCATATAATTCAAAAGAACCTTATTTGAAACCAGATATGATTTATATTCATGATAGAAGACAAGAAAGAATGCTTAAAATCACTCAAGAAATAGAAATGGAGCAT

SEQ ID NO: 6502 - protein, 149 aa, Streptococcus agalactiae
MTEQQIEYINNRSEIAGHLEAIVSEIYLREESGKIESWFVTIPDMNSFVAETNMDREQILFLLDSAHKYHIYFLFGGLASYLMTNISDVPKAIRTQAQYVLLGMRVMDQSVLPKSYNSKEPYLKPDMIYIHDRRQERMLKITQEIEMEH

SEQ ID NO: 6503 - protein, 315 aa, Streptococcus agalactiae
ATGTGGCAGGCACTTACCCTTGGGGCCAAAGAACTTGGCTACCAGTTTGGACCATTTATGGGTAATGGTGGCGATTGGAAAAATAAGCCGGGCTATCAAACCACACACGAGGCAAAAACAGGCTACGCCATCTCATTTAGCCCCGGCCAAGCTGGTGCTGATAGAACTTACGGCCACGTGGCCATCGTCGAAGACGTTAAGGAAGACGGATCTATCCCGATCTCCGAATCAAATGTCCTAGGACTTGGCACCATCTCCTACCGCACCTTCAGTGCAGCAGAAGCAGCACAATTGACTTATGTAGTTGGGGAGAAG

SEQ ID NO: 6504 - protein, 105 aa, Streptococcus agalactiae
MWQALTLGAKELGYQFGPFMGNGGDWKNKPGYQTTHEAKTGYAISFSPGQAGADRTYGHVAIVEDVKEDGSIPISESNVLGLGTISYRTFSAAEAAQLTYVVGEK

SEQ ID NO: 6505 - protein, 807 aa, Streptococcus agalactiae
GTGGTGCCAAGCCAACCTCAAGTGACAGCAACACCTCAGAAATCTGAAGTTGTGACACCAGCCATTACGAGTGGCATTGATTTGCCAGATGTTGCCATACCTACGGCAATGGCTAGCGCAGCTTATGTCAAACACTGGATAGGCAATGATGCTTATACACACAATCTATTGTCTCACCGTTACGGCATTACTGCCGCACAGCTTGATGGATTCTTACAGTCGACAGGTATCACATACGATAGCAGTCGCATCGACGGTCAAAAAATCTTAGACCGAGAGAAATCATCTGGTCTGGATGCGCGTGCAATCATTGCCATTGCTATCGCAGAAAGTTCGCTTGGTACACAAGGCGTTGCCACAGCACCAGGTGCTAATATGTTTGGTTTTGGGGCAGTTGACAACAATACAACTAACGCTCAAAACTTTAGTGATGACAAGGCTGTCATTAAAATGACGCAGGAAACCATCATCCAAAACCAAAACACCAGCTTTGCCATTCAAGACCAAAAAGCACAATTCTTGTCAACTGGCAACTTGAATGTAGCGGCTCGAGGTGGGGTTTACTTCACGGATGCTAGCGGTTCTGGTAAACGTCGTGCGGCCATTATGGAGAGCATTGACAAGTGGATTGACGCGCATGGCGGAATTTCTGAGATTTCAAAGGAACTGCTCAACACGTCGTCCGTCGCTATGATGGCAGTCCCAACGAGTTACTCTGTTTCAAGAGCTAATCAAGCGGGCAACTATGTGGCAGGCACTTACCCTTGGGGCCAAAGAACTTGGCTACCAGTTTGGACCATTTATGGG

SEQ ID NO: 6506 - protein, 269 aa, Streptococcus agalactiae; identical to SEQ ID NO: 1922

SEQ ID NO: 6507 - protein, 426 aa, Streptococcus agalactiae
TTGAAAAAAGATAAATATATTGCATTGTGTTTGTTGTGTGCAATTGCCACGTCAAACTTATCGGCTGTTACGGTTTTTGCTCAGGATGCACAAACTATTTTGACGCAAGCTACGACTGTAACTGATCAAACAAGTGAAAAAGCTGGAGAAAATTCATCAGCTGAGGCGACAAGCGCTTCTGAGTCAGTTTCATCAGAAGCGACGACAGTGGTACCTGAGGCAAGTCTGCCTTCAACTGATCTCCATGCCCAACCAGCAGATAGCAAAACAGCTCCTACTGAGACTGTAATTGAGGGACAAACAGAAACTAATCCGACGACTAGTCCAGATAAACAGTTCCTTCAACAAGTGATTCCAAAGGAGAAACACAGGCTGGGACGCAAACAGATACAAGCAAACCCGAAACTCCAGCTCCTAGTCAGTCTG

SEQ ID NO: 6508 - protein, 142 aa, Streptococcus agalactiae; identical to SEQ ID NO: 1924

SEQ ID NO: 6509 - protein, 252 aa, Streptococcus agalactiae
ATGGATAAAATACATACTCTAGGAAGTGTCATTGAATTAAAAAATGATAGTCAGAAAGTCATGATTACATCAAGATTTCCGTTATATGACAATGAAGGTCAATTGGGATATTTTGATTATTCTGGATGTATTTTCCCAATTAGTATAGTTGGAAATGAAACTTATTTTTTCAATTTGGAAGATATAGATAAAGTCTTGTTTGAAGGTTACTATGATGAAAATGAAGAGGAGATGCAAAAAATATTTTTGAAA

SEQ ID NO: 6510 - protein, 84 aa, Streptococcus agalactiae; identical to SEQ ID NO: 1926

SEQ ID NO: 6511 - protein, 588 aa, Streptococcus agalactiae
TTGATACATAGAGAGAAATCATATGCAGAAATATATCATGACGGAAATCAAGGTTATTATTATAATTTTGATACAAAAATTTTTTACATTAAAAGTTTTGAAACGCCTAATTATCAAAAAGAAAATTTAGAAAATATTAAAAAATATTCTAGTATTATTACGTTTCTTGTTCTCATACTCATTCCTATTAATAATTGGTATAGAACAATAGCTAATTTAAAGTTGAATTTAATTCTTGCAATAATGTTTATCGTAATTGCACTAGTAGTAGTTAACAAATTAAACAATATAGTTTCGAAACAAAAGAGAAATATCGATAATATTAGTTACGAGAAAATGGAATTTGACAAAGAAAAAATAGCAAATATAATTGTTTCTGCTGAAGAATTGTCGAATAAACTGTTATTTTTATTAGTAATTTCATTATTTATATCCCTACTCCTAATAATGTTATATTTTAAATACTCAGTATTGATATTTTTTCCTATAGCACTTATGTTACTAATATTATCAAGATTGTTATTAGAAAATATTGATTTTTTTGAAAGAAAAAATGCAATAAATGAAATAAAAAAGCAATATAATTTT

SEQ ID NO: 6512 - protein, 196 aa, Streptococcus agalactiae; identical to SEQ ID NO: 1928

SEQ ID NO: 6513 - protein, 303 aa, Streptococcus agalactiae
ATGAAGACAGGAGCACCCGTAATAATTGGTAGTGCTGCAAAAGTTGTAGGAACGGCTGCGGGTACCGCAACAGCTGGACTATTAATTTCAACAGGTGTACTTGCACCGCCTGCTCCTGTTGTTGGTTCTGCTGTGGACTTTGGTGCTACAGCAGTAATAGGTGTAGGTGGATCGATGGTGTTCGATTATGTTTATGATAATAAAGATGAAATAAATCATATTATAAAAAGAGCATCGAAGGATACAATTAACAATGTTAGTGATTTTTTTGAATTAATGTATGATTCAACAGGTAGTATAAAT

SEQ ID NO: 6514 - protein, 101 aa, Streptococcus agalactiae; identical to SEQ ID NO: 1930

SEQ ID NO: 6515 - protein, 912 aa, Streptococcus agalactiae
ATGGTAAAAGTTAGTGTAAGTTCTGTAGGAACTCAAGCATCAACAGTAGCTATTTCTATGTTTAGTCGTGTATCGGCTTTAAATGATGCAATAACAAAACTATCATCTTTTGCAGAGGCTGCAACTCTTCAAGGGACTGCTTATTCAAATGCAAAAAGCTATGCTACTGGAACGTTAACTCCGATGCTTCAAGGAATGATTCTTTTCTCTGAAACATTGAGTGAGAAATGTACAGAATTACAAACCTTATATGTCTCAATTTGTGGTGATGAGGATTTAGACTCTGTCGTTTTAGAATCAAAATTAGCAAGTGATAGGGCATCATTAAAGATTGCTGAAGCACTTTTAGAGCATCTTAACGATGATCCAGAACCTTCCAAATCTGCCATAAGTTCTACAAAAAGTAATATTAAAAAATTAAAAAAACGTATAAAATCTAATCAAAAGAAATTAGACAACCTTAATGAATTTAACGCCCATTCAGCAACAGTATTTGCGGACATTTCTAATGCACAGTCAACTGTTAACCAAGCACTAGCGGCTGTTTCAACAGGATTTTCTGGATATAATAGTAAAACCGGAGCTTTTGGAAAACCAACATCCGGACAGATGGAATGGACAAAGACAGTTAAGAAGAATTGGAAAGAGCGAGAAGACGCCAAAGCTGAAGAACTGAAAAGTAAAAAGGCTGAAGAAAGTAAGAAAGCTTCAAAAATTGAAAATACTACTAAAAAAAGTAATGTTTCAGTTGATAAAAAGAAATTAATAAAAGCGGCTAATGAAGCGTATAAATTAGGAGAAATTAAAAAAGATACCTATGAATCAATTATCAGTGGTTTAAGTAATGCATCGGCTGCCTTACTTAAAGAGGTAGCTAAATCAAAATTGACTGACACAGCTCGGCTATTGATG

SEQ ID NO: 6516 - protein, 304 aa, Streptococcus agalactiae; identical to SEQ ID NO: 1936

SEQ ID NO: 6517 - protein, 360 aa, Streptococcus agalactiae
ATGACTGAACGAACATTCGAAGATATTGAACTTGACTTAAAGTTATTCCAAATAAAGCTTGATAATGCTGAGAATAGTAAAAGGCTCTTACAAAAATTGAAAAACGACGTCATGGAGTTACAAATAGAGTTACTAGAATCATTAAAACTCGGTGATGCCTATTTAACAGAATCAGAAGAATTAGAAGAGAATAATGACTTTATTCTAACGGTAAATAGTGAAACACTAAGTTTAGAAGAATCCTATGACAATAGGATAAACTTAGTTTCTAAAGAGATTATGGATTATGAAAATGCATTAGATAAGTTGTATTATGAAAAACAGAGTTTGATGCAAAAAAGTAATGAAAGAAAAGGAGGT

SEQ ID NO: 6518 - protein, 120 aa, Streptococcus agalactiae; identical to SEQ ID NO: 1938

SEQ ID NO: 6519 - protein, 129 aa, Streptococcus agalactiae
GTGAATGAGTTTGAAGCTATTGACCAAAAAATTAGCCAAGAGATTGCGGCAAATACTAAATATACAATGCCTAGTAATGACAGCTCTGTTATATCAAATCCGGATTTTAAGCCTAAATATGGTTTGTTT

SEQ ID NO: 6520 - protein, 43 aa, Streptococcus agalactiae
MNEFEAIDQKISQEIAANTKYTMPSNDSSVISNPDFKPKYGLF

SEQ ID NO: 6521 - protein, 108 aa, Streptococcus agalactiae
GTGATTCCACTGGCTCCTGATTGTATTGCAGTTGCACAGGTGGATGCGACGGAGGCATCACTTTGTATTTTTGCCATTTGGTCTCCTTTCTTAGTCTATGGTGAGTTT

SEQ ID NO: 6522 - protein, 36 aa, Streptococcus agalactiae; identical to SEQ ID NO: 1944

SEQ ID NO: 6523 - protein, 3873 aa, Streptococcus agalactiae
ATGTCAGCTTATCAATTTTACGAAGGCTATCCTGATTTTCACCGCTCACCTCGTATTATTTATCGTTCCAGTGAAGATAAAATTACAGTTAATGCGCCTGGTAATGAACCTAATAAGTCTAAAGATGAACTGTTAAAATTAATTGTTCCTCCTCTAGTGATGATTGGAGTCAGCATTCTTATTTCTATTTTTCGTCCTCGTGGTATCTATATCATTGCAACAATGTCAATGGCTCTAGTGACGATGATTTTCTCTATCACTGGTTACTTTAAAAATCGTAAACAGTATAAGCAGGACTTACAAGAACGCATTGATTCCTATCATGACTATTTATCTGATAAGTCAATTGAACTTCAGAAGTTAGCTAAAGAGCAAAAGCGTGGGCAACACTATCATTACCCAACGATTGAAGGTTTACAGGAAATGGCTGATACTTATCACCATCGTATTTATGAAAAGACACCACTTCATTTTGACTTCTTGTATTATCGCCTAGGTTTGGGAGAAGTACCAACGAGCTATAATATTCATTATTCTCAACCAGAACGTTCTGGGAAAAAAGATCCTTTAGAGAACGAAGGCTATAACCTCTACTTTAACAATCGTTATATTAAAAATATGCCGATTGTTGCGAATTTATCACATGGACCAGTTGGCTATATAGGACCACGAGGTTTAGTATTGGAGCAACTCCAATTGATGGTTAATCAATTAGCTTTTTTCCATTCTTACCATGATGTTCAATTTATTACTATTGTTCCAGAGGAAGAGATGGATAAGTGGTCTTGGATGCGTTGGTTGCCACATGAAACCTTACAAGATGTCAATGTTCGTGGCTTTGTTTATAATCAAAGAAGCCGTGATCAAGTGCTCAACAGTCTTAACCAAATTTTAAAATTACGTCGCACACAACGCGAAGATAAATCTGCCAAAGAAGGGACTTTATTTTCTCCGCATTATGTCGTTATTGTAACTGATGAAAAGTTAATTTTAGATCACGTCATCATGGAATTCTTTACGGAAGATCCTACAGAATTGGGATGTTCTCTCATCTTTGTTCAAGATGTTATGAGTTCACTTTCAGAAAATATCAAAACCATTATTAATATTAAAGACCGTAATACTGGTCAGTTAGTTATAGAAGAAGGAGAGCTTAAAGAAACAGATTTTGAATTAGATCATTTCTTAGAGGATTATGACAAGGAAAATATTTCACGTCGCCTAGCTCCGTTAAATCACCTACAAAATCTTAAATCTTCAATACCAGAAGCAGTTACTTTTATGGAAATGTATCAAGCAGAAGAATTTGAAGATTTGCATGTTCAAGAGCGTTGGATAAGCCATGCTCCGTATAAAAGCTCAGCTGTTCCACTTGGCTTACGTGGTCAGGATGATATTGTTTATCTAAACCTACATGAAAAAGCTCATGGTCCTCATGGATTAGTTGCAGGAACAACGGGATCAGGGAAGTCAGAAATTATACAGTCCTATATCCTTTCTTTAGCTGTTAATTTCCATCCACACGATGTAGCTTTCCTTCTCATAGACTACAAAGGTGGGGGGATGGCAAACCTCTTTAAGGACCTGCCACACTTACTTGGCACCATCACCAACTTAGATGGTGCCCAATCGATGCGTGCTTTGGTTTCTATTAATGCTGAATTGAAACGTCGTCAACGTTTATTTGCTAAAGCTGATGTTAATCATATTAACCAGTATCAGAAGAAATACAAACTTGGAGAAGTTTCAGAACCAATGCCTCATCTCTTCTTAATCTCCGATGAGTTTGCCGAATTGAAATCCAACCAACCTGAGTTTATGAAAGAGCTTGTCTCAACAGCGCGAATTGGGCGTTCCCTAGGGATTCACTTAATCCTAGCGACCCAAAAACCATCTGGTGTGGTAGATGACCAAATCTGGTCAAACTCACGCTTCAAACTAGCTCTTAAAGTAGCAGACCGCGGCGACTCCATGGAAATGCTCCATACTCCAGATGCCGCCGAGATTACACAAGCAGGACGTGCCTACCTCCAAGTTGGTAATAATGAAGTCTATGAACTCTTCCAATCAGCATGGTCAGGAGCAGATTACCAACCTGAAAAAGACGACCAAGGGATTGAAGACCATACCATTTATTCCATCAACGACCTTGGCCAATACGAAATCCTAAATGATGATCTTTCAGGCTTAGACCAAGCCGAAAATATTAAAGAAGTACCTACGGAATTAGATGCTATCGTTGAAAACATTCAAGCTTTAACCAAAGAAATGGGCATCTCAGACTTACCTCAACCGTGGCTACCGCCTCTAAGCAATCAGATTGCAGTAACCGATCTCCGTAAGGAGGGATCAGTAGACCTCTGGAGCAAGGCCCCATCTTACAAAGCTGTTCTTGGCTTTATGGATATACCAAGCCAACAAGCACAAGAAGTGGCTTACCACGATTTTGAAGACGATGGGCATTTGTCAATTTTTGCAGGACCAAGTATGGGGAAATCAACAGCCCTTCAAACTGTAACAATGGACTTAGCACGTCATAATAGTCCAGAATTTTTAGACCTTTACCTCTTTGATTTTGGTACCAATGGCCTCTTACCTCTAAGACGTTTGCCACATGTAGCAGATTTCTTTACCATTGATGATGACGAAAAAATAGCCAAGTTTATTGCCCGTATCAAAGTTGAAATGTCTGATCGTAAAAAAGCCCTCAGTCGCTACAATGTCGCGACAGCAAAACTTTACCGTCAGGTATCTGGGGAAACCATGCCTCAAATCCTGATTGTTATTGACAGTTATGAAGGGCTACGGGAAGCTCAAACACCGACTAACTTAGAAGCTTGTTTCCAAAATATTTCGCGTGATGGGTCGTCACTTGGCATTTCCTTAGTTATCTCAGCTGGTCGTACGGCAGCTTTGAGGTCGTCCTTAATGGCAAACCTTAAAGAACGTATCGCTCTTAAATTAACAGATGACTCTGAATCACGGACACTTGTCGGTCGTCACCAACACATCATGGAAGATATTCCAGGACGTGGATTAATCAAACGTGATGACATTGAAGTGTTACAAGTGGCTCTCTCAACAGAAGGCACTGAAACCTTTGACATCATCAATAACATCCAAAACGAATCTGACGCCATGAACAGCAAATGGACTGGACCAAGACCAAAAGCAATACCAATTGTTCCCGAAGAATTAACCTTTGACGACTTTATGGCTACAGATAGTGTTCAAGCTGACCTATCAGCTAATCGTTTACCACTTGGGCTTGAAATGGTTGACGTTGAAAGTTATAGTTTAGCACTTAATCGCTTTAAGCATATGCTTTACATGTCTGATTCTGACGAGTCACTCGAAGCAGTTGGTTCCCATATCATCAAGGTCTTGCTTAACGTCCCAAATTACCATACCATGATCATCGATTCGCTTGGCGAATATGAAAGCTATCAAGGTCAGGTACGTACTTATGTGGGTTCTGATATGATTGAAGATATGGCGGATCAGTTGATCTATGAGTTGCAGCAACGTGAAAGCCAATCTGAGATAGCTGAATGGTTTATCATGATTCCAGATTTTGAAAGCTTTGTGGCTAAGAGCAATATGAAGCTTGAACAGGTTCAGGCATTGCTTGACAATGGACCACGCTATGGTTTACATCTGATTCTTGGATCAAGCTATAACTATGTTGGGACTAAGATCGATGCTGTGCCTAAATACGTTCGCACAACGACCCAGTATGTGCTGGCTGGCATGAGGCTCATGGATCAAACCTTCCTTGAAAAAGTGTATAATAGTAAGGAAATCCGTCCAAACAAAGACGAAGCCTACATTCACGATAGAAAAACCTATCAAAAATTAAAACTCACCATAGAC

SEQ ID NO: 6524 - protein, 1291 aa, Streptococcus agalactiae
MSAYQFYEGYPDFHRSPRIIYRSSEDKITVNAPGNEPNKSKDELLKLIVPPLVMIGVSILISIFRPRGIYIIATMSMALVTMIFSITGYFKNRKQYKQDLQERIDSYHDYLSDKSIELQKLAKEQKRGQHYHYPTIEGLQEMADTYHHRIYEKTPLHFDFLYYRLGLGEVPTSYNIHYSQPERSGKKDPLENEGYNLYFNNRYIKNMPIVANLSHGPVGYIGPRGLVLEQLQLMVNQLAFFHSYHDVQFITIVPEEEMDKWSWMRWLPHETLQDVNVRGFVYNQRSRDQVLNSLNQILKLRRTQREDKSAKEGTLFSPHYVVIVTDEKLILDHVIMEFFTEDPTELGCSLIFVQDVMSSLSENIKTIINIKDRNTGQLVIEEGELKETDFELDHFLEDYDKENISRRLAPLNHLQNLKSSIPEAVTFMEMYQAEEFEDLHVQERWISHAPYKSSAVPLGLRGQDDIVYLNLHEKAHGPHGLVAGTTGSGKSEIIQSYILSLAVNFHPHDVAFLLIDYKGGGMANLFKDLPHLLGTITNLDGAQSMRALVSINAELKRRQRLFAKADVNHINQYQKKYKLGEVSEPMPHLFLISDEFAELKSNQPEFMKELVSTARIGRSLGIHLILATQKPSGVVDDQIWSNSRFKLALKVADRGDSMEMLHTPDAAEITQAGRAYLQVGNNEVYELFQSAWSGADYQPEKDDQGIEDHTIYSINDLGQYEILNDDLSGLDQAENIKEVPTELDAIVENIQALTKEMGISDLPQPWLPPLSNQIAVTDLRKEGSVDLWSKAPSYKAVLGFMDIPSQQAQEVAYHDFEDDGHLSIFAGPSMGKSTALQTVTMDLARHNSPEFLDLYLFDFGTNGLLPLRRLPHVADFFTIDDDEKIAKFIARIKVEMSDRKKALSRYNVATAKLYRQVSGETMPQILIVIDSYEGLREAQTPTNLEACFQNISRDGSSLGISLVISAGRTAALRSSLMANLKERIALKLTDDSESRTLVGRHQHIMEDIPGRGLIKRDDIEVLQVALSTEGTETFDIINNIQNESDAMNSKWTGPRPKAIPIVPEELTFDDFMATDSVQADLSANRLPLGLEMVDVESYSLALNRFKHMLYMSDSDESLEAVGSHIIKVLLNVPNYHTMIIDSLGEYESYQGQVRTYVGSDMIEDMADQLIYELQQRESQSEIAEWFIMIPDFESFVAKSNMKLEQVQALLDNGPRYGLHLILGSSYNYVGTKIDAVPKYVRTTTQYVLAGMRLMDQTFLEKVYNSKEIRPNKDEAYIHDRKTYQKLKLTID

SEQ ID NO: 6525 - protein, 519 aa, Streptococcus agalactiae
ATGTTAGTTATTTGTTATTATCAATCACTCCGCTACGAATTTAATATTGAAGAGGAGAAATCCTTTCTAATATCATCAAACGGCAAGTCGCCAATACCAGTATTAGATTTAGAAAATGACATCACGCTAAAAAATATACAAGGTCAATTGGTATATATTATTGACCAAAAAGAAAAAGAGTTAACTAATGGTGTAGAGATTTCAGGAATTGTCTTCTATTTAGCGAATAATCAAAAAGAAATTTATACTCCCTTAGATTACGAAGATATATTAATCGGTGATAAAGAAGGGTATCGTGTCCGTTTTAAAGAAGGAGCCCCTAATTTATTACTGAAAAAAATAGAAAGTAATTGGCAGCTTAATTTATTTGAAGGTGATATTTATCTGAATAATCATCTTCAAAAAGTAGTGCAGCAGTTACCTTTAAGTTTAGGTGATGAGATTAGCTTCCAAGGAACAATTGTTAAGCTTTTCCCAGATGAAATTCAAATCTGGGGGGGGCTGATTATGAAACATCAT

SEQ ID NO: 6526 - protein, 173 aa, Streptococcus agalactiae
MLVICYYQSLRYEFNIEEEKSFLISSNGKSPIPVLDLENDITLKNIQGQLVYIIDQKEKELTNGVEISGIVFYLANNQKEIYTPLDYEDILIGDKEGYRVRFKEGAPNLLLKKIESNWQLNLFEGDIYLNNHLQKVVQQLPLSLGDEISFQGTIVKLFPDEIQIWGGLIMKHH

SEQ ID NO: 6527 - protein, 1272 aa, Streptococcus agalactiae
ATGGAAACAGATTCGTTTGTATTTGAAGAACAAGACTTTCAATTTGAAAAAGGACCAGATTTTTGGCAGTTATCTCTTAAGCGTTCAAAAGTAGGAACTCAAAATCTGCAACAACTGCAATTGTTAGAAATTCACCATTCTTTGTTGATGCCTATGACAACTGCAATTGATGCAGATACCATTCAATTTCAATTCCAGACAGAAGCGCACGCTCTATTTTTTGAAAGCTTTAAAAAAGAAACTTTATCTGAAAAATTACGATTAGCCTTGAATGTCTTGGATTTAGATAAGGCTTTGTCTTTGTCAGTAAATTTCATTTTGCATCCCTCTAATCTATTTTTAACAAAAAATGCAACTGCTAAAATAGCTTATCGTAGCCTTCCTGGGATTATGAGACCTGAGAAATTTGGTCCAGAAGAGTTTTTATATCAATTCAAATGTTTTGTCTTTGCATTATTGACGCAACATGACTATATAGAGTTGTATAATGGTGCTATTTCTGTTATTGAAGTATCAGATTTCCTAAAAAGCATTTATCATGCAGAAACTATTCAGGCTGTTAGAGACATCATTACTATTGATTATGAGCAGCAAGTAGAAGTAGAAACTCATACGTTAGCAAAAGTATCAAGGGCAAAATATAAGCTTTATAAATACATAAGTGTTTGGCTAGGAGCTTTATCTACAATACTCTTGATTCCGCTAGTATATCTGGTTTTTATTCACAATCCATTCAAAGAAAAAATGTTGGCAGCGGATACTTCATTTATTAAAGTTGATTATAATCAAGTGATTAATCGACTAGAACATGTAAAAGTAAGTAAGTTACCTTATACACAGAAGTACGAGTTGGCCTATTCCTATATTAATGGAATGTCATTTTCTGAAGAACAGCGTGAAGTTATTTTAAACAATGTTACGCTCAAGACTGATGAGCTCTATCTTGATTATTGGATTAATATTGGCCGTGGTTTAGATGATGATGCTATTGATGCTGCCAAACGTTTAGACGATTCTGACCTTGTTATTTATGCTATTGTTCAGAAAATGGATCAGGTTAGAAAAGACAATAGTTTATCTGGTAAAGATCGTGAACAAAAACTTTCTGAGCTACAAACAGACTATGATAAATATTGGAAAGACCGTAAGACAGCCTTAACAGATGAGGAATCCAAATCGAAAAATAGCAATAATCATTCGACAAATTCCAACAAAGAGTCATCTGAATCATCAAGTACTACAGCAAGTACATCTTCTAAAACTAAAAGTAGG

SEQ ID NO: 6528 - protein, 424 aa, Streptococcus agalactiae; identical to SEQ ID NO: 1950

SEQ ID NO: 6529 - protein, 240 aa, Streptococcus agalactiae
ATGAATACACATATTAACATTACTCTAGATATGGGGGAAACCTCAAAAGATTTACGTATCCCTTTGAAAATTAGCGTTAAGCAATTAGTAATGGAATTAGATAGTATTTTTAGCCGTACTGAAAGGCGTACCAAATATCAACTAAGAGTTATAAATAAAGGTATTTTATTGGGAGAGAACGATATATTAGCGCACCATCCAGTAACAACTGGTGATCGTATAAGGATAGAGGAGTTTTAT

SEQ ID NO: 6530 - protein, 80 aa, Streptococcus agalactiae; identical to SEQ ID NO: 1952

SEQ ID NO: 6531 - protein, 471 aa, Streptococcus agalactiae
ATGAAGTTGAAACGATTTTTAGCCTGTCTACTAATATTATCCTGTATGAGTCAAACATCAGTATTTTCTGATGGGTTAAAGAATAATGATATTCATTTTGATACAAAACGTTTAGAATCAGATTCACAAAAAAATTCTGGTTTTCAAACTGAATTAACTAAAGATTTATTTAAAAAAGAAGACCTTAAAAAATTGGATAAAAACCGTCAATCTAAAGTCTCACTCCAGAAAAAGCAGTCTAAGCAACTGTTTCAATATTCAAATAAAGGACAATCTGATAGGAAAAAACGTATCAAACAATTATTTTCTGAAGAAAGTAATCAATTTAAATTTGTTACAAGAACAGAAGAACCGACTGTTTCGGCTGATATTGGTCATATAATTATATACCTGGTTCTCATTAGTTTGGTACTAATATTAGCTTCTATAATGACTTTTAAAATAAAGGACAAAAAGGATGAATACACATAT

SEQ ID NO: 6532 - protein, 157 aa, Streptococcus agalactiae
MKLKRFLACLLILSCMSQTSVFSDGLKNNDIHFDTKRLESDSQKNSGFQTELTKDLFKKEDLKKLDKNRQSKVSLQKKQSKQLFQYSNKGQSDRKKRIKQLFSEESNQFKFVTRTEEPTVSADIGHIIIYLVLISLVLILASIMTFKIKDKKDEYTY

SEQ ID NO: 6533 - protein, 1608 aa, Streptococcus agalactiae
TTGTCATCTAGTTCTACTCGAACTGGTGAGCAGATAGTTTCTGTTGAATCAAATAATCCAGATTACAGGGTAGATACCTGGACGGTTAATGGTAAGCAAACAAGAACCTTGGACCCCAGCCAAAACAATAATATTATTATCAATAGCAGTTATCAAAGGGAATCATCTAACTCTAGTATTACGAAACCAAGCTATACAATCACTATCGGGAATCAGAAACAAATTGTACAAAATGATGACGGTAAAATCCAACGGTCTTACTTTGAGGCAGAGGCAACGTATCAACGAACTCTACAAGAAGTAAATGATGCATATAACACCACTCACGGATTAGTAGCTAAATACTACATTATTTCTGATGGCGAAGAACCGCAAAATTTATTTGATCAATTTTTAAATCAAAGTGTTAACGATACGATGGTTGATCTGGTCAAAAATGGTATAACTAAGTATTTGATGGATGAAAACACTGCTGATGCGCAACATAAAGTTAAAGATGTCATGGAGGAAGTTGAAAATAGTCAAGATGAATTGGCGGATCAAATGGCAAAAGTAACTGAGACAAATGTACGACTAACAGATGCAATCAAAAAACAGCTTGAAACCCTTCAATCAATTAACATGAAGGTCCAAAACATCACACAGGATCAATCTAAAGTAAACGACTCACAGAAAACAACTGATCAACAATTATCTGATTTGAAGAACCATCTAGATGGGCTAATGACCTCTGCAGCGGGCGTAAAAGATATGTCCAAATCTAATAGTCAAGAGGCGGACCAAGTTAATCAAATATTCACATCATTCAATAAAGATGTTCAAGATGCTAAAAATTCGGGCAACAAACTTTCGACGGATGCAACCGATTTAATGGCTAACTTCCAAAAAGAATTGGCCAATAATGGTGATTTCGTAGCTTCTTTCTCTAAAGTTTTTAATACTGCTTATAAAAATGGAGTGCCAAATGATATTCTCCTTAATTTCTTATCACGACCTGTCGCTGAATCAGCGTCTGCAGTTAGGGCAACTGAAAATACTTATCGCCCATTCACTTGGATACTATTATTAGAAGTTGTTAGCCTATTTACAGCATATATCTTTGCGACTCAAAACCTTATTAAGAAATTGACAGATAGGTATAATGTCAACCGCTGGCTTCAAACAGACTTTTTAAATGTCATTGTCATTTCAGGCCTCTCTCTTGTTATTGGTTTAGCACTGGGAGTTATCTCAAGCAGAAGTCTTCATGTCATGCCTGAATATGTACCATCTTGGTTCCTAGTTATGACTCTGTTTAGTTTTTTATTAATTCATAGTCAGTATTTCTTTATTAAAAATTTTAAAGCAGTTGGTATGGGTTTGGCTTTGTTTATGATTATTAGTTTTGTGTATCTATCAAATGCCGTAGGCACAGTAGCGACTGTTAGTGGACTTCCAAAATTACTAAAAGCTATTAATCCACTATCTATCCTTGAAAATCAATTATCATCTTATTTTGATAATGTGACAACTGGATTTATTTTCCTTATCTTAGTACTTCTTGTGGATGTTGCTTTTATTATCATGAATATTTTTATCACCTTAAATTTTGAAGCTAAAGTAAAAGAG

SEQ ID NO: 6534 - protein, 536 aa, Streptococcus agalactiae
MSSSSTRTGEQIVSVESNNPDYRVDTWTVNGKQTRTLDPSQNNNIIINSSYQRESSNSSITKPSYTITIGNQKQIVQNDDGKIQRSYFEAEATYQRTLQEVNDAYNTTHGLVAKYYIISDGEEPQNLFDQFLNQSVNDTMVDLVKNGITKYLMDENTADAQHKVKDVMEEVENSQDELADQMAKVTETNVRLTDAIKKQLETLQSINMKVQNITQDQSKVNDSQKTTDQQLSDLKNHLDGLMTSAAGVKDMSKSNSQEADQVNQIFTSFNKDVQDAKNSGNKLSTDATDLMANFQKELANNGDFVASFSKVFNTAYKNGVPNDILLNFLSRPVAESASAVRATENTYRPFTWILLLEVVSLFTAYIFATQNLIKKLTDRYNVNRWLQTDFLNVIVISGLSLVIGLALGVISSRSLHVMPEYVPSWFLVMTLFSFLLIHSQYFFIKNFKAVGMGLALFMIISFVYLSNAVGTVATVSGLPKLLKAINPLSILENQLSSYFDNVTTGFIFLILVLLVDVAFIIMNIFITLNFEAKVKE

SEQ ID NO: 6535 - protein, 1395 aa, Streptococcus agalactiae
ATGAAAAGAAATAACTTTAGAATACTTTGGTATATTATAGCTGTTGCTCTCTTTTTAGTAGCTATTGCTGGCCTTAATCTTAAGCTTCAAGGCGATCATGCAAAAGAGAATAAAACAACACAGTCAGCTACTAACACTAAACTAAATATAGCATTAGTCAACGAAGATCAAAATGTATCTAATGGTAAAGAAAGTTATAATTTAGGAGCTAGTTATATTAAGTCTATCGAACGTGATAATAGTCAAAATTGGTCAGTTGTTAGTCGAGGTACTGCTCAAAATGGATTAGACAAAGGTGATTATCAATTAATGGTTATCATCCCTAATAACTTTTCTCAAAAACTTCTTGATGTCAATAAAGCAAATGCAGAGCAAACAACTATCTCTTATAAGGTTAATGCCAAGGGGAATTTAGCATTAGAGAAAAAGGCAACTGAAAAAGAGAAAGATATTGTTTCAGAGTTAAATAGCCACTTAGTAAATATGTACATGGCAAGTATTTTAAGTAACTTATATACAGCTCAAGAAAATGTACAGGCCATGGTAAATGTTCAGTCAGGTAATATCTCAAATTACCAAAAAAATCTTTTAGATTCTGCAACTAATTTCCAAAATATCTTTCCAGCCCTCGTTAACCAGTCTAGTAGTTCCATTACTGCTAACGAATCACTGAAAAAATCTTTAGAAGCTTCTGATAACATGTTTAATGATTTGGTGACAACCCAGACAAATACTGGAAAAGATTTATCAAGCTTAATAGAACAGCGCCATCAAGATAGCATTTCGTATGAAGCGTTTTCGACCTCATTACTAGAAATGAATAACGAGTTATTAGAGAAGCAATTATCTGATATTATCACACAAGCACAAAAAGACCAAGAAACATTATCATCACAACTCAATAGTATTATGGGTGATGATAACAATCATAATCATAAAGAAAACTCATCAGCTTATCTAAATGTTGCAAGGCAAAAAATCCAAGAACTATCTGAAGCACTCAAGTCACAAGATAACATTGCTAAAGATCAAAGTGAACAACTAGATAAAATTGTTAGAGAGGGACTAGCAAGTTACTTTGCTAAGAATAATAAAGATAATATTACTTTATTAGAATTATTGAAGAGTCATTCTACTAATGAGAAGACTTTGAAAGATTTTAAAGCTAAGGTAGCAGATTTCACAAATTCTCTCATTTCAAGCATTCCTTCACTAAACCTTTCGGAGTTGCACTTAACCCAAGAAGAAGAAAAAGCCATTCAGTTTACATCTTCTGATTCGGAAATCATTAAAAAAGTAAGCAACGAAAGAACTCTGTATTTAAATACTAATTTATTGAATCGTCTTTTTGAAGCTAGGAAAAATAGAGATGAAGCTAAAATAAAGTTAATCAAT

SEQ ID NO: 6536 - protein, 465 aa, Streptococcus agalactiae
MKRNNFRILWYIIAVALFLVAIAGLNLKLQGDHAKENKTTQSATNTKLNIALVNEDQNVSNGKESYNLGASYIKSIERDNSQNWSVVSRGTAQNGLDKGDYQLMVIIPNNFSQKLLDVNKANAEQTTISYKVNAKGNLALEKKATEKEKDIVSELNSHLVNMYMASILSNLYTAQENVQAMVNVQSGNISNYQKNLLDSATNFQNIFPALVNQSSSSITANESLKKSLEASDNMFNDLVTTQTNTGKDLSSLIEQRHQDSISYEAFSTSLLEMNNELLEKQLSDIITQAQKDQETLSSQLNSIMGDDNNHNHKENSSAYLNVARQKIQELSEALKSQDNIAKDQSEQLDKIVREGLASYFAKNNKDNITLLELLKSHSTNEKTLKDFKAKVADFTNSLISSIPSLNLSELHLTQEEEKAIQFTSSDSEIIKKVSNERTLYLNTNLLNRLFEARKNRDEAKIKLIN

SEQ ID NO: 6537 - protein, 197 aa, Streptococcus agalactiae
TTGCTTACTCAAGAGCAAGCAGTTATTGACGAAAATTGGGATGGATCTACTTTTGATTCTTTTGAAGCACAATTCAATGAATATCTCCAAAAATTACAGAATTTGCTCAATTACTCGAAGATATTAACCAGCAATTATTAAAAGTTGCAGATATCATTGAGCAGACGGATGCAGATATTGCTTCTCAAATTAGTGGA

SEQ ID NO: 6538 - protein, 66 aa, Streptococcus agalactiae
MLTQEQAVIDENWDGSTFDSFEAQFNELSPKITEFAQLLEDINQQLLKVADIIEQTDADIASQISG

SEQ ID NO: 6539 - protein, 228 aa, Streptococcus agalactiae
ATGGAAACAGATTCGTTTGTATTTGAAGAACAAGACTTTCAATTTGAAAAAGGACCAGATTTTTGGCAGTTATCTCTTAAGCGTTCAAAAGTAGGAACTCAAAATCTGCAACAACTGCAATTGTTAGAAATTCACCATTCTTTGTTGATGCCTATGACAACTGCAATTGATGCAGATACCATTCAATTTCAATTCCAGACAGAAGCGCACGCTCTATTTTTGAAAGCT

SEQ ID NO: 6540 - protein, 76 aa, Streptococcus agalactiae
METDSFVFEEQDFQFEKGPDFWQLSLKRSKVGTQNLQQLQLLEIHHSLLMPMTTAIDADTIQFQFQTEAHALFLKA

SEQ ID NO: 6541 - protein, 279 aa, Streptococcus agalactiae
TTGGATAAAAACCGTCAATCTAAAGTCTCACTCCAGAAAAAGCAGTCTAAGCAACTGTTTCAATATTCAAATAAAGGACAATCTGATAGGAAAAAACGTATCAAACAATTATTTTCTGAAGAAAGTAATCAATTTAAATTTGTTACAAGAACAGAAGAACCGACTGTTTCGGCTGATATTGGTCATATAATTATATACCTGGTTCTCATTAGTTTGGTACTAATATTAGCTTCTATAATGACTTTTAAAATAAAGGACAAAAAGGATGAATACACATAT

SEQ ID NO: 6542 - protein, 93 aa, Streptococcus agalactiae
MDKNRQSKVSLQKKQSKQLFQYSNKGQSDRKKRIKQLFSEESNQFKFVTRTEEPTVSADIGHIIIYLVLISLVLILASIMTFKIKDKKDEYTY

SEQ ID NO: 6543 - protein, 299 aa, Streptococcus agalactiae
ATGGCACAAATTAAATTAACACCAGAAGAACTTCGCTCATCAGCACAAAAGTACACAGCTGGTTCTCAACAAGTAACAGAAGTTCTTAATTTGCTTACTCAAGAGCAAGCAGTTATTGACGAAAATTGGGATGGATCTACTTTTGATTCTTTTGAAGCACAATTCAATGAATTATCTCCAAAAATTACAGAATTTGCTCAATTACTCGAAGATATTAACCAGCAATTATTAAAAGTTGCAGATATCATTGAGCAGACGGATGCAGATATTGCTTCTCAATAGTGGATAGTATCGTATCA

SEQ ID NO: 6544 - protein, 100 aa, Streptococcus agalactiae
MAQIKLTPEELRSSAQKYTAGSQQVTEVLNLLTQEQAVIDENWDGSTFDSFEAQFNELSPKITEFAQLLEDINQQLLKVADIIEQTDADIASQIVDSIVS

SEQ ID NO: 6545 - protein, 780 aa, Streptococcus agalactiae
ATGATTCCAGATAGTAGTTTTAAAGTGCTATCAGATATGGCATATAATATTGAAAAATCCAAAGCAGAAAGTAATGGACACCTTCAAATTATAGAAGGTAGTCAAATTATTGATTTCCATCAAAAACGCTCTTTTATGGTATTAGAGGTTAATGATGATATCAATAATGGTATGCAGGCTATGGCATGTCAGTCTTTGGATGAAAGTAATCATATTGTTATAGCATATTCAGGAACGAACGCTTTTAATAAGAAAGATATCTTAACAGATATCGATTCAGTTGTATTGGGGAAGAACAATAAATTGCTAACTTGTCCTTCAAGTATTACCCTGAGAGAGGATGGCATTTCTCTGCCTTGTAAAAATCCAAGTCAAATTACAACATCTAAACTATTTGCACAAAAAATTAAGATGAACTATCCTGATGCAACCCTCTGGTTAACAGGCCATTCTCTAGGTGGTTATTTGGCCATGATTGTGGCTTCAGAAATGAGATTATCAGCGCGTGTTTTTAATTCCCCTAGTCCCATTAACAATATGTCTGAAGCAGCCACATCCTATGTAATTTCACATCCAGAGAAGTATCATAGTTACCGTATTAATAAAGATTACATTGGTAATTTTGGTATTAATAGTTCAGATGATAAATTAGGTATTTCTAAAAGAGTCAATGCTAAGAAGCAACATGGTTTTTATAAAAAGATTTTCTTTCACGAATTGACACGATTTCGATTAAATCAACAAGGACAGATTGTTGATATAGATGAAAATAAACAGGAT

SEQ ID NO: 6546 - protein, 260 aa, Streptococcus agalactiae; identical to SEQ ID NO: 1958

SEQ ID NO: 6547 - protein, 321 aa, Streptococcus agalactiae
ATGTTAAAAACACGAACACATATTAATGAATTAGAAACAAAAATCGCCCTTGATTTAGTACACAGATATCTAGGTATTCAACAACTTGTTTTTTCAAAGTGGAGGCATTCTTTAGAAACTGGTTCATGGTCTTCTATTATAACAATAAATGGCGTTAATATTATCAATTACATTGTTGATGATATTAGTGACAGTAATAGTATTTCAGGTATTATTTGTCATCCTAAAAGTTTTCATCTCAGACCTAGAGAAAAAAAGGAACCTATTCAGTCTATTGATGAGTTAGATATCACCTGGTCTTTGAATAGAGAGGAAAATGAA

SEQ ID NO: 6548 - protein, 107 aa, Streptococcus agalactiae; identical to SEQ ID NO: 1960

SEQ ID NO: 6549 - protein, 3180 aa, Streptococcus agalactiae
ATGCCAAAGCGCACAGACATACGTAAAATTATGGTTATCGGTTCTGGCCCGATTGTGATTGGACAAGCAGCAGAGTTTGACTATTCTGGTACACAAGCCTGTCTCTCTTTAAAAGAGGAGGGATACCAAGTTGTTTTGGTCAATTCGAATCCGGCTACTATCATGACAGATAAAGATATTGCTGATAAAGTTTATATTGAACCTATTACCTTGGAGTTTGTCACAAGAATTCTCAGGAAGGAAAGACCTGATGCTCTCCTTCCAACTCTTGGAGGTCAAACTGGATTGAATATGGCTATGGCTCTATCAAAAAATGGTATCCTAGAAGAATTGAATGTTGAACTATTAGGGACCAAATTATCAGCCATTGATAAAGCTGAAGATCGTGATTTATTTAAACAGTTGATGGAAGAACTCAATCAACCTATTCCAGAATCCGAGATTGTTAATTCGGTAGAAGAAGCTATTCAATTTGCAGAGCAAATCGGGTATCCATTAATTGTTCGTCCTGCCTTTACTTTAGGAGGTACAGGTGGAGGCATGTGCGATAATCAAGAACAATTGGTTGACATCACGACGAAGGGGTTAAAGTTATCGCCTGTGACACAGTGCCTTATTGAACGTTCAATTGCCGGCTTTAAAGAGATTGAATACGAAGTTATGCGTGATGCAGCAGATAACGCTCTTGTTGTTTGTAATATGGAAAATTTTGATCCTGTTGGTATCCATACAGGGGACTCTATAGTTTTTGCACCCGCACAAACGTTATCTGATGTGGAAAATCAGTTATTACGAGATGCGAGTTTAGATATTATAAGAGCTTTGAAAATTGAAGGAGGATGCAATGTTCAACTAGCCCTTGATCCGAATAGTTTTAAATACTATGTCATTGAAGTTAATCCAAGAGTATCAAGATCTTCTGCTTTAGCTTCAAAAGCTACTGGATATCCAATTGCTAAATTAGCAGCTAAGATAGCTGTTGGTTTGACACTAGATGAGGTAATTAATCCTATTACAAAAACGACTTACGCTATGTTTGAACCTGCTTTAGATTACGTAGTCGCAAAAATGCCGAGATTTCCTTTTGATAAATTTGAAAGTGGCGATAGAAAATTGGGAACACAGATGAAAGCTACAGGCGAAGTCATGGCAATAGGACGGAATATAGAAGAATCTTTGTTGAAAGCTTGTCGTTCACTAGAAATAGGTGTCGATCACATTAAAATAGCAGATTTAGATAATGTATCAGATGATGTTTTATTAGAAAAAATAAGAAAGGCAGAAGATGATCGCTTATTTTATCTAGCAGAAGCTTTACGTAGACATTATAGTATTGAAAAATTAGCAAGTTTGACTAGCATTGATTCTTTCTTCCTTGATAAGTTAAGAGTGATTGTAGAGTTAGAAGATCTATTATCTAAAAACAGACTGGATATCAATATTCTCAAAAAGGTTAAAAATAAAGGTTTTTCAGATAAAGCTATAGCGAGTTTATGGCAAATAAACGAAGATCAAGTTCGTAACATGCGAAAAGAAGCAGGAATTCTTCCAGTTTATAAGATGGTTGATACATGTGCGTCTGAGTTTGATTCAGCAACGCCCTACTTTTATTCGACTTATGCCGTAGAAAACGAGTCATTGATATCAGATAAAGCCTCTATTTTGGTTTTAGGATCGGGCCCAATCCGAATTGGACAGGGAGTTGAATTTGATTATGCAACGGTTCATTCTGTTAAAGCCATCAGAGAGTCTGGTTTTGAAGCGATTATCATGAACTCTAATCCAGAGACGGTCTCAACGGATTTCTCTATTTCAGATAAGCTTTACTTTGAACCTTTGACTTTTGAAGATGTTATGAATGTTATTGACTTAGAAAAACCTGAAGGGGTCATCTTACAATTCGGTGGTCAGACTGCTATTAATCTAGCAAAAGATTTAAACAAGGCAGGGGTTAAAATACTAGGCACACAATTAGAAGATTTGGATCGTGCTGAAAATAGAAAACAATTTGAAGCCACTTTACAAGCTCTAAATATCCCTCAACCACCAGGTTTTACCGCCACTACGGAGGAAGAGGCAGTTAATGCAGCGCAAAAGATTGGTTATCCCGTGTTGGTTAGACCATCATATGTTCTTGGTGGACGAGCTATGAAGATAGTTGAAAACGAAGAAGATTTACGTCATTATATGACAACCGCGGTAAAGGCAAGCCCAGATCATCCAGTGCTTATAGATGCATACCTTATAGGTAAAGAGTGTGAGGTTGATGCTATATCCGATGGTCAGAATATACTGATTCCTGGAATAATGGAGCATATAGAGCGAGCTGGTGTTCATTCAGGAGATTCCATGGCTGTATATCCTCCTCAAACATTGTCTGAGACCATTATCGAAACTATTGTAGATTATACAAAACGCTTAGCAATTGGATTAAACTGTATCGGTATGATGAATATTCAGTTTGTAATCAAGGATCAGAAAGTATATGTTATTGAAGTTAATCCTCGTGCTAGTAGAACACTTCCATTCTTATCAAAAGTAACTCACATTCCTATGGCCCAAGTAGCAACAAAAGTTATCTTAGGAGATAAACTCTGCAATTTTACATATGGTTATGATCTCTATCCAGCTTCAGATATGGTCCACATTAAAGCCCCTGTCTTTAGTTTTACCAAACTTGCTAAAGTAGATAGTTTATTAGGTCCTGAAATGAAATCAACAGGCGAAGTGATGGGATCAGATATTAATCTTCAGAAAGCCTTGTATAAAGCCTTTGAAGCAGCATATCTCCATATGCCAGACTATGGTAACATTGTTTTTACAGTAGATGATACAGATAAAGAAGAAGCTTTAGAACTTGCAAAAGTCTATCAAAGTATTGGTTATCGTATTTATGCTACCCAAGGGACTGCAATTTATTTTGATGCTAATGGTTTAGAGACAGTTTTAGTAGGTAAGTTAGGAGAGAACGATCGAAATCATATTCCTGATTTAATTAAAAATGGTAAGATTCAAGCAGTTATCAACACAGTTGGACAAAATAACATTGATAACCATGATGCTCTCATCATCAGACGTTCTGCAATTGAACAAGGAGTTCCTCTATTTACATCTTTAGATACTGCACATGCAATGTTCAAAGTTCTTGAAAGCAGAGCATTTACATTAAAAGTACTAGAT

SEQ ID NO: 6550 - protein, 1060 aa, Streptococcus agalactiae
MPKRTDIRKIMVIGSGPIVIGQAAEFDYSGTQACLSLKEEGYQVVLVNSNPATIMTDKDIADKVYIEPITLEFVTRILRKERPDALLPTLGGQTGLNMAMALSKNGILEELNVELLGTKLSAIDKAEDRDLFKQLMEELNQPIPESEIVNSVEEAIQFAEQIGYPLIVRPAFTLGGTGGGMCDNQEQLVDITTKGLKLSPVTQCLIERSIAGFKEIEYEVMRDAADNALVVCNMENFDPVGIHTGDSIVFAPAQTLSDVENQLLRDASLDIIRALKIEGGCNVQLALDPNSFKYYVIEVNPRVSRSSALASKATGYPIAKLAAKIAVGLTLDEVINPITKTTYAMFEPALDYVVAKMPRFPFDKFESGDRKLGTQMKATGEVMAIGRNIEESLLKACRSLEIGVDHIKIADLDNVSDDVLLEKIRKAEDDRLFYLAEALRRHYSIEKLASLTSIDSFFLDKLRVIVELEDLLSKNRLDINILKKVKNKGFSDKAIASLWQINEDQVRNMRKEAGILPVYKMVDTCASEFDSATPYFYSTYAVENESLISDKASILVLGSGPIRIGQGVEFDYATVHSVKAIRESGFEAIIMNSNPETVSTDFSISDKLYFEPLTFEDVMNVIDLEKPEGVILQFGGQTAINLAKDLNKAGVKILGTQLEDLDRAENRKQFEATLQALNIPQPPGFTATTEEEAVNAAQKIGYPVLVRPSYVLGGRAMKIVENEEDLRHYMTTAVKASPDHPVLIDAYLIGKECEVDAISDGQNILIPGIMEHIERAGVHSGDSMAVYPPQTLSETIIETIVDYTKRLAIGLNCIGMMNIQFVIKDQKVYVIEVNPRASRTLPFLSKVTHIPMAQVATKVILGDKLCNFTYGYDLYPASDMVHIKAPVFSFTKLAKVDSLLGPEMKSTGEVMGSDINLQKALYKAFEAAYLHMPDYGNIVFTVDDTDKEEALELAKVYQSIGYRIYATQGTAIYFDANGLETVLVGKLGENDRNHIPDLIKNGKIQAVINTVGQNNIDNHDALIIRRSAIEQGVPLFTSLDTAHAMFKVLESRAFTLKVLD

SEQ ID NO: 6551 - protein, 1074 aa, Streptococcus agalactiae
ATGAAGCGTCTATTATTACTGGAAGATGGTAGTGTGTTTGAGGGTGAGGCTTTCGGAGCGGATGTAGAAACAAGTGGTGAAATCGTTTTTAGTACAGGAATGACAGGGTATCAAGAATCTATAACAGATCAATCTTACAACGGTCAAATCATTACTTTTACTTATCCTCTTATTGGAAATTATGGGATAAATCGAGACGATTACGAATCTATCAGACCAACATGTAAGGGAGTAGTTGTTTATGAATGGGCAGAGTATCCAAGTAACTGGCGTCAACAGATGACACTTGATGAATTTTTAAAATTAAAAGGAATACCTGGAATTTCAGGTATAGATACTCGAGCATTAACAAAAATTATTCGAAAACATGGAACAATGAAAGCTTGTTTAATAAACGAGGGAAATTCTATTCATGAAGCACTAGAAAACCTTCAAGAAAGTGTTCTTTTAAATAATCAAATTGAACAAGTATCAACCAAATTAGCTTATGCTTCGCCTGGAGTTGGCAAAAATATTGTATTAGTTGACTTTGGTTTAAAACATTCTATTCTAAGAGAACTGTCACAACGTCAATGTCATATCACAGTGATCCCTCATACTACGACAGCGCAAGAAATCTTAAATCTCAATCCAGATGGAGTACTCTTATCTAACGGCCCTGGGAACCCAGAACAATTACCGAATGCTTTACAAATGATCCAAGAAATTCAAAGTAAAATTCCAATTTTTGGTATTTGTATGGGACATCAACTATTTGCTAAAGCCAATGGTGCAAAGACTTATAAAATGACTTTTGGTCATCGAGGTTTTAATCATGCTGTTCGTCATTTGCAAACAGGACAGGTTGATTTTACAAGTCAAAATCATGGTTATGCTGTTTCGAGAGAAGATTTCCCTGAGGCTCTCTTCATTACACATGAAGAGATTAATGATAAAACCGTCGAAGGTGTTCGACATAAATACTATCCTGCCTTTTCAGTGCAGTTTCACCCAGATGCAGCACCAGGGCCGCATGATACATCTTATCTTTTTGATGAATTTATTAATATGATTGATGATTTCCAGCAAAAAAGC

SEQ ID NO: 6552 - protein, 358 aa, Streptococcus agalactiae
MKRLLLLEDGSVFEGEAFGADVETSGEIVFSTGMTGYQESITDQSYNGQIITFTYPLIGNYGINRDDYESIRPTCKGVVVYEWAEYPSNWRQQMTLDEFLKLKGIPGISGIDTRALTKIIRKHGTMKACLINEGNSIHEALENLQESVLLNNQIEQVSTKLAYASPGVGKNIVLVDFGLKHSILRELSQRQCHITVIPHTTTAQEILNLNPDGVLLSNGPGNPEQLPNALQMIQEIQSKIPIFGICMGHQLFAKANGAKTYKMTFGHRGFNHAVRHLQTGQVDFTSQNHGYAVSREDFPEALFITHEEINDKTVEGVRHKYYPAFSVQFHPDAAPGPHDTSYLFDEFINMIDDFQQKS

SEQ ID NO: 6553 - protein, 924 aa, Streptococcus agalactiae
ATGAATCATCAAACACAAACACTTTCATTAGAACATTTTGTCAGTTTAGAAGAATTATCAAATCAAGAAGTTATGTCTTTGATAAAGAGAAGTATCGAAGTCAAAGAAAATCCTAGCAACATTGGTTTTGATAAAGATTACTATGTGTCAAATCTCTTTTTTGAGAATTCAACAAGAACACATAAGTCATTTGAAATGGCAGAACTCAAATTAGGATTAAAAACAATTGAATTTAATGCTGATACAAGTTCTGTTAATAAAGGAGAAACCCTTTATGACACTATCTTAACAATGAGTGCTCTAGGATTGGACGTTTGTGTCATTAGGCATCCTGATATTGACTATTATAAAGAATTGATTGCTAGTCCGAACATTCATTCAGCTATTGTCAATGGGGGTGATGGCTCAGGCCAACATCCAAGTCAATCACTTTTGGATTTGGTAACTATTTACGAAGAATTTGGATACTTCAAAGGGCTAAAAATTGCGATTGTAGGAGATTTAACTCACTCACGGGTAGCTAAATCTAACATGCAAGTGCTAAAACGGTTAGGAGCTGAAATTTTCTTTTCTGGACCAAAAGAATGGTATAGTAGTCAGTTTGATGAATATGGGCAATATTTACCAATAGACCAGTTAGTTGATCAAATTGATGTCCTTATGCTTTTACGTGTTCAACACGAACGTCATGATGGTAAAGGGGTGTTTTCAAAAGAAAGCTATCATCAACAATTTGGTCTTACAAAAGAACGCTATAAACATTTAAGGGATACAGCAATTATTATGCACCCAGCGCCCGTCAATAGGGATGTAGAGATTGCTAGCGATTTGGTAGAAGCAGATAAGGCTCGAATAGTGAAACAGATGAGTAATGGCGTCTATGCAAGGATAGCTATCTTAGAAGCAGTGCTCAATAGCAGACAA

SEQ ID NO: 6554 - protein, 308 aa, Streptococcus agalactiae
MNHQTQTLSLEHFVSLEELSNQEVMSLIKRSIEVKENPSNIGFDKDYYVSNLFFENSTRTHKSFEMAELKLGLKTIEFNADTSSVNKGETLYDTILTMSALGLDVCVIRHPDIDYYKELIASPNIHSAIVNGGDGSGQHPSQSLLDLVTIYEEFGYFKGLKIAIVGDLTHSRVAKSNMQVLKRLGAEIFFSGPKEWYSSQFDEYGQYLPIDQLVDQIDVLMLLRVQHERHDGKGVFSKESYHQQFGLTKERYKHLRDTAIIMHPAPVNRDVEIASDLVEADKARIVKQMSNGVYARIAILEAVLNSRQ

SEQ ID NO: 6555 - protein, 1290 aa, Streptococcus agalactiae
ATGTATATCATTAAAAACGGATTGATTATCGACCCTCAAAGTGGTTTTAATCAAGTATCAGACATGCTGATTGATCAAGGAAAAATTAAACAAATATCGAAAGAAATTGATATTAAAGGCATTCCAATCATTGATGCAAGCAATAAAATTGTAGCTCCAGGATTAGTCGATATTCATGTACATTTTCGTGAGCCTGGACAGACACATAAAGAAAATATCCATACAGGGGCCCTATCAGCTGCAGCAGGTGGTTTTACGACAGTTCTTATGATGGCCAATACTAACCCAACGATTTCTAGCCTAGAAATTGTAAAACAAGTTAAGGAGAGTGCAGCAAAAGAAGCAATTAAGATTGAAACAGTTGCTACAATTACTAAATCCCTGAATGGTAAAGATTTAGTTAATTTCGAAGAACTATTAGAAGCTGGAGTTGCTGGATTCTCAGACGATGGTATTCCTTTGACAGATACTAAGGTTTTGCAAGAAGCTATGAACTTAGCTAGAAAACATGATGTTGTCCTATCGTTACATGAAGAGGATCCATCGTTAAATGGCGTTCTTGGTATCAACGAACATATTGCTCAGAAAATTTATCATGTCTGTGGAGCTAGTGGTCTTGCTGAATATTCAATGATTGCGCGAGATGCTATGATTGCTTACCAAACACAGGCGAAAGTCCATATCCAGCATTTGTCAAGTTCAGAATCAGTAGAAGTAGTTGATTTTGCGCAGAAGCTTGGTGCTAACTTAACAGCAGAAGTAACCCCCCAACATTTTTCAAAGACAGAGGACTTACTTTTAACTAAGGGTGCTAATGCAAAATTAAACCCACCACTGCGACTTGAAAAGGATAGACAAGCCCTCATTGATGGTCTTAAAAGTGGTGTTATTTCAATTATTGCAAGTGATCACGCTCCCCATCATATTATGGAGAAAGCAGCAGATAATATTAGTCAAGTGCCCTCTGGTATGACTGGCTTAGAGACATCATTAGCCTTAGGGATTACTTATTTAGTATCTACTAAAGAACTCTCAATGATTGACTTTTTGGCAAAAATGACATGTAATCCTGCACAGTTATATGGATTTGATGCAGGTTATCTCAGAGAAGGTGGACCTGCAGATATTGTTATTTTTGATCAAGCTGAAGAGAGAATAATAAAGGCAGAATTTGCCTCCAAATCCAGCAACTCTCCTTTTATCGGTGATAAATTGAAGGGAGTTGTTCACTACACAATTTGCAATGGTGAAATAGTCTATCAAAAAGATAGCCACGCAGCAACATTGGTA

SEQ ID NO: 6556 - protein, 430 aa, Streptococcus agalactiae
MYIIKNGLIIDPQSGFNQVSDMLIDQGKIKQISKEIDIKGIPIIDASNKIVAPGLVDIHVHFREPGQTHKENIHTGALSAAAGGFTTVLMMANTNPTISSLEIVKQVKESAAKEAIKIETVATITKSLNGKDLVNFEELLEAGVAGFSDDGIPLTDTKVLQEAMNLARKHDVVLSLHEEDPSLNGVLGINEHIAQKIYHVCGASGLAEYSMIARDAMIAYQTQAKVHIQHLSSSESVEVVDFAQKLGANLTAEVTPQHFSKTEDLLLTKGANAKLNPPLRLEKDRQALIDGLKSGVISIIASDHAPHHIMEKAADNISQVPSGMTGLETSLALGITYLVSTKELSMIDFLAKMTCNPAQLYGFDAGYLREGGPADIVIFDQAEERIIKAEFASKSSNSPFIGDKLKGVVHYTICNGEIVYQKDSHAATLV

SEQ ID NO: 6557 - protein, 627 aa, Streptococcus agalactiae
ATGGATTTAGCAAGACAGATTGCCATGGAACTATTAGATATTCAAGCTGTTTACTTAAGGCCCCAACAACCCTTTACTTGGGCTTCGGGAGTCAAATCGCCAATTTACACTGATAATCGTGTAACCTTATCGTATCCTGAGACAAGGACACTGATTGAAAATGGTTTTGTTAAACAAATACAGAAACATTTCCCAAACGTTGATATCATCGCAGGGACAGCGACTGCAGGCATACCACATGGCGCTATTATAGCTGATAAGATGAATTTGCCATTTGCCTATATACGCTCGAAGGCAAAGGATCATGGTGTGGGGAATCAAATCGAGGGACGTGTTTACTCAGGCCAAAAAATGGTTATCATTGAAGATTTGATTTCAACAGGAGGATCTGTTTTAGAGGCTGTTACGGCTGCGCAGAGTCAAGGTATTGAGGTTTTAGGGGTAGTAGTGATATTTACATATCAATTAGCTAAGGCTGAACAAGCATTTCGTGAAGCTGATATTCCTTTGGTGACTTTGACGGATTACAATCAATTAATTAAAGTTGCTAAAGTTAATGGATATATTACAGCTGACCAACTGGTATTACTGAAAAAATTTAAAGAAGATCAAATGAATTGGCAAAGT

SEQ ID NO: 6558 - protein, 209 aa, Streptococcus agalactiae; identical to SEQ ID NO: 1970

SEQ ID NO: 6559 - protein, 699 aa, Streptococcus agalactiae
ATGTTAGAAAAATGCCCTATCATTGCCTTAGATTTTTCTGATTTGGCTTCTGTAACAACTTTTTTAGAACATTTTCCAAAAGAAGAATTACTTTTTGTCAAAATAGGAATGGAGCTTTATTATTCCGAAGGTCCCTCAATTATTAGATATATTAAATCCTTAGGACATCGCATTTTTTTGGATTTAAAATTACATGATATCCCTAATACAGTTCGATCATCTATGTCTGTCTTAGCCAAATTAGACATTGATATGACTAATGTCCATGCTGCAGGAGGAGTCGAAATGATGAAAGCAGCTAGAGAAGGTTTGGGGGAGGGTCCAATACTATTAGCAGTGACACAATTAACCTCGACTTCACAAGAACAAATGCAGGTGGATCAACATATTAACTTAAGTGTAGTTGATTCGGTTTGCCATTATGCTCAAAAAGCTCAAGAAGCAGGCCTAGATGGAGTAGTCGCATCGGCTCAAGAGGTAAAGCAAATCAAGAAACAGACTAACGAACATTTCATTTGCTTAACGCCTGGTATCAGACCTCCACAAACCAATCAGTTAGATGATCAAAAAAGAACGATGACTCCTGAGCAAGCACGTATAGTTGGGGCTGATTATATCGTTGTGGGAAGACCTATAACGAAAGCAGAAAATCCATATCAAGCATATCTAGACATAAAAGAAGAATGGAATCGTATTAAA

SEQ ID NO: 6560 - protein, 233 aa, Streptococcus agalactiae
MLEKCPIIALDFSDLASVTTFLEHFPKEELLFVKIGMELYYSEGPSIIRYIKSLGHRIFLDLKLHDIPNTVRSSMSVLAKLDIDMTNVHAAGGVEMMKAAREGLGEGPILLAVTQLTSTSQEQMQVDQHINLSVVDSVCHYAQKAQEAGLDGVVASAQEVKQIKKQTNEHFICLTPGIRPPQTNQLDDQKRTMTPEQARIVGADYIVVGRPITKAENPYQAYLDIKEEWNRIK

SEQ ID NO: 6561 - protein, 1230 aa, Streptococcus agalactiae
ATGCAAAATGATATGAGCGTTGTTCTTAGAGCTGGTAAATTACTGATTGAAAGCGGAGCAGAAGTCTATCGTGTCGAAGACACAATGAAGCATTTTGCTAAGGCTCTTCAGATAGAAAATTTTGAAGCTTATGTGGTTAGTAGCAGTATTATCGCTTCCGGGATTAACCGCTATGGTAAACAAGAAGCTAAAGTATGCAATACAGATGGTGTAACAGCAAATTTAGGTAGACTTGAAGCTGTTAATAACCTTTCTAGGCAAATTGCTAAACAAGACTTAGTATCTCCAGAAGAAATTGTAAAGCAGTTAGACTTAATTGAACATCAAAAAGATTATAGTTTGCTTGTTACTTTAATTTCTTATTTTTGTGGAGCGGGTAGTTTTTCTTTAGCCTTGGGTAGTTCCTTATTAGATTCATTTTCCGCTGCTGTAACAGGCTTAATTTTAGGATATTTTTTGAATTTGATGGAAAGTCGTATACATACAGGATTTCTTTTGACCATTCTAGGTAGTTCTGTAGTGGCTTTAAGTGCTAATTTATTATATTTTTCAGGATTAGGTGAGCATCGTAGCATTATCATATTAGGGGCACTAATGGTTATGGTGCCAGGGGCTGCCTTTGTTAATTCGGTGAGAGAATTTTCACAGAATAATTTTTCAACAGGTTTAGCTTTGATTATGTCTGCTTTACTCATTTGTATTTCTATATCAGCAGGCGTGGCTATTACAATTGAAATTATTCCGTTTGCAGAACAAATGACAGGTTCTTTTTCTGGTGTTCCTAATACCATCCTTGAGATTATCATCAGAACACTAATGGCCGGTTTAGGGACGATAGCCTTCTCTATTCTCTACCATGTTCCAAAACGTTATTTCCTTGACTTAGGTATACTAGGAGCAATATCTTGGATGCTCTACCTGATCTTATGGCAACAATTTCATATGGATGCTATAGCCGTATTTTTTCCAGGGCTTTTCATCACTTATTTTTCACGGCTATTAGCTGCTAAACGTAAATGTCCTGCCACTGTCTTTTTAGCGACAAGTATGTTTCCTCTTATTCCAGGACTTAGCTTCTATAGAGCTGTTTACTTTTTATTGACGGGAGCAGATGCTTTAGCAATGGAATATTTTAGATCCTGTTTTGTAACAGCTTTTACAATTGCTATAGCAATCAGTATTGTACAGCAGATTCCTCTATCGTTCTTTATTAGACGTAAAATGATAAAA

SEQ ID NO: 6562 - protein, 410 aa, Streptococcus agalactiae
MQNDMSVVLRAGKLLIESGAEVYRVEDTMKHFAKALQIENFEAYVVSSSIIASGINRYGKQEAKVCNTDGVTANLGRLEAVNNLSRQIAKQDLVSPEEIVKQLDLIEHQKDYSLLVTLISYFCGAGSFSLALGSSLLDSFSAAVTGLILGYFLNLMESRIHTGFLLTILGSSVVALSANLLYFSGLGEHRSIIILGALMVMVPGAAFVNSVREFSQNNFSTGLALIMSALLICISISAGVAITIEIIPFAEQMTGSFSGVPNTILEIIIRTLMAGLGTIAFSILYHVPKRYFLDLGILGAISWMLYLILWQQFHMDAIAVFFPGLFITYFSRLLAAKRKCPATVFLATSMFPLIPGLSFYRAVYFLLTGADALAMEYFRSCFVTAFTIAIAISIVQQIPLSFFIRRKMIK

SEQ ID NO: 6563 - protein, 1401 aa, Streptococcus agalactiae
ATGTCAATTGTTACAGGTCATCTTCACCTGATGAAGGAAAATTGAATGGTCAAAATATGTAACTGCTGGTTACCTTGATCAACATACTGTGTTAGAAGAAGGTCAAACAGTTCGTGATGTTTTGCGAACAGCATTTGATGAACTTTTTAAAACAGAGGCACGTATCAATGATATATATATATCCATGGCAGATGATGGCGCAGATGTAGATAGCCTTATGGAAGAAGTTGGAGAACTACAAGATCGTTTAGAATCACGTGATTTTTATACGCTTGATGCTAAAATTGATGAAGTCGCACGGGCATTAGGAGTTATGGATTTTGGTATGGATTCTGATGTTACTGAATTATCTGGTGGTCAAAGGACAAAGGTTCTTTTAGCAAAACTGTTATTAGAAAAGCCAGATATCCTCCTGCTTGATGAGCCTACAAACTACCTTGATGCTGAACATATTGATTGGTTAAAACGCTATTTACAAAATTATGAAAATGCTTTTGTTTTAATCTCACACGATATTCCATTTTTGAACGATGTTATCAATATTGTCTATCATGTTGAAAATCAAGATTTAGTAAGATATTCCGGTGATTATACTAATTTTGAATCAGTCTATGCAATGAAAAAGGCTCAATTAGAAGCAGCCTATGAACGTCAACAAAAGGAAATAGCTGATTTACAAGATTTTGTTAATCGTAATAAAGCACGCGTTGCAACACGTAATATGGCAATGTCTCGTCAAAAGAAACTAGACAAAATGGATATTATTGAGTTACAAGCAGAGAAACCAAAGCCAAGTTTTGAATTTAAAGAATCTCGCACACCAGGACGTTTTATTTTCCAAGCTAAAGATCTTCAAATTGGATATGATCGTGCTTTAACAAAACCTCTAAACCTAACATTTGAACGTAATCAAAAAATAGCTATTGTTGGAGCAAATGGGATAGGAAAAACAACATTACTTAAGAGTTTACTAGGTATTATCCCCCCTATTTCTGGTAATGTTGAACGAGGTGATTTTATTGATTTAGGTTATTTTGAACAAGAAGTACCCGGAGGGAATCGCCAAACTCCACTTGAAGCAGTATGGGATGCTTTTCCTGCTTTGAACCAAGCAGAGGTAGGGCAGCTCTTGCTCGTTGTGGTTTAACTTCAAAGCATATTGAAAGTCAGATTCAGGTGTTATCTGGTGGGGAGCAATCAAAGGTCAGATTTTGCTTATTAATGAATCGCGAAAATAATGTCCTTGTACTTGATGAACCAACCAATCATTTAGATGTAGATGCTAAAGATGAGTTAAAACGTGCTTTAAAAGCTTATAAGGGATCAATCTTGATGGTATGTCATGAACCGGACTTTTATGAAGGATGGATGGATGATGTTTGGGACTTTAACCAACTTAGT

SEQ ID NO: 6564 - protein, 468 aa, Streptococcus agalactiae
MSIVTGHLQPDEGKIEWSKYVTAGYLDQHTVLEEGQTVRDVLRTAFDELFKTEARINDIYISMADDGADVDSLMEEVGELQDRLESRDFYTLDAKIDEVARALGVMDFGMDSDVTELSGGQRTKVLLAKLLLEKPDILLLDEPTNYLDAEHIDWLKRYLQNYENAFVLISHDIPFLNDVINIVYHVENQDLVRYSGDYTNFESVYAMKKAQLEAAYERQQKEIADLQDFVNRNKARVATRNMAMSRQKKLDKMDIIELQAEKPKPSFEFKESRTPGRFIFQAKDLQIGYDRALTKPLNLTFERNQKIAIVGANGIGKTTLLKSLLGIIPPISGNVERGDFIDLGYFEQEVPGGNRQTPLEAVWDAFPALNQAEVRAALARCGLTSKHIESQIQVLSGGEQSKVRFCLLMNRENNVLVLDEPTNHLDVDAKDELKRALKAYKGSILMVCHEPDFYEGWMDDVWDFNQLS

SEQ ID NO: 6565 - protein, 336 aa, Streptococcus agalactiae
ATGCAAATCATCAAACGTGATGGACAGATTGTTGAATTTGATCCTGAAAAAATCTACCAAGCTATCTTGAAAGCTGCTCAAACAGTTTATGTGCTTGATGAGTCACTTCGTCAAGACCTTGCTCAAGTGACTAAAAAAGTAATCTTAGATTTAGAGGATGCTCAGGTTGAACGACCAACGATCAATATGATTCAGTCTTTGGTTGAAAATCGTTTATTGGATGCAGGATACATTCATATTGCTGAACACTATATTTCATACCGTTTGCAACGTGATTTAGAGCGAAATGGTTATGATGATCAAATCACTGTTCATTTACACTTTGAAAAAATTAAG

SEQ ID NO: 6566 - protein, 112 aa, Streptococcus agalactiae
MQIIKRDGQIVEFDPEKIYQAILKAAQTVYVLDESLRQDLAQVTKKVILDLEDAQVERPTINMIQSLVENRLLDAGYIHIAEHYISYRLQRDLERNGYDDQITVHLHFEKIK

SEQ ID NO: 6567 - protein, 868 aa, Streptococcus agalactiae
TTGTTTCAGCTGGTGGATCTATTCAGCAAAGTTCGCTCCTTATGCAGTAAAGTCTGGAGCAGTTGTAGTAGATAACACGTCATATTTTCGTCAGAATCCTGATGTTCCACTAGTTGTTCCTGAAGTAAATGCTCATGCCATGATTGGTCATAATGGTATCATAGCTTGCCCCAATTGTTCTACTATTCAAATGATGATTGCTTTAGAGCCCATTCGTCAAAAATGGGGGATAGAGCGTGTTATAGTTTCCACCTATCAAGCTGTTTCGGGTTCAGGTGCACGTGCTGTTGAAGAAACTAAGGAACAGTTGAGACAAGTTTTAAATGATAACCTTTCACCTGATCAATTAATTGCAACGGTCTTGCCATGTTCTAGCGATCAAAAACATTATCCTATCGCATTCAATGCATTACCTCAAATTGATATTTTTACTGATAATGATTATACGTACGAAGAAATGAAAATGACTTTGGAGACAAAGAAAATTATGGAAGATGCTACTATTAAGGTTTCAGCTACCTGCGTCCGCATTCCCGTTTTATCGGGTCATTCTGAGTCTATTTATATTGAGACGAAAGAATTAGCCTCAATCTCTGAAATTAAAAAGGCTATTGCAAATTTTCCTGGTGCCGTCCTACAAGACCTTCCATCTCAGCAAATTTACCCTCAAGCGATTAATGCTGTAGGCCATAGGGAGACCTTTGTTGGTCGTATTCGAAAAGACCTTGATCAAGAAAATGGTGTTCATATGTGGGTAGTTTCAGATAATCTACTGAAGGGGGCAGCTTGGAATTCTGTTCAAATCGCAGAAACATTGCATAAGAATGGGCTGGTTAAACCAGCGAAAGAGTTAAAATTTGAATTAATA

SEQ ID NO: 6568 - protein, 290 aa, Streptococcus agalactiae
  VARIANT 2, 9: Xaa = Any Amino Acid
MXSAGGSIXAKFAPYAVKSGAVVVDNTSYFRQNPDVPLVVPEVNAHAMIGHNGIIACPNCSTIQMMIALEPIRQKWGIERVIVSTYQAVSGSGARAVEETKEQLRQVLNDNLSPDQLIATVLPCSSDQKHYPIAFNALPQIDIFTDNDYTYEEMKMTLETKKIMEDATIKVSATCVRIPVLSGHSESIYIETKELASISEIKKAIANFPGAVLQDLPSQQIYPQAINAVGHRETFVGRIRKDLDQENGVHMWVVSDNLLKGAAWNSVQIAETLHKNGLVKPAKELKFELI

SEQ ID NO: 6569 - protein, 887 aa, Streptococcus agalactiae
ATGGGAGTGCTAGGATCAACTATTATTTTAGGATCAAGTCCTGTATCTGCTATGGATAGTGTTGGAAATCAAAGTCAGGGTAATGTTTAGAGCGTCGTCAACGTGATGCGGATAACAAGAGCCAGGGCAATGTTTTAGAGCGTCGCCAACGTGACGTTGAGAATAAGAGCCAAGGCAATGTTTTAGAGCGTCGCCAACGTGACGTTGAGAATAAGAGCCAAGGCAATGTTTTAGAGCGTCGTCAACGTGATGCAGATAACAGAAGCCAGGGTAATGTTTTAGAGCGTCGTCAACGTGATGCGGATAACAGGAGCCAGGGCAATGTTTTAGAGCGTCGCCAACGTGACGTTGAGAATAAGAGCCAAGGCAATGTTTTAGAGCGCCGCCAACGCGATGTTGAGAACAAGAGCCAAGGCAATGTTTTAGAGCGTCGTCAACGTGATGTTGAGAATAAGAGCCAAGGCAATGTTTTAGAGCGTCGTCAACGTGATGCAGAAAACAAAAGTCAGGGCAATGTTCTAGAGCGTCGTCAACGCGATGTTGAGAATAAGAGCCAAGGCAATGTTTTAGAGCGCCGCCAACGCGATGTTGAGAACAAGAGCCAAGTAGGTCAACTTATAGAGAAAAATCCACTTCTTTCAAAGTCAACTGTATCTAGAGAAAATAATCACTCTAGTCAAGGTGACTCTAACAAACAGTCATTCTCTAAAAAAGTATCTCAGGTTACTAATGTAGCTAATAGACCGATGTTAACTAATAATTCTAGAACAATTCCAGTGATAAATAAATTACCTAAAACAGGTGATGATCAAAATGTCATTTTTAAACTTGTAGGGTTTGGTTTAATTTTGTTAACAAGTCTCTGCGGTTTGAGACGCAATGAAAAT

SEQ ID NO: 6570 - protein, 296 aa, Streptococcus agalactiae
MGVLGSTIILGSSPVSAMDSVGNQSQGNVLERRQRDADNKSQGNVLERRQRDVENKSQGNVLERRQRDVENKSQGNVLERRQRDADNRSQGNVLERRQRDADNRSQGNVLERRQRDVENKSQGNVLERRQRDVENKSQGNVLERRQRDVENKSQGNVLERRQRDAENKSQGNVLERRQRDVENKSQGNVLERRQRDVENKSQVGQLIEKNPLLSKSTVSRENNHSSQGDSNKQSFSKKVSQVTNVANRPMLTNNSRTIPVINKLPKTGDDQNVIFKLVGFGLILLTSLCGLRRNEN

SEQ ID NO: 6571 - protein, 1593 aa, Streptococcus agalactiae
TTGATTTGGAGGGGGGAAAAACTTATCAGTAATAAAGTCAAAATTGTTCGTTTACTTAATAAGAGTAAGAAAAGTTTACTAAGGGGTATATTTAGTCGAACAACCGTTATCGCTATTTTATTGATTTTACAATTATTGTTTTTACTAGCCTCTTACTCATGGCTAGAGCAGTATCGTGTTTGGTTAGCAACCGTTGAACATATCTTAACAATTGGAGCGGTCTTATATTTAGTTAATAGTGAAATGGATGCTTTGTCTCGAGTAACTTGGTTAATATTGGTAATGATTGCCCCTTTACTAGGGGCGATGTTCCTAATGTACACCAAATTTGACTGGGGTTATCGTGGTTTGAAACAAAGATTGGAGACATTGATTGATGAGAGTCAGATTTATCTAGAGGATGATCCTGAAACTTTGAATCAGCTTAAGTCGAGTACATCCACAACATATCACTTGGTTCAATATTTTGAAAAAGCACATGGAAATTTCCCAGTTTATCGAAATACTGATGTGACATTTCTACCAACGGGAGAAACATTCTTTGAAAAAATGAAAGAAGAACTACTAAAAGCTAAGAAGTATATCTTTTTAGAATTCTTTATCATTGACGAAGGAATAATGTGGGGAGAAATACTTAGTATTTTAGAACAAAAGGTGGAAGAAGGTGTTGAAGTCCGTATCTTATATGATGGTATGATAGAAATTACAAAATTATCCTTTGATTATACGAAACGACTTGAGAAAATAGGAATAAAAGCAAAAGCATTTTCTCCGATTTCTCCTTTTATTTCAACTTATTATAACTATCGTGACCATCGAAAAATTGTTGTTATTGATGGAGTAGTAGGCATGACTGGTGGTGTAAACTTAGCCGATGAGTATATTAATCACATTGAGTTATTTGGGCATTGGAAAGATTCAGGTATTATGTTAAAGGGGAAAGCAGTGGATAGTTTCCTCCTACTTTTCTTACAGATGTGGTCCATTACTGAGGAAAAAATGTTAGTAGCGCCTTACCTCGGTGTACACGATGATTTAGTTGAAAATGAAGGCTATGTTATTCCTTATGGAGATTCTCCTTTAGACACTGATAAAGTAGGGGAAAATGTTTATATAGATATTCTTAATCATGCTAGAGAATATGTTTACATCATGACACCTTATTTAATATTAGACAGTGAATTGGAACATGCCATTCAGTTTGCTGCGGAACGTGGTGTAGATGTACGTATTATTATGCCGGGTATCCCAGATAAGCCAATCCCTTATGCTCTTGCTAAAACTTACTATCAAGCATTAACAAAATCAGGTGTTAAAATATATGAATACACCCCTGGATTTGTTCATTCAAAAATATTCCTTAGTGATAATACAAAGGCTGTTGTAGGTACGATAAATCTTGATTACCGTAGCCTGTATCACCATTTTGAATGTGCTGTTTATCTTTATAAGGTAGATGCAATCCAAGACATTTATCGAGATTATATGGATACGTTAAATAAATCAAGGTTAGTTAGCTTGAAAGATATAAATAATATTCCAAAATTCCAAAAAGTAATTGGCATAGTGACAAAAACTATCGCTCCCCTGCTT

SEQ ID NO: 6572 - protein, 531 aa, Streptococcus agalactiae
MIWRGEKLISNKVKIVRLLNKSKKSLLRGIFSRTTVIAILLILQLLFLLASYSWLEQYRVWLATVEHILTIGAVLYLVNSEMDALSRVTWLILVMIAPLLGAMFLMYTKFDWGYRGLKQRLETLIDESQIYLEDDPETLNQLKSSTSTTYHLVQYFEKAHGNFPVYRNTDVTFLPTGETFFEKMKEELLKAKKYIFLEFFIIDEGIMWGEILSILEQKVEEGVEVRILYDGMIEITKLSFDYTKRLEKIGIKAKAFSPISPFISTYYNYRDHRKIVVIDGVVGMTGGVNLADEYINHIELFGHWKDSGIMLKGKAVDSFLLLFLQMWSITEEKMLVAPYLGVHDDLVENEGYVIPYGDSPLDTDKVGENVYIDILNHAREYVYIMTPYLILDSELEHAIQFAAERGVDVRIIMPGIPDKPIPYALAKTYYQALTKSGVKIYEYTPGFVHSKIFLSDNTKAVVGTINLDYRSLYHHFECAVYLYKVDAIQDIYRDYMDTLNKSRLVSLKDINNIPKFQKVIGIVTKTIAPLL

SEQ ID NO: 6573 - protein, 1668 aa, Streptococcus agalactiae
ATGAAAACAGATATTGAAATAGCGCAAAGCGTCGCCCTAAAGCCTATTGCTGAGATTGTTGAGCAAGTAGGAATTGGTTTTGATGATATAGAATTGTATGGTAAATACAAAGCAAAATTATCTTTTGATAAGATTGAAGCTGTAAAATCTCAAAAAGTAGGAAAGTTAATTTTAGTAACTGCTATTAATCCGACACCAGCAGGTGAGGGAAAATCCACTATGAGCATTGGATTAGCTGATGCTTTAAATAAAATTGGTAAAAAAACGATGATTGCTCTTCGCGAACCTTCTTTAGGTCCTGTAATGGGTATTAAAGGAGGAGCTGCTGGAGGTGGATACGCACAAGTACTACCAATGGAAGATATTAATTTGCATTTTACTGGTGATATGCACGCAATCACAACTGCTAATAATGCTTTATCAGCTCTACTTGATAATCATATTCATCAAGGCAATGAATTAGATATTGACCAACGTCGAGTGATTTGGAAGCGTGTAGTTGATCTTAATGATCGTGCTCTTCGTCAGGTGATCGTTGGCTTAGGAAGCCCTGTCAATGGGATACCACGTGAAGATGGCTTTGATATTACTGTTGCTTCTGAAATAATGGCTATTCTATGTTTAGCTACTGACCTATCAGATTTAAAGAAACGCCTGTCAAATATTGTTGTGGCTTACTCAAGGGACCGTAAACCAATCTATGTTAAAGATTTGAAGATTGAAGGAGCTCTCACACTTATCCTAAAAGATGCTATCAAACCTAATTTGGTTCAAACCATTTATGGGACACCGGCTCTTGTCCATGGGGGACCATTTGCTAATATTGCACATGGATGTAATTCTGTCTTAGCGACTTCAACAGCTCTACGCTTAGCAGATTACGTTGTTACTGAAGCTGGTTTTGGAGCAGACTTGGGCGCTGAAAAGTTTCTTGATATAAAAACGCCAAACCTTCCGACTTCTCCCGATGCGATTGTTATTGTTGCTACATTGCGTGCATTGAAAATGCATGGAGGTGTTTCAAAAGAAGATCTCTCACAAGAGAACGTCGAAGCAGTTAAAAGAGGTTTTACAAATCTCGAGCGTCACGTTAACAATATGCGTCAATATGGTGTTCCGGTAGTTGTAGCTATCAATCAGTTTACTGCAGATACAGAAAGTGAAATTGCAACTCTTAAAACCTTATGTAGTAATATTGATGTGGCAGTTGAATTAGCAAGTGTGTGGGAAGATGGAGCAGACGGTGGCCTTGAACTTGCACAGACTGTTGCTAATGTGATTGAAACACAATCATCCAATTACAAACGCTTATATAGTGATGAAGACACTATTGAAGAAAAAATTAAAAAAATTGTTACTAAAATATATGGTGGTAATAAAGTTCATTTTGGACCTAAGGCACAAATACAATTAAAAGAGTTTAGTGACAATGGCTGGGACAAGATGCCTATTTGTATGGCAAAGACACAATATAGCTTTTCTGATAATCCAAATTTACTTGGTGCTCCAACTGACTTTGATATAACTGTTCGTGAATTTGTTCCAAAAACAGGAGCTGGTTTTATAGTTGCTCTTACTGGAGACGTATTGACAATGCCTGGTTTACCTAAAAAACCTGCAGCTCTCAATATGGATGTTTTAGAAGACGGTACAGTCGTTGGATTATTT

SEQ ID NO: 6574 - protein, 556 aa, Streptococcus agalactiae
MKTDIEIAQSVALKPIAEIVEQVGIGFDDIELYGKYKAKLSFDKIEAVKSQKVGKLILVTAINPTPAGEGKSTMSIGLADALNKIGKKTMIALREPSLGPVMGIKGGAAGGGYAQVLPMEDINLHFTGDMHAITTANNALSALLDNHIHQGNELDIDQRRVIWKRVVDLNDRALRQVIVGLGSPVNGIPREDGFDITVASEIMAILCLATDLSDLKKRLSNIVVAYSRDRKPIYVKDLKIEGALTLILKDAIKPNLVQTIYGTPALVHGGPFANIAHGCNSVLATSTALRLADYVVTEAGFGADLGAEKFLDIKTPNLPTSPDAIVIVATLRALKMHGGVSKEDLSQENVEAVKRGFTNLERHVNNMRQYGVPVVVAINQFTADTESEIATLKTLCSNIDVAVELASVWEDGADGGLELAQTVANVIETQSSNYKRLYSDEDTIEEKIKKIVTKIYGGNKVHFGPKAQIQLKEFSDNGWDKMPICMAKTQYSFSDNPNLLGAPTDFDITVREFVPKTGAGFIVALTGDVLTMPGLPKKPAALNMDVLEDGTVVGLF

SEQ ID NO: 6575 - protein, 1017 aa, Streptococcus agalactiae
ATGTATCTTATTGAACCAATTAGAAATGGTAAGCGTATCACAGACGGTGCGATTGCACTTGCCATGCAAGTTTATATTTTACAAAATGTTTTTTTAGATGATGATATTTTATTTCCATACTATTGTGATCCCAAAGTTGAAATCGGAAAATTTCAGAATGCAGTTATAGAGACAAATCAAGAATATTTGAAAGAACATGATATTCCTGTTGTTCGTCGAGATACTGGTGGAGGGGCTGTTTACGTTGACTCAGGTGCTGTAAATATTTGCTATCTCATGAAAGATCATGGACAATTTGGTGATTTCAAACGAGCTTATGAGCCAGCTATTAAGGCCCTAAAAACTTTAGGTGCTTCTAGTGTTGAAATGAGGGGACGAAATGACTTAGTTATTGATGGTAAAAAAGTATCAGGTGCAGCAATGACGATAGTAAACGGTCGTATTTACGGTGGTTACTCTCTTTTATTAGATGTTGATTTTGATGCTATGGAAAAAGTGTTAAATCCTAATCGGAAAAAAATTGAATCTAAAGGGATAAAATCTGTCCGAAGTCGAGTAGGAGATATTCGTAGCCACTTGTCAGAAGATTATCGTCATATCACAACCGATCAATTTAAAGATTTAATGGTTTGTCAATTATTACATATTGATCATATTGATCAGGCAAAACGCTATCATCTAACCGAAAAAGATTGGGCTGCGATTGACGCTCTAGCTGATGAAAAATATAAGAATTGGGATTGGAATTATGGTAACTCACCACAGTATTCGTATCACAGAGATGCTCGTTTTCCGTCAGGAACTTACGATTTTCACTTAGAAATTGAGAAAGGTATTATTACGAATTGCCGTATTTATGGTGACTTTTTCAGTTCTAAAGATATTTCAGATATTGAAAACCTTCTCATTGGTTGCCCTATGAAAGAAGAATTAGTCTTGGAAAAATTAAGTACTTTATCATTAGAAGATTATTTTGGTCAGACTAGTCCAGAAGAAATAAAAGCAGTTTTATTTTCA

SEQ ID NO: 6576 - protein, 339 aa, Streptococcus agalactiae
MYLIEPIRNGKRITDGAIALAMQVYILQNVFLDDDILFPYYCDPKVEIGKFQNAVIETNQEYLKEHDIPVVRRDTGGGAVYVDSGAVNICYLMKDHGQFGDFKRAYEPAIKALKTLGASSVEMRGRNDLVIDGKKVSGAAMTIVNGRIYGGYSLLLDVDFDAMEKVLNPNRKKIESKGIKSVRSRVGDIRSHLSEDYRHITTDQFKDLMVCQLLHIDHIDQAKRYHLTEKDWAAIDALADEKYKNWDWNYGNSPQYSYHRDARFPSGTYDFHLEIEKGIITNCRIYGDFFSSKDISDIENLLIGCPMKEELVLEKLSTLSLEDYFGQTSPEEIKAVLFS

SEQ ID NO: 6577 - protein, 876 aa, Streptococcus agalactiae
ATGACAGTGTGGAAGACTCTAGAAAAAACTAATCATTCTCAATCAGAAATACTAAGTCAGTTAATAGAAGAATCAGATGCTATTGTAGTTGGTATTGGTGCAGGCATGTCTGCAGCGGATGGATTTACCTATATTGGCCCCAGATTTGAAGAAGCTTTTCCGGATTTTATTGCTAAATATCAACTATTAGATATGTTGCAAGCAAGTCTTTATGACTTTGAAGATTGGGAAGAATATTGGGCCTTCCAAAGTCGTTTTGTGGCACTTAATTATTTAGATCAACCGGTAGGACAAGCTTATCTTGATTTAAAGGATATTTTAGCGAAAAAAGAATATCATATTATTACAACTAATGCTGATAATGCCTTCGCTGTGACTGATTATAATTTAGAAAAAGTTTTTCATATTCAAGGTGAATATGGCTTATGGCAGTGTAGTCAACATTGTCATCAACAAACTTATCGAAATGATCAGGCAATTCGTCAAATGATTGCACAACAAAAGGATATGAAGATTCCTAGTAACTTAATCCCAAAATGCCCAAAGTGTGATCAACCGTTTGAAATTAATAAACGTAACGAAGAAAAAGGTATGGTGGAAGATGCTGACTTTCATGCTCAACGACAACGTTATGAAAATTTCTTATCACAACATCAAAATGACAAAGTTCTTTATCTAGAGATTGGAGTTGGACATACCACGCCACAATTTATTAAGCATCCGTTTTGGCGATTCGTCTCTTTAAATGAAAACTCTTTATTTGTTACTCTTAATCACAAGCATTATCGCATTCCTCAAAAGATTCGCTCAAGGAGTGTGCAACTGACACAGCATATCGCTGAATTAATTGCTGAAGCGAAAAAAGAAATTATTGGA

SEQ ID NO: 6578 - protein, 292 aa, Streptococcus agalactiae
MTVWKTLEKTNHSQSEILSQLIEESDAIVVGIGAGMSAADGFTYIGPRFEEAFPDFIAKYQLLDMLQASLYDFEDWEEYWAFQSRFVALNYLDQPVGQAYLDLKDILAKKEYHIITTNADNAFAVTDYNLEKVFHIQGEYGLWQCSQHCHQQTYRNDQAIRQMIAQQKDMKIPSNLIPKCPKCDQPFEINKRNEEKGMVEDADFHAQRQRYENFLSQHQNDKVLYLEIGVGHTTPQFIKHPFWRFVSLNENSLFVTLNHKHYRIPQKIRSRSVQLTQHIAELIAEAKKEIIG

SEQ ID NO: 6579 - protein, 816 aa, Streptococcus agalactiae
ATGCCTAATCAAAAACAACTATTGCTAGCCATGATTGAGTATCTTCAGTCAGAAAATTTAACAGACGTTGATGACTTGAGGACCACCGATTTGCAAACGGTTTGGCGTGGTCTAGTTAATCAACAAGATCCTCAAAACATTAGTCAAGAGTACCTGTCTTTAGAAGATAGGTATTTGTCACATTGGTGGAATACTCAAAAAGTAAAAACGATAGACGTCTGTCATCAAACGGTATATTCAAATGTATTTACCTACCATGGGGATATTTGCTTATTACAAGTGGATGCTATTGTTAATGCAGCAAATAGTAAGTTGTTAGGTTGTTTTATTCCTAATCACCATTGTATTGACAATCATATTCATACGTTTGCAGGTTCACGATTACGTTTAGCATGTCATCAATTGATGACACAACAAGGACGAATGGAAGCCGTAGGACAAGCTAAACTTACCGAATCCTATCATCTTCCTTGTAAGTATGTTATTCATACAGTCGGACCTTACGTAAAAGTTGATCAAAAGCCATCTCGTATAAGAGAGGATTTATTAAAGTCTTCTTATAAATCCTGCTTACAGTTGGCAGTTCGAGCTAATCTTAAAACAATTGTCTTCCCTTGTATATCAACGGGAGAATTTGGTTTTCCTAATCAAAGAGCTGCTGAATTGGCTGTTCAAGCGATATTAGAGTGGCAACGCGAAAATCAGCACAAACTCTATATTATTTTCAATACATTCACACCTAAAGACCAAGAGATTTATCAAAAATTATTATTAAAAGAGGAAATAGATGACAGTGTGGAAGACTCTAGAAAAAAC

SEQ ID NO: 6580 - protein, 272 aa, Streptococcus agalactiae
MPNQKQLLLAMIEYLQSENLTDVDDLRTTDLQTVWRGLVNQQDPQNISQEYLSLEDRYLSHWWNTQKVKTIDVCHQTVYSNVFTYHGDICLLQVDAIVNAANSKLLGCFIPNHHCIDNHIHTFAGSRLRLACHQLMTQQGRMEAVGQAKLTESYHLPCKYVIHTVGPYVKVDQKPSRIREDLLKSSYKSCLQLAVRANLKTIVFPCISTGEFGFPNQRAAELAVQAILEWQRENQHKLYIIFNTFTPKDQEIYQKLLLKEEIDDSVEDSRKN

SEQ ID NO: 6581 - protein, 330 aa, Streptococcus agalactiae
ATGAAAAAAATTGCGAACTACTTATTAATTGAAAAAAATGAAGAACTTTATACTATCAGTTTAACTCCAGAACTTCAAGATGACTTGGGAACTGTCGGATATGTGGAATTCACAGATGATACAAATTTAGAAGTTGATGATGTTATTTTAAATATTGAAGCTTCAAAGACGGTTATGGCAATTTTATCTCCTCTTACAGGTAAAGTTGTTAAAGTTAATACAGCTGCAAGTCAAGAACCAACTTTGTTAAATTCTGAAAAAGCTGACGAAAATTGGTTGGTTGTGTTAACAGACGTTGATTATGCTGCTTTTGAAGCTTTAGAAAATGCC

SEQ ID NO: 6582 - protein, 110 aa, Streptococcus agalactiae
MKKIANYLLIEKNEELYTISLTPELQDDLGTVGYVEFTDDTNLEVDDVILNIEASKTVMAILSPLTGKVVKVNTAASQEPTLLNSEKADENWLVVLTDVDYAAFEALENA

SEQ ID NO: 6583 - protein, 984 aa, Streptococcus agalactiae
ATGAAATTAAGTGTCCTTGATTATGGGCTTATTGATTATGGAAAAACTGCAAGTGATGCAATACAAGAAACGATTCTTTTATCACAAGAGGCGGAGCGACTAGGCTATCATCAATTTTGGGTGGCTGAACATCACGGTGTTAGGGCATTCAGTATTAGCAATCCAGAATTAATGATAATGCATTTGGCTAACCAGACTAAATCTATCAAAATTGGCTCTGGAGGTATAATGCCTCTGCACTATAGTAGTTTTAAACTCGCGGAGACTCTCAAAACATTAGAGACATGTCATCCGAATCGAGTAAGTATTGGTTTAGGAAATTCACTAGGGACAGTTAAAGTTTCAAATGCACTTCGTAGCTTACATAAAGCACATGATTACGAAGAGGTACTGGAGGAATTGAAGTCATGGCTTATTGATGAATCATCCAGCAAGAAACCATTAGTTCAACCGACTCTTTCTAGCTTCCCAGACTTATATGTGTTGGGGAGTGGTCAAAAATCAGCTTATTTAGCGGCTAAACTTGGCTTAGGCTTTACCTTCGGTGTTTTTCCTTTTATGGACAAAGACCCATTGACAGAAGCTAAAAAGCTTTCATCTCTTTATTATCATCAGTTTGAAGAATATTATCCTAATAAGTCTCCTAATTTGATGGTAGCTGCATTTGTAGTTATAGCTGATACTTCAGAAGAAGCTGAAAACATAGCAAAGACTTTAGATATCTGGATGCTAGGAAATAAAGACTTCAATGAATTTGCAACATTTCCTACTATTGAAGAAGCTAATCATTACCAATTGACTCCTGAACAAAAAGCAAAAATTAAATCAAATCGCCACCGTATGATTGTAGGTGATCCAAAACAAGTTAAAGAAAGCCTTGACGCTTTAGTTAATGCTAGTCAAGCAGAAGAACTACTTTTGATTCCTCTTGTTCCAGGACTTGATCAACGAATCAAATCCTTAAAATTATTATCACAGTTATAT

SEQ ID NO: 6584 - protein, 328 aa, Streptococcus agalactiae
MKLSVLDYGLIDYGKTASDAIQETILLSQEAERLGYHQFWVAEHHGVRAFSISNPELMIMHLANQTKSIKIGSGGIMPLHYSSFKLAETLKTLETCHPNRVSIGLGNSLGTVKVSNALRSLHKAHDYEEVLEELKSWLIDESSSKKPLVQPTLSSFPDLYVLGSGQKSAYLAAKLGLGFTFGVFPFMDKDPLTEAKKLSSLYYHQFEEYYPNKSPNLMVAAFVVIADTSEEAENIAKTLDIWMLGNKDFNEFATFPTIEEANHYQLTPEQKAKIKSNRHRMIVGDPKQVKESLDALVNASQAEELLLIPLVPGLDQRIKSLKLLSQLY

SEQ ID NO: 6585 - protein, 1197 aa, Streptococcus agalactiae
ATGAATAATGTCCAAGGTAATTTATTTCGTCCATTAACGCTTCCCAATGGATTGAGCTTAGAAAATCGTTTTGTTCTATCACCTATGGTAACTAATTCTTCTACATCAGAAGGTTTTGTAACTGATGACGACATAGCATATGCTGTTCGTCGTGCTAAATCTGCTCCATTACAAATTACTGGAGCAGCATATATCACAGAATATGGTCAGTTATTTGAATATGGTTTTAGCGTTTCAAAGGATGAGGACATTCCTGGTTTGACTAAATTGGCTAAAGCAATGAAGTCTAAGGGAGCGAAAGCTGTTTTGCAGCTGACGCATGCTGGACGTTTCTCAAGTCACACTTTGGCAAGACACGGATATGTGTATGGTCCCAGCCCTATGCAATTGCAATCGCCATACCCACATCAGGTTAAAGAACTAACACACAAAGATATACTAAGGATTATCGATGAATATGTCCAGGCTACAAGACGAGCTATACAAGCTGGATTTGATGGTGTTGAAATATCTTCTGCACAACGATTACTAATTCAAACCTTTTTCTCAACCTTCTCAAATCAAAGAAAAGATGAGTATGGTCCTCAAACTTTGACTAATCGCTGTCGTTTAGGCTTAGAAGTTTTTAAAGCGGTACAAAAAGTTATCAGAGAAGAAGCAGAGTCAGATTTTATCCTTGGTTTTAGAGCGACGCCTGAAGAAACTCGCGGTTCACAAATTGGATATAGCATTGAAGAGTTTATGGAATTTCTTGAAAAAATTTTAGCGATTGCTCAGGTAGATTATCTTGCCGTTGCAAGCTGGGGGCATGATGTCTTTAGAAATACTATACGTTCTGAGGGAGTTTACAAAGGGCAGCTGGTTAATCAAGTTATATTTGAACATTTTGGTGATAGAGTTCCAATTATGGCAACTGGAGGTATTAATAGTGCTTCAAAGGTGTTTGAAGCCTTACAACATGCTCATATGGTAGGAGCTTCCACGCCCTTAGTAGTTGATCCGGAATTTTTACAAAAAATAAAAGCTAAGCGTTCTGATCAGATTAATTTAAGGATTAAAGTGAGTGATTTAGAAGGTTTGGCGATTCCAAAAGCCTCCTTTAAAGATATTGTTCCTTTGATGGATTATGGAGAATCTTTGCCAAAGGAAGCTCGAGAAGTTTTTAGAGAACTTCGAAGCAATTATAGGGAGGAAAGA

SEQ ID NO: 6586 - protein, 399 aa, Streptococcus agalactiae
MNNVQGNLFRPLTLPNGLSLENRFVLSPMVTNSSTSEGFVTDDDIAYAVRRAKSAPLQITGAAYITEYGQLFEYGFSVSKDEDIPGLTKLAKAMKSKGAKAVLQLTHAGRFSSHTLARHGYVYGPSPMQLQSPYPHQVKELTHKDILRIIDEYVQATRRAIQAGFDGVEISSAQRLLIQTFFSTFSNQRKDEYGPQTLTNRCRLGLEVFKAVQKVIREEAESDFILGFRATPEETRGSQIGYSIEEFMEFLEKILAIAQVDYLAVASWGHDVFRNTIRSEGVYKGQLVNQVIFEHFGDRVPIMATGGINSASKVFEALQHAHMVGASTPLVVDPEFLQKIKAKRSDQINLRIKVSDLEGLAIPKASFKDIVPLMDYGESLPKEAREVFRELRSNYREER

SEQ ID NO: 6587 - protein, 834 aa, Streptococcus agalactiae
TTGGAATGGCAAGATCTAGCGCAATTACCTGTATCTATTTTTAAAGACTATGTTACAGATGCTCAAGACGCGGAAAAACCTTTTATATGGACAGAAGTATTTTTAAGGGAGATTAATCGCTCAAATCAAGAAATTATTTTGCATATTTGGCCGATGACTAAGACAGTCATTCTGGGGATGTTAGATCGAGAATTACCACATTTAGAATTAGCAAAAAAAGAAATCATCAGTCGTGGTTATGAACCAGTTGTTCGGAATTTTGGTGGTCTCGCAGTTGTAGCTGATGAAGGAATTTTAAATTTTTCATTGGTTATTCCAGATGTTTTTGAGAGAAAATTGTCTATCTCAGATGGGTATCTTATAATGGTCGATTTTATTAGAAGTATATTTTCGGATTTTTATCAACCTATTGAGCACTTTGAAGTAGAGACCTCCTATTGTCCTGGTAAGTTTGATCTTAGTATAAATGGCAAAAAATTTGCTGGCTTGGCTCAGCGCCGTATAAAGAATGGTATTGCGGTATCGATTTACCTTAGCGTTTGTGGCGATCAAAAAGGGCGGAGTCGAATGATTTCAGATTTTTATAAGATTGGTCTAGGTGATACGGGTAGTCCAATTGCTTATCCAAATGTAGATCCTGAAATTATGGCTAATCTATCTGATCTATTAGATTGTCCTATGACAGTAGAAGATGTTATTGATCGTATGTTGATTAGCCTTAAACAAGTAGGTTTTAATGATCGTTTACTGATGATTAGGCCCGATTTAGTTGCAGAGTTTGATAGATTTCAGGCTAAGTCTATGGCTAATAAGGGGACGGTGAGCAGAGATGAA

SEQ ID NO: 6588 - protein, 278 aa, Streptococcus agalactiae
MEWQDLAQLPVSIFKDYVTDAQDAEKPFIWTEVFLREINRSNQEIILHIWPMTKTVILGMLDRELPHLELAKKEIISRGYEPVVRNFGGLAVVADEGILNFSLVIPDVFERKLSISDGYLIMVDFIRSIFSDFYQPIEHFEVETSYCPGKFDLSINGKKFAGLAQRRIKNGIAVSIYLSVCGDQKGRSRMISDFYKIGLGDTGSPIAYPNVDPEIMANLSDLLDCPMTVEDVIDRMLISLKQVGFNDRLLMIRPDLVAEFDRFQAKSMANKGTVSRDE

SEQ ID NO: 6589 - protein, 690 aa, Streptococcus agalactiae
ATGGCTATGAAAATTTTGATTACATCAGGTGGAACTACCGAGAAAATTGATACCGTTAGGAGTATCACGAATCACGCAACAGGAGCTTTAGGAAAAATAATTGCAGAAAAATATTTACGAGAAGGACATCAGGTGACACTCGTGACTACTAAAAATGCAGTCAAACCAGAATCTGCTACCAACTTATCCATATTTGAGATTGAGGACGTTGACTCATTAATAAAAACCTTGAAGCCATTAGTGAAAGAGCATGATATTTTAATTCATAGCATGGCAGTGTCTGACTATACCCCCGTCTACATGGCTGATTTCGAAAAGGTTAAATCAAGCGATGATTTAGATACTTTTTTGCGCAAAGATAACCACGAAGGGAAAATATCATCTGAATCAGAATATCAAGTCCTTTTTCTCAAAAAAACACCAAAAGTTATCAGCCTTGTGAAAAAATGGAATCCTCAAATTACTCTAGTAGGTTTTAAACTACTTGTGAACGTTACTAAAGAAAATCTTTTTAAAGTTGCTCGTCATAGCTTAATCAAAAATAAAGCTACGTTTATTTTAGCTAATGACCTCATTGATATTACCTCAAAACATCACATAGCCTACCTACTTGATCATGATAATGTGTATAAAGCTACCACCAAAGAAGATATTGCTCAATTAATTTACGAAAAGGTAAAAAAATATGAT

SEQ ID NO: 6590 - protein, 230 aa, Streptococcus agalactiae
MAMKILITSGGTTEKIDTVRSITNHATGALGKIIAEKYLREGHQVTLVTTKNAVKPESATNLSIFEIEDVDSLIKTLKPLVKEHDILIHSMAVSDYTPVYMADFEKVKSSDDLDTFLRKDNHEGKISSESEYQVLFLKKTPKVISLVKKWNPQITLVGFKLLVNVTKENLFKVARHSLIKNKATFILANDLIDITSKHHIAYLLDHDNVYKATTKEDIAQLIYEKVKKYD

SEQ ID NO: 6591 - protein, 540 aa, Streptococcus agalactiae
ATGATTAAACGTATTACACTAGCCGTCACCGGTTCAATTTCGGCCTATAAAGCAGCAGACCTTACAAGTCAATTAACTAAAATTGGCTATGATGTTCACATCATAATGACACAAGCTGCCACAGAATTTATTACACCGTTAACTCTGCAAGTATTATCAAAAAATCCTATTCATTTAGATGTTATGGATGAGCATAACCCAAAAATCATCAACCATATCGAATTAGCAAAACGCACAGATTTATTTATCGTTGCACCTGCCTCTGCTAATACTATTGCTCATCTAGCATATGGCTTCGCTGATAACATCGTAACAAGCGTTGCTCTTGCTATGCCCGATGAAACTCCAAAACTTATCGCACCAGCAATGAATACAAAGATGTATCATAATACAATCACCCAACGTAACATTAATATTTTGAAAAAAATAGGTTATCAGGAAATTGAACCTCGTATTAGTTTGCTTGCCTGTGGTGATACCGGTCAAGGAGCCCTGGCTGATATCTCCACTATACTTAAATGTATACAAGAAGTTGCAAAT

SEQ ID NO: 6592 - protein, 180 aa, Streptococcus agalactiae
MIKRITLAVTGSISAYKAADLTSQLTKIGYDVHIIMTQAATEFITPLTLQVLSKNPIHLDVMDEHNPKIINHIELAKRTDLFIVAPASANTIAHLAYGFADNIVTSVALAMPDETPKLIAPAMNTKMYHNTITQRNINILKKIGYQEIEPRISLLACGDTGQGALADISTILKCIQEVAN

SEQ ID NO: 6593 - protein, 570 aa, Streptococcus agalactiae
ATGAAAAAGAAAAACAAATCCTCTAACATTGCTATAATTGCAATCTTTTTTGCTATTATGCTTGTCATTCATTTTTTGTCATCATTTATTTTTAGTTTTTGGTTAGTCCCTATTAAACCTACTTTGATGCATATCCCAGTTATTATTGCATCTATAGCCTATGGACCTCGTATTGGTGCAACTCTAGGCGCCTTAATGGGGGGGATCAGCGTAGCTAACAGCAGCATTGTTCTATTACCAACGAGTTACCTCTTCTCACCTTTTGTTGAAAATGGTAATTTTTATTCGCTAATTATTGCACTTGTACCACGTATTCTAATCGGGATTATTCCTTATTTCGTTTACAAATTACTACACGACCGCTTTGGTTTGGCTATCTCAGGTGCTATAGGCTCTCTAACAAACACAGTATTTGTTTTATCTGGAATTTTTATCTTTTTTTCAAGTACTTATAATGGGAATATCAAGCTAATGCTCGCTGGGATTATTTCATCTAATTCATTAGCTGAGATGGTCATTGCAGCTATCATTGTATATCTAACTGTTCCTCGTATTCTCAATATTAAACAT

SEQ ID NO: 6594 - protein, 190 aa, Streptococcus agalactiae
MKKKNKSSNIAIIAIFFAIMLVIHFLSSFIFSFWLVPIKPTLMHIPVIIASIAYGPRIGATLGALMGGISVANSSIVLLPTSYLFSPFVENGNFYSLIIALVPRILIGIIPYFVYKLLHDRFGLAISGAIGSLTNTVFVLSGIFIFFSSTYNGNIKLMLAGIISSNSLAEMVIAAIIVYLTVPRILNIKH

SEQ ID NO: 6595 - protein, 1716 aa, Streptococcus agalactiae
ATGACTTACACAGAAAATTTTCAAAAATGGTTAGATTTTGAGCAGCTTCCTGACTATCTTCGTCAAGAATTACTATCAATGGATGAAAAAACAAAAGAAGATGCTTTTTACACAAACTTAGAATTTGGTACTGCTGGTATGCGTGGTTATATTGGTGCTGGTACAAATCGTATTAATATTTATGTTGTCCGTCAAGCAACCGAAGGATTGGCAAAATTAATCGAAACTAAGGGAGAGGAAGCTAAAAAACGTGGTGTAGCCATTGCTTATGATTCACGCCACTTCTCTCCAGAATTTGCTTTTGAGTCTGCACAGGTCTTGGCACAGCATGGAATTAAATCTTACGTATTTGAAGCTCTTCGTCCAACACCAGAACTCTCTTTTGCTGTTCGCCATTTAAATGCCTATGCTGGTATTATGGTTACTGCAAGCCACAATCCAGCACCTTTCAATGGTTATAAAGTCTACGGACAAGACGGAGGTCAACTACCACCAGCTGATGCTGATGCACTAACAGACTTTATCCGTGCTATTGAAAATCCATTTGCAGTTGAACTTGCTGATTTAGATGAAAGCAAATCAGCGGGTCTTATTCAAGTTATCGGTGAAGATGTTGATATTGAATATCTTAGAGAGGTTAAAGATGTTAATATCAATCAAGATTTAATCAATAACTTTGGAAAAGACATGAAAATTGTCTATACTCCTCTCCACGGAACTGGTGAGATGTTGACACGCCGTGCCCTTGCTCAAGCCGGTTTTGAATCTGTTGTTGTAGTAGAATCACAAGCTAAGGCAGATCCAGACTTTTCTACTGTCAAATCTCCTAACCCTGAAAGCCAAGCTGCCTTTGCTCTTGCTGAAGAACTCGGACGAGAAGTTGATGCAGATGTCTTAGTAGCTACTGATCCTGATGCAGACCGCCTAGGCGTTGAAATTCGCCAACCAGATGGTTCTTATAAAAACCTTTCTGGAAATCAAATTGGAGCGATTATTGCGAAATACATCCTGGAAGCTCATAAAACAGCAGGAACACTTCCAGAAAATGCTGCTCTCGCTAAATCAATCGTATCAACAGAATTAGTAACAAAAATTGCCGAAAGTTATGGCGCTACAATGTTTAACGTTTTAACTGGATTTAAATTCATCGCTGAGAAAATTCAAGAGTTTGAAGAAAAACATAACCACACCTATATGTTTGGTTTTGAAGAAAGCTTCGGATATCTTATTAAACCATTTGTCCGTGATAAAGACGCTATTCAAGCAGTTCTTTTGGTTGCTGAGATTGCAGCTTATTACCGTTCGCGTGGTTTAACACTTGCAGATGGTATTGATGAAATTTACAAAGAATATGGTTATTTTGCTGAAAAAACGATTTCAGTAACACTTTCAGGAGTGGATGGAGCTGCTGAAATTAAGAAGATTATGGACAAATTCCGTGAAAATGGTCCAAAACAATTTAACAATACTGATATTGTATTATTAGAAGATTTCCAAAAACAAACCGCTACTAAAAATGATGGAACAATATCTAACTTAACAACTCCTCCAAGTAATGTTTTGAAGTACACGTTAGCTGATGATTCATGGATTGCAGTTCGCCCTTCAGGAACTGAACCAAAAATCAAGTTCTATATTGCCACGGTCGGTAATGATTTAGCAGATTCAGAAACAAAAATCGCCAATATTGAAAAAGAGATTACAACATTTGTAAAT

SEQ ID NO: 6596 - protein, 572 aa, Streptococcus agalactiae
MTYTENFQKWLDFEQLPDYLRQELLSMDEKTKEDAFYTNLEFGTAGMRGYIGAGTNRINIYVVRQATEGLAKLIETKGEEAKKRGVAIAYDSRHFSPEFAFESAQVLAQHGIKSYVFEALRPTPELSFAVRHLNAYAGIMVTASHNPAPFNGYKVYGQDGGQLPPADADALTDFIRAIENPFAVELADLDESKSAGLIQVIGEDVDIEYLREVKDVNINQDLINNFGKDMKIVYTPLHGTGEMLTRRALAQAGFESVVVVESQAKADPDFSTVKSPNPESQAAFALAEELGREVDADVLVATDPDADRLGVEIRQPDGSYKNLSGNQIGAIIAKYILEAHKTAGTLPENAALAKSIVSTELVTKIAESYGATMFNVLTGFKFIAEKIQEFEEKHNHTYMFGFEESFGYLIKPFVRDKDAIQAVLLVAEIAAYYRSRGLTLADGIDEIYKEYGYFAEKTISVTLSGVDGAAEIKKIMDKFRENGPKQFNNTDIVLLEDFQKQTATKNDGTISNLTTPPSNVLKYTLADDSWIAVRPSGTEPKIKFYIATVGNDLADSETKIANIEKEITTFVN

SEQ ID NO: 6597 - protein, 1731 aa, Streptococcus agalactiae
ATGAAAGCAAGTCATCCTAAAAAGATACAAAAAAAGCTTGTTCAAGATCTTCTTTCTAAAAAAAGCTTAGTAGGAATGGCATTATTAGGGACGGTAGTACAAGTTTGCCTCACTGTTTATTTGCCTGTTCTAATTGGACAGGCGGTAGACGTTGTATTATCGCCTCATTCTATGATATTATTGTTACCTATAATGTGGAAGATGGTTGCAGTTATTTTAGCAAATACTATTATTCAATGGATTAATCCTCTGCTCTATAACCGCTTAATTTTTCATTATGTTGCTTCTTTAAGAAAGGCTGTAATGGAAAAGTTGAATCTATTACCTATAGCTTACCTTGATAAACGTGGCATAGGTGACTTGATTAGTCGTGTGACTACCGATACGGAGCAATTATCAAATGGTTTATTAATGGTTTTTAACCAGTTCTTTGTTGGTTTATTAACTATTCTAGTTACTATTTTTAGTATGGCAAAGATTGATTTATTAATGCTTTTTTTGGTATTATTTCTGACGCCTTTATCACTCTTTCTAGCCCGCTTTATTGCTAAAAAGAGTTATCACTTATATCAAAATCAAACGGCATCACGAGGACGACAAACTCAATTCATTGAAGAGATGGTGAGTCAAGAAAGCCTTATTCAAGCATTCAGTGCGCAAGAAGAAAGTAGTGATCATTTTAGGACTATTAATCAAGAGTATGCTAACTTTTCTCAATCAGCAATTTTTTATTCTTCAACTGTCAATCCATCAACCCGATTTATCAATAGTTTGATTTATGGCTTCTTAGCAGGGATTGGTGCCCTTCGTATTATGTCAGGTGCTTTTAGTGTTGGTCAATTAATCACTTTCTTAAATTATGTCAATCAATATACTAAGCCATTTAATGACATCTCTTCCGTCCTGTCTGAGATGCAAAGTGCTCTGGCTTGTGCAGAACGCCTTTACTCTATTTTAGAAGAATCGTCACCAAATATAACAGGTACAGAAAAACTTGATTCATCAACGGTCAAAGGTCAAATCGATTTTAAAAACGTTATTTTTGGTTATAATAAATCAAAACCACTATTGAATGGTATTAATTTACACATTCCAGCAGGAGCTAAGGTCGCTATTGTAGGACCAACAGGTGCTGGGAAGTCTACTTTAATCAATTTATTAATGCGTTTCTATGAAGTTGACGGGGGAAATATCCTTTTAGATGGTAAGCCTATTACTGATTATGAGCCATCACAATTAAGGCAAGAAATTGGAATGGTATTACAAGAAACGTGGTTAAAAAGTGCTACGATTCACGATAACATTGCATATGCCAATCCTAAAGCTAGCCGTGACGAAGTGATAGAGGCTGCAAAAGCAGCTAATGCAGATTTCTTTATCAAACAATTACCGAATGGATATGATACGTATTTAGAAGATGCTGGAGACTCGTTATCACAGGGGCAGTGTCAGCTATTGACAATTGCTCGTATTTTTCTTAAATTACCTAGAATATTGATATTAGATGAGGCAACATCGTCTATAGATACTCGTACTGAAGTTCTTGTTCAAGAAGCATTCCAAATGTTGATGAAGGGGAGAACAAGCTTTATTATTGCACATCGCTTATCTACCATTCAAACAGCAGATATTATTTTAGTTATGGTATCTGGTGAAATTGTAGAAGTGGGTAACCACTCTGAATTAATGGCTCAAAAAGGTATTTATTATCAAATGCAAAATGCACAAAAG

SEQ ID NO: 6598 - protein, 577 aa, Streptococcus agalactiae
MKASHPKKIQKKLVQDLLSKKSLVGMALLGTVVQVCLTVYLPVLIGQAVDVVLSPHSMILLLPIMWKMVAVILANTIIQWINPLLYNRLIFHYVASLRKAVMEKLNLLPIAYLDKRGIGDLISRVTTDTEQLSNGLLMVFNQFFVGLLTILVTIFSMAKIDLLMLFLVLFLTPLSLFLARFIAKKSYHLYQNQTASRGRQTQFIEEMVSQESLIQAFSAQEESSDHFRTINQEYANFSQSAIFYSSTVNPSTRFINSLIYGFLAGIGALRIMSGAFSVGQLITFLNYVNQYTKPFNDISSVLSEMQSALACAERLYSILEESSPNITGTEKLDSSTVKGQIDFKNVIFGYNKSKPLLNGINLHIPAGAKVAIVGPTGAGKSTLINLLMRFYEVDGGNILLDGKPITDYEPSQLRQEIGMVLQETWLKSATIHDNIAYANPKASRDEVIEAAKAANADFFIKQLPNGYDTYLEDAGDSLSQGQCQLLTIARIFLKLPRILILDEATSSIDTRTEVLVQEAFQMLMKGRTSFIIAHRLSTIQTADIILVMVSGEIVEVGNHSELMAQKGIYYQMQNAQK

SEQ ID NO: 6599 - protein, 1719 aa, Streptococcus agalactiae
ATGAAAAGACTAACTTATTATTTTAAGGGGTATATCAAAGAAACTATCTTTGGACCCCTTTTCAAATTATTAGAAGCCTCTTTTGAACTTTTGGTACCAATCGTTATTGCAAAAATGATTGACGAGACCATTCCACGAGGGGATAGAAGTAGTTTACTGTTGCAAATTGGATTGATTTTCTTTTTGGCTGCGGTGGGTGTTGTAGTAGCGATAACTGCTCAATATTATTCTTCAAAAGCCGCAGTTGGTTATACGAGACAATTGACAGAGGATCTCTATCAAAAAGTCATGTCACTGGGTAAAAAAGACAGAGATGAATTGGGAACTGCTAGTTTGATTACTCGTTTGACTGCTGATACATTTCAAATCCAAACTGGTTTAAATCAATTTTTACGTTTATTTTTGAGGGCTCCGATTATTGTTTTTGGTGCCATAATTATGGCTTTTTCCATTAGTCCCTCATTGACTATTTGGTTCTTGATAATGGTTGTCACGTTATTTATCATTGTTTTTGTAATGTCTCGACTATTAAATCCTATTTACCTTAAAATCAGAACTTTAACCGATTATTTGGTAAAGTTGACTAGGCAACAACTTCAAGGTGTACGAGTTATCCGTGCCTTTAATCAAGTAGATAGAGAGAGTGAAGCATTTAATGATATCAATTATCACTATACGAATTTACAATTAAAAGCAGGTAGGCTTTCTAGTTTAGTAACGCCTCTAACATTTCTAGTTGTTAATATCATTTTGGTTGTGATTATTTGGCGTGGTAATTTAAATATAGCTAATCATCTTTTATCACAAGGAATGTTGGTTGCTTTAATTAATTACTTATTGCAAATTCTTGTTGAATTGTTAAAAATGACAATGTTGGTGACATCACTGAACCAAAGTTATATCAGTGCTAAGCGAATTATAGCCGTTTTTGAAAGACCGTCTGAAATAATTGATGACAAACTTGAGCCAAAATATTCGAATAAGGCTTTAGAAGTGCAAGAAATGGCATTTTCTTATCCAAACTCCTCTGAAAAAGCTTTATCTGATATTACTTTTTCTATGAATGTAGGAGAAACTTTAGGGATAATTGGTGGAACTGGCTCTGGGAAATCAACCTTGGTTAATTTACTGCTTCATATTTATAAAGTGCAAGAAGGGGATATTGATATATATCATCAGGGAAAAAGTCCAGATACAATTTCAAATTGGCGTAGCCTGGTAAGAGTTGTTCCTCAAAATGCTCAGTTGTTTAAAGGAACTATTCGTTCTAACCTTTCTTTGGGACTTGGTAAAGTTAGTGAGGAAAAACTTTGGACTGCTTTAGAAATAGCACAAGCTAGTGATTTTGTAAAAGAAAAAGATGGTCAACTTGATGCCCCTGTAGAGAGTTTTGGTAGGAATTTCTCTGGTGGTCAAAGGCAAAGGTTGACGATTGCAAGAGCTTTAGTTCAAGATAAGATTCCATTTTTGATTTTAGACGATGCAACATCTGCATTGGATTATTTAACAGAAGCTCGTTTATTTAAAGCTATAATTAAACATTTCAACCAAACTAATCTTATTATTGTATCACAGAGAATTAATAGTATACAAAATGCAGATAGAATCTTACTTCTTGATAAGGGCAAACAAGTTGGTTTTGATAATCATCAATCTTTATTAGCTCATAACAAAGTTTATAAGTCCATTTACCATTCACAAAATTTTAAGGAGGAGGAG

SEQ ID NO: 6600 - protein, 573 aa, Streptococcus agalactiae
MKRLTYYFKGYIKETIFGPLFKLLEASFELLVPIVIAKMIDETIPRGDRSSLLLQIGLIFFLAAVGVVVAITAQYYSSKAAVGYTRQLTEDLYQKVMSLGKKDRDELGTASLITRLTADTFQIQTGLNQFLRLFLRAPIIVFGAIIMAFSISPSLTIWFLIMVVTLFIIVFVMSRLLNPIYLKIRTLTDYLVKLTRQQLQGVRVIRAFNQVDRESEAFNDINYHYTNLQLKAGRLSSLVTPLTFLVVNIILVVIIWRGNLNIANHLLSQGMLVALINYLLQILVELLKMTMLVTSLNQSYISAKRIIAVFERPSEIIDDKLEPKYSNKALEVQEMAFSYPNSSEKALSDITFSMNVGETLGIIGGTGSGKSTLVNLLLHIYKVQEGDIDIYHQGKSPDTISNWRSLVRVVPQNAQLFKGTIRSNLSLGLGKVSEEKLWTALEIAQASDFVKEKDGQLDAPVESFGRNFSGGQRQRLTIARALVQDKIPFLILDDATSALDYLTEARLFKAIIKHFNQTNLIIVSQRINSIQNADRILLLDKGKQVGFDNHQSLLAHNKVYKSIYHSQNFKEEE

SEQ ID NO: 6601 - protein, 600 aa, Streptococcus agalactiae
ATGTTTAAATTTTTAAAACGTTTGATAGCATTAATTATTATTATTTTCATTGGGTACCGTCTAGTTATCATCCATGAAAATGTTAAAAAAGTGCTTCAATATCATGATTTAGTGCAGAATACTCTTGCAGAGAATGGTTCAGAGGCTAATGTGTACTTAGTATTATCTATGATTTATACTGAAACTAAGGGAGATGCTATAGATGTGATGCAATCAAGTGAAAGTATCAGTGGAACTACGAACAGTATTACGGATAGTCACACCAGTATTAAACATGGCGTCACTCTGTTGTCACAAAATATAAGTCAAGCTAAAAAAGCTAAGGTTGATGTATGGACTGCTGTCCAAGCATATAATTTTGGTTCTTCTTATATTGATTATGTAGCGGATCATGGGGGTGAAAATTCCATTGAGTTGGCCAAAAATTACTCTAAAAATGTTGTAGCTCCCAGCCTAGGAAATTATAACGGGGACACTTACTTTTACTATCATCCTCTCGCCTTAATTTCAGGAGGGAAGCTCTATAAAAATGGTGGTAATATTTACTACTCACGTGAAGTTCAATTCAACCTTTATTTGATAAAAATAATGGAGTTGTTT

SEQ ID NO: 6602 - protein, 200 aa, Streptococcus agalactiae
MFKFLKRLIALIIIIFIGYRLVIIHENVKKVLQYHDLVQNTLAENGSEANVYLVLSMIYTETKGDAIDVMQSSESISGTTNSITDSHTSIKHGVTLLSQNISQAKKAKVDVWTAVQAYNFGSSYIDYVADHGGENSIELAKNYSKNVVAPSLGNYNGDTYFYYHPLALISGGKLYKNGGNIYYSREVQFNLYLIKIMELF

SEQ ID NO: 6603 - protein, 975 aa, Streptococcus agalactiae
ATGATGGATTTTTATATCAAACAGATTATTATACATCAGTTTTCTCCTAACGACACAGAGTTAGTGCTATCAGATACTCCGTTAACCCTAACTCCAAGGATTGATGACTACTTTCGTAAAAAATTAAGTAAAGTTTTTTCTGATGAAGCTAAGCGTGGCTATTTTGGAGAGGATAATGTATTTATGAGTCATTTACAAGATGATTTATATGTTTCTTCCTGTCAAATTGCGCAACTTTGGAAAGAAGAGTTTGTCATATCGGAAGATCAAAAAACGAATGACTTAGTTTTTATTCAATTTGACAAGGATGGAATGGAACATTTTGCTTTCCTTCGAATCTCATTAAAGGAACAATTTGCTCATGTTTCTGAAAATCAAGAGCAGCCAATTACAATAACACAGAATAACCTTCCAAGTGCTGCTCAAACTCCAGATGAAGCTTTGGTTGTTAACAAGTCATCAAAGCAATACTATTTAATTGAAAAGCGTATCAAACACAATGGTTCATTTGCTAATTATTTTTCTGAAAATTTATTACAAGTACAACCAGAACAGTCTGTTAAAAAATCTATAAAAATGGTTGAACAGACAGCTCAAAAAATTGCTGAAAATTTCAACAAAGATGATTTTTCTTTCCAATCAAAAATGAAATCGGCTATTTATAAGAATTTAGAAGAAGAGCAAGAATTGTCTCCAGAAAAATTAGCAGATCAATTATTTGATGATAATTTAACAGCCAGGCTGACTTTTGTTGATGAATTGAAAGACGCAATACCTGGATCTGTTCAAGTAAGTGATATTGATCATTCCCGTCAAATTAAGAAGTTAGAGAATCAGAAGCTATCTCTTTCAAATGGTATTGAATTGATTGTACCCAACAATGTCTACCAAGATGCCGAATCAGTTGAATTTATCCAAAACCCTGATGGTACATACTCAATACTAATCAAAAACATACAGGATATTCAAAATAAA

SEQ ID NO: 6604 - protein, 325 aa, Streptococcus agalactiae
MMDFYIKQIIIHQFSPNDTELVLSDTPLTLTPRIDDYFRKKLSKVFSDEAKRGYFGEDNVFMSHLQDDLYVSSCQIAQLWKEEFVISEDQKTNDLVFIQFDKDGMEHFAFLRISLKEQFAHVSENQEQPITITQNNLPSAAQTPDEALVVNKSSKQYYLIEKRIKHNGSFANYFSENLLQVQPEQSVKKSIKMVEQTAQKIAENFNKDDFSFQSKMKSAIYKNLEEEQELSPEKLADQLFDDNLTARLTFVDELKDAIPGSVQVSDIDHSRQIKKLENQKLSLSNGIELIVPNNVYQDAESVEFIQNPDGTYSILIKNIQDIQNK

SEQ ID NO: 6605 - protein, 1254 aa, Streptococcus agalactiae
ATGATTTTTGATAAAGACAATTTTAAAGAATTTGACCAAGAACTTTGGCAGGCTATTCATGATGAGGAAATTCGCCAACAAAATAATATTGAATTAATTGCATCAGAAAACGTTGTTTCAAAAGCTGTTATGGCAGCACAAGGTTCTGTTTTGACAAATAAATATGCCGAAGGGTATCCTAGTCATCGTTATTATGGAGGAACAGATTGTGTTGATGTAGTTGAAAGTTTAGCTATAGAACGAGCTAAGACGTTATTTAATGCTGAGTTTGCTAATGTTCAACCACATTCTGGTAGTCAGGCTAATGCAGCAGCTTACATGGCTTTAATCGAGCCGGGAGATACTGTCTTAGGGATGGACTTAGCAGCAGGTGGGCACTTAACACATGGCGCTTCAGTTAGCTTCTCAGGAAAAACTTATCATTTTGTTTCTTACTCTGTTGATCCTAAGACGGAGATGCTAGACTATGATAACATTTTGAAAATAGCACAGGAAACGCAGCCTAAATTAATTGTTGCAGGGGCGTCGGCTTATTCTCGCATTATTGATTTTGAAAAATTTCGTCAAATAGCAGACGCAGTAGATGCTTACTTAATGGTTGATATGGCTCACATTGCAGGTTTAGTTGCTTCTGGTCATCACCCTAGTCCTATTCCTTATGCTCATGTAACGACAACGACAACACATAAGACTCTACGTGGACCTAGAGGTGGTTTGATTTTAACCAATGATGAAGCAATTGCTAAAAAAATTAATTCTGCAGTCTTTCCAGGACTCCAAGGTGGACCATTAGAACATGTAATTGCTGCAAAAGCTGTAGCTTTGAAAGAAGCCCTAGATCCTTCCTTTAAAATATACGGTGAGGATATTATTAAAAATGCTCAAGCCATGGCTAAAGTTTTTAAAGAAGATGATGACTTTCATTTGATTTCTGATGGTACTGATAATCATTTGTTCTTAGTAGACGTCACAAAAGTTATTGAGAATGGCAAAAAGGCACAAAATGTTCTTGAAGAAGTCAATATCACCCTTAACAAGAACTCTATACCGTTTGAGCGACTATCACCATTTAAAACATCAGGTATTCGAATTGGTACTCCAGCAATTACTAGTCGAGGAATGGGAGTTGAAGAATCTCGAAGAATCGCTGAATTAATGATTAAGGCACTCAAAAATCATGAAAATCAAGATGTCCTCACAGAAGTTCGTCAAGAAATTAAATCATTAACGGACGCTTTCCCTTTGTATGAGAAT

SEQ ID NO: 6606 - protein, 418 aa, Streptococcus agalactiae
MIFDKDNFKEFDQELWQAIHDEEIRQQNNIELIASENVVSKAVMAAQGSVLTNKYAEGYPSHRYYGGTDCVDVVESLAIERAKTLFNAEFANVQPHSGSQANAAAYMALIEPGDTVLGMDLAAGGHLTHGASVSFSGKTYHFVSYSVDPKTEMLDYDNILKIAQETQPKLIVAGASAYSRIIDFEKFRQIADAVDAYLMVDMAHIAGLVASGHHPSPIPYAHVTTTTTHKTLRGPRGGLILTNDEAIAKKINSAVFPGLQGGPLEHVIAAKAVALKEALDPSFKIYGEDIIKNAQAMAKVFKEDDDFHLISDGTDNHLFLVDVTKVIENGKKAQNVLEEVNITLNKNSIPFERLSPFKTSGIRIGTPAITSRGMGVEESRRIAELMIKALKNHENQDVLTEVRQEIKSLTDAFPLYEN

SEQ ID NO: 6607 - protein, 594 aa, Streptococcus agalactiae
ATGAATGATTTGGGACAGATTTTAGAGGATCATGGCGCAGTTATTATGCCAACAGAAACGGTCTACGGAATCTTTGCCAAAGCTTTGAGTGAAGAAGCTGTGAACCACGTCTATGAGCTTAAAAAAAGGCCTCGTGATAAGGCTATGAACTTAAATATATGTGATTTTGAGACTATTTTAAAATATTCTAAAAATCAACCGACCTATTTAAAGCAATTGTACGATGCTTTTTTACCAGGACCGCTAACCATTATTTTGGAAGCTTCACAAGAAGTTCCGCATTGGATCAATTCTGGGTTATTAAGCGTAGGATTTCGGATGCCTAAACACCCTGTAACCCTTGATATGATTGCTAACCATGGTCCACTGATTGGTCCTTCTGCTAATATTTCTGGATGTGATAGTGGTCGTGTGTTCTCAGAAATTCAAAAACAGTTTAATCATCAAGTTTTAGGTATTGAAGATGATAAAGCATTGACAGGTGTGGATTCTACTATTATTGATTTGTCTGGTGATAGAGTTAAGATTTTAAGGCAAGGTGCAATCACGCAAGAGGTACTAACGGCTACGATACCTGAATTAATTTTTGAAAAT

SEQ ID NO: 6608 - protein, 198 aa, Streptococcus agalactiae; identical to SEQ ID NO: 2020

SEQ ID NO: 6609 - protein, 828 aa, Streptococcus agalactiae
ATGAATTATGCGCAGTTAATCAAGCATTACGGACAGTTATTAGAAGCTTGTGGTGAAGAAGTCGAAAATTTTATTTATGTATTAAAAGACCTAAAACAATGGTCAACAACTGATTACCTTTTAAATCAAAATAGTAGTGTGAGTGATACTGATCAGCAATTAATGGAAAATATTTTTCAACAGCTTAAAAAACATAGATCACCGCAGTATATTACAGGTAAAGCTTACTTTAGAGACCTTATTTTCTTTGTTGATGAACGAGTTTTAATTCCAAGGCCTGAGACAGAGGAGTTGGTTGATCTAATCTTATCAGAGAATAAAGTAGAAGATTGTTCTGTTTTAGATATTGGTACAGGTAGTGGAGCAATTGCCATTTCTCTAAAAAAAGAACGCCCCTCTTGGGATGTTCTAGCTAGTGACATTTCTGTATCTGCATTAGACTTGGCAAAGGAAAATGCTAATAATTGTGATGCGGAAGTGACTTTTATAGAATCAGATGTCTTTAGTAACATTTCAGGTAAATTTGATATTATTGTGTCTAATCCTCCCTATATTTCTTACAATGACAAAGACGAGGTGGGGAAGAATGTGCTAGCTTCAGAGCCTCATAGTGCCCTTTTTGCAGACGAAGAAGGATTAGCTATTTATCGTAAAATCATTGAAAACTCAAGAGAATATTTGCAACCTAGAGGTAAATTATATTTTGAAATAGGTTACAAACAAGGTGATGATTTACGAAGTTTATTGAAAAGATATTTTCCAAACAATCGTTGCAGAGTTTTGAAAGATATATTTGGTAAAGATAGAATGGTGGTATTAGATAATGAA

SEQ ID NO: 6610 - protein, 276 aa, Streptococcus agalactiae; identical to SEQ ID NO: 2022

SEQ ID NO: 6611 - protein, 1077 aa, Streptococcus agalactiae
ATGAATATTTATGATCAATTGCAGGCAGTTGAAGATCGTTATGAAGAGTTAGGTGAGTTACTTAGTGATCCAGATGTTGTTTCAGATACAAAGCGATTTATGGAATTATCACGTGAAGAAGCTAATACTCGAGAAACTGTCACAGCTTATAGAGAATATAAGCAAGTCATTCAAAATATTTCAGATGCTGAAGAAATGATCAAGGATGCTTCTGGTGATGCTGAATTGGAAGAAATGGCTAAAGAAGAACTTAAAGAATCAAAAGCAGCTAAAGAAGAGTATGAAGAAAGATTAAAAATCCTTCTATTACCTAAAGATCCTAACGATGATAAAAACATTATTTTAGAAATTCGTGGTGCTGCTGGTGGCGATGAAGCAGCGCTTTTTGCTGGTGATCTTTTAACAATGTATCAAAAATATGCTGAAACTCAAGGATGGCGTTTTGAAGTTATGGAATCATCCGTTAATGGTGTTGGTGGTATTAAAGAAGTGGTTGCTATGGTTTCTGGTCAGTCAGTTTATTCTAAGCTTAAATATGAATCAGGAGCTCATCGTGTTCAACGTGTTCCGGTGACAGAGAGTCAGGGTCGTGTTCATACTTCAACTGCAACTGTTTTGGTAATGCCAGAAGTTGAAGAAGTAGAATACGAAATTGATCAAAAAGATCTTCGCGTCGATATTTACCACGCGTCTGGTGCTGGTGGTCAGAACGTCAATAAAGTTGCTACTGCAGTTCGTATGGTACACATTCCTACAGGAATCAAAGTTGAAATGCAAGAAGAGCGTACTCAGCAAAAAAACCGTGATAAAGCGATGAAAATCATTCGTGCTCGTGTTGCTGACCATTTTGCGCAAATTGCTCAAGATGAACAAGATGCTGAACGTAAATCAACAGTTGGTACTGGTGATCGTTCAGAACGTATTCGCACTTATAATTTCCCACAAAATCGTGTAACAGATCATCGTATTGGTTTGACACTTCAAAAATTAGATACTATTTTATCTGGAAAAATGGATGAAGTTATTGATGCACTTGTTATGTATGATCAGACTCAAAAGTTAGAAGCCTTAAATAAA

SEQ ID NO: 6612 - protein, 359 aa, Streptococcus agalactiae; identical to SEQ ID NO: 2024

SEQ ID NO: 6613 - protein, 537 aa, Streptococcus agalactiae
ATGAATTCTGGTAAAACCATTGAAATTTTAAAAGTTGCTCATAACTATGAAGAACAAGGAAAACCTGTGGTTATTATGACAAGCGCCTTGGACACTCGAGATGAATTTGGAGTCGTTTCAAGTCGTATTGGAATGCGCCGTGAAGCAGTTCCAATTTCAGATGATATGGACATTTTCTCCTATATTCAGAATTTACCACAAAAGCCTTATTGTGTTTTAATTGATGAATGTCAATTTTTGAGTAAGAAAAACGTCTACGATTTAGCTAGAGTAGTAGATGACTTAGATGTACCAGTCATGGCTTTTGGTTTGAAAAATGATTTCCAAAACAATCTTTTTGAAGGTTCAAAACATTTGCTATTATTGGCCGATAAGATTGATGAAATCAAAACAATTTGCCAATACTGTAGTAAGAAAGCAACCATGGTTTTAAGGACAGAAAACGGAAAACCTGTCTATGAAGGTGATCAGATACAAATTGGTGGTAATGAAACATATATCCCAGTTTGTCGAAAACATTATTTTAATCCAGATATT

SEQ ID NO: 6614 - protein, 179 aa, Streptococcus agalactiae
MNSGKTIEILKVAHNYEEQGKPVVIMTSALDTRDEFGVVSSRIGMRREAVPISDDMDIFSYIQNLPQKPYCVLIDECQFLSKKNVYDLARVVDDLDVPVMAFGLKNDFQNNLFEGSKHLLLLADKIDEIKTICQYCSKKATMVLRTENGKPVYEGDQIQIGGNETYIPVCRKHYFNPDI

SEQ ID NO: 6615 - protein, 180 aa, Streptococcus agalactiae
ATGCCATTTGTAAAAATTGACTTGTTTGAGGGACGCTCACAAGAACAAAAAAATGAATTAGCTCGCGAGGTTACTGAAGTAGTATCACGCATTGCAAAAGCACCTAAAGAAAATATCCATGTTTTTATCAACGATATGCCTGAAGGAACCTACTATCCTCAAGGTGAACTTAAGAAAAAA

SEQ ID NO: 6616 - protein, 60 aa, Streptococcus agalactiae; identical to SEQ ID NO: 2028

SEQ ID NO: 6617 - protein, 909 aa, Streptococcus agalactiae
ATGGGAACGACTATCGATATTCAAATTAATTCTAAAAATGCTCAAAAACAAATCCAAGAGGTCATAGAACTCTTGGAGCTCTACAAAAATCGCTTTAGTGCAAATGACTTTAATTCAGAGTTAATGGCTATAAATAACAACGCTGGTATCAAGCCTATTCAAGTACATCCAGACCTCTTTGAATTAATCACAATTGGGAAAGAACACAGCTTAGCTAGGCCTAGTAACCTAAATATTGCTATTGGTCCTTTAGTGCAAACTTGGAGAATTGGATTTTCAGATGCTAAACTACCTAGCCCTAGTGAAATATCAGAAGCTATGATTTTATCTGACCCAACTCATATACTTCTAGATTCAAAAAATCAATCTGTTTTTTTAAATCAGATAGGAATGAAAATTGATTTGGGTGCACTTGCAAAAGGATATATTGCTGACAAAATTATGACCTATCTCAAAAATGAGATGATTGATTCTGCTATCATTAATTTAGGCGGAAACGTTTTAGTTCACGGAGATAATCCTAATCGTTCAGAAGGGTATTGGGTTATCGGCATTCAACATCCGAAAAAGAAACGGGGACAAAATATTGGAGCTGTCAAAATTAAAAACCAATCTGTTGTAACCTCAGGTACTTATGAACGCCGTCTGATTATTGACGATAAGGAATACCATCATATTTTTGATCGACAGACTGGTTATCCGATACAAACAGAGATGGCTAGCATTTCTATTGTTTCTAAACAATCCGTCGACTGTGAAATCTGGACCACAAGGTTGTTTGGCTTATCCATTAAAGAGGCTCTTGATATTTTAAACGCTGTTTCCTACATTGAAGGCATTATCATCACTAAAGATGACCGTATCTATTTATCTGATGGCTTAAAACATCATTTTCAACTATTTTATCAT

SEQ ID NO: 6618 - protein, 303 aa, Streptococcus agalactiae
MGTTIDIQINSKNAQKQIQEVIELLELYKNRFSANDFNSELMAINNNAGIKPIQVHPDLFELITIGKEHSLARPSNLNIAIGPLVQTWRIGFSDAKLPSPSEISEAMILSDPTHILLDSKNQSVFLNQIGMKIDLGALAKGYIADKIMTYLKNEMIDSAIINLGGNVLVHGDNPNRSEGYWVIGIQHPKKKRGQNIGAVKIKNQSVVTSGTYERRLIIDDKEYHHIFDRQTGYPIQTEMASISIVSKQSVDCEIWTTRLFGLSIKEALDILNAVSYIEGIIITKDDRIYLSDGLKHHFQLFYH

SEQ ID NO: 6619 - protein, 600 aa, Streptococcus agalactiae
ATGAAACTTATTGGCATCGTTGGAACTAACTCAAATAAATCAACAAATCGTCAATTATTACAATACATGCAACAACACTTTGCTGACAAAGCAGAAATTGAACTCATCGAAGTTAAAGACCTTCCGTTATTTAATAAACCTGCTGATAAAAATGTTCCCCAAGTAATTTTGGATATTGCTGCTAAAATTGAAGAAGCTGATGGTGTTATTATTGGTACGCCAGAATATGATCATTCTATACCTTCGGCCTTGATGAGTGTTTTAGCTTGGCTATCATATGGTATTTACCCACTTCTCAACAAACCCGTTATGATTACTGGTGCTTCATATGGAACACTTGGATCATCACGTGCACAATTACAATTACGTCAAATACTTAACGCTCCTGAACTAAAAGCAAGTGTTTTACCTGACGAATTCTTGTTATCACACTCTCTCCAAGCCTTTGATAAAGATGGCAACCTACACGATATCGAAACAAGTCAGAAGCTAGATGCTATCTTTGATGATTTTCGTCTTTTTGTTAAGATTACTGGTAAATTATCAAATGCTCGTGATTTACTTCAAAAAGAAGCAGAAAATTTTGACTGGGAAAGTTTA

SEQ ID NO: 6620 - protein, 200 aa, Streptococcus agalactiae; identical to SEQ ID NO: 2032

SEQ ID NO: 6621 - protein, 1233 aa, Streptococcus agalactiae
ATGAAATTTGTAGGTATTGTTGGCTCAAATGCAGAGCAATCATATAATCGTATGTTGCTTGAATTTATTCGCAAGAATTTTAAAACCAAATTTGAATTGGAAGTCCTTGAAATCGATGATATTCCAATGTTTAATCAAGACCAAAATTGGGAAGAAAGTTTCCAACTTCGTCTTCTTAATAATAAGATCACACGAGCTGATGGCGTTATTATTGCCACTCCTGAACATAATCATACTATTACGGCCGCTCTTAAAAGTGTGCTTGAGTGGCTCTCATTTGCTGTGCATCCACTCGAAAATAAACCTGTTATGATTGTCGGTGCTTCATATTATGATCAAGGCACATCACGTGCTCAAATACACCTTCGTAAAATCCTTGATGCTCCTGGCGTTAATGCTTACACACTTCCAGGAAATGAATTCTTATTAGGAAAAGCTAAAGAAGCCTTTGACGATAATGGAAATATTATCAATCCTGGGACTGTTCAATTTTTAGAAACTTGTCTTGATAATTTTATCAAATATGTAGGAGTTGTATCATCATTGAGAAAACCTAAAGCTATTGAATCTGAAGACCTCTACTGTCAGGGACAAATCGATACAACCATTACTGGTATCGATCCAGATGATCCTGATTGGTTAGACAAGGCAGCTGAGAAAGTTAACGCCGTTGAAGGGGATGCTTACGTTAAACTAGACAATGGTTTACTTACTGTTAACCAACTTAATATGTTTTTAAATGCTATGCCATTTGAGCTAACATATGCAGATGATAATAATCAATTTCTATATTACAATAATAATCATCCAGATCCAGATACAATGTTAGGAAAACGTGTTCGTGAACAAGTAGGAAACCGTATGGCTACAGTTCATGGTAGTTTACCACCGGCACGAATGAAAAATGTTGAATGGGTTATCGGTACTCTTCGTAATGGAAATCAAGAATATGTACGTACAGTCGTTCCTGGTACACCTCCAGAAGTTATCAATACTCACAACTATCAAGCTATGTACTACCCAGACGGATCTTATGCTGGTATTAATGAAATTATCTTTAACTTTAAACCGTGGTTAGATTGGTACCTCCAAACTACTGGACAACGTTTGGTCGGTGGAACTACTGCTGCTCCTGGAGCTTCAGCAGTTGACGCTACTTCTAGCGCTTCAACTAGCACAGGGGATGCTCCCGTGGATCAAGCCACAGATGCCACTTCTGGTGCCTCTGAACAT

SEQ ID NO: 6622 - protein, 411 aa, Streptococcus agalactiae
MKFVGIVGSNAEQSYNRMLLEFIRKNFKTKFELEVLEIDDIPMFNQDQNWEESFQLRLLNNKITRADGVIIATPEHNHTITAALKSVLEWLSFAVHPLENKPVMIVGASYYDQGTSRAQIHLRKILDAPGVNAYTLPGNEFLLGKAKEAFDDNGNIINPGTVQFLETCLDNFIKYVGVVSSLRKPKAIESEDLYCQGQIDTTITGIDPDDPDWLDKAAEKVNAVEGDAYVKLDNGLLTVNQLNMFLNAMPFELTYADDNNQFLYYNNNHPDPDTMLGKRVREQVGNRMATVHGSLPPARMKNVEWVIGTLRNGNQEYVRTVVPGTPPEVINTHNYQAMYYPDGSYAGINEIIFNFKPWLDWYLQTTGQRLVGGTTAAPGASAVDATSSASTSTGDAPVDQATDATSGASEH

SEQ ID NO: 6623 - protein, 786 aa, Streptococcus agalactiae
ATGTCACTTTTTCAAGAAAAAATTGCTTACAATTGCGCCAAAAAGGAAGCGCTTTACAAAGAGAGTTTAGGACGCTACGCCTTGAGGTCAATGCTAGCAGGGGCTTATTTGACAATGAGTACTGCTGCTGGTATCGTCGCAGCTGATACTATTGGTAAAATTTCTCCTGCTCTATCAGGTTTTGTATTTGCTTTCATCTTTAGTTTTGGACTTATTTATGTTTTAATATTTAATGGTGAATTGGCGACATCTAATATGCTTTATCTCACTGCAGGAGCCTATAATAAAAATATCTCTTGGAAAAAAGCCATGACAATTTTAATTTATTGTACTTTTTTCAACCTCGTTGGTGCTTGCATATTAGCTTGGTTGTTTAATCAATCGTACTCATTTCAGCATTTAACAAATGATAGCTTTTTAGGGCATGTCGTTGCTAAAAAGTTAAGAAAACCTAGTTCAGGAGCTTTCCTAGAAGGTATTATTGCTAATATGTTTGTGAATTTAGCTATCCTTGCTTACATGTTATTAAAAGAAGAATCGGCAAAAATGACGGTTATTTTATCTGCTATTTTTATGTTTGTTTTTCTATCAAACGAACACTTAATTGCTAATTTTGCATCCTTTATGTTAGCTGCTTTTAGCCATATCGAACATATTAAAGGTTTTACTCTTCTAAACGTTATCCGCCAATGGACACTTGTATTCTTTGGTAACTGGATAGGAGGGGGCGTTTTCATCGGCCTAGCCTATGCTTGGTTAAATAAAACAAAAACTTCTCACCATGAA

SEQ ID NO: 6624 - protein, 262 aa, Streptococcus agalactiae
MSLFQEKIAYNCAKKEALYKESLGRYALRSMLAGAYLTMSTAAGIVAADTIGKISPALSGFVFAFIFSFGLIYVLIFNGELATSNMLYLTAGAYNKNISWKKAMTILIYCTFFNLVGACILAWLFNQSYSFQHLTNDSFLGHVVAKKLRKPSSGAFLEGIIANMFVNLAILAYMLLKEESAKMTVILSAIFMFVFLSNEHLIANFASFMLAAFSHIEHIKGFTLLNVIRQWTLVFFGNWIGGGVFIGLAYAWLNKTKTSHHE

SEQ ID NO: 6625 - protein, 1272 aa, Streptococcus agalactiae
ATGAAATTTAATGAGCAAAGTAATTCGCAAGCAGCACTTCTAGGCTTGCAACACCTGTTAGCTATGTATGCAGGATCCATTCTTGTACCTATCATGATTGCTAGTGCTCTTGGTTATAATGCTAAGCAACTAACTTATCTTATTGCGACAGATATTTTTATGTGTGGGATTGCCACCTTATTACAATTACGATTAAGTAAGCACTTTGGAGTGGGCCTTCCAGTTGTATTAGGGTGTGCCTTTCAGTCTGTAGCTCCTTTATCAATTATTGGTGCACAACAAGGTTCTGGCTATATGTTTGGAGCTTTAATTGCTTCAGGAATATATGTCGTTTTAGTTGCTGGCATTTTTTCTAAAGTTGCAAATTTCTTTCCTCCAATTGTAACAGGATCAGTTATTACTACAATTGGTTTGACATTAATACCAGTTGCGATGGGAAATATGGGTGATAATGCAAAAGAACCAAGCTTACAATCTTTAACTTTATCACTAGTAACGATTGGTGTTGTTTTATTAATTAATATTTTCGCAAAAGGCTTTTTGAAGTCAATTTCAATCCTTATTGGACTCATTTCAGGTACAATTCTTGCAGCATTTATGGGCTTAGTTGATGCTTCTGTGGTAGCAGAAGCACCACTTGTACATATTCCGAAGCCATTTTATTTTGGAGCTCCTAGATTTGAATTTACTTCTATTTTAATGATGTGTATTATTGCAACAGTTTCTATGGTAGAATCAACAGGTGTTTACCTTGCGCTTTCAGATATTACAAACGATAAATTAGACAGTAAGAGACTTCGTAATGGTTACCGTTCAGAAGGATTGGCAGTATTACTTGGCGGCTTATTTAATACCTTTCCATATACCGGTTTTTCTCAAAATGTAGGATTGGTACAGATATCTGGGATACGTACGCGTAAGCCGATATATTTTACAGCTCTCTTCTTAGTTATACTTGGCTTGTTACCTAAATTTGGCGCAATGGCTCAAATGATTCCAAGTCCAGTTCTTGGTGGTGCTATGTTAGTTTTATTTGGTATGGTAGCACTTCAAGGGATGAAAATGCTTAATCAGGTTGATTTTGAGCATAATGAGCATAACTTTATCATTGCAGCCGTATCAATTGCAGCAGGAGTAGGTTTTAATGGAACAAATCTCTTCATTAGTCTTCCTAATACTTTACAAATGTTTTTGACAAATGGTATTGTTATCTCAACCCTGACAGCTGTTGTTTTAAATATCATTTTGAATGGATTGCCTAAAAAATTAATA

SEQ ID NO: 6626 - protein, 424 aa, Streptococcus agalactiae
MKFNEQSNSQAALLGLQHLLAMYAGSILVPIMIASALGYNAKQLTYLIATDIFMCGIATLLQLRLSKHFGVGLPVVLGCAFQSVAPLSIIGAQQGSGYMFGALIASGIYVVLVAGIFSKVANFFPPIVTGSVITTIGLTLIPVAMGNMGDNAKEPSLQSLTLSLVTIGVVLLINIFAKGFLKSISILIGLISGTILAAFMGLVDASVVAEAPLVHIPKPFYFGAPRFEFTSILMMCIIATVSMVESTGVYLALSDITNDKLDSKRLRNGYRSEGLAVLLGGLFNTFPYTGFSQNVGLVQISGIRTRKPIYFTALFLVILGLLPKFGAMAQMIPSPVLGGAMLVLFGMVALQGMKMLNQVDFEHNEHNFIIAAVSIAAGVGFNGTNLFISLPNTLQMFLTNGIVISTLTAVVLNIILNGLPKKLI

SEQ ID NO: 6627 - protein, 579 aa, Streptococcus agalactiae
ATGAAGTTATTGGAAGAACGTATTCTTAAAGATGGTGATGTTTTAGGTGAGAACATTTTAAAGGTTGATTCCTTTTTGACTCATCAGGTAGATTTTGAGTTAATGCAGGAAATAGGTAAAGTTTTTGCTGATAAATATAAAGAAGCCGGCATTACGAAGGTTGTTACGATTGAAGCATCTGGAATTGCGCCAGCAGTGTACGCAGCTCAAGCATTGGGCGTACCAATGATATTTGCTAAAAAAGCTAAGAACATTACTATGACTGAAGGTATCTTAACTGCTGAAGTGTATTCTTTTACAAAGCAAGTTACGAGTCAAGTTTCTATTGTGAGTCGCTTTTTATCTAACGATGATACTGTACTCATTATTGATGACTTTTTAGCAAACGGTCAAGCGGCTAAAGGATTACTTGAAATTATTGGTCAAGCTGGAGCTAAGGTTGCTGGTATCGGAATCGTTATTGAAAAATCTTTCCAAGATGGGCGTGATTTGTTAGAAAAAACAGGTGTTCCAGTTACTTCTCTTGCTCGTATTAAGGCGTTTGAAAATGGTCGAGTTGTTTTTGCGGAGGCTGATGCT

SEQ ID NO: 6628 - protein, 193 aa, Streptococcus agalactiae; identical to SEQ ID NO: 2040

SEQ ID NO: 6629 - protein, 981 aa, Streptococcus agalactiae
ATGTTTAACGATATTCCTGTTTTTGATTATGAAGATATTCAATTAATACCAAACAAGTGTATTATATCTAGCCGCTCACAAGCTGACACAAGTGTCAAACTTGGAAACTATACCTTTAAACTTCCAGTAATCCCTGCTAATATGCAGACTATTATTGATGAAGAGGTAGCTGAAACATTAGCGTGTGAAGGTTATTTTTATATTATGCACCGTTTTAATGAAGAAGAAAGAAAACCTTTTATCAAGCGTATGCATGATAAAGGTTTAATTGCATCGATTTCGGTTGGGGTCAAAGACTATGAATATGATTTTGTGACAAGTCTGAAAGAAGATGCTCCTGAGTTTATCACTATTGATATTGCACATGGCCATTCTAACAGTGTTATAGAGATGATCCAACACATTAAACAAGAGCTTCCAGGAACTTTCGTTATTGCTGGAAATGTAGGAACGCCTGAAGCTGTTAGAGAATTGGAAAATGCAGGTGCAGATGCAACTAAAGTTGGTATTGGACCTGGTAAAGTTTGTATTACTAAAGTCAAGACAGGTTTTGGTACTGGAGGTTGGCAATTAGCTGCCTTACGTTGGTGTTCTAAAGCTGCTCGCAAGCCAATTATTGCTGATGGTGGTATTCGAACACATGGGGATATTGCAAAATCTATCCGCTTTGGTGCTAGTATGGTAATGATTGGTTCGCTGTTTGCTGGTCACCTTGAAAGTCCTGGAAAACTTGTGGAAGTAGAAGGACAGCAATTTAAAGAATACTATGGCTCAGCTTCTGAATATCAAAAGGGAGAACATAAAAATGTTGAAGGTAAGAAAATTCTATTACCTGTTAAAGGGCGACTAGAGGATACTTTGACAGAAATGCAACAAGATTTGCAAAGTTCTATTTCTTACGCAGGTGGAAAAGAATTGGATAGCTTGAGACACGTTGATTACGTTATTGTTAAAAATTCTATTTGGAATGGTGATTCCATT

SEQ ID NO: 6630 - protein, 327 aa, Streptococcus agalactiae
MFNDIPVFDYEDIQLIPNKCIISSRSQADTSVKLGNYTFKLPVIPANMQTIIDEEVAETLACEGYFYIMHRFNEEERKPFIKRMHDKGLIASISVGVKDYEYDFVTSLKEDAPEFITIDIAHGHSNSVIEMIQHIKQELPGTFVIAGNVGTPEAVRELENAGADATKVGIGPGKVCITKVKTGFGTGGWQLAALRWCSKAARKPIIADGGIRTHGDIAKSIRFGASMVMIGSLFAGHLESPGKLVEVEGQQFKEYYGSASEYQKGEHKNVEGKKILLPVKGRLEDTLTEMQQDLQSSISYAGGKELDSLRHVDYVIVKNSIWNGDSI

SEQ ID NO: 6631 - protein, 1338 aa, Streptococcus agalactiae
ATGACTAAAAAGGGATGGCGTATTATGCCTGCCATAATTACAACGGCTATATTAGGTTTTTCAGGGATTCTTATTGAAACATCTATGAATGTCACTTTTCCGCTTTTGATGAAAGAATTTGGGGTTAACCCCGCTGTTATTCAATGGGTGACAACAGGAAATTTGTTAGCTGTTGCTGTGACTGTGCCTTTGTCAGCATTTATGATTAAAAATTTATCAGAGAGACAAATTTTTACATTGGCAAATGTGCTTTTTTTATCTGGTGTTTTAATTGATAGCTTTGCCCCTAATTTAGCTATATTGTTAGTAGGGAGAGTCTTGCAAGGTGTTGGGACAGGATTAGCCCTCCCTTTATTGTTTCATATCATTCTTACACAAATCCCGATGGAGCGTAGAGGACTAATGATGGGAGTAGCTGCTATGGTCACACTTTTAGCACCGGCAGTTGGACCTACTTATGGCGGTGTTATTTCAGGAATGTTAGGATGGAAGATGATTTTTATGCTTCTGGCACCAATACTTATCATATCCACCTTTATAGGTTTGGCTTCTATTCCCAAACGTCAAGTAAGAATTAATGATAAACTCAATTTTCCTGCCTTTGTCAGTTTAGGTATTGGCTTGGCAACCCTTCTTTTAGCTATTGAAAAGGTGTCTATTTTTTACTTATTAGTAGCTATTGTTAGTTTTGTTATTTTTTACTATTTAAATAAACAGCTAGAATTTTTGAATTTGAATGTTTTTAAAGATAAAGATTTCTCAATCTTATTGTATGGCGTACTGGCTTTTCAAATGATTCCTCTAGCACTTTCGTTCTTATTACCTAACCTCTTGCAACTTGTTTTACATCAAACTTCAACCAAAGCTGGTTTGTTTATGTTTCCAGGTGCAATAGCAGTAGTTTTTTTATCCCCTTTTGCAGGTTATCTCCTGGATAAAATTGGTGCATTTAAGCCAATTATGATAGGTATCTCCCTTTCTTTGATAGGTTTAATTGGTACAGCTATATTCATTCCTGCGAAGTCTGTTGTAGTACTTTTAGCCTTTGATATTCTTACTAAAATTGGTATGGGGATTGGAGCAAGTAATATGGTTACGACTGCTTTAACAAAACTAAAGCCAACACAATCAGCGGATGGTAATAGTATCTTGAATACACTACAACAATTTGCGGGAGCTTTTGCAACCGCAGTAGCCTCACAAATTTTTACCATCGGACAAGTAGCTATTCCGAAAAATGGAGCTATAATTGGTAGTCAATTTGCAGTTCTATTCGTTATCGTTGTTGTTATCTTAGCTATTGTAGGATTAACTTATCTTCGAAAAAGAAAAGCAATA

SEQ ID NO: 6632 - protein, 446 aa, Streptococcus agalactiae
MTKKGWRIMPAIITTAILGFSGILIETSMNVTFPLLMKEFGVNPAVIQWVTTGNLLAVAVTVPLSAFMIKNLSERQIFTLANVLFLSGVLIDSFAPNLAILLVGRVLQGVGTGLALPLLFHIILTQIPMERRGLMMGVAAMVTLLAPAVGPTYGGVISGMLGWKMIFMLLAPILIISTFIGLASIPKRQVRINDKLNFPAFVSLGIGLATLLLAIEKVSIFYLLVAIVSFVIFYYLNKQLEFLNLNVFKDKDFSILLYGVLAFQMIPLALSFLLPNLLQLVLHQTSTKAGLFMFPGAIAVVFLSPFAGYLLDKIGAFKPIMIGISLSLIGLIGTAIFIPAKSVVVLLAFDILTKIGMGIGASNMVTTALTKLKPTQSADGNSILNTLQQFAGAFATAVASQIFTIGQVAIPKNGAIIGSQFAVLFVIVVVILAIVGLTYLRKRKAI

SEQ ID NO: 6633 - protein, 690 aa, Streptococcus agalactiae
ATGCTAATACCCAAGAAAATAGTGGCTTTTGCCTCAAATGAATCTGAAAATAATTTCTTTATTACGTTAAAGACTTACTTTAATTATTTGTTTTCTATACAAATCATTACAGATATTTCAACTCTCAATCATGCAGATTTTGACGGTAGCTTTGCATTCCATGATATAGAAACTAGCATACCTCATCTGGTAATTGACTCCAACTACTTAGCGATTAGTCAGACTAACTCAAAAACAGAGGCTAACGATATTAAAACGTTCTCGGAACTCTCCAAAACAATGACCGAGTTTCACTATATGCTAAATTTTGACTTATTTAACCATCTCCCATATCGTTTTAGATTGCATAATAAGGACGGTCAAACAATTTATTCGAACCATAAACCTGAAGATCCTTTTGATATTTATCCTGAAGAAGAATATCCTATAGACAAATGGGTTCAAAACAGCCTAATAGAGAAAAAAGCGAAAGAGCTACATTTACTCTTACCTAGCGCATCACAAGATTATATTCTAGTACAATCTTATAAACGCTTAGAAAATGATAGTGGGCAACTCGTTGGTTATATTGAACATGTTCATAATATTAAACCACTGCTAGAGGGTTATTTAAAAGAATCCGGTCAAGCTATCGTTGGATGGTCTGATGTCACGTCTGGTGCTTCTATCTCTAACGATGATTTTGAACTA

SEQ ID NO: 6634 - protein, 230 aa, Streptococcus agalactiae
MLIPKKIVAFASNESENNFFITLKTYFNYLFSIQIITDISTLNHADFDGSFAFHDIETSIPHLVIDSNYLAISQTNSKTEANDIKTFSELSKTMTEFHYMLNFDLFNHLPYRFRLHNKDGQTIYSNHKPEDPFDIYPEEEYPIDKWVQNSLIEKKAKELHLLLPSASQDYILVQSYKRLENDSGQLVGYIEHVHNIKPLLEGYLKESGQAIVGWSDVTSGASISNDDFEL

SEQ ID NO: 6635 - protein, 1995 aa, Streptococcus agalactiae
ATGCAACATGTCAATCATTCTTCTTTTGATAAAGCATCAAAAGCAGGATTTATTATTGCTTTAGGCATTGTTATGGAGATATTGGTACAAGCCCACTCTATACGATGCAATCATTGGTTGAAAACCAAGGTGGTATTTCTAGTGTCACAGAATCGTTTATCTTAGGTTCTATATCTTTAATCATATGGACCTTGACACTTATTACAACTATCAAGTATGTGCTTGTAGCTTTAAAGGCGGATAATCATCACGAAGGTGGTATTTTTTCTTTATATACCCTTGTTAGAAAAATGACACCTTGGTTAATTGTGCCGGCTGTTATTGGAGGTGCAACCTTGTTGTCAGATGGAGCTTTGACGCCAGCTGTAACCGTAACTTCAGCCGTTGAAGGATTAAAAGTAGTTCCTAGTTTGCAGCATATTTTCCAGAATCAGAGTAACGTTATTTTTGCGACCTTGTTTATTTTACTGTTACTTTTTGCCATCCAAAGGTTTGGAACGGGTGTTATTGGGAAATTATTTGGGCCAATTATGTTTATATGGTTTGCCTTTTTAGGTATTAGCGGTCTCCTTAATAGTTTTGCCCATCCAGAAGTTTTCAAAGCAATTAATCCATACTACGGTTTAAAATTGTTATTTAGTCCAGAGAATCATAAAGGTATTTTTATTTTAGGATCTATTTTCCTGGCGACAACGGGGGCAGAAGCACTATACTCTGACTTAGGTCATGTTGGGCGTGGAAATATACATGTTTCATGGCCGTTTGTTAAGGTTGCCATTATACTTTCTTATTGTGGGCAAGGGGCATGGATTTTAGCTAATAAGAACGCAGGAAATGAATTGAATCCCTTTTTTGCTAGTATTCCTTCGCAATTTACAATGCATGTCGTTATTTTAGCTACTTTGGCAGCTATCATCGCTTCACAGGCACTGATTTCTGGATCATTTACCTTAGTTTCTGAAGCTATGCGACTAAAAATATTCCCACAATTTCGTTCAACTTATCCTGGTGACAATATTGGTCAAACCTACATACCTGTTATTAATTGGTTCTTATTTGCCATTACAACCTCTATTGTTTTGCTTTTTAAGACTTCAGCGCACATGGAAGCAGCATATGGATTAGCGATAACAATTACGATGCTAATGACAACTATTTTACTGTCTTTCTTTTTAATTCAAAAAGGAGTAAAAAGAGGTTTAGTCTTATTGATGATGATTTTCTTTGGTATTTTAGAGGGAATCTTCTTCCTTGCTTCAGCTGTTAAATTTATGCATGGAGGCTATGTTGTTGTTATTATAGCAGTAGCAATTATATTCATCATGACTATCTGGTATAAAGGTAGTAAAATTGTTTCGCGTTATGTTAAGTTGTTGGATTTAAAAGATTACATCGGACAATTAGATAAACTTAGACATGATCATCGTTATCCGATTTATCATACTAACGTTGTTTATTTGACAAATCGTATGGAAGGAGACATGTGATAAGTCTATCATGTATTCTATCCTTGATAAGCGCCCTAAAAAAGCACAAGTTTATTGGTTTGTAAACATTAAGGTCACTGATGAACCTTATACAGCTGAGTATAAAGTTGACATGATGGGAACAGACTTCATTGTGAAGGTAGAACTTTACCTTGGATTTAAGATGCGTCAGACTGTGTCACGCTATCTTCGTACGATTGTAGAAGAATTACTTGAAAGTGGACGTCTGCCTAAACAAGGAAAGACATACAGCGTTAGACCTGATAGTAAAGTAGGAGATTTTAGGTTTATTGTCCTTGATGAACGTTTCTCAAGTAGTCAAAACCTAAAACCTGGTGAACGATTTGTTATGCTAATGAAATCATCTATAAAGCATTGGACAGCAACACCAATACGATGGTTTGGTCTACAATTTTCCGAAGTTACAACAGAAGTAGTTCCTTTGATTTTTACAGCTAATCGAGGTCTACCAATTAAAGAAAAAATTGAACTTACAACAACTGGAGAT

SEQ ID NO: 6636 - protein, 666 aa, Streptococcus agalactiae
  VARIANT 24, 496: Xaa = Any Amino Acid
MQHVNHSSFDKASKAGFIIALGIXYGDIGTSPLYTMQSLVENQGGISSVTESFILGSISLIIWTLTLITTIKYVLVALKADNHHEGGIFSLYTLVRKMTPWLIVPAVIGGATLLSDGALTPAVTVTSAVEGLKVVPSLQHIFQNQSNVIFATLFILLLLFAIQRFGTGVIGKLFGPIMFIWFAFLGISGLLNSFAHPEVFKAINPYYGLKLLFSPENHKGIFILGSIFLATTGAEALYSDLGHVGRGNIHVSWPFVKVAIILSYCGQGAWILANKNAGNELNPFFASIPSQFTMHVVILATLAAIIASQALISGSFTLVSEAMRLKIFPQFRSTYPGDNIGQTYIPVINWFLFAITTSIVLLFKTSAHMEAAYGLAITITMLMTTILLSFFLIQKGVKRGLVLLMMIFFGILEGIFFLASAVKFMHGGYVVVIIAVAIIFIMTIWYKGSKIVSRYVKLLDLKDYIGQLDKLRHDHRYPIYHTNVVYLTNRMEGDMXDKSIMYSILDKRPKKAQVYWFVNIKVTDEPYTAEYKVDMMGTDFIVKVELYLGFKMRQTVSRYLRTIVEELLESGRLPKQGKTYSVRPDSKVGDFRFIVLDERFSSSQNLKPGERFVMLMKSSIKHWTATPIRWFGLQFSEVTTEVVPLIFTANRGLPIKEKIELTTTGD

SEQ ID NO: 6637 - protein, 588 aa, Streptococcus agalactiae
ATGGATATTACAAGTAGAGAATCGGTTGACAAAGCTTTAGAAAGTCTGCCTAAAAATTTGCAATCAATTGATTTGTTGGTTAATAATGCAGGCTTAGCACTTGGATTGGATAAATCATATGAAGCTGATTTTGGAGATTGGATGACTATGATTAATACTAACGTTGTAGGATTAATTTACTTGACACGATGCATTTTACCGAAAATGGTAGAAGTTAATAGAGGGTTAATTATCAATTTGGGATCAACTGCAGGAACAATTCCTTATCCAGGAGCTAATGTCTATGGCGCATCAAAAGCTTTTGTAAAACAATTTTCTCTCAACTTGCGTGCCGATTTAGCTGGAACTAAAATCAGAGTTACTAACCTAGAACCCGGTTTATGTGAAGGGACAGAATTTTCAACTGTACGTTTCAAAGGAGATCATAAAAGAGTTGAAAAACTTTATGAAGGTGCGCATGCAATTCAAGCAGAGGATATTGCTAATACCGTGTCATGGGTTGCTAGCCAACCAGAACACATTAATATTAACCGCATAGAAATAATGCCAGTCAGTCAAACTTATGGGCCTCAACCTGTTTATCGTGAT

SEQ ID NO: 6638 - protein, 196 aa, Streptococcus agalactiae
MDITSRESVDKALESLPKNLQSIDLLVNNAGLALGLDKSYEADFGDWMTMINTNVVGLIYLTRCILPKMVEVNRGLIINLGSTAGTIPYPGANVYGASKAFVKQFSLNLRADLAGTKIRVTNLEPGLCEGTEFSTVRFKGDHKRVEKLYEGAHAIQAEDIANTVSWVASQPEHININRIEIMPVSQTYGPQPVYRD

SEQ ID NO: 6639 - protein, 387 aa, Streptococcus agalactiae
ATGTCACTTTTTCAAGAAAAAATTGCTTACAATTGCGCCAAAAAGGAAGCGCTTTACAAAGAGAGTTTAGGACGCTACGCCTTGAGGTCAATGCTAGCAGGGGCTTATTTGACAATCCTGATCCTCTTTGGTTTAACCACTTACTTAGAAAAAAAGAGTAGTTCAACACCTAACTCAGATAAGTTAGTTATTTATAACTGTGGAGACTATATTGATCCAGCCTTATTAAAAAAATTTACAAAAGAAACTGGAATTGAAGTACAATACGAAACGTTTGACTCTAATGAGGCTATGCACACCAAAATTAAGCAGGGTGGGACGACATATGATATTGCTGTACCTAGTGATTATATGATTGACAAAATGATAAAAGNNNNNTTAATTAAT

SEQ ID NO: 6640 - protein, 129 aa, Streptococcus agalactiae
  VARIANT 125, 126: Xaa = Any Amino Acid
MSLFQEKIAYNCAKKEALYKESLGRYALRSMLAGAYLTILILFGLTTYLEKKSSSTPNSDKLVIYNCGDYIDPALLKKFTKETGIEVQYETFDSNEAMHTKIKQGGTTYDIAVPSDYMIDKMIKXXLIN

SEQ ID NO: 6641 - protein, 213 aa, Streptococcus agalactiae
ATGTTTGTTTTTCTATCAAACGAACACTTAATTGCTAATTTTGCATCCTTTATGTTAGCTGCTTTTAGCCATATCGAACATATTAAAGGTTTTACTCTTCTAAACGTTATCCGCCAATGGACACTTGTATTCTTTGGTAACTGGATAGGAGGGGGCGTTTTCATCGGCCTAGCCTATGCTTGGTTAAATAAAACAAAAACTTCTCACCATGAA

SEQ ID NO: 6642 - protein, 71 aa, Streptococcus agalactiae
MFVFLSNEHLIANFASFMLAAFSHIEHIKGFTLLNVIRQWTLVFFGNWIGGGVFIGLAYAWLNKTKTSHHE

SEQ ID NO: 6643 - protein, 210 aa, Streptococcus agalactiae
ATGCTTAATCAGGTTGATTTTGAGCATAATGAGCATAACTTTATCATTGCAGCCGTATCAATTGCAGCAGGAGTAGGTTTTAATGGAACAAATCTCTTCATTAGTCTTCCTAATACTTTACAAATGTTTTTGACAAATGGTATTGTTATCTCAACCCTGACAGCTGTTGTTTTAAATATCATTTTGAATGGATTGCCTAAAAAATTAATA

SEQ ID NO: 6644 - protein, 70 aa, Streptococcus agalactiae
MLNQVDFEHNEHNFIIAAVSIAAGVGFNGTNLFISLPNTLQMFLTNGIVISTLTAVVLNIILNGLPKKLI

SEQ ID NO: 6645 - protein, 141 aa, Streptococcus agalactiae
ATGGGCACGAGTGGTATAGGAACACTATTTATGACTATCTTTTCATTTGCCTTATCAAATGTTAGCTTTATTGTTATAGGATGTGCCATTGCTATATTGGGAGGATTAGGATTTAGCTATAGTAAAAAACAATTCAAGGGA

SEQ ID NO: 6646 - protein, 47 aa, Streptococcus agalactiae
MGTSGIGTLFMTIFSFALSNVSFIVIGCAIAILGGLGFSYSKKQFKG

SEQ ID NO: 6647 - protein, 986 aa, Streptococcus agalactiae
ATGCGTTCCTTATTTGGTGGTTTAAGAGAAAAAGTTGCAAGTGATTATGTTAAGATTGTTTTCCCTGAGGGAAGCGATGAACGTGTATTACGTGCAGCAGCTCGTTTGAAATTTGAAGGTCTTGTTGATCCTGTTATTTTAGGTAAGGCTGACGAAGTTCACGATTCTTTGGCAAGACTTGGTTTTGTTGATCAAGATTATAGCGTTATTGACCCTGAACAATACGAAAAATTTGAAGAGATGAAAGAAGCTTTTGTTGAGATTCGTAAAGGCAAAGCTACTATGGAAGATGCAGATCGTCTTTTGAAGGATGTTAACTATTTTGGGGTTATGTTAGTAAAACTTGGTTTGGCAGATGGTATGGTATCAGGGGCCATTCATTCAACAGCTGATACTGTACGTCCTGCTCTTCAAATTATTAAAACAAAACCAGGAATTTCACGCACTTCAGGTGTATTCTTGATGAACCGTGAAAATACACAAGAACGTTATATTTTTGCTGACTGTGCTATTAACATTGATCCTAATGCACAAGAGCTAGCAGAAATTGCAGTAAATACTGCGGATACAGCTAAAATATTTGATATTGATCCCAAGATTGCTATGCTTAGTTTTTCAACAAAAGGAAGTGCAAAAGCGCCTCAAGCTGAAAAAGTTCAAGAAGCAGCTAAAATTGCCAAAGATTTATCTCCCGAATTAGCTGTTGATGGAGAATTACAATTTGATGCAGCTTTTGTTCCGGAAACTGCAGAAATTAAAGCTCCTAATAGTGATGTTGCTGGAAAAGCAAATGTTTTTATTTTCCCAGACCTTCAATCAGGAAATATTGGCTATAAAATTGCACAACGTTTGGGTATGTTTGAAGCATCGGACCGATCTTACAAGGATTGAATGCTCCAGTAATGATTTATCACGTGGATCAAGTGCTGAAGATATTTACAAACTTGCTATCATTACAGCTGCTCAAGCTATTGATGAAAATCAAA

SEQ ID NO: 6648 - protein, 330 aa, Streptococcus agalactiae
MRSLFGGLREKVASDYVKIVFPEGSDERVLRAAARLKFEGLVDPVILGKADEVHDSLARLGFVDQDYSVIDPEQYEKFEEMKEAFVEIRKGKATMEDADRLLKDVNYFGVMLVKLGLADGMVSGAIHSTADTVRPALQIIKTKPGISRTSGVFLMNRENTQERYIFADCAINIDPNAQELAEIAVNTADTAKIFDIDPKIAMLSFSTKGSAKAPQAEKVQEAAKIAKDLSPELAVDGELQFDAAFVPETAEIKAPNSDVAGKANVFIFPDLQSGNIGYKIAQRLGMFEAIGPILQGLNAPVNDLSRGSSAEDIYKLAIITAAQAIDEKSK

SEQ ID NO: 6649 - protein, 882 aa, Streptococcus agalactiae
TTGAAATTTGAATACATAGCAGAAGAAAGGTGCAAAGTTAAAACACTTTTGAAAAGTCATGATGTTTCAAGGGGGTTATTAGCAAAGATTAAGTACAGAGGTGGTAAGATTTTTGTCAATGGTGAAGAGCAGAACGCTATTTTCTTATTAGAGATTGGCGATGTTGTTACGATAGATATTCCTGACGAGCCTTCTCACGAAACTTTGGAACCAGTGCCTCACGATTTAGATATTGTTTATGAGGATGATCATTTTTTGATTTTAAATAAACCTTTTGGTTTCGCTAGTATTCCTAGCTCTATTCATTCAAATACAATTGCTAATTTTATAAAACACTATTATGTGTCTAATAACTATGCCAATCAGCAGGTCCATATTGTGACCCGGTTGGATCGAGATACAAGTGGATTAATGTTATTCGCCAAGCATGGTTATGCCCATGCTCGTCTAGATAAACAACTTCAGGCTAAAGCAATTGAAAAAAGGTATTATGCATTAGTATCAGGGAGTGGTGATTTAGCAGATAGTGGTGATATTATAGCTCCTATTGCACGAGATGTTGATAGTATTATTACGAGGCGCGTCCATGAATCAGGCAAATATGCACATACTAGTTATCAAGTAGTTGCTCGTTATGGTGATGTTAGATTAGTGGATATCAAATTACATACAGGGCGTACTCATCAAATTAGAGTTCACTTTGCTCATATCGGCTTTCCTCTTTTGGGAGATGATTTGTACGGAGGACGTATGGATCTAGGAATAAACAGGCAAGCATTGCATTGTCATTCTTTGTCTTTTTACGACCCTTTTATGGGAAAAATAAATAAACAGACGCTAGACTTGACAGATGACTTTGACAGCGTTATCATGGAATTACAT

SEQ ID NO: 6650 - protein, 294 aa, Streptococcus agalactiae
MKFEYIAEERCKVKTLLKSHDVSRGLLAKIKYRGGKIFVNGEEQNAIFLLEIGDVVTIDIPDEPSHETLEPVPHDLDIVYEDDHFLILNKPFGFASIPSSIHSNTIANFIKHYYVSNNYANQQVHIVTRLDRDTSGLMLFAKHGYAHARLDKQLQAKAIEKRYYALVSGSGDLADSGDIIAPIARDVDSIITRRVHESGKYAHTSYQVVARYGDVRLVDIKLHTGRTHQIRVHFAHIGFPLLGDDLYGGRMDLGINRQALHCHSLSFYDPFMGKINKQTLDLTDDFDSVIMELH

SEQ ID NO: 6651 - protein, 830 aa, Streptococcus agalactiae
ATGACACAGATGAATTTTACAGATAGAGCAACACGTGTTGCTATAATTGCTAACGGAAAATATCAAAGCAAGCGTGTAGCCTCAAAGCTCTTCGCTGCTTTTAAACATGATCCTGATTTTTATTTATCAAAAAAGGATCCTGATATTGTCATTTCTATTGGTGGAGATGGTATGCTTTTGTCAGCTTTCCACATGTACGAAAAACAACTGGATAAAGTAAGGTTTGTCGGTGTTCATACAGGACATTTAGGATTTTATACAGACTATCGAGATTTTGAAGTTGACACATTAATTAATAATTTGAAAAATGATAAAGGTGAACAAATCTCCTATCCCATTTTGAAAGTAACTATTACCCTTGAAGATGGTCGAATTATTCGTGCGCGTGCTTTAAATGAGTCTACTATTAAGCGTATTGAAAAAACAATGGTAGCGGATGTTGTTATTAATCAAGTGGTATTTGAAAGGTTTAGGGGAGATGGCATTTTAGTTTCTACACCAACCGGTAGTACTGCTTACAATAAATCACTAGGGGGGGCAGTACTCCACCCAACGATAGAAGCCTTGCAACTAACAGAAATTTCTAGTCTTAATAATCGCGTCTATCGTACCTTGGGGTCATCGGTTATTATCCCCAAAAAAGATGCTATAGAGATAGTCCCTAAACGAGTTGGTGTCTACACAATTTCTATAGATAACAAAACAGTCCTTACAAAATGTTACCAAAATAGAATATAGTATTGACGAAAAAAGTATTAACTTTGTTTCAACTCCAAGTCACACTAGCTTGGGAACGTGTTAACGATGCTTTTATCGGAGAACCTGAACAT

SEQ ID NO: 6652 - protein, 278 aa, Streptococcus agalactiae
  VARIANT 265: Xaa = Any Amino Acid
MTQMNFTDRATRVAIIANGKYQSKRVASKLFAAFKHDPDFYLSKKDPDIVISIGGDGMLLSAFHMYEKQLDKVRFVGVHTGHLGFYTDYRDFEVDTLINNLKNDKGEQISYPILKVTITLEDGRIIRARALNESTIKRIEKTMVADVVINQVVFERFRGDGILVSTPTGSTAYNKSLGGAVLHPTIEALQLTEISSLNNRVYRTLGSSVIIPKKDAIEIVPKRVGVYTISIDNKTVHYKNVTKIEYSIDEKSINFVSTPSHTSFXERVNDAFIGEPEH

SEQ ID NO: 6653 - protein, 669 aa, Streptococcus agalactiae
ATGTCAATGGATTGGGAAACATTTCTAGACCCTTATATTCAAACGGTTGGTGAATTAAAAATAAAGCTTCGTGGTATTCGTAAACAATTTAGAAAGCAAAATCGTCACTCTCCAATAGAATTTGTTACTGGACGCGTAAAGTCGGTTGAAAGTATTCAAGAAAAGATGGTTTTACGTGGTATTTCAGAAGAAAATCTTGCTCAGGACTTGCAAGATATTGCAGGTCTTCGTATCATGGTACAATTTGTAGATGACGTTGATGAAGTCCTTGCCTTATTGAGAAAACGTCATGACATGACAGTGGTTCAGGAGCGAGACTATATTACCCATATGAAATCTAGTGGATATCGTTCATATCATGTCGTTGTAGAGTATCCTGTAGACACAATAGATGGACAAAAGAAAGTTTTAGCAGAAATACAAATCAGAACTCTGGCTATGAATTTTTGGGCAACCATCGAACATTCATTAAATTACAAATATCAGGGGGACTTCCCTGAAGAAATTAAACAAAGACTGGAGAAAACAGCAAAAATCGCTTTAGAATTGGATGAAGAAATGCGTAAGATTCGCGAAGATATTCGTGAAGCACAGCTTTTATTTGATCCTTTAAATCGAAAATTGAGCGATGGTGTAGGAAATAGTGATGACACAGATGAATTTTACAGA

SEQ ID NO: 6654 - protein, 223 aa, Streptococcus agalactiae; identical to SEQ ID NO: 2064

SEQ ID NO: 6655 - protein, 570 aa, Streptococcus agalactiae
ATGACACACCTAGAAATTGAATACAAAACTCTATTGAATAAAGACGAATTTAATCGTCTAACAAGCTTATTTTCTCATGTTCAACCTATTACTCAAACCAATTACTATTTTGACACAGAAACATTTGAAATGAAAGCACACCGAATGTCACTTCGCATTAGAACGTTACCTAACCGTGCCGAACTAACACTAAAAATCCCTAGAGAAGTAGGAAATTTAGAGCACAATCATGACCTTACTTTAGAAGAAGCTAAATATATCGTTAAAAATGGCCAGTTCCCTGAAGATACTGAGATTGCTTCTTTAATCCTTGAAAAGGGAGTTGATCCAACCAAATTAGCTGTCTTTGGACAACTTACAACAACAAGACGAGAGATGGAAACTTCAATCGGCTTAATGGCTCTAGACAGCAATATATATGCTGATATTAAAGATTATGAACTTGAGTTAGAAGTCAAACAACCTAAACAAGGGAAAAGAGATTTCGACCAGTTTTTAAAAGAAAATAATATTAATTTTAAATACGCCAAAAGTAAGGTGGCTAGATTCTCTGCTACTTTAAAGAATAAC

SEQ ID NO: 6656 - protein, 190 aa, Streptococcus agalactiae; identical to SEQ ID NO: 2066

SEQ ID NO: 6657 - protein, 972 aa, Streptococcus agalactiae
ATGGCAGAACAATACGCCGATAAACAAATCAAACTTTTCTCATTAACCGCTAATAGAGAAATTGCTGAAAAAATTTCCCAAGCTTCAGGAATTCCTTTGGGTAAGATGTCATCACGTCAATTCTCTGATGGCGAAATTATGATTAATATTGAGGAAACGGTGCGCGGTGACGATATCTATATCATCCAATCTACAAGCTTCCCAGTCAATGATAATCTCTGGGAATTACTCATTATGATTGACGCTTGCAAACGTGCAAGTGCTAATACTGTTAACATCGTAGTCCCTTATTTTGGTTACTCTCGTCAGGACCGCATCGCTGCATCTCGTGAACCTATTACTGCAAAATTGGTCGCTAATATGTTAGTTAAAGCTGGAGTTGATCGAGTTCTTACCCTCGACTTACATGCAGTACAAGTACAAGGGTTCTTCGATATCCCAGTTGACAATCTTTTTACTGTCCCACTATTTGCTGAACACTATAATCAACTCGGTCTCTCTGGTGAAGATGTCGTCGTTGTTAGCCCTAAAAATTCTGGAATCAAGCGTGCTCGTAGTTTGGCAGAATACCTTGACTCTCCAATTGCTATCATTGATTATGCACAAGATGATTCTGAACGTGAAGAAGGCTATATTATTGGTGAGGTAGAAGGTAAGAAAGCTATTATTATTGATGATATTTTAAATACAGGAAAAACCTTTGCCGAAGCTGCAAAAATTTTAGAACGTGGTGGAGCAACTGAGATTTATGCTGTTGCTAGTCATGGGCTTTTTGCTGGCGGCGCAGCTGATATTTTAGAGTCTGCACCAATTAGAGAAATTATCGTAACAGACTCTGTTTTATCTAAAGAGCGTATTCCTAGCAATATTAAATATCTGACAGCTAGCCATCTCATTGCAGATGCTATTATCCGTATCCATGAAAGAAAACCTTTAAGTCCATTATTTTCATATCGTTCAGATAAGAAGGAT

SEQ ID NO: 6658 - protein, 324 aa, Streptococcus agalactiae; identical to SEQ ID NO: 2068

SEQ ID NO: 6659 - protein, 1113 aa, Streptococcus agalactiae
ATGATTTATTTAGACAATGCTGCTACTACCGCTCTAACCCCATCTGTTATTGAGAAAATGACCAATGTCATGACAAGTAACTATGGTAATCCATCTAGTATACATACCTTTGGGCGTCAAGCAAATCAACTTTTACGTGAATGTCGACAAATTATTGCTGAATATCTAAATGTTAATTCACGTGAAATTATTTTCACTTCTGGGGGAACTGAGAGCAACAATACAGCTATCAAAGGGTATGCTCTTGCAAATCAGCTAAAAGGTAAACATATTATTACCTCTGAAATTGAACATCATTCAGTCCTACATACTATGACTTACTTATCAGAGCGATTTGGTTTTGATATTACTTACTTAAAACCAAACCATGGACAAATTACTGCAAAAGACGTTCAAGAAGCTTTACGAGATGATACTATTATGGTATCTCTCATGTTTGCTAATAATGAAACCGGGGACTTTTTACCAATTCAAGAGATTGGTCAGCTTCTCAGGAACCACCAAGCTGTTTTTCACGTTGATGCCGTTCAAGTCTTTAGCAAAATGGAACTTGATCCTCATTCTTTAGGAATTGACTTTTTAGCTGCTTCTGCCCATAAATTTCACGGTCCAAAAGGTGTTGGGATACTTTACTGTGCTCCCCATCACTTTGATAGTCTACTTCATGGTGGAGACCAAGAGGAAAAAAGGCGTGCTTCAACTGAAAATATAATTGGTATTGCTGGAATGTCTCAAGCTCTTACTGATGCTACGACTAACACCCTTAAAAATTGGACTCACATTAGTCAGCTGAGAACGACCTTTTTAGATGCTATTTCAGACCTTGACTTCTATCTTAATAACGGTCAAGACTGCTTACCTCATGTACTTAATATAGGTTTTCCTGGACAGAATAATGGCTTGTTATTGACACAATTAGATTTAGCTGGATTCGCAGTTTCAACAGGTTCTGCATGTACTGCAGGAACAGTCGAACCTAGCCATGTCTTAACAAGCTTGTACGGAGCCAACTCACCACGTCTAAATGAATCAATACGTATTAGTTTTTCAGAACTAAATACCCAAGAAGAAATTCTTAAATTAGCTAAAACCTTAAGAAAAATTATAGGAGAT

SEQ ID NO: 6660 - protein, 371 aa, Streptococcus agalactiae
MIYLDNAATTALTPSVIEKMTNVMTSNYGNPSSIHTFGRQANQLLRECRQIIAEYLNVNSREIIFTSGGTESNNTAIKGYALANQLKGKHIITSEIEHHSVLHTMTYLSERFGFDITYLKPNHGQITAKDVQEALRDDTIMVSLMFANNETGDFLPIQEIGQLLRNHQAVFHVDAVQVFSKMELDPHSLGIDFLAASAHKFHGPKGVGILYCAPHHFDSLLHGGDQEEKRRASTENIIGIAGMSQALTDATTNTLKNWTHISQLRTTFLDAISDLDFYLNNGQDCLPHVLNIGFPGQNNGLLLTQLDLAGFAVSTGSACTAGTVEPSHVLTSLYGANSPRLNESIRISFSELNTQEEILKLAKTLRKIIGD

SEQ ID NO: 6661 - protein, 345 aa, Streptococcus agalactiae
ATGGCATTTGAAAAAGAAATAAATCTTCCAGACTGCAATTACATTTATACTATCAGCCCGAACATTAAAAAATATACCTTACGCGATACTACATTCACTCAAAATCGCTTAGGTAATTATGAATTAGAGCGTCTCCTAGAAACAGTACCTAATTCTGGCGATGGCTTTCCTCTAAAGATTACAATCAATAAAGAACTTTCTGGTTTTAAGCTCTTAATTACTGATAAATCTGGCCTTAGAATAGTAAATATCTTTAAATCTACCGATCATAAAATTCTTCAAGACAAATTTTATTTCTTAATGGACAGCCTCGTTGAGCGTGATATCTTTACGAAAACTGCAAAA

SEQ ID NO: 6662 - protein, 115 aa, Streptococcus agalactiae
MAFEKEINLPDCNYIYTISPNIKKYTLRDTTFTQNRLGNYELERLLETVPNSGDGFPLKITINKELSGFKLLITDKSGLRIVNIFKSTDHKILQDKFYFLMDSLVERDIFTKTAK

SEQ ID NO: 6663 - protein, 630 aa, Streptococcus agalactiae
ATGGATAAGTCTATTCCTAAAGCAACTGCTAAACGTTTATCACTGTACTACCGTATTTTTAAACGTTTTAATACTGATGGCATCGAAAAAGCTAGTTCCAAACAAATTGCAGATGCCCTAGGTATCGATTCTGCTACTGTTCGACGTGATTTTTCTTATTTTGGTGAACTAGGACGCCGTGGTTTTGGTTATGATGTCAAAAAACTTATGAACTTCTTTGCAGAAATATTGAACGATCATTCTACAACAAATGTTATGTTGGTGGGATGTGGAAATATCGGTAGAGCTCTCTTGCATTATCGTTTCCACGATCGCAATAAAATGCAAATTTCAATGGCTTTTGATTTAGATAGCAATGATTTAGTTGGTAAAACAACCGAGGATGGCATTCCTGTCTACGGTATTTCGACTATCAATGACCATTTAATAGATAGTGATATTGAAACTGCTATCCTAACAGTACCTAGTACAGAAGCCCAAGAAGTTGCTGACATCTTAGTCAAAGCAGGTATAAAAGGCATCTTGAGTTTTTCTCCAGTTCATTTAACATTACCAAAAGATATCATTGTTCAGTATGTAGATTTAACAAGCGAATTACAAACTTTACTTTATTTCATGAACCAGCAGCAA

SEQ ID NO: 6664 - protein, 210 aa, Streptococcus agalactiae
MDKSIPKATAKRLSLYYRIFKRFNTDGIEKASSKQIADALGIDSATVRRDFSYFGELGRRGFGYDVKKLMNFFAEILNDHSTTNVMLVGCGNIGRALLHYRFHDRNKMQISMAFDLDSNDLVGKTTEDGIPVYGISTINDHLIDSDIETAILTVPSTEAQEVADILVKAGIKGILSFSPVHLTLPKDIIVQYVDLTSELQTLLYFMNQQQ

SEQ ID NO: 6665 - protein, 678 aa, Streptococcus agalactiae
ATGTACCATATTGAATTAAAAAAGGAAGCTTTACTACCAAGAGAACGCCTAGTTGATTTAGGCGCAGATAGATTGAGTAATCAGGAGTTATTAGCCATTCTCTTACGTACAGGTATTAAAGAAAAACCTGTTCTGGAAATTTCAACGCAAATTTTAGAAAACATAAGCAGTTTAGCAGATTTTGGTCAATTATCCTTACAGGAGTTGCAATCCATTAAAGGAATCGGTCAGGTTAAATCCGTCGAAATAAAAGCTATGCTAGAACTAGCAAAACGGATTCACAAAGCTGAATATGATCGTAAAGAGCAAATTTTAAGTAGTGAACAATTAGCGAGGAAAATGATGCTCGAATTAGGGGATAAAAAACAAGAACATTTAGTAGCTATTTATATGGATACACAAAATCGTATTATCGAACAGAGAACAATTTTTATTGGTACTGTACGTCGTTCAGTAGCAGAGCCAAGAGAAATTCTACATTATGCTTGTAAAAACATGGCAACTTCTTTGATTATCATACATAATCATCCCTCAGGTTCTCCAAAGCCCAGTGAAAGTGATTTAAGTTTCACTAAAAAAATAAAACGATCATGTGATCATCTGGGAATTGTTTGCCTAGATCACATCATCGTTGGAAAAAATAAATATTATAGTTTTCGAGAAGAAGCAGATATTTTA

SEQ ID NO: 6666 - protein, 226 aa, Streptococcus agalactiae
MYHIELKKEALLPRERLVDLGADRLSNQELLAILLRTGIKEKPVLEISTQILENISSLADFGQLSLQELQSIKGIGQVKSVEIKAMLELAKRIHKAEYDRKEQILSSEQLARKMMLELGDKKQEHLVAIYMDTQNRIIEQRTIFIGTVRRSVAEPREILHYACKNMATSLIIIHNHPSGSPKPSESDLSFTKKIKRSCDHLGIVCLDHIIVGKNKYYSFREEADIL

SEQ ID NO: 6667 - protein, 1131 aa, Streptococcus agalactiae
ATGAAATTTGAAAAACGGCAGGTCTATTATGTTGTCATAACATTTGCTATTTGCTATGCTATACAGGCTTATTGGGGAGCTGTTTCTAATATTTTAACTACGCTTCATAAGGCAATATTTCCTTTTTTGATGGGAGCTGGAATTGCCTATATTATTAATATTGTAATGTCAGTCTATGAGCGATTATATATAAAGCTTTTTAAAGGATCTAGACTATTAATGGCAATCAAGCGTAGTGTTTCTATGATTTTATCCTATGCAACTTTTATTGGTTTAATTGTCTGGCTATTTTCAATTGTCATTCCAGATTTGATTTCTAGTTTGAGTTCTTTATTGGTTATTGATACCGGAGCACTTGCTAAATTGGTTAATAATCTCAATGAAAATAAACAAATTTCTGAGGCTTTAAATTATATGGGAACAGATAAAGACTTAGTTTCTACTTTAAGTGGTTATAGCCAGCAGATTTTGAAGCAAGTTTTATCTGTTTTAACAAATTTACTAACCTCAGTTTCCTCTATTGCGGCAACACTCCTGAATGTTTTTGTTAGTTTTATTTTTTCAATTTACGTTTTGGCAAACAAGGAGCAGTTGGGACGTCAGTTTAATTTGTTAATTGATACCTATTTAGGTTCAACAGGCAAAACATTCCATTACGTTCGTCATATCCTTCATCAACGTTTCCATGGTTTTTTTGTAAGCCAAACTTTAGAAGCTATGATTTTAGGAAGTTTGACGGTTATTGGTATGTTGATCTTCCAATTTCCTTATGCTTTAACAGTTGGGGTTTTAGTTGCTTTTACAGCTCTAATACCGGTTGTGGGAGCCTACATTGGTGTTACAATCGGTTTCATCTTAATTGCTACTGAATCGCTTACTGAAGCATTCTTGTTTGTTCTTTTCTTGATCCTTTTACAACAATTTGAGGGAAATGTCATTTATCCGAAAGTTGTCGGTGGATCGATTGGACTGCCTTCTATGTGGGTTTTAATGGCTATTACTATCGGAGGTGCTTTATGGGGGATCTTAGGCATGTTACTTGCTGTTCCTGTTGCAGCTACTATCTATCAGATTGTAAAAGATCATATTATCAAGCGACAAACGCTTAGAAATCGTGCACGAACCTATCGT

SEQ ID NO: 6668 - protein, 377 aa, Streptococcus agalactiae
MKFEKRQVYYVVITFAICYAIQAYWGAVSNILTTLHKAIFPFLMGAGIAYIINIVMSVYERLYIKLFKGSRLLMAIKRSVSMILSYATFIGLIVWLFSIVIPDLISSLSSLLVIDTGALAKLVNNLNENKQISEALNYMGTDKDLVSTLSGYSQQILKQVLSVLTNLLTSVSSIAATLLNVFVSFIFSIYVLANKEQLGRQFNLLIDTYLGSTGKTFHYVRHILHQRFHGFFVSQTLEAMILGSLTVIGMLIFQFPYALTVGVLVAFTALIPVVGAYIGVTIGFILIATESLTEAFLFVLFLILLQQFEGNVIYPKVVGGSIGLPSMWVLMAITIGGALWGILGMLLAVPVAATIYQIVKDHIIKRQTLRNRARTYR

SEQ ID NO: 6669 - protein, 1434 aa, Streptococcus agalactiae
ATGGTAAAACAAGTATTTCCAAAAGGTTTTTTATGGGGCGGGGCAACTGCTGCCAATCAATGTGAAGGAGCTTACAATGTTGATGGACGTGGCCTAGCAAATGTAGATGTTGTTCCTACTGGAGAAGATCGATTTGCAATTATTTCAGGACAAAAGAAAATGTTTGATTTTGAGGAAGGATACTTTTATCCAGCAAAAGAATCAATAGATTTTTATCACCATTATAAAGAAGACCTTGCATTACTTGCAGAAATGGGTTTCAAAACCTATCGTATGTCAATAGCATGGACGCGTATTTTTCCAAAGGGTGATGAGCTATATCCAAATAAAGCTGGTCTTCGGTTTTATGAAAATATTTTTAAAGAGTGTCGTAAGTATGGTATTGAACCTTTGGTAACCATCACACATTTTGACTGTCCTATCTACCTTATTAAACATTACGGTGGGTGGCGGAGCCGTAAAATGATTGGTTTTTATGAGCGCCTTGTACGAGCTTTATTTACTCGTTTTAAGGGGTTAGTTAAATATTGGTTGACCTTTAACGAAATCAATATGATTTTACACGCTCCTTTTATGGGCGCTGGCTTATATTTTGAAGATGGTGAAAATCAAGAGCAAATTAAATATCAAGCAGCTCACCATGAGTTAGTGGCTTCGGCTATTGCAGTAAAAATTGCTCATGAAGTTGATCCAAATAATCAAATCGGATGTATGCTAGCTGCAGGTCAATACTATCCAAATACGTGTCATCCACAAGATTATTGGGCTTCGATGCAAAAAAATAGAGAAAATTATTTTTTTATTGATGTGCAAGCTCGTGGCAAATACCCTAATTATGCTAAAAAATATTTTGAGCATTTAGGTATTTCAATTCAAATGACAGCAGAAGATCTTGCTTTGTTAAGAGACTATACGGTTGATTTTATTTCATTTTCTTACTATTCAAGCCGAGTAGCTTCAGGTAATCCAACTGTCAGTGAACAGGTTCAAGAAAATATTTTCGCATCACTTAAGAATCCTTACTTGAAATCTTCTGAATGGGGATGGCAAATTGATCCGCTTGGATTACGTATTACCTTAAATGCTATCTGGGATCGTTATCAAAAACCGATGTTTATTGTTGAAAATGGACTTGGGGCAGTAGATATTCCTGATGAGAATGGTTACGTAGAAGATGATTATCGTATTGATTACCTCCGTCAGCACATTGCTGCAATGAGAGATGCTATATATGTAGATGGTGTTAATTTAATTGGCTATACTACATGGGGATGTATTGATTTAGTATCTGCAGGAACTGGTGAAATGGAAAAACGCTATGGTTTCATTTATGTTGATCGCAATAATAAAGGAGAGGGAACACTCAAGCGTTACAAGAAAAAATCGTTTTATTGGTACAAGAAGGTTATTGCAAGTAATGGCAGTCAAATAGAA

SEQ ID NO: 6670 - protein, 478 aa, Streptococcus agalactiae
MVKQVFPKGFLWGGATAANQCEGAYNVDGRGLANVDVVPTGEDRFAIISGQKKMFDFEEGYFYPAKESIDFYHHYKEDLALLAEMGFKTYRMSIAWTRIFPKGDELYPNKAGLRFYENIFKECRKYGIEPLVTITHFDCPIYLIKHYGGWRSRKMIGFYERLVRALFTRFKGLVKYWLTFNEINMILHAPFMGAGLYFEDGENQEQIKYQAAHHELVASAIAVKIAHEVDPNNQIGCMLAAGQYYPNTCHPQDYWASMQKNRENYFFIDVQARGKYPNYAKKYFEHLGISIQMTAEDLALLRDYTVDFISFSYYSSRVASGNPTVSEQVQENIFASLKNPYLKSSEWGWQIDPLGLRITLNAIWDRYQKPMFIVENGLGAVDIPDENGYVEDDYRIDYLRQHIAAMRDAIYVDGVNLIGYTTWGCIDLVSAGTGEMEKRYGFIYVDRNNKGEGTLKRYKKKSFYWYKKVIASNGSQIE

SEQ ID NO: 6671 - protein, 612 aa, Streptococcus agalactiae
ATGTTAGAAGTTATTGACAAAGCTTTAAGAGATTATCAAATGAAACGAGAACAGTTTTTTGAGATTAACAATCAGACAGTACAAGAAGGTGCCATTGTTTTCACAGGAGATTCTATCGTTGAGTTTTTTCCTTTAAAAAAACATTTAGGACGTGACTATCCTTTAGTTAATAGAGGAGTAGCAGGATCAGATACTTATTGGCTTTTAGAAAACTTGAGAACCCAAGTATGGGAACTATTACCATCCAAAGTATTTATTTTAATTGGAACAAATGATATTGGTTTAGGGCATTCACAGTCAGAAATCATAGCTAATATCACGGATATAATTGCAGAAATTCGTGCGGAATCTTATATGACAGAGATTAATATACTGAGTGTTTTACCTGTTAGTGAAGAAGATGACTATATAGAGCGTGTCAAGGTAAGAAATAATCAAGCAATAAAAGCTTTAAACAAAACCTTATCAGTAATTTCTGGCATTAATTATATTGAATTGTATGATTTATTAGTTGACGAAAAAGGTCAGCTTGCTAGCAGTTTTACAAAAGATGGTTTGCACCTAACAGATCAAGCCTATGCTAAAATTTCTGAAACGATAAAACTCCACCTT

SEQ ID NO: 6672 - protein, 204 aa, Streptococcus agalactiae
MLEVIDKALRDYQMKREQFFEINNQTVQEGAIVFTGDSIVEFFPLKKHLGRDYPLVNRGVAGSDTYWLLENLRTQVWELLPSKVFILIGTNDIGLGHSQSEIIANITDIIAEIRAESYMTEINILSVLPVSEEDDYIERVKVRNNQAIKALNKTLSVISGINYIELYDLLVDEKGQLASSFTKDGLHLTDQAYAKISETIKLHL

SEQ ID NO: 6673 - protein, 795 aa, Streptococcus agalactiae
ATGGATGGAACTTTTCTACGCTCAGATAAAACTTATGATAAAGCACGGTTTTCTTCTTTATTAACGTTGATGGAGAAGTATGATATTAAATTTGTAGCTGCTAGTGGTAATTTATACGATCAATTGTTGTTAAACTTTTTGGAATACCCTAATCGTATCGCCTACGTCGCTGAAAATGGTGGTCGTGTCATTGACCAAGATGGCACATTACTAAAAGAAACTTATTTATCTAATGATACAGTTGCAGCTGTTTTATCCTATTTATATCAGAACTATCCTGAGACACTCATCAGCTTATCTGGTGAAAAACGTTCATACCTTGAGCGAAGAACTCCTATTAATAGGCGGACTGAATTAGAATACTATATGCCTAATTTTATCTATAAAGACCATTTGCTGCCCTTAGATGATGACCGATATTTTCAAATGACACTTTGGGTAAATGAAAATCTTGTTTCTGAGATGTTGTTAGATATTAGTGAACACTTTAAAAATCATCATATCAGATTGACCTCTAGTGGTTTTGGTTGTATCGATGTCTTACCAGCTGATGTCAATAAAGCGGATGGTATCGCTATTCTCCTTGAAAAGTGGGGATTGAAACAGGATCAAGTGATGGTTTTTGGTGATGGGGGCAATGATGTGGAAATGTTGAGAGCAGCAAATATTTCTTACGCTATGTCAAATGCGCCAGAAGAAATTAAAGCTATTGCTAAATATCAAACAGTTAGTAACGATCAAGATGGTGTGTTAGAAACGATAGAGAACTTTCTTCACAAGATGAGTGATAATGAA

SEQ ID NO: 6674 - protein, 265 aa, Streptococcus agalactiae
MDGTFLRSDKTYDKARFSSLLTLMEKYDIKFVAASGNLYDQLLLNFLEYPNRIAYVAENGGRVIDQDGTLLKETYLSNDTVAAVLSYLYQNYPETLISLSGEKRSYLERRTPINRRTELEYYMPNFIYKDHLLPLDDDRYFQMTLWVNENLVSEMLLDISEHFKNHHIRLTSSGFGCIDVLPADVNKADGIAILLEKWGLKQDQVMVFGDGGNDVEMLRAANISYAMSNAPEEIKAIAKYQTVSNDQDGVLETIENFLHKMSDNE

SEQ ID NO: 6675 - protein, 285 aa, Streptococcus agalactiae
ATGAACTCACTTGATAATTTACTATCACATAATTTAGAAGATAACCGGCATTTATTACCCTACGAACACATGCATACTGAGGTTAGAAATGGTTACCCTGACATTTTATTTCACTGGCATCCGGAACTTGAAATTCATATGTCCACGAGGGGACCGCACGTTATCACATCGATTATGATTTTTTTAATAGCCAATCTGGTGATATTATCTTGATCCGTCCAAATGGTATGCATTCTATTCATCCGATTAATAAAGAGCATATCACAGATAGCATTAAATTTCACT

SEQ ID NO: 6676 - protein, 96 aa, Streptococcus agalactiae
MNSLDNLLSHNLEDNRHLLPYEHMHTEVRNGYPDILFHWHPELEISYVHEGTARYHIDYDFFNSQSGDIILIRPNGMHSIHPIEIKSISQIALNFT

SEQ ID NO: 6677 - protein, 582 aa, Streptococcus agalactiae
TTGCAGACTAGCTCTTTTAAGTTTATCCAATGTATCAAACCTAGTATGACAGGATATAATGATATCAAAAATTGTTTGTTTGATATTTTTAATATTTCAAAAGAAGAAAATCGACATTTTGAGCTACTCCTAAAAGCTAAATTAAACGAACTCTTGTATTTACTCTATTATCATCAATATGTCATTAAAAAACATACTGATGATACCTACAGAAAAAATGAGAGAATTCGTGATCTGATTGATTATATTAATAATAATTACCAGCAAAATCTTACCATTGAATTTTTAGCTGATTATATGGGGTATAGTAAGACACATTTTATGACCGTATTTAAACAGCATACTGGAACATCCTGTACAGAATTTATCATACAAGTTCGTCTTAATAAAGCTAGTGAGCATCTTATTAACTCCACTACGGCCATTATTGATATTGCCAACAGCGTTGGTTTTAATAATCTATCAAATTTTAATCGCCAATTTAAACGCTATTATCATACAACTCCTCGCCAGTACCGCAAACAATTTACCAACAAAAAAGACGGTAGTACGCTTGTCTATAGAAATATAAATACAAAAAAA

SEQ ID NO: 6678 - protein, 194 aa, Streptococcus agalactiae
MQTSSFKFIQCIKPSMTGYNDIKNCLFDIFNISKEENRHFELLLKAKLNELLYLLYYHQYVIKKHTDDTYRKNERIRDLIDYINNNYQQNLTIEFLADYMGYSKTHFMTVFKQHTGTSCTEFIIQVRLNKASEHLINSTTAIIDIANSVGFNNLSNFNRQFKRYYHTTPRQYRKQFTNKKDGSTLVYRNINTKK

SEQ ID NO: 6679 - protein, 1530 aa, Streptococcus agalactiae
ATGGAAAATCATAAAAATGAATTTCAGTTTTCACTTGAATCAATTCTGGGATTTGTTTGGAGAGGAATAGTAGTAGGCTTAATAGCAGGATTTGTTGTCAGCATATTTCGATTAGCGATTGAAAAAATTTTTTTAGTTGTTATGGAACTTTATAAAAGTGCCCATTATCAACCAATTATTTTATTAAGCATTACGGTTACTAGTATTATCGCTGCAGTGATAATAGGTTTTTTTATCAAATCTGATCCTGATATTAAAGGTTCAGGTATCCCGCATGTTGAAGGTGAACTTAAAGGAATGCTATCGCCAGACTGGTTTAGTATTGTATGGAAGAAATTCATTGCGGGTATTTTAGCTATTTCTTCGGGACTTATGCTTGGTCGCGAAGGTCCCAGTATTCAGTTAGGAGCTATGACAGGTAAGGGAATTGCACAGTATCTCAATGCTAGTCGAATGGAAAAACGTGTTTTAATTGCTAGTGGTGCGGCAGCAGGTCTTTCAGCAGCCTTCAACGCTCCTATTGCAGGCCTTTTATTTGTAGTTGAAGAAATTTACCATCATTTTTCTCGCTTAGTTTGGATAACAGCTTTGGTAGCAAGTTTAGTGGCAAACTTTGTCTCACTTAATATCTTTGGTTTAACCCCAGTTTTAGCTTTACCATCAGAATTACCATCTTTAAATCTCAACTTTTATTGGATTTTTTTACTCATGGGTCTCTTTTTGGGTATCTTAGGTTTTATCTATGAGTGGGTAATTTTAAGATTTCATGTGATCTATGATTATTTGGGCAAACTATTTCATCTACCATCTCACCTATATGGTATATTAGCGGTAATTTTTATTCTTCCTATTGGTTACTATTTCCCACAATTATTGGGGGGTGGAAATGGCTTAATTGTATCACTGCCTAGGAGTAATCTTAGTCTGATGATGTTAGGATTATTTTTCCTCATTCGTTTTTTATGGAGTATGTTGAGTTACAGTAGTGGCTTGCCAGGAGGAATTTTTTTACCAATTCTAGCTTTAGGATCTTTAGCAGGTGCTTTTTTTGCAGTAGGTATGCAGTACTTTGGTATAATATCTCATCAGCAGATATCTTTATTTGTTGTTCTAGGAATGGCGGGCTATTTTGGTGCAATCTCAAAAGCACCACTAACAGCTATGATTTTGGTTACAGAAATGGTTGGCGATTTAAAACAATTAATGGCTATTGGAATTGTAACGATGGTATCTTATATTGTCATGGATTTATTAAAGGGAGAACCTATTTATGAAGCGATGTTGGCTAAAATGACCTTCAATCCAAAAGATAAAGTAATGACACCTACATTGATTGAATTAACTGTTTCAGATAAAATATCAGGAAAGTATGTCCGAGATTTAGAATTACCAGAAAATGTGTTAATAACGACTCAAATTCATCATAAGACATCGGCTGTAGTATCAGGAAATACTATCTTGAATGCTGGCGACACCATTTTTTTAGTTGTGAATGAATCGGAAATTAAAGAAGTACGTGAACAGCTGATG

SEQ ID NO: 6680 - protein, 510 aa, Streptococcus agalactiae
MENHKNEFQFSLESILGFVWRGIVVGLIAGFVVSIFRLAIEKIFLVVMELYKSAHYQPIILLSITVTSIIAAVIIGFFIKSDPDIKGSGIPHVEGELKGMLSPDWFSIVWKKFIAGILAISSGLMLGREGPSIQLGAMTGKGIAQYLNASRMEKRVLIASGAAAGLSAAFNAPIAGLLFVVEEIYHHFSRLVWITALVASLVANFVSLNIFGLTPVLALPSELPSLNLNFYWIFLLMGLFLGILGFIYEWVILRFHVIYDYLGKLFHLPSHLYGILAVIFILPIGYYFPQLLGGGNGLIVSLPRSNLSLMMLGLFFLIRFLWSMLSYSSGLPGGIFLPILALGSLAGAFFAVGMQYFGIISHQQISLFVVLGMAGYFGAISKAPLTAMILVTEMVGDLKQLMAIGIVTMVSYIVMDLLKGEPIYEAMLAKMTFNPKDKVMTPTLIELTVSDKISGKYVRDLELPENVLITTQIHHKTSAVVSGNTILNAGDTIFLVVNESEIKEVREQLM

SEQ ID NO: 6681 - protein, 1071 aa, Streptococcus agalactiae
ATGCGTAGAGTTTATTCCTTTTTAGGCGGTATTGTTCTTGTTATCCTGATCCTCTTTGGTTTAACCACTTACTTAGAAAAAAAGAGTAGTTCAACACCTAACTCAGATAAGTTAGTTATTTATAACTGGGGAGACTATATTGATCCAGCCTTATTAAAAAAATTTACAAAAGAAACTGGAATTGAAGTACAATACGAAACGTTTGACTCTAATGAGGCTATGCACACCAAAATTAAGCAGGGTGGGACGACATATGATATTGCTGTACCTAGTGATTATATGATTGACAAAATGATAAAAGAAAACCTTCTGGTTAAACTTGATCATTCAAAGATAGCTAATTGGGATGCTATTGGAGCTAGGTTTAAAAATTTGAGTTTCGATCCTAAAAATAAATATTCGATTCCTTATTTCTGGGGAACTGTTGGGATTGTTTATAATGATCAATTAGTTAAAACTCCTCCTAAACATTGGGATGATTTATGGCGTCCAGAGTTTCGAAATAAAATCATGCTAGTTGATAGTGCACGTGAGGTTATTGGAGTTGGTTTAAATTCCTTGGGATATGGATTGAATACAAAGAACATATCAGAATTAAAAGCCGCTTCTAAAAAGTTAGATGCTCTAACACCAAACGTTAAGGCTATTGTTGCTGATGAGATGAAAGGCTATATGATTCAGGGAGATGCAGCGATTGGTGTTACATTCTCTGGAGAAGCACGAGAAATGCTTGATGGGAACAAGCATTTGCATTACGTTGTTCCTAGTGAAGGATCTAACCTTTGGTTTGATAATATTGTAATCCCCAAAACAGTAAAGCATCGCAAAGAAGCTTATGCCTTTATTAATTTCATGATGGAACCTAAAAATGCGGCACAAAATGCAGAATATATTGGTTATGCGACCCCTAATCTCAAAGCAAAAGCGCTGTTACCAGCAGATATCAAAAATGATAAAGCATTTTATCCTCCTGATAAAACAATTGATCATTTAGAAGTTTACAATAACTTGGGTCAAAAATGGCTTGGTATTTACAATGATTTGTACTTACAATTTAAAATGTATCGTAAG

SEQ ID NO: 6682 - protein, 357 aa, Streptococcus agalactiae
MRRVYSFLGGIVLVILILFGLTTYLEKKSSSTPNSDKLVIYNWGDYIDPALLKKFTKETGIEVQYETFDSNEAMHTKIKQGGTTYDIAVPSDYMIDKMIKENLLVKLDHSKIANWDAIGARFKNLSFDPKNKYSIPYFWGTVGIVYNDQLVKTPPKHWDDLWRPEFRNKIMLVDSAREVIGVGLNSLGYGLNTKNISELKAASKKLDALTPNVKAIVADEMKGYMIQGDAAIGVTFSGEAREMLDGNKHLHYVVPSEGSNLWFDNIVIPKTVKHRKEAYAFINFMMEPKNAAQNAEYIGYATPNLKAKALLPADIKNDKAFYPPDKTIDHLEVYNNLGQKWLGIYNDLYLQFKMYRK

SEQ ID NO: 6683 - protein, 774 aa, Streptococcus agalactiae
ATGAAAAAATTCGCAAATATCTATTTAGCACTTGTTTTTATTATCCTTTATATTCCTATTATTTATTTGATTTTTTATTCTTTCAATAAAGGTGGGGATATGAATTCTTTTACTGGATTCACCTTTAGTCACTATGGAGAACTGTTTCAGGATAGCCGCTTAATGCTAATTTTAGTGCAAACATTCTTTTTGGCTTTTCTTAGCGCCTTATTAGCTACAATTATTGGTACCTTTGGAGCTATTTGGATTTATCAGGTAAGACGTAGACATCAAACCTCTATTTTATCGCTTAATAATATCCTTTTAGTAGCACCAGATGTTATGATTGGTGCAAGTTTTCTCTTAGTATTTACTGTTATTGGTTTACAGTTAGGTTTCACTTCTGTATTATTGAGCCATGTTGCATTCTCTATTCCTATTGTTGTTTTAATGGTCTTACCTCGTTTAAAAGAAATGAATGATGATATGATTAATGCTTCCTATGATTTAGGAGCTTCAACTTGGCAAATGCTTAAAGAAGTTATGTTACCCTATTTGTCGTCGGGTATTATTTCAGGTTTCTTTATGGCTTTCACTTACTCGCTAGATGATTTTGCGGTTACTTTCTTTGTTACAGGTAATGGCTTTTCAACGCTTTCAGTAGAAATCTATTCACGCGCACGTCGCGGTATATCATTGGAAATTAATGCCTTGTCAACTATTGTCTTTTTATTTAGTATTTTATTGGTAATTGGTTATTACTATATTTCGAAAGAGAAGGGAGAAAAGAATGCG

SEQ ID NO: 6684 - protein, 258 aa, Streptococcus agalactiae; identical to SEQ ID NO: 2094

SEQ ID NO: 6685 - protein, 792 aa, Streptococcus agalactiae
ATGAAGAAAACCTCTAGTCTATTTTCAATTCCTTATATGGCTTGGTTATTCTTATTTGTATTAGCACCTGTTGCTTTGATTGCTTGGAACTCGTTCTTTGATATTAATGGGCACTTTACTTTAGCTAATTACCAGACGTTTTTTAGCTCAGGAACCTATCTTAAAATGAGCTTTAACTCGGTTCTATATGCAGGCATCGTTAGTTTCATAACGCTTTTGATTAGCTATCCAGCTGCTTATTTGCTTACAAAATTAAAACACAAGCAATTATGGCTAATGCTAGTTATTTTGCCAACATGGATTAATCTTTTGTTAAAAGCCTATGCTTTTATGGGGATATTTGGTCAACAAGGGGGAATTAACGCCTTCTTAACCTTTATAGGTATCGGCCCAAAACAGATTCTATTTACAGATTTTTCATTTCTTTTTGTAGCAGCTTACATTGAATTACCGTTTATGTTATTACCCATTTTTAATGCCTTGGATGATATTGATCAAAATCTCATTTATGCAAGTGATGACTTGGGTGCAAATGCATGGCAAACTTTTCAGAAGGTTATATTTCCTCTATCTCTGAATGGTGTAAGAGCAGGTGTACAATCTGTCTTTATTCCTAGTTTAAGTCTCTTTATGCTTACGCGTCTTATTGGTGGTAATCGAGTTATTACTTTAGGGACAGCCATAGAACAACATTTTTTAATCACACAAAATAAAGGTATGGGCTCAACCATAGGGGTTATTTTAATTTTAGTGATGGTTGCTATTATGTGGTTAACAAAGGAGAGGAAAGCA

SEQ ID NO: 6686 - protein, 264 aa, Streptococcus agalactiae; identical to SEQ ID NO: 2096

SEQ ID NO: 6687 - protein, 1152 aa, Streptococcus agalactiae
TTGACTAACCCAATCATTGCATTTAAAAATGTATCAAAGGTATTTGAAGACAGCAACACCGTTGTCTTAAAAGATATTAATTTTGAACTTGAAGAAGGTAAATTTTACACCTTATTAGGGGCCTCAGGAAGTGGTAAATCAACTATCTTAAATATTATTGCAGGTTTGCTAGAGGCGAGTACAGGCGATATTTACTTAGATGGGAAACGCATCAATGATGTTCCCACTAATAAACGGGATGTTCATACCGTTTTCCAAAACTATGCTTTGTTTCCACATATGACGGTTTTTGAAAACGTTGCTTTTCCATTAAAGTTGAAAAAAATGGATAAGAAAGAAATTCAAAAACGTGTTCAAGAAACTCTAAAAATGGTTCGTTTAGAAGGGTTTGAAAAACGAGCCATTCAAAAATTATCAGGAGGACAACGCCAGCGTGTTGCGATAGCGCGTGCTATCATCAATCAACCTAAAGTAGTCTTACTAGATGAACCCTTATCAGCATTGGATTTGAAATTGCGTACAGAGATGCAATATGAATTGCGCGAACTGCAACAACGTTTAGGCATTACCTTTGTTTTTGTCACACATGATCAAGAAGAAGCGTTGGCAATGAGTGATTGGATTTTCGTCATGAATGAAGGTGAAATTGTTCAATCAGGAACACCAGTAGATATCTACGATGAACCTATCAATCATTTTGTAGCAACTTTTATAGGTGAATCAAATATCTTATCTGGCAAGATGATTGAGGATTATTTGGTTGAATTTAACGGTAAGCGCTTTGAGGCTGTTGATGGCGGTATGCGCCCTAATGAATCAGTCCAAGTAGTTATTCGTCCAGAAGATCTTCAAATTACCCTACCTGATGAAGGAAAACTTCAAGTTAAAGTGGACACACAACTTTTTCGAGGTGTCCACTATGAAATTATTGCTTATGATGATTTAGGTAATGAATGGATGATTCATTCAACTCGTAAAGCTATTGAGGGGGAAGTTATTGGTTTAGATTTCACTCCAGAAGATATACATATTATGCGTCTTAATGAAACAGAAGAAGAATTTGATGCGCGCATTGAAGAATATGTAGACACTGACGATCATGAGGATGGTTTAATCAATGCTATCGAGGAGGAGAGAAATGAAGAAAACCTC

SEQ ID NO: 6688 - protein, 384 aa, Streptococcus agalactiae; identical to SEQ ID NO: 2098

SEQ ID NO: 6689 - protein, 900 aa, Streptococcus agalactiae
ATGATTAAAACAATACAAAAAGAATTAGAAGGTCTCGATATTCGCTTTGATGAGCCTTTAAAGAAATATACTTATACTAAAGTAGGAGGACCTGCTGATTATCTTGCATTCCCAAGGAATCGCCTTGAACTATCGCGTATTGTTAAGTTTGCTAACAGTCAAAATATTCCTTGGATGGTTTTAGGAAATGCGAGTAATATTATCGTTAGAGATGGTGGTATCCGTGGTTTTGTTATCATGTTTGATAAACTGTCAACTGTTACAGTCAACGGTTATGTTATTGAAGCAGAAGCAGGAGCTAATCTCATTGAAACAACTCGTATTGCACGTTATCATAGCTTAACTGGCTTTGAATTTGCTTGCGGAATTCCTGGAAGTGTAGGTGGAGCAGTCTTTATGAATGCTGGCGCTTACGGTGGTGAAATTGCTCATATTTTATTGTCTGCACAAGTTTTGACACCACAGGGTGAACTTAAAACGATTGAAGCTAGGAATATGCAATTTGGTTATCGTCATTCTGTCATTCAAGAGAGTGGAGATATTGTTATATCAGCTAAGTTTGCCTTAAAACCAGGAGATCATCTCATGATTACTCAGGAAATGGATCGTTTAACCTATCTCCGTGAGCTGAAACAACCTTTAGAATACCCTTCTTGTGGTTCTGTGTTCAAACGTCCCCCAGGACATTTTGCAGGGCAACTCATTAGCGAAGCACATCTTAAAGGTCAACGTATTGGTGGAGTAGAGGTTAGCCAAAAACATGCTGGTTTTATGGTTAACATTGCAGAAGGTTCAGCTCAAGATTATGAAAATCTTATTGAACATGTTATTAACACCGTTGAATCAACTTCAGGTGTCCATTTGGAACCAGAAGTTCGTATTATCGGTGAGTCGCTATTA

SEQ ID NO: 6690 - protein, 300 aa, Streptococcus agalactiae; identical to SEQ ID NO: 2100

SEQ ID NO: 6691 - protein, 486 aa, Streptococcus agalactiae
ATGACAACCGTTTACTTGAGTTTAGGTAGTAATATTGGTGATAGAGAAACTTTTCTGAAGCAGGCTCTCTTTTCAATTGATCATTTGCAAAAGACAAAAGTCGCGCAAATTTCCGCTATTTATGAAACAGCTGCTTGGGGGAATACTAACCAAGAAGATTTTTTTAATATATGTTGTCAGGTAGAGACAGACTTAGCACCTTTTGAATTATTGGATTATTGTCAAGAAATTGAAAAACGCTTAAAGCGCGTGAGACATGAGCACTGGGGTCCAAGGACAATAGATATTGATATCTTACTTTTTGGTAATCAAGTGATTAACCAAGAAGATTTAGTAGTACCCCATCCGTATATGACGAAGCGAGCATTTGTTCTAGTTCCGTTACTCGAAATAGCACCTCAACTAAGTTTACCTAATGGTTCTAAGCTAGAAGACTATCTCGAAAAATTGAATTTAGGAGAAGTTCATTATTTAAAACCAGTCGAA

SEQ ID NO: 6692 - protein, 162 aa, Streptococcus agalactiae; identical to SEQ ID NO: 2102

SEQ ID NO: 6693 - protein, 360 aa, Streptococcus agalactiae
ATGGATAAGATTTATTTAAATAAATGTCGGTTTTATGGTTATCATGGTGCTTTTTCGGAAGAACAAACATTGGGGCAAGTTTTTCAAGTTGATGCTGTTCTATCACTTGATTTGGCAAAAGCATCACAAACTGATGATTTAATTGATACGGTTCATTATGGTGAAGTTTTTGACTGTATTAAAAATCATGTTGAAAACGAACAGTATCAATTAATAGAGAAATTAGCAGGTGTTATTGTTGAAGATATTTTCTTACAGTTTCATCCAGTACAAGCTATTACATTAAAGATTACAAAAGACAATCCACCAATTAATGGGCACTATGAATCAGTTGGAATTGAATTGGAGCGCAAGCGAGCA

SEQ ID NO: 6694 - protein, 120 aa, Streptococcus agalactiae
MDKIYLNKCRFYGYHGAFSEEQTLGQVFQVDAVLSLDLAKASQTDDLIDTVHYGEVFDCIKNHVENEQYQLIEKLAGVIVEDIFLQFHPVQAITLKITKDNPPINGHYESVGIELERKRA

SEQ ID NO: 6695 - protein, 801 aa, Streptococcus agalactiae
ATGAAAATAGGACAATATGATATTACAGGTAAAGCTTGTATCATGGGGATTTTAAATGTAACGCCTGATTCCTTCTCAGATGGTGGTTCTTATACCACAATTGATTCAGCTTTAAATCAAGTTGGTGAGATGCTTGAACAAGGGGTGGCAATTGTAGATATTGGGGGAGAATCAACGCGGCCAGGTGCAGTATTTGTGACTTCTGAAGAAGAAATTAAACGTGTAGTTCCAATGATTAAAGCTATTAGAGAGGTCTACCCTGATCTTTTGTTATCAATAGATACTTATAAAACAGAGGTAGCTCAAGCAGCCCTTGATGCAGGTGTACATATTTTAAATGACGTTTGGTCAGGTTTATATGATGGTAAAATGCTATCTTTAGCAGCAGAACGAAATGTTCCAATTATTTTGATGCATAACCAGGAAGAAGCTGTTTATCAAGATATCAAAAAAGAAGTTTGTGAATTCTTACTTGAAAGAGCAGATCATGCTTTAGAAGCAGGTGTTTCAAAGGATAATATTTGGATAGATCCTGGCTTTGGTTTTGCTAAAACAGAGGAGCAAAATTTAGAACTATTAAAAGGTTTGGAACAAGTGTGTGATTTAGGTTATCCTGTGTTATTTGGGATCTCTCGAAAACGTACTGTTAATTATCTTCTAGGTGGTAATAGGGAAGTAATTGAACGTGATATGGGGACTGCTGCTTTATCGGCATGGGCAATAGCAAAGGGGTGTCAGATTGTACGTGTTCACAATGTTGAAGTAAATAAGGACATTGTGACAGTAATTAGTCAGTTGGTG

SEQ ID NO: 6696 - protein, 267 aa, Streptococcus agalactiae
MKIGQYDITGKACIMGILNVTPDSFSDGGSYTTIDSALNQVGEMLEQGVAIVDIGGESTRPGAVFVTSEEEIKRVVPMIKAIREVYPDLLLSIDTYKTEVAQAALDAGVHILNDVWSGLYDGKMLSLAAERNVPIILMHNQEEAVYQDIKKEVCEFLLERADHALEAGVSKDNIWIDPGFGFAKTEEQNLELLKGLEQVCDLGYPVLFGISRKRTVNYLLGGNREVIERDMGTAALSAWAIAKGCQIVRVHNVEVNKDIVTVISQLV

SEQ ID NO: 6697 - protein, 561 aa, Streptococcus agalactiae
ATGCCCAATCAAGAAAAAATGGAAAAAGCTATTTATCAATTTTTAGAGGCTTTAGGAGAAAATCCTGATCGAGAAGGATTGAAAGATACACCGAAGCGTGTGGCAAAAATGTATATAGAAATGTTCTCAGGACTTAATCAAGATCCAAAGGAGCAATTCACTGCAGTCTTTTCTGAAAATCATGAAGAGGTTGTGATTGTCAAGGATATTCCATTCTATTCCATGTGTGAACATCATTTGGTTCCTTTTTATGGTAAAGCTCATATTGCTTATTTACCAAACGATGGACGTGTTACTGGACTTAGTAAGCTTGCACGTGCAGTTGAAGTGGCGAGTAAGCGTCCTCAACTTCAGGAACGTTTAACAGCACAAGTTGCACAAGCTTTAGAGGATGCTTTGGCGCCTAAAGGTATTTTTGTTATGATAGAAGCAGAGCATATGTGTATGACAATGCGTGGCATTAAAAAACCAGGAAGTAAGACGATTACAACGGTAGCTCGTGGTTTATACAAGGACGATCGATATGAAAGACAAGAAATTCTATCGCTAATACAAAAAGGA

SEQ ID NO: 6698 - protein, 187 aa, Streptococcus agalactiae
MPNQEKMEKAIYQFLEALGENPDREGLKDTPKRVAKMYIEMFSGLNQDPKEQFTAVFSENHEEVVIVKDIPFYSMCEHHLVPFYGKAHIAYLPNDGRVTGLSKLARAVEVASKRPQLQERLTAQVAQALEDALAPKGIFVMIEAEHMCMTMRGIKKPGSKTITTVARGLYKDDRYERQEILSLIQKG

SEQ ID NO: 6699 - protein, 1260 aa, Streptococcus agalactiae
ATGACTTATCAAGAAGCGCTAGAATGGATTCATAGCAAATTAGCTTTTGGTATTAAACCAGGTTTGGAACGTATGAGATGGATGCTAGAGCAGTTAGGAAACCCTCAAAACAACCTATCTGCCATTCATGTTGTTGGAACGAATGGTAAAGGATCAACAACTAGTTATTTACAACATATTTTTACAAATTCTGGTTATCAAGTTGGAACATTTACATCACCATATATTGTTGACTTTAGAGAGCGTATTAGCATTGATGGTCAAATGATTCCAGAGTCTGATTTTATCAAACTTGTTGAAACTGTTCGTCCAGTTGTTGAACGGTTGCACCTTGAGACCAACCTAGAACCAGCTACAGAATTTGAAGTTATAACAGTTTTGATGTTCTATTATTTTGGCAATAGCTGTCCAGTTGATATCGTCATTATTGAGGCTGGAATGGGCGGTTATTATGATTCTACCAACATGTTCAAGGCTTTAGCGGTTACTTGTCCGTCAATTGGATTAGATCATCAGGAGGTTTTAGGACGAACTTATGTAGATATAGCTGAACAAAAAGTAGGTGTTTTAAAAAAAGGAGTTCCATTCGTATATGCTAATGATCGTCAGGATGTTGAAGAAGTCTTTCAAATAAAAGCCAAGGAAACCCACAGCCAGACTTATCGTTTACACAATGACTTTTATATAAAAGAAGAGGAAAATTATTTTAACTATATAGGTCCTCAAGCAAATATTGATCATATTCAGTTGCAAATGCCGGGACGTCACCAAGTTTCCAATGCTAGCATAGCTATAACTACCAGTTTATTATTAAGAGACAAATATCCAAAGTTAACCCTACAGACCATTAAAGATGGGCTTGAAATGACAAAATGGGTAGGCCGTACAGAATTAATCTTTCCAAATGTAATGATTGATGGCGCTCATAATAATGAAAGTGTCGATGCTCTCGTTCAAGTTATAAAAAAATATCAGCAGAAAAACGTGCATATTCTATTTGCTGCAATTAATACTAAACCGATAGAGAGTATGTTAGAATCATTGTCTAGTATCGCTCCGGTTTCGGTTACTAGCTTTGATTACCCTAAATCAATAAACTTAGACAAATATCCTAAAGCGTACACTAGAGTTAGTGATTGGAAGAAATGGCTACATGATATAAATCTGACATCAGATAAAGATTTCTATGTGATTACTGGCTCCCTTTATTTTATTTCTCAAGTTCGTCAGGAACTACTATTAATCAAAACTACAACAACT

SEQ ID NO: 6700 - protein, 420 aa, Streptococcus agalactiae
MTYQEALEWIHSKLAFGIKPGLERMRWMLEQLGNPQNNLSAIHVVGTNGKGSTTSYLQHIFTNSGYQVGTFTSPYIVDFRERISIDGQMIPESDFIKLVETVRPVVERLHLETNLEPATEFEVITVLMFYYFGNSCPVDIVIIEAGMGGYYDSTNMFKALAVTCPSIGLDHQEVLGRTYVDIAEQKVGVLKKGVPFVYANDRQDVEEVFQIKAKETHSQTYRLHNDFYIKEEENYFNYIGPQANIDHIQLQMPGRHQVSNASIAITTSLLLRDKYPKLTLQTIKDGLEMTKWVGRTELIFPNVMIDGAHNNESVDALVQVIKKYQQKNVHILFAAINTKPIESMLESLSSIAPVSVTSFDYPKSINLDKYPKAYTRVSDWKKWLHDINLTSDKDFYVITGSLYFISQVRQELLLIKTTTT

SEQ ID NO: 6701 - protein, 885 aa, Streptococcus agalactiae
TTGAGAAAAGATAATTTAGGAATTATCCTTGGCTTGTCAGCCTATGTTTTATGGGGGCTTTTATCTCTTTATTGGAAATTATTATCTGGAATTGAAGCATATAGTACGTTTGCTTATAGGATTATATTCACTGTTTTAACTATGCTTATTTATATGCTCGTTTCGGGTAGAAAAACAGTCTATTTAAAAGACTTAAAAGGCTTAGTTAATAATAAAAAGTCATTTTGGACAATGTTTGTAGCCAGTATTTTAATTTCAATTAATTGGTTGGTCTATATTTTTGCAGTCACGCATGGTCACGCTACTGAGGCAAGTCTTGGTTATTATATGATGCCGATTATTTCAATTTTGTTGTCGGTCCTTGTTTTACGTGAACACCTGGCAAGAGTAGTTAGCCTTGCAATTTTGATTGCAATCATGGGAGTTGGAATTTTAGTTTATCAAACTGGTCATTTTCCTTTAATTTCACTAACTCTAGCGCTTTCTTTTGGTTTTTATGGGTTATTAAAAAAATCAATTTCTTTATCTAGCGATTTTTCGATGCTGGTAGAAAGTAGTTTTATTGCTCCGTTTGCACTCATTTATATAGTGTTTTTCGCCAAAGATTTTTTAACTGATTATAATATATTACAATTAGTTTTACTCTCACTTTCAGGAATCATTACAGCAGTTCCTCTTTTATTATTTGCAGAAGCCATTAAGAGGGCTCCTCTAAATATTATCGGTTTTATCCAATACATCAATCCAACCATCCAATTATTGCTAGCATTGTTTATTTTTAAAGAAACTATCGTTAGTGGGGAGGTAATAGGTTTTATTTTTATCTGGCTTGCTATTTTAGTTTTTAGTATTGGACAAGTACATACGATGTTAAAGAAAGGTAAA

SEQ ID NO: 6702 - protein, 295 aa, Streptococcus agalactiae; identical to SEQ ID NO: 2112

SEQ ID NO: 6703 - protein, 863 aa, Streptococcus agalactiae
ATGAGGATAATTGTACCTGCAACTAGTGCGAATATTGGTCCAGGCTTTGATTCAATAGGAGTTGCGTTATCAAAGTATTTAAGCATTGAAGTATTAGAAGAAAGTACAGAGTGGTTAGTTGAACACAATTTAGTAAATATTCCAAAAGATCATACTAACCTCCTTATTCAAACAGCTTTGCATGTTAAGTCGGATTTGGCACCACACCGCTTAAAAATGTTTTCAGATATTCCTTTGGCCAGAGGTTTAGGTTCTTCTTCCTCTGTAATTGTTGCAGGAATAGAATTAGCCAATCAATTAGGAAATTTGGCTCTTTCTCAAAAAGAAAAATTAGAGATAGCTACCCGATTAGAAGGACATCCTGATAATGTAGCACCGGCCATTTTTGGTGATTTAGTTATTTCATCAATAGTGAAAAATGATATTAAAAGTTTGGAAGTGATGTTTCCAGATAGTTCCTTTATCGCTTTTATTCCAAATTATGAATTAAAAACAAGTGATAGTCGAAATGTACTACCTCAAAAATTGAGTTATGAGGATGCAGTTGCTTCAAGCAGCGTCGCTAATGTGATGGTTGCGTCGTTGTTGAAAGGTGATTTGGTAACTGCTGGATGGGCTATAGAAAGGGACCTCTTTCATGAAAGATATCGTCAACCTTTGGTGAAGGAATTTGGAGTTATAAAACAAATCAGCACTCAAAACGGTGCGTATGCTACTTATTTGTCTGGAGCAGGACCGACGGTAATGGTTCTGTGTTCGAAAGAAAAGAACAACCAATTGTCACAGAGTTAAGTAAATTATGTTTAGATGGACAGATTCAAGTACTTAATATTGAGCGAAAAGGAGTGAGAGTTGAGAAAAGA

SEQ ID NO: 6704 - protein, 288 aa, Streptococcus agalactiae; identical to SEQ ID NO: 2114

SEQ ID NO: 6705 - protein, 1281 aa, Streptococcus agalactiae
ATGACTATTAAAATAGCTTTATTAGGTTTTGGAACGGTTGCTAAGGGTATTCCATATTTGCTAAAAGAAAATCAACATAAGCTACTTTCTTTAGAAGGCGAAGATATTGTGATTGATAAAGTATTAGTAAGAGATAATGAAAGCCGCCAGCGTTTCATCAATCAGGGATTTACTTATAACTTTGTGACAGAGATAAATACTATTCTTCAAGATCCACAAATTGATATTGTAGTGGAATTAATGGGGGGGATTGAGCCAGCTAAAACTTATTTGAGTCAAGCATTAGGATTTGGTAAACATATTGTGACAGCCAATAAAGATCTCATTGCTTTACACGGAAAAGAGTTGATGGATTTAGCAGACGCTAGAGGTCTAGCTTTATTCTATGAGGGAGCAGTTGCTGGAGGCATTCCTATTTTAAGGACCCTATCGCATTCGTTTGCCTCAGATAAAATGACACGTTTATTAGGAATTCTCAACGGTACCTCCAACTTCATGTTAACAAAAATGTTTGAAGAGGGATGGTCTTATGAACAAGCTCTAAAAAAGGCACAAGAGTTAGGTTATGCCGAAAGTGATCCTACAAATGATGTTGAAGGTATTGATACTGCCTACAAAGCCACTATCTTAAGTCAATTTGGATTTGGTATGCCTATTGATTTTGATGATGTTAATTATAAGGGGATTTCTAGTATTCGCTCAGAGGACGTTGAAGTAGCTCAGGAGATGGGCTTTGCCATTAAGTTGGTAGCTGATCTTCGTGAAACTCCAACTGGTATAAGTGTAGACGTTTCTCCGACACTAATTTCTCAAGAGCATCCCTTAGCTGCAGTTAATCATGTGATGAATGCAGTATTCATTGAATCAATAGGGATTGGTCAGTCTCTTTTTTATGGACCAGGTGCGGGACAAAATCCAACAGCAACCTCTGTTTTAGCCGATATCATCGATATTAGTCGTAGTATTCGATCACAGATAAAAATTAAGCCTATGAATACTTATCATTGTCCGTGTAGGTTGTCAATGCAGTCTGATATCTTCAATGAGTACTATCTAGCTATTTCTTTGAGAAATGCTGAAGATAGTGATACACTTGGAAGGTACTTTGAGCAAGAAAATATAGGTTTGAAAAATGTTATTGAAAAAGCATTGGATGATAAACAACAAGAAATCTATGTATTAACAGATGAAGTTAGCCAAGAGAAAATAACTCAATTTATTGAGGAGTTTCCTGAGAGTGGTGTCATTCAGTTAATCAATGTTTTCAAAGTAATAGGAGGG

SEQ ID NO: 6706 - protein, 427 aa, Streptococcus agalactiae; identical to SEQ ID NO: 2116

SEQ ID NO: 6707 - protein, 885 aa, Streptococcus agalactiae
ATGGCACACACACCTACTAGTCATCGTAAACCACGAAAACGTTCCCCATGGTTAGCTATTGCTTCTGTCTTTTTTTTGTTAATAGCTTTAATCGGCATATTTCTATTCTTCAACAATCGTTCAAAGCAAGAAATAAAAACAAAAACGAACGCCTCTAGTCATCGAAAAATTGTCACATCTATCAAAAAAAAGAAATGGGTTAAGCAAAAGACTCCTGTTAAAATACCCATTTTAATGTACCATGCTGTTCATGTTATGGACCCTTCTGAAGCCGCCAGTGCTAACTTAATTGTGGCACCTGACATTTTTGAAAGTCATATAAAACGTCTCAAAAAGGAAGGATATTACTTCTTAGCCCCTAACGAGGCATATCGTGCACTAAACGAAAATGCTTTACCTGAAAAAAAAGTCATTTGGATTACTTTTGATGATGGAAATGCCGATTTCTACACTAAGGCATACCCTATACTCAAAAAGTACAAGGTTAAAGCCACTAATAATATCATCACTGGCTTTGTTCAAGAAGGACGAGAATCTAACCTCAACGTTCAACAAATGCTAGAAATGAAGCAAAACGGCATGTCATTCCAAGGACATACGGTTACTCACCCCAATCTTTCTCTCTTAACTCCAGAACTACAAACCCAAGAAATGACACTATCAAAACTGTTTTTAGATCAAAAACTCTCTCAAGATACTCTTGCGATTGCTTATCCATCAGGACGCTACAATCCTACAACTTTGGATATTGCTAGTCAATATTATAAACTAGGGCTTACAACAAACGAAGGAGTTGCAACAAAAGATAACGGTTTGCTTTCTCTTAATCGAGTTCGTATCTTACCAACTACTAGCGATGATGATTTGATCAAAACGATTAACCAA

SEQ ID NO: 6708 - protein, 295 aa, Streptococcus agalactiae
MAHTPTSHRKPRKRSPWLAIASVFFLLIALIGIFLFFNNRSKQEIKTKTNASSHRKIVTSIKKKKWVKQKTPVKIPILMYHAVHVMDPSEAASANLIVAPDIFESHIKRLKKEGYYFLAPNEAYRALNENALPEKKVIWITFDDGNADFYTKAYPILKKYKVKATNNIITGFVQEGRESNLNVQQMLEMKQNGMSFQGHTVTHPNLSLLTPELQTQEMTLSKLFLDQKLSQDTLAIAYPSGRYNPTTLDIASQYYKLGLTTNEGVATKDNGLLSLNRVRILPTTSDDDLIKTINQ

SEQ ID NO: 6709 - protein, 735 aa, Streptococcus agalactiae
TTGGGACCAACGGTTCGTATTTTTGATACCCTAACAGAGTCTTTAGGCTCTTATTTACAAAATTTCTTTGGAATGAGCTTTCGTGCAGCTGCTTTTGACAATACTAAACGTTCTTGGATTGATAATTGGACGATTTTTTATTGGGCGTGGTGGATTTCCTGGTCTCCTTTTGTTGGAGTTTTCATCGCTCGTATTTCTAAAGGGCGTAGCATTCGGGAGTTTTTAACGGTAGTTCTTTTAATACCGACATTATTGAGTTTTGTATGGTTTGCAGCATTTGGCACATTATCAACTCAGGTACAACAACTGGGTATTAATTTGACAAAGTTTGCAACAGAGGAAGTATTGTTTGCTACTTTTAATCACTACACTTTAGGTTGGCTTTTATCCACTATTGCTATCATTTTAATTTTTTCATTTTTTATTACATCAGCAGATTCTGCAACGTACGTTTTGGCTATGTTGACAGAAGATGGTAATTTAAATCCAAAAAATCGAACTAAAGTAATTTGGGGGCTAGTGTTGGCAGTGATTGCTATTGTCTTACTCTTGTCTGGTGGTCTGTTAGCGCTGCAGAACGTTTTAATTATTGTCGCTCTGCCATTTTCATTCGTAATGATTTTGATGATGCTAGCGCTATTAGTGGAGCTTTTCCATGAGAAAAAAGAAATGGGCTTATCGATTTCTCCAGATCGTTATCCACGTAAAAATGAACCATTTAAATCTTATGAAGAA

SEQ ID NO: 6710 - protein, 245 aa, Streptococcus agalactiae
MGPTVRIFDTLTESLGSYLQNFFGMSFRAAAFDNTKRSWIDNWTIFYWAWWISWSPFVGVFIARISKGRSIREFLTVVLLIPTLLSFVWFAAFGTLSTQVQQLGINLTKFATEEVLFATFNHYTLGWLLSTIAIILIFSFFITSADSATYVLAMLTEDGNLNPKNRTKVIWGLVLAVIAIVLLLSGGLLALQNVLIIVALPFSFVMILMMLALLVELFHEKKEMGLSISPDRYPRKNEPFKSYEE

SEQ ID NO: 6711 - protein, 387 aa, Streptococcus agalactiae
ATGAAGGCTCAGGCGATTGTCACAAGCCAAGGGAGAATTGTTTCTTTGGATATTGCAGTGAACTATTGCCACGATATGAAGTTGTTCAAAATGAGTCGCAGAAACATCGGACAAGCTGCTAAAATCTTGGCAGACAGTGGTTATCAAGGGATCATGAAGATGTATTCACAAGCGCAAACTCCGAGGAAATCAAGCAAACTTAAGCCACTAACTCTTGAAGATAAAACCTATAACCATACGCTATCCAAAGAGAGAATCAAGGTTGAGAATATTTTTGCCAAAGTAAAAACGTTTAAAATATTTTCAACAACCTATCGAAATCGACGCAAACGGTTTGGATTACGAATGAATTTGATTGCTGGAATGATCAACCGTGAACTAGGATTT

SEQ ID NO: 6712 - protein, 129 aa, Streptococcus agalactiae; identical to SEQ ID NO: 882

SEQ ID NO: 6713 - protein, 381 aa, Streptococcus agalactiae
ATGAATTATGAAGCAAGCAAACAATTAACTGATGTACGATTTAAGCGCCTTGTTGGTGTTCAGCGCACTACTTTTGAAGAGATGTTAGCTGTGTTAAAAACAGCTTATCAACGTAAACACGCAAAAGGTGGCCGAACCCCTAAGTTAAGCTTAGAAGATCTCCTCATGGCTACTCTTCAATACATGCGAGAATACCGCACTTATGAACAAATTGCGGCTGATTTTGGCATTCACGAAAGCAACTTAATCCGTCGAAGTCAATGGGTTGAATCAACTCTTATTCAAAGTGGTTTTACGATTTCAAAAACTCATCTTAGTGCTGAGGATACGGTGATTGTGGATGCAACAGAGGTAAAAATCAATCGTCCTAAAAAAATCAAC

SEQ ID NO: 6714 - protein, 127 aa, Streptococcus agalactiae; identical to SEQ ID NO: 880

SEQ ID NO: 6715 - protein, 186 aa, Streptococcus agalactiae
TTGGGTGTTCCCAATAATGCATTTGTTCAAATTGTTATTATCCTTATTACAACAGCTTTATTTGTTATGTCAGCTTTATCAGGTTTAGGAAAAGGTGTTAAAATTTTATCGAACTTAAATTTGATTTTAGCGGTAGCCCTCTTAGCTTTAGTTATTAGACTTCCTGCGAAACAAAATATGGTACAA

SEQ ID NO: 6716 - protein, 62 aa, Streptococcus agalactiae
MGVPNNAFVQIVIILITTALFVMSALSGLGKGVKILSNLNLILAVALLALVIRLPAKQNMVQ

SEQ ID NO: 6717 - protein, 390 aa, Streptococcus agalactiae
TTGTTAGTTACTTCAATTCTTGCTTTGTGTGTCTTTTTTATTATGAGTCCTCTTGGACAAATACGTTTAGGGCGACCTCATTCACGTCCTGAATATTTAACTGTATCATGGATAGCAATGATGTTTTCAGCAGGTATGGGGATTGGTTTGGTCTTCTACGGAGCAGCTGAACCCTTATCGCATTTTGCTATTTCGACACCTGGCGCACCTAAGGAATCGCAAACAGCATTAGCTGATGCATTTCGTTTTACATTTTTTCACTGGGGGATACATGCTTGGGCAGTATATGCATTGGTTGCTTTGGCTCTAGCTTATTTTGGATTTCGAAAGCAAGAGAAATACCTCTTGTCTGTCACTTTAAAGCCTCTTTTCGGTGATAAGACAGATGGT

SEQ ID NO: 6718 - protein, 130 aa, Streptococcus agalactiae
MLVTSILALCVFFIMSPLGQIRLGRPHSRPEYLTVSWIAMMFSAGMGIGLVFYGAAEPLSHFAISTPGAPKESQTALADAFRFTFFHWGIHAWAVYALVALALAYFGFRKQEKYLLSVTLKPLFGDKTDG

SEQ ID NO: 6719 - protein, 141 aa, Streptococcus agalactiae
TTGAGTAAAAAACATATTACGCCTGTGTTTACAGGTTCACTAATTGTATCGCTTATTTTAGTCTTATTAGGAATTATTGTTCCTCGTGGTTTTCAATCTTGGACACAAATCTTGCGTGAACAGGTATCTACCAATTTCGGT

SEQ ID NO: 6720 - protein, 47 aa, Streptococcus agalactiae
MSKKHITPVFTGSLIVSLILVLLGIIVPRGFQSWTQILREQVSTNFG

SEQ ID NO: 6721 - protein, 1374 aa, Streptococcus agalactiae
ATGGCATATAAAACAATTTATCCGTACACTAACGAAGTATTGCATGAATTCGATAATATCAGTGACAGTGATCTCGAACAGTCATTAGACATAGCGCATGCCCTCTACAAGACATGGCGCAAAGAAGATAATGTTGAAGAACGCCAAAATCAATTGCATAAAGTAGCAGATTTATTACGTAAGGACCGTGATAAGTACGCTGAAGTTATGACTAAAGATATGGGAAAACTTTTCACTGAAGCACAAGGAGAAGTGGACTTGTGTGCAGACATAGCTGACTATTATGCTGATAATGGGCAAAAGTTTTTAAAACCTGTTCCGTTAGAAAGTCCAAATGGAGAGGCTTACTATTTGAAACAAGCTGTCGGTGTTTTACTTGCTGTCGAGCCATGGAATTTCCCATTTTATCAGATTATGCGTGTATTTGCCCCTAACTTTATAGTGGGTAATACTATGCTTTTAAAACATGCTTCTATTTGTCCTGCATCAGCTCAAGCATTTGAGGATTTAGTCCGAGAAGCAGGAGCTCCAGAAGGAGCGTTTAAAAATATTTTTGCTTCGTATGATCAAGTTTCAAACCTTATATCAGATCCTCGTGTTGCAGGTGTGTGTTTAACTGGTTCTGAGCGTGGTGGGGCATCAATAGCAGCTGAGGCTGGTAAAAATTTGAAAAAATCGTCTATGGAATTAGGTGGGAACGATGCTTTTCTTATTTTAGATGATGCTGATTTTGATTTACTTAGTAAAACAATATTCTTTGCGCGTTTATATAATGCAGGTCAAGTATGTACATCTTCAAAACGTTTCATTGTTATGGCTGATAAGTATGACGAATTTGTAAATATGGTAGTTGAGACCTTTAAGTCTGCTAAATGGGGTGACCCAATGGATTCGGAAACAACCTTGGCTCCACTGTCATCTGCAGGTGCAAAGGATGATGTTTTAAAACAAATTAAATTGGCGGTAGACCACGGTGCTGAGGTAGTTTTTGGAAATGACACTATAGATCATCCAGGAAACTTCGTCATGCCAACTGTTTTAACGAATATCACTAAAGCAAATCCAATCTATAATCAAGAAATTTTCGGCCCCGTAGCCTCTATCTATAAAGTGGATACTGAAGAAGAAGCTATTGCTTTAGCTAATGATTCTAGTTATGGTTTAGGAAGTACTGTTTTCTCTTCTGATCCAGAACATGCTAAAAAAGTGGCGGCTCAGATTGAAACAGGGATGACATTTATTAATTCAGGGTGGACATCATTACCGGAATTACCGTTTGGAGGTATTAAAAATTCAGGATATGGTCGTGAATTGAGCCAACTTGGATTTGATGCCTTTGTCAACGAACATTTGGTATTTACACCAAATAGTGAT

SEQ ID NO: 6722 - protein, 458 aa, Streptococcus agalactiae
MAYKTIYPYTNEVLHEFDNISDSDLEQSLDIAHALYKTWRKEDNVEERQNQLHKVADLLRKDRDKYAEVMTKDMGKLFTEAQGEVDLCADIADYYADNGQKFLKPVPLESPNGEAYYLKQAVGVLLAVEPWNFPFYQIMRVFAPNFIVGNTMLLKHASICPASAQAFEDLVREAGAPEGAFKNIFASYDQVSNLISDPRVAGVCLTGSERGGASIAAEAGKNLKKSSMELGGNDAFLILDDADFDLLSKTIFFARLYNAGQVCTSSKRFIVMADKYDEFVNMVVETFKSAKWGDPMDSETTLAPLSSAGAKDDVLKQIKLAVDHGAEVVFGNDTIDHPGNFVMPTVLTNITKANPIYNQEIFGPVASIYKVDTEEEAIALANDSSYGLGSTVFSSDPEHAKKVAAQIETGMTFINSGWTSLPELPFGGIKNSGYGRELSQLGFDAFVNEHLVFTPNSD

SEQ ID NO: 6723 - protein, 1005 aa, Streptococcus agalactiae
ATGTTATTTAAGGAAAAAATTCCTGGACTAATATTATGCTTTATTATTGCTATACCATCTTGGTTGCTTGGGCTTTATCTCCCTTTAATAGGAGCACCAGTCTTTGCTATCTTGATTGGAATAATTGTTGGATCCTTTTATCAAAATCGACAATTGTTTAATAAGGGTATTGCTTTTACGTCTAAATATATTTTACAAACAGCAGTTGTCTTATTGGGTTTTGGACTAAACCTCATGCAAGTGATGAAAGTTGGTATATCATCGTTACCCATCATTATTATGACGATTTCCATTTCATTGATTATTGCTTATGTTTTGCAAAAGTTATTTAAGTTAGATAAAACGATTGCTACTTTAATAGGTGTTGGTTCATCTATTTGTGGTGGATCCGCAATTGCAGCGACTGCACCAGTTATTAATGCTAAAGATGATGAAGTAGCACAAGCTATTTCGGTTATTTTTTTATTCAATATCTTAGCGGCTTTAATTTTTCCAACGCTGGGGAATTTTATTGGTCTCTCTGATCACGGTTTTGCATTATTTGCAGGGACTGCTGTCAATGATACCTCGTCAGTTACAGCAACTGCTACTGCATGGGATGCTATCAATCACAGCAATACTTTGGGCGGAGCTACTATTGTTAAATTGACACGAACATTAGCCATCATTCCAATTACGATTGTATTATCTATTTATCATATGAAACAAACGCAGAAAGAACAATCTGTAAGTGTTACTAAGATATTTCCGAAGTTTGTGCTTTATTTTATCTTAGCTTCTTTGCTAACAACGATAGTTGCTTCATTAGGTTTTTCGTTACGTATCTTTGAGCCACTTAAGGTTTTATCTAAATTTTTTATTGTTATGGCAATGGGGGCAATTGGTATAAATACTAATGTCAGCAAACTAATTAAAACTGGAGGAAAATCAATTCTTTTAGGTGCAGCGTGTTGGTTAGGCATTATTATAGTTAGTTTAACAATGCAAGCTATCCTTGGAACTTGG

SEQ ID NO: 6724 - protein, 335 aa, Streptococcus agalactiae
MLFKEKIPGLILCFIIAIPSWLLGLYLPLIGAPVFAILIGIIVGSFYQNRQLFNKGIAFTSKYILQTAVVLLGFGLNLMQVMKVGISSLPIIIMTISISLIIAYVLQKLFKLDKTIATLIGVGSSICGGSAIAATAPVINAKDDEVAQAISVIFLFNILAALIFPTLGNFIGLSDHGFALFAGTAVNDTSSVTATATAWDAINHSNTLGGATIVKLTRTLAIIPITIVLSIYHMKQTQKEQSVSVTKIFPKFVLYFILASLLTTIVASLGFSLRIFEPLKVLSKFFIVMAMGAIGINTNVSKLIKTGGKSILLGAACWLGIIIVSLTMQAILGTW

SEQ ID NO: 6725 - protein, 683 aa, Streptococcus agalactiae
ATGAAAAAGTTTTTAAAAGTTTTTTTAACTGTACTAGTACTGATTCTAATTGTAGGTGCAGGCGGTCTCTATTTCTGGAATAATCATCAGTCACTAGAGGGGAAATGGCGTACAGTTTCTTTAGAGAAGCAAGTTGAGAAAGAAATAGAACACAACTTGGAAGTCAGGCAGCGGATATGGGGATTAGTGCAGCTGATTTGGTTAAGGGCGCTAATATGCATATGAACGTCAAAAACGATGAGGCAAAGATAACAGTCACTGCTCAAATTGATGAGGTAAAATTCCATCAAGCTATAAAAACTTTTATTGATAAAGCTCTTGAAAAACAATTAAAAGATCAAGGTTTGACTTACAATGATTTAAGTGAAGCAGGTAAAAAGATTTTTGATGAAACAAAAATCACTGACAAACAAATTGACCAACAAATTGATAGAAGTTTCCAAAGTGCTGCACAAGCTGCCGGAGGAAAATATAATACTAATACTGGTGAAATGACATTGCCAGTTATGGATGGTAAAGTACATCGCTTAACAAGTGTTATTAAAGTATCGCACATCAATAAAAAGGCAAATGCGTTCTATGGTAATATTGTGAAAAATGGTGAAAAAACAGCCTATAAAAAAGAGGGCTCAAAATTGATTTTAGGTAATGAAAAATCATATCCATTTATGAAAGTAACTAAA

SEQ ID NO: 6726 - protein, 228 aa, Streptococcus agalactiae
MKKFLKVFLTVLVLILIVGAGGLYFWNNHQSLEGKWRTVSLEKQVEKEIEQQLGSQAADMGISAADLVKGANMHMNVKNDEAKITVTAQIDEVKFHQAIKTFIDKALEKQLKDQGLTYNDLSEAGKKIFDETKITDKQIDQQIDRSFQSAAQAAGGKYNTNTGEMTLPVMDGKVHRLTSVIKVSHINKKANAFYGNIVKNGEKTAYKKEGSKLILGNEKSYPFMKVTK

SEQ ID NO: 6727 - protein, 1068 aa, Streptococcus agalactiae
ATGTCTAGGAAAACATTTAAACGTATACTATCGATTGGAGTTTGCACGCTCGTACTATCGATGAGTCTTTATTACACTGAAAAAGCCCACGCTATTACTGGTCCTAGTGACCGCCAATACGTAGAAAACCCAAATCCTCACATTATTGTAAATGTTACAGGTACTGATCAAAACGGAAATAGCATTTTACCGCATTATATCGAAGTCAATGTAAAGATGGGACAAACTTTAAGTAAAGAAGAAATTCTAGATTATATTGCTCGAAATTTAAACTCTAGTGTTGGAGGAGAAAGTAAAAACGTTCAATACAGCAACATCGAGTTTAAGGAAAGTGCTTATCTGAAGCGTCAATTAGATGATGGCAAGACAGAAGAAATAGCAATTGATAACGACGGTGTTACTGTACCTAAAGACGGTCCAAACAAATTTTGGATTGACGTTCCAGTAACTTGTACGGTAAATTCAATAACTCCAAAGCTCCATAAAGTAGAATGGGGTACACCTATTTCAGTTTTACATTATGTACAGTTCGTTGATAAAACTACAGGTAAAACTTTAGAGGATTTTAAAACTATTGATTTTGCTGAAATCGACCTTGGAATTCGACATACCGGTGATAGCATTACCGATAAGGAACTATATAACTCAGCTTACAGTGCCTTTTTAAGGAGTAAATTAACTAAGCAAGGCTATCAATTCCAATACAGAATTAGTACAGATGTTCAACAAAATCTTCAAGTCACCAAAAAACTTTACAACTACGATGTAAATGAAGAATTGATTAACTATCAAATCGAAAACAATAGACCCACACTAAACCTATCTAATAAAGCCGAGACTGATATCTTTTTCGAAAGATATTATGTTTCTAGAGATGGAGATAGTTTAGCACGTACAGAATCAACCATTTCGATTAAAATGGTTGATGCCAAAACTGAAAAAGCGCTATTTAACCACACATTAACGGGTTATAGACATTGGCAACTGTTTCCAATGTCTATAACAGACTCTTTGAAGAAAATCTTATCCCAACTACAAAATCAGGAGAAAGATATTTTATTCAAAATA

SEQ ID NO: 6728 - protein, 356 aa, Streptococcus agalactiae
MSRKTFKRILSIGVCTLVLSMSLYYTEKAHAITGPSDRQYVENPNPHIIVNVTGTDQNGNSILPHYIEVNVKMGQTLSKEEILDYIARNLNSSVGGESKNVQYSNIEFKESAYLKRQLDDGKTEEIAIDNDGVTVPKDGPNKFWIDVPVTCTVNSITPKLHKVEWGTPISVLHYVQFVDKTTGKTLEDFKTIDFAEIDLGIRHTGDSITDKELYNSAYSAFLRSKLTKQGYQFQYRISTDVQQNLQVTKKLYNYDVNEELINYQIENNRPTLNLSNKAETDIFFERYYVSRDGDSLARTESTISIKMVDAKTEKALFNHTLTGYRHWQLFPMSITDSLKKILSQLQNQEKDILFKI

SEQ ID NO: 6729 - protein, 105 aa, Streptococcus agalactiae
TTGGCAACTGTTTCCAATGTCTATAACAGACTCTTTGAAGAAAATCTTATCCCAACTACAAAATCAGGAGAAAGATATTTTATTCAAAATATGAAAAAAAACAGC

SEQ ID NO: 6730 - protein, 35 aa, Streptococcus agalactiae
MATVSNVYNRLFEENLIPTTKSGERYFIQNMKKNS

SEQ ID NO: 6731 - protein, 93 aa, Streptococcus agalactiae
TTGGGTAATAAACCACAAGCAGCTTGTTATCCAAACAAACAATTTGCTTGCGAAAATACTGACTCTAAATACAACTATAGCTATTTAGAAAAA

SEQ ID NO: 6732 - protein, 31 aa, Streptococcus agalactiae
MGNKPQAACYPNKQFACENTDSKYNYSYLEK

SEQ ID NO: 6733 - protein, 108 aa, Streptococcus agalactiae
GTGTTATTATTTCAATCTCAAACTTTATTAAATAGTTCAAGGATAGGAGAATATTATGAAAGAAAAGAAAAATTTGGGGATAAAATTAATAAAATCCCTATATGGTAT

SEQ ID NO: 6734 - protein, 36 aa, Streptococcus agalactiae
MLLFQSQTLLNSSRIGEYYERKEKFGDKINKIPIWY

SEQ ID NO: 6735 - protein, 147 aa, Streptococcus agalactiae
TTGGGTTTAACAACTAACAATAACACTCCGCTGATTGTATCACTATTTTCTTTAAAAGTTATTTTGTCTAGTATTATGTCCGGTGTAGCTTACAATGGAGTTATGTATCTAATATTTAAAAACAATGTTGATATTGAAAAAGATGAA

SEQ ID NO: 6736 - protein, 49 aa, Streptococcus agalactiae
MGLTTNNNTPLIVSLFSLKVILSSIMSGVAYNGVMYLIFKNNVDIEKDE

SEQ ID NO: 6737 - protein, 492 aa, Streptococcus agalactiae
ATGACAACATTTCTTGGAAATCCTGTTACTTTTACAGGAAAACAGCTACAAGTTGGGGATATTGCAAAAGATTTTTTACTAATAGCTACAGACTTATCTCAAAAATCTTTAAAAGATTTTGAAGGGAAAAAGAAAGTTATTAGCGTTGTTCCTTCTATTGATACAGGTATTTGTTCAAAACAAACACGTACTTTTAATGAGGAATTATCAGAGCTAGATAACACAGTGGTTATTACTGTTTCTATGGACCTTCCATTTGCTCAGAAGCGTTGGTGCAGCGCTGAAGGCCTTGATAACGTGATTTTATTATCAGATTTTTATGATCATTCGTTTGGTCAAGAGTACGCTCTTTTGATGAATGAGTGGCATTTGTTAACGCGTGCAGTTCTTATTTTGGATGAGCATAATAAGGTGACTTACACCGAATACGTTGACAATGTTAATTCAGATGTTGACTACGAAGCGGCGATTAATGCTGCAAAGATATTACCA

SEQ ID NO: 6738 - protein, 164 aa, Streptococcus agalactiae
MTTFLGNPVTFTGKQLQVGDIAKDFLLIATDLSQKSLKDFEGKKKVISVVPSIDTGICSKQTRTFNEELSELDNTVVITVSMDLPFAQKRWCSAEGLDNVILLSDFYDHSFGQEYALLMNEWHLLTRAVLILDEHNKVTYTEYVDNVNSDVDYEAAINAAKILP

SEQ ID NO: 6739 - protein, 657 aa, Streptococcus agalactiae
ATGGATTTATTCCTAAGTTTAGAAAGGAAATTTAAAGCTGCAAGTGACAAAGAAGTTTCTAAGCAACAGGAGGCTTATTTACGCCATCATTTTAAGTGCTATGGTATTAAATCACCTGAGCGACGTATGCTCTACAAAGAGCTTATAAAGGCCGCTAAAAGACAAGCAAAAATTGATTGGCAATTGCTTGATAAATGTTGGCAAAGTGACTATCGTGAATATCATCATTTTGTACTTGATTATCTATTAGCTATGAGTCAATTTATTACCTATAATGATTGCTCTAGACTAGAGTTTTACGCTCGTCATCAACAGTGGTGGGATAGTATTGATGTTCTGACTAAGGTTTTTGGGAACTTATCCTTAAAAGATGACAAGGTTATGAATTTACTGTCAGAATGGTCACTTGATCAAGATTTTTGGATGAGGCGACTAGCTATTGAGCATCAACTAGGATTTAAAGAAAAAACAAATACTGATATTTTGTCACTTTTTATTTTAAGAAATACAGGAAGTCAAGAATTTTTTATCAATAAGGCGATTGGCTGGGCGCTTAGGGATTATTCAAAATATAATAAAGTATGGGTAAAGGACTTTATCAGTAATCATTATGATGAGTTGTCGACTTTGAGCATACGCGAAGGAAGTAAGTACCTC

SEQ ID NO: 6740 - protein, 219 aa, Streptococcus agalactiae
MDLFLSLERKFKAASDKEVSKQQEAYLRHHFKCYGIKSPERRMLYKELIKAAKRQAKIDWQLLDKCWQSDYREYHHFVLDYLLAMSQFITYNDCSRLEFYARHQQWWDSIDVLTKVFGNLSLKDDKVMNLLSEWSLDQDFWMRRLAIEHQLGFKEKTNTDILSLFILRNTGSQEFFINKAIGWALRDYSKYNKVWVKDFISNHYDELSTLSIREGSKYL

SEQ ID NO: 6741 - protein, 537 aa, Streptococcus agalactiae
GTGGATAGTTACTATTTACAAAGTGACTTTTTTAGTACTATTATTTCATATTGTCATCGCTATCAGATTCCATATTTTGTTGATGAGGTCTTTAATTACGCTACTTATCAGGCTTCTAAAATTCCCTTTATTGCTTATGTTGATCCTCAAAAAAGGGGAGAGCTTCTAGAAGTTTCTAAAATTGAGAAACCGATAAAAATGGTGTTGTATTTTGGTGATCAGCTGGGAAGGGCAGACCAAATGTTAGCGAAATTAAATCGTTTTGGACTTAGTAGTCACTTTTTCCACGAATTTGAAAAATGTTTGTACATAAATCCCATTGCAGTTGACAAGGGAAAAGCCACTAAGAAATTATTTGGGAATCGTTTTATAGCTTTTGGCAATGATAAAAATGATATTTCTATGTTTGATGCTGCGCATTATAGTGTTCAAGTAGGGGATTTTGATGAACTGACTCCTTACGCTAATTTACGTGTATCAAGAGAATCTGTACATGAAGGAATTACAACGCTTTTTGAAAAATACAAGGGGATTACG

SEQ ID NO: 6742 - protein, 179 aa, Streptococcus agalactiae
MDSYYLQSDFFSTIISYCHRYQIPYFVDEVFNYATYQASKIPFIAYVDPQKRGELLEVSKIEKPIKMVLYFGDQLGRADQMLAKLNRFGLSSHFFHEFEKCLYINPIAVDKGKATKKLFGNRFIAFGNDKNDISMFDAAHYSVQVGDFDELTPYANLRVSRESVHEGITTLFEKYKGIT

SEQ ID NO: 6743 - protein, 90 aa, Streptococcus agalactiae
ATGGATTTTGTCTTTGATATAGATGGAACTCTTTGTTTTGATGGTATGAGTCTATCTAAAGAAATACAAGGAATACTAGAGAGCCCAGAT

SEQ ID NO: 6744 - protein, 30 aa, Streptococcus agalactiae
MDFVFDIDGTLCFDGMSLSKEIQGILESPD

SEQ ID NO: 6745 - protein, 639 aa, Streptococcus agalactiae
ATGGTTTCTGAACAATCTGAAATTGTAACATCTAAATATCAAAAAATAGCAGTAGCGGTTGCACAAAGAATCGCAAATGGAGATTATGAAGTTGGAGAGAAGTTGAAATCTAGAACAACTATTGCTTCAACATTCAACGTATCACCAGAAACAGCACGTAAGGGTCTTAATATTTTAGCAGATTTACAGATTTTAACTTTAAAGCATGGCAGTGGAGCCATTATTCTTTCTAAAGAAAAAGCAATTGAATTCTTAAACCAATATGAAACCTCTCATTCAGTTGCTATTTTGAAAGGTAAAATCCGTGATAATATTAAGGCTCAGCAACAAGAAATGGAAGAGTTAGCTACTTTAGTTGATGATTTTTTGCTTCAAACACGTGCGGTTAGTAAACAATACCCATTAGCACCATATGAAATTATTGTCAGTGAAGATTCTGAACACCTTGGTAAGTCAATAGGAGAATTAAATGTATGGCATCAAACTGGTGCGACTATTGTGGCTATTGAACACGAAGGGAAATTTATTGTTTCTCCGGGGCCTTTCTCAGTTATAGAGCAAGGAGATCATATCTTTTTTGTTGGTGATGAAGATGTTTATGCACGTATGAAAACCTATTTTAACTTAAGGATGGGACTT

SEQ ID NO: 6746 - protein, 213 aa, Streptococcus agalactiae
MVSEQSEIVTSKYQKIAVAVAQRIANGDYEVGEKLKSRTTIASTFNVSPETARKGLNILADLQILTLKHGSGAIILSKEKAIEFLNQYETSHSVAILKGKIRDNIKAQQQEMEELATLVDDFLLQTRAVSKQYPLAPYEIIVSEDSEHLGKSIGELNVWHQTGATIVAIEHEGKFIVSPGPFSVIEQGDHIFFVGDEDVYARMKTYFNLRMGL

SEQ ID NO: 6747 - protein, 549 aa, Streptococcus agalactiae
ATGGAAAATCAAAAACAAGATATTAAAACTTCAGTAACTTATGAAGAAAAGGTAATTGCTAAAATTGTTGGACATGCTTTAGAATCAGTAGACGGACTCTTGGCTGTGAGTGGAGGTTTCTTCTCTAATCTAAAAAATAGCGTTGTAAATTCTGACTCAGTAACTGATGGTGTAAATGTTGAAGTTGGTACTAAAGAAGTTGCAGTTGATTTAGACATCGTTGTTGAATACGGCAAGGATATCCCAGCTATCGTTGAAAGCATTAAAGCGATTGTCAGTCAAAACGTTGAAGTGATGACCCACCTTAAAGTTGTTGAATTGAACGCAAATGTCGTAGATGTTAAGACTAAAGCTGAACATGAAGCTGACTCAGTGACAGTACAAGATCGTGTATCTGATGCAGCACAAGCAACAGGAAACTTTGCTTCTGAACAAGCTGGCAAAGCTAAAGCAGCAATTTCCTCTGGAGCAGAGAAAACAAAAGAAGCAGTATCAAATGGTACTGAGGCTGCAAAAGAAAAAATCTCAGAAGCTCGTACTAGTGAATCT

SEQ ID NO: 6748 - protein, 183 aa, Streptococcus agalactiae
MENQKQDIKTSVTYEEKVIAKIVGHALESVDGLLAVSGGFFSNLKNSVVNSDSVTDGVNVEVGTKEVAVDLDIVVEYGKDIPAIVESIKAIVSQNVEVMTHLKVVELNANVVDVKTKAEHEADSVTVQDRVSDAAQATGNFASEQAGKAKAAISSGAEKTKEAVSNGTEAAKEKISEARTSES

SEQ ID NO: 6749 - protein, 195 aa, Streptococcus agalactiae
ATGTCTGAAGAAAAATTTGATGCAAAAGTTGATAAGGTTTCTGGTTCAGTAAAAGAATCTGTTGGGAAACTTACTGGCGATAAAGAAGTTGAATCTGAAGGTAAAGTCGATAAATTGAAAGGTCATGCAAAAGAAAAACTTGCTGACATTAAAGATACCATTAAGGGTGCTTCAGAGAGCTTTAAGAAAAAGGAC

SEQ ID NO: 6750 - protein, 65 aa, Streptococcus agalactiae
MSEEKFDAKVDKVSGSVKESVGKLTGDKEVESEGKVDKLKGHAKEKLADIKDTIKGASESFKKKD

SEQ ID NO: 6751 - protein, 540 aa, Streptococcus agalactiae
ATGACTGAAACTTACATCAAAAACACAACTAACAATTCTGGCACGACAGCTGTTCGTGGAGAATTAACTTTCGAAGATAAAGTGATTGAAAAAATTGTTGGAATTGCGATTGAGCATGTAGATGGTCTTTTGGCTGTAAATGGTGGTTTTTTCTCAAATTTAAAAAATAGCGTTGTAAATTCTGATTCAGTTACAGATGGCGTAAATGTTGAAGTGGGTAAAAAGCAAGTTGCTGTTGATTTGGATATTGTTGCTGAATACCAAAAACATGTTCCAACTATCTTTGCCGATATCAAAAAAGTTGTTGAAGCTGAAGTGAAACGTATGACAGACCTTGAAGTGGTTGAAGTTAATGTTAATGTTGTTGATATTAAAACTCGTGCTCAACATGAAGAAGATTCAGTAACTCTTCAAGATCGTGTAACAAGTGCAGCACAAGCAACAGGTGAATTTGCTTCGAATCAAGTTTCAAACGTTAAAAGTGCCGTAGGTAACGGTGTTGATAAAGTGGAAGACATGAAGTCTGAGCCACGTGTACAA

SEQ ID NO: 6752 - protein, 180 aa, Streptococcus agalactiae
MTETYIKNTTNNSGTTAVRGELTFEDKVIEKIVGIAIEHVDGLLAVNGGFFSNLKNSVVNSDSVTDGVNVEVGKKQVAVDLDIVAEYQKHVPTIFADIKKVVEAEVKRMTDLEVVEVNVNVVDIKTRAQHEEDSVTLQDRVTSAAQATGEFASNQVSNVKSAVGNGVDKVEDMKSEPRVQ

SEQ ID NO: 6753 - protein, 192 aa, Streptococcus agalactiae
ATGTCAGAATTCGTGAGGAAATACAGATATCCACTAGGAGGTGCAGTTATTGGGCTCGTTTTAGCTGCAATGATTGTAACCATTGGATTCTTTAAAACAATTCTTGCTCTTGTTATCATTGTGCTGGGTGCTTATGCTGGGCTTTATGTGCAAAGAACAGGTATGCTTGACCAATTCTTTAATAAGAGAAAA

SEQ ID NO: 6754 - protein, 64 aa, Streptococcus agalactiae
MSEFVRKYRYPLGGAVIGLVLAAMIVTIGFFKTILALVIIVLGAYAGLYVQRTGMLDQFFNKRK

SEQ ID NO: 6755 - protein, 579 aa, Streptococcus agalactiae
ATGTCAAAAGGACTAAAAAGTTTATATACTTTACTAGGTCTAATCTCCCTTACCCTACTAGGATTTGTAGCTGTTATCAGTAAACAACACATTTATCTACCATCTTTTAATTGGTTAGATTGGGATTTTAATTTGCCATCACCGATTGACGTTGGTATGTATCATTATTTCTTCTGGGGAGCATTAGTGCTGTTTGTAATCGTTTTACTGGCTATATTGGTAGTTCTGTTTTATCCAAGACGATACACAGAGTATAAACTGGCTGATAAAACTGGTAAATTGATGTTAAAAAAATCTGCAATAGAGGGATTTGTTAAAACAGAAGTATTAAAAACTGGTTTGATAAAATCTCCTAGCGTGACAGCTCATTTATATAAGAAAAAAGTAAAAGTTGATGTTAAAGGGCTTTTAACTTCTCGTACAAATGTACCAGAACAACTTGAACATATTCAAAGTGATGTTGAACTTGGCTTAAAAGAATTCTTTGGGTTGGAAAAGAAAATGAACACTAGAGTATTTGTTAAGCAAGTTGAAGAAGAAAATGTTGGGAATGCTAAGACGAATAAAAGTCGTGTAGAA

SEQ ID NO: 6756 - protein, 193 aa, Streptococcus agalactiae
MSKGLKSLYTLLGLISLTLLGFVAVISKQHIYLPSFNWLDWDFNLPSPIDVGMYHYFFWGALVLFVIVLLAILVVLFYPRRYTEYKLADKTGKLMLKKSAIEGFVKTEVLKTGLIKSPSVTAHLYKKKVKVDVKGLLTSRTNVPEQLEHIQSDVELGLKEFFGLEKKMNTRVFVKQVEEENVGNAKTNKSRVE

SEQ ID NO: 6757 - protein, 246 aa, Streptococcus agalactiae
ATGAGTTTAATTTGGTCATTAATCGTAGGTGCGATTATCGGTGCTATTGCAGGGGCTGTTACTAACAAAGGTGGCTCAATGGGTTGGATAGCTAACATCTTAGCTGGTTTAGTTGGTTCATTTGTTGGTCAAAGTTTACTAGGAACATGGGGGCCTAAATTAGCAGGTATGGCTTTGATTCCTTCAATCGTAGGTGCGATTATTGTTGTCATTGTTACTTCATTTGTACTAGGTAAAATGAATAAC

SEQ ID NO: 6758 - protein, 82 aa, Streptococcus agalactiae
MSLIWSLIVGAIIGAIAGAVTNKGGSMGWIANILAGLVGSFVGQSLLGTWGPKLAGMALIPSIVGAIIVVIVTSFVLGKMNN

SEQ ID NO: 6759 - protein, 336 aa, Streptococcus agalactiae
TTGCCGAGTGGTCACTTAAGAAACTCTTGTTATTTAGTTAAGAACAAAATAAGTTTGTACACTGAGATGTACTTAGGAAGAAAGGTATTTATCATGGGTTTAATTTGGTCATTAATCGTTGGTGCTATTATTGGTGCTATTGCAGGAGCAATCACTAACAAGGGTGGTTCAATGGGTTGGATAGCTAACATCTTAGCTGGTTTAGTTGGTTCATTTGTTGGTCAAAGTTTACTAGGAACATGGGGGCCTAAGTTAGCAGATATGGCTTTGATTCCTTCAATCGTAGGTGCGATTATCGTTATCATTGTTACTTCATTTGTATTAGGCAAAAAATCA

SEQ ID NO: 6760 - protein, 112 aa, Streptococcus agalactiae
MPSGHLRNSCYLVKNKISLYTEMYLGRKVFIMGLIWSLIVGAIIGAIAGAITNKGGSMGWIANILAGLVGSFVGQSLLGTWGPKLADMALIPSIVGAIIVIIVTSFVLGKKS

SEQ ID NO: 6761 - protein, 2277 aa, Streptococcus agalactiae
ATGAATCCTTTAATAATTGGAATGAATGATAAACAAGCAGAAGCGGTACAAACGACAGACGGACCGCTTTTGATTATGGCAGGAGCTGGCTCTGGAAAAACACGTGTTCTGACTCATCGTATTGCTTATTTAATAGATGAAAAATATGTTAATCCTTGGAATATTTTAGCGATTACTTTTACTAATAAAGCAGCGCGTGAAATGCGTGAACGTGCTATCGCCTTGAATCCAGCTACCCAAGATACTTTGATTGCAACTTTTCATAGTATGTGTGTTCGTATTTTACGTCGTGAAGCTGATTATATTGGATATAATCGTAACTTTACAATCGTTGATCCAGGTGAGCAGCGTACTTTAATGAAGCGAATCATTAAGCAATTAAATTTGGACACAAAAAAGTGGAATGAACGTTCAATTTTAGGTACAATCTCTAATGCTAAAAATGACCTTCTTGATGAAATTGCATATGAGAAGCAAGCCGGAGATATGTATACACAGGTAATTGCTAAATGCTATAAAGCTTATCAAGAGGAATTACGTAGAAGTGAGGCCATGGATTTCGATGACTTGATTATGATGACACTTCGATTATTTGATCAGAATAAAGATGTTTTGGCCTATTACCAACAGAGGTATCAATATATCCATGTAGACGAGTATCAAGATACTAACCACGCTCAATACCAATTAGTTAAGTTATTAGCTTCGCGTTTCAAAAATATTTGTGTTGTTGGTGATGCCGATCAATCCATTTATGGATGGCGTGGAGCTGATATGCAAAATATTCTTGATTTTGAAAAGGACTATCCGCAAGCCAAAGTTGTATTATTAGAAGAAAATTATCGATCAACTAAGAAAATACTTCAAGCTGCTAATAATGTGATCAATCATAATAAAAATCGCCGTCCTAAAAAATTATGGACTCAAAATGATGAAGGTGAGCAAATTGTATATCATAGAGCTAACAACGAGCAAGAAGAAGCCGTTTTTGTAGCGTCAACTATTGATAACATCGTTCGAGAACAAGGAAAAAATTTCAAAGATTTTGCCGTTCTTTATCGTACGAATGCGCAATCTCGTACTATTGAGGAAGCACTTTTAAAATCCAATATTCCATATACAATGGTTGGTGGAACAAAATTCTATAGTCGTAAAGAAATTCGAGATGTTATTGCTTATCTCAATATCCTTGCAAATACTTCTGATAATATTTCTTTTGAGCGGATTGTAAATGAACCTAAAAGAGGGGTGGGGCCAGGAACTTTAGAAAAAATACGGTCATTTGCCTATGAACAGAACATGTCTCTTCTTGATTCCTCTTCAAATGTCATGATATCGCCCTTAAAAGGGAAGGCTGCTCAAGCTGTTTGGGATTTAGCTAATCTGATTTTGACTCTACGTAGTAAGCTAGATAGTTTAACTGTAACGGAGATTACAGAAAACCTACTGGATAAGACAGGATATCTAGAAGCACTTCAAGTTCAAAATACATTAGAAAGTCAAGCGCGTATTGAAAATATTGAAGAATTCTTATCAGTGACTAAAAATTTTGACGATAACCCAGAGATTACAGTAGAGGGTGAAACTGGTTTAGATCGTCTATCGCGTTTTTTAAATGATTTAGCTTTAATAGCAGATACTGATGATAGCGCCACTGAAACGGCTGAAGTCACTTTAATGACATTACATGCTGCCAAGGGTCTAGAATTTCCAGTTGTTTTCTTAATCGGTATGGAAGAAGGAGTATTTCCTTTATCGCGTGCAATAGAGGATGCTGATGAATTAGAAGAAGAGCGTCGTTTAGCTTATGTCGGGATTACGAGAGCAGAACAAATACTTTTCCTTACCAATGCTAATACCCGTACTTTATTTGGTAAAACTAGTTATAATAGACCAACCCGTTTTATACGTGAGATTGATGATGAACTGATACAATACCAAGGGTTAGCTCGACCAGTTAATTCTTCATTTGGTGTGAAATATTCAAAAGAACAGCCTACACAATTTGGTCAAGGAATGAGTCTTCAACAAGCGCTTCAGGCACGTAAAAGTAATTCACAACCTCAAGTAACTGCCCAACTCCAGGCTCTTAACACGAACAATAGCCATGAGACATCATGGGAGATTGGTGATGTTGCAACTCATAAAAAATGGGGGGACGGTACGGTGCTTGAAGTTTCAGGTAGCGGAAAGACTCAAGAGTTAAAAATAAATTTTCCAGGTATTGGGTTAAAGAAATTATTAGCGAGTGTCGCTCCTATTAGCAAAAAGGAAAAC

SEQ ID NO: 6762 - protein, 759 aa, Streptococcus agalactiae
MNPLIIGMNDKQAEAVQTTDGPLLIMAGAGSGKTRVLTHRIAYLIDEKYVNPWNILAITFTNKAAREMRERAIALNPATQDTLIATFHSMCVRILRREADYIGYNRNFTIVDPGEQRTLMKRIIKQLNLDTKKWNERSILGTISNAKNDLLDEIAYEKQAGDMYTQVIAKCYKAYQEELRRSEAMDFDDLIMMTLRLFDQNKDVLAYYQQRYQYIHVDEYQDTNHAQYQLVKLLASRFKNICVVGDADQSIYGWRGADMQNILDFEKDYPQAKVVLLEENYRSTKKILQAANNVINHNKNRRPKKLWTQNDEGEQIVYHRANNEQEEAVFVASTIDNIVREQGKNFKDFAVLYRTNAQSRTIEEALLKSNIPYTMVGGTKFYSRKEIRDVIAYLNILANTSDNISFERIVNEPKRGVGPGTLEKIRSFAYEQNMSLLDSSSNVMISPLKGKAAQAVWDLANLILTLRSKLDSLTVTEITENLLDKTGYLEALQVQNTLESQARIENIEEFLSVTKNFDDNPEITVEGETGLDRLSRFLNDLALIADTDDSATETAEVTLMTLHAAKGLEFPVVFLIGMEEGVFPLSRAIEDADELEEERRLAYVGITRAEQILFLTNANTRTLFGKTSYNRPTRFIREIDDELIQYQGLARPVNSSFGVKYSKEQPTQFGQGMSLQQALQARKSNSQPQVTAQLQALNTNNSHETSWEIGDVATHKKWGDGTVLEVSGSGKTQELKINFPGIGLKKLLASVAPISKKEN

SEQ ID NO: 6763 - protein, 384 aa, Streptococcus agalactiae
ATGAAATTCAATTTAGAACAAGTAAAAGTATTTGAGAATTACGAAATTGAAAACTGGGAAGAAGGTCAAGTTACCTTAACAACGAAGGTCGTTGACTCTTCGCTCAACTATTATGGTAATGCTCATGGTGGTTATTTGTTTACACTGTGTGATCAAGTCAGTGGTTTAGTTGCTATTTCAACAGGATATGAAGCGGTAACTCTACAATCAAATATCAACTATTTGAGGGCAGGCCGATTAGATGATCTGCTTACTGTCATCGGTACTTGTGTTCATAATGGTCGTACTACAAAAGTCGTTGATGTTCACATTAAAAATCAGAAAGACGAAATGGTTACAACTGCTATTTTTACAATGTTTGTAACTGGAGAGAGAAAAGAGAAG

SEQ ID NO: 6764 - protein, 128 aa, Streptococcus agalactiae
MKFNLEQVKVFENYEIENWEEGQVTLTTKVVDSSLNYYGNAHGGYLFTLCDQVSGLVAISTGYEAVTLQSNINYLRAGRLDDLLTVIGTCVHNGRTTKVVDVHIKNQKDEMVTTAIFTMFVTGERKEK

SEQ ID NO: 6765 - protein, 876 aa, Streptococcus agalactiae
ATGATTATTGTTATTGGTTTAGGTTTGGCAAACTCTGCTGTAACTAATGCAGGTTTTGTCGCTAAAGGTGATTGGCGTAAAATGCTAGTTGCTGTTGTTACATTCTTGATTGCAGCTTTTATCAATACTAAAGGGAAAGGTTTTATCAAGATTATTCCATTTTTATTTGCAATTATTGGAGGTTATATTTTATCAATCATTCTTGGCTTGGTAGATTTATCTCCAGTTGAAAAAGCTGACTGGTTTGAATTACCAAAATTCTATTTACCGTTTAAGACAGGTTTATTTCACAGTTATAAACTTTACTTTGGACCAGAAATGCTTGCAATTCTTCCAATCTCAATTGTAACGATTGCTGAAAATATCGGTGATCATACAGTTTTAGGTCAGATTTGTGGGCGTAACTTTCTAAAAAAACCAGGTTTAAATCGTCTTTTAATTGGAGATGGTTTAGCAACCGCATTTTCTGCTCTTATAGGAGGGCCAGCTGAAACTACTTATGGTGAAAATACAGGTGTTATTGGCATGACGCGTATAGCTTCTGTAACGGTTATTCGTAATGCAGCTTTTATTGCAATCGCTTTTTCATTCTTTGGTAAATTTACAGCTTTGATCTCTACAATTCCTAGTGCAGTACTTGGTGGAATGGCTATATTACTTTATGGTGTTATTGCAAGTAATGGATTAAAAGTGTTGATTGAAAATCGTGTCAATTTTGCTGAGGTTCGTAATCTGATTATTGCCAGTTCCATGTTAGTTTTAGGCCTCGGTGGAGCAGTCCTTGATCTAGGTGCTCTAACTTTATCAGGAACAGCATTAAGTGCTATAGTGGGTATTATATTAAATTTAATATTGCCAAAAGAAAGCATGAAATCA

SEQ ID NO: 6766 - protein, 292 aa, Streptococcus agalactiae
MIIVIGLGLANSAVTNAGFVAKGDWRKMLVAVVTFLIAAFINTKGKGFIKIIPFLFAIIGGYILSIILGLVDLSPVEKADWFELPKFYLPFKTGLFHSYKLYFGPEMLAILPISIVTIAENIGDHTVLGQICGRNFLKKPGLNRLLIGDGLATAFSALIGGPAETTYGENTGVIGMTRIASVTVIRNAAFIAIAFSFFGKFTALISTIPSAVLGGMAILLYGVIASNGLKVLIENRVNFAEVRNLIIASSMLVLGLGGAVLDLGALTLSGTALSAIVGIILNLILPKESMKS

SEQ ID NO: 6767 - protein, 141 aa, Streptococcus agalactiae
TTGAACTATCGCGTATCAGTTAAGTTTGTTAACAGTCAAAATATTCCTTGGATGGTTTTAGGAAATGCGAGTAATATTATCGTTAGAGAGGGTGGTATCCGTGGTTTTGTTATCATGTTTGATAAACTGTCNNNNNTTAAT

SEQ ID NO: 6768 - protein, 47 aa, Streptococcus agalactiae
  VARIANT 45, 46: Xaa = Any Amino Acid
MNYRVSVKFVNSQNIPWMVLGNASNIIVREGGIRGFVIMFDKLSXXN

SEQ ID NO: 6769 - protein, 93 aa, Streptococcus agalactiae
ATGGATAAGATTTATTTAAATAACTGTCGGTCTTATGGTTATCATGGTGCTTTTTCGGAAGAACAAGCATTGGGGCAAGTTTCTCAANNNNNT

SEQ ID NO: 6770 - protein, 31 aa, Streptococcus agalactiae
  VARIANT 30, 31: Xaa = Any Amino Acid
MDKIYLNNCRSYGYHGAFSEEQALGQVSQXX

SEQ ID NO: 6771 - protein, 171 aa, Streptococcus agalactiae
GTGAGAAAAACATCAGGAAAAAATAAAGCCTATGACTATATTGCTATAGAAAGTGGGCTTTTTTGTATGCCCAAGAGGACTAGTTTAGATATGACTTTAAATGCTAAAGGTGAAAGTAATCAAATTCTAGTAGATAAGGAGGTACATTCTACTAACTTATTNNNNNTTAAT

SEQ ID NO: 6772 - protein, 57 aa, Streptococcus agalactiae
  VARIANT 54, 55, 56: Xaa = Any Amino Acid
MRKTSGKNKAYDYIAIESGLFCMPKRTSLDMTLNAKGESNQILVDKEVHSTNLXXXN

SEQ ID NO: 6773 - protein, 1343 aa, Streptococcus agalactiae
ATGCTAACACTTTTTACTCATATCAATAGCTTCGTTTGGGGTCCACCTTTACTTGCTTTATTAGTCGGAACAGGTATTTACCTATCATTTCGCTTAGGTTTTGTTCAATTGAGACAACTTTCTAGAGCTTTCAAATTGATTTTCCGAGAAGATAACGGACAAGGGGATATTTCAAGTTATGCTGCTCTTGCAACTGCTCTTGCTGCAACGGTAGGGACAGGTAATATCGTTGGTGTGGCTACGGCTATTAAATCTGGAGGACCAGGAGCTTTGTTTTGGATGTGGGTAGCCGCCTTTTTTGGAATGGCAACAAAATACGCAGAAGGATTATTAGCTATCAAATATCGCACAAAAGATACTAATGGAGAAATTTCTGGAGGACCAATGTACTACATTGTCATGGAATGGGACAAAAATGGAAACCATTAGCAGTCTTTTTTTCTGCAGCAGGTATCTTAGTAGCTCTTTTAGGAATAGGGACATTCACTCAAGTCAATGCAATTGCCTCTTCTCTTGAGCATACTTTCAAAATATCAACTAGATTTACCAGCCTCATTCTTGCTGTTATAGTATTATTTATTATATTTGGAGGTATAAAATCTATTTCAAAAGTTTCAGAAAAAATAGTGCCTTTTATGGCTATAAGCTATATTTTAGCAACACTGATTATTATTGCAGTTAATTACAATAAGATTCCACATACTTTCCAACTCATCTTTAGCGGTGCTTTTTCTGGGACAGCAGCCATTGGTGGTTTTTCTGGAGCTATCGTTAAAGAAGCAATTCAAAAGGGAATTGCTAGAGGAGTTTTCTCAAATGAATCTGGATTGGGTTCTGCTCCAATAGCTGCAGCAGCAGCTAAAACAAAAGAACCTGTTGAACAAGGGCTTATTTCAATGACAGGAACCTTCATTGACACTATTGTTATTTGTACTTTGACAGGGATTGCAATTTTAGTTACAGGAAAATGGCTAGAATTTGATTTACAGGGTGCTCCATTAACACAAGCATCTTTTAATACCGTATTTGGCTCACTAGGTAGTTTTGCTCTAACCTTCTGCCTTGTCTTATTTGCTTTTACTACTATTTTAGGATGGAGCTACTACGGAGAGCGTTGCTTTGAATATCTATTTGGGACTAAATTTATTAACGCTTATCGTATTATTTTTGTCATTATGGTTGGCTTAGGTGGTTTCTTACAGCTCGATCTTATTTGGGTTATCGCTGATATCGTTAATGGTTTAATGGCTTTACCAAATCTAATAGCTCTCCTAGTTTTGTCACCAATTATTGTTAAAGAAACACAGAAATATTTTTCAGAGACTAAAAATATCACTAAGCCT

SEQ ID NO: 6774 - protein, 448 aa, Streptococcus agalactiae
MLTLFTHINSFVWGPPLLALLVGTGIYLSFRLGFVQLRQLSRAFKLIFREDNGQGDISSYAALATALAATVGTGNIVGVATAIKSGGPGALFWMWVAAFFGMATKYAEGLLAIKYRTKDTNGEISGGPMYYIVNGMGQKWKPLAVFFSAAGILVALLGIGTFTQVNAIASSLEHTFKISTRFTSLILAVIVLFIIFGGIKSISKVSEKIVPFMAISYILATLIIIAVNYNKIPHTFQLIFSGAFSGTAAIGGFSGAIVKEAIQKGIARGVFSNESGLGSAPIAAAAAKTKEPVEQGLISMTGTFIDTIVICTLTGIAILVTGKWLEFDLQGAPLTQASFNTVFGSLGSFALTFCLVLFAFTTILGWSYYGERCFEYLFGTKFINAYRIIFVIMVGLGGFLQLDLIWVIADIVNGLMALPNLIALLVLSPIIVKETQKYFSETKNITKP

SEQ ID NO: 6775 - protein, 240 aa, Streptococcus agalactiae
ATGGCAACTTCTACTGAAAACTTACAACTTGCAAAAAGAGGGCCTATTATTAGTATCATTGCCTATATAACACTGGCAGTCGCTAAATTAGCTACAGGTTATTGGTTTGATGCTACTTCACTTGTAGCAGATGGATTTAATAACTTATCTGATATCTTAGGAAATGTAGCACTCTTAATTGGTTTACACTTGGCTAGTCAACCAGCCGACTCAAACCATCGTTTTGGTCACTGGAAAATT

SEQ ID NO: 6776 - protein, 80 aa, Streptococcus agalactiae
MATSTENLQLAKRGPIISIIAYITLAVAKLATGYWFDATSLVADGFNNLSDILGNVALLIGLHLASQPADSNHRFGHWKI

SEQ ID NO: 6777 - protein, 1044 aa, Streptococcus agalactiae
TTGGCTAGTCAACCAGCCGACTCAAACCATCGTTTTGGTCACTGGAAAATTGAAGATTTAGCAAGCCTGATCACCTCTTTTATCATGTTTGTTGTAGGTATTCAAGTTTTTATTCAAACTGTCACTAAGATTATTAATAATACTGATACTAACATTGATCCTCTAGGTGCTATAGTAGGTGCTATATCTGCTCTTGTTATGCTTGGCGTTTATTTCTATAATAAACAATTATCTCAAAGAGTAAAGTCTAGCGCTCTGGTTGCAGCTTCTAAAGATAACCTTTCTGATGCTGTGACATCTATCGGCACATCTATTGCTATCATTGCGGCTTCTCTAAATTTTCCTATTATTGATCGTTTAGCTGCTATCATTATTACTTATTTTATTCTTAAAACAGCTTATGATATTTTTATAGAATCTGCTTTCAGCTTATCGGATGGTTTCGATGATTATCAATTAAAACAATACGAAAAAGCTATATTAACAATTCCTAAAATATCCGCTGTAAAATCTCAACGTGGACGTACTTACGGTAGTAATATTTACCTTGATATTGTTCTCGAAATGAACCCTGATCTCTCAGTCTTTGAAAGTCATGCCATTACCGAAAGAGTGGAAAAACTACTCAGTGATAAATTTTCTGTATATGACATAGATATTCATGTAGAACCCGCTTCTATTCCAGAAGACGAAATTTTCGATAATGTTTACCAAAAATTATACAAAAATGAAAAAATCATCCTAGCAAAAATTCCCGGTTATGAGACCTTTATTAGCCCTGACTTTTATATGATTAATGAAAAGGGAAATATTATCACTTCTGACATGCTTACTAATGCTACAAATCATTCATTGGCAAGCAACTTTAAATATTTCAATGTAAAATCAATTAGTCAAAAAACAAAACTTGTGTCTTATGAATTGGAAGGTAAACGACATACTAGTATTTGGCGCCGTAATGAAAAATGGTTCTTAATCTACCATCAAATAACTGCCAAGTCAAGTCCGTATAAAACGAGACGATATCAAATCACTTCCCTTGAT

SEQ ID NO: 6778 - protein, 348 aa, Streptococcus agalactiae
MASQPADSNHRFGHWKIEDLASLITSFIMFVVGIQVFIQTVTKIINNTDTNIDPLGAIVGAISALVMLGVYFYNKQLSQRVKSSALVAASKDNLSDAVTSIGTSIAIIAASLNFPIIDRLAAIIITYFILKTAYDIFIESAFSLSDGFDDYQLKQYEKAILTIPKISAVKSQRGRTYGSNIYLDIVLEMNPDLSVFESHAITERVEKLLSDKFSVYDIDIHVEPASIPEDEIFDNVYQKLYKNEKIILAKIPGYETFISPDFYMINEKGNIITSDMLTNATNHSLASNFKYFNVKSISQKTKLVSYELEGKRHTSIWRRNEKWFLIYHQITAKSSPYKTRRYQITSLD

SEQ ID NO: 6779 - protein, 390 aa, Streptococcus agalactiae
ATGAAATTATACGTTCAATTAATGGTTATTTTAACCTTTTCATTCGCTGGTGAGGTTCTATCTACTATATTCAACTTACCTGTACCAGGTAGTATTATTGGATTAATATTACTATTCCTAGCGTTAAAATACAAAATCATCAGGCTCAGGCATATTGATGCCGTGGGGAATTTTCTATTAGCAAATATGACCATTTTATTTTTACCACCAGCAGTTGGACTGATGGAGCACTTTCAAGACATAAAGCCCTATCTTTTTGGGATAGCTATCATTATCTTAGGAGCGCTATTTCTCAATATTCTAACTATTGGACTGGTATCCCAATGGATCAAAAAGAGATATGAAGGAGATTATCCAGAAATTGGAGGTAAAAATGGCAACTTTAACGAA

SEQ ID NO: 6780 - protein, 130 aa, Streptococcus agalactiae; identical to SEQ ID NO: 2138

SEQ ID NO: 6781 - protein, 693 aa, Streptococcus agalactiae
ATGGCAACTTTAACGAATAACCCTATCTTTGGTATTATGTTAACCGTATGGGCGTATTACATTGGCATAAGGATTTTTAGAAAATATCCTTCCCCTGCAACAACTCCACTTCTTTTGGCGACTATTTTATTAATTGCTTTTTTAAAATTAACACATATCTCCTATAAAGATTACTACAATGGCGGTTCATTTCTAACGATGTTAATTACGCCTTCAACGGTTGTATTGGCTATTCCTCTCTATAGAACCTTTCATTTAATGAAGCATCACATTAAAAGTATTAGCATTAGCATCATCTTAGCTTCTGTTATCAACACAGTTTTTACCGCAATAGTTGCTAAGTTTTTTGGTATGAAATATTTCTTAGTAATCTCACTTTTCCCAAAGTCCGTAACTACAGCTATGGCCGTTGGAATTACAAGTAAAGCAGGTGGATTAGCTACTATCACTCTGGTCGTAGTTGTTATTACAGGCATCTTAACAAGCGTTTTGGGTCCTATTTTTCTAAAATTATTAAGGATAGAAGATCCTGTTGCTATAGGGCTCGCGCTAGGAGGAACTGGGCATGCTATAGGAACTGGACAAGCCTTAAAATATGGCCAAGTTCAAGGCGCCATGGCTGGACTAGCAATTGGTATCACAGGAATTTGCTATGTTATTGTCAGTCCTTTAGTTGCAGGCTTAATATTGAAA

SEQ ID NO: 6782 - protein, 231 aa, Streptococcus agalactiae
MATLTNNPIFGIMLTVWAYYIGIRIFRKYPSPATTPLLLATILLIAFLKLTHISYKDYYNGGSFLTMLITPSTVVLAIPLYRTFHLMKHHIKSISISIILASVINTVFTAIVAKFFGMKYFLVISLFPKSVTTAMAVGITSKAGGLATITLVVVVITGILTSVLGPIFLKLLRIEDPVAIGLALGGTGHAIGTGQALKYGQVQGAMAGLAIGITGICYVIVSPLVAGLILK

SEQ ID NO: 6783 - protein, 620 aa, Streptococcus agalactiae
ATGATACCGTTAAAAAAAATAACTGTTGGAACGATTATCTGTCTCTCATTTTTGGGTTTAACAGCATGCTCTTCTTCAAATACTCAGCAAACCTCTACTTCAAAATCAAATGTATCACAACATAAAAATATCAAAGCTGACCACGAAGAATTACGTTTGAAATTTAATAAAGTAAAGTTAGGGGTTAAAGCAAATAACTTTAAAGGAGGCACTAGTCTCGCTGAATTAAAACAATTATTTGGTGGCGAACCAAATGAAAAATTTGATACACCAGCGGGAAATGTCACTCTTAAAGGCTATCGTTGGAATGTCGATGATATCTCCATCACTATACAATTATTAAACGATAGTAGCATTGTTCGTTCAATTAGTAATTTTAAGTTTATTCGAGATGCCAACATCACAACAAAAGATTATAATAGTTTAAAAAATGGCATGTCATACAATAAAGTAAAAGAACTTCTAGGAGAACCTGATGATATTTCTCAAGCAGTTTCTTCAGATAAAGAGGAACTACAGGCTGCATGGATTAGTGGCATTCAGTCGTCAGATAGTGATCCAGGAATTAACCTTACATTTGAAAATGATAAACTCACTACAAACAACAGCATGGTTTAAAA

SEQ ID NO: 6784 - protein, 207 aa, Streptococcus agalactiae
MIPLKKITVGTIICLSFLGLTACSSSNTQQTSTSKSNVSQHKNIKADHEELRLKFNKVKLGVKANNFKGGTSLAELKQLFGGEPNEKFDTPAGNVTLKGYRWNVDDISITIQLLNDSSIVRSISNFKFIRDANITTKDYNSLKNGMSYNKVKELLGEPDDISQAVSSDKEELQAAWISGIQSSDSDPGINLTFENDKLTNKQQHGLK

SEQ ID NO: 6785 - protein, 924 aa, Streptococcus agalactiae
TTGGAAGCTCGTAAAGCATGGGACAAACTTGTTGGTCGTGAAGGTGAAGTTGTTACTGTTAAAGGTACACGTGCTGTTAAAGGCGGACTTTCAGTTGAATTTGAAGGACTTCGTGGTTTCATCCCAGCTTCAATGATTGATACTCGTTTTGTACGTAACACTGAAAAATTTGTTGGACAAGAATTTGATGCTAAAATCAAAGAAGTTGATGCAGCAGAAAATCGCTTCATCCTTTCACGTCGTGAAGTTGTTGAAGAATCAGCAGCAGCTGCACGTAAAGAAGTTTTCTCAAACATTGAAGTAGGTTCAGTTGTAACTGGTAAAGTTGCTCGTTTAACAAGCTTTGGTGCTTTCATTGACCTTGGTGGTGTTGATGGACTTGTACACGTAACTGAATTATCACATGAGCGCAATGTTTCACCTAAATCAGTTGTAACTGTTGGTGAAGAAGTTGAAGTTAAAGTACTTTCAATTGATGAAGAAGCTGGTCGTGTATCACTTTCACTTAAAGCAACTACACCTGGCCCATGGGATGGTGTTGAACAAAAACTTGCTGCTGGTGATGTTATTGAAGGTAAAGTAAAACGCTTGACTGACTTTGGTGCTTTTGTTGAAGTGTTACCTGGCATTGATGGACTTGTACACATTTCACAAATTTCACACAAACGTGTTGAAAATCCTAAAGACGTATTATCTGCAGGACAAGAAGTTACTGTTAAAGTTCTTGAAGTTAATTCAGATGCAGAACGTGTATCACTTTCAATGAAAGCTCTTGAAGAGCGTCCAGCGCAAGCAGAAGGTGAAAAAGAAGAAAAACGTCAATCACGTCCACGTCGTCCACGTCGTCAAGAAAAACGCGACTATGAGCTTCCAGAAACACAAACTGGATTCTCTATGGCTGACTTATTCGGTGATATTGAATTA

SEQ ID NO: 6786 - protein, 308 aa, Streptococcus agalactiae
MEARKAWDKLVGREGEVVTVKGTRAVKGGLSVEFEGLRGFIPASMIDTRFVRNTEKFVGQEFDAKIKEVDAAENRFILSRREVVEESAAAARKEVFSNIEVGSVVTGKVARLTSFGAFIDLGGVDGLVHVTELSHERNVSPKSVVTVGEEVEVKVLSIDEEAGRVSLSLKATTPGPWDGVEQKLAAGDVIEGKVKRLTDFGAFVEVLPGIDGLVHISQISHKRVENPKDVLSAGQEVTVKVLEVNSDAERVSLSMKALEERPAQAEGEKEEKRQSRPRRPRRQEKRDYELPETQTGFSMADLFGDIEL

SEQ ID NO: 6787 - protein, 546 aa, Streptococcus agalactiae
ATGGATGCAGTTTACGAAAGCGGAATCGTTTATCCTCCAAGAGATAAGGTGTTCAATGCCATACAGATAACACCACTAGAAAACGTAAAAGTAGTGATTATTGGCCAAGATCCTTACCATGGCCCTCAACAAGCTCAAGGACTCTCATTTTCTGTTCCAGACAATTTACCAGCTCCTCCTTCACTTCAAAATATTCTAAAAGAATTAGCAGAAGATATTGGGTCACGTTCACATCATGACTTAACATCATGGGCGCAACAAGGAGTGCTGCTATTGAATGCTTGTTTAACAGTTCCAGAACACCAAGCTAATGGTCATGCTGGGCTTATATGGGAACCTTTTACTGATGCTGTCATCAAAGTGGTTAACCAAAAGGAAACACCAGTAGTCTTTATTCTGTGGGGTGGCTATGCTCGAAAGAAAAAGTCGCTAATTGATAATCCTATTCATCATATTATTGAGAGTCCTCATCCGAGTCCCTTATCTGCTTATCGTGGCTTCTTTGGTAGCAGACCTTTTTCTAGAACAAATCATTTCTTAGAAGGA

SEQ ID NO: 6788 - protein, 182 aa, Streptococcus agalactiae
MDAVYESGIVYPPRDKVFNAIQITPLENVKVVIIGQDPYHGPQQAQGLSFSVPDNLPAPPSLQNILKELAEDIGSRSHHDLTSWAQQGVLLLNACLTVPEHQANGHAGLIWEPFTDAVIKVVNQKETPVVFILWGGYARKKKSLIDNPIHHIIESPHPSPLSAYRGFFGSRPFSRTNHFLEG

SEQ ID NO: 6789 - protein, 147 aa, Streptococcus agalactiae
TTGGGGTATAGCCAAGCGGTAAGGCAAGGGACTTTGACTCCCTCATGCGTTGGTTCGAATCCAGCTACCCCAGTCAAAGGTATCAAACTTTTGTTTGACACCGTCAAAGAGATATTTGTTGTCCTTGCGGGTTNNNNNTTAATTAAT

SEQ ID NO: 6790 - protein, 49 aa, Streptococcus agalactiae
  VARIANT 45, 46: Xaa = Any Amino Acid
MGYSQAVRQGTLTPSCVGSNPATPVKGIKLLFDTVKEIFVVLAGXXLIN

SEQ ID NO: 6791 - protein, 228 aa, Streptococcus agalactiae
GTGAGTAAAAAAGATAAGAAAATTGAAATTCAAATTTCAGACGCTCAAGTAACAGTTAATGGAACTAAGGTTGATGGATACCAACTCGTTATTGGAAAAAAAATTGTAGGTCAAATTGCAGAGCTAGATTCTAAATTTGCTGTGATTAAAGGTGAGCAAGTGAGTGGATTCTATAAAAATTTAGATCAAGCTATGGGAAATATTATTGAAGAATATAATCTTAATCGC

SEQ ID NO: 6792 - protein, 76 aa, Streptococcus agalactiae; identical to SEQ ID NO: 4036

SEQ ID NO: 6793 - protein, 1020 aa, Streptococcus agalactiae
ATGACAGTAAATTTAGATTGGGATAATTTAGGTTTTGCTTACAGAAAATTACCATTCCGATACATTTCGCATTTTAAAGATGGGAAATGGGATGATGGCAAGTTGACAGATGATGCAACGCTACATATTTCAGAAAGTTCTCCTGCCCTCCACTATGGGCAACAAGCTTTTGAAGGATTGAAAGCTTATAGAACTAAAGATGGCTCTATTCAGTTATTTCGTCCAGATCAAAATGCAGAACGACTTCAAAGAACAGCAGATCGTCTTTTAATGCCACATGTTCCGACAGACAAATTTATTGCAGCGGTTAAATCTGTTGTACGCGCTAATGAGGAGTTTGTTCCACCGTATGGTACAGGGGCAACATTATACATTCGTCCCTTATTAATTGGTGTGGGAGATATTATTGGAGTTAAACCTGCTGAAGAATATATTTTTACGGTATTTGCAATGCCAGTAGGTAGTTATTTTAAAGGTGGTTTAACACCAACTAACTTTATTGTTTCCAAAGAATATGATAGAGCAGCACCGAATGGTACAGGAGCTGCAAAAGTTGGTGGTAACTATGCTGCTAGTCTTCTTCCTGGGAAATACGCTCATGAGAAACAATTTTCAGATGTTATCTATCTTGATCCAGCGACACATACTAAAATTGAAGAGGTTGGAGCAGCTAATTTCTTTGGAATTACTAAAGATAATCAGTTTATCACCCCTTTGAGTCCTTCAATTTTACCTTCAATTACTAAATATTCATTGCTTTACCTTGCTAAAGAAAGGTTTGGTATGGAAGCGATTGAAGGAGATGTCTTTGTCGACGAATTAGATAAATTTACAGAAGCTGGCGCATGTGGTACAGCCGCAGTTATTTCACCAATTGGAGGAATTCAAAACGGAGATGACTTCCATGTCTTCTACAGTGAGACAGAAGTTGGTCCAGCGACACGTAAACTATATGATGAGTTAGTAGGGATCCAGTTTGGTGATGTTGAAGCACCAGAAGGGTGGATTTATAAAGTAGAT

SEQ ID NO: 6794 - protein, 340 aa, Streptococcus agalactiae
MTVNLDWDNLGFAYRKLPFRYISHFKDGKWDDGKLTDDATLHISESSPALHYGQQAFEGLKAYRTKDGSIQLFRPDQNAERLQRTADRLLMPHVPTDKFIAAVKSVVRANEEFVPPYGTGATLYIRPLLIGVGDIIGVKPAEEYIFTVFAMPVGSYFKGGLTPTNFIVSKEYDRAAPNGTGAAKVGGNYAASLLPGKYAHEKQFSDVIYLDPATHTKIEEVGAANFFGITKDNQFITPLSPSILPSITKYSLLYLAKERFGMEAIEGDVFVDELDKFTEAGACGTAAVISPIGGIQNGDDFHVFYSETEVGPATRKLYDELVGIQFGDVEAPEGWIYKVD

SEQ ID NO: 6795 - protein, 2457 aa, Streptococcus agalactiae
ATGTCTAATATTCAAAATATGTCCCTTGAGGACATTATGGGAGAGCGTTTTGGGCGCTATTCTAAGTATATCATTCAAGAACGGGCGTTGCCGGATATTCGTGATGGCTTAAAACCTGTTCAACGTCGAATCCTTTATTCAATGAATAAAGATGGTAATACTTTTGAAAAGGGATTTCGCAAATCTGCAAAATCAGTCGGTAATGTTATGGGGAATTTCCATCCTCATGGGGATTCCTCTATCTATGACGCGATGGTTCGTATGTCTCAAGATTGGAAAAATCGTGAGACATTGATTGAAATGCACGGAAATAATGGTTCTATGGATGGAGATCCTGCGGCGGCTATGCGTTATACGGAAGCCCGTCTATCAGAAATTGCTGGTTATCTTCTTCAAGATATTGATAAGAATACCGTACCCTTTGCCTGGAATTTCGATGATACAGAGAAAGAACCAACTGTTTTACCAGCTGCCTTTCCCAATCTTTTAGTCAACGGAGCAACAGGAATATCTGCAGGCTATGCAACAGATATTCCACCACATAATTTAGCAGAAGTCATTGATGCTGTCGTGTACATGATTGATCACCCTAAAGCTAAATTAGATAAATTAATGGAATTTCTACCTGGTCCAGATTTTCCAACTGGCGCTATCATTCAAGGAAAAGATGAAATTCGTAAGGCATATGAGACTGGTAAGGGGAGAGTAGCGGTTCGCTCGCGAACTGCTATTGAAACCTTAAAAGGTGGTAAGAAACAAATTATTGTTACTGAAATTCCTTATGAAGTTAATAAGTCAGTTTTAGTAAAACGAATCGATGATGTTCGTGTTAATAATAAAGTTCCAGGAATAGCAGAGGTGCGTGATGAGTCTGATAGAGATGGTCTTCGTATCGCTATTGAGCTCAAAAAAGAAGCCGATGAAACAATTGTCTTAAATTATCTTTTTAAATATACAGACCTACAAGTGAATTATAATTTCAATATGGTTGCTATTGATGACTACACCCCTAAGCAGGTGGGTCTATCAAGAATATTAACTAGCTATATCGCTCACCGAAGAGAAATTATTATTGCTCGTTCAAAATTTGATAAAGAAAAAGCCGAAAAACGTCTCCATATTGTTGAGGGACTGATTAGGGTTCTTTCTATTTTGGATGAAGTGATTGCATTAATTCGTGCTTCTGAGAATAAAGCTGATGCGAAAGAGAATTTGAAGGTCAGCTATGAGTTTTCAGAAGCCCAAGCAGAGGCTATCGTCACATTGCAATTATATCGTCTCACAAATACTGATATTGTGACGTTGAGAGAAGAAGAAGAAGAACTTCGTCAACAAATCACAATGCTTAAGGCAATTATTAGTGATGAACGTACGATGTATAACGTAATGAAACGTGAGTTACGTGAGGTCAAAAAGAAATTTGCCAATACTAGACGTTCTGAACTTCAAGAATTAGCTGAAACTATTGAAATCGATACTGCAAGTTTAATTATCGAAGAGGACACATACGTCAGTGTTACTAGAGGCGGATATGTAAAACGCACCAGTCCTCGCTCTTTCAATGCATCAACTGTTGATGAACTTGGTAAGCGAGAAGATGACGAATTGATATTTGTGAGCAATGCAAAGACTACCCAACATTTATTGATGTTTACTAACCTTGGTAATCTTGCTTATCGTCCAGTTCATGAATTAGCTGATATTCGATGGAAAGACGTTGGTGAACATTTATCACAAAATCTTGTTAACTTTGCTTCAAATGAAGAAATTATTTATGCTGAATTAGTAGATGATTTTACTAAAGAAACTTATTTTGCTGTCACTAGCTTAGGGCAAATAAAGCGTTTTGAACGTCAAGAAATCAGTCCATGGCGGACATATAAGTCAAAAACAGCTAAATATGCTAAGTTAAAAAATGTAGATGATTACGTTGTGACTGTTGCTCCTATCCAATTAGAGGATGTTATACTTGTCACTTATAATGGTTATGCGTTGAGATTTAGTATAAATGATGTACCAGTCGTTGGTAGTAAAGCCGCAGGTGTAAAAGCGATGAATTTAAAAGATAGTGATCACATCGTATCTGCATTTATAGCTAACACCACAAGTTTATATTTATTAACTCATAGAGGAAGTCTTAAACGAATGGCCATTGATGTTATCCCCACAACTAGTCGTGCTAATCGAGGACTTCAAGTTCTTCGTGAATTGAAATCCAAACCGCATCGCGTTTTTAAAGCAGGACCTGTATATTTAGAGGATTCATCTTTTGAATTTGATTTATTTAGTTCAGTATCGAATCATGAAGGAGATACTTTCGTACTTGAGATTATGTCTAAAACAGGAAAAGTTTACGATGTTGATTTAAGTCAATGGAGTTTTTCTGAACGTACAAGTAATGGCTCTTTTGTATCTGATAAGATTTCTGACGAAGAAGTATTCTCAGTTAAAATTAAG

SEQ ID NO: 6796 - protein, 819 aa, Streptococcus agalactiae
MSNIQNMSLEDIMGERFGRYSKYIIQERALPDIRDGLKPVQRRILYSMNKDGNTFEKGFRKSAKSVGNVMGNFHPHGDSSIYDAMVRMSQDWKNRETLIEMHGNNGSMDGDPAAAMRYTEARLSEIAGYLLQDIDKNTVPFAWNFDDTEKEPTVLPAAFPNLLVNGATGISAGYATDIPPHNLAEVIDAVVYMIDHPKAKLDKLMEFLPGPDFPTGAIIQGKDEIRKAYETGKGRVAVRSRTAIETLKGGKKQIIVTEIPYEVNKSVLVKRIDDVRVNNKVPGIAEVRDESDRDGLRIAIELKKEADETIVLNYLFKYTDLQVNYNFNMVAIDDYTPKQVGLSRILTSYIAHRREIIIARSKFDKEKAEKRLHIVEGLIRVLSILDEVIALIRASENKADAKENLKVSYEFSEAQAEAIVTLQLYRLTNTDIVTLREEEEELRQQITMLKAIISDERTMYNVMKRELREVKKKFANTRRSELQELAETIEIDTASLIIEEDTYVSVTRGGYVKRTSPRSFNASTVDELGKREDDELIFVSNAKTTQHLLMFTNLGNLAYRPVHELADIRWKDVGEHLSQNLVNFASNEEIIYAELVDDFTKETYFAVTSLGQIKRFERQEISPWRTYKSKTAKYAKLKNVDDYVVTVAPIQLEDVILVTYNGYALRFSINDVPVVGSKAAGVKAMNLKDSDHIVSAFIANTTSLYLLTHRGSLKRMAIDVIPTTSRANRGLQVLRELKSKPHRVFKAGPVYLEDSSFEFDLFSSVSNHEGDTFVLEIMSKTGKVYDVDLSQWSFSERTSNGSFVSDKISDEEVFSVKIK

SEQ ID NO: 6797 - protein, 1926 aa, Streptococcus agalactiae
GTGACGAATTATGGCGACGATGCTATTCAAGTCTTAGAAGGATTAGATGCTGTTCGTAAGCGTCCAGGGATGTATATAGGTTCCACAGATGGAACTGGTTTACATCATTTAGTGTGGGAAATTGTAGATAATGCAGTTGATGAAGCTCTATCAGGTTTTGGAAATCGCATTGATGTTATTATTAACAAAGATGGGAGTATAACTGTTACAGACCATGGACGCGGTATGCCAACTGGAATGCATGCTATGGGAAAACCTACTGTTGAAGTCATCTTCACGGTGCTTCATGCAGGTGGAAAATTTGGACAAGGTGGTTATAAAACATCAGGTGGTCTCCATGGTGTTGGATCATCTGTAGTTAATGCTTTGTCTTCTTGGTTAGAAGTTGAAATCATTCGCGACGGAGCTATTTACAGACAACGTTTTGAAAATGGTGGTAAGCCCGTTACAACCCTGAAAAAAATCGGCACGGCACCAAAATCAAAATCTGGGACATCTGTCAGCTTTATGCCAGATCAGTCAGTATTTTCAACGATAGATTTTAAGTTTAATACAATTGCAGAGCGCTTAAAGGAATCTGCCTTTCTCTTAAAAAATGTTACTTTAACCTTAACAGATAATCGTTCAGAAGAAGCAGAGCATCTAGAATTTCATTATGAAAACGGTGTTCAAGATTTTGTAGAGTATTTAAATGAAGATAAAGAAACGTTGACACCAATCATGTTTTTCGAAGGTGAAGAACAAGAATTTCATATCGAAGTTGCTTTGCAGTATAATGATGGTTTTTCAGATAATATTCTTTCTTTTGTCAATAATGTTCGTACTAAAGATGGTGGAACACATGAAACTGGCTTGAAATCAGCTATTACAAAGTCTATGAATGACTATGCACGTAAAACAGGACTTCTTAAAGAAAAAGATAAAAACCTTGAAGGTTCTGATTATCGTGAGGGGCTATCAGCCATTTTATCTATTCTTGTACCTGAGGAGCACTTGCAATTTGAAGGCCAAACTAAAGATAAACTAGGAAGTCCCTTAGCACGACCAATTGTTGATGGTATTGTTTCTGAAAAGTTAACTTACTTTCTTATGGAAAATGGAGATTTAGCATCTAATTTAATCCGTAAGGCAATAAAAGCACGTGATGCGCGTGAAGCTGCACGTAAAGCTCGTGATGAAAGTAGAAATGGGAAAAAGTCGAAAAAAGATAAAGGTCTACTTTCTGGAAAATTAACCCCTGCACAATCAAAAAATGCTAAGAAAAATGAACTCTATTTAGTCGAAGGAGACTCTGCAGGTGGCTCTGCTAAGCAAGGTCGTGATAGAAAGTTTCAAGCTATTTTACCGTTGCGAGGAAAAGTATTGAATACAGCTAAGGCAAAGATGGCTGATATTATAAAAAACGAAGAAATTAATACAATGATCCATACCATTGGTGCAGGTGTTGGTCCTGATTTTAATATTGACGATATTAATTATGATAAAGTTATCATTATGACCGATGCTGATACTGACGGAGCTCATATTCAGACACTATTATTAACTTTCTTTTATCGCTATATGAGACCTCTTGTTGAAGAGGGACATGTCTATATTGCTTTGCCACCTTTGTATAAAATGTCAAAAGGAAAAGGTAAGAAAGAAATTGTTGAGTATGCTTGGACGGATATAGAGTTAGAAGAATTACGACAAAAATTTGGTAAAGGCTCACTATTACAACGATATAAAGGGCTTGGGGAAATGAATGCCGATCAATTGTGGGAAACCACTATGAACCCTGAGACAAGGACATTAATTCGTGTAACAATTGAAGATTTAGCAAGAGCAGAACGTCGAGTTAATGTCTTGATGGGTGATAAAGTTCCTCCAAGACGCCAATGGATTGAAGATAATGTCAAGTTTACTTTAGAAGAGAATACAGTATTT

SEQ ID NO: 6798 - protein, 642 aa, Streptococcus agalactiae; identical to SEQ ID NO: 2156

SEQ ID NO: 6799 - protein, 636 aa, Streptococcus agalactiae
ATGAATATTATAATTATGATTATCATTGCCTATCTGTTAGGCTCTATCCAAACTGGACTTTGGATTGGTAAATATTTTTACCAAGTCAATCTTCGTCAACACGGTAGTGGTAATACTGGCACCACGAATACCTTCCGTATTTTAGGTGTAAAAGCTGGCATTGTCACTTTGACTATTGACATTTTAAAAGGGACTCTAGCAACACTTATTCCTATCATATTAGGTATAACGACAGTATCTCCATTTTTTATCGGTTTTTTTGCTATTATAGGTCACACTTTCCCTATTTTTGCACAATTCAAAGGTGGGAAAGCCGTTGCTACAAGCGCTGGGGTTTTGCTAGGATTTGCACCTTCTTTTTTCCTTTACTTATTAGTTATCTTTTTATTAACGCTTTATCTTTTTAGCATGATTTCCCTATCCAGTATTACAGTAGCTGTCGTAGGTATTCTTAGTGTCTTAATTTTTCCATTAGTAGGCTTTATATTAACGGACTACGACTGGATATTTACCACTGTGGTTATCTTAATGGCTCTCACGATTATTATCCGACATCAGGATAATATCAAACGTATTCGAAAAAGGCAAGAAAATTTGGTTCCGTTTGGCTTAAACCTAAGTAAACAAAAAAATAAA

SEQ ID NO: 6800 - protein, 212 aa, Streptococcus agalactiae
MNIIIMIIIAYLLGSIQTGLWIGKYFYQVNLRQHGSGNTGTTNTFRILGVKAGIVTLTIDILKGTLATLIPIILGITTVSPFFIGFFAIIGHTFPIFAQFKGGKAVATSAGVLLGFAPSFFLYLLVIFLLTLYLFSMISLSSITVAVVGILSVLIFPLVGFILTDYDWIFTTVVILMALTIIIRHQDNIKRIRKRQENLVPFGLNLSKQKNK

SEQ ID NO: 6801 - protein, 651 aa, Streptococcus agalactiae
ATGAAACATTCTAGTTGGCATGATTTAATAAAAAGAGAACTACCCAATCATTACTACAATAAAATTAATACATTTATGGATGCAGTTTACGAAAGCGGAATCGTTTATCCTCCAAGAGATAAGGTGTTCAATGCCATACAGATAACACCACTAGAAAACGTAAAAGTAGTGATTATTGGCCAAGATCCTTACCATGGCCCTCAACAAGCTCAAGGACTCTCATTTTCTGTTCCAGACAATTTACCAGCTCCTCCTTCACTTCAAAATATTCTAAAAGAATTAGCAGAAGATATTGGGTCACGTTCACATCATGACTTAACATCATGGGCGCAACAAGGAGTGCTGCTATTGAATGCTTGTTTAACAGTTCCAGAACACCAAGCTAATGGTCATGCTGGGCTTATATGGGAACCTTTTACTGATGCTGTCATCAAAGTGGTTAACCAAAAGGAAACACCAGTAGTCTTTATTCTGTGGGGTGGCTATGCTCGAAAGAAAAAGTCGCTAATTGATAATCCTATTCATCATATTATTGAGAGTCCTCATCCGAGTCCCTTATCTGCTTATCGTGGCTTCTTTGGTAGCAGACCTTTTTCTAGAACAAATCATTTCTTAGAAGAAGAAGGAATAAATGAGATTGATTGGTTAAAT

SEQ ID NO: 6802 - protein, 217 aa, Streptococcus agalactiae
MKHSSWHDLIKRELPNHYYNKINTFMDAVYESGIVYPPRDKVFNAIQITPLENVKVVIIGQDPYHGPQQAQGLSFSVPDNLPAPPSLQNILKELAEDIGSRSHHDLTSWAQQGVLLLNACLTVPEHQANGHAGLIWEPFTDAVIKVVNQKETPVVFILWGGYARKKKSLIDNPIHHIIESPHPSPLSAYRGFFGSRPFSRTNHFLEEEGINEIDWLN

SEQ ID NO: 6803 - protein, 483 aa, Streptococcus agalactiae
ATGAGAGAAACCGAAACACACGATCACCAAGCGCTAATTCAAAAATTGTTAGTCAGTATTCATTATTTAACCTTGTTTCGTGATGAAATTATATTAGTAGAAAAAACCCCATCTTTACTGGGGAAACATTTTTCTATTGCTATTGTGCAGAATGAACTAGGTGAGATACTTTCTAAAATAGAAGCTTTGAGTAAGCAAAAAAAACTGATTCGTTCTATTTATTGGTATGATGAATCGTCATTTAAAGTCATGAATAAGGCTCTGGCTATTGTAGAAGAATGGATTAAGGGCTTAGATAATCTTTTAGAATTCTGTCAATTACAGACGGTTTTTCAAGCAATTTTAGGTGATGAACGTGCACATGTATTTGGAATCCTTATTGATGTTTATACTTCTTTAAACATTATAAATACTTCTTTGAAAGAAGAAAATTCTAGACCAGTGTCCTTATCTGATTTGGCTCTAGGTCTTAAGGACGAAGAT

SEQ ID NO: 6804 - protein, 161 aa, Streptococcus agalactiae
MRETETHDHQALIQKLLVSIHYLTLFRDEIILVEKTPSLLGKHFSIAIVQNELGEILSKIEALSKQKKLIRSIYWYDESSFKVMNKALAIVEEWIKGLDNLLEFCQLQTVFQAILGDERAHVFGILIDVYTSLNIINTSLKEENSRPVSLSDLALGLKDED

SEQ ID NO: 6805 - protein, 1239 aa, Streptococcus agalactiae
ATGAAGCCAATTTGTATTATTCCTGCGCGATCAGGGTCAAAAGGATTACCAGATAAGAATATGTTATTCCTAGCAGGTAAACCCATGATTTTCCATACTATAGATGCTGCAATTGAATCTGGAATGTTTGATAAGAAAGATATTTTTGTTAGTACAGATTCAGAATTGTACAGAGAGATTTGTTTAGAACGCGGTATTTCAGTGGTGATGAGAAAACCGGAACTTTCAACTGATCAGGCAACTTCGTATGATATGTTAAAAGATTTTTTATCTGACTATGAAGATAATCAGGAGTTTGTGTTACTTCAAGTAACCTCTCCACTAAGAAAATCATGGCATATAAAGGAAGCAATGGAGTATTATTCTTCACATGATGTTGACAATGTTGTAAGTTTTTCTGAAGTTGAGAAACACCCTGGTCTGTTTACGACATTGTCTGATAAAGGCTATGCTATAGATATGGTGGGAGCAGATAAAGGTTATCGTCGCCAAGATTTACAACCTTTATACTATCCGAACGGCGCTATTTTTATTTCTAATAAAGAAACTTACTTAAGGGAAAAAAGCTTTTTCACCTCTAGGACATATGCTTATCAAATGGCAAAGGAATTTTCATTAGATGTTGATACGAGAGATGATTTTATCCACGTCATCGGTCACCTCTTTTTCGATTATGCCATTAGGGAAAAAGAGAATAAAGTTTTTTATAAAGAAGGCTATAGTCGTTTGTTCAATAGAGAAGCTTCAAAGATAATTTTAGGTGATTCAAAAACGATATCTATCTCACTAGAAAATTACCATAATTATTCCCAAGGTGGTGTAACATTAGCAACGATGTTGGAAAACTTACCTAACTTTTTGACAGCTAATGTAACAGAGGCTTTTGTTTCTATAGGGGTAAATGATCTCATTACAGGTTATAGTGTGGAAGAAATATTCAGCAATTTCCAAAAACTCTACTCATTATTAGCTGAGAATAAAATAAAGATGAGATTTACAACTATTGCTTACACCCTTTTTAGAGAAACTGTCAATAATGCAGATATTGAGAAAATCAATCAATGGCTAACAGAATTTTGTTATCAAAATCAGATTCCACTGTTAGATATTAATAGATTTTTATCAAAGGATGGTAATCTAAATTATCATTTAACTAGTGATGGATTACATTTTACTCAAGAGGCTAATGATTTGTTACAAAGTCAATATCAATTATTTGTAGACGAAGTTAAAACCTTA

SEQ ID NO: 6806 - protein, 413 aa, Streptococcus agalactiae
MKPICIIPARSGSKGLPDKNMLFLAGKPMIFHTIDAAIESGMFDKKDIFVSTDSELYREICLERGISVVMRKPELSTDQATSYDMLKDFLSDYEDNQEFVLLQVTSPLRKSWHIKEAMEYYSSHDVDNVVSFSEVEKHPGLFTTLSDKGYAIDMVGADKGYRRQDLQPLYYPNGAIFISNKETYLREKSFFTSRTYAYQMAKEFSLDVDTRDDFIHVIGHLFFDYAIREKENKVFYKEGYSRLFNREASKIILGDSKTISISLENYHNYSQGGVTLATMLENLPNFLTANVTEAFVSIGVNDLITGYSVEEIFSNFQKLYSLLAENKIKMRFTTIAYTLFRETVNNADIEKINQWLTEFCYQNQIPLLDINRFLSKDGNLNYHLTSDGLHFTQEANDLLQSQYQLFVDEVKTL

SEQ ID NO: 6807 - protein, 627 aa, Streptococcus agalactiae
ATGAAAAAAAAGTTGGCATTTTTAGGCGCAGGAAGTCATGCTGATGCGATTGCTCCGGTTATTGATCCTCTTGTGTATGATTTCGTAGGTTTTTTTGATGATAAAGATATTACGGAGCATGATGGTTATCCTGTTCTTGGAAAACTTTATGATGTGCTACCTTACCTTGAAGATGGCTCAATAGATGCAGTATTTATTACAATAGGTGATAATGCTAAAAGGAAAGAACTATTTGAATATGTAGCAAAGGATTATTATGACTGTATTATTAACATCATTAGTCCCAATGCTTTAGTATTGACACCAGATAGTATTTGTGGGCGTGGTATCTTTATTGGTTTTGGGGCTTTTATAGGTTCTAAAGTGAAGCTGTTTGATAACAACGTTGTTAATACAGGAGCGCTCATTGAACATCATACTGTTGTAGAATCACACTGTAATATAGCACCTAATGCTACCATAAATGGTCTTTGTTATATTAGAGAAGAAGTTTATGTAGGTAGTGCCAGTGTTATTATTCAAACCTTGGATATTTCATCGTGTACGACAATTGGCGCAGGAGCTGTTGTTGTAAAAGATATTATAGAACCTGGAACCTATGTAGGGGTTCCAGCCAAAAAAATAAAA

SEQ ID NO: 6808 - protein, 209 aa, Streptococcus agalactiae
MKKKLAFLGAGSHADAIAPVIDPLVYDFVGFFDDKDITEHDGYPVLGKLYDVLPYLEDGSIDAVFITIGDNAKRKELFEYVAKDYYDCIINIISPNALVLTPDSICGRGIFIGFGAFIGSKVKLFDNNVVNTGALIEHHTVVESHCNIAPNATINGLCYIREEVYVGSASVIIQTLDISSCTTIGAGAVVVKDIIEPGTYVGVPAKKIK

SEQ ID NO: 6809 - protein, 1152 aa, Streptococcus agalactiae
ATGAAAAAAATTTGTTTAGTAACCGGATCGCGTGCTGAATACGGAATAATGAAGCCATTGATTCAAAGATTATCAAAAGATAAAGAAGTCAACTTACAAATTATTGCGACAGCAATGCATCTGGAAGAAAAGTACGGCTATACTTATCGTCAAATTGAAGAAGACGGTTTTGATATTGCTTATAAAGTTCCCTTACATCTTTATGATACTGACAGAAGAACTGTATCTACTGCAATGGCGCATTTACAACTAGGATTGACCAAAATTTTTGACAAGGAAGACTATGATCTAGTCATCATTTTAGGGGATCGTTACGAAATGTTACCAGTTGTGAATGTAGCGTTGATTTATAATGTCCCAGTATGCCACCTTCATGGAGGGGAGACCTCATTAGGCAATTTTGATGAGTATATTCGCCATGCAGTTACTAAGATGAGTCACCTACACTTAGTCTCTACAGAGGACTTTCGTCAACGTGTGATTCAGATGGGAGAACAACCTCAATTTGTAATTAACACAGGAGCTCTCGGAGTGGAAAATGCTCTATCAATCCCTTCTCTAACCAAAGAAGCAATAGAAAAGCAATTAGGTATTGTACTAGAGGAATCCTATTTTGTTGTTCTCTATCATCCTGTTACTTTTGAACAAGGAAAAAGTGCTGGAGAACAGATGAAAGCGGTACTATCAGCCCTTTCTAAATTTGGTGTCCAGTGTCTATTTATAGGATCCAATTCAGATACTGGTTCTGATGATATTGCAAAGGCTATCAATACTTATTTGATAAATCATGAAAATAGTTATTGCTTTGCTTCTTTATCAACCCAACTTTATCATTCCTTAATTCGTCATTCACTAGGACTGATTGGTAATTCGTCTTCTGGTTTAATAGAAGTTCCTTCTTTGATGAAACCTACTCTTAATATTGGTGATCGCCAAAAAGGTAGGCTACATGGAGAAAGTGTAGTAAGTGTACCAGTCGAAACCTCCTCTGTATTGGAGGGATTATCAAAATTGAATGAAGTGACCAACTTTGACAATCCCTACTACAAAGGGAATGCTTCATCTATTGCATATGAAGCAATAAAGCTTTATTTGAAAGATGAACCTTCAATTTCCCAACCATTTTATGATTTAAAGGAGAATAATCTAAAA

SEQ ID NO: 6810 - protein, 384 aa, Streptococcus agalactiae
MKKICLVTGSRAEYGIMKPLIQRLSKDKEVNLQIIATAMHLEEKYGYTYRQIEEDGFDIAYKVPLHLYDTDRRTVSTAMAHLQLGLTKIFDKEDYDLVIILGDRYEMLPVVNVALIYNVPVCHLHGGETSLGNFDEYIRHAVTKMSHLHLVSTEDFRQRVIQMGEQPQFVINTGALGVENALSIPSLTKEAIEKQLGIVLEESYFVVLYHPVTFEQGKSAGEQMKAVLSALSKFGVQCLFIGSNSDTGSDDIAKAINTYLINHENSYCFASLSTQLYHSLIRHSLGLIGNSSSGLIEVPSLMKPTLNIGDRQKGRLHGESVVSVPVETSSVLEGLSKLNEVTNFDNPYYKGNASSIAYEAIKLYLKDEPSISQPFYDLKENNLK

SEQ ID NO: 6811 - protein, 1023 aa, Streptococcus agalactiae
ATGGTTTATATTATTGCAGAGATTGGTTGCAATCATAATGGAGATATTAATCTTGCGAAAAAAATGGTAGATGTTGCGGTGTCTTGTGGTGTTGATGCTGTTAAATTTCAGACTTTTAAAGCTGAGAAACTTATTTCTAAATTTGCTCCCAAAGCTGAATATCAAAAAGAAACTACAGGAACAGCAGACAGTCAACTTGAGATGACGAAACGTTTAGAGTTAAGCTTTGAAGAATACTTAGAAATGCGTGATTATGCAATTTCAAAAGGTGTGGAGACCTTTTCAACACCTTTTGATGAAGAGTCATTAGAGTTCTTAATTTCTACAGATATGCCAATTTACAAAATTCCATCAGGAGAAATCACTAATTTACCTTACTTAGAAAAGATTGGCAAGCAACAAAAGAAAGTTATTCTTTCGACGGGTATGGCGGTAATGGAAGAGATCCATCAAGCGGTGAATATTTTACGTCAGAATGGTACAACTGACATTTCTATTTTACATTGTACAACAGAGTACCCAACACCTTACCCCTCTCTAAATTTAAACGTTATTCATACTTTGAAAGATGAATTTAAAGATTTAACGATAGGTTATTCGGATCATTCAATTGGATCAGAAGTACCTATCGCAGCAGCAGCAATGGGTGCAGAAGTTATTGAAAAACACTTTACTTTAGATACTAATATGGAAGGTCCGGATCATAAAGCCAGTGCAACACCTGATATTTTAGCTGCTTTAGTTAAAGGGGTTCGCATTGTTGAACAAGCCTTAGGTAGATTTGAAAAAATCCCAGATCCAGTAGAAGAAAAAAATAAGATTGTTGCTCGTAAATCAGTCGTTGCTTTAAAACCAATTAAAAAAGGCGATATTTATTCAATAGAAAATATTACGGTGAAGCGCCCAGGTAATGGTATTTCTCCTATGAACTGGTATGACATCTTGGGACAAGAAGCGCAAGATGATTTCGAAGAGGATGAAGTTATTCGTGATTCACGCTTTGAAAATCAATTGCCCGAGTTA

SEQ ID NO: 6812 - protein, 341 aa, Streptococcus agalactiae
MVYIIAEIGCNHNGDINLAKKMVDVAVSCGVDAVKFQTFKAEKLISKFAPKAEYQKETTGTADSQLEMTKRLELSFEEYLEMRDYAISKGVETFSTPFDEESLEFLISTDMPIYKIPSGEITNLPYLEKIGKQQKKVILSTGMAVMEEIHQAVNILRQNGTTDISILHCTTEYPTPYPSLNLNVIHTLKDEFKDLTIGYSDHSIGSEVPIAAAAMGAEVIEKHFTLDTNMEGPDHKASATPDILAALVKGVRIVEQALGRFEKIPDPVEEKNKIVARKSVVALKPIKKGDIYSIENITVKRPGNGISPMNWYDILGQEAQDDFEEDEVIRDSRFENQLPEL

SEQ ID NO: 6813 - protein, 1398 aa, Streptococcus agalactiae
ATGAATACTAAGAAATTACTTCAATCTGGTTTTATTTATACACTCGGGAATTTATTGGTGCAAGGATTAGCCTTTATCACACTTCCCATCTATACTCGGGTTATCTCAACAGAAGTTTATGGCCAATATAGTTTATATGTCGCTTGGATGAATATTATTATGCTTTTTATTGGCCTTCAGACGAGCGGTTCTTTAAGTTCAGCCCGGGTCAAATACGGAGAAGAATTTAAAAGCTATTCAGGGAGTGCCTTTTCTGTAGGTAATATATGGTTTCTTATTATACTTTTGATAGCTTTTCTATTTAGAAGTTTTCTTGCACCATTAGTTGGTTTTTCTGAATCTATTTTTTTATTAATGGTGTGTCAAAGTTACGCTAGCTATGTGGTGACTTTCTTTGGTCAGTATTTTATACAACAACAGAGGAGTTTGGCTAATTTAATATTATCCTTAGCCAATGCAGTTTCATCTGTTGCACTATCTCTATTTTTAATTTTTCATTGGTCCGATGACTTTTTATCTAGGGTTTTTGGAGCTTTTGTTCCTACTATAATAACTGGAATAGTTGCCTTTGCTTATATTTATTATCATAGCAAATCTTTTTACAATCCTAAGTATTTTCGGTTCATTGTCACTGTGTCTGTTCCTTTGATTTTTCATTTGTTAGGACACCAGTTGTTGGGGCAATTAGATAGAATTATGCTAGCTCGTTTATACAATACTAAAGAAGTTGCAATGTATAGTTTCGGTTATTCGCTTGGAATGATTATTCAGATTGTTTTGAATAGTATTAATATGGCTTGGATTCCATGGTTTTTTGATGCTAGAAAAGAAAAATTACTGCAACTTTCAACTTATATTAGCCGTTATCTCTATTTAGGAGTTTTCTTAACATTAGGTTATTTGACTGTTTTTCCTGAGTTAGCTCAAATAATGGGAGGAGACAAGTATAGTAGTAGTGTTCAATTTATTTCTTTAATTATTGTCAGCTACTTTTTAGTTTTTCTCTATACATTTCCTGTAAATATCCAATTCTTCTATGCTAATACGACATGGATTCCTATTGGGACATTATTAGCTGCTGGTGTAAATTGGTTACTAAACCTTGTATTAATTCCTCATTATGCAGCCTATGGCGCTGCTATGGCTACAATAATATCTTATTTAGCCTTGTTGATTTTTCATCATATTGTTTCGAAAGTTAAATACCATTATTCAGATGTCTCAGTTAGGCAGTACATCATTTTAAGTGGTATAGTATTTAGTTATGCTATGTTAATGAACATGTTCCTAGATAATATCGTTATTAGATGGAGTTTAGGAATAATTATTCTTATAGTATATAGCATTGTTTTTCAAAAAGTCATTTTAGACTTATTGAGTAAAAAAAGAAGGAGAAGA

SEQ ID NO: 6814 - protein, 466 aa, Streptococcus agalactiae
MNTKKLLQSGFIYTLGNLLVQGLAFITLPIYTRVISTEVYGQYSLYVAWMNIIMLFIGLQTSGSLSSARVKYGEEFKSYSGSAFSVGNIWFLIILLIAFLFRSFLAPLVGFSESIFLLMVCQSYASYVVTFFGQYFIQQQRSLANLILSLANAVSSVALSLFLIFHWSDDFLSRVFGAFVPTIITGIVAFAYIYYHSKSFYNPKYFRFIVTVSVPLIFHLLGHQLLGQLDRIMLARLYNTKEVAMYSFGYSLGMIIQIVLNSINMAWIPWFFDARKEKLLQLSTYISRYLYLGVFLTLGYLTVFPELAQIMGGDKYSSSVQFISLIIVSYFLVFLYTFPVNIQFFYANTTWIPIGTLLAAGVNWLLNLVLIPHYAAYGAAMATIISYLALLIFHHIVSKVKYHYSDVSVRQYIILSGIVFSYAMLMNMFLDNIVIRWSLGIIILIVYSIVFQKVILDLLSKKRRRR

SEQ ID NO: 6815 - protein, 954 aa, Streptococcus agalactiae
ATGACTAATTTTGTTTGTCATACTTTATACCATCTACTGATTACTATAATAAAGTTAAAAGATAAAGAAAATACTAGAATATTTATTTGTGACACTATCACGGATTATGAAACTTGGGTAAAGATATTAAATGATCAGGGAATAAGAACTGAATCATTTAAAGAGTTTGCTTATCGGGAGCAGTTACAAAATAAAAATATTGAAGAAGTGATGGAGCTTGTAGATTCAGACTTAAATCACTACTTTGAGAGAGTAGATACACAAGTCTATCTATTTAATGATGATACTTTAATAGGTCGCTATATGGTGTATTTAGGTAAAAATTATCATCTAATTGAAGATGGTTATAACTGTTTTCAAGCCAAGTTATTCTTGGGTGGTTCTGTCGTAAAACGAGTAATTAAAACTTACTTATTTAAAAAGTATGTTCCGTATGGTTTTTCAAAATATTGTCTCTCAATTGAGGTTAATTCTTTAGTGGGGTTACCTCATGACATAAGGAGTAAGAAATATAAAGAACTACCGAGAAAAAAATTATTTGATAGTCTTAACAAAGAACAAAAATCACTGATTTTCAAAATATTTAAAACAAAACCATTAACTATAACTCCAAAGTCAGTATTATTGTTGACACAGCCACTTGCACAAGATAAATGGTATAAAACACCTACAGAGAGGTTTCAAAGTATTCAAGAGCAATACGATTATTTTGACGATATTGTCCAGGAATATAGAACGTTAGGGTACAATGTTTATTTAAAAGTTCATCCTAGAGATGTAGTAGATTATTCCAAATTGCCGGTAGAGCTATTACCATCAAATGTTCCTATGGAAATTATAGAGTTGATGTCAACAGGTCGGTTCGAATGTGGGATAACACATTCGTCCACTGCGCTGGATTCTTTAACTTGTGTTGATAAAAAAATAACTTTAGTAGATCTGAAGGATATTAAA

SEQ ID NO: 6816 - protein, 318 aa, Streptococcus agalactiae
MTNFVCHTLYHLLITIIKLKDKENTRIFICDTITDYETWVKILNDQGIRTESFKEFAYREQLQNKNIEEVMELVDSDLNHYFERVDTQVYLFNDDTLIGRYMVYLGKNYHLIEDGYNCFQAKLFLGGSVVKRVIKTYLFKKYVPYGFSKYCLSIEVNSLVGLPHDIRSKKYKELPRKKLFDSLNKEQKSLIFKIFKTKPLTITPKSVLLLTQPLAQDKWYKTPTERFQSIQEQYDYFDDIVQEYRTLGYNVYLKVHPRDVVDYSKLPVELLPSNVPMEIIELMSTGRFECGITHSSTALDSLTCVDKKITLVDLKDIK

SEQ ID NO: 6817 - protein, 945 aa, Streptococcus agalactiae
ATGATAAAGAAAATTGAAAAGGATTTAATAAGTGTAATTGTACCTATTTATAATGTTGAAGATTATTTAGTTGAATGTATAGAAAGCCTTATTGTTCAAACATATCGAAATATTGAAATATTATTGATTAATGATGGTTCGACGGATAATTGTGCGACAATTGCCAAAGAATTTTCTGAAAGAGATTGTAGAGTTATCTATATAGAAAAGTCGAATGGTGGGTTGTCAGAAGCTAGAAACTATGGAATTTATCATTCAAAGGGAAAATACTTAACTTTTGTTGATTCAGATGATAAAGTTTCCTCTGATTACATAGCGAATTTGTATAATGCTATTCAAAAACATGATTCGTCTATAGCTATCGGTGGCTATTTAGAATTTTATGAAAGACATAATAGCATAAGAAATTATGAATATTTAGACAAAGTGATACCAGTTGAAGAAGCACTACTAAACATGTATGACATTAAAACTTATGGTTCAATTTTTATTACTGCATGGGGAAAATTATTCCATAAATCTATATTCAATGATTTAGAATTTGCATTAAATAAGTATCATGAGGATGAATTCTTTAACTATAAAGCATACTTAAAAGCTAATTCTATAACATACATAGACAAGCCTCTCTATCATTATCGTATACGAGTAGGTAGTATCATGAATAATAGTGATAATGTTATAATTGCTAGAAAGAAACTTGATGTTTTATCAGCATTAGACGAGCGAATAAAACTTATAACAAGTTTACGTAAGTATTCCGTTTTTTTACAAAAAACAGAAATATTTTATGTCAATCAATATTTTAGGACTAAAAAATTTTTAAAACAACAATCTGTAATGTTTAAAGAAGATAACTATATCGATGCTTATAGAATGTATGGACGGTTACTTAGAAAAGTGAAGTTAGTTGATAAATTAAAACTTATAAAAAATAGGTTTTTC

SEQ ID NO: 6818 - protein, 315 aa, Streptococcus agalactiae
MIKKIEKDLISVIVPIYNVEDYLVECIESLIVQTYRNIEILLINDGSTDNCATIAKEFSERDCRVIYIEKSNGGLSEARNYGIYHSKGKYLTFVDSDDKVSSDYIANLYNAIQKHDSSIAIGGYLEFYERHNSIRNYEYLDKVIPVEEALLNMYDIKTYGSIFITAWGKLFHKSIFNDLEFALNKYHEDEFFNYKAYLKANSITYIDKPLYHYRIRVGSIMNNSDNVIIARKKLDVLSALDERIKLITSLRKYSVFLQKTEIFYVNQYFRTKKFLKQQSVMFKEDNYIDAYRMYGRLLRKVKLVDKLKLIKNRFF

SEQ ID NO: 6819 - protein, 972 aa, Streptococcus agalactiae
ATGGAAAAACGAATACTTGTTTCTATCATTATACCTATATACAACTCAGAAGCATACCTTAAAGAATGTGTGCAATCCGTACTACAACAGACTCATCCATTGATAGAAGTTATACTAATTGATGATGGATCCACTGATAATAGTGGAGAAATTTGTGATAATTTATCTCAAGAAGATAATCGCATACTTGTATTTCATAAAAAAAATGGAGGGGTCTCTTCGGCAAGGAACCTAGGTCTAGATAAATCCACAGGAGAATTCATAACATTTGTGGATAGTGATGATTTTGTAGCACCGAATATGATTGAAATAATGTTAAAAAATTTAATCACTGAGAATGCTGATATAGCAGAAGTAGATTTTGATATTTCGAATGAGAGAGATTATAGAAAGAAGAAAAGACGAAACTTTTATAAAGTCTTTAAAAACAATAACTCTTTAAAAGAATTTTTATCAGGCAATAGAGTGGAAAATATTGTTTGTACAAAATTATATAAAAAAAGTATAATTGGCAACTTGAGGTTTGATGAGAACTTAAAAATTGGTGAGGATTTACTTTTTAATTGTAAACTCTTATGTCAAGAGCACCGTATAGTCGTAGATACGACTTCTTCCTTATATACTTATCGAATTGTAAAAACTTCCGCAATGAATCAGAAATTCAACGAAAACTCATTAGATTTTATAACAATTTTTAATGAAGTAAGTAGTTTGGTTCCTGCCAAATTGGCTAATTATGTTGAAGCGAAATTTTTAAGAGAAAAGATAAAGTGTCTCCGAAAAATGTTTGAATTAGGTAGTAATATTGACAATAAAATCAAAGTACAACGAGAGATTTTTTTCAAAGACATTAAATCATACCCGTTCTATAAAGCGGTAAAATACTTATCATTAAAGGGATTATTAAGCTTTTATTTAATGAAATGTTCACCTAAACTATATGTTATGGCATATAGAAGATTTCAAAAACAG

SEQ ID NO: 6820 - protein, 324 aa, Streptococcus agalactiae
MEKRILVSIIIPIYNSEAYLKECVQSVLQQTHPLIEVILIDDGSTDNSGEICDNLSQEDNRILVFHKKNGGVSSARNLGLDKSTGEFITFVDSDDFVAPNMIEIMLKNLITENADIAEVDFDISNERDYRKKKRRNFYKVFKNNNSLKEFLSGNRVENIVCTKLYKKSIIGNLRFDENLKIGEDLLFNCKLLCQEHRIVVDTTSSLYTYRIVKTSAMNQKFNENSLDFITIFNEVSSLVPAKLANYVEAKFLREKIKCLRKMFELGSNIDNKIKVQREIFFKDIKSYPFYKAVKYLSLKGLLSFYLMKCSPKLYVMAYRRFQKQ

SEQ ID NO: 6821 - protein, 1137 aa, Streptococcus agalactiae
ATGCAACTTTTGTTACTTTTAGCATTAATAGTTTTACTTATTTGTAGTAGTTATAATGAAAAAATGAAATTTTTAAATATGGCTGAAATTTTTTTCATTGTATTTTATATTATTTATTTAACTTCAATATTGCTACATTCTTTGTTTAAAAATCCTGATTTTGATAGAATTTTAGCAGCTTTTAACTCGTTGATTATCGGTATAGTATCATTGGCTTTTTATCATTATTATAAGAATACAACTTTGGAGTTAGATAAAATATTAAAAGCATTTTTATTTAATGGGTTAATCCTATTTTTTTTAGGGGGAACATATTATTATTGTTTGCATAATAATATTCAAAATATCAGTATTTTTGGTAGAGATTTGATTGGGTCAGACTGGATTAATGGTATGCATACTCAAAGAGCAATGGGATTTTTTGAATATTCAAACCTTATAATTCCTATTACAGTGGTAACTAACTTATATATATATATATATATGAAGTTAAGAAACTATTCAATTATGACCATAGGTGTTGTATTATTATTTACCTTTATTTTACCTATTGGATCGGGCTCCAGGGCTGGAATAGTAGCTATATTGGCGCAGATGTTTATTCTTCTTCTAAATACAGTTGTCGTAAAGAAGAAAACTATAAAATTTTTATTGTACATACTTCCGTTTCTACTAGTAATAGTAATGATGTTATATTTTGATAACTTACTATCTATATATTATCGTATAATTAATTTGCGATCCGGGAGTAGTGAATCCAGATTTTCTTTATATAAAGATACAGTAAACATCGTTATAAATAATTCTTTATTATTTGGAGAAGGAGTTAAAGAGTTATGGTTAAATAGTGATCTACCTTTGGGGTCGCATTCAACGTATATAGGCTATTTCTACAAAAGTGGCCTGCTGGGATTAATGAATATAGTTCCAGGTTTGCTTTTAATTTTTACTAATATTGGTAGGAAAGCTAAACAATCAGCTTTTTATTATGAGATAGTAGGAACACTTATAACTTTATTCTCATTTTTTGCACTTGAAGATCTTGACGGAGCTAATTGGCTTATTGTTTTTATTTTTACAGTGTTAGGAATTTTAGAAAATAAGGATTTTTATAGTCAACTTAAAAGGTGGAAAAGT

SEQ ID NO: 6822 - protein, 379 aa, Streptococcus agalactiae
MQLLLLLALIVLLICSSYNEKMKFLNMAEIFFIVFYIIYLTSILLHSLFKNPDFDRILAAFNSLIIGIVSLAFYHYYKNTTLELDKILKAFLFNGLILFFLGGTYYYCLHNNIQNISIFGRDLIGSDWINGMHTQRAMGFFEYSNLIIPITVVTNLYIYIYMKLRNYSIMTIGVVLLFTFILPIGSGSRAGIVAILAQMFILLLNTVVVKKKTIKFLLYILPFLLVIVMMLYFDNLLSIYYRIINLRSGSSESRFSLYKDTVNIVINNSLLFGEGVKELWLNSDLPLGSHSTYIGYFYKSGLLGLMNIVPGLLLIFTNIGRKAKQSAFYYEIVGTLITLFSFFALEDLDGANWLIVFIFTVLGILENKDFYSQLKRWKS

SEQ ID NO: 6823 - protein, 480 aa, Streptococcus agalactiae
ATGATTTTTGTCACAGTGGGGACACATGAACAGCAGTTCAACCGTCTTATTAAAGAAGTTGATAGATTAAAAGGGACAGGTGCTATTGATCAAGAAGTGTTCATTCAAACGGGTTACTCAGACTTTGAACCTCAGAATTGTCAGTGGTCAAAATTTCTCTCATATGATGATATGAACTCTTACATGAAAGAAGCTGAGATTGTTATCACACATGGCGGTCCAGCGACGTTTATGAATGCAGTTTCTAAAGGGAAAAAAACTATTGTGGTTCCTAGACAAGAACAGTTTGGAGAGCATGTGAATAATCATCAGGTGGATTTTTTGAAAGAGTTATTCTTGAAATATGAATTAGATTATATTTTGAATATCAGTGAATTAGAGAATATTATTAAGGAAAAAAATATATCTACTAGTAAAGTAATATCACAAAACAATGATTTTTGTTCCTCTTTCAAAAATGAACTTTCTAAACTATTTGAA

SEQ ID NO: 6824 - protein, 160 aa, Streptococcus agalactiae
MIFVTVGTHEQQFNRLIKEVDRLKGTGAIDQEVFIQTGYSDFEPQNCQWSKFLSYDDMNSYMKEAEIVITHGGPATFMNAVSKGKKTIVVPRQEQFGEHVNNHQVDFLKELFLKYELDYILNISELENIIKEKNISTSKVISQNNDFCSSFKNELSKLFE

SEQ ID NO: 6825 - protein, 447 aa, Streptococcus agalactiae
ATGAAAATTTGTCTGGTTGGTTCAAGTGGTGGTCATCTAGCACACTTGAACCTTTTGAAACCCATTTGGGAAAAAGAAGATAGGTTTTGGGTAACCTTTGATAAAGAAGATGCTAGGAGTATTCTAAGAGAAGAGATTGTATATCATTGCTTCTTTCCAACAAACCGTAATGTCAAAAACTTGGTAAAAAATACTATTCTAGCTTTTAAGGTCCTTAGAAAAGAAAGACCAGATGTTATCATATCATCTGGTGCCGCTGTAGCAGTACCATTCTTTTATATTGGTAAGTTATTTGGTTGTAAGACCGTTTATATAGAGGTTTTCGACAGGATAGATAAACCAACTTTGACAGGAAAATTAGTGTATCCTGTAACAGATAAATTTATTGTTCAGTGGGAAGAAATGAAAAAAGTTTATCCTAAGGCAATTAATTTAGGAGGAATTTTT

SEQ ID NO: 6826 - protein, 149 aa, Streptococcus agalactiae; identical to SEQ ID NO: 4194

SEQ ID NO: 6827 - protein, 1386 aa, Streptococcus agalactiae
TTGAAAGAAAAAGAAAATATACAAAAGATTATTATAGCGATGATTCAAACAGTTGTGGTTTATTTTTCTGCAAGTTTGACATTAACATTAATTACTCCCAATTTTAAAAGCAATAAAGATTTATTGTTTGTTCTATTGATACATTATATTGTCTTTTATCTTTCTGATTTTTACAGAGACTTTTGGAGTCGTGGCTATCTTGAAGAGTTTAAAATGGTATTGAAATACAGCTTTTACTATATTTTCATATCAAGTTCATTATTTTTTATTTTTAAAAACTCATTTACAACGACACGACTTTCCTTTTTTTCTTTTATTGCTATGAATTCGATTTTATTGTATCTATTGAATTCATTTTTAAAATATTATCGAAAATATTCTTACGCTAAGTTTTCACGAGATACCAAAGTTGTTTTGATAACGAATAAGGATTCTTTATCAAAAATGACCTTTAGGAATAAATACGACCATAATTATATTGCTGTCTGCATCTTGGACTCCTCTGAAAAGGATTGTTATGATTTGAAACATAACTCGTTAAGGATAATAAACAAAGATGCTCTTACTTCAGAGTTAACCTGCTTAACTGTTGATCAAGCTTTTATTAACATACCCATTGAATTATTTGGTAAATACCAAATACAAGATATTATTAATGACATTGAAGCAATGGGAGTGATTGTCAATGTTAATGTAGAGGCACTTAGCTTTGATAATATAGGAGAAAAGCGAATCCAAACTTTTGAAGGATATAGTGTTATTACATATTCTATGAAATTCTATAAATATAGTCACCTTATAGCAAAACGATTTTTGGATATCACGGGTGCTATTATAGGTTTGCTCATATGTGGCATTGTGGCAATTTTTCTAGTTCCACAAATCAGAAAAGATGGTGGACCGGCTATCTTTTCTCAAAATAGAGTAGGTCGTAATGGTAGGATTTTTAGATTCTATAAATTCAGATCAATGCGAGTAGATGCAGAACAAATTAAGAAAGATTTATTAGTTCACAATCAAATGACAGGGCTAATGTTTAAGTTAGACGATGATCCTAGAATTACTAAAATAGGAAAATTTATTCGAAAAACAAGCATAGATGAGTTGCCTCAATTCTATAATGTTTTAAAAGGTGATATGAGTTTAGTAGGAACACGCCCTCCCACAGTTGATGAATATGAAAAGTATAATTCAACGCAGAAGCGACGCCTTAGTTTTAAGCCAGGAATCACTGGTTTGTGGCAAATATCTGGTAGAAATAATATCACTGATTTTGATGAAATCGTAAAGTTAGATGTTCAATATATCAATGAATGGTCTATTTGGTCAGATATTAAGATTATTCTCCTAACACTAAAGGTAGTCTTACTTGGGACAGGTGCTAAG

SEQ ID NO: 6828 - protein, 462 aa, Streptococcus agalactiae
MKEKENIQKIIIAMIQTVVVYFSASLTLTLITPNFKSNKDLLFVLLIHYIVFYLSDFYRDFWSRGYLEEFKMVLKYSFYYIFISSSLFFIFKNSFTTTRLSFFSFIAMNSILLYLLNSFLKYYRKYSYAKFSRDTKVVLITNKDSLSKMTFRNKYDHNYIAVCILDSSEKDCYDLKHNSLRIINKDALTSELTCLTVDQAFINIPIELFGKYQIQDIINDIEAMGVIVNVNVEALSFDNIGEKRIQTFEGYSVITYSMKFYKYSHLIAKRFLDITGAIIGLLICGIVAIFLVPQIRKDGGPAIFSQNRVGRNGRIFRFYKFRSMRVDAEQIKKDLLVHNQMTGLMFKLDDDPRITKIGKFIRKTSIDELPQFYNVLKGDMSLVGTRPPTVDEYEKYNSTQKRRLSFKPGITGLWQISGRNNITDFDEIVKLDVQYINEWSIWSDIKIILLTLKVVLLGTGAK

SEQ ID NO: 6829 - protein, 696 aa, Streptococcus agalactiae
ATGACTCGTTTAGAAATAGTTGATAGCAAGTTAAGACAAGCAAAAAAAACAGAAGAATACTTCAATGCGATCCGTACAAACATACAGTTTAGTGGAAAGGAAAATAAAATTCTTGCAATTACCTCTGTTAGGGAAGGGGAAGGAAAATCCACTACTTCAACAAGTTTAGCTTTATCTTTAGCTCAAGCAGGATTTAAAACATTATTAATTGATGCGGATACTAGGAACTCTGTTATGTCTGGAACCTTTAAAGCAACTGGAACTATTAAAGGCTTGACGAATTATTTATCAGGTAATGCAGATCTTGGAGATATTATCTGTGAAACCAATGTTCCTAGACTGATGGTCGTTCCTTCAGGGAAAGTACCACCAAATCCAACAGCATTACTTCAGAACGCTTATTTTAATAAGATGATTGAAGCTATTAAAAATATATTTGATTATATTATCATCGATACTCCACCTATTGGTTTAGTTGTTGATGCCGCAATAATCTCTAATGCTTGCGATGGTTTTATTTTAGTAACCCAAGCAGGTAGAATAAAACGTAATTATGTTGAAAAAGCAAAAGAACAGATGGAACAAAGTGGTTCAAAGTTCTTAGGTATTATTCTTAATAAAGTTAGTGAATCTGTTGCTACTTACGGCGATTACGGCGATTATGGAAATTACGGAAAAAGGGATAGAAAAAGGAAG

SEQ ID NO: 6830 - protein, 232 aa, Streptococcus agalactiae
MTRLEIVDSKLRQAKKTEEYFNAIRTNIQFSGKENKILAITSVREGEGKSTTSTSLALSLAQAGFKTLLIDADTRNSVMSGTFKATGTIKGLTNYLSGNADLGDIICETNVPRLMVVPSGKVPPNPTALLQNAYFNKMIEAIKNIFDYIIIDTPPIGLVVDAAIISNACDGFILVTQAGRIKRNYVEKAKEQMEQSGSKFLGIILNKVSESVATYGDYGDYGNYGKRDRKRK

SEQ ID NO: 6831 - protein, 690 aa, Streptococcus agalactiae
ATGAATAAAATAGCTAATACAGAAGTTGAAATAAATATATTCAACCTTTTAAAAAAATTGTGGAAAAAGAAATTTTTAATCACATTTGTTGCCATTGCATTTGCAACAGCTGGACTTTTCTATAGTCTTTTTATTGTTACGCCACAATATACTTCTTCAACAAGGATATATGTCATTAACCCTAATACCCCTAATAATAGTATTACTGCACAAGATCTACAAGCGGGGAGTTTTCTTGCAAATGACTATAAGGAGATTATTACGTCTACTGACGTTCTAGAAAAAGTTATTTCTTCTGAAAAATTGAATTATCCTTCGTCTCAGTTGTTGCAAAAAATAACAGTTTCTATTTTAAAAGATACACGTGTTATTTCAATATCGGTCGAAGATGCTAATCCAAAAATGTCTCAAAAATTAGCAAATTCAGTTAGAGAAGCAGCAGTTTCAAAAATCAAGGCAGTTACTCAAGTAGAGGATATCACTACTCTTGAGAAGGGAAATTTACCTAAAGCACCATCTTCTCCTAATATTAAAAAGAATGTACTAATCGGGTTTATTGTTGGTGCAGGATTATCAACTATTGTTTTAGTTATTATGGGTATTTTGGATGATCGTGTTAATACTGAAGAAGATATTGAAAAGGCCCTAGGACTTACTTCTTTAGGTATAGTACCAGATTTGAATAAACTT

SEQ ID NO: 6832 - protein, 230 aa, Streptococcus agalactiae; identical to SEQ ID NO: 2178

SEQ ID NO: 6833 - protein, 729 aa, Streptococcus agalactiae
ATGATTGATATTCATTCTCATATCGTTTTTGATGTAGATGATGGGCCTAAAACGCTTGAAGAGAGTTTATCTTTAATAGAAGAAAGTTATCGACAAGGTGTTAGAATAATTGTTTCGACATCACATAGAAGAAAAGGTATGTTTGAAACACCTGAAGATATTATCTTCAAAAACTTTTCTATAGTTAAACACGAAGCGGAAAAAAGATTTGAACATCTTCAAATCTTATATGGTGGAGAATTGTACTATACAAGTGATATGTTAGAAAAACTGAAGTTAAAGCAAATTCCAACTTTAAACAATACGAAATTTGCTTTAATTGAATTTTCTATGCAAACTTCTTGGAAAGATATTCATACAGCTTTGTCAAATGTTTTAATGCTTGGTATTACACCAGTCGTTGCGCATATAGAGAGGTATAACGCTTTAGAGAATCAAAAAGAACGGGTGAAGGAAATTATTAATATGGGGTGTTACACACAAATAAATAGTTCCCATATTTTGAAACAAAAACTTTTTAATGATAAGCATAAACGCTTTAAGAAAAGAGCCCGTTATTTTTTAGAGGAAAATTTAGTGCATTTTGTAGCGAGTGATATGCATAACCTTGATGTTAGACCGCCATTTTTAGCAGAAGCTTATAAGATTATCTGTAGAGATTTCGGTAAAGAACGTGCTAACCAACTTTTTATTGAAAATGCTCAATCTATATTAAAAAACCATTACATT

SEQ ID NO: 6834 - protein, 243 aa, Streptococcus agalactiae; identical to SEQ ID NO: 2180

SEQ ID NO: 6835 - protein, 1455 aa, Streptococcus agalactiae
ATGTCTAATCATTCGCGCCGTCAACAAAAGAAACACTCACATACACCTCTACGGGTGATTAATTTATTTCTTTTGGTGATTTTTATTTTGTTAAGTGTAGTCTCATTATTTCTTATGTATCGTCACCATTTTTTGGCATTTAGACACCTGAACGTCATTTATGGAGTTGTAATTGTTTTAATCATTTTAGCAAGTTTATTTCTTTGTATTAAGAATAAAGCTAGAATTTTTACAACTATAATTTTAGTATTAGCTTCTATTTTCGTTGCTACTACTTTATATGGATTTAAGTCAACCATTGATTTGACAAATAATCTAAATAAAACTGCTTCATACTCTGAAATTGAGATGAGTGTAATTGTACCAAAAGATTCTAAAATAACCAATATAGAAGCTGTCAGCAAATTAGCCGCACCAGTTAAAAACGATACTTCAAATATTACTGATTTGATAGAACATATAAAATCAGAAAAAGGAATCTCTATTACACCACAAAAAACAGATTCTTACCAGGATGCATACAATAGAATTAAAAATGGTGATAGTCAGGCTATGGTTTTAAATAATGCTTATGTTAGCTTAATTGAACTTAGCACCCCTGATTTTAAATCGCAGATAAAAACGATTTATACTTACAAAATTAAGAAAAAAATTAATCGTAAAAATACTAATCATAAAGAAGGGGTATTTAATATCTATATTAGCGGTATTGATACTTTTGGCTCTATATCAACAGTATCAAGATCTGATGTAAATATTATTATGACGGTTAATACCAATACCCACAAAGTATTGTTAACGACAACACCACGAGATGCCTATGTAAAAATTCCAGATGGTGGGGGCAATCAATATGATAAATTAACCCATGCAGGTTTGTATGGCGTTGAGACATCAATGAAAACACTTGAAAACCTTTACGACATCAACCTTGATTATTATGCTAGAATTAATTTTTCATCATTTTTAAAATTAATAGACCTCTTGGGAGGAGTGACAGTTTATAACGATCAAGCTTTTACAAGTAAACATGGTAATTTTGACTTCCCTGTTGGTCAAGTAACATTGAATTCTGAGCAGGCTTTGGGCTTTGTTAGAGAACGTTATTCTCTACAAGGAGGCGATAACGATAGAGGTAGAAATCAAGAAAAAGTGATTGCAGCTATTATAAATAAGTTAGCTTCTAGTCAGTCAGTAACAAAATTAAATAGCATTACCTCACAGCTCCAAACGTCCGTTCAAACTAATATGACTATTGATAATATTAATGATTTGATTAACAATCAATTGTCAACTGGACAACGCTTCACTGTCGAGTCACAAGCATTAACTGGTCATGGTTCAACGGGTGAACTCCCTTCATATGCAATGCCAGGAGCTCAACTTTATATGATGTCAATTGATCAATCTAGCTTATCTAATGCAAAATCAAAAATTAAGAACACAATGGAGGAA

SEQ ID NO: 6836 - protein, 485 aa, Streptococcus agalactiae; identical to SEQ ID NO: 2182

SEQ ID NO: 6837 - protein, 921 aa, Streptococcus agalactiae
ATGAGAATTCAACAATTACAATATGTTATTAAGATTGTAGAAACTGGTAGCATGAATGAAGCCGCTAAACAACTCTACATTACCCAACCTTCACTTTCAAACGCTGTTAGGAACCTTGAGACTGAGATGGGGATCCAAATTTTTATTCGAAATCCAAAAGGAATAACGTTAACAAAAGATGGTATGGAATTTCTGTCATATGCGCGACAAATTCTAGAACAAACAGCACTTCTTGAAGAGCGTTATAAGGGTGATAATACAAGTCGTGAGCTGTTCAGCGTTTCTTCACAACACTATGCATTTGTGGTTAACGCTTTTGTAGCTCTCTTTAATGGCACAGACATGACCCAATACGAACTTTTTTTACGTGAAACTAGGACTTGGGAAATTATTGATGATGTTAAAAATTTCCGTTCAGAGATTGGTGTTCTGTTTCTTAATAGCTATAATAGAGATGTATTAACCAAATTATTCGACGATAATTCCTTAATTGCCACAACTCTTTTTACTACTACACCTCATATTTTCGTGAGCAAATCCAATCCCTTAGCTAATAGAAAAAAATTAAGTATGAAAGATTTAGAAGATTATCCTTATCTGAGTTATGATCAAGGCCTGCATAATTCTTTCTACTTTTCTGAGGAAATGATGTCTCAAATTCCTCACCCAAAATCCATTGTTGTCAGTGATAGAGCAACTCTGTTTAATTTAATGATTGGATTAGATGGTTATACAGTGGCAACTGGTATCCTCAACTCAAAATTGAACGGTGACGAAATTGTCGCAATCCCTCTTGACGTGGATGATGTTATTGATATTGTCTATATCCGACACGACAAAGCAAACCTTTCAAAAATGGGACAAAAATTTATTGACTATTTATTAGAGGAAGTTTCGTTTAATCATAAAAATAAACAGTCC

SEQ ID NO: 6838 - protein, 307 aa, Streptococcus agalactiae; identical to SEQ ID NO: 2184

SEQ ID NO: 6839 - protein, 765 aa, Streptococcus agalactiae
ATGACAGATTTTTCAACTGCTCTTAAAGTATTAGTGGATCAGTATTCTTATCATAATGCTTTCTTATTATTACAAAAACATGGTCCTTTAAACTCAGATTTATTATTTTTATTGGAAATGATGAAAGAGCGTCGAGAGTTAAACATTGATTTTCTTTTTGCTCATCAAGAACAAGTTGTTATATTACAAGAAAAATACAATATAAAGCTTTTGCATAACTCGTATGATTTAGAGTTGCTGGCAAATTACATCATGGATTTAGAAGCAAAAGTAAAAAATGGATTAATCATAGATTTTGTCCGTAGTGTTAGTCCTATTTTATATCGTCTATTTATGATTTTACTTGCACAAGAAGTACCTCACTTGCATGATTACATCCATAATGCAAGAGATGATCACTACGATACTTGGAAGTTTAAAGAATTAAAGGAGTCAAACCATCCAGTCCTTTTGGCATTCTCTGAAAGGTGGCACGATAGTCGCTTGACTTCTAAAAGCCTTGCAGAATGTTTACAATTAACCGACCTTGATGAAGAAGTGAAATCGACCATCATTCAATTAAGACAGTTCGAAAAATCAGTCAGAAATCCTTTGGCTCACCTGATTAAACCTTTTGATGAGCAAGAACTATATCGCACAACTCAATTTTCTTCTCAAGCATTTTTAGACCAGATTATCTTCTTGGCAAAGGTAATTGGTGTTGAGTATGATACTGTTAATTTTCACTACGATACGGTTAACAAGCTTATTATAAAGATACTTGAG

SEQ ID NO: 6840 - protein, 255 aa, Streptococcus agalactiae; identical to SEQ ID NO: 2186

SEQ ID NO: 6841 - protein, 708 aa, Streptococcus agalactiae
ATGTCAATCCATATTGAAGCAAAACAAGGTGAAATTGCAGATAAAATTTTACTTCCAGGAGATCCACTCCGTGCGAAATTTATTGCCGAGAATTTTTTAGAAGATGCGGTGTGTTTTAATACAGTTCGCAATATGTTTGGTTATACAGGTACCTATAAAGGACATCGTGTTTCTGTTATGGGAACTGGTATGGGTATGCCTTCAATTTCAATTTATGCTCGCGAACTAATTGTTGATTATGGGGTTAAAACATTGATTCGCGTAGGAACAGCAGGTGCTATTAATCCTGATATCCATGTTCGTGAACTTGTTTTAGCACAAGCAGCAGCAACAAATTCTAATATTATCCGTAATGATTGGCCTGAATTTGATTTTCCGCAAATTGCTGATTTTAAACTTTTGGATAAAGCTTATCACATCGCAAAGGAAATGGATATTACAACTCATGTAGGCAGTGTATTATCTTCAGACGTGTTTTATTCAAACCAACCAGATCGTAATATGGCCTTGGGTAAACTAGGTGTTCATGCTATTGAGATGGAAGCAGCAGCTCTCTACTATCTTGCAGCTCAACACAATGTTAATGCTCTTGCTATGATGACGATTTCAGATAACTTGAATAATCCAGAAGAAGATACAAGTGCAGAAGAGCGTCAAACAACATTTACTGATATGATGAAAGTTGGGCTCGAAACACTTATTTCTGAA

SEQ ID NO: 6842 - protein, 236 aa, Streptococcus agalactiae; identical to SEQ ID NO: 2188

SEQ ID NO: 6843 - protein, 1170 aa, Streptococcus agalactiae
ATGCACTATGTATTAATGTTTACAGAGTGGTTAGCATTTGGTGATAGTAGAGAAAATACTCTGTCTTTGTTAAATAGTGTCACACCAATTAAAAGAGTGTTATCACTTACTTTAGTCTCCTTTTTAGCATCCCTTAGTTGGTATTACTTACAAATCAAACCAAAGCAAATAACTAGTATTAAACAACAGGTTGTTTTTAAGGATTCTTCTGTAAAAAAGTCACCTTACTGGCTACATATAGGTCACGCATTTTTGCAATTGATTTATGTAGGAGCTGGTGGTCCTATTGGAAAAGAAGGAGCACCACGAGAGTTTGGAGCCATAAATGCTGGGAAAATATCGGATTTATTAGCACTTAAAGTGCTGGATAAACGTTTATTAATCATTAGTGGTGCAGCTGCAGGTTTGTCAGCAGTTTATCAAGTACCCCTAGCTAGTGTATTCTTTGCTTTTGAAACTTTAGCTTTAGGAATCTCACTGAAAAATATTGTGACATTGCTAGCCTCTAATTTTGGTGCAGCTAGTATTGCTCAATTAGTTATTTCGACAGCCCCTCTTTATCATATTTCAAAGATGAGTCTGAATTCACAGTTATTAGCTTTTATGTTCTTGATCGTTTTATGTGTAACTCCGATTGCGATTAGCTTTAGATATTTAAATCAAAAAGTGACAGAGAGACGTATTAAAAATATAAAAATATTGTTAAGTTTGCCAGTAGTGTCATTGATAGTATCTGTTTTATCAATAGTCTATCCCCAGATTTTAGGAAATGGTAATGCCCTAGTTCAAGAGGTCTTTAAAGGGACCACAGTTAGCTTAATCACTATTTTAGTTGTTCTCAAGATGATAGCAACATTATCCACTCTTTACGCTGGTGCTTATGGCGGTATACTGACACCATCTTTTTCCATTGGTGCTTGTTTAGGTTTTTTGTTAGCTAGTATTTCTATTCCTTTACTTCCCCACATATCGATAGTAACCAGTATGTTGGTTGGTGCAGCTATTTTTTTAGCTATTACAATGAGAGCGCCACTGACAGCTGTCGGTTTAGTCATATCTTTTACTGGTCAATCCGTTATAACTATTGTTCCCTTAACTATAGCAGTACTTTTTGCTACTGCCTATGATTATTTTATAAGAAAAATGAGGAGTTTATATGTCAATCCATAT

SEQ ID NO: 6844 - protein, 390 aa, Streptococcus agalactiae
MHYVLMFTEWLAFGDSRENTLSLLNSVTPIKRVLSLTLVSFLASLSWYYLQIKPKQITSIKQQVVFKDSSVKKSPYWLHIGHAFLQLIYVGAGGPIGKEGAPREFGAINAGKISDLLALKVLDKRLLIISGAAAGLSAVYQVPLASVFFAFETLALGISLKNIVTLLASNFGAASIAQLVISTAPLYHISKMSLNSQLLAFMFLIVLCVTPIAISFRYLNQKVTERRIKNIKILLSLPVVSLIVSVLSIVYPQILGNGNALVQEVFKGTTVSLITILVVLKMIATLSTLYAGAYGGILTPSFSIGACLGFLLASISIPLLPHISIVTSMLVGAAIFLAITMRAPLTAVGLVISFTGQSVITIVPLTIAVLFATAYDYFIRKMRSLYVNPY

SEQ ID NO: 6845 - protein, 807 aa, Streptococcus agalactiae
ATGACATTATTAGAAAAAATTAATGAGACTAGAGACTTTTTGCAAGCAAAAGGCGTCACAGCACCAGAATTTGGCCTTATTTTAGGCTCTGGTTTAGGAGAATTGGCTGAAGAAATCGAAAATCCTATTGTTGTGGATTATGCAGACATCCCAAATTGGGGACAGTCAACAGTAGTTGGTCATGCTGGAAAATTAGTGTATGGGGATTTATCAGGCCGTAAGGTATTAGCGCTTCAAGGTCGTTTTCACTTTTATGAAGGAAATACAATGGAAGTCGTTACTTTCCCAGTACGTATCATGAGAGCATTGGCTTGCCACAGTGTGCTTGTGACTAATGCAGCGGGTGGGATTGGATACGGACCAGGAACTTTAATGCTGATCAAAGACCACATCAATATGATTGGGACTAACCCTCTCATAGGTGAGAACCTTGAAGAATTTGGACCACGTTTCCCAGACATGTCGGATGCTTATACAGCAACATATCGACAAAAAGCTCACCAAATTGCTGAAAAACAGAATATCAAACTCGAAGAAGGTGTGTACTTGGGTGTATCAGGACCCACTTATGAAACACCTGCAGAAATTCGTGCATTCCAAACAATGGGCGCACAAGCGGTAGGTATGTCCACGGTTCCAGAGGTGATCGTTGCAGCTCACTCAGGGCTTAAAGTGTTAGGAATTTCAGCAATTACTAACTTTGCCGCTGGCTTCCAATCAGAGCTCAATCATGAGGAGGTCGTTGAAGTTACTCAGCGTATTAAAGAAGATTTCAAGGGATTAGTTAAATCATTAGTTGCTGAACTT

SEQ ID NO: 6846 - protein, 269 aa, Streptococcus agalactiae; identical to SEQ ID NO: 2192

SEQ ID NO: 6847 - protein, 405 aa, Streptococcus agalactiae
ATGGAAAAAGTTAGGATTTACCATAACCCAAATTGTGGGACATCGAGGAACGTACTTGCCATTATTCGTCATTGTGGTATTGAACCAGAAATTATTTATTATCTGAAAACACCACCTAGCAGGATGGAACTGGTTGAACTGTTGTTAGAAATGAAACTTTCTGCGAGGGAACTTCTAAGAACAGATGTTCCTGCTTATGAGAAATTCAATTTGGAATCTTCTAGCGTTGCAGATGAAGAAATGATTGATGCGATGATACAAGATCCTATTCTTATCAATCGTCCCATAGTTGTTACGAGTAAAGGTGCAAAACTCTGCCGACCCTGTGAAGAAATTTTAACCATTTTACCTGTAAAGATGGAAAAAGATTTTGTTAAAGAAGATGGACAGATTATTCAAAGTTTA

SEQ ID NO: 6848 - protein, 135 aa, Streptococcus agalactiae
MEKVRIYHNPNCGTSRNVLAIIRHCGIEPEIIYYLKTPPSRMELVELLLEMKLSARELLRTDVPAYEKFNLESSSVADEEMIDAMIQDPILINRPIVVTSKGAKLCRPCEEILTILPVKMEKDFVKEDGQIIQSL

SEQ ID NO: 6849 - protein, 1209 aa, Streptococcus agalactiae
ATGTCACAATTTGATCGCATTCACTTAGTTGTCTTAGATTCAGTGGGTATTGGAGCGGCACCAGATGCCAATGATTTTGTCAATGCAGGAGTTCCTGATGGTGCTTCAGACACGCTTGGCCACATTTCAAAAACAGTTGGACTTGCGGTGCCAAACATGGCTAAAATTGGACTTGGTAATATTCCTCGTCCCCAAGCGCTTAAAACCGTTCCTGCAGAAGAAAATCCAAGTGGCTACGCGACGAAGTTACAAGAAGTATCACTTGGTAAAGATACAATGACAGGACATTGGGAGATCATGGGCTTAAATATTACAGAGCCATTTGATACTTTCTGGAATGGTTTTCCAGAAGATATTATCACAAAGATTGAGGATTTTTCAGGACGTAAAGTTATTCGTGAAGCGAATAAACCTTATTCAGGGACAGCTGTTATTGATGACTTCGGACCACGCCAAATGGAAACTGGTGAGCTCATCATCTATACCTCAGCTGACCCAGTCCTACAAATTGCAGCTCATGAGGATATCATTCCTCTAGAAGAACTCTACCGTATTTGTGAATATGCTCGTAGTATCACAATGGAGCGTCCAGCTCTCCTTGGTCGTATTATCGCTCGTCCATATGTAGGTGAACCAGGCAACTTTACGCGTACAGCCAACCGTCACGACTATGCAGTATCACCATTTGAAGATACCGTATTAAATAAACTAGATCAAGCTGGCATCGATACTTATGCTGTTGGTAAAATCAATGATATTTTCAATGGTTCAGGCATTAATCATGATATGGGACATAACAAATCAAATAGTCATGGTATTGATACTTTGATAAAAACAATGGGGTTATCAGAGTTTGAAAAAGGCTTCTCCTTTACTAATTTGGTTGACTTTGATGCTCTCTATGGTCACCGTCGTGATCCTCATGGTTATCGTGATTGTCTTCATGAGTTTGATGAGCGTCTTCCAGAGATTGTTTCAGCGATGCGTGACAAAGACTTACTTTTGATCACTGCCGATCATGGTAATGACCCAACTTATGCAGGTACAGACCATACAAGAGAATACATTCCTCTCTTAGCCTATAGCCCATCTTTCACAGGAAACGGCCTTATCCCAGTAGGGCATTTCGCAGATATTTCAGCAACAGTTGCGGATAACTTTGGTGTTGATACTGCGATGATTGGAGAGAGCTTCTTGCAGGACTTGGTA

SEQ ID NO: 6850 - protein, 403 aa, Streptococcus agalactiae
MSQFDRIHLVVLDSVGIGAAPDANDFVNAGVPDGASDTLGHISKTVGLAVPNMAKIGLGNIPRPQALKTVPAEENPSGYATKLQEVSLGKDTMTGHWEIMGLNITEPFDTFWNGFPEDIITKIEDFSGRKVIREANKPYSGTAVIDDFGPRQMETGELIIYTSADPVLQIAAHEDIIPLEELYRICEYARSITMERPALLGRIIARPYVGEPGNFTRTANRHDYAVSPFEDTVLNKLDQAGIDTYAVGKINDIFNGSGINHDMGHNKSNSHGIDTLIKTMGLSEFEKGFSFTNLVDFDALYGHRRDPHGYRDCLHEFDERLPEIVSAMRDKDLLLITADHGNDPTYAGTDHTREYIPLLAYSPSFTGNGLIPVGHFADISATVADNFGVDTAMIGESFLQDLV

SEQ ID NO: 6851 - protein, 669 aa, Streptococcus agalactiae
ATGGACGAACTAAAAAAACTTGCTGGAGTGACCGCTGCAAAATACGTTAAAAACGGTATGATTGTAGGTTTAGGGACAGGTTCTACAGCATATTTTTTTGTTGAAGAAATTGGACGCCGTGTCAAAGAAGAGGGATTGCAAGTCGTAGGCGTTACAACGTCAAACCGTACGACTGAGCAGGCAAGAGGATTAGGTATTCCGTTGAAATCAGCAGATGATATTGATGTCATTGATGTCACTGTGGATGGAGCAGATGAAGTAGACCCTGATTTTAATGGTATCAAGGGTGGCGGTGGTGCGCTGCTCATGGAAAAAATAGTAGCTACTCCAACTAAAGAATATATCTGGGTTGTCGATGAGAGCAAACTTGTTGAAACGTTAGGTGCATTTAAATTGCCTGTTGAGGTTGTTAGATATGGTTCTGAGCGTCTTTTTCGGGTTTTTAAATCAAAAGGTTATTGTCCTTCTTTCCGTGAAACAGAAGGTGACCGCTTTATCACTGATATGGGGAACTACATTATCGACCTAGATTTGAAAAAAATAGAGGATCCAAAGCAGTTAGCGAATGAACTTGACCATACAGTTGGTGTTGTTGAACATGGTTTATTTAATAGTATGGTTAATAAAGTTATAGTAGCAGGCAAAAACGGTCTTGACATACTTGAAAAA

SEQ ID NO: 6852 - protein, 223 aa, Streptococcus agalactiae
MDELKKLAGVTAAKYVKNGMIVGLGTGSTAYFFVEEIGRRVKEEGLQVVGVTTSNRTTEQARGLGIPLKSADDIDVIDVTVDGADEVDPDFNGIKGGGGALLMEKIVATPTKEYIWVVDESKLVETLGAFKLPVEVVRYGSERLFRVFKSKGYCPSFRETEGDRFITDMGNYIIDLDLKKIEDPKQLANELDHTVGVVEHGLFNSMVNKVIVAGKNGLDILEK

SEQ ID NO: 6853 - protein, 453 aa, Streptococcus agalactiae
TTGCTCTCATCGACAACCCAGATATATTCTTTAGTTGGAGTAGCTACTATTTTTTCCATGAGCAGCGCACCACCGCCACCCTTGATACCATTAAAATCAGGGTCTACTTCATCTGCTCCATCCACAGTGACATCAATGACATCAATATCATCTGCTGATTTCAACGGAATACCTAATCCTCTTGCCTGCTCAGTCGTACGGTTTGACGTTGTAACGCCTACGACTTGCAATCCCTCTTCTTTGACACGGCGTCCAATTTCTTCAACAAAAAAATATGCTGTAGAACCTGTCCCTAAACCTACAATCATACCGTTTTTAACGTATTTTGCAGCGGTCACTCCAGCAAGTTTTTTTAGTTCGTCCATATTTTCCCCTTTTAAGTTAATGTTATCTAATATTTTTGATAAGTCTATTCAAAACACTATCTCAAGACACATTATACCATTTTTTAAG

SEQ ID NO: 6854 - protein, 151 aa, Streptococcus agalactiae
MLSSTTQIYSLVGVATIFSMSSAPPPPLIPLKSGSTSSAPSTVTSMTSISSADFNGIPNPLACSVVRFDVVTPTTCNPSSLTRRPISSTKKYAVEPVPKPTIIPFLTYFAAVTPASFFSSSIFSPFKLMLSNIFDKSIQNTISRHIIPFFK

SEQ ID NO: 6855 - protein, 708 aa, Streptococcus agalactiae
ATGAGAACACTATTTAGAATGATATTTGCTATTCCAAAGTTTATCTTTAGATTGATTTGGAATATCATTTGGGGAATATTCAAGACAGTTCTTGTTATTGCGATTATTTTATTTGGCTTGTATTACTATGCGAATCACAGTCAATCAGAATTTGCTAATCAACTTAGTGACATTATTCAGACAGGAAAAACATTTTTAAATTTTGCTGACACTAATCAGCTCAAAAATTCCTTTACTAATCTAGCTACGGATAGTGTTCATCATTCAGAAAATACCAGATGGGATAAAAATCAGGCAACTATCTATATAGCAACTAGAGATTCTGAGTTGGTCTCTGCTTACAAGCAAGCAATCTCCAATTGGAATGCAACAGGTGCTTTTGTGTTACAAACAACAGACAATCCTAATGCTGATATTATTGCTAAGGATTACTCAGATGCTAAAACACAAGCTGCGGGTGTAGCTGAAACCGAGAAAAATGCTTTAACTAATCGTATTTCAAAGGTAACAGTTAAATTAAACACATTTTACCTTAAGAATAAACAGTTTGGTTATGACCACACTAGGATTGTTAATACAGTCGAACATGAATTAGGACACGCTTTAGGTCTAGGACATAATGATCAACAACATTCCGTTATGCAGTCAAAAGGTTCGCATTATGGCATTCAAGAAGTTGATATTCAAACGCTAAAAAACTTATATGCA

SEQ ID NO: 6856 - protein, 236 aa, Streptococcus agalactiae
MRTLFRMIFAIPKFIFRLIWNIIWGIFKTVLVIAIILFGLYYYANHSQSEFANQLSDIIQTGKTFLNFADTNQLKNSFTNLATDSVHHSENTRWDKNQATIYIATRDSELVSAYKQAISNWNATGAFVLQTTDNPNADIIAKDYSDAKTQAAGVAETEKNALTNRISKVTVKLNTFYLKNKQFGYDHTRIVNTVEHELGHALGLGHNDQQHSVMQSKGSHYGIQEVDIQTLKNLYA

SEQ ID NO: 6857 - protein, 786 aa, Streptococcus agalactiae
ATGGCATTTTTTAATATTGAATATCACTCTAAGGTACTAGGAACGGAACGTCAAGTCAATGTTATTTACCCAGATGCTTTTGAGATATCTGATGATAAAATTGATGATTGTGACATTCCTGTTTTGTATCTTCTCCATGGAATGGGGGGAAATGAGAATTCTTGGCAAAAACGCACAAATATAGAGCGTCTTTTACGTCATACTAATCTTATCGTCGTGATGCCATCAACAGACTTAGCATGGTATACCAACACAAAGTATGGGTTGGATTATTTTGATGCAATAGCTATCGAGTTACCAAAAGTTTTGAAACGTTTCTTTCCTAATATGTCTGATAAGAGAGAGAAAAATTTCATTGCTGGATTATCTATGGGGGGATATGGAGCATATAAAATAGCTCTACTGACTAATCGTTTTTCTCATGCTGCCTCTTTGTCAGGTGCACTTTCTTTTGACTTTGATTTATTATTCAATAATGGCAACGATAACATTAACTATTGGTCGGGAATTTTTGGTGATTTGAATAACACTGATAACATAGAGCGTCATTCACTAAGGCGTTGCGTTGAGTCTTTTGATATGAAGACTAAATTTTATGCATGGTGTGGTTATGAAGATTTTCTTTTTGAAGCTAATGAAGTCGCAATTGATGAACTTCGTCAATTAGGTTTAACTATTGACTATTTCAATGATCATGGTAAACATGAATGGTATTACTGGAATCAGCAATTAGAAAAAGTCTTAGAATGGCTCCCTATTGATTATGTCAAAGAAGAGCGCCTTTCG

SEQ ID NO: 6858 - protein, 262 aa, Streptococcus agalactiae
MAFFNIEYHSKVLGTERQVNVIYPDAFEISDDKIDDCDIPVLYLLHGMGGNENSWQKRTNIERLLRHTNLIVVMPSTDLAWYTNTKYGLDYFDAIAIELPKVLKRFFPNMSDKREKNFIAGLSMGGYGAYKIALLTNRFSHAASLSGALSFDFDLLFNNGNDNINYWSGIFGDLNNTDNIERHSLRRCVESFDMKTKFYAWCGYEDFLFEANEVAIDELRQLGLTIDYFNDHGKHEWYYWNQQLEKVLEWLPIDYVKEERLS

SEQ ID NO: 6859 - protein, 1659 aa, Streptococcus agalactiae
ATGAGCGACATAAAAATCATGGCTCTTGGAGGTGTTCGTGAAAACGGAAAAAACCTATATGTAGTAGAAGTCAATGATTCTATCTTTGTTTTGGATGCTGGACTCAAATATCCTGAAAATGAACAACTGGGTGTTGATGTTGTTATTCCAAATCTTGATTACTTAATTGAAAATAAAAAACGTGTTCAGGGGATTTTCTTAACCCATGGACATGCGGATGCTATTGGTGCATTGCCTTATATTATCGCCGAAGTCAAAGCACCTGTGTTTGGTTCACCTCTCACAATTGAATTAGCTAAGTTATTCGTTAAAAATAGTACAGCAGTCAAGAAATTCAATAATTTCCATGTGATTGATAGTGAAACGGAAATTGAATTTCAAGATGCGGTGATTTCGTTCTTTAAAACGACTCATTCAATTCCAGAGTCAATGGGAATCGTTATTGGGACAAAAGAGGGAAATATCGTTTACACAGGTGACTTTAAATTTGATCAAGCTGCAAGGAAATATTACCAAACAGATCTGGCACGTTTAGCTGAAATTGGTCGTGATGGTGTTTTAGCACTTTTATCAGATTCTGCAAATGCTACAAGCAATGACCAAGTTGCTAGCGAATATGAGGTCGGTGATGAAATTAAGAGCGTTATTGAAGACGCAGAAGGTAGAGTCATCGTAGCAGCAGTTGCAAGTAATCTCATTCGTATTCAACAAGTCTTTGATGCAGCGGCAGAAAACGGTCGTCGAGTAGTTTTGACTGGTTTTGATATTGAAAATATTGTTCGTACGGCCATTCGTATGAAACGCATTCATATTGCTGATGAAAATATGATTATCAAACCTAAAGATATGACACGTTACGAAGATAACGAATTATTAATCCTTGAAACTGGACGTATGGGAGAGCCGATAAATGGTCTCCAAAAAATGGCAATCGGACGTCATCGTTATGTTCAAATTAAAGATGGTGATTTAGTATTTATCGTAACAACACCAAGTATTGCAAAAGAGGCAGTTGTAGCGCGTGTTGAAAATCTGATTTATAAAGCTGGTGGCTCAGTTAAATTGATAACACAGAATTTGCGCGTATCAGGTCATGCAAATGGTCGCGAATTACAATTATTAATGAATCTATTGAAACCTAAATACCTTTTCCCAATTCAAGGAGAGTATAGGGATTTGTCAGCACATGCGGGCTTAGCTCAAGAGGTAGGAATGTCAGCAGATGATATTTATATTGTGAAGCGTGGTGACATCATGGTTCTTGAAAAAGATGGCTTCTTCCATAGTGGATCTGTTCCTGCTGGAGATGTTATGATTGATGGAAATGCTATTGGTGACGTTGGTAATATTGTACTTCGTGACCGCAAGGTATTATCTGAAGATGGAATTTTTATTGTTGTTATAACTGTCAGCAAAAAAGAAAAGAAAATCATTTCTAAAGCTCGTGTTAATACGCGTGGTTTTGTGTATGTGAAAAAAAGCAGAGATATTTTGCGTGAGAGCGCAGAATTAGTTAATACAACGGTAGAAGATTACTTAAGCAAAGATACATTTGACTGGGGTGAACTTAAAGGGAAAGTGCGTGATGAGGTCAGCAAGTTCTTATTTGACCAAACGAAACGTCGCCCAGCAATCCTTCCTGTGGTTATGGAAGTTCGT

SEQ ID NO: 6860 - protein, 553 aa, Streptococcus agalactiae
MSDIKIMALGGVRENGKNLYVVEVNDSIFVLDAGLKYPENEQLGVDVVIPNLDYLIENKKRVQGIFLTHGHADAIGALPYIIAEVKAPVFGSPLTIELAKLFVKNSTAVKKFNNFHVIDSETEIEFQDAVISFFKTTHSIPESMGIVIGTKEGNIVYTGDFKFDQAARKYYQTDLARLAEIGRDGVLALLSDSANATSNDQVASEYEVGDEIKSVIEDAEGRVIVAAVASNLIRIQQVFDAAAENGRRVVLTGFDIENIVRTAIRMKRIHIADENMIIKPKDMTRYEDNELLILETGRMGEPINGLQKMAIGRHRYVQIKDGDLVFIVTTPSIAKEAVVARVENLIYKAGGSVKLITQNLRVSGHANGRELQLLMNLLKPKYLFPIQGEYRDLSAHAGLAQEVGMSADDIYIVKRGDIMVLEKDGFFHSGSVPAGDVMIDGNAIGDVGNIVLRDRKVLSEDGIFIVVITVSKKEKKIISKARVNTRGFVYVKKSRDILRESAELVNTTVEDYLSKDTFDWGELKGKVRDEVSKFLFDQTKRRPAILPVVMEVR

SEQ ID NO: 6861 - protein, 477 aa, Streptococcus agalactiae
ATGGGAACAGCACCTAGGATGACAGTTGCTGAAAATTTATTAGTTGCTAAATTTCGAGGTGAAAAGAGACCGTTAGTTCCTAGAAAGATTACTAACTATACCGAAGAATTTCAAAAATTGATTGCTAGAACTGGTAATGGACTTGATCGCCATTTAGAGACACCTACAGGTTTATTATCAGGTGGACAAAGACAAGCACTTAGTTTATTAATGGCAACTTTGAAAAAACCAAATCTGTTATTATTGGACGAACACACAGCAGCGCTTGATCCTAGAACAAGTGTTTCGCTTATGGGCTTGACTGATGAGTTTATCAAACAAGATTCGTTGACTGCCTTAATGATTACACATCATATGGAAGATGCTCTCAAATATGGAAATCGTATATTAGTAATGAAAGATGGCAAGATTGTCAGAGATTTAAATCAGGCACAAAAAAACGAGATGGCTATAGCTGACTATTATCAATTATTTGAT

SEQ ID NO: 6862 - protein, 159 aa, Streptococcus agalactiae
MGTAPRMTVAENLLVAKFRGEKRPLVPRKITNYTEEFQKLIARTGNGLDRHLETPTGLLSGGQRQALSLLMATLKKPNLLLLDEHTAALDPRTSVSLMGLTDEFIKQDSLTALMITHHMEDALKYGNRILVMKDGKIVRDLNQAQKNEMAIADYYQLFD

SEQ ID NO: 6863 - protein, 299 aa, Streptococcus agalactiae
ATGGTGATGAAAATCATAGAGTTAAAAGAAGCAACCGTACAAGTCAGTAATGGTTTAGCAGAAATGAAAACGATATTAGACCATGTTAATTTGAGTATTTATGAACATGACTTCATTACAATATTGGGTGGAAATGGAGCTGGAAAATCAACGCTTTTTAATGTAATTGCAGGTACCTTGATGTTAAGCGGTGGAAATATTTACATCATGGGACAAGATGTTACTATTTTACCAGCAGAAAAACGAGCTAAATTTATCACGGGTATTTCAAGATCCGAAAATGGGAACAGCACCTAGGA

SEQ ID NO: 6864 - protein, 100 aa, Streptococcus agalactiae
MVMKIIELKEATVQVSNGLAEMKTILDHVNLSIYEHDFITILGGNGAGKSTLFNVIAGTLMLSGGNIYIMGQDVTILPAEKRAKYYHGYFKIRKWEQHLG

SEQ ID NO: 6865 - protein, 861 aa, Streptococcus agalactiae
ATGATTATTTCATCAGTTTCACAAGGTTTATTATGGGGGATATTAGGATTAGGGATATACTTAACCTTTAGAATCTTAAAATTTCCAGACATGACAACAGAGGGCTCCTTCCCTCTAGGGGGAGCGGTTTGTGTTACCTTAATGAATCAGGGGGTTAATCCTATTTTGGCGACGATTCTAGGCATGCTATCAGGGATGTTAGCGGGATTTGTTACTGGTTTACTTTATACTAAAGGAAAGATACCGACGATTTTAGCAGGAATTTTAGTAATGACCTCATGCCACTCCATTATGCTAATGGTTATGAAAAGAGCAAATCTAGGTTTAAATGAGATTCAAACATTGAAAGATTTTCTTCCGTTTTCAAATGATTTAAATCTTCTCGTATTAGGTTTGATAGCTATTCTCTTGGTGATTTCTGCCTTAATTTATTTTCTCTATACACGCTTGGGGCAAGCTTATATTGCAACAGGAGACAACCCTGATATGGCAAAGAGCTTCGGCATTGATACCGACAAAATGGAAATGCTTGGCTTAATTGTATCAAATGGCTTAATTGCTTTATCAGGAGCTTTAGTAAGTCAACAAGATGGATATGCTGATGTATCAAAAGGTATAGGTGTTATTGTTATTGGGTTAGCTAGTATTATTATTGGAGAGGTACTTTACTCTACTGGTTTAACTCTCTTTGAACGTTTAATTGCTATAGTGGTGGGTTCTATTCTTTATCAATTTTTAATAACGGCAGTAATCGCCTTAGGATTTAATACGAATTACCTAAAATTATTTAGTGCAATAGTGCTTGGAATTTGTTTAATGGTTCCTGTCCTAAAAACGAAGATTTTGAAAGGAGTACGCTTA

SEQ ID NO: 6866 - protein, 287 aa, Streptococcus agalactiae; identical to SEQ ID NO: 2212

SEQ ID NO: 6867 - protein, 1002 aa, Streptococcus agalactiae
ATGAAAAATAAAGGACTGATAGCTACGCTAATTCTATTGACCATATTAGTGGTTGGGGAATTATTTTATAACAAATCAGAAAAACATCTTAATTTATCAGAAAAGCAAGTTGTTAAAATTGGTATTTTACAGTATGTAACCCATGATGCTTTGGATGCTATTGAAAAGGGAGTTGAAGATGGTCTAGCTCAAGAAGGATATAAAGGGAAAAAAGTTAAATTAACCGTTTTAAACGCCGAAGCTGATCAAAGTAAAATTCAAGCGATGAGTAAACAATTAGTTAATCATCACAATGATATTTTGATTGGAATTGCGACACCATCAGCACAAGGTTTAGCAGCTTCGACTAAGGATACTCCTATAATCATGGGAGCTGTTTCTGATCCTTTAGGGGCCAAGTTAGTAACGAATATGAAGAAACCAACAACTAATGTTACAGGATTATCAAACGTTGTTCCGACCAAGCAAACTGTGCAATTAATCAAGGATATAACTCCCAATGTTAAACGTATAGGAATTCTTTATGCTAGTAGCGAAGATAATTCTGTGTCACAAGTAACTGAGTTTACAAAATATGCTCAAAAAGCAGGACTAGAAGTTCTTAAATATTCTGTACCATCTACAAATGAAATTAAGACAAGTATGTCAGTCATGACCAAAAAAGTAGACGCTGTCTTTGTTCCACAAGATAATACTATTGCGAGTGCTTTTAGAACAGTTATCGTAGCAGCAAACCAAGCTAATATACCTGTGTATTCCAGTGTTGATACTATGGTTGAACAAGGAAGTATAGCATCAGTAGCGCAGAGTCAATATGGCTTAGGGTTAGAAACTGCAAAACAGGCCATTAAAGTCCTAAGAGGGAAGCCGGTTAAAGATGTACCAGTCAAAGTTATTGATACAGGGAAGCCAAGCCTCAATTTGAAAGCAGCCAAACACTTAGGAATTAAAATTCCTAAGAAGATTATGAAACAGGCAGAAATTACCGTTAAGGTTGACGAT

SEQ ID NO: 6868 - protein, 334 aa, Streptococcus agalactiae
MKNKGLIATLILLTILVVGELFYNKSEKHLNLSEKQVVKIGILQYVTHDALDAIEKGVEDGLAQEGYKGKKVKLTVLNAEADQSKIQAMSKQLVNHHNDILIGIATPSAQGLAASTKDTPIIMGAVSDPLGAKLVTNMKKPTTNVTGLSNVVPTKQTVQLIKDITPNVKRIGILYASSEDNSVSQVTEFTKYAQKAGLEVLKYSVPSTNEIKTSMSVMTKKVDAVFVPQDNTIASAFRTVIVAANQANIPVYSSVDTMVEQGSIASVAQSQYGLGLETAKQAIKVLRGKPVKDVPVKVIDTGKPSLNLKAAKHLGIKIPKKIMKQAEITVKVDD

SEQ ID NO: 6869 - protein, 1653 aa, Streptococcus agalactiae
ATGTCTTTTGATGGATTTTTTTTACATCACCTCACAAATGAATTACAAGAACAGATTGAAAAAGGACGTATCCAAAAAGTTAACCAACCTTTTGACCATGAATTGGTATTAACAATACGCAATAATCGTCGCAACTATAAACTACTCCTATCTGCTCACCCTGTATTTGGACGTATCCAAACTACCGAAGCAAATTTCCAAAATCCTCAAAATCCAAATACTTTTACAATGATCATGAGAAAGTATTTGCAAGGTGCAGTGATTGAAACCATTCAACAAATTGAAAATGACCGTATATTAGAAATCATCGTGTCTAATAAAAACGAAATCGGTGATCACATTAAAGCAACACTTGTTGTTGAAATCATGGGAAAACACAGTAACATTATCTTGATTGATAAAAATGAACATAAAATTATTGAATCAATTAAGCATGTTGGTTTCTCACAAAACTCCTATCGTACTATCCTTCCTGGTTCGACTTACATTGCCCCACCCAAAACAAAAGCAATCAATCCTTTTGATATTTCTGATCAAACTCTATTTGAGCTGCTTCAAACCAATGATCTAAGCCCTAAAAACCTCCAACAGCTCTTCCAAGGTTTAGGACGCGATACTGCGCTAGAATTATCTCACTGTTTGAAAGACAATAAACTTAACGATTTTCGTCAATTCTTTTCGAGAGAATATTATCCCAGCCTAACAGAAAAATCCTTTTCCGCTGTCCAATTCTCAAGCAGTCACGAAACATTTCAGTCTCTTGGACAATTGTTAGATTATTACTACCAAGAGAAGGCTGAAAAAGATCGCATAGCACAGCAAGCTAGTGACCTCATCCACCGTGTTCAAAGTGAGTTAGAGAAAAATATCAAAAAACTAGCTAAGCAACAAGACGAACTTCTAGCTACTGAAAATGCAGAGGAGTTTCGCCAAAAAGGAGAGCTTCTAACTACCTATCTCTCTATGGTACCAAATAATCAAGATGTCGTTGTGCTTGATAATTATTACACCAACCAAACCATTGAGATTTCACTTGATCGAGCTTTAACACCCAACCAAAATGCCCAACGCTACTTTAAAAAATATCAAAAATTAAAAGAAGCTGTAAAACATTTAAAAGGAATTATTTCAGATACGGAAAATACAATCACCTACCTTGAATCTGTTGAAACATCGCTAAATCATGCTTCTATGGAAGATATCAATGATATTCGTGAAGAACTTGTTGAAACTGTATTTATTAAGCGACGCGCACATGATAAACAACATAAGCGCAAAAAACCTGAACAATATTTAGCATCCGATGGCAAGACTATTATTCTGGTGGGACGTAATAATCTCCAAAATGACGAGTTAACATTTAAAATAGCTCGTAAAGGGGAGTTGTGGTTTCATGCCAAGGATATCCCCGGAAGTCATGTGTTAATTCGGGATAACCTCAATCCAAGTGACGAGGTTAAGACAGATGCCGCCGAGTTAGCTGCTTATTACTCTAAAGCTCGTCTCTCCAATCTTGTTCAAGTAGACATGATTGAAGCAAAAAAACTCAATAAACCAAGTGGTACTAAGCCAGGTTTTGTAACTTACACTGGTCAAAAAACCTTACGAGTCACTCCCACACAAGAAAAAATAGATAGCCTTAAACTAAAAAAA

SEQ ID NO: 6870 - protein, 551 aa, Streptococcus agalactiae
MSFDGFFLHHLTNELQEQIEKGRIQKVNQPFDHELVLTIRNNRRNYKLLLSAHPVFGRIQTTEANFQNPQNPNTFTMIMRKYLQGAVIETIQQIENDRILEIIVSNKNEIGDHIKATLVVEIMGKHSNIILIDKNEHKIIESIKHVGFSQNSYRTILPGSTYIAPPKTKAINPFDISDQTLFELLQTNDLSPKNLQQLFQGLGRDTALELSHCLKDNKLNDFRQFFSREYYPSLTEKSFSAVQFSSSHETFQSLGQLLDYYYQEKAEKDRIAQQASDLIHRVQSELEKNIKKLAKQQDELLATENAEEFRQKGELLTTYLSMVPNNQDVVVLDNYYTNQTIEISLDRALTPNQNAQRYFKKYQKLKEAVKHLKGIISDTENTITYLESVETSLNHASMEDINDIREELVETVFIKRRAHDKQHKRKKPEQYLASDGKTIILVGRNNLQNDELTFKIARKGELWFHAKDIPGSHVLIRDNLNPSDEVKTDAAELAAYYSKARLSNLVQVDMIEAKKLNKPSGTKPGFVTYTGQKTLRVTPTQEKIDSLKLKK

SEQ ID NO: 6871 - protein, 717 aa, Streptococcus agalactiae
ATGTCAGAAACAGTTAAATTATTTCAATACAGCACCTTGAGTTCACTGATGGCAGGATTGTACAAAGGCAGTCTAACTATCGGAGAATTATTAACTCACGGTGACTTAGGAATCGGTACTGTTCATATGATTGATGGTGAATTGATTGTATTGGATGGGAAAGCTTATCAAGCTATTGGTACAGATGGTAAAGCAGAGATTATCCAATTATCAGATGATGTGACAGTACCCTATGCAGCGGTTTTACCACACTATATCCAAAAACAATTTGATATCAATGCTGAGACAGATAATAAGGATTTGGAAGAGATGATTCTAAAAAACTTTGAAGGTCAAAATCTCTTTAAGTCTTTAAAAATCAAAGGAACGTTTTCAAGAATGCACGTTCGTATGATTCCAAAATCTCCACAACATAAACGTTTTGCAGATATTGCATCTAATCAGCCAGAATTTACCAGAGAGAATGTATCTGGTACGTTGGTTGGGATTTGGACGCCGGAATTATTTCATGGTGTGGGGGTAAAAGGGTTCCATGTCCACTTTATTTCAGACGATTTAACTTTCGGTGGGCATGTTATGGATTACTCGCTCACACAAGGAAAAGTTGAAATTGGGAAGGTTGACCAACTTGACCAATGTTTCCCAACTCAAGATCAAGAATTTTTGGAAGCTAACTTTGACCTACAAAAGCTTAGAGAAGATATTGATTTAAGTGAA

SEQ ID NO: 6872 - protein, 239 aa, Streptococcus agalactiae
MSETVKLFQYSTLSSLMAGLYKGSLTIGELLTHGDLGIGTVHMIDGELIVLDGKAYQAIGTDGKAEIIQLSDDVTVPYAAVLPHYIQKQFDINAETDNKDLEEMILKNFEGQNLFKSLKIKGTFSRMHVRMIPKSPQHKRFADIASNQPEFTRENVSGTLVGIWTPELFHGVGVKGFHVHFISDDLTFGGHVMDYSLTQGKVEIGKVDQLDQCFPTQDQEFLEANFDLQKLREDIDLSE

SEQ ID NO: 6873 - protein, 1680 aa, Streptococcus agalactiae
ATGACAGAATCACATAATCAATATGGGGCTGACTTAATTGTCGATAGCCTCATTAATCATGATGTCAAATATGTTTTTGGTATCCCAGGAGCTAAGATTGACCGCGTATTTGACACTCTAGAAGATAAAGGTCCAGAGTTAATTGTTGCTCGTCATGAGCAGAACGCGACTTTTATGGCTCAGGCTGTCGGGCGTATTACGGGAGAACCAGGAGTTGTTATTGCAACTAGTGGACCTGGGATCTCGAACTTGGCAACAGGGTTAGTTACTGCGACAGATGAAGGTGATGCTGTTCTTGCAATTGGTGGACAGGTTAAGCGAGGAGATTTATTGAAACGTGCTCATCAATCAATGAATAACGTTGCTATGCTAGAACCTATTACAAAATATTCTGCTGAGGTTCATGACCCTAATACTTTGTCAGAAACTGTTGCAAACGCCTATCGTCTTGCTAAATCTGGTAAACCAGGAGCAAGTTTTATCTCTATTCCTCAAGACGTTACAGACAGTCCAGTCTCAGTAAAAGCAATCAAACCTCTTAGTGCACCTAAATTGGGTTCGGCATCTGTTTTAGATATTAATTATTTAGCGCAAGCTATTAACAATGCTGTTTTACCGGTACTGTTATTAGGAAATGGCGCATCTTCAGAGGGAGTAACTGCTGCCGTACGTCGACTTCTTGATGCTGTTAAACTACCAGTAGTAGAAACTTTCCAAGGTGCGGGTATTGTGTCACGTGAGCTCGAGGATGAAACATTCTTTGGTCGTGTAGGCCTCTTCCGTAATCAACCTGGAGATATGCTTTTGAAGCGTGCAGACCTAGTTATTGCTATCGGGTATGACCCTATTGAATATGAAGCGCGTAACTGGAATGCTGAAATTTCTGCTCGTATTATTGTTATTGACGTTGAACAAGCAGAAATTGATACGTATTTCCAACCCGAGCGAGAACTGATTGGAGACATGGCACATACACTTGATTTACTTTTACCAGCTATTAAAGGATATGAATTGCCTGAAGGTTCAAAAGAGTATTTGAAAGGGCTTCGTAATAACATTGAAAATGTTAGCGATGTTAAATTTGATCGTGACTCAGCTCATGGACTTGTTCATCCTCTTGATCTCATTGATGTACTCCAAGAAAATACCACCGATGATATGACTGTTACAGTTGATGTGGGGAGTCATTATATTTGGATGGCTCGCTACTTTAAATCATATGAAGCGCGTCACTTGCTCTTCTCAAACGGAATGCAAACATTAGGAGTTGCTCTACCTTGGGCAATTTCTGCGGCTCTTTTGCGTCCCAACACAAAAGTTATTTCAGTTTCTGGTGATGGTGGCTTCTTATTCTCAGCTCAAGAGTTAGAAACTGCAGTTCGTCTTCATCTACCAATTGTTCACATTATTTGGAACGATGGAAAATATAACATGGTTGAATTCCAGGAAGAAATGAAGTATGGGCGTTCTTCAGGTGTTGACTTTGGACCAGTTGATTTTGTAAAATACGCTGAAAGTTTCGGTGCTAAAGGTTACCGTGTAGACAGCAAAGACAGTTTTGAAGAAACACTCAAACAAGCTCTAATCGATGCTGAAAATGGACCAGTGTTGATTGATGTGCCTATCGACTATAAAGATAACGTGACACTAGGTGAAACAATCTTACCTGACGAGTTCTAC

SEQ ID NO: 6874 - protein, 560 aa, Streptococcus agalactiae
MTESHNQYGADLIVDSLINHDVKYVFGIPGAKIDRVFDTLEDKGPELIVARHEQNATFMAQAVGRITGEPGVVIATSGPGISNLATGLVTATDEGDAVLAIGGQVKRGDLLKRAHQSMNNVAMLEPITKYSAEVHDPNTLSETVANAYRLAKSGKPGASFISIPQDVTDSPVSVKAIKPLSAPKLGSASVLDINYLAQAINNAVLPVLLLGNGASSEGVTAAVRRLLDAVKLPVVETFQGAGIVSRELEDETFFGRVGLFRNQPGDMLLKRADLVIAIGYDPIEYEARNWNAEISARIIVIDVEQAEIDTYFQPERELIGDMAHTLDLLLPAIKGYELPEGSKEYLKGLRNNIENVSDVKFDRDSAHGLVHPLDLIDVLQENTTDDMTVTVDVGSHYIWMARYFKSYEARHLLFSNGMQTLGVALPWAISAALLRPNTKVISVSGDGGFLFSAQELETAVRLHLPIVHIIWNDGKYNMVEFQEEMKYGRSSGVDFGPVDFVKYAESFGAKGYRVDSKDSFEETLKQALIDAENGPVLIDVPIDYKDNVTLGETILPDEFY

SEQ ID NO: 6875 - protein, 1224 aa, Streptococcus agalactiae
ATGTTGAATAGTGAAAAAATGATTGTTTCTATCCAAAATCAGGATTTAGAACATGCTAACAAGTATTTCGAAAAAGCGTTGAAAAATGATCCTGAGGAAGTCTTATTGGAACTAGGAGCTTATTTGGAGAGTATTGGTTTTTTACCCCAAGCAAAACGTCTCTATGATCAAATCCGACCAAATTATCCAGAAGTTGCTATCAATTTAGCTCAAATTGTTGCCGAAGATGGAGATATTGAACAAGCATTCTTATACTTAGATTATATCTCAGAAGACAGTCAAGAGTATGTTTCAGCCCTCCTTGTTATGGCTGACTTATATGATATGGAAGGCTTGACTGATGTTGCGCGTGAAAAGCTTTTGCTAGCCAGCAAACTTAGCGATGACCCATTGGTTACATTTGGTTTAGCTGAAATGAACCTTAGTTTGGAACATTATCAAGAAGCGATAGAAGGATATGCTTCACTTGACAATCGAGAAATCTTAGAAACGACTGGGGTTTCAACTTATCAGCGTATTGGTAAATCCTACGCTATTATGGGGAAATTTGATGCAGCTATCGAATTTTTAGAAAAAGCCGTTGACATTGAGTATGATGATTTAACAGTTTTTGAGTTAGCAACAATCCTTTATGATCAAGAAGAATATCAAAAAGCTAACCTTTATTTTAAACAGTTGGATACTATTAATCCAGACTTTGATGGCTATGAATATATCTATGGTTTATCTCTTCGTGAGGAGCATAAATCTGAAGAAGCTTTACGTCTAGTTCAGCAAGGTCTTCGTAAAAATAGTTTTGATGGTCAACTTCTCTTACTAGCCTCACAATTATCGTATGAATTACATGATGTTTCTTCGTCGGAGTCTTATTTGAAACAAGCTGAAAAAGTTTCTGAAAACCAAGATGAAATTGTTATGAGATTGTCAAATTTGTATCTTGAAGAAGAGCGATTTGAGGAAGTCTTGGAATTAGACAATGATGATTTAGAAAATATCCTTGCAAAATGGAATATCGCTAAAGCACACAAGGCTTTAGAAATGGATGATAGTGTAGACTATTATCAATCTTTGTATAATGATTTAAAAGATAATCCAGAATTTTTACAAGATTATGCTTACATTTTGAGAGAATTTGGTTACCTTGATAAGGCACAAGAAGTAGGAAAGGCTTATTTAAAATTAGTTCCAGATGATATAGAGATGTCAGAATGGGTGAATAACATT

SEQ ID NO: 6876 - protein, 408 aa, Streptococcus agalactiae; identical to SEQ ID NO: 2222

SEQ ID NO: 6877 - protein, 1188 aa, Streptococcus agalactiae
ATGAATCGACCATCAGAAAAAGAATTTAAAAATAGTTTGTTTTTTAAATGGATCTTAAATAATCAAGCAGTTATTGCTCTCATGATTACCTTTTTGGTATTTTTAACGATTTTTATTTTTACCAAAATCTCTTTTATGTTTAAACCTGTGTTTGATTTTCTTGCTGTGCTGATATTGCCGCTTGTAATTTCTGGATTGCTTTATTACCTATTAAAACCTATGGTTACATTTTTAGAGAAGCGGGGAATTAAGCGTGTAACAGCGATATTATCAGTTTTTACTATTATAATCCTTCTGTTAATTTGGGCAATGTCTAGTTTTATTCCCATGATGAGTAATCAATTACGCCATTTTATGGAAGATCTCCCTTCATATGTGAATAAAGTGCAAATGGAAACAAGTTCGTTTATAGATCACAACCCTTGGTTAAAATCTTATAAAGGGGAAATATCGAGCATGTTATCTAATATCAGTAGCCAAGCGGTCTCTTATGCTGAAAAATTTTCAAAGAATGTTTTAGAGTGGGCAGGAAATTTAGCTAGTACAGTTGCACGTGTGACAGTAGCAACAATCATGGCTCCCTTTATTTTGTTTTATCTTTTAAGAGATAGTCGCAACATGAAGAATGGTTTCTTAATGGTTTTACCAACCAAACTACGCCAACCAACTGATCGTATTTTGCGAGAAATGAATAGTCAAATGTCAGGATATGTGCAAGGACAAATCATTGTTGCTATTACTGTTGGTATTATTTTTTCAATAATGTATAGTATTATAGGCCTTAGATATGGCGTGACATTAGGGATTATTGCCGGTGTGTTAAATATGGTTCCCTATTTGGGAAGTTTTGTCGCCCAAATTCCAGTGTTTATCTTAGCGCTTGTCGCAGGACCTGTTATGGTTGTTAAAGTTGCGATTGTTTTTGTTATTGAGCAAACTCTAGAGGGACGCTTTGTCTCACCCTTGGTTTTAGGTAATAAACTTAGCATTCATCCAATTACAATTATGTTTATTTTATTAACCTCTGGAGCGATGTTTGGTGTTTGGGGAGTATTCCTCAGTATTCCGATTTATGCATCTATCAAAGTTGTTGTTAAAGAATTGTTTGATTGGTACAAAGCTGTCAGTGGGCTATATACAGTAGATGTTGTTACTGAAGAAAGAAGTGAAGAAGTTAAAAATGTTGAA

SEQ ID NO: 6878 - protein, 396 aa, Streptococcus agalactiae; identical to SEQ ID NO: 2224

SEQ ID NO: 6879 - protein, 480 aa, Streptococcus agalactiae
TTGAAAAGACGGTTAATTTTTATGAAAAATAGAGATTTTAGGGTTAGAGACCAGCTCGAAACATTCGGAGTCAGAGTTTCTGCTTTAATCATAGAAAATCAAAAACTGCTATTAATATATGCTCCTCATCTCGATAAATACTATTTGCCAGGTGGGGCGCTTCAAGTTGGAGAAGATAGCAATAAGGCTGTTGCGAGAGAAGTACTTGAGGAAATAGGTCTTCACAGCCAAGTTGGTGATTTAGCCTATATTGTTGAGAATCAGTTTAATATTAAGAGACATCATTATCACTCAGTTGAATTTTTATATTTTGTTAATCTCTTGGGTCAGGCGCCAGAATCTATCAAAGAAGGAACGCATAAGCGACATTTTGTATGGCTTCCAATAAAAGAATTAACAAAAATTGATTGTAATCCTAATTTTTTAGCACAGGATTTGATAGAATGGCCAGGTCATGTTGTGCATAAAATCGTTCAAAAT

SEQ ID NO: 6880 - protein, 160 aa, Streptococcus agalactiae; identical to SEQ ID NO: 2226

SEQ ID NO: 6881 - protein, 480 aa, Streptococcus agalactiae
ATGACTAAATTAGCAACAATTTGTTACATTGACAATGGCAAGGAATTACTTCTATTGCACCGCAACAAAAAAGAGAATGATGTTCATGAGGGAAAGTGGATCTCGGTAGGCGGTAAACTGGAGGCAGGTGAAACTCCGGATGAATGTGCTAAGCGTGAAATTCTAGAAGAAACCCATTTAACAGTAAAAAAAATGGATTTTAAAGGAGTCATCACTTTTCCTGAATTTACGCCAGGTCATGATTGGTATACCTATGTCTTTAAAGTAACAGATTATGAAGGAGAGTTAATTTCAGATGATGAATCACGAGAAGGAACCTTAGAATGGGTACCATATGATCAAGTTCTCTCTAAGCCAACGTGGCAAGGAGATTACGAAATTTTTAAATGGATTTTAGAAGATGTTCCTTTCTTTTCTGCTAAGTTTGTTTATGATGAACACCAAAATTTAATTGAAAAGACGGTTAATTTTTATGAAAAA

SEQ ID NO: 6882 - protein, 160 aa, Streptococcus agalactiae; identical to SEQ ID NO: 2228

SEQ ID NO: 6883 - protein, 3216 aa, Streptococcus agalactiae
ATGGAAATCAAAAAGAAACATCGTATTATGCTTTATTCAGCCCTTATTTTAGGAACAATATTGGTTAACAATAGTTACCAAGCTAAAGCTGAAGAGCTTACCAAAACTACCTCAACGTCCCAAATAAGAGATACTCAAACTAATAATATTGAAGTTCTCCAGACTGAAAGTACCACTGTCAAAGAGACTAGCACCACAACCACACAACAAGATCTGTCTAACCCCACAGCTTCAACCGCAACTGCAACAGCCACTCATAGCACAATGAAACAAGTAGTAGATAATCAAACTCAAAATAAGGAGCTGGTGAAAAACGGAGATTTTAATCAAACTAACCCTGTATCTGGAAGCTGGTCACATACAAGCGCTAGGGAATGGTCTGCTTGGATTGATAAAGAAAATACTGCTGATAAATCACCTATTATCCAACGTACCGAACAAGGCCAAGTAAGCCTATCCAGCGACAAAGGCTTTAGAGGTGCTGTAACACAAAAAGTGAACATTGATCCCACTAAAAAATATGAGGTCAAGTTTGATATTGAAACAAGTAACAAGGCTGGACAAGCTTTCCTTCGTATTATGGAGAAAAAAGACAACAATACGCGACTTTGGCTTTCTGAGATGACCAGCGGTACTACTAACAAACATACCTTAACAAAGATATATAACCCAAAGTTAAATGTCTCCGAGGTGACACTTGAACTTTATTATGAAAAAGGAACTGGTTCTGCTACTTTTGATAATATATCAATGAAAGCAAAAGGCCCTAAAGACTCAGAGCATCCACAACCCGTCACAACACAAATTGAAGAAAGCGTTAATACGGCTTTAAACAAAAATTACGTTTTTAATAAAGCTGACTACCAATACACTCTAACCAATCCGTCTCTCGGGAAAATTGTTGGTGGAATATTGTATCCAAACGCTACTGGTTCAACAACTGTTAAAATATCTGATAAATCTGGTAAAATAATTAAAGAAGTACCGTTATCAGTTACAGCTTCAACAGAAGATAAGTTTACAAAACTCCTCGACAAATGGAACGACGTGACTATTGGTAATCATGTTTACGATACTAATGATTCGAACATGCAAAAGATTAATCAGAAATTAGATGAAACTAACGCCAAAAACATCAAAACTATCAAACTGGATTCTAATCACACTTTCCTTTGGAAAGATTTAGATAATCTCAATAATTCAGCACAGTTAACCGCTACTTATCGTCGTTTGGAAGATTTAGCTAAACAAATCACCAATCCCCACTCTACTATTTACAAAAATGAAAAAGCTATTCGTACTGTAAAAGAGAGTCTGGCTTGGCTTCATCAAAACTTCTACAATGTTAATAAAGATATAGAAGGCTCTGCCAATTGGTGGGATTTTGAAATCGGTGTCCCTCGCTCAATTACAGCTACCCTAGCTCTCATGAATAACTACTTCACTGACGCTGAAATAAAAACTTATACCGACCCAATTGAACACTTTGTTCCTGATGCAGGATATTTCCGTAAAACGCTTGACAATCCATTTAAAGCCCTTGGTGGTAATCTAGTCGATATGGGGCGCGTTAAAATCATTGAAGGTTTACTTCGTAAAGACAATACTATTATCGAAAAAACTTCTCATTCTCTAAAAAATCTTTTTACTACTGCTACTAAAGCTGAAGGTTTCTATGCTGACGGTTCTTACATCGACCATACGAATGTTGCTTATACTGGCGCCTATGGTAATGTTCTGATAGATGGTTTGACACAATTGCTGCCTATCATTCAAGAAACTGACTATAAAATCTCTAATCAAGAACTTGATATGGTTTATAAATGGATTAATCAATCATTTTTACCTTTAATTGTAAAAGGTGAGTTAATGGATATGAGTCGTGGACGCTCAATTAGTAGAGAGGCTGCTTCTTCGCATTCGGCTGCAGTTGAAGTTCTCAGAGGTTTCCTCAGATTGGCTAACATGTCTAATGAAGAGCGAAACTTAGACCTCAAATCAACTATTAAAACGATTATCACTTCAAATAAATTCTACAACGTCTTCAATAACCTCAAATCGTATTCCGATATTGCCAACATGAATAAGCTGCTTAATGACAGTACAGTCGCTACTAAACCTTTAAAAAGTAATTTATCAACCTTTAATAGCATGGACCGCTTAGCTTATTATAATGCCGAGAAAGACTTTGGTTTCGCGCTTTCATTACATTCTAAACGCACCCTCAACTATGAAGGAATGAATGATGAAAATACACGTGGTTGGTATACCGGAGATGGTATGTTCTATCTTTATAATAGTGATCAATCTCATTATAGTAATCATTTTTGGCCAACCGTCAATCCTTATAAAATGGCTGGAACAACTGAAAAAGATGCTAAGCGTGAAGATACAACTAAGGATTTCATGAGCAAACATAGCAAAGACGCTAAAGAAAAAACCGGTCAAGTTACAGGAACATCTGACTTTGTTGGTTCCGTCAAACTTAATAATCACTTTGCTCTTGCCGCTATGGATTTTACTAACTGGGATCGCACCTTAACAGCACAAAAAGGTTGGGTTATCTTAAATGATAAGATTGTCTTTTTAGGTAGCAACATCAAGAATACTAACGGCATTAGAAATGTTTCTACAACAATTGATCAACGAAAAGACGATTCTAAAACACCTTATACTACATACGTCAATGGAAAAACTGTTGATTTAAAGCAAGCAAGTTCTCAACAATTTACAGATACAAAGAGTGTCTTTTTAGAATCAAAAGAACCTGGTCGCAATATTGGTTATATCTTCTTTAAAAATAGCACTATTGATATTGAACGCAAAGAGCAAACAGGTACTTGGAACAGCATTAATCGTACTTCTAAAAATACCTCAATCGTTAGTAATCCTTTTATCACTATAAGCCAAAAGCATGACAACAAAGGTGATAGCTATGGTTACATGATGGTTCCAAACATTGATCGCACAAGTTTTGATAAATTAGCCAACAGCAAAGAAGTAGAATTACTAGAAAATAGTTCAAAACAACAAGTTATCTATGATAAAAACAGTCAAACTTGGGCTGTTATCAAACACGATAATCAAGAGAGTCTCATTAACAATCAATTCAAAATGAATAAAGCGGGACTTTACCTAGTACAAAAAGTTGGTAATGACTATCAAAATGTCTATTACCAACCTCAAACCATGACAAAAACAGACCAATTAGCTATC

SEQ ID NO: 6884 - protein, 1072 aa, Streptococcus agalactiae
MEIKKKHRIMLYSALILGTILVNNSYQAKAEELTKTTSTSQIRDTQTNNIEVLQTESTTVKETSTTTTQQDLSNPTASTATATATHSTMKQVVDNQTQNKELVKNGDFNQTNPVSGSWSHTSAREWSAWIDKENTADKSPIIQRTEQGQVSLSSDKGFRGAVTQKVNIDPTKKYEVKFDIETSNKAGQAFLRIMEKKDNNTRLWLSEMTSGTTNKHTLTKIYNPKLNVSEVTLELYYEKGTGSATFDNISMKAKGPKDSEHPQPVTTQIEESVNTALNKNYVFNKADYQYTLTNPSLGKIVGGILYPNATGSTTVKISDKSGKIIKEVPLSVTASTEDKFTKLLDKWNDVTIGNHVYDTNDSNMQKINQKLDETNAKNIKTIKLDSNHTFLWKDLDNLNNSAQLTATYRRLEDLAKQITNPHSTIYKNEKAIRTVKESLAWLHQNFYNVNKDIEGSANWWDFEIGVPRSITATLALMNNYFTDAEIKTYTDPIEHFVPDAGYFRKTLDNPFKALGGNLVDMGRVKIIEGLLRKDNTIIEKTSHSLKNLFTTATKAEGFYADGSYIDHTNVAYTGAYGNVLIDGLTQLLPIIQETDYKISNQELDMVYKWINQSFLPLIVKGELMDMSRGRSISREAASSHSAAVEVLRGFLRLANMSNEERNLDLKSTIKTIITSNKFYNVFNNLKSYSDIANMNKLLNDSTVATKPLKSNLSTFNSMDRLAYYNAEKDFGFALSLHSKRTLNYEGMNDENTRGWYTGDGMFYLYNSDQSHYSNHFWPTVNPYKMAGTTEKDAKREDTTKDFMSKHSKDAKEKTGQVTGTSDFVGSVKLNNHFALAAMDFTNWDRTLTAQKGWVILNDKIVFLGSNIKNTNGIRNVSTTIDQRKDDSKTPYTTYVNGKTVDLKQASSQQFTDTKSVFLESKEPGRNIGYIFFKNSTIDIERKEQTGTWNSINRTSKNTSIVSNPFITISQKHDNKGDSYGYMMVPNIDRTSFDKLANSKEVELLENSSKQQVIYDKNSQTWAVIKHDNQESLINNQFKMNKAGLYLVQKVGNDYQNVYYQPQTMTKTDQLAI

SEQ ID NO: 6885 - protein, 1038 aa, Streptococcus agalactiae
ATGTATAAAAACATTATCGTAACTGGTGGAGCTGGTTTCATCGGATCAAATTTTGTACACTATGTTTACAATAACCACCCAGATGTTCATGTAACTGTCCTTGATAAATTGACATATGCAGGTAATCGTGCTAACATTGAAGCCATTCTTGGTGATCGTGTTGAGTTAGTTGTTGGTGACATCGCTGACGCTGAATTGGTAGACAAATTGGCTGCTAAAGCGGATGCTATTGTTCACTATGCGGCTGAGAGTCACAACGATAACTCATTGGAAGATCCAAGTCCATTTATCCATACAAACTTTATCGGAACTTACACTTTGCTTGAAGCAGCTCGTAAATACGATATCCGTTTCCACCACGTGTCAACTGATGAAGTTTATGGAGATCTTCCACTTCGTGAAGACCTTCCAGGAAATGGTGAAGGACCAGGTGAAAAATTCACTGCTGAAACAAAATACAATCCATCATCACCTTACTCATCAACTAAGGCAGCTTCTGACCTTATCGTTAAGGCATGGGTACGTTCCTTCAGCGTAAAAGCGACCATTTCGAACTGTTCAAATAACTATGGACCATACCAACACATCGAAAAATTCATTCCACGTCAAATTACAAATATCTTGGCAGGAATCAAACCGAAACTTTATGGTGAAGGTAAAAACGTCCGTGACTGGATCCACACAAATGATCATTCAACAGGTGTCTGGGCTATTTTGACTAAGGGGCGTATTGGTGAAACATACCTTATTGGTGCCGACGGTGAGAAAAACAACAAGGAGGTTCTTGAACTTATCCTTGAGAAAATGGGTCAACCAAAAGACGCTTACGATCACGTAACTGACCGTGCTGGTCATGATCTTCGTTACGCTATCGATTCTACAAAATTGCGTGAAGAACTCGGTTGGGAACCACAATTTACAAACTTTTCAGAAGGTTTGGAAGAAACTATTAAATGGTATACAGAAAATGAGACATGGTGGAAAGCAGAAAAAGATGCTGTAGAAGCCAAGTATGCTAAAACTCAAGAAGTCATTAAG

SEQ ID NO: 6886 - protein, 346 aa, Streptococcus agalactiae
MYKNIIVTGGAGFIGSNFVHYVYNNHPDVHVTVLDKLTYAGNRANIEAILGDRVELVVGDIADAELVDKLAAKADAIVHYAAESHNDNSLEDPSPFIHTNFIGTYTLLEAARKYDIRFHHVSTDEVYGDLPLREDLPGNGEGPGEKFTAETKYNPSSPYSSTKAASDLIVKAWVRSFSVKATISNCSNNYGPYQHIEKFIPRQITNILAGIKPKLYGEGKNVRDWIHTNDHSTGVWAILTKGRIGETYLIGADGEKNNKEVLELILEKMGQPKDAYDHVTDRAGHDLRYAIDSTKLREELGWEPQFTNFSEGLEETIKWYTENETWWKAEKDAVEAKYAKTQEVIK

SEQ ID NO: 6887 - protein, 510 aa, Streptococcus agalactiae
ATGTTTGATCTTTTTTTGACTATCACCAATGAATTGAATCTAATAGGGATTACGCCTTTGTTGATGGGATCGGTTGGCTTAGAAGTACGTACAGGTCGAGATTGGAAAGCTAGAGACTTAGATATTCATGTTCCTAGTGACCCTAGAGGATGGGAGGCACCTGATGAGGGGCGTATTTTCCAATTCGCTGAAATAAATGTGATAATGGAAAAACTAGGATTTAATCTTGTAGATCGTCATGAGCATGAATACCAGAAAGAAGGCCTTTCTGTTGAGTTTGGTGGTCTCCACTCACTTCCAGAATTTGCAGGTATACCTATAGATGACTTGGAAGAAATTGAGACAAATGGCGCTCACTATTTTCTACCAACTTTAGATCAATACCTAAAAATATACCAAGCATCCTCAAAAGATTCTTATCGATCAGATAAGAATAATCACAAAGACTTTGCAAAAATTGATTATTTAGAAAAATTATTAAGTAATAAAATGGTTCGTAATGCGAACCAC

SEQ ID NO: 6888 - protein, 170 aa, Streptococcus agalactiae
MFDLFLTITNELNLIGITPLLMGSVGLEVRTGRDWKARDLDIHVPSDPRGWEAPDEGRIFQFAEINVIMEKLGFNLVDRHEHEYQKEGLSVEFGGLHSLPEFAGIPIDDLEEIETNGAHYFLPTLDQYLKIYQASSKDSYRSDKNNHKDFAKIDYLEKLLSNKMVRNANH

SEQ ID NO: 6889 - protein, 591 aa, Streptococcus agalactiae
ATGACTGAACAATTTTTTGATAAAGAATTAACTTGTCGTCCAATTAAAGTCATTCCTGGATTGTTGGAATTCGATATTCCCGTTCGTGGAGACAACCGTGGATGGTTCAAAGAGAACTTTCAAAAAGAAAAAATGATACCGCTTGGTTTCCCAGAAAGCTTCTTTGAGGCAGACAAACTACAAAATAATATTTCGTTTAACAAAAAAAATACTTTGCGAGGTCTCCATGCAGAACCTTGGGATAAATATGTTTCGATCGCTGATGAAGGACGTGTGATCGGTACTTGGGTTGACCTCCGTGAAGGTGACAGTTTTGGTAACGTTTACCAAACGATTATCGATGCCTCAAAGGGTATCTTTGTTCCACGCGGCGTTGCTAATGGTTTCCAAGTTCTTTCAGATAAAGCAGCTTATACTTATCTCGTTAACGATTATTGGGCACTTGAACTCAAACCAAAATATGCTTTCGTTAACTATGCAGATCCAAATCTAGGCATTCAGTGGGAAAACCTTGAAGAAGCAGAAGTCTCAGAAGCAGATAAGAATCACCCACTTCTCAAAGATGTAAAACCTTTGAAGAAGGAAGATTTG

SEQ ID NO: 6890 - protein, 197 aa, Streptococcus agalactiae
MTEQFFDKELTCRPIKVIPGLLEFDIPVRGDNRGWFKENFQKEKMIPLGFPESFFEADKLQNNISFNKKNTLRGLHAEPWDKYVSIADEGRVIGTWVDLREGDSFGNVYQTIIDASKGIFVPRGVANGFQVLSDKAAYTYLVNDYWALELKPKYAFVNYADPNLGIQWENLEEAEVSEADKNHPLLKDVKPLKKEDL

SEQ ID NO: 6891 - protein, 867 aa, Streptococcus agalactiae
ATGAAAGGTATTATTTTAGCGGGAGGTTCAGGTACTCGCTTGTACCCATTAACTCGTGCTGCATCAAAACAATTGATGCCGATTTATGATAAACCAATGATTTATTATCCATTGTCAGTTTTGATGTTGGCAGGAATAAAAGAAATACTGATTATTTCTACTCCACAAGATTTGCCTCGCTTTGAAGATATGCTTGGAGATGGTTCAGAATTAGGAATCTCTCTTTCTTATGCTGAACAACCAAGCCCAGATGGGTTAGCACAGGCCTTCATTATCGGTGAAGAATTTATTGGCGATGATCACGTTGCCTTAGTATTAGGTGATAATATTTACCATGGACCAGGTTTATCTGTAATGCTACAACGTGCAGCTAGTAAAGAAAGTGGAGCAACCGTCTTTGGCTATCAAGTAAAAGATCCAGAACGTTTTGGTGTTGTCGAGTTTGATACTGATATGAATGCCATTTCTATTGAAGAAAAACCAGCGCAACCTAAGTCTAATTATGCTGTCACAGGTCTTTATTTCTATGATAACGATGTGGTTGAAATCGCTAAAAATATTAAGCCAAGCCCTCGTGGAGAACTTGAAATTACTGATGTTAACAAAGCCTACCTTGATAGAGGTGACTTATCAGTTGAGTTAATGGGACGTGGATTTGCGTGGTTAGACACTGGAACTCACGAAAGCCTTCTTGAAGCAGCACAATATATTGAAACAGTACAACGCATGCAAAACGTTCAAGTTGCTAACCTTGAGGAAATTGCTTACCGCATGGGCTACATCACTCGTGAACAAGTCCTTGAGTTGGCACAACCACTTAAGAAAAATGAGTATGGTCAATACCTACTTCGTTTGATTGGAGAAGCC

SEQ ID NO: 6892 - protein, 289 aa, Streptococcus agalactiae
MKGIILAGGSGTRLYPLTRAASKQLMPIYDKPMIYYPLSVLMLAGIKEILIISTPQDLPRFEDMLGDGSELGISLSYAEQPSPDGLAQAFIIGEEFIGDDHVALVLGDNIYHGPGLSVMLQRAASKESGATVFGYQVKDPERFGVVEFDTDMNAISIEEKPAQPKSNYAVTGLYFYDNDVVEIAKNIKPSPRGELEITDVNKAYLDRGDLSVELMGRGFAWLDTGTHESLLEAAQYIETVQRMQNVQVANLEEIAYRMGYITREQVLELAQPLKKNEYGQYLLRLIGEA

SEQ ID NO: 6893 - protein, 1101 aa, Streptococcus agalactiae
ATGAAAAAGATAGCAATTATTGGTGCAGGAGCAGTCGGAGCGACACTAGCCTATTACTTATCAAAAGAAAAGGATATTCAGGTTACTGTTTTTGATTATGGAGTTGGACAAGCAACTAAGGCTGCTGCGGGGATTATTAGCCCATGGTTTTCAAAACGTCGTAATAAATCCTGGTATCGCATGGCGAGGTTGGGGGCTGATTTTTATTCAAATCTAGTCACGGATTTACAAAAAGATGGTTTTGAAATAAAATTTTATCAGCAAACTGGTGTTTTCTTATTAAAAAAGGACGAGAGTCAGTTAGAGTCATTGTTTGCACTAGCAGATAAACGTCGACTAGAATCTCCTCTAATAGGCGATTTACAAATACTAAATAAAAGTGAAGCAAATACTCACTTTCCTGAGTTAGATGGCTATGAACAGTTACTTTATGCGAGTGGAGGAGCACGAGTAGAAGGGGCGGACTTAACACGAATATTGTTAGAAGCAAGTGGTGTTAATGTCATCAAGGATGAAGTTCACTTTACGATAACTGATAATGGCTTTCGTGTTCAAGGAATTGATTTTGATAAACTTGTTTTAGCGAGTGGAGCCTGGCTAGCTAAGATATTAGATGAGCACAACTATCAGGTAGATGTTCGCCCTCAAAAAGGGCAATTGCGAGACTATTATTTTAGCAATATTAATACAGGAAAATATCCTGTTGTAATGCCAGAAGGTGAGCTAGATATTATCCCATTTGATAATGGTAAAGTCTCTGTAGGTGCAAGTCACGAAAATGATATGGCTTTTGATTTAAACATTGATTTTAAAGTCTTAGACAAGTTTGAAGAGCAAGCTATTGGCTATTTTCCGCAATTAAAAAAAGCAGATACGACTTCTGAACGTGTTGGAATTCGTGCCTATACAAGTGATTTTTCTCCATTTTTTGGCCCTGTCCCTTGTATGGAGGGTGCGTATGCTGCAAGTGGATTAGGATCAACTGGCTTAACAGTGGGCCCATTAATTGGTTATGAATTATGTCAATTAATCTTAAATAAAGAAAATCAGCTAAATTTAGAGGATTACGATATTACGAAATACGTGAAAAAGATTAGTAGA

SEQ ID NO: 6894 - protein, 367 aa, Streptococcus agalactiae
MKKIAIIGAGAVGATLAYYLSKEKDIQVTVFDYGVGQATKAAAGIISPWFSKRRNKSWYRMARLGADFYSNLVTDLQKDGFEIKFYQQTGVFLLKKDESQLESLFALADKRRLESPLIGDLQILNKSEANTHFPELDGYEQLLYASGGARVEGADLTRILLEASGVNVIKDEVHFTITDNGFRVQGIDFDKLVLASGAWLAKILDEHNYQVDVRPQKGQLRDYYFSNINTGKYPVVMPEGELDIIPFDNGKVSVGASHENDMAFDLNIDFKVLDKFEEQAIGYFPQLKKADTTSERVGIRAYTSDFSPFFGPVPCMEGAYAASGLGSTGLTVGPLIGYELCQLILNKENQLNLEDYDITKYVKKISR

SEQ ID NO: 6895 - protein, 786 aa, Streptococcus agalactiae
ATGAAAGCTAGAGAACTTATTGATGTATATGAAACTTATTGTCCACAGGAATTATCTATGGAAGGAGATATTTCAGGTCTTCAAATTGGATCTTTAGATAAAGAAATAAAGACAGTCATGGTAGCTTTAGATGTTCGAGAGACCACAGTAGCTGAAGCAATTGAACGTCAAGTAGATCTTCTGATTGTAAAGCATGCTCCTATTTTTCGTCCATTAAAGGATTTGGTAGCAACACCGCAAAATAAGATTTATATAGACCTTCTTAAATCAGACATTGCTGTTTATGTGAGCCATACTAATATAGATATCGTTCCTAATGGACTTAACGACTGGTTTTGTGAATTATTAGATATTCAATATCCCGATATACTATCTGAGACAAGTAATGGTTATGGTATTGGTCGCATTGGTGATGTTAGACCCCAGAGTTTTGAATTTTTTGCATGGAAAATTAAAGATGTGTTTGGTTTAGATAGCGTTCGTTTAGTTTCATATGATAAGTCTAATCCTGAAATTCAACGAGTTGCTATTTGCGGGGGTAGTGGGCAAAGTTTCTACAAAGAAGCTATTGCAAAAGGAGCAGATGTTTTTGTAACGGGAGATATTTATTATCATACTGCACAAGAAATGATCACAAATGGTTTGCTTGCGATTGACCCAGGTCATCATATTGAGGTTTTATTTGTTTCTAAAATAGCTACTATGATTGAGCAGTGGAAACTTGAAAAAGACTGGGATATTTCAGTTTTAGAGAGTAAAGCTCCAACAAATCCCTTTTACCATATG

SEQ ID NO: 6896 - protein, 262 aa, Streptococcus agalactiae
MKARELIDVYETYCPQELSMEGDISGLQIGSLDKEIKTVMVALDVRETTVAEAIERQVDLLIVKHAPIFRPLKDLVATPQNKIYIDLLKSDIAVYVSHTNIDIVPNGLNDWFCELLDIQYPDILSETSNGYGIGRIGDVRPQSFEFFAWKIKDVFGLDSVRLVSYDKSNPEIQRVAICGGSGQSFYKEAIAKGADVFVTGDIYYHTAQEMITNGLLAIDPGHHIEVLFVSKIATMIEQWKLEKDWDISVLESKAPTNPFYHM

SEQ ID NO: 6897 - protein, 681 aa, Streptococcus agalactiae
ATGGATTTACAATTATCAAAACGATTACAAAAAGTTGCAAACTACGTTCCAAAAGGAGCTCGGTTATTAGATGTAGGAAGTGATCATGCTTACTTACCTATTTTTTTGTTGCAGATGGGATACTGTGATTTTGCCATTGCTGGTGAAGTGGTGAATGGACCGTATCAGTCTGCGTTGAAAAACGTTTCAGAACATGGTCTCACTTCAAAGATAGATGTTCGCTTAGCAAATGGTTTGTCAGCTTTTGAAGAAGCAGATAATATTGATACGATAACTATCTGTGGAATGGGTGGTCGTTTGATTGCTGATATTTTGAATAACGATATAGACAAACTTCAGCACGTTAAAACACTAGTCTTACAACCTAATAATCGGGAAGATGATTTAAGAAAATGGTTAGCTGCAAATGATTTTGAAATAGTAGCAGAAGATATCTTGACTGAAAATGACAAATGCTATGAAATTTTAGTTGTTAAGCATGGTCATATGAATTTAACTGCTAAAGAATTGCGATTTGGTCCATTTTTATTATCCAATAACACAACGGTTTTTAAAGAAAAATGGCAAAACGAGCTTAATAAATTAACTTTTGCTTTAAACTCTATTCCTAATAGTAAAATTGAAGAACGCGCTATTTTGGAAGATAAAATACAGGATATAAAGGAGGTTCTTGATGAAAGC

SEQ ID NO: 6898 - protein, 227 aa, Streptococcus agalactiae
MDLQLSKRLQKVANYVPKGARLLDVGSDHAYLPIFLLQMGYCDFAIAGEVVNGPYQSALKNVSEHGLTSKIDVRLANGLSAFEEADNIDTITICGMGGRLIADILNNDIDKLQHVKTLVLQPNNREDDLRKWLAANDFEIVAEDILTENDKCYEILVVKHGHMNLTAKELRFGPFLLSNNTTVFKEKWQNELNKLTFALNSIPNSKIEERAILEDKIQDIKEVLDES

SEQ ID NO: 6899 - protein, 678 aa, Streptococcus agalactiae
ATGACTTATTTGGAACAATATCAGTCAGGGCAATTGACTCTACCAAGTGCTTTATTTTTTCACTTTAAATCTATTTTTAAGACAGCAGACGATTTTTTAGTTTGGCAATTTTTCTATTTACAAAATACAACTAATTTATCCGATCTAACACCGAGCCGTATTGCGACATCACTTGATAAAACAGTGGCAGATATCAATCGTTCTATATCGAATTTAACAAGTCAAGGTTTATTAGATGTCAAAACAATTGAGTTGAATCATGAAATCGAGATTATCTTTGATACAAGCCCTGTGTTTGCTAAATTAGATAAACTTTTCGAAGAGGATAATCAAGTAATAATAGACAATAAAACCTCTGATTCGAATCGTCTGAAAGATTTAGTAGGAGACTTCGAACGTGAATTAGGTCGCTTATTAAGTCCTTTTGAATTAGAAGATTTACAAAAGACACTGCAAGAAGATCAGACAGATCCTGATATTGTTAGGGCAGCTCTTAGAGAAGCGGTTTTCAATGGGAAAACAAGTTGGAATTATATCAATGCTATCCTTCGCAATTGGCGGCGTGAAGGATTGACGACACTTCGACAAATTGAAGAGAGAAAACAAGCACGTGAAGATAACCAAATGAAAGATTTAGCGATTTCGGATGATTTTAAAAATGCAATGAATTTATGGGAA

SEQ ID NO: 6900 - protein, 226 aa, Streptococcus agalactiae
MTYLEQYQSGQLTLPSALFFHFKSIFKTADDFLVWQFFYLQNTTNLSDLTPSRIATSLDKTVADINRSISNLTSQGLLDVKTIELNHEIEIIFDTSPVFAKLDKLFEEDNQVIIDNKTSDSNRLKDLVGDFERELGRLLSPFELEDLQKTLQEDQTDPDIVRAALREAVFNGKTSWNYINAILRNWRREGLTTLRQIEERKQAREDNQMKDLAISDDFKNAMNLWE

SEQ ID NO: 6901 - protein, 516 aa, Streptococcus agalactiae
ATGGATTTAAATAATTACATCGCTTCAATTGAAAACTATCCTCAAGAAGGAATTACTTTCCGTGATATCTCCCCATTAATGGCTGATGGTAAAGCATACAGCTATGCTGTTCGTGAAATTGTACAATATGCTGCTGATAAAGATATTGATATGATTGTTGGACCAGAAGCTCGTGGCTTTATTGTTGGTTGCCCAGTTGCTTATGCTCTTGGTATTGGTTTTGCTCCAGTCCGTAAACCAGGTAAATTACCACGCGAAGTTATTTCAGCTGACTATGAAAAAGAATATGGTCTTGATACATTGACAATGCACGCAGATGCTATTAAACCTGGTCAACGTGTTTTAATTGTTGATGACCTTTTAGCTACTGGTGGAACAGTAAAAGCGACAATTGAAATGATTGAAAAACTCGGTGGCGTTGTCGCAGGCTGTGCTTTCCTAGTTGAACTAGATGGATTAAATGGTCGTAAAGCTATTGAAGGTTATGATACTAAGGTATTGATGAACTTTCCAGGA

SEQ ID NO: 6902 - protein, 172 aa, Streptococcus agalactiae; identical to SEQ ID NO: 2246

SEQ ID NO: 6903 - protein, 2562 aa, Streptococcus agalactiae
ATGAGACCTATCGTTAGAAAAAAGATGTACAAAAAAGGTAAATTTTGGGTCGTTGCAGGTATCGTTACTATTTTAGGTGGTAGTGCAATTCTTGGTCAAGATGTCAAGGCAGAACAGGCAGAAGCAGTAACTTCAACGATCTCAGAGAAAACTGATAGCAGTCAGACTATTTCGGATACTTCCAAGTTAACGTTACCTGTTAATTCCTCGGAGGCTATGAAAAATAGTGCAGAGCCTTTAATAAAAACAGGCTTTGCTACATCTGTTTCATCTAATCCTAGAGAGATAGCAGCTACCCCAGTCAAAACCTTTGATGCTAGCTCAAAAGTTGTTGTAAAAGCTAGTACTGCTGAGCACTCAGCAAATCAAACAAATTCTAATGTTAATCAAGTAGCTAATGATAGTGAAGTTATTACTCAACAAAATTCAACAAAGCAATTACCAACAGTGACTTACTCTGCTCATGTTCAAGATATTGGATGGCAAAAGTCGGTTGATAATGCAACAGTTTCAGGAACAGTAGGACAAGAAAAGCAGGTTGAGGCAATAAAATTGTCTATTAAAGCACCTGAAGGAATAACAGGAAAACTTAGCTATAAAACTTATGTTAAAGGACAAGGTTGGCAACCTTCAGTAGAGAGTGGTCAAGTTAGTGGTACTGTTGGTCAGAGTAGACCTATTGAAGCACTAAGCATTAACCTTACTGATAATTTACAAAAATTATATGATGTCTATTATCGTGTTCATGTTCAAGATATAGGGTGGATGGCTTGGGCTAAAAATGGAGCTTACGCTGGAACTTTGGGAATGTCAAAGCGCCTTGAAGCTTACGAAGTAAAATTTACCCTTAAAGGACAATCTGTTTTAACACCAACTATACCTAAGGAAGAGAGACCTGTCTTAAATTATCAGGTTAAGGTAGGCCAAAATGGTTGGCAATCTAATAAACTTGAAGGACAAATGGCGGGAACTTTAGGAGAATCCAAAGCCCTAGATGGAGTAAAATTCACTCTTAGCACCTTGAAGTATGGGGACATTCTCTATCGTACTCATGTACAAGATAAAGGTTGGGGAGAAATTTTAGGTAGTCAAACAAGTAAGGATTATCAAGGAAAAAGACTAGAAGCTATTCAATTGGACTTAAGTGGGAATTTAAAACAAAATTATGATATTTATTATCGCGCTCACGTCCAAGATAAAGGTTGGATGGCTTGGCAAAAAAATAATAGTGTAGCAGGTACAGTCGGAGAATCGAAACGTTTAGAGGCTTTGGAAGTAAAACTAGTAGCTAAAGCTTCAGATTTTAGTTCCAAAACAGATCATTCATTCTTAGAAATGAAGCATCCTGGATTAAGTTATCAAACTTATCTTCAAAAAGATGGTTGGAAACCAACGGTTTTGGAAGGCCAATTAGGAGGTAGTATTGGACTTTCAAAATCTATAAAAGCCATCAAACTTAACTTAGGTAGTACAGCTCTAGGAAATATAGAATATAGAACTTTTCTTAATAGTTCAGGTTGGCAAACTGTTGTTAATTCAGGGAGAGAAAGTAATGTACCAAATGAATCTCAACAAGTAGAAGCTATTCAGATGCGATTGACAGGTCTGCTATCGAAAACCTATAGTGTGATGTATCGAGTTCACATGCAAGATTATGGTTGGCAGGATTGGACTTATAACAATAACATCGCTGGTAGTACTAATCAAGGAAAACGAATTGAAGCAATCGAAATTAAATTAGTTGAGACTGCTAAAATACCGGTAACTGTCCAAACGACCTATAAGGGAACTGGAAACTATAATGTACGAGTGACAAATGTTATTAGTCCTGGGAATTTAAAAATTGCTATTTGGTCAGATAAAAATAATCAGGATGACCTTAAGTGGTATACCGTCACACCCAAAAATCATGAAGCTACATTGACATTTAATGTTACAAATCATAGAGACAATGGTAAATACTTTATCCATGTTTATCAGGAAAATGCTTCTAATCAAAAACAATTATTGGTAAAAACTTCTCTACAAGTCGCACATTCAAATTATAATACTCCTTACTTTAGCCAACGTGATGGAAGGTGGGCAAGTCGAAGATATGGTATGGCAACTTTAGGAGAAACTGGTTGTGTACCAACTTCTCTAGCTATGATTTTGTCTTCTTTGAAAGGAGAAACTGTTTTACCAACGCAAATTGCAGATTACCTTTACCATAAGACAGTTGAATTTAATCGTGGTGTTCAAGGAACAACTTCTAGAGGAATTTTAAAAGCAGCCAAAGAATGGGGTGTAACTGCAACTGCATTAGGAACTCAAGCTAACCTTGTACAAGCGTTGAAGGATGGTTATCATGTCCTAGCGGCAGTACAAAATAATGTTTTTGTTCTTCATGGAAGTCATGAAATCGTTCTCAAAGGATATAATAACGGACTGACACATGTCTCTGACCCTTACACACCGTCCTTGTCTGGTTGGTATCCAATTTCACAACTTTGGAAAGAACAGAGCTATTATAGTGAGGATAGAATTGATATTGGAGCACCTTTTGTCAAGGTAACAGATGCC

SEQ ID NO: 6904 - protein, 854 aa, Streptococcus agalactiae
MRPIVRKKMYKKGKFWVVAGIVTILGGSAILGQDVKAEQAEAVTSTISEKTDSSQTISDTSKLTLPVNSSEAMKNSAEPLIKTGFATSVSSNPREIAATPVKTFDASSKVVVKASTAEHSANQTNSNVNQVANDSEVITQQNSTKQLPTVTYSAHVQDIGWQKSVDNATVSGTVGQEKQVEAIKLSIKAPEGITGKLSYKTYVKGQGWQPSVESGQVSGTVGQSRPIEALSINLTDNLQKLYDVYYRVHVQDIGWMAWAKNGAYAGTLGMSKRLEAYEVKFTLKGQSVLTPTIPKEERPVLNYQVKVGQNGWQSNKLEGQMAGTLGESKALDGVKFTLSTLKYGDILYRTHVQDKGWGEILGSQTSKDYQGKRLEAIQLDLSGNLKQNYDIYYRAHVQDKGWMAWQKNNSVAGTVGESKRLEALEVKLVAKASDFSSKTDHSFLEMKHPGLSYQTYLQKDGWKPTVLEGQLGGSIGLSKSIKAIKLNLGSTALGNIEYRTFLNSSGWQTVVNSGRESNVPNESQQVEAIQMRLTGLLSKTYSVMYRVHMQDYGWQDWTYNNNIAGSTNQGKRIEAIEIKLVETAKIPVTVQTTYKGTGNYNVRVTNVISPGNLKIAIWSDKNNQDDLKWYTVTPKNHEATLTFNVTNHRDNGKYFIHVYQENASNQKQLLVKTSLQVAHSNYNTPYFSQRDGRWASRRYGMATLGETGCVPTSLAMILSSLKGETVLPTQIADYLYHKTVEFNRGVQGTTSRGILKAAKEWGVTATALGTQANLVQALKDGYHVLAAVQNNVFVLHGSHEIVLKGYNNGLTHVSDPYTPSLSGWYPISQLWKEQSYYSEDRIDIGAPFVKVTDA

SEQ ID NO: 6905 - protein, 2196 aa, Streptococcus agalactiae
ATGATATCTGCTAAGTATAGTTGGGTCCTCAATAACCAAAAGCCAGACGCTGGCTTTTTTGAGGCTTCAAAAAAAGAAAAGATAAGTGAAGCGGTGGCTTCCTTAATTTATTCGCGAGGTATTAAGACATCAGCGGAATTACATCATTTTTTACAAACTAATTTGGAAAATCTCCATGATCCTTATTTGTTAAATGATATGGATAAAGCTGTTAATCGTATTAGACGAGCTATTGAAAATAATGAAACTATTTTAGTTTATGGAGACTATGATGCTGATGGAATGACATCAGCATCAATCATGAAAGAAGCTTTAAATATGATGGGAGCTGAAGTCCAGGTTTATCTCCCAAATCGCTTTACAGATGGTTATGGTCCCAATGAAAGTGTTTATAAATATTTTATTGAACAACAAGATGTTTCATTAATCATTACGGTTGATAATGGTGTGGCAGGGCATGAAGCAATTGCATATGCTCAAAATCAAGGTGTGGACGTGGTAGTTACTGATCATCACAGTATGCCAGCAGATTTACCTTGTGCTTATGCTATTATTCACCCAGAACATCCTGATGCTAATTATCCATTTCCTTATTTAGCAGGGTGTGGTGTTGCTTTTAAAGTAGCTTGTGCTCTCTTAGAAACAATCCCGACAGAAATGTTGGATTTGGTTGCTATTGGGACGATTGCAGATATGGTTAGCCTAACTGATGAAAATCGTATCATGGTAAAAGCTGGACTTGAAGTTATGAAAGATAGTGAAAGAATAGGCTTACAGGAGCTAATATCTCTATCAAATATTGATTTAAAAACACTAAATGAAGAAACTATTGGATTTAAAATTGCTCCACAATTAAACGCTTTAGGAAGACTTGATGACCCTAATCCAGCTATTGAATTACTGACAGGGTTTGATGATGAAGAATCTCAAGCAATAGCCCAAATGATTGATCAAAAAAATGAAGAGCGAAAAGAAATCGTTCAAACTATCTTTGACCAAGCTATGCAAATGCTTGATCAAACAAAGCCTGTACAAGTTTTAGCAAAAGAAAATTGGCATCCAGGGGTTTTAGGTATTGTGGCGGGTCGTATTTTAGAGAGAACTGGACAACCTGTTATTGTTTTGAATATTGAAGATGGTATTGCTAAAGGAAGTGCCAGAAGTGTAGAAGCACTTGATATTTTTCAAGCTTTTGACCAGCATCGAGAATTATTCATTGCTTTTGGAGGTCACAGCGGAGCAGCAGGCATGACTTTAGAGGAAAGTAAGGTGGGTGATCTTTCTCAAGTTTTATGTGACTATATCTCTAAAAAACAATTGGACATGAGTCAGAAAAAAACTCTGACAATTGATAGTGAGCTACGTTTTGACGAACTTAGTTTAGACACTGTTAGAGATTTTGAAAAGTTAGCGCCATTTGGAATGGATAATAAAAAGCCAGTCTTTTTGTTAAAAGATTTTAAAGTGAGTCAAGCTAGAGTCATGGGGCAAAACGGTGCTCATCTGAAATTAAAACTAGAACAAGATGGACAAGCACTTGATTTGGTAGCATTTAATATGGGGAGTCAACTACAAGAGTTCCAACAAGCACAACATTTGGAGTTAGCTGTCACTTTATCTGTTAATCAATGGAATGGTGCCACAACCCTACAATTAATGTTGGAGGATGCGCGTGTAGACGGTATTCAATTATTTGATATTAGAAGCAAAGCAAGTAGCTTACCTCATGGAGTGCCAATCCTGTCTCAAGAAGAGCAGAGCAAAGAAGTTATTCTTTTGACTGTTCCCGATCATCCACAAGAATTAAAACAAATGACTCAAGGTAAACAGTTTGATGCCATCTATTTTAAAAATGAGATACCAAAAAATTATTTTATATCTGGTTATGGTACACGTGATCAGTTTGCTGGTTTATATAAAACAATATATCAATTCCCAGAATTTGACGTTCGTTATAAGTTAAAAGAGCTCAGTTCCTACCTTCATATCCCTGATATTTTATTAATTAAAATGATTCAAATTTTTGAAGAACTACATTTTGTTACGATTACAGAGGGGATTATGACAGTCAATAAAGAAGCAGAAAAGCGAGATATCTCTGAGAGTCAAATTTATCAAGAATTAAAAGAGACAGTTAAGTTTCAAGAATTAATGACTTTAGGGACACCTAAAGAAATATATGATTTTATGATGAGT

SEQ ID NO: 6906 - protein, 732 aa, Streptococcus agalactiae
MISAKYSWVLNNQKPDAGFFEASKKEKISEAVASLIYSRGIKTSAELHHFLQTNLENLHDPYLLNDMDKAVNRIRRAIENNETILVYGDYDADGMTSASIMKEALNMMGAEVQVYLPNRFTDGYGPNESVYKYFIEQQDVSLIITVDNGVAGHEAIAYAQNQGVDVVVTDHHSMPADLPCAYAIIHPEHPDANYPFPYLAGCGVAFKVACALLETIPTEMLDLVAIGTIADMVSLTDENRIMVKAGLEVMKDSERIGLQELISLSNIDLKTLNEETIGFKIAPQLNALGRLDDPNPAIELLTGFDDEESQAIAQMIDQKNEERKEIVQTIFDQAMQMLDQTKPVQVLAKENWHPGVLGIVAGRILERTGQPVIVLNIEDGIAKGSARSVEALDIFQAFDQHRELFIAFGGHSGAAGMTLEESKVGDLSQVLCDYISKKQLDMSQKKTLTIDSELRFDELSLDTVRDFEKLAPFGMDNKKPVFLLKDFKVSQARVMGQNGAHLKLKLEQDGQALDLVAFNMGSQLQEFQQAQHLELAVTLSVNQWNGATTLQLMLEDARVDGIQLFDIRSKASSLPHGVPILSQEEQSKEVILLTVPDHPQELKQMTQGKQFDAIYFKNEIPKNYFISGYGTRDQFAGLYKTIYQFPEFDVRYKLKELSSYLHIPDILLIKMIQIFEELHFVTITEGIMTVNKEAEKRDISESQIYQELKETVKFQELMTLGTPKEIYDFMMS

SEQ ID NO: 6907 - protein, 759 aa, Streptococcus agalactiae
ATGGCAAGAACGATACTGATTACAGGTGCTTCTGGTGGTTTAGCACAGGCAATTATTAACCAATTACCTCAAGACGACCATTTAATTGTCACAGGGAGATCAAGAGAAAAACTTGAAAAGCTTTATGGAAAGAGACCAAATACCTTATGTTTATCACTAGACATAACTAATGACAATGCTGTAACGAATACGATTGAAAAAATTTATGGTGAATTTGGTCAAATTGATATTTTAATTAATAATGCTGGATTTGGTTCTTTTAAAGAATTTTGGGATTATAGTGGTGAAGAAGTCAAAGACATGTTTGCTGTGAATACATTTGCAACGATGTCTATAGCTCGTCAGATAGGACATAAGATGTCTCTTGTAAAATCTGGTCATATCGTTAATATTGCAAGCATGGCTGGCCTCATAGCAACAAGTAAAGCTAGCGTTTATGGGGCTAGTAAGTTTGCTGTCGTTGGATTTTCGAATGCTCTTCGTTTAGAATTAGCAGAAAAAAATGTTTATGTGACAAGTGTAAACCCTGGACCAATCAAAACAGGATTTTTTGCTCAGGCTGATCCAAGTGGCGATTATTTAGCAAGTATAGGTCGTTTTGCTCTAACACCAGAAAAAGTAGCTAAAAAACTAGTTTCTATTCTTGGAAAAAATAAGAGAGAATTAAATCTTCCTTTTATATTAGCTTTTGCGCATAAATGTTATAGTTTATTTCCAAAAACAGCTGATTATTTTGCTAGAAAGGTATTCAATTATAAA

SEQ ID NO: 6908 - protein, 253 aa, Streptococcus agalactiae
MARTILITGASGGLAQAIINQLPQDDHLIVTGRSREKLEKLYGKRPNTLCLSLDITNDNAVTNTIEKIYGEFGQIDILINNAGFGSFKEFWDYSGEEVKDMFAVNTFATMSIARQIGHKMSLVKSGHIVNIASMAGLIATSKASVYGASKFAVVGFSNALRLELAEKNVYVTSVNPGPIKTGFFAQADPSGDYLASIGRFALTPEKVAKKLVSILGKNKRELNLPFILAFAHKCYSLFPKTADYFARKVFNYK

SEQ ID NO: 6909 - protein, 927 aa, Streptococcus agalactiae
ATGGAAATTCAATTTTTAGGAACTGGAGCTGGTCAACCAGCGAAAGCTCGTAATGTTTCAAGTTTAGTCTTGAAATTATTAGATGAAATTAACGAGGTTTGGATGTTTGATTGTGGAGAGGGTACACAGCGTCAAATTTTAGAAACTACGATTAAACCTCGTAAAGTTAAAAAAATTTTTATCACGCACATGCACGGAGACCATGTTTTTGGTCTTCCAGGTTTTTTATCCAGTCGGGCTTTTCAAGCCAATGAAGAGCAGACAGATTTAGATATTTATGGACCGGTTGGTATAAAAAGTTTTGTTATGACTGCCTTAAGGACATCAGGTTCACGTTTACCTTATCGAATCCATTTTCACGAGTTTGATGAATCATCACTCGGAAAAATTATGGAAACAGATAAATTTACCGTTTATGCAGAAAAGCTAGATCATACTATCTTTTGTATGGGATATCGTGTTGTGCAAAAAGATCTTGAGGGCACTTTAGATGCTGAAGCATTGAAACTAGCAGGTGTTCCATTTGGTCCTCTTTTTGGGAAAGTCAAAAATGGTGAGAATGTTACCTTAGAAGATGGTAGAGAAATTATTGCTAAAGATTATATTTCTGAACCGAAAAAGGGTAAAGTAATCACTATTTTGGGAGATACTAGAAAAACAGATGCAAGTATTAGGTTAGCTTTGGGCGCTGATGTTTTAGTTCACGAATCTACTTATGGTAAGGGTGATGAGCGAATTGCTAAATCGCATGGGCATTCAACCAATATGCAAGCAGCTGATATCGCTAAACAAGCAAATGCTAAACGACTATTATTAAATCATGTTAGTGCTCGTTTTATGGGGCGAGATTGTTGGCAAATGGAAGAAGATGCAAAGACGATTTTTTCAAATACCCATCTTGTTAGAGATTTGGAAGAAGTAGGTATA

SEQ ID NO: 6910 - protein, 309 aa, Streptococcus agalactiae
MEIQFLGTGAGQPAKARNVSSLVLKLLDEINEVWMFDCGEGTQRQILETTIKPRKVKKIFITHMHGDHVFGLPGFLSSRAFQANEEQTDLDIYGPVGIKSFVMTALRTSGSRLPYRIHFHEFDESSLGKIMETDKFTVYAEKLDHTIFCMGYRVVQKDLEGTLDAEALKLAGVPFGPLFGKVKNGENVTLEDGREIIAKDYISEPKKGKVITILGDTRKTDASIRLALGADVLVHESTYGKGDERIAKSHGHSTNMQAADIAKQANAKRLLLNHVSARFMGRDCWQMEEDAKTIFSNTHLVRDLEEVGI

SEQ ID NO: 6911 - protein, 645 aa, Streptococcus agalactiae
ATGATTGATTATATTGATTTAGCTTTGACTTATGGTGGTTTTACGAGCTTAGATAAAGTTTATCTAGAGAAAAAACTAGATGGCCTCTCTAAGCAACAACGACTTGATTTTATCACCCCACCTCCTAGTGTGATTAATGCTTATTTTGCTGAAATATATCAAAAGCAAGGGCCAGAAGCTGCAACTGATTACTATTTTGATCTTTCCAAAGCCTTGGGCTTGTTTCCAAAACATTTATCGTTTGATGAAGAAAAACCTTTTATTCGTTTGAATTTATCAGGAAAATCATTTGGTTTTGCTTACCTAAATGATCAAGAAGAAGCGAGTGTTTTTTCTGAAGTTAAAGAAGTCATTACACCGCAGTTACTCTTAGAAATTGCACAGATTTTTCCTCAATATAAAGTCTATCGAGATCGGTCTGGTATCAGAATGGCAAAAATAGATTTTGACGAAACAGAATCTCAAAATATTACACCAGAAACAAGTTTACTAGGGAATGTCTTACAACTTAAAAAAGATATTATTAAAATAACTAGTTTCAATCAAGAAGAGCTATTAGAGTTGGTTAAAACAAAGTCAGGTAAATACTATTATTCTAGTCAAGGACGTGAGTCAGTTATTTATATTGATACTAAATCTACTAAT

SEQ ID NO: 6912 - protein, 215 aa, Streptococcus agalactiae
MIDYIDLALTYGGFTSLDKVYLEKKLDGLSKQQRLDFITPPPSVINAYFAEIYQKQGPEAATDYYFDLSKALGLFPKHLSFDEEKPFIRLNLSGKSFGFAYLNDQEEASVFSEVKEVITPQLLLEIAQIFPQYKVYRDRSGIRMAKIDFDETESQNITPETSLLGNVLQLKKDIIKITSFNQEELLELVKTKSGKYYYSSQGRESVIYIDTKSTN

SEQ ID NO: 6913 - protein, 1236 aa, Streptococcus agalactiae
GTGATAGAAACTAAAGAAGAGCAAGAACGTGTTATTTTAGTTGGGGTAGAACTTCAAGATACTGAGAATTTTGAAATGTCCATGGAAGAACTTGCTAGCTTAGCTAAGACAGCAGGAGCAAATGTTGTTAATCATTATTATCAAAAAAGAGATAAATATGATAGTAAATCATTTATCGGATCTGGTAAATTAGAGGAGATAAAAGCTATTGTAGAAGCAGATGAGATTGATACCGTTGTGGTTAATAATCGTTTGACTCCGCGACAAAACTCTAATTTGGAAGCTGAACTTGGTGTTAAAGTTATTGACCGTATGCAACTTATTTTAGATATCTTTGCTATGCGTGCTAGAAGTCATGAAGGAAAATTACAGGTTCATCTAGCGCAATTGAAATATATGTTACCACGCTTAGTTGGACAAGGTATTATGCTTAGTCGTCAAGCAGGAGGAATCGGAAGCCGAGGTCCAGGAGAATCTCAGTTAGAGTTGAATCGTCGTTCCATTCGTCATCAAATTTCTGATATCGAAAGACAATTGAAGATTGTAGAAAAAAATCGCGAGACAGTTCGAGAAAGACGTGTTGATTCGACAACCTTTAAAATTGGATTAATTGGATATACAAATGCTGGCAAGTCAACTATTATGAATGTTTTAACCGATGATAAGCAATATGAAGCCAATGAATTATTTGCAACGTTAGACGCTACAACCAAGCAGATCTATTTACAAAATCAATTTCAAGTCACTTTAACAGATACTGTTGGTTTTATTCAAGATTTACCTACAGAGTTAGTTGCGGCTTTCAAGTCTACCTTAGAAGAAAGTCGACATGTCGATTTATTACTTCATGTTATTGATGCTAGTGACCCTAATCATGAAGAACACGAAAAAGTTGTTATGGAGATTCTTAAAGACTTAGATATGATAGATATTCCTCGTTTAGCGATATACAACAAGATGGATGTCACTGAGCAGCTGAATGCAACAACTTTTCCTAATGTGAGAATTGCAGCCAAAAAACAAGGGAGTAAGGATTTATTACGCCGTCTTATTGTGGATGAAATACGACATATCTTTGACGAATTTTCGATTAGAGTGCATCAAAATCAAGCATATAAGCTCTATGATCTCAATAAAATAGCATTGCTTGATACCTACACCTTTGAAGAAGAATACGAGAATATTACAGGCTATATTTCTCCTAAACAAAAATGGAAGCTGGAAGAATTTTATGAT

SEQ ID NO: 6914 - protein, 412 aa, Streptococcus agalactiae
MIETKEEQERVILVGVELQDTENFEMSMEELASLAKTAGANVVNHYYQKRDKYDSKSFIGSGKLEEIKAIVEADEIDTVVVNNRLTPRQNSNLEAELGVKVIDRMQLILDIFAMRARSHEGKLQVHLAQLKYMLPRLVGQGIMLSRQAGGIGSRGPGESQLELNRRSIRHQISDIERQLKIVEKNRETVRERRVDSTTFKIGLIGYTNAGKSTIMNVLTDDKQYEANELFATLDATTKQIYLQNQFQVTLTDTVGFIQDLPTELVAAFKSTLEESRHVDLLLHVIDASDPNHEEHEKVVMEILKDLDMIDIPRLAIYNKMDVTEQLNATTFPNVRIAAKKQGSKDLLRRLIVDEIRHIFDEFSIRVHQNQAYKLYDLNKIALLDTYTFEEEYENITGYISPKQKWKLEEFYD

SEQ ID NO: 6915 - protein, 888 aa, Streptococcus agalactiae
ATGAGAAAAATCAAGCTTATAGCAGTTGTTGGTCCAACTGCGGTTGGGAAGACAGCATTAGGAATTGAATTAGCTAAAACTTTCAATGGCGAAATCATTAGTGGTGATAGTCAGCAAGTTTATCAGAAGTTAGATATCGGAACGGCTAAAGCTAGTAAAGAAGAGCAAGAACAAGCTTATCATCACTTGATTGATGTTCGTGAAGTAAATGAGAACTATTCGGTTTATGATTTCGTCAAAGAGGCAAAAGTAGCTATTGATACGATTATTTCTAAGGGGAAAATTCCTATTATTGTTGGAGGTACTGGCCTATATTTACAGAGTTTGTTTGAGGGCTATCATTTAGGAGGCGAAGTCAATCAAGAAACTCTTATGGCCTATCGTGAAAAATTAGAGTCTCTAAGTGATGAAGATTTATTTGAAAAGTTGACAGAACAATCCATTATTATACCACAAGTTAATCGTCGACGTGCCATTCGTGCATTAGAATTGGCGAAGTTTGGGAATAATTTGCAAAATAGTGAAAGTCCGTATGATGTTTTATTAATTGGATTGAATGATGATCGTCAGGTGCTTTATGATCGTATCAATAGACGAGTTGATTTGATGATGGACAATGGTCTCTTAGATGAAGCTAAATGGCTATACGATAACTACCCGAGTGTTCAAGCAAGTAAAGGAATTGGCTATAAAGAATTATTTCCTTACTTTTCAAAGCAAATACCATTAGAAGAAGCTGTTGATAAACTAAAACAAAATACCAGACGTTTTGCAAAACGCCAATTAACATGGTTTAGAAACCGTATGAATGTCGAATTTATTATGGTTGGTGAGGAAAATTATCAACAAAAAATCAAGCGAAAAGTCAGTGATTTTTTATCATCAAAG

SEQ ID NO: 6916 - protein, 296 aa, Streptococcus agalactiae
MRKIKLIAVVGPTAVGKTALGIELAKTFNGEIISGDSQQVYQKLDIGTAKASKEEQEQAYHHLIDVREVNENYSVYDFVKEAKVAIDTIISKGKIPIIVGGTGLYLQSLFEGYHLGGEVNQETLMAYREKLESLSDEDLFEKLTEQSIIIPQVNRRRAIRALELAKFGNNLQNSESPYDVLLIGLNDDRQVLYDRINRRVDLMMDNGLLDEAKWLYDNYPSVQASKGIGYKELFPYFSKQIPLEEAVDKLKQNTRRFAKRQLTWFRNRMNVEFIMVGEENYQQKIKRKVSDFLSSK

SEQ ID NO: 6917 - protein, 174 aa, Streptococcus agalactiae
ATGGTTAAAAAATTCGCATTTGCTAAAGGAATAGCAACAGGAGTCGTTGCAACAGCTGCTACTCTTGCAGGTGCTGCATTTGCTATCAAAAAAACAATTATTGAACCTGAGGAAGAAAAAATAGCTTTTATCGAAGAAAATCGTAAAAAAGCTGCACGTAAACGTGTCTCTCAT

SEQ ID NO: 6918 - protein, 58 aa, Streptococcus agalactiae; identical to SEQ ID NO: 2270

SEQ ID NO: 6919 - protein, 906 aa, Streptococcus agalactiae
TTGGGAAAAACCACCATTAGTGATGGCGGGATTAGTATTAGGGCTATTAGCTTTGGGGAACCTTCTAGAGGGATATGGCACCTATGTTCGCTATTGTTTAGGGCTAGTAGCACTTGTTTTTTGGATTTTTTAATCAAAGGAATATTAAAAAATAAAAAAGAAAGCAGGAAGGAGTTAAGCAATCCTTTGATTGCTTCTGTCTTTACTACTTTTTTTATGGCAGGTATGATTTTATCAACCTATATCTTATTATTTAGAAGTTTAGGAATATGGGTAGCCGTTCTGTCAAAAGGTGTATGGTGGTTGTCATTTATTGCGTTAATCATTCATATGGCTATTTTTTCATGGAAATATTTGAGACACTTTTCGATGGCTAATCTTTTTCCTTCTTGGTCTGTCCTCTATGTTGGTATAGGGGTAGCTAGCCTGACAGCACCAATTAGTGGACAATTCACTATTGGGAAAATAGTCTTTTGGTATGGTTTTATTGCAACTTTAGTATTATTACCATTTCTATTCATTAAAGCATATAAAATCGGGCTACCTTCGGCAGTTAAGCCTAATATAACTACTATTTGCGCTCCAATGTCGCTAATCACAGCGGGATATGTCAATAGTTTTGTGTCACCAAATAGAGGTTTATTACTGCTATTAATCGTAATGGCACAATTTCTTTATTTTTTCATTCTTTTTCAGGTGCCTAAATTACTGATTGGTGATTTTACACCAGGTTTCTCAGCCTTTACTTTCCCCCTTGTTATCTCAGCTACCTCACTTAAATTAAGTATTCAGCATCTATCATTACCAGTTGATATACAGGGGCTAGTCCACTTTGAAATTGGGACAACAACTCTTATTGTTATGATAGTAATGGTACGTTATATTTTCTTTTTAAGGCGAACAATT

SEQ ID NO: 6920 - protein, 302 aa, Streptococcus agalactiae
MGKTTISDGGISIRAISFGEPSRGIWHLCSLLFRASSTCFLDFLIKGILKNKKESRKELSNPLIASVFTTFFMAGMILSTYILLFRSLGIWVAVLSKGVWWLSFIALIIHMAIFSWKYLRHFSMANLFPSWSVLYVGIGVASLTAPISGQFTIGKIVFWYGFIATLVLLPFLFIKAYKIGLPSAVKPNITTICAPMSLITAGYVNSFVSPNRGLLLLLIVMAQFLYFFILFQVPKLLIGDFTPGFSAFTFPLVISATSLKLSIQHLSLPVDIQGLVHFEIGTTTLIVMIVMVRYIFFLRRTI

SEQ ID NO: 6921 - protein, 180 aa, Streptococcus agalactiae
TTGTGTTATAATAGATGTAAACGTTTTTTTATGAGGTATATGATGAAAAATTGGGAAAAACCACCATTAGTGATGGCGGGATTAGTATTAGGGCTATTAGCTTTGGGGAACCTTCTAGAGGGATATGGCACCTATGTTCGCTATTGTTTAGGGCTAGTAGCACTTGTTTTTTGGATTTTT

SEQ ID NO: 6922 - protein, 60 aa, Streptococcus agalactiae
MCYNRCKRFFMRYMMKNWEKPPLVMAGLVLGLLALGNLLEGYGTYVRYCLGLVALVFWIF

SEQ ID NO: 6923 - protein, 3756 aa, Streptococcus agalactiae
ATGAAAAGAAAAGACTTATTTGGTGATAAACAAACTCAATACACGATTAGAAAGTTAAGTGTTGGAGTAGCTTCAGTTACAACAGGGGTATGTATTTTTCTTCATAGTCCACAGGTATTTGCTGAAGAAGTAAGTGTTTCTCCTGCAACTACAGCGATTGCAGAGTCGAATATTAATCAGGTTGACAACCAACAATCTACTAATTTAAAAGATGACATAAACTCAAACTCTGAGACGGTTGTGACACCCTCAGATATGCCGGATACCAAGCAATTAGTATCAGATGAAACTGACACTCAAAAGGGAGTGACAGAGCCGGATAAGGCGACAAGCCTGCTTGAAGAAAATAAAGGTCCTGTTTCAGATAAAAATACCTTAGATTTAAAAGTAGCACCATCTACATTGCAAAATACTCCCGACAAAACTTCTCAAGCTATAGGTGCTCCAAGCCCTACCTTGAAAGTAGCTAATCAAGCTCCACGGATTGAAAATGGTTACTTTAGGCTACATCTTAAAGAATTGCCTCAAGGTCATCCTGTAGAAAGCACTGGACTTTGGATATGGGGAGATGTTGATCAACCGTCTAGTAATTGGCCAAATGGTGCTATCCCTATGACTGATGCTAAGAAAGATGATTACGGTTATTATGTTGATTTTAAATTATCTGAAAAACAACGAAAACAAATATCTTTTTTAATTAATAACAAAGCAGGGACAAATTTAAGCGGCGATCATCATATTCCATTATTACGACCTGAGATGAACCAAGTTTGGATTGATGAAAAGTACGGTATACATACTTATCAACCCCTCAAAGAAGGGTATGTCCGTATTAACTATTTGAGTTCCTCTAGTAACTATGACCACTTATCAGCATGGCTCTTTAAAGATGTTGCAACCCCCTCAACAACTTGGCCAGATGGTAGTAATTTTGTGAATCAAGGACTATATGGAAGGTATATTGATGTATCACTAAAAACTAACGCCAAAGAGATTGGTTTTCTAATCTTAGATGAAAGTAAGACAGGAGATGCAGTGAAAGTTCAACCCAACGACTATGTTTTTAGAGATTTAGCTAACCATAACCAAATTTTTGTAAAAGATAAGGATCCAAAGGTTTATAATAATCCTTATTACATTGATCAAGTGCAGCTAAAGGATGCCCAACAAATTGATTTAACAAGTATTCAAGCAAGTTTTACAACTCTAGATGGGGTAGATAAAACTGAAATTTTAAAAGAATTGAAAGTGACTGATAAAAATCAAAATGCTATACAAATTTCTGATATCACTCTCGATACTAGTAAATCTCTTTTAATAATCAAAGGCGACTTTAATCCTAAACAAGGTCATTTCAACATATCTTATAATGGTAACAATGTCATGACAAGGCAATCTTGGGAATTTAAAGACCAACTTTATGCTTATAGTGGAAATTTAGGTGCAGTTCTCAATCAAGATGGTTCAAAAGTTGAAGCCAGCCTCTGGTCACCGAGTGCTGATAGTGTCACTATGATTATTTATGACAAAGATAACCAAAACAGGGTTGTAGCGACTACCCCCCTTGTGAAAAATAATAAAGGTGTTTGGCAGACGATACTTGATACTAAATTAGGTATTAAAAACTATACTGGTTACTATTATCTTTACGAAATAAAAAGAGGTAAGGATAAGGTTAAGATTTTAGATCCTTATGCAAAGTCATTAGCAGAGTGGGATAGTAATACTGTTAATGATGATATTAAAACGGCTAAAGCAGCTTTTGTAAATCCAAGTCAACTTGGACCTCAAAATTTAAGTTTTGCTAAAATTGCTAATTTTAAAGGAAGACAAGATGCTGTTATATACGAAGCACATGTAAGAGACTTCACTTCTGATCGATCTTTGGATGGAAAATTAAAAAATCAATTTGGTACCTTTGCAGCCTTTTCAGAGAAACTAGATTATTTACAGAAATTAGGAGTTACACACATTCAGCTTTTACCGGTATTGAGTTATTTTTATGTTAATGAAATGGATAAGTCACGCTCAACAGCTTACACTTCCTCAGACAATAATTACAATTGGGGCTATGACCCACAGAGCTATTTTGCTCTTTCTGGGATGTATTCAGAGAAACCAAAAGATCCATCAGCACGTATCGCCGAATTAAAACAATTAATACATGATATTCATAAACGTGGCATGGGGGTTATACTTGATGTCGTCTATAATCACACTGCAAAAACTTATCTCTTTGAGGATATAGAACCTAATTATTATCACTTTATGAATGAAGATGGTTCACCAAGAGAAAGTTTTGGAGGGGGACGTTTAGGAACCACTCATGCAATGAGTCGTCGTGTTTTGGTTGATTCCATTAAATATCTTACAAGTGAATTTAAAGTTGATGGTTTCCGTTTTGATATGATGGGAGATCATGATGCGGCTGCGATTGAATTAGCTTATAAAGAAGCTAAAGCTATTAATCCTAATATGATTATGATTGGTGAGGGCTGGAGAACATTCCAAGGCGATCAAGGTCAGCCGGTTAAACCAGCTGACCAAGATTGGATGAAGTCAACCGATACAGTTGGCGTCTTTTCAGATGATATTCGTAATAGCTTGAAATCTGGTTTTCCAAATGAAGGTACTCCAGCTTTCATCACAGGTGGCCCACAATCTTTACAAGGTATTTTTAAAAATATCAAAGCACAACCTGGGAATTTTGAAGCAGATTCGCCAGGAGATGTGGTGCAGTATATTGCTGCACATGATAACCTTACCTTGCATGATGTGATTGCAAAATCAATTAATAAAGACCCTAAGGTAGCTGAAGAAGAGATTCATAGACGTCTGCGTTTAGGAAATGTAATGATTTTAACATCTCAAGGGACAGCATTCATTCATTCTGGTCAAGAGTATGGTCGTACGAAGCGTTTACTTAACCCTGATTACATGACAAAAGTTTCAGATGACAAATTGCCTAATAAAGCAACACTTATTGAAGCTGTTAAAGAATATCCATATTTTATTCATGATTCATATGATTCTTCAGATGCCATTAATCATTTTGATTGGGCAGCAGCCACAGATAATAACAAACACCCAATTTCAACGAAAACACAGGCCTATACAGCAGGTTTAATCACATTAAGGCGTTCAACAGATGCTTTCCGGAAATTGAGCAAAGCAGAAATTGATCGTGAGGTTAGCTTGATTACAGAGGTAGGTCAAGGTGATATTAAAGAAAAAGATTTGGTTATTGCTTACCAAACAATAGATTCTAAAGGTGATATTTACGCAGTATTTGTTAATGCTGATAGTAAAGCTAGAAACGTTTTACTAGGTGAAAAATATAAACACCTTTTAAAAGGGCAAGTAATTGTTGATGCTGATCAAGCGGGGATTAAACCAATCTCAACTCCTAGAGGTGTTCATTTTGAAAAAGATAGTTTGCTGATTGATCCATTAACAGCAATTGTGATTAAAGTTGGCAAAGTTGCTCCTAGCCCTAAGGAGGAATTGCAAGCAGATTATCCCAAAACACAATCTTTCAAGGAATCTAAAACGGTAGAAAAAGTAAATAGAATAGCTAATAAGACCTCAATAACTCCTGTAGTTTCTAAGAAGGCCGATTCATATCTGACAAATGAAGCTAATTTGCCAAAAACTGGAGATAAGTCATCAAAAATACTAAGTGTAGTAGGAATAAGCATTCTAGCAAGTCTACTTGCTCTAGTAGGTCTCTCTTTAAAGAGGAATCGTCACTTAAAA

SEQ ID NO: 6924 - protein, 1252 aa, Streptococcus agalactiae
MKRKDLFGDKQTQYTIRKLSVGVASVTTGVCIFLHSPQVFAEEVSVSPATTAIAESNINQVDNQQSTNLKDDINSNSETVVTPSDMPDTKQLVSDETDTQKGVTEPDKATSLLEENKGPVSDKNTLDLKVAPSTLQNTPDKTSQAIGAPSPTLKVANQAPRIENGYFRLHLKELPQGHPVESTGLWIWGDVDQPSSNWPNGAIPMTDAKKDDYGYYVDFKLSEKQRKQISFLINNKAGTNLSGDHHIPLLRPEMNQVWIDEKYGIHTYQPLKEGYVRINYLSSSSNYDHLSAWLFKDVATPSTTWPDGSNFVNQGLYGRYIDVSLKTNAKEIGFLILDESKTGDAVKVQPNDYVFRDLANHNQIFVKDKDPKVYNNPYYIDQVQLKDAQQIDLTSIQASFTTLDGVDKTEILKELKVTDKNQNAIQISDITLDTSKSLLIIKGDFNPKQGHFNISYNGNNVMTRQSWEFKDQLYAYSGNLGAVLNQDGSKVEASLWSPSADSVTMIIYDKDNQNRVVATTPLVKNNKGVWQTILDTKLGIKNYTGYYYLYEIKRGKDKVKILDPYAKSLAEWDSNTVNDDIKTAKAAFVNPSQLGPQNLSFAKIANFKGRQDAVIYEAHVRDFTSDRSLDGKLKNQFGTFAAFSEKLDYLQKLGVTHIQLLPVLSYFYVNEMDKSRSTAYTSSDNNYNWGYDPQSYFALSGMYSEKPKDPSARIAELKQLIHDIHKRGMGVILDVVYNHTAKTYLFEDIEPNYYHFMNEDGSPRESFGGGRLGTTHAMSRRVLVDSIKYLTSEFKVDGFRFDMMGDHDAAAIELAYKEAKAINPNMIMIGEGWRTFQGDQGQPVKPADQDWMKSTDTVGVFSDDIRNSLKSGFPNEGTPAFITGGPQSLQGIFKNIKAQPGNFEADSPGDVVQYIAAHDNLTLHDVIAKSINKDPKVAEEEIHRRLRLGNVMILTSQGTAFIHSGQEYGRTKRLLNPDYMTKVSDDKLPNKATLIEAVKEYPYFIHDSYDSSDAINHFDWAAATDNNKHPISTKTQAYTAGLITLRRSTDAFRKLSKAEIDREVSLITEVGQGDIKEKDLVIAYQTIDSKGDIYAVFVNADSKARNVLLGEKYKHLLKGQVIVDADQAGIKPISTPRGVHFEKDSLLIDPLTAIVIKVGKVAPSPKEELQADYPKTQSFKESKTVEKVNRIANKTSITPVVSKKADSYLTNEANLPKTGDKSSKILSVVGISILASLLALVGLSLKRNRHLK

SEQ ID NO: 6925 - protein, 732 aa, Streptococcus agalactiae
ATGAGAGATAATCATCTACACACGTATTTTTCCTATGATTGTCAAACGGCATTTGAGGACTATATTAATGGTTTTACAGGTGAATTTATCACGACAGAACATTTTGATTTATCAAATCCTTACACCGGTCAAGACGATGTTCCTGATTATAGTGCTTATTGTCAAAAAATAGATTATCTTAATCAGAAATATGGAAATCGATTTAAAAAAGGAATTGAAATCGGTTATTTTAAAGATAGGGAATCAGATATTTTAGATTATTTAAAAAATAAAGAATTTGATTTAAAACTATTGTCAATCCATCATAATGGTAGGTATGATTATCTGCAAGAAGAAGCTCTGAAAGTACCAACAAAGGAGCTTTTAGCAGATTACTTTAATCGTATGGAATTTGCCATAGGCCGTGTGGAAGCGCACGTTTTAGCTCACTTTGATTATGGTTTTCGTAAGTTAAACTTAGATGTAGAAGATTTAAAACCGTTTGAAACGCAATTGAAGCGCATTTTCATAAAGATGTTATCTAAGGGGTTAGCTTTTGAACTAAATACCAAATCCCTTTATCTATATGGGAATGAAAAACTTTATCGCTATGCTTTAGAGATACTCAAACAGCTTGGTTGTAAACAATACTCTATAGGCTCTGACGGTCATATTCCTGAACATTTTTGTTATGAATTTGATAGACTTCAAGGTCTGCTAAAGGACTATCAAATTGATGAAAATCATTTGATA

SEQ ID NO: 6926 - protein, 244 aa, Streptococcus agalactiae
MRDNHLHTYFSYDCQTAFEDYINGFTGEFITTEHFDLSNPYTGQDDVPDYSAYCQKIDYLNQKYGNRFKKGIEIGYFKDRESDILDYLKNKEFDLKLLSIHHNGRYDYLQEEALKVPTKELLADYFNRMEFAIGRVEAHVLAHFDYGFRKLNLDVEDLKPFETQLKRIFIKMLSKGLAFELNTKSLYLYGNEKLYRYALEILKQLGCKQYSIGSDGHIPEHFCYEFDRLQGLLKDYQIDENHLI

SEQ ID NO: 6927 - protein, 582 aa, Streptococcus agalactiae
ATGACTGACTTGGAAAAAATTATTAAAGCAATAAAAAGTGATTCACAGAATCAAAATTATACAGAAAATGGTATTGATCCTTTGTTTGCTGCTCCTAAAACAGCTAGGATCAATATTGTTGGCCAAGCACCTGGTTTAAAAACTCAAGAAGCAAGACTCTATTGGAAAGATAAATCTGGAGATCGTCTACGCCAGTGGCTTGGAGTTGATGAAGAGACATTTTACCATTCTGGAAAATTTGCTGTTTTACCTTTAGATTTTTATTACCCAGGCAAAGGAAAATCAGGAGATTTACCCCCTAGAAAAGGTTTTGCGGAGAAATGGCACCCTCTTATTTTAAAAGAAATGCCTAATGTTCAATTGACCTTGCTAGTTGGTCAGTATGCTCAGAAATATTATCTTGGAAGCTCCGCACATAAAAATCTAACAGAAACAGTTAAAGCTTACAAAGACTATCTACCCGATTATTTACCCCTGGTTCACCCATCACCGCGAAATCAAATTTGGCTAAAGAAGAATCCATGGTTTGAAAAAGATCTAATCGTTGATTTACAAAAGATAGTAGCAGATATTTTAAAAGAT

SEQ ID NO: 6928 - protein, 194 aa, Streptococcus agalactiae
MTDLEKIIKAIKSDSQNQNYTENGIDPLFAAPKTARINIVGQAPGLKTQEARLYWKDKSGDRLRQWLGVDEETFYHSGKFAVLPLDFYYPGKGKSGDLPPRKGFAEKWHPLILKEMPNVQLTLLVGQYAQKYYLGSSAHKNLTETVKAYKDYLPDYLPLVHPSPRNQIWLKKNPWFEKDLIVDLQKIVADILKD

SEQ ID NO: 6929 - protein, 1404 aa, Streptococcus agalactiae
ATGACAATTGATTTTAGAGCAGAAGTAGACAAACGCAAAGACGCTTTGATGGACGATTTAATAAATCTTCTTCGCATTAACTCGGAGCGTGATGATTCACAAGCTGATGCAGAGCATCCATTTGGTCCTGGACCTGTAAAAGCCTTGGAATTTTTCCTTGAGATGGCTGAGCGAGATGGCTACGAAACAAAAAACGTAGATAATTATGCGGGACACTTTACATTTGGTCAAGGCGAAGAAGAACTAGGTATTTTTGGGCATTTAGATGTTGTTCCTGCAGGCAGCGGTTGGGATACAGACCCTTATGAACCAGTTATCAAGGATAACCGTTTATATGCTCGAGGCTCATCAGACGATAAGGGACCAACAATGGCATGTTATTATGCTCTAAAAATTATTAAAGAGCTTGGGCTACCAACATCTAAGAAAGTTCGTTTTGTTGTAGGAACTGATGAAGAATCTGGATGGGGAGATATGGATTACTACTTCGAACATGTTGGTCTTCCAAAACCTGATTTTGGTTTCTCTCCAGATGCAGAATTTCCAATTATAAATGGTGAAAAAGGTAATATTACTGAATATTTACATTTTTCAGGAGAAAATAAGGGAGCTGTTAGACTGCATAGCTTTTCTGGCGGACTTCGCGAAAACATGGTTCCAGAATCAGCCACAGCACGTTTCACAAGTCATTTAGATCAGACAACACTTGGGGCTAGTCTAGCTGATTTTGCAAGTAAACATAATTTGAAAGCAGAATTATCTGTAGAAGATGAGCAATATACAGCAACAGTTTATGGTAAATCTGCTCATGGTTCAACACCACAAGAAGGTGTTAATGGGGCGACTTATTTAGCTCTTTATCTAAGTCAATTTGATTTTGAAGGTCCTGCTCGTGCTTTCTTAGATGTTACAGCCAACATTATTCACGAAGACTTCTCAGGTGAAAAACTTGGAGTAGCTTATGAAGATGACTGTATGGGACCATTGAGCATGAATGCAGGTGTCTTCCAGTTTGATGAAACTAATGATGATAATACTATCGCTCTTAATTTCCGTTACCCACAAGGGACAGATGCTAAAACTATCCAAACTAAGCTTGAGAAACTTAACGGAGTTGAAAAAGTGACTCTTTCTGACCATGAACACACACCACACTATGTACCTATGGACGATGAATTAGTATCAACCTTACTAGCTGTCTATGAAAAGCAAACTGGTCTTAAAGGACATGAACAGGTTATTGGTGGTGGGACATTTGGTCGCTTACTTGAACGGGGTGTTGCATACGGTGCCATGTTCCCAGGAGATGAAAACACTATGCATCAAGCTAATGAGTACATGCCTTTAGAAAATATTTTCCGTTCGGCTGCTATCTACGCAGAAGCTATCTATGAATTAATCAAA

SEQ ID NO: 6930 - protein, 468 aa, Streptococcus agalactiae
MTIDFRAEVDKRKDALMDDLINLLRINSERDDSQADAEHPFGPGPVKALEFFLEMAERDGYETKNVDNYAGHFTFGQGEEELGIFGHLDVVPAGSGWDTDPYEPVIKDNRLYARGSSDDKGPTMACYYALKIIKELGLPTSKKVRFVVGTDEESGWGDMDYYFEHVGLPKPDFGFSPDAEFPIINGEKGNITEYLHFSGENKGAVRLHSFSGGLRENMVPESATARFTSHLDQTTLGASLADFASKHNLKAELSVEDEQYTATVYGKSAHGSTPQEGVNGATYLALYLSQFDFEGPARAFLDVTANIIHEDFSGEKLGVAYEDDCMGPLSMNAGVFQFDETNDDNTIALNFRYPQGTDAKTIQTKLEKLNGVEKVTLSDHEHTPHYVPMDDELVSTLLAVYEKQTGLKGHEQVIGGGTFGRLLERGVAYGAMFPGDENTMHQANEYMPLENIFRSAAIYAEAIYELIK

SEQ ID NO: 6931 - protein, 600 aa, Streptococcus agalactiae
ATGAAATTTCTAGAATTAAATAAGAAGCGCCATGCTGTGAAACATTTTAATGATAAACCAGTCGACTTTAAAGATGTTAGAACTGCTATTGAAATTGCGACATTAGCGCCATCTGCTAATAATATTCAGCCTTGGAAGTTTGTCGTTGTCCAAGAAAAAAAATCTGCTCTAGCAGAAGGTTTACCGGAAAGTAATTGTAACCAAATTAATCAAGCGCAGTATGTTATTGCTTTATTTACAGATACAGATTTAGGACAGAGATCACGGAAAATAGCTCGTATTGGTCGTAGATCTCTTCCTGATGATTTAATTGGTTATTACATGGAAACTCTACCACCACGCTATGCTTTATATAGTGAAAAACAAACTGGAGAGTATCTCTCTTTAAATGCAGGTATCGTTGCTATGAATTTAGTACTTGCCTTGACAGATCAAGGTATTAGTTCTAATATGATTTTAGGGTTCGATAAAGCGATTACTAATGATGTCTTAGAGATAGATAAACGTTTTAGACCAGAAATATTAATTACTGTTGGTTATAGTGATGAAAAGGTTGAACCTAGTTATCGTTTGCCAGTTGATCATATTATTGAAAAACGT

SEQ ID NO: 6932 - protein, 200 aa, Streptococcus agalactiae; identical to SEQ ID NO: 2292

SEQ ID NO: 6933 - protein, 1779 aa, Streptococcus agalactiae
ATGCTACGAGCATTAAAAGAAGATTTTTTTCTAACCTTAACCTCTTTAAAAAATCAATTTTGGGTTTACATTGGAACTGGTATCTTAATCCAAACTTTAGTTGCTTATTTAGTAAAAGGAATTCTGAGTTTTATCTTTCGTCGGATATTGATATTGTCAAATACTCCCGCAGTGACTAAAGACAATTGGACTTTACTTTTTAATCATCCCTTAGCTTTATTACTCTTTATACTTTATATCGTAATCCTAATTGGGTTCATCTATACTGAGTTCGCTATCTATACTATTGCCATACTGAAAACTGAATTTTCTCTCAGTATCAAAAAATGGCTAACAATCTTTCCTAAAAAAATAAAATCACTTTTAGGACCACAGCTAATTTGGGTATCAATCTACTTACTTTTGACAATTCCTCTAGCTAACCTTGGTCTAAGGTCAAGTATACTAGAGCATCTTAAAATTCCTGACTTTATTTCTGGCGAGTTAACAAAGACAGTCTTTGGAAAGATAGGTTACTCTACCCTTTTACTGCTTATTTGTTACTTAAACCTTCGATTAATTTATTTTCTCCCGCTGACCATTTTAACTGACTACAATGCTAAAGAAGCACTTTTAGAGAGTTGGAAACTTAGCCGCGGAAAGCATCAGTGGCGTCTTCTAAGTAAAATTATTTTAACCAGTTTATTTATATCTGTAATTGGAACAGTTGCACTAGCTGTTGTTGCTGGTACATCTTCATTCATTGATCATTCTGGAAACAATTTTCCTCTTCAAGCCACTTTCTATAACCTTTTAAAATCAATACTTTTTGCCGTAACACTTCTTATTAAATGTTTAATCATAAGTCACCTATTAGCAGATATTAAACAAAATAAAAGTATTGTTCAACAATGGAGAGCTTGGAAAGGCGTCCAACATAAGCAAAAATTTAAACACATTGCTTGTGTTATCCTAGCTCTAGCTATTGGTACCACTGCCTTAAAAAATGCTATAGCTCTGGCTCTCCTACAAGATAACATTTCAATTAAAAAAGAATTAATAGCCCATCGTGGTGATACATCACATGGCGTTGAAAATTCTATTGAAGCATTAAAAGCAGCCCATAAAGCAAAAGCAGATTATTCAGAGATGGATGTTATCATGACAAAAGATCATAAATTAGTAGTCATCCATGATGATAATCTCAAACGACTCTCTGGTATGAACAAAGATGTTTCTAAACTAACTTTAGATCAAGTTACAAAAATCCCAATTCACCAAGGGCGTTTTGCTAGTCACATTCCATCATTTGCAGAATTTATGAAGACCGCTCAGTCACTAGATCAAAAAATCATGATTGAATTGAAACCGTATAATCAAAACCTCGATATCTATGCGGATGAATTTATCAAAGAATTTAAAGAGCTTCGTCTATCAACCAAGCATAAAGTAATGTCTCTCAACTTGACACTCATTGAAAAAGTTGAGAAAAAATTGCCACAACTTGATACAGGTTACCTAATCCCACTACATTGGGGAACGCTTCAAAATCATAACGTTGACTTTTATGGGATTGAGGAATTTTCATACAATGATTGGATTGCATATCTCGCCCAAGAATATAATAAACAGCTCTATGTTTGGACTATTAACCGTGATAACCTTATGATACGTTATTTACAAAGCCCAGTTAATGGAATCATCACAGATGAACTCAACCTTTTCAAGGTCATTAATAAAGATATCAAAAATAGCCCTAATTATTATCAAAGAGCTCTCCAACTTATTGATAGCGAGGGT

SEQ ID NO: 6934 - protein, 593 aa, Streptococcus agalactiae
MLRALKEDFFLTLTSLKNQFWVYIGTGILIQTLVAYLVKGILSFIFRRILILSNTPAVTKDNWTLLFNHPLALLLFILYIVILIGFIYTEFAIYTIAILKTEFSLSIKKWLTIFPKKIKSLLGPQLIWVSIYLLLTIPLANLGLRSSILEHLKIPDFISGELTKTVFGKIGYSTLLLLICYLNLRLIYFLPLTILTDYNAKEALLESWKLSRGKHQWRLLSKIILTSLFISVIGTVALAVVAGTSSFIDHSGNNFPLQATFYNLLKSILFAVTLLIKCLIISHLLADIKQNKSIVQQWRAWKGVQHKQKFKHIACVILALAIGTTALKNAIALALLQDNISIKKELIAHRGDTSHGVENSIEALKAAHKAKADYSEMDVIMTKDHKLVVIHDDNLKRLSGMNKDVSKLTLDQVTKIPIHQGRFASHIPSFAEFMKTAQSLDQKIMIELKPYNQNLDIYADEFIKEFKELRLSTKHKVMSLNLTLIEKVEKKLPQLDTGYLIPLHWGTLQNHNVDFYGIEEFSYNDWIAYLAQEYNKQLYVWTINRDNLMIRYLQSPVNGIITDELNLFKVINKDIKNSPNYYQRALQLIDSEG

SEQ ID NO: 6935 - protein, 1779 aa, Streptococcus agalactiae
ATGAATGAACTGATTAAACATAAGCTAGAATTGTTACCAGACAGTCCTGGTTGTTACCTTCATAAAGATAAGAATGGGACAATTATTTATGTAGGTAAGGCTAAAAATCTTAAGAATCGTGTGAAAAGTTATTTTCATGGGAGTCATAATACTAAGACAGAACTTTTGGTCTCTGAGATTGAAGACTTTGAATACATTGTGACAACATCTAATACCGAAGCTCTATTATTGGAAATTAATTTAATCCAAGAAAATATGCCGAAGTATAATATTCGATTGAAAGATGATAAGTCTTACCCATATATCAAAATAACAAATGAACGTTATCCTCGTCTTATGATTACACGTCAAGTAAAAAAATCAGATGGCACTTATTTTGGACCTTATCCGGATTCTGGGGCAGCAACTGAGATTAAGCGGTTACTAGATAGGCTCTTTCCTTTTAAGAAATGTACTAATCCAGCAAATAAAGTATGCTTTTATTATCATTTAGGGCAATGCAATGCACATACAGTTTGTCAAACTAATAAAGCTTATTGGGATAGTCTGAGAGAAGATGTAAAACAGTTTCTTAATGGTAAAGATAATAAAATTGTTAACGGATTAACTGAAAAAATGAAGAGCGCTGCTATGACTATGGAATTTGAGCGTGCGGCTGAATATCGAGATTTGATCGAAGCAATTAGTTTGTTGCGTACTAAGCAGCGTGTTATTCATCAAGATATGAAGGATAGAGATGTTTTTGGTTATTTCGTTGATAAGGGTTGGATGTGTGTACAGGTCTTTTTTGTTCGAAATGGAAAATTGATTCAGCGTGACGTGAATATGTTTCCTTATTATAATGAACCAGAGGAAGATTTTCTAACTTACATAGGGCAATTTTATCAAGATACAAAACATTTTCTACCCAAAGAAGTCTTTATTCCACAGGATATTGATGCTAAGTCGGTTGAAACAATTGTAGGCTGTAAGATTGTTAAACCACAACGTGGTGAAAAGAAACAGTTAGTAAATCTGGCAATAAAAAATGCTCGTGTCAGTTTACAACAGAAGTTTGACTTACTGGAAAAAGATATTCGTAAAACTCATGGGGCAATTGAAAATTTAGGTAATCTTCTTAATATCCCTAAACCAGTACGCATAGAAGCATTTGATAATTCCAATATTCAAGGGACAAGTCCAGTAGCTGCTATGGTGGTATTTGTGAATGGAAAGCCAAGTAAAAAAGACTATCGAAAGTTTAAAATTAAGACTGTTATCGGACCAGATGATTATGCTAGTATGAGAGAAGTCATTCATCGGCGTTATAGTAGGGTTTTAAAAGATGGCTTGACACCTCCGGACTTGATTGTAATTGATGGTGGTCAGGGGCAAGTAAATATAGCGCGTGATGTTATTGAGAACCAATTAGGTTTAGCCATACCTATTGCAGGTTTGCAAAAGAATGATAAACACCAAACACATGAATTACTTTTTGGAGATCCTTTAGAAGTAGTAGAATTACCGCGTAATTCAGAAGAATTTTTCTTACTTCACCGTATTCAAGATGAGGTACATCGTTTTGCTATTACTTTTCATCGTCAATTACGCTCCAAAAATTCCTTTTCTTCAAAATTAGATGGTATCACTGGGTTGGGACCAAAACGTAAACAATTGCTAATGAAACATTTTAAAAGCTTACCTAATATCCAAAAAGCTGAGATTGAGGACATTATTATGTGTGGTATTCCTAGGACTGTTGCAGAAAGTCTCCGAGATTCTCTTAATGATCCTCCTAAA

SEQ ID NO: 6936 - protein, 593 aa, Streptococcus agalactiae
MNELIKHKLELLPDSPGCYLHKDKNGTIIYVGKAKNLKNRVKSYFHGSHNTKTELLVSEIEDFEYIVTTSNTEALLLEINLIQENMPKYNIRLKDDKSYPYIKITNERYPRLMITRQVKKSDGTYFGPYPDSGAATEIKRLLDRLFPFKKCTNPANKVCFYYHLGQCNAHTVCQTNKAYWDSLREDVKQFLNGKDNKIVNGLTEKMKSAAMTMEFERAAEYRDLIEAISLLRTKQRVIHQDMKDRDVFGYFVDKGWMCVQVFFVRNGKLIQRDVNMFPYYNEPEEDFLTYIGQFYQDTKHFLPKEVFIPQDIDAKSVETIVGCKIVKPQRGEKKQLVNLAIKNARVSLQQKFDLLEKDIRKTHGAIENLGNLLNIPKPVRIEAFDNSNIQGTSPVAAMVVFVNGKPSKKDYRKFKIKTVIGPDDYASMREVIHRRYSRVLKDGLTPPDLIVIDGGQGQVNIARDVIENQLGLAIPIAGLQKNDKHQTHELLFGDPLEVVELPRNSEEFFLLHRIQDEVHRFAITFHRQLRSKNSFSSKLDGITGLGPKRKQLLMKHFKSLPNIQKAEIEDIIMCGIPRTVAESLRDSLNDPPK

SEQ ID NO: 6937 - protein, 765 aa, Streptococcus agalactiae
ATGATAGACGTTGAGAATATTCTTGAAAAAATGAAACCTAACCAAAAAATCAATTACGATTGGGTCATGCAACAAATGGTTAAGCAGTGGCAAGCTAGTGATATCCGTCCGAAAATTCTGATGCATGTTTGCTGTGCTCCTTGTAGTACATATACCCTTGAATACTTATCACAATGGGCAGATGTTACCATCTATTTTGCTAATTCAAATATCCATCCTAAAGATGAATATTATCGCCGCGAATATGTTACTCAAAAATTTGTTCATGATTTCAACAAAAATACTGGATATTCTGTACAATTCTTATCAGCACCATATGAACCAAATGAATTTTTCAAAATTGTTCATGGGTTAGAAGAAGAACCTGAAGGTGGGGATCGTTGTAAAGTTTGCTATGATTTCCGTCTTGATAAGACAGCGGAAAAAGCCGTTGAACTAGGTTTTGATTACTTTGGCAGTGCCCTAACTATTAGTCCTCACAAAAACTCTCAAACAATCAATACTATTGGTATTGATGTCCAAAAAATTTATGATACTCAGTATCTTCCTAGCGACCTTAAAAAAAATAAAGGTTACCAACGTTCCGTTGAGATGTGTAAAGATTATGATATCTACCGACAATGTTACTGTGGGTGTATCTTCGGTGCTAAAGATCAAGGGATAAATCTTCTCCAAATCAAAAAAGATGCGAAAGCTTTCGTGAGTGATAAAGACGGCAAAGAAGAATTTCCTAATATACGCTTCACATTTAATGGCAAGTCAATG

SEQ ID NO: 6938 - protein, 255 aa, Streptococcus agalactiae
MIDVENILEKMKPNQKINYDWVMQQMVKQWQASDIRPKILMHVCCAPCSTYTLEYLSQWADVTIYFANSNIHPKDEYYRREYVTQKFVHDFNKNTGYSVQFLSAPYEPNEFFKIVHGLEEEPEGGDRCKVCYDFRLDKTAEKAVELGFDYFGSALTISPHKNSQTINTIGIDVQKIYDTQYLPSDLKKNKGYQRSVEMCKDYDIYRQCYCGCIFGAKDQGINLLQIKKDAKAFVSDKDGKEEFPNIRFTFNGKSM

SEQ ID NO: 6939 - protein, 928 aa, Streptococcus agalactiae
ATGTTGATTGGAATCATGCCGCTGGTGTTGTTTAGCATTTGCCGTTCATTCTTTGATGCATTGGGGTTAACAAGGTTATCTATGTATCTGATGCTTTTTTCTACCCTTTAATTCATTTTTTAATTATATGCTTATCTACGGTAAATTTGGTATGCCTAGACTAGGAGGTGCGGGGGCAGGTCTTGGAACTTCTTTAACTTATTGGGCTATTTTTATTGTTATTATTATTGTGATGTCACTTCATCCTCAAATTAAAACATATCATATATGGACTCTGGAAAGAATAAAAGCTCCTTTGATTATTGAAGATATTCGATTGGGATTACCGATTGGTTTACAAATTTTTGCAGAAGTTGCAATTTTTGCAGTAGTAGGCTTATTCATGGCAAAATTTTCTTCAATCATTATTGCAGCACATCAGGCTGCTATGAATTTTTCATCATTAATGTATGCCTTTCCTTTAAGTATTTCCACTGCTCTAGCTATTACAATATCGTTTGAAGTAGGGGCAGAGCGCATTCAGGACGCAAACACTTATAGTAGGATAGGACGCTTAACAGCGGTAGGGATTACATCAGGAACCTTACTATTTTTATTTCTATTTCGTGAGAATGTAGCAGCAATGTATAATAGTGACCCTCACTTTGTCGCTATTACAGCTCAATTCCTAACTTATAGTCTCTTTTTCCAGTTTGCAGATGCTTATGCAGCTCCTGTACAGGGGATTTTACGAGGCTATAAGGATACAACAAAACCATTTATGATCGGTGCGGGCTCTTATTGGTTATGTGCTTTGCCATTAGCGGTTATCTTAGAAAAAAATAGCCAGTTAGGTCCGTTTGCCTATTGGATTGGTTTAATCACAGGTATTTTTGTTTGTGGTCTATTTCTAAACCAACGTCTGCAAAAGATTAAGAAGTTGTATTAT

SEQ ID NO: 6940 - protein, 310 aa, Streptococcus agalactiae
  VARIANT 33, 34: Xaa = Any Amino Acid
MLIGIMPLVLFSICRSFFDALGLTRLSMYLMLXXLPFNSFFNYMLIYGKFGMPRLGGAGAGLGTSLTYWAIFIVIIIVMSLHPQIKTYHIWTLERIKAPLIIEDIRLGLPIGLQIFAEVAIFAVVGLFMAKFSSIIIAAHQAAMNFSSLMYAFPLSISTALAITISFEVGAERIQDANTYSRIGRLTAVGITSGTLLFLFLFRENVAAMYNSDPHFVAITAQFLTYSLFFQFADAYAAPVQGILRGYKDTTKPFMIGAGSYWLCALPLAVILEKNSQLGPFAYWIGLITGIFVCGLFLNQRLQKIKKLYY

SEQ ID NO: 6941 - protein, 366 aa, Streptococcus agalactiae
ATGATTGACGAAATACTTGTTGAAGATGGAAAGGTTGTGGGGGTTCGTACAGCAACTAATCAGAAATTTTCAGCAAAATCTGTTGTTATAACAACAGGTACTGCTCTTCGAGGAGAGATTATATTAGGTGATCTTAAGTACTCCTCGGGCCCTAATAATAGTTTAGCTTCTGTGACATTGGCAGATAATTTAAGAGACCTAGGATTAGAAATTGGTCGTTTCAAAACTGGAACACCTCCTCGTGTAAAAGCCTCCTCTATTAATTATGAAAAGACAGAGATACAACCTGGGGATGAGCAACCAAATCATTTTTCATTTATGTCTAGGGATGAAGATTATATTACTGACCAGGTACCGTGCNNNNNT

SEQ ID NO: 6942 - protein, 122 aa, Streptococcus agalactiae
  VARIANT 121, 122: Xaa = Any Amino Acid
MIDEILVEDGKVVGVRTATNQKFSAKSVVITTGTALRGEIILGDLKYSSGPNNSLASVTLADNLRDLGLEIGRFKTGTPPRVKASSINYEKTEIQPGDEQPNHFSFMSRDEDYITDQVPCXX

SEQ ID NO: 6943 - protein, 327 aa, Streptococcus agalactiae
ATGAAATTCTATAAATATAGTCACCTTATAGCAAAACGATTTTTGGATATCACGGGTGCTATTATAGGTTTGCTCATATGTGGCATTGTGGCAATTTTTCTAGTTCCACAAATCAGAAAAGATGGTGGACCGGCTATCTTTTCTCAAAATAGAGTAGGTCGTAATGGTAGGATTTTTAGATTCTATAAATTCAGATCAATGCGAGTAGATGCAGAACAAATTAAGAAAGATTTATTAGTTCACAATCAAATGACAGGGCTAATGTTTAAGTTAGACGATGATCCTAGAATTACTAAAATAGGAACTTACCTTAAGACAAGCTATGAT

SEQ ID NO: 6944 - protein, 109 aa, Streptococcus agalactiae
MKFYKYSHLIAKRFLDITGAIIGLLICGIVAIFLVPQIRKDGGPAIFSQNRVGRNGRIFRFYKFRSMRVDAEQIKKDLLVHNQMTGLMFKLDDDPRITKIGTYLKTSYD

SEQ ID NO: 6945 - protein, 558 aa, Streptococcus agalactiae
ATGTACGCCCCACAATATACTCTTTCACCAAGGATATATGTCATAACCCCTAATACCCCTAATAATAGTATTACTGCACAAGATCTACAAGCGGGGAGTTTTCTTGCAAATGACTATAAGGAGATTATTACGTCTACTGACGTTCTAGAAAAAGTTATTTCTTCTGAAAAATTGAATTATCCTTCGTCTCAGTTGTTGCAAAAAATAACAGTTTCTATTTTAAAAGATACACGTGTTATTTCAATATCGGTCGAAGATGCTAATCCAAAAATGTCTCAAAAATTAGCAAATTCAGTTAGAGAAGCAGCAGTTTCAAAAATCAAGGCAGTTACTCAAGTAGAGGATATCACTACTCTTGAGAAGGGAAATTTACCTAAAGCACCATCTTCTCCTAATATTAAAAAGAATGTACTAATCGGGTTTATTGTTGGTGCAGGATTATCAACTATTGTTTTAGTTATTATGGGTATTTTGGATGATCGTGTTAATACTGAAGAAGATATTGAAAAGGCCCTAGGACTTACTTCTTTAGGTATAGTACCAGATTTGAATAAACTT

SEQ ID NO: 6946 - protein, 186 aa, Streptococcus agalactiae
MYAPQYTLSPRIYVITPNTPNNSITAQDLQAGSFLANDYKEIITSTDVLEKVISSEKLNYPSSQLLQKITVSILKDTRVISISVEDANPKMSQKLANSVREAAVSKIKAVTQVEDITTLEKGNLPKAPSSPNIKKNVLIGFIVGAGLSTIVLVIMGILDDRVNTEEDIEKALGLTSLGIVPDLNKL

SEQ ID NO: 6947 - protein, 399 aa, Streptococcus agalactiae
ATGTCAATCCATATTGAAGCAAAACAAGGTGAAATTGCAGATAAAATTTTACTTCCAGGAGATCCACTCCGTGCGAAATTTATTGCCGAGAATTTTTTAGAAGATGCGGTGTGTTTTAATACAGTTCGCAATATGTTTGGTTATACAGGTACCTATAAAGGACATCGTGTTTCTGTTATGGGAACTGGTATGGGTATGCCTTCAATTTCAATTTATGCTCGCGAACTAATTGTTGATTATGGGGTTAAAACATTGATTCGCGTAGGAACAGCAGGTGCTATTAATCCTGATATCCATGTTCGTGAACTTGTTTTAGCACAAGCAGCAGCAACAAATTCTAATATTATCCGTAATGATTGGCCTGAATTTGATTTTCCGCCAAATTNNNNNTTAATTAAT

SEQ ID NO: 6948 - protein, 133 aa, Streptococcus agalactiae
  VARIANT 129, 130: Xaa = Any Amino Acid
MSIHIEAKQGEIADKILLPGDPLRAKFIAENFLEDAVCFNTVRNMFGYTGTYKGHRVSVMGTGMGMPSISIYARELIVDYGVKTLIRVGTAGAINPDIHVRELVLAQAAATNSNIIRNDWPEFDFPPNXXLIN

SEQ ID NO: 6949 - protein, 408 aa, Streptococcus agalactiae
ATGTCTAAAGATAGTATCATTGAAAAATTAAAAAAGGATTCTAAGAAATATCGTCAAGAAGACATCAACTTTGTGATTAATAACCTCAAGGTTGATTACAAAAAAAATGCCTTGATTTCTGCCAAAATTTATTCAAAGACCATGAATTTATCTAAACAATCTATCTTTGAACAGCTCTATTCGGAGTCTCCAGATAAGGCAACCCACTCTGATAAATTTACAAAAGAAGAATCCCAATATGCTATAGACCATCTCAAAGTAGATTTCAAAGAAAATGCTCTTGAGACTGCTAAAAGTTATCAAAGTAGTTCTTCTTTATCCAAAGAAGAAATCTATAAACAATTGACATCTACGCTGGGCGATAAATTCACAAATGATGAAGCCCAATATGCTGTAGATCATTTGAAA

SEQ ID NO: 6950 - protein, 136 aa, Streptococcus agalactiae
MSKDSIIEKLKKDSKKYRQEDINFVINNLKVDYKKNALISAKIYSKTMNLSKQSIFEQLYSESPDKATHSDKFTKEESQYAIDHLKVDFKENALETAKSYQSSSSLSKEEIYKQLTSTLGDKFTNDEAQYAVDHLK

SEQ ID NO: 6951 - protein, 288 aa, Streptococcus agalactiae
ATGTCTAGAAAAGTACGTCGTCACTTCACCGATGATTTTAAGCAACAAATTGTTGACCTTTACAATGTTGGTAGAAAGCGTAGCAGTCTCATCAAGGTATATGAGCTAACCCCTTCCACCTTCGATAAGTGGGTTAGACAAGCCAAAACAACTGGTTCATTCAAGTCTGTTGATAATCTGACAGATGAACAGCGGGAGCTAATTGAACTCAGAAAACACAATAAAGAACTCGAAATGCAATTAGATATCCTAAAGCAAGCAGCGGTGATTATGGCACAAAAAGGGAAA

SEQ ID NO: 6952 - protein, 96 aa, Streptococcus agalactiae
MSRKVRRHFTDDFKQQIVDLYNVGRKRSSLIKVYELTPSTFDKWVRQAKTTGSFKSVDNLTDEQRELIELRKHNKELEMQLDILKQAAVIMAQKGK

SEQ ID NO: 6953 - protein, 759 aa, Streptococcus agalactiae
ATGCCACACTCAAGTTATTACTATCAAGCCGTGGAGTCAGTATCTGAAACGGAGTTTGAAGAAACTATTAAAAGAATTTTTCTCGATAGCGAGTCTAGATACGGATCCAGAAAAATCAAAATATGCTTGAATAACGAAGGTATCACACTTTCACGTCGTCGGATTCGACGCATTATGAAGCGACTCAATTTGGTTTCTGTTTATCAGAAAGCCACCTTCAAACCACATTCTAGAGGCAAGAATGAAGCCCCTATTCCCAACCACTTAGACAGGCAATTTAAGCAAGAAAGACCACTACAAGCCTTAGTCACTGACTTAACCTATGTTCGTGTAGGCAATCGTTGGGCTTATGTTTGCCTCATCATTGACCTATACAACCGTGAAATCATCGGCCTGTCTCTTGGTTGGCACAAGACCGCTGAACTCGTTAAGCAAGCCATACAAAGCATCCCTTACGCCCTGACCAAATTCAAGATGTTCCATTCAGATCGTGGCAAAGAGTTTGATAATCAGTTAATTGATGAAATATTGGAAGCCTTTGGAATCACACGTTCGCTTAGTCAGGCTGGTTATCCTTATGACAATGCCGTAGCTGAAAGTACGTATCGTGCTTTCAAAATTGAATTTGTTTATCAAGAAACCTTTCAATTGCTGGAAGAACTAGCTCTTAAGACTAAAGACTATGTTCATTGGTGGAATTACCACCGCATTCATGGTAGTCTCAACTACCAAACACCAATGACTAAAAGATTAATTGCC

SEQ ID NO: 6954 - protein, 253 aa, Streptococcus agalactiae
MPHSSYYYQAVESVSETEFEETIKRIFLDSESRYGSRKIKICLNNEGITLSRRRIRRIMKRLNLVSVYQKATFKPHSRGKNEAPIPNHLDRQFKQERPLQALVTDLTYVRVGNRWAYVCLIIDLYNREIIGLSLGWHKTAELVKQAIQSIPYALTKFKMFHSDRGKEFDNQLIDEILEAFGITRSLSQAGYPYDNAVAESTYRAFKIEFVYQETFQLLEELALKTKDYVHWWNYHRIHGSLNYQTPMTKRLIA

SEQ ID NO: 6955 - protein, 288 aa, Streptococcus agalactiae
ATGGTTAAAAAAGCATATTCATGGGAAACTAAGCTGGCTTGCATCGATATGAAGAAAGCAGGCAAGTCTAACAGAGTTATTATGGAGACTTTAGGCATCAAAAATAATAGTCAAATCTATACTTGGATGAAATGGTACGAAAACGAGGAGCTTTATCGTTTTCATCAAGGTGTTGGCAAGCAATATACCTACGGTAAAGGCTTGGAACATCTGTCTGAAGTGGAACAATTACAATTACAGGTTGACCTCTTAAAAAAGTATCGAGGCTTGATAAGGAAATCGATAAAG

SEQ ID NO: 6956 - protein, 96 aa, Streptococcus agalactiae; identical to SEQ ID NO: 2304

SEQ ID NO: 6957 - protein, 378 aa, Streptococcus agalactiae
ATGGAGAATCACTTTATTTATGGCTATCGTACCATTACACGATTGCTCAAAAAAATCCACGGATTGACTGTTAATACAAAGAAAGTCTATCGTATCATGAAAAATAATGGCTGGCTTTGTCGGACACGTACCAAGAAAGTTCCCAATTTGGGTAAAGCTTATTATTTAACAGATAATAAATTGAGTCGGGATTTCCATGCCGATAAGCCTAAGGAAAAGCTCGTAACAGATATTACCTACCTATATTTCGGTAACTGTAAATTGTATCTCTCATCAATTATGAATCTCTATAACCGAGAAATTATAGCTTACACTATCTCAGATTGTCAGGACACGGATTTTGTACTAGACACCCTTAATCAGTTAAAATTGCCTAAA

SEQ ID NO: 6958 - protein, 126 aa, Streptococcus agalactiae
MENHFIYGYRTITRLLKKIHGLTVNTKKVYRIMKNNGWLCRTRTKKVPNLGKAYYLTDNKLSRDFHADKPKEKLVTDITYLYFGNCKLYLSSIMNLYNREIIAYTISDCQDTDFVLDTLNQLKLPK

SEQ ID NO: 6959 - protein, 231 aa, Streptococcus agalactiae
ATGCATTCTTTTTCTAATCCTGGATATCCTTATGATAATGCCGTAACTGAAGCATTTTTCAAGTATTTAAAGCATAGACAAATCAACCGAAAACATTATCAAAATATCAAACAGGTTCAATTAGACTGCTTTGAATACATTGAGAATTTTTATAACAATTACAACCCACATACGGCTAATCTAGGACTAACCCCTAATCAGAAAGAAGAAAATTATTTTAACGCAATAAAA

SEQ ID NO: 6960 - protein, 77 aa, Streptococcus agalactiae
MHSFSNPGYPYDNAVTEAFFKYLKHRQINRKHYQNIKQVQLDCFEYIENFYNNYNPHTANLGLTPNQKEENYFNAIK

SEQ ID NO: 6961 - protein, 2465 aa, Streptococcus agalactiae
GTGAAGAAAACATATGGTTATATCGGCTCAGTTGCTGCCATTTTACTAGCTACTCATATTGGAAGTTACCAACTTGGTAAGCATCATATGGGTCTAGCAACAAAGGACAATCAGATTGCCTATATTGATGACAGCAAAGGTAAGGCAAAAGCCCCTAAAACAAACAAAACGATGGATCAAATCAGTGCTGAAGAAGGCATCTCTGCTGAACAGATCGTAGTCAAAATTACTGACCAAGGCTATGTGACCTCACACGGTGACCATTATCATTTTTACAATGGGAAAGTTCCTTATGATGCGATTATTAGTGAAGAGTTGTTGATGACGGATCCTAATTACCGTTTTAAACAATCAGACGTTATCAATGAAATCTTAGACGGTACGTTATTAAAGTCAATGGCAACTATTATGTTTACCTCAAGCCAGGTAGTAAGCGCAAAAACATTCGAACCAAACAACAAATTGCTGAGCAAGTAGCCAAAGGAACTAAAGAAGCTAAAGAAAAAGGTTTAGCTCAAGTGGCCCATCTCAGTAAAGAAGAAGTTGCGGCAGTCAATGAAGCAAAAAGACAAGGACGCTATACTACAGACGATGGCTATATTTTTAGTCCGACAGATATCATTGATGATTTAGGAGATGCTTATTTAGTACCTCATGGTAATCACTATCATTATATTCCTAAAAAGGATTTGTCTCCAAGTGAGCTAGCTGCTGCACAAGCCTACTGGAGTCAAAAACAAGGTCGAGGTGCTAGACCGTCTGATTACCGCCCGACACCAGCCCCAGGTCGTAGGAAAGCCCCAATTCCTGATGTGACGCCTAACCCTGGACAAGGTCATCAGCCAGATAACGGTGGCTATCATCCAGCGCCTCCTAGGCCAAATGATGCGTCACAAAACAAACACCAAAGAGATGAGTTTAAAGGAAAAACCTTTAAGGAACTTTTAGATCAACTACACCGTCTTGATTTGAAATACCGTCATGTGGAAGAAGATGGGTTGATTTTTGAACCGACTCAAGTGATCAAATCAAACGCTTTTGGGTATGTGGTGCCTCATGGAGATCATTATCATATTATCCCAAGAAGTCAGTTATCACCTCTTGAAATGGAATTAGCAGATCGATACTTAGCTGGCCAAACTGAGGACAATGACTCAGGTTCAGAGCACTCAAAACCATCAGATAAAGAAGTGACACATACCTTTCTTGGTCATCGCATCAAAGCTTACGGAAAAGGCTTAGATGGTAAACCATATGATACGAGTGATGCTTATGTTTTTAGTAAAGAATCCATTCATTCAGTGGATAAATCAGGAGTTACAGCTAAACACGGAGATCATTTCCACTATATAGGATTTGGAGAACTTGAACAATATGAGTTGGATGAGGTCGCTAACTGGGTGAAAGCAAAAGGTCAAGCTGATGAGCTTGCTGCTGCTTTGGATCAGGAACAAGGCAAAGAAAAACCACTCTTTGACACTAAAAAAGTGAGTCGCAAAGTAACAAAAGATGGTAAAGTGGGCTATATGATGCCAAAAGATGGTAAGGACTATTTCTATGCTCGTGATCAACTTGATTTGACTCAGATTGCCTTTGCCGAACAAGAACTAATGCTTAAAGATAAGAAGCATTACCGTTATGACATTGTTGACACAGGTATTGAGCCACGACTTGCTGTAGATGTGTCAAGTCTGCCGATGCATGCTGGTAATGCTACTTACGATACTGGAAGTTCGTTTGTTATCCCACATATTGATCATATCCATGTCGTTCCGTATTCATGGTTGACGCGCGATCAGATTGCAACAGTCAAGTATGTGATGCAACACCCCGAAGTTCGTCCGGATGTATGGTCTAAGCCAGGGCATGAAGAGTCAGGTTCGGTCATTCCAAATGTTACGCCTCTTGATAAACGTGCTGGTATGCCAAACTGGCAAATTATCCATTCTGCTGAAGAAGTTCAAAAAGCCCTAGCAGAAGGTCGTTTTGCAACACCAGACGGCTATATTTTCGATCCACGAGATGTTTTGGCCAAAGAAACTTTTGTATGGAAAGATGGCTCCTTTAGCATCCCAAGAGCAGATGGCAGTTCATTGAGAACCATTAATAAATCTGATCTATCCCAAGCTGAGTGGCAACAAGCTCAAGAGTTATTGGCAAAGAAAAATACTGGTGATGCTACTGATACGGATAAACCCAAAGAAAAGCAACAGGCAGATAAGAGCAATGAAAACCAACAGCCAAGTGAAGCCAGTAAAGAAGAAAAAGAATCAGATGACTTTATAGACAGTTTACCAGACTATGGTCTAGATAGAGCAACCCTAGAAGATCATATCAATCAATTAGCACAAAAAGCTAATATCGATCCTAAGTATCTCATTTTCCAACCAGAAGGTGTCCAATTTTATAATAAAAATGGTGAATTGGTAACTTATGATATCAAGACACTTCAACAAATAAACCCT

SEQ ID NO: 6962 - protein, 822 aa, Streptococcus agalactiae
MKKTYGYIGSVAAILLATHIGSYQLGKHHMGLATKDNQIAYIDDSKGKAKAPKTNKTMDQISAEEGISAEQIVVKITDQGYVTSHGDHYHFYNGKVPYDAIISEELLMTDPNYRFKQSDVINEILDGYVIKVNGNYYVYLKPGSKRKNIRTKQQIAEQVAKGTKEAKEKGLAQVAHLSKEEVAAVNEAKRQGRYTTDDGYIFSPTDIIDDLGDAYLVPHGNHYHYIPKKDLSPSELAAAQAYWSQKQGRGARPSDYRPTPAPGRRKAPIPDVTPNPGQGHQPDNGGYHPAPPRPNDASQNKHQRDEFKGKTFKELLDQLHRLDLKYRHVEEDGLIFEPTQVIKSNAFGYVVPHGDHYHIIPRSQLSPLEMELADRYLAGQTEDNDSGSEHSKPSDKEVTHTFLGHRIKAYGKGLDGKPYDTSDAYVFSKESIHSVDKSGVTAKHGDHFHYIGFGELEQYELDEVANWVKAKGQADELAAALDQEQGKEKPLFDTKKVSRKVTKDGKVGYMMPKDGKDYFYARDQLDLTQIAFAEQELMLKDKKHYRYDIVDTGIEPRLAVDVSSLPMHAGNATYDTGSSFVIPHIDHIHVVPYSWLTRDQIATVKYVMQHPEVRPDVWSKPGHEESGSVIPNVTPLDKRAGMPNWQIIHSAEEVQKALAEGRFATPDGYIFDPRDVLAKETFVWKDGSFSIPRADGSSLRTINKSDLSQAEWQQAQELLAKKNTGDATDTDKPKEKQQADKSNENQQPSEASKEEKESDDFIDSLPDYGLDRATLEDHINQLAQKANIDPKYLIFQPEGVQFYNKNGELVTYDIKTLQQINP

SEQ ID NO: 6963 - protein, 633 aa, Streptococcus agalactiae
ATGGATCTAGACCCTAATTTAAAAAAATCAAAGGTTGATGTGTTTGAAGCGTCAAAACCTTTGACACTAGATAGAGTCAAAGGGCTAGAAGATATGGAAGTCACACAAGGCATTGACCCTGCGACACTTTATGACCCACATACCTGGACGGATCCCGTTTTAGCTGGTGAGGAAGCTGTTAATATCGCTAAAGAGCTAGGACGTTTGGATCCTAAACACAAAGACAGTTACACTAAAAAGGCTAAGGCTTTCAAAAAAGAAGCAGAGCAACTAACTGAAGAATACACTCAAAAATTTAAAAAGGTGCGCTCAAAAACATTCGTGACGCAACACACGGCATTTTCTTATCTGGCTAAACGATTCGGCTTGAAACAACTTGGTATCTCGGGTATTTCTCCAGAGCAAGAGCCCTCTCCTCGCCAATTGAAAGAAATTCAAGACTTTGTCAAAGAATACAACGTCAAGACTATTTTTGCAGAAGACAACGTCAATCCCAAAATTGCTCATGCTATTGCGAAATCAACAGGAGCTAAAGTAAAGACATTAAGTCCACTTGAAGCTGCTCCAAGCGGAAACAAGACATATCTAGAAAATCTTAGAGCAAATTTGGAAGTGCTCTATCAACAGTTGAAG

SEQ ID NO: 6964 - protein, 211 aa, Streptococcus agalactiae
MDLDPNLKKSKVDVFEASKPLTLDRVKGLEDMEVTQGIDPATLYDPHTWTDPVLAGEEAVNIAKELGRLDPKHKDSYTKKAKAFKKEAEQLTEEYTQKFKKVRSKTFVTQHTAFSYLAKRFGLKQLGISGISPEQEPSPRQLKEIQDFVKEYNVKTIFAEDNVNPKIAHAIAKSTGAKVKTLSPLEAAPSGNKTYLENLRANLEVLYQQLK

SEQ ID NO: 6965 - protein, 567 aa, Streptococcus agalactiae
ATGAAGCGACTCAATTTGGTTTCTGTTTATCAGAAAGCCACCTTCAAACCACATTCTAGAGGCAAGAATGAAGCCCCTATTCCCAACCACTTAGACAGGCAATTTAAGCAAGAAAGACCACTACAAGCCTTAGTCACTGACTTAACCTATGTTCGTGTAGGCAATCGTTGGGCTTATGTTTGCCTCATCATTGACCTATACAACCGTGAAATCATCGGCCTGTCTCTTGGTTGGCACAAGACCGCTGAACTCGTTAAGCAAGCCATACAAAGCATCCCTTACGCCCTGACCAAAGTCAAGATGTTCCATTCAGATCGTGGCAAAGAGTTTGATAATCAGTTAATTGATGAAATATTGGAAGCCTTTGGAATCACACGTTCGCTTAGTCAGGCTGGTTGTCCTTATGACAATGCCGTAGCTGAAAGTACGTATCGTGCTTTCAAAATTGAATTTGTTTATCAAGAAACCTTTCAATCGCTGGAAGAACTAGCTCTTAAGACTGAAAAGGCAACACTTTTCTGTACAACATTTATAAAGTGTTGCCTTTTCAGGTTTTTACCAATGCTA

SEQ ID NO: 6966 - protein, 189 aa, Streptococcus agalactiae
MKRLNLVSVYQKATFKPHSRGKNEAPIPNHLDRQFKQERPLQALVTDLTYVRVGNRWAYVCLIIDLYNREIIGLSLGWHKTAELVKQAIQSIPYALTKVKMFHSDRGKEFDNQLIDEILEAFGITRSLSQAGCPYDNAVAESTYRAFKIEFVYQETFQSLEELALKTEKATLFCTTFIKCCLFRFLPML

SEQ ID NO: 6967 - protein, 3374 aa, Streptococcus agalactiae
TTGCGTAAAAAACAGAAACTACCATTTGATAAACTTGCCATTGCGCTTATGTCTACGAGCATCTTGCTCAATGCACAATCAGACATCAAAGCAAATACTGTGACAGAAGACACTCCTGCTACCGAACAAACCGTAGAAACTCCACAACCAACAGCGGTTTCTGAGGAAGCACCATCATCAAAGGAAACTAAAACCCCACAAACTCCTAGTGATGCAGGAGAAACAGTAGCAGATGACGCTAATGATCTAGCCCCTCAAGCTCCTGCTAAAACTGCTGATACACCAGCAACCTCAAAAGCGACTATTAGGGATTTGAACGACCCTTCTCAGGTCAAAACCCTGCAGGAAAAAGCAGGCAAGGGAGCTGGGACTGTTGTTGCAGTGATTGATGCTGGTTTTGATAAAAATCATGAAGCGTGGCGCTTAACAGACAAAGCCAAAGCACGTTACCAATCAAAAGAAGATCTTGAAAAAGCTAAAAAAGAGCACGGTATTACCTATGGCGAGTGGGTCAATGATAAGGTTGCTTACTACCATGACTATAGTAAAGATGGTAAAACCGCTGTCGATCAAGAGCACGGCACACACGTGTCAGGAATCTTGTCAGGAAATGCTCCATCTGAAACGAAAGAACCTTACCGCCTAGAAGGTGCGATGCCTGAGGCTCAATTGCTTTTGATGCGTGTCGAAATTGTAAATGGACTAGCAGACTATGCTCGTAACTACGCTCAAGCTATCAGAGATGCTATCAACTTGGGAGCTAAGGTGATTAATATGAGCTTTGGTAATGCTGCACTAGCTTACGCCAACCTTCCAGACGAAACCAAAAAAGCCTTTGACTATGCCAAATCAAAAGGTGTTAGCATTGTGACCTCAGCTGGTAATGATAGTAGCTTTGGGGGCAAGACCCGTCTACCTCTAGCAGATCATCCTGATTATGGGGTGGTTGGGACACCTGCAGCGGCAGACTCAACATTGACAGTTGCTTCTTACAGCCCAGATAAACAGCTCACTGAAACTGCTACGGTCAAAACAGCCGATCAGCAAGATAAAGAAATGCCTGTTCTTTCAACAAACCGTTTTGAGCCAAACAAGGCTTACGACTATGCTTATGCTAATCGAGGGACGAAAGAGGATGATTTTAAGGATGTCAAAGGTAAGATTGCCCTTATTGAACGTGGCGATATTGATTTCAAAGATAAGATTGCAAAAGCTAAAAAAGCTGGTGCTGTAGGAGTCTTGATCTATGACAATCAGGACAAGGGCTTCCCGATTGAATTGCCAAATGTTGATCAGATGCCTGCGGCCTTTATCAGTCGAAAAGATGGTCTCTTATTAAAAGACAATCCCCAAAAAACCATCACCTTCAATGCGACACCTAAGGTATTGCCAACAGCAAGTGGCACCAAACTAAGCCGCTTCTCAAGCTGGGGTCTGACAGCTGACGGTAATATTAAGCCAGATATTGCAGCACCCGGCCAAGATATTTTGTCATCAGTGGCTAACAACAAGTATGCCAAACTTTCTGGAACTAGTATGTCTGCGCCATTAGTAGCGGGTATCATGGGACTGTTGCAAAAGCAGTATGAGACACAGTATCCTGATATGACACCATCAGAGCGTCTTGATTTAGCTAAAAAAGTATTGATGAGCTCAGCAACTGCCTTATATGATGAAGATGAAAAAGCTTATTTTTCTCCTCGCCAACAAGGAGCAGGAGCAGTCGATGCTAAAAAAGCTTCAGCAGCAACGATGTATGTGACAGATAAGGATAATACCTCAAGCAAGGTTCACCTGAACAATGTTTCTGATAAATTTGAAGTAACAGTAACAGTTCACAACAAATCTGATAAACCTCAAGAGTTGTATTACCAAGCAACTGTTCAAACAGATAAAGTAGATGGAAAACACTTTGCCTTGGCTCCTAAAGCATTGTATGAGACATCATGGCAAAAAATCACAATTCCAGCCAATAGCAGCAAACAAGTCACCGTTCCAATCGATGCTAGTCGATTTAGCAAGGACTTGCTTGCCCAAATGAAAAATGGCTATTTCTTAGAAGGTTTTGTTCGTTTCAAACAAGATCCTAAAAAAGAAGAGCTTATGAGCATTCCATATATTGGTTTCCGAGGTGATTTTGGCAATCTGTCAGCCTTAGAAAAACCAATCTATGATAGCAAAGACGGTAGCAGCTACTATCATGAAGCAAATAGTGATGCCAAAGACCAATTAGATGGTGATGGATTACAGTTTTACGCTCTGAAAAATAACTTTACAGCACTTACCACAGAGTCTAACCCGTGGACGATTATTAAAGCTGTCAAAGAAGGGGTTGAAAACATAGAGGATATCGAATCTTCAGAGATCACAGAAACCATTTTTGCAGGTACTTTTGCAAAACAAGACGATGATAGCCACTACTATATCCACCGTCACGCTAATGGCAAGCCATATGCTGCGATCTCTCCAAATGGGGACGGTAACAGAGATTATGTCCAATTCCAAGGTACTTTCTTGCGTAATGCTAAAAACCTTGTGGCTGAAGTCTTGGACAAAGAAGGAAATGTTGTTTGGACAAGTGAGGTAACCGAGCAAGTTGTTAAAAACTACAACAATGACTTGGCAAGCACACTTGGTTCAACCCGTTTTGAAAAAACGCGTTGGGACGGTAAAGATAAAGACGGCAAAGTTGTTGCTAACGGAACCTACACCTATCGTGTCCGCTACACTCCGATTAGCTCAGGTGCAAAAGAACAACACACTGATTTTGATGTGATTGTAGACAATACGACACCTGAAGTCGCAACATCGGCAACATTCTCAACAGAAGATCGTCGTTTGACACTTGCATCTAAACCAAAAACCAGCCAACCGGTTTACCGTGAGCGTATTGCTTATACTTACATGGATGAGGATCTGCCAACAACAGAGTATATTTCTCCAAATGAAGATGGTACCTTTACTCTTCCTGAAGAGGCTGAAACAATGGAAGGCGCTACTGTTCCATTGAAAATGTCAGACTTTACTTATGTTGTTGAAGATATGGCTGGTAACATCACTTATACACCAGTGACTAAGCTATTGGAGGGCCACTCTAATAAGCCAGAACAAGACGGTTCAGATCAAGCACCAGACAAAAAACCAGAAGCTAAACCAGAACAAGACGGTTCAGGTCAAACACCAGATAAAAAAACAGAAACTAAACCAGAAAAAGATAGTTCAGTCAAACACCAGGTAAAACTCCTCAAAAAGGTCAACCTTCTCGTACTCTAGAGAAACGATCTTCTAAGCGTGCTTTAGCTACAAAAGCATCAACAAGAGATCAGTTACCAACGACTAATGACAAGGATACAAATCGTTNNNNNTTAATTAAT

SEQ ID NO: 6968 - protein, 1125 aa, Streptococcus agalactiae
  VARIANT 1121, 1122: Xaa = Any Amino Acid
MRKKQKLPFDKLAIALMSTSILLNAQSDIKANTVTEDTPATEQTVETPQPTAVSEEAPSSKETKTPQTPSDAGETVADDANDLAPQAPAKTADTPATSKATIRDLNDPSQVKTLQEKAGKGAGTVVAVIDAGFDKNHEAWRLTDKAKARYQSKEDLEKAKKEHGITYGEWVNDKVAYYHDYSKDGKTAVDQEHGTHVSGILSGNAPSETKEPYRLEGAMPEAQLLLMRVEIVNGLADYARNYAQAIRDAINLGAKVINMSFGNAALAYANLPDETKKAFDYAKSKGVSIVTSAGNDSSFGGKTRLPLADHPDYGVVGTPAAADSTLTVASYSPDKQLTETATVKTADQQDKEMPVLSTNRFEPNKAYDYAYANRGTKEDDFKDVKGKIALIERGDIDFKDKIAKAKKAGAVGVLIYDNQDKGFPIELPNVDQMPAAFISRKDGLLLKDNPQKTITFNATPKVLPTASGTKLSRFSSWGLTADGNIKPDIAAPGQDILSSVANNKYAKLSGTSMSAPLVAGIMGLLQKQYETQYPDMTPSERLDLAKKVLMSSATALYDEDEKAYFSPRQQGAGAVDAKKASAATMYVTDKDNTSSKVHLNNVSDKFEVTVTVHNKSDKPQELYYQATVQTDKVDGKHFALAPKALYETSWQKITIPANSSKQVTVPIDASRFSKDLLAQMKNGYFLEGFVRFKQDPKKEELMSIPYIGFRGDFGNLSALEKPIYDSKDGSSYYHEANSDAKDQLDGDGLQFYALKNNFTALTTESNPWTIIKAVKEGVENIEDIESSEITETIFAGTFAKQDDDSHYYIHRHANGKPYAAISPNGDGNRDYVQFQGTFLRNAKNLVAEVLDKEGNVVWTSEVTEQVVKNYNNDLASTLGSTRFEKTRWDGKDKDGKVVANGTYTYRVRYTPISSGAKEQHTDFDVIVDNTTPEVATSATFSTEDRRLTLASKPKTSQPVYRERIAYTYMDEDLPTTEYISPNEDGTFTLPEEAETMEGATVPLKMSDFTYVVEDMAGNITYTPVTKLLEGHSNKPEQDGSDQAPDKKPEAKPEQDGSGQTPDKKTETKPEKDSSGQTPGKTPQKGQPSRTLEKRSSKRALATKASTRDQLPTTNDKDTNRXXLIN

SEQ ID NO: 6969 - protein, 134 aa, Streptococcus agalactiae
TTGGAGAAAGATACAGTGAGTATAAAGAAGGTTCATTTAGTGCAGGGCGACTTTTTAAAAAGACAGATGAATTAGATAAATTTTCTAAGCCCCTTCTAAAAAGCAGAAAATGGAGTATACAGGATCAAAACAAA

SEQ ID NO: 6970 - protein, 47 aa, Streptococcus agalactiae
  VARIANT 35: Xaa = Any Amino Acid
MEKVYSEYKEGSFSAGRLFKKTDELDKFSKPLLKXGRKWSITGIKTK

SEQ ID NO: 6971 - protein, 956 aa, Streptococcus agalactiae
ATGATGCCTTATCGTCAAGTTTGCAAAGTAATAGATAGCACTTTGCAAACAATCATAACAAAAGACTGTGTTTTAAAAGCAGTAAAATTTGTAGAAAAATTGTTAAAAGAAAAAGAACGCTATCGTTTTTATTTGGAAGAGCCACCCGAACGTAAAAAAGTGAAAAAACTGTATGTTGAGGGTGATGGAGTCATGATTAAAAGCACAGATTCTAGAGAGGAAAGAAGGTATTTAGATTTAACACATTTTGTTATTCATACAGGCTCAAAAAAAGTTTCTACTAAAAGATATGAATTGCAGGACAAGCACGAAATATTACAGCTTAATTATGATAAAGCTAAATATAATCTTTTAGATTATATTTATAATAACTATGAAGTAGATGACGATACTATTTTAATCACTAACTCTGATATGGGTAAAGGCTATACTAGTAGAGTTTTTAAGGAATTAGGAAAAGCACTTAAGGTAAAGAAACATGAGCATTTTTGGGATATCTATCATGTTAAAGAAAAGTTAAGTTCATACCTTAGAAAATATCCAATTGAATTAACCGATTTTGCTTTAGATGCGGTAAAAAAATATAATTCTGATAAGCTTGAATTAGTTTTTGATACTGTTGAATCACTGATTTGTGATGAACTTGAAGATCAAGAATTTCAGAAGTTTAAGAAAAAAGTATTAAATAATTTCAAATATATAAAACCAGCTCATCTTAGAAATCTTTCAAATCGTGGTATTGGTATCATGGAATCACAACACAGAAAGATAACGTATAGAATGAAGCGACGTGGCATGTATTGGTCAAAGTGGGGAATCTCCACAATGGCAAATATGATTATATTTGAAAGAGCTAACGGTTTACGAGAATTATTTTTCGGTTCTTGGAGAAAGATACAGTGAGTATAAAGAAGGTTCATTTAGTGCAGGGCGACTTTTTAAAAAGACAGATGAAT

SEQ ID NO: 6972 - protein, 319 aa, Streptococcus agalactiae
MMPYRQVCKVIDSTLQTIITKDCVLKAVKFVEKLLKEKERYRFYLEEPPERKKVKKLYVEGDGVMIKSTDSREERRYLDLTHFVIHTGSKKVSTKRYELQDKHEILQLNYDKAKYNLLDYIYNNYEVDDDTILITNSDMGKGYTSRVFKELGKALKVKKHEHFWDIYHVKEKLSSYLRKYPIELTDFALDAVKKYNSDKLELVFDTVESLICDELEDQEFQKFKKKVLNNFKYIKPAHLRNLSNRGIGIMESQHRKITYRMKRRGMYWSKWGISTMANMIIFERANGLRELFFGSWRKYTVSIKKVHLVQGDFLKRQMN

SEQ ID NO: 6973 - protein, 288 aa, Streptococcus agalactiae
ATGTCTAGAAAAGTACGTCGTCACTTCACCGATGATTTTAAGCAACAAATTGTTGACCTTTACAATGTTGGTAGAAAGCGTAGCAGTCTCATCAAGGAATATGAGCTAACCCCTTCCACCTTCGATAAGTGGGTTAGACAAGCCAAAACAACTGGTTCATTCAAGTCTGTTGATAATCTGACAGATGAACAGCGGGAGCTAATTGAACTCAGAAAACACAATAAAGAACTCGAAATGCAATTAGATATCCTAAAGCAAGCAGCGGTGATTATGGCACAAAAAGGGAAA

SEQ ID NO: 6974 - protein, 96 aa, Streptococcus agalactiae
MSRKVRRHFTDDFKQQIVDLYNVGRKRSSLIKEYELTPSTFDKWVRQAKTTGSFKSVDNLTDEQRELIELRKHNKELEMQLDILKQAAVIMAQKGK

SEQ ID NO: 6975 - protein, 741 aa, Streptococcus agalactiae
ATGCCACGCTCAAGTTATTACTATCAAGCCGTGGAGTCAGTATCTGAAACGGAGTTTGAAGAAACTATTAAAAGAATTTTTCTCGATAGCGAGTCTAGATACGGATCCAGAAAAATCAAAATATGCTTGAATAACGAAGGTATCACACTTTCACGTCGTCGGATTCGACGCATTATGAAGCGACTCAATTTGGTTTCTGTTTATCAGAAAGCCACCTTCAAACCACATTCTAGAGGCAAGAATGAAGCCCCTATTCCCAACCACTTAGACAGGCAATTTAAGCAAGAAAGACCACTACAAGCCTTAGTCACTGACTTAACCTATGTTCGTGTAGGCAATCGTTGGGCTTATGTTTGCCTCATCATTGACCTATACAACCGTGAAATCATCGGCCTGTCTCTTGGTTGGCACAAGACCGCTGAACTCGTTAAGCAAGCCATACAAAGCATCCCTTACGCCCTGACCAAAGTCAAGATGTTCCATTCAGATCGTGGCAAAGAGTTTGATAATCAGTTAATTGATGAAATATTGGAAGCCTTTGGAATCACACGTTCGCTTAGTCAGGCTGGTTGTCCTTATGACAATGCCGTAGCTGAAAGTACGTATCGTGCTTTCAAAATTGAATTTGTTTATCAAGAAACCTTTCAATCGCTGGAAGAACTAGCTCTTAAGACTGAAAAGGCAACACTTTTCTGTACAACATTTATAAAGTGTTGCCTTTTCAGGTTTTTACCAATGCTA

SEQ ID NO: 6976 - protein, 247 aa, Streptococcus agalactiae
MPRSSYYYQAVESVSETEFEETIKRIFLDSESRYGSRKIKICLNNEGITLSRRRIRRIMKRLNLVSVYQKATFKPHSRGKNEAPIPNHLDRQFKQERPLQALVTDLTYVRVGNRWAYVCLIIDLYNREIIGLSLGWHKTAELVKQAIQSIPYALTKVKMFHSDRGKEFDNQLIDEILEAFGITRSLSQAGCPYDNAVAESTYRAFKIEFVYQETFQSLEELALKTEKATLFCTTFIKCCLFRFLPML

SEQ ID NO: 6977 - protein, 1812 aa, Streptococcus agalactiae
ATGAGTTTTTTTGAAAAATTATTTAGCAAGTTTAATAAAAAGACAACTAGTGATATTGTTCAATTCAATAATAATTCTCATATTAATCCATTTGGTTTTGTAGATTCCCAACAAATGGATATTAATGACAATAATATAAACTTTATAAAAAATAGATTTATTGCTTTTGATATAGAAACGACAGGTTTAAACTCACAGCAAGATAGAATTGTTGAAGTAGGTGCAGTTCTTTTTGAAAATGGTAAAGTCGTTGATTCATATGAATCATTAGTAAATGCTAAAGTTAACATTTCAGCAGATGTAACTCGAATTAATAACATTACAAATCGTATGATTAAGAATGCTCCATCTGAAAATCAAGTATATTATGAATTAGTAAATTTTTTGGGTGATGCATTAAATGGTAAAACACCGGTTTGTGCACATAATGCTAAATTTGATATGGGATTTTTATGTAATACACTAAGTAGACTTGGATATAATGGAGAAATTAAGTATTTGGATACTCTATCCCTTTCAAGAAAAAATGTAAAAGGGTTGAGGAATTATAAACAAAATACAGTTGCTGAATATTTTAATCTACAGAATAAAAATTCTCATAGAGCTAAAAGTGATGCAATCATTTGTGGTAATATATTAACAAAATTATTTTTTATTATTGAAAACCAAAAATCAAGAAAAAGTTTTTCTTCTAAAAACAACAAAATTTCTCCAGAGGAACTTGAGGTTTGTGCAGTTATACAAAATATTATTTTTGAAAGAAAAGGTGATACTGATTTAGTGGGATATTATAAAAATAGTAGTGGTTATATTGATGTGTACTATTTATACAAGATTGTAAGGTTTAAATTTACTAAAAAAGGTAAGTATATTATCGTACCTAGAGATTTGAAAGGTTCTGAAAATTTTATTCTAGAGTCTTGTACTTTATCAGAAGGTGGTCATGATTTTGTTAGACTATACTTTAATTCTCCACTTGAAGTGAAAGAAATTTCTAGTTATATTTTTGAAGAATATATAAATACTAAAAGATCTGCAACTGAGTATTTAAATTATAATAAAAACTATGTTGATGAATATAAGGCAAGTCCTCTTATGGAAAATGTACTTTCAAACACTGATGTAAAAAATATTTTAGTTAGTATAAATAATAAAGTTTATAACTCACAAAATAATATTATTGAGAAAGATCTTATTGACAGAAAAGATATAAAAATTAATCCTGTTAATAATCGAATTCCTGTTTCAGAAATACAAAATTTGACTAATTGGCATAAAGGATTTGATTTGGGTTTTCCATTCTGGGAAGAAGGGGAAAAATATAGAAAAGAAGGAAATTTAAAACGATCAATTTTGTTATATGATTTAGCTAGATCTAATGGCTATTGTTCGCCCGCACTTTTTGAGTCATATGCAATGGCTTTTCATAGATTAAAAGACTATGAAAATGAAATTGATATCTTAGATGAAGGAATAGAGCGTGAGGGCAATTTAGGTAGATTAATTACACGTAGAAATAATGCGATGAAAATGTTAATCAAATCAAGAAACGAACAAAAGAAAATAAAAGAAAATGAAAGTGCTGAAAACATCCTTTTTAGTGAAATAGAGATTTTAAAAAGAAAAAAAACTAGAAAAAATGCACGTCCAGTCTTGAAAATGGACGATGAAATGAATATATTAGAACATTTTGAGTCTATTTCAGATGCAGTAAAAAAAACAGGAATTAATTCAAAAAGTATACGTGATGCTTCAAAAGGTATTCAAAAGCATGCAGGTGGTTTTGTCTGGAGATACGAGGACGAATATAAG

SEQ ID NO: 6978 - protein, 604 aa, Streptococcus agalactiae
MSFFEKLFSKFNKKTTSDIVQFNNNSHINPFGFVDSQQMDINDNNINFIKNRFIAFDIETTGLNSQQDRIVEVGAVLFENGKVVDSYESLVNAKVNISADVTRINNITNRMIKNAPSENQVYYELVNFLGDALNGKTPVCAHNAKFDMGFLCNTLSRLGYNGEIKYLDTLSLSRKNVKGLRNYKQNTVAEYFNLQNKNSHRAKSDAIICGNILTKLFFIIENQKSRKSFSSKNNKISPEELEVCAVIQNIIFERKGDTDLVGYYKNSSGYIDVYYLYKIVRFKFTKKGKYIIVPRDLKGSENFILESCTLSEGGHDFVRLYFNSPLEVKEISSYIFEEYINTKRSATEYLNYNKNYVDEYKASPLMENVLSNTDVKNILVSINNKVYNSQNNIIEKDLIDRKDIKINPVNNRIPVSEIQNLTNWHKGFDLGFPFWEEGEKYRKEGNLKRSILLYDLARSNGYCSPALFESYAMAFHRLKDYENEIDILDEGIEREGNLGRLITRRNNAMKMLIKSRNEQKKIKENESAENILFSEIEILKRKKTRKNARPVLKMDDEMNILEHFESISDAVKKTGINSKSIRDASKGIQKHAGGFVWRYEDEYK

SEQ ID NO: 6979 - protein, 1230 aa, Streptococcus agalactiae
ATGGTAAACCAATTAATAATTTTAGGAAATGGATTTGATAGAGCTTCGGATTTAAAGTCAGGATATATGGATTTTTTCAATTTTAGATTAAAGATCAGACAGTACTAGTAGTTTTTGGTATTATATTTTGAGATCATGTTATAATAAAAAATGGTCTAGCGATTTATGGAGTGATATTGAGAAATTAATTTCAGTACATCTAAAAAACATTATAACACTATATAATAACGAAACAATTTTAAGTGGCAAAGATATTGAGAGTATATATATCGAAACATTAAGCACTGATTACTCAAGAAATGATTACTCTACCAGTGAGGAGCTAACGCAAAAAGCACTCCATAATTTTTTGTGGAATCATAATGGTATACCTATTGTTCCAGAACTAGATAATTTATTATTACTAATTCAAAAAGATTTAAAAATAGTCGAAGATGAGTTTTGTTCTTATTTAACTAATCAAATAGAGATCCAGGAACAATCAAAAGATGATTATTTTAAAGATATAACTAATTTGGGAAATAATTACTTATTAAAATCTCGAATTATTTTTGAACTCTTGTATAAAAGTAATATTTCTAGTGCATTCACATGTAATTCTTTTGTTGCACTACATGATTTTCATAACGAAAATTGTTTCAATTCCTATGAAGGATTTCTTAGCTACATTTATGACTTAGAAAGTAATAATGAATTTAATGTTGAAACATCAATATTGAATTTTAATTATACATTACCTAGAATAGATAAATTACAACGTAATATTCATGGAACCCTGAATGATAAAAATATTATTTTTGGAATAGATTATGATTCTTTAATTGATATACAAAAAGATAAAAATGTTACCCTGCCTGTTGAATTTACCAAATCATACAGGATATTACAGAACGGAAATATATTTCAATATCCAATTCCCTCTGAATTAACTTTTATAAAATTTTATGGTCATGGTCTGGGTGAAGCAGACTATTCTTATTTTCAATCAATTTTTGACTCAATTAATCTTTATCCAGTGACACTGTACTAATTTTCTATTGGAGTTGTTATAACGAGAATATTAGGGAACAAATTAAATCTCAACAAGTTCATGCAGTACATAAATTAATTGAAAAATATGGAGATACTTTTAATAATAAGAATCATGGCAGAAATTTATTCACAAAACTTCAATTAGAAAATCGTTTAATTATTCAAGAAATACTTTATAATGATATTCTAAATCCATAT

SEQ ID NO: 6980 - protein, 411 aa, Streptococcus agalactiae
MVNQLIILGNGFDRASDLKSGYMDFFNFRFKDSDSTSSFWYYILRSCYNKKWSSDLWSDIEKLISVHLKNIITLYNNETILSGKDIESIYIETLSTDYSRNDYSTSEELTQKALHNFLWNHNGIPIVPELDNLLLLIQKDLKIVEDEFCSYLTNQIEIQEQSKDDYFKDITNLGNNYLLKSRIIFELLYKSNISSAFTCNSFVALHDFHNENCFNSYEGFLSYIYDLESNNEFNVETSILNFNYTLPRIDKLQRNIHGTLNDKNIIFGIDYDSLIDIQKDKNVTLPVEFTKSYRILQNGNIFQYPIPSELTFIKFYGHGLGEADYSYFQSIFDSINLYSSDTVLIFYWSCYNENIREQIKSQQVHAVHKLIEKYGDTFNNKNHGRNLFTKLQLENRLIIQEILYNDILNPY

SEQ ID NO: 6981 - protein, 362 aa, Streptococcus agalactiae
ATGGCATTAAACATTGAAAATATTATTGCTGAAATTAAAGAAGCTACAATTCTTGAACTTAACGATCTTGTAAAAGCTATCGAAGAAGAATTTGGTGTAACTGCTGCTGCTCCTGTAGCTGCTGCCGCTGCTAGTGGTGAAGCTGCTGCTGCTAAAGACTCATTTGACGTTGAATTAACAGCTGCTGGAGACAAAAAGTTGGCGTTATCAAAGTTGTTCGTGAAATCACAGGCGAAGGTCTTAAAGAAGCTAAAGCTATTGTTGACAACGCACCATCAGTTATTAAAGAAGGTGCTTCAGAAGCAGAAGCTAACGAAATCAAAGAAAAACTTGAAGCTGCAGGTGCTTCAGTTACTCTTAAA

SEQ ID NO: 6982 - protein, 121 aa, Streptococcus agalactiae
MALNIENIIAEIKEATILELNDLVKAIEEEFGVTAAAPVAAAAASGEAAAAKDSFDVELTAAGDKKVGVIKVVREITGEGLKEAKAIVDNAPSVIKEGASEAEANEIKEKLEAAGASVTLK

SEQ ID NO: 6983 - protein, 498 aa, Streptococcus agalactiae
ATGAGTGAAGCAATTATTGCAAAAAAAGCTGAACAAGTTGAACTTATTGCTGAGAAAATGAAAGCAGCAGCAAGTATCGTTGTTGTTGATTCACGTGGTCTTACTGTTGAGCAAGATACTAATTTACGTCGTTCACTTCGTGAAAGCGATGTTGAGTTTAAAGTTATCAAAAACTCAATTTTAATTCGTGCAGCTGAAAAAGCAGGTCTTGAAGACCTTAAAGAACTTTTTGTTGGTCCATCAGCAGTTGCGTTTTCTAACGAAGATGTTATTGCACCAGCTAAAGTTATTAGCGATTTCGCTAAAGATGCAGAAGCTCTTGAAATCAAAGGTGGTTCAGTAGACGGTAAATTCACTTCAGTTGAAGAAATTAACGCTCTTGCTAAATTACCAAACAAAGAAGGTATGCTTTCAATGCTCCTTTCAGTACTTCAAGCGCCAGTACGCAACGTTGCATATGCTGTCAAAGCAGTTGCAGAAAAAGACGAAGAAGTGGCA

SEQ ID NO: 6984 - protein, 166 aa, Streptococcus agalactiae
MSEAIIAKKAEQVELIAEKMKAAASIVVVDSRGLTVEQDTNLRRSLRESDVEFKVIKNSILIRAAEKAGLEDLKELFVGPSAVAFSNEDVIAPAKVISDFAKDAEALEIKGGSVDGKFTSVEEINALAKLPNKEGMLSMLLSVLQAPVRNVAYAVKAVAEKDEEVA

SEQ ID NO: 6985 - protein, 465 aa, Streptococcus agalactiae
ATGGCAAATAATAATTTTTATAATCGTGACCCTTTTGGAAATATGGATGATATTTTTAATTCTCTAATGGGAAATATGGGGGGCTATAATAGTGAGAATAAACGATACTTAATCAATGGACGGGAAGTTACTCCTGAAGAATTCAGTCAATATCGTCAAACTGGAAAACTCCCCGGTCAAGAGCTAAATAACCAAAATACTCCTACAAACCAAGTCTCTGCAGATAGTGTTTTGACTAAATTAGGAACTAATTTAACCGATCAAGCACGTCAGCATTTGCTAGATCCAGTTATTGGACGAAACAAAGAAATTCAGGAAACTGCAGAAATTCTAGCTCGTCGTACTAAAAATAATCCTGTCTAGGGTGATGCAGGGTGTGGTAAAACAGCTGTTATTGAAGGTTTGGGCACAGCAATTATAAATGGTGATGTCCCTGCTGCTATCAAAAATAAGAAATCATTTCGA

SEQ ID NO: 6986 - protein, 156 aa, Streptococcus agalactiae
  VARIANT 120, 122: Xaa = Any Amino Acid
MANNNFYNRDPFGNMDDIFNSLMGNMGGYNSENKRYLINGREVTPEEFSQYRQTGKLPGQELNNQNTPTNQVSADSVLTKLGTNLTDQARQHLLDPVIGRNKEIQETAEILARRTKNNPXLXGDAGCGKTAVIEGLGTAIINGDVPAAIKNKKSFR

SEQ ID NO: 6987 - protein, 177 aa, Streptococcus agalactiae
TTGTTTAATGAAAAACATGGTAAGTTTTATGTTTATACACCAGCATCTTCACGTGTGATTGGAAATGGAAAAATGGTAACTGTTGAAAAACCGTTATTGTTTATTGACAATACAATTAATGGTAGAAATATTGAACCTGCAAAAAATGTATGGGCTGAAAAGCTTATTGAAGTGAAA

SEQ ID NO: 6988 - protein, 59 aa, Streptococcus agalactiae
MFNEKHGKFYVYTPASSRVIGNGKMVTVEKPLLFIDNTINGRNIEPAKNVWAEKLIEVK

SEQ ID NO: 6989 - protein, 168 aa, Streptococcus agalactiae
ATGGCAAAAATTGGTTTAAACTTTGGAGAAAAATTACAAATTGCAGATAAGGAATATCGTACCTTTAATGATGGATTGGATGTAAATGTTTTGTTAGGAGATTTAACTTGGAGACGATATGAAGAACCAGTTCAATTTACGGAAGATAAAAAGGAATTGACCTTGTGG

SEQ ID NO: 6990 - protein, 56 aa, Streptococcus agalactiae
MAKIGLNFGEKLQIADKEYRTFNDGLDVNVLLGDLTWRRYEEPVQFTEDKKELTLW

SEQ ID NO: 6991 - protein, 189 aa, Streptococcus agalactiae
GTGGTAGATGAAAATGTTAAATCACACTTAATTGACCTGGGTTATGACGAAGCAATGGGAGTACGTCCATTGCGCCGTGTCATCGAGCAAGAAATTCGAGATCGCATCACAGACTACTATCTCGATCATACAGATGTTAAACACCTAAAAGCTAATTTGCAAGATGGCCAAATCGTCATTTCTGAAAGA

SEQ ID NO: 6992 - protein, 63 aa, Streptococcus agalactiae
MVDENVKSHLIDLGYDEAMGVRPLRRVIEQEIRDRITDYYLDHTDVKHLKANLQDGQIVISER

SEQ ID NO: 6993 - protein, 1672 aa, Streptococcus agalactiae
ATGTCCCTGCTGCTATCAAATAAAGAATCATTTCGATAGATATCTCTAGCCTTGAAGCTGGCACCCAATATAGGGGTAGTTTGAAGAAAATATTCAAAATATCATAAAAGAAGTTAAGGAAACAGGAAATATTATTCTCTTCTTTGATGAAATACACCAAATATTAGGAGCCGGTTCAACTGGTGGTGATAGTGGCTCTAAGGGGCTCGCAGATATACTTAAGCCTGCACTTTCACGTGGTGAATTAACGGTTATAGGTGCAACTACTCAAGATGAATATCGTAACACCATTCTCAAGAATGCTGCCTTAGCACGCCGCTTTAACGAAGTTAAAGTCAATGCACCTTCTGCACAAGATACTTTCAATATCCTTATGGGGATAAGAAACCTCTATGAGCAACATCATAATGTTGTTTTACCTGACTCTGTTTTGAAAGCAGCTGTAGATTTATCTATTCAATACATACCACAAAGAAGTCTCCCTGATAAAGCAATTGACCTTATTGATATGACTGCTGCACACCTAGCTGCGCAACATCCCGTAACTGACCTTAAATCCTTAGAAAAAGAAATCGCTGCGCAAAGAGACAAGCAAGAAAAAGCTGTCAATACTGAAGATTTTGAAGAAGCTCTTAAGGTCAAGACACGCATTGAAGAGTTACAAAACCAGATTGATAATCATACCGAAGGACAAAAAGTCACTGCAACTATCAATGATATCGCTATGTCAATTGAGCGTCTAACTGGAGTTCCTGTATCAAATATGGGTGCTAGTGATATTGAACGCTTAAAAGAACTTGGCAATCGTCTAAAAGGTAAAGTCATTGGTCAAAATGATGCTGTTGAGGCAGTTGCAAGAGCTATTCGCCGAAATCGTGCTGGTTTCGATGATGGTAATCGTCCGATTGGTAGCTTTCTATTTGTTGGACCAACTGGAGTTGGTAAAACTGAGCTAGCAAAGCAATTAGCTTTTGATATGTTCGGATCAAAGGATGCTATCGTTAGACTTGATATGTCTGAATATAATGATCGTACTGCAGTTTCTAAGCTAATTGGAGCGACTGCTGGTTACGTTGGTTATGACGACAATAGTAATACACTAACAGAACGTATCCGTCGAAATCCTTATTCTATTGTTCTTCTTGATGAAATCGAAAAAGCTGACCCGCAAGTTATCACGCTTCTCCTTCAAGTTCTAGATGATGGTCGTTTAACTGATGGTCAAGGAAACACTATTAACTTTAAAAATACTGTTATCATTGCAACCTCAAATGCAGGTTTTGGAAACGAAGCATTTACAGGTGACAGCGATAAAGACTTGAAAATTATGGAACGAATTTCTCCATATTTCCGTCCAGAATTTCTAAATCGTTTCAATGGTGTTATTGAATTCTCTCACCTAAGCAAAGATGACTTAAACGAAATTGTAGATTTGATGCTTGATGAAGTTAACCAAACAATTGGCAAAAAAGGAATTGACCTTGTGGTAGATGAAAATGTTAAATCACACTTAATTGACCTGGGTTATGACGAAGCAATGGGAGTACGTCCATTGCGCCGTGTCATCGAGCAAGAAATTCGAGATCGCATCACAGACTACTATCTCGATCATACAGATGTTAAACACCTAAAAGCTAATTTGCAAGATGGCCAAATCGTCATTTCTGAAAGA

SEQ ID NO: 6994 - protein, 558 aa, Streptococcus agalactiae
MSLLLSNKEIISIDISSLEAGTQYRGSFEENIQNIIKEVKETGNIILFFDEIHQILGAGSTGGDSGSKGLADILKPALSRGELTVIGATTQDEYRNTILKNAALARRFNEVKVNAPSAQDTFNILMGIRNLYEQHHNVVLPDSVLKAAVDLSIQYIPQRSLPDKAIDLIDMTAAHLAAQHPVTDLKSLEKEIAAQRDKQEKAVNTEDFEEALKVKTRIEELQNQIDNHTEGQKVTATINDIAMSIERLTGVPVSNMGASDIERLKELGNRLKGKVIGQNDAVEAVARAIRRNRAGFDDGNRPIGSFLFVGPTGVGKTELAKQLAFDMFGSKDAIVRLDMSEYNDRTAVSKLIGATAGYVGYDDNSNTLTERIRRNPYSIVLLDEIEKADPQVITLLLQVLDDGRLTDGQGNTINFKNTVIIATSNAGFGNEAFTGDSDKDLKIMERISPYFRPEFLNRFNGVIEFSHLSKDDLNEIVDLMLDEVNQTIGKKGIDLVVDENVKSHLIDLGYDEAMGVRPLRRVIEQEIRDRITDYYLDHTDVKHLKANLQDGQIVISER

SEQ ID NO: 6995 - protein, 1053 aa, Streptococcus agalactiae
TTGTGGGGATTGCTTGGGATAGCTCACAACGTGCTGGGCTTTACTTCGGTGTTCCATTTATTATTTTATGTTATATTTATCACAAACTACGTTACAAGACATGGTGATCTTATGGGAAGATTTAAAGAACTTTTAGAGAGTAAAAAAGCTCTCATCCTACACGGTGCCTTGGGGACCGAGCTTGAGAGTAGAGGTTGTGATGTTTCTGGTAAACTTTGGTCAGACAAATATCTGATTGAGGATCCAGCAGCTATTCAGACCATTCATGAAGATTATATTCGTGCTGGCGCTGATATTGTGACGACATCAACTTATCAGGCGACTTTACAAGGGCTAGCTCAAGTTGGTGTCTCTGAAAGTCAGGCAGAAGACTTGATTCGCTTGACTGTTCAGTTGGCAAAAGCTGTGCGTGAGCAAGTTTGGAAAAGTTTGACAAAAGAAGAAAAATCAGAAAGAATCTATCCTTTGATTTCTGGGGATGTTGGTCCCTACGCTGCCTTTTTGGCGGACGGTTCTGAGTACACAGGGCTCTACGATATTTATAAGGAAGGTCTCAAAAATTTCCATCGCCATCGTATTGAGCTTCTTTTAGATGAGGGTGTTGACCTTCTGGCACTTGAAACCATTCCAAATGCTCAGGAGGCTGAGGCTCTTATTGAGCTACTTGTCGAGGATTTCCCTCAGGTTGAGGCTTATATGTCATTCACCTCTCAAGATGGTAAGACCATCTCAGATGGTAGTGCTGTTGCAGGCTTGGCGAAAGCTATTGATGTTAGCCCACAGGTCGTGGCGCTGGGCATTAACTGTTCAAGTCCATCGTTAGTTGCTGATTTCTTGCAAGCAATAGCAGAGCAGACGGACAAGCCTCTTGTGACCTATCCAAACTCTGGAGAGATTTATGATGGGGCAAGCCAATCTTGGCAATCTAGCCGAGATCATTCACACACCCTACTTGAAAATACAAGTGACTGGCAAAAACTTGGCGCCCAAGTTGTCGGAGGTTGTTGCCGAACTAGACCAGCTGATATTGCTGACCTCTCAGAACATTTGACA

SEQ ID NO: 6996 - protein, 351 aa, Streptococcus agalactiae
MWGLLGIAHNVLGFTSVFHLLFYVIFITNYVTRHGDLMGRFKELLESKKALILHGALGTELESRGCDVSGKLWSDKYLIEDPAAIQTIHEDYIRAGADIVTTSTYQATLQGLAQVGVSESQAEDLIRLTVQLAKAVREQVWKSLTKEEKSERIYPLISGDVGPYAAFLADGSEYTGLYDIYKEGLKNFHRHRIELLLDEGVDLLALETIPNAQEAEALIELLVEDFPQVEAYMSFTSQDGKTISDGSAVAGLAKAIDVSPQVVALGINCSSPSLVADFLQAIAEQTDKPLVTYPNSGEIYDGASQSWQSSRDHSHTLLENTSDWQKLGAQVVGGCCRTRPADIADLSEHLT

SEQ ID NO: 6997 - protein, 1374 aa, Streptococcus agalactiae
ATGGAAAATCATCGTTATGAAGATGAAGGTAAATTCCAGCGTAAGATGACCAGTCGTCATCTCTTTATGTTATCTCTAGGTGGTGTTATCGGGACTGGGCTTTTCTTGAGTTCAGGTTATACCATTGCACAGGCTGGTCCGCTTGGAGCTGTGCTGTCTTATTTGATTGGTGCCGTTGTGGTTTATTTGGTCATGCTATCACTTGGTGAATTGGCAGTTGCCATGCCGGTGACGGGGTCATTCCACACTTATGCCACTAAGTTTATCAGTCCTGGCACAGGTTTTACTGTTGCCTGGCTATATTGGATTTGTTGGACGGTCGCCTTGGGAACTGAATTTTTAGGTGCTGCCATGCTCATGCAGCGCTGGTTCCCAGATGTGCCGGCTTGGGCATTTGCTTCTTTCTTTGCCCTTGTGATTTTTGGCTTAAATGCTCTCAGTGTGCGCTTTTTTGCAGAAGCAGAGTCTTTCTTCTCAAGTATTAAGGTTATTGCTATCATTATCTTTATTATCTTGGGCTTAGGTGCTATGTTTGGTCTAGTTTCCTTTGAAGGTCAGCACAAAGCTATTCTTTTCACTCATCTGACTGCCAATGGTGACTTTCCAAATGGTATCGTTGCAGTTGTCTCAGTCATGTTGGCTGTTAACTATGCCTTCTCTGGTACTGAGTTGATTGGTATTGCGGCAGGTGAAACGGATAATCCAAAAGAAGCTGTGCCAAGGGCTATTAAAACGACAATCGGTCGCTTGGTTGTTTTCTTTGTACTGACAATTGTTGTCCTAGCTTCGCTATTGCCAATGAAAGAGGCAGGCGTATCCACAGCACCATTCGTTGATGTCTTTGACAAGATGGGAGTCCCTTTTGCGGCGGATATCATGAACTTTGTTATCTTGACAGCCATCCTGTCTGCTGGTAACTCAGGTCTCTACGCATCAAGCCGTATGCTCTGGTCCCTTGCCAATGAAGGTATGTTGTCAAAATCTGTCGTGAAAATCAATAAACACGGTGTCCCAATGCGTGCTCTTCTCTTGTCAATGGCAGGAGCAGTGCTGTCGCTCTTTTCAAGTATTTACGCTGCAGACACAGTTTATCTAGCCTTGGTTTCAATCGCGGGCTTTGCTGTTGTTGTCGTATGGCTAGCCATTCCGGTCGCACAAATCAATTTCCGCAAGGAATTCTTGAAAGAGAATCGACTAGAAGATTTGTCTTACAAAACACCCTTTACACCAGTTCTCCCTTATATCACAATCGTTTTGCTTTTGATTTCGATTGTGGGGATTGCTTGGGATAGCTCACAACGTGCTGGGCTTTACTTCGGTGTTCCATTTATTATTTTATGTTATATTTATCACAAACTACGTTACAAGACATGG

SEQ ID NO: 6998 - protein, 458 aa, Streptococcus agalactiae
MENHRYEDEGKFQRKMTSRHLFMLSLGGVIGTGLFLSSGYTIAQAGPLGAVLSYLIGAVVVYLVMLSLGELAVAMPVTGSFHTYATKFISPGTGFTVAWLYWICWTVALGTEFLGAAMLMQRWFPDVPAWAFASFFALVIFGLNALSVRFFAEAESFFSSIKVIAIIIFIILGLGAMFGLVSFEGQHKAILFTHLTANGDFPNGIVAVVSVMLAVNYAFSGTELIGIAAGETDNPKEAVPRAIKTTIGRLVVFFVLTIVVLASLLPMKEAGVSTAPFVDVFDKMGVPFAADIMNFVILTAILSAGNSGLYASSRMLWSLANEGMLSKSVVKINKHGVPMRALLLSMAGAVLSLFSSIYAADTVYLALVSIAGFAVVVVWLAIPVAQINFRKEFLKENRLEDLSYKTPFTPVLPYITIVLLLISIVGIAWDSSQRAGLYFGVPFIILCYIYHKLRYKTW

SEQ ID NO: 6999 - protein, 648 aa, Streptococcus agalactiae
ATGTCATATTTTAGAAATTACTGGTATCGTTTTGGAGCAATTTTATTTATTATTTTAGCAGTAATATTGCTTGTTTTTAGACCTGACTGGTCAATGCTTCACTATCTATTGTATTTTAACTTTATGGCACTTCTAGCGCATCAATTTGAAGAATATCAGTTTCCCGGTGGGGCATCACCTATCATTAACTATGTTGTTTATGATGAAGAAGAGCTGATGGATCGTTTTCCAGGCAATACTCAGTCTATTATGTTGGTTAATACTATTGCTTGGTTGCTTTACATTGCTAGTATTGCTTTTCCTCAAGCTTATTGGCTTGGATTAGGAGTCATGTTCTTTAGTCTAACGCAGCTCTTGGGTCATGGTTTTCAGATGAATATTAAACTTAAAACTTGGTATAATCCTGGTCTAGCAACGACAGTATTTCTCCTAGTACCAATAGCTTGCGCATACATCTATCAAGCTAGTGCAGAAGGAATGCTCACTTGGGGAGATTGGCTAGGTGGTTTTATCATGTTGATTGTCTGTGTACTAACTAGTATTATTGCACCTGTACAGCTATTGAAGGATAAGAAGACCAATTATATTATTAGTCCTTGGCAAATGGACCGTTTTCATAAGGTCATTAATTTTGTAAGGATAAAAAAA

SEQ ID NO: 7000 - protein, 216 aa, Streptococcus agalactiae
MSYFRNYWYRFGAILFIILAVILLVFRPDWSMLHYLLYFNFMALLAHQFEEYQFPGGASPIINYVVYDEEELMDRFPGNTQSIMLVNTIAWLLYIASIAFPQAYWLGLGVMFFSLTQLLGHGFQMNIKLKTWYNPGLATTVFLLVPIACAYIYQASAEGMLTWGDWLGGFIMLIVCVLTSIIAPVQLLKDKKTNYIISPWQMDRFHKVINFVRIKK

SEQ ID NO: 7001 - protein, 321 aa, Streptococcus agalactiae
ATGCTAGTTGAACTTAAATCGGTTGAAACTGATACTAGTAAGTGGGACTTAAACCATCTATCAGCCTTTTTCGGGAATCAGTGGTTTGCAGTGATTGTTTATCTTTTGCCGATTTTTTGTCCCAATATACCATTTTTAACACTTGCAGTCATGATTTTTGCATTTGCAGAACTTGCCATGCATCTTTTCTTTTTTAATCTTTCCTTGAAGAAGTGGTATAATCCAGGACTTCTTACGACCTTAGTAGGTCTTGTCCCTGTTTCTGTCTATTATTTAGCTCATGATTGGAAGTTGTATTCTGGACTTGATTGGTTTTTAGGC

SEQ ID NO: 7002 - protein, 107 aa, Streptococcus agalactiae
MLVELKSVETDTSKWDLNHLSAFFGNQWFAVIVYLLPIFCPNIPFLTLAVMIFAFAELAMHLFFFNLSLKKWYNPGLLTTLVGLVPVSVYYLAHDWKLYSGLDWFLG

SEQ ID NO: 7003 - protein, 162 aa, Streptococcus agalactiae
ATGGTATCAAATGTTACAAATCTTGGAGGTCATCTTATGAAAACATTGATAACAAAATGGTACCTCTTTTGTCCCTATCTTGCCTCTCTTTTTGCCTTAGCATTATTTTTTGGAAATTGGGATTTACGAGTGCAGTCACTACTTATATCGGGACTTTTTATT

SEQ ID NO: 7004 - protein, 54 aa, Streptococcus agalactiae
MVSNVTNLGGHLMKTLITKWYLFCPYLASLFALALFFGNWDLRVQSLLISGLFI

SEQ ID NO: 7005 - protein, 627 aa, Streptococcus agalactiae
ATGACTGAAAGTGTGACAGTTAATAAAAAGAGAATAAAACAAATCACTCAAACACAAGAGGATATCTTAACAGCTTTTGGCCAACTTTTGGAAGAGTATCCCTATGAGAAAATTCAGATCAGCCAAATTGCCAAGAAATCTGGCTATGCTAGAAGGACCCTTTACCGACACTTTGACAGTCGAGATGACCTACTTACCCTTTTCATCGAAAGACTAACATTAAATCTCTTTAAGCAACTTGGTCAATTGGAACAAGCTACTTTTAGCCAAGTTTTCCAGAATTTTTTTAGTTATTGGTCTGATTATAAATCCCTTCTTCTCATTCTTAGAAAGAATGACCTACTCCCTCAATTTCAACAATCCTGGTTCCGACATATTGATTTGATAGAGTTAGGTCGTGGTGATTTATCTTCCAATACCTATGCTCAGCGATTTGCGATTGGTGGTATTTTCAGTGTTCTAATTGAGTGGATTCATCAAGACTGCCAAACAAGTATCGAAGAATTAACTCAAGTTTCCTTCGATATTATCAATCATTTAAAAAATAAAAAAGAGCTTTGCAGTAGTCTCAACAGCTACTGCAAAGCTCTTTTTGTCATAAACTCTCAAATTATAACTCAGATAAAA

SEQ ID NO: 7006 - protein, 209 aa, Streptococcus agalactiae
MTESVTVNKKRIKQITQTQEDILTAFGQLLEEYPYEKIQISQIAKKSGYARRTLYRHFDSRDDLLTLFIERLTLNLFKQLGQLEQATFSQVFQNFFSYWSDYKSLLLILRKNDLLPQFQQSWFRHIDLIELGRGDLSSNTYAQRFAIGGIFSVLIEWIHQDCQTSIEELTQVSFDIINHLKNKKELCSSLNSYCKALFVINSQIITQIK

SEQ ID NO: 7007 - protein, 594 aa, Streptococcus agalactiae
ATGGCAGAAGAATTTTTAAATACTCATAATGCGTCTATTTTATTGAGTGCAGCTAACAAGTCACATTATCCTCAGGATGATCTCCCAGAAGTTGCTCTCGCTGGTCGTTCAAATGTTGGTAAATCAAGCTTTATCAACACGCTTCTTGGTCGTAAAAACCTAGCGCGTACGTCGAGTAAGCCAGGTAAGACACAACTACTCAACTTTTATAACATTGATGACAAACTGCGTTTTGTCGATGTCCCTGGATATGGCTACGCTAAGGTGTCTAAAACTGAGCGTGCTAAGTGGGGCAAGATGATTGAAGAGTACCTTGTAACACGTGATAACCTTCGTGTTGTTGTTAGTTTAGTTGATTTTCGTCATGATCCAAGTGCGGACGATATTCAAATGTATGAATTTCTTAAGTACTATGAAATTCCAGTAATTATTGTAGCGACAAAGGCAGATAAAATACCTCGTGGCAAGTGGAATAAACATGAGTCGTCTATTAAGAAGAAATTAAACTTTGATAAAAAGGACCATTTCATCGTCTTTTCATCTGTTGACCGCACAGGTCTTGATGAATCATGGGATACTATTTTATCTGAGTTA

SEQ ID NO: 7008 - protein, 198 aa, Streptococcus agalactiae; identical to SEQ ID NO: 2448

SEQ ID NO: 7009 - protein, 1224 aa, Streptococcus agalactiae
ATGGCTGGGAATCGTAATAACGATATGAATGTCTATTGTTCATTTTGTGGCAAAAGCCAAGATGAAGTAAAAAAAATTATTGCAGGTAATGGTGTTTTCATTTGTAATGAATGTGTGGCCTTATCACAAGAAATTATTAAGGAAGAATTAGCTGAGGAAGTACTTGCTGATTTAGCAGAAGTACCAAAACCTAAGGAACTATTAGAAATATTAAATCAATATGTTGTAGGGCAAGATCGTGCTAAACGTGCTTTAGCAGTTGCTGTCTACAATCATTACAAGCGTGTTAGTTATACCGAGAGTAGTGACGATGATGTAGATTTGCAAAAATCCAACATTTTGATGATTGGTCCAACTGGCTCAGGAAAAACCTTCTTAGCACAAACACTAGCTAAAAGCCTTAATGTACCGTTTGCTATTGCAGATGCGACTTCATTGACCGAAGCAGGATACGTTGGAGAAGATGTTGAGAATATTCTTCTTAAATTGATTCAAGCTGCTGATTATAATGTCGAACGTGCTGAGCGTGGTATTATCTACGTTGATGAAATAGATAAAATTGCTAAGAAAGGCGAAAATGTTTCTATCACACGTGATGTATCTGGTGAAGGTGTACAGCAAGCCCTTCTTAAAATTATTGAGGGTACGGTAGCAAGTGTTCCCCCACAGGGTGGGCGTAAACATCCTAACCAAGAAATGATTCAAATTAATACCAAGAACATCCTTTTTATTGTCGGTGGTGCTTTTGATGGTATTGAAGACCTTGTGAAGCAACGTTTAGGCGAAAAAATTATTGGTTTTGGACAGACAAGCCGCAAAATTGATGACAACGCTTCTTATATGCAAGAGATAATTTCTGAGGATATTCAAAAGTTTGGACTGATTCCAGAGTTTATTGGCCGTTTACCAGTAGTTGCAGCGTTAGAACTTCTTACTGCAGAAGATCTGGTTCGTATTCTGACAGAACCACGCAATGCTTTGGTTAAACAATACCAAACCTTATTATCTTATGATGGTGTAGAATTGGAATTTGATCAGGATGCTCTATTGGCTATCGCTGATAAGGCTATCGAGCGCAAGACTGGTGCACGTGGTTTACGTTCTATTATTGAAGAAACGATGCTTGATATCATGTTTGAAATTCCAAGCCAAGAAGATGTAACAAAAGTTCGTATCACAAAGGCTGCTGTTGAGGGTACTGACAAGCCTGTTTTAGAGACGGCT

SEQ ID NO: 7010 - protein, 408 aa, Streptococcus agalactiae
MAGNRNNDMNVYCSFCGKSQDEVKKIIAGNGVFICNECVALSQEIIKEELAEEVLADLAEVPKPKELLEILNQYVVGQDRAKRALAVAVYNHYKRVSYTESSDDDVDLQKSNILMIGPTGSGKTFLAQTLAKSLNVPFAIADATSLTEAGYVGEDVENILLKLIQAADYNVERAERGIIYVDEIDKIAKKGENVSITRDVSGEGVQQALLKIIEGTVASVPPQGGRKHPNQEMIQINTKNILFIVGGAFDGIEDLVKQRLGEKIIGFGQTSRKIDDNASYMQEIISEDIQKFGLIPEFIGRLPVVAALELLTAEDLVRILTEPRNALVKQYQTLLSYDGVELEFDQDALLAIADKAIERKTGARGLRSIIEETMLDIMFEIPSQEDVTKVRITKAAVEGTDKPVLETA

SEQ ID NO: 7011 - protein, 168 aa, Streptococcus agalactiae
ATGCAACGTAGCCTTTTTGGGGTCTTTACCGCATTTTTAGCTGTGATTTGTGTTTTATGTGCAATTCCTGCTATAAAGAAAAAAAGATATGGATTAGGAACGGTTTTTTTGATGAATGCTTTCACTAACCTTGTCAACACAATCCATGCCTTTTATGGAACCTTATTT

SEQ ID NO: 7012 - protein, 56 aa, Streptococcus agalactiae
MQRSLFGVFTAFLAVICVLCAIPAIKKKRYGLGTVFLMNAFTNLVNTIHAFYGTLF

SEQ ID NO: 7013 - protein, 492 aa, Streptococcus agalactiae
ATGACAAAGCAAATAATTGCCATTTGGGCTGAAGATGAAGACCATTTGATTGGAGTTAATGGCGGTTTACCATGGAGGCTTCCTAAAGAGTTACATCACTTCAAAGAAACGACCATGGGGCAGGCTTTGCTTATGGGACGAAAGACCTTTGATGGAATGAACCGTCGTGTTTTACCTGGTAGAGAGACAATCATCTTAACAAAAGATGAACAATTCCAAGCAGATGGAGTGACAGTCCTAAATAGTGTTGAACAAGTTATAAAATGGTTTCAGGAACATAATAAGACCTTATTTATTGTAGGTGGTGCAAGTATTTATAAAGCATTTCTGCCTTATTGTGAAGCAATCATAAAAACTAAAGTTCATGGAAAATTTAAAGGTGATACCTATTTTCCTGATGTTAATCTATCTGAGTTTAAAGTTATCTCTAGAGATTATTTTGAAAAGGATGAGCAGAATGCTCATGCTTTTACTGTGACATATTTTGAAAAA

SEQ ID NO: 7014 - protein, 164 aa, Streptococcus agalactiae; identical to SEQ ID NO: 2452

SEQ ID NO: 7015 - protein, 837 aa, Streptococcus agalactiae
ATGACAAAAGCCGATTTATTATTTAAAGACAATATCACGAAAATTATGTCTGAAGGTGTATTTAGCGAGCAAGCCAGACCTAGATATAAAAATGGGGAAATGGCTAATTCTAAGTATATTACAGGTGCCTTTGCAGAGTATGATTTATCAAAGGGTGAATTTCCTATTACAACTCTACGTCCAATTCCAATAAAATCTGCTATTAAAGAAATTTTCTGGATTTATCAAGATCAGACAAATGATTTAGTAGTTTTGAATGATAAATATGGTGTGACATACTGGAATGATTGGGAAGTTGGCCATACTGGCACGATAGGTCAGCGCTACGGTGCAGTTGTTAAAAAACATAATATTATATCAAAACTCTTAAAACAGCTTGAAGATAACCCTTGGAATCGTCGTAATGTTATTTCATTATGGGACTATGAAGCATTTGAAGAAACAGAAGGCCTACTACCTTGTGCTTTTCAAACGATGTTTGATGTGAGACGCGTTAATGGTGAGCTTTATTTGGATGCCACATTAACACAACGTTCTAATGACATGTTAGTTGCACATCATATTAATGCTATGCAGTATGTAGCACTTCAGATGATGATTGCAAAGCATTTTGGTTGGAGAGTTGGGAAGTTTTTCTATTTTATCAATAATCTTCATATTTATGATAACCAGTTTGAACAAGCTCAGGAACTCTTAAAACGCCAACCGTCTGAGTGTAACCCCAAACTAGTATTGAATGTTCCAGATGGAACAGACTTTTTTGATATTAAACCAGATGATTTTGCGTTAGTTGATTATGACCCAATTAAACCTCAATTACGTTTTGATTTAGCAATC

SEQ ID NO: 7016 - protein, 279 aa, Streptococcus agalactiae
MTKADLLFKDNITKIMSEGVFSEQARPRYKNGEMANSKYITGAFAEYDLSKGEFPITTLRPIPIKSAIKEIFWIYQDQTNDLVVLNDKYGVTYWNDWEVGHTGTIGQRYGAVVKKHNIISKLLKQLEDNPWNRRNVISLWDYEAFEETEGLLPCAFQTMFDVRRVNGELYLDATLTQRSNDMLVAHHINAMQYVALQMMIAKHFGWRVGKFFYFINNLHIYDNQFEQAQELLKRQPSECNPKLVLNVPDGTDFFDIKPDDFALVDYDPIKPQLRFDLAI

SEQ ID NO: 7017 - protein, 1275 aa, Streptococcus agalactiae
GTGAGAAACAAGACTTTGAAGGTTAAAGCTTTTTTTCATATTTTTAGCTTCTTTATGGTAAAATGGAATTTAGCAAAAATGACTTTTATTCAGAAAGGTTTACCAATGAAAATAGGAATTGATAAGATTGGTTTTGCAACCAGTCAATATGTCCTTGAAATGACTGATTTGGCTATTGCTCGCCAAGTTGACCCTGAAAAATTCAGCAAGGGATTATTGTTAGATTCACTTAGTATTACGCCAGTTACAGAAGATATCGTTACACTTGCAGCCTCTGCAGCTAATGATATTTTATCTGATGAGGACAAAGAAACTATTGATATGGTGATTGTCGCTACAGAATCAAGTATCGATCAGAGTAAGGCGGCTTCTGTCTATGTACATCAACTTTTAGAGATTCAACCTTTCGCAAGGTCATTCGAGATGAAAGAAGCATGCTATAGCGCAACTGCTGCTCTTGATTACGCTAAATTACATGTAGAAAAACATCCAGATTCTAAAGTATTAGTGATAGCTTCAGATATTGCTAAATATGGCATTAAATCTACTGGAGAATCCACTCAAGGTGCAGGCAGTATCGCTATGCTTATTAGTCAAAACCCATCCATTCTAGAGCTAAAAGAGGACCGTCTAGCGCAAACCCGTGATATTATGGACTTTTGGCGACCAAATTATTCTGATGTTCCTTATGTTAATGGCATGTTTTCAACAAAACAATATCTAGATATGCTAAAAACTACTTGGAAAGAATATCAAAAACGTTTTAATACTAGTCTAAGTGACTATGCTGCTTTTTGTTTCCATATTCCTTTTCCAAAATTAGCTTTAAAGGGCTTTAATAAAATTCTAGATAATAACTTAGATGAACAAAAGAAAGCTGAACTACAAGAAAATTTTGAGCACTCTATTACCTATAGTAAGAAAATTGGAAATTGCTATACTGGCTCATTGTATCTAGGACTTCTATCGTTACTAGAAAATAGTCAAAATTTAAAAGCAGGTGATCAAATTGCCTTCTTTTCATACGGTAGCGGAGCTGTTGCTGAAATTTTTACCGGTCAGTTAGTAGACGGCTACCAAAATAAACTTCAGAGCGATCGTATGGATCAACTCAATAAACGTCAAAAAATTACAGTAACTGAGTATGAGAAACTCTTCTTTGAAAAAACAATCCTAGACGAAAATGGAAATGCTAACTTCAACACCTACCGGACTGGCACTTTTTCTCTAGACTCTATTTGCGAACATCAACGTATCTACAAGAAAATTAATAAT

SEQ ID NO: 7018 - protein, 425 aa, Streptococcus agalactiae
MRNKTLKVKAFFHIFSFFMVKWNLAKMTFIQKGLPMKIGIDKIGFATSQYVLEMTDLAIARQVDPEKFSKGLLLDSLSITPVTEDIVTLAASAANDILSDEDKETIDMVIVATESSIDQSKAASVYVHQLLEIQPFARSFEMKEACYSATAALDYAKLHVEKHPDSKVLVIASDIAKYGIKSTGESTQGAGSIAMLISQNPSILELKEDRLAQTRDIMDFWRPNYSDVPYVNGMFSTKQYLDMLKTTWKEYQKRFNTSLSDYAAFCFHIPFPKLALKGFNKILDNNLDEQKKAELQENFEHSITYSKKIGNCYTGSLYLGLLSLLENSQNLKAGDQIAFFSYGSGAVAEIFTGQLVDGYQNKLQSDRMDQLNKRQKITVTEYEKLFFEKTILDENGNANFNTYRTGTFSLDSICEHQRIYKKINN

SEQ ID NO: 7019 - protein, 1281 aa, Streptococcus agalactiae
ATGACAAAAATTTCCTGGACAGGATTTTCAAAAAAATCCCCTGAAGAACGTATTCATTACCTTGAAGAACAAGATTTTTTAGCTGATTCTTCCCTAGAAATAGTGACGAATCAGGACTTACTCTCTTTATCACTAGCCAATCAAATGGCTGAAAATGTCATCGGTCGAATAGCCTTACCATTTTCACTTGTCCCAGATGTTTTGGTTAACGGTAAAGTCTATCAAGTCCCATATGTCACTGAAGAACCGTCAGTTGTTGCTGCTGCAAGTTTTGCTGCTAAAATTATAAAACGATCTGGTGGTTTTCTGACAACTGTCCATAATCGTAAAATGATTGGACAAGTAGCCATTTATGATGTACAAGATAGTCAACACACTAAAGAATCTATATTAAATCAAAAACAGCAATTATTAGAAATAGCCAACGCTGCTCATCCATCAATAGTCAAGCGTGGAGGCGGTGCTTGCGACCTAACTATTGAGATTAAAGAAGACTTTTTGATTGTTTACCTTATGGTTGATACAAAAGAAGCCATGGGTGCTAATATGGTTAACACCATGATGGAAGCATTATCTTCGCCATTAGAAGACATTTCAAAAGGCAAAAGCTTAATGTCAATTTTATCTAACTATGCTACCGAATCTTTAGTGACTGCTACATGCCGAGTTGATTTAAGATTTCTAAGTCGCCAAAAAGAGGAGGCCATCAAGTTAGCTCAAAAAATGACGATGGCAAGTCAATTAGCTCAAGTAGACCCTTATCGTGCTAGCACACATAATAAAGGTATTTTTAATGGCATTGATGCTATCGTCTTAGCTACTGGAAATGATTGGCGAGCTATTGAAGCTGGAGCGCATACCTATGCTGTCAAAGATGGACAATATCGAGGATTATCTAAATGGTCTTATAAGGTTGATGATAATTTTCTAGAAGGTACTCTGACGCTACCGATGCCTGTTGCAACAAAAGGTGGATCCATCGGTATTAACCCTAGTGTCCAACTAGCTCACGATCTACTAGGTCGTCCTAATGCTAAAGAGTTGGCAAGTATTGTTCTTTCGATTGGACTAGCTCAAAATTTTGCGGCTCTTAAGGCATTGGTTAGCACAGGAATTCAAGCTGGTCACATGAAACTTCAAGCAAAGTCGTTGGCACTACTTGCTGGAGCTAAAGAAGAACAAATTTCAGAAGTCGTTAAACAGCTTCTAGACTCTAAACACATGAATCTAGAGACAGCACAGAAAATTGTCAATAAACTTACTAAAAGTAAAAAAAGAATT

SEQ ID NO: 7020 - protein, 427 aa, Streptococcus agalactiae
MTKISWTGFSKKSPEERIHYLEEQDFLADSSLEIVTNQDLLSLSLANQMAENVIGRIALPFSLVPDVLVNGKVYQVPYVTEEPSVVAAASFAAKIIKRSGGFLTTVHNRKMIGQVAIYDVQDSQHTKESILNQKQQLLEIANAAHPSIVKRGGGACDLTIEIKEDFLIVYLMVDTKEAMGANMVNTMMEALSSPLEDISKGKSLMSILSNYATESLVTATCRVDLRFLSRQKEEAIKLAQKMTMASQLAQVDPYRASTHNKGIFNGIDAIVLATGNDWRAIEAGAHTYAVKDGQYRGLSKWSYKVDDNFLEGTLTLPMPVATKGGSIGINPSVQLAHDLLGRPNAKELASIVLSIGLAQNFAALKALVSTGIQAGHMKLQAKSLALLAGAKEEQISEVVKQLLDSKHMNLETAQKIVNKLTKSKKRI

SEQ ID NO: 7021 - protein, 447 aa, Streptococcus agalactiae
ATGAATAAAAATCAATACCCAAAATGGGAAGAATTACCTGAACTAGATCTGTATCTTGACCAAGTACTTCTCTATGTGAATCAATTAATTAATCCTAAAACAATAACTAACGATAAACTACTCACCGCTTCTATGATCAACAATTATGTCAAACATAATTATATATCCAAACCTATTAAAAAAAAATACAATCGCCGTCAAGTAGCACGATTGATTGTTATTACAGCTTTTAAACAAGTTTTTGCTATTCAAGAAATCAGTCAAACATTAGAAATTCTGACAGCTGACAATCATTCTGAGGAAGCATATAACGGATTTGCTGCTTGTATGAACAAAGAAGAGGTTCACGATTTACCACCAGTTGTCATTAGTGCCTGTCAGACGTTGAACCTTTATCAAGAAACACAAAAATTAGTTTTAGAACTAGGAGGAAAAAATAAAAATGCT

SEQ ID NO: 7022 - protein, 149 aa, Streptococcus agalactiae
MNKNQYPKWEELPELDLYLDQVLLYVNQLINPKTITNDKLLTASMINNYVKHNYISKPIKKKYNRRQVARLIVITAFKQVFAIQEISQTLEILTADNHSEEAYNGFAACMNKEEVHDLPPVVISACQTLNLYQETQKLVLELGGKNKNA

SEQ ID NO: 7023 - protein, 561 aa, Streptococcus agalactiae
ATGCTAATCCTATTACCAATCACCGCTGTCTATAGTCACAACCACTTCGGATTACAAGCAGCACTTGGTACCTCAATATTTGTCACTTCATTATTTTTGATGTTTTTATCATCAAGTATTTACCACTCCATGACTTATAGCAGTCTCCAAAAATATGTTCTACGCATGATTGATCACTCTATGATTTATATTGCTATTGCAGGTAGTTATACTCCTGTCGCATTGTCACTTATTGGCGGCTGGTTAGGATATCTCATCATTTTTTTACAATGGGGGATTACATTATTTGGTATCCTTTATAAAATCTTCGCTCCCAAAATCAATGATAAATTTAGCCTTGTACTTTACCTCATTATGGGATGGCTGGTTATCTTTATTTTCCCTGCTATTATCACAAAAACTGGACCAGCTTTTTGGGGATTACTCTTGGCTGGTGGTATTTGCTATACTATCGGTGCACTCTTTTATGCTCGCAAACGTCCTTATGATCACATGATTTGGCACCTTTTCATTCTATTAGCTTCTATTTTACAATACATTGGAATTGTCTACTTCATGCTA

SEQ ID NO: 7024 - protein, 187 aa, Streptococcus agalactiae
MLILLPITAVYSHNHFGLQAALGTSIFVTSLFLMFLSSSIYHSMTYSSLQKYVLRMIDHSMIYIAIAGSYTPVALSLIGGWLGYLIIFLQWGITLFGILYKIFAPKINDKFSLVLYLIMGWLVIFIFPAIITKTGPAFWGLLLAGGICYTIGALFYARKRPYDHMIWHLFILLASILQYIGIVYFML

SEQ ID NO: 7025 - protein, 912 aa, Streptococcus agalactiae
ATGAAAAGTGCTTATATCTTTTTTAATCCAAAATCTGGTAAAGATGAACAAGCATTGGCACAAGAAGTAAAATCTTATTTAATAGAACATGATTTTCAAGACGATTATGTTCGTATCATTACACCTTCATCTGTTGAGGAAGCTGTCGCCTTAGCAAAAAAAGCATCAGAAGACCATATCGACTTGGTTATTCCTTTAGGGGGAGATGGCACTATTAATAAAATCTGTGGTGGTGTCTACGCTGGTGGTGCTTATCCTACTATCGGACTAGTACCTGCCGGGACCGTCAATAACTTTTCAAAAGCTTTGAACATCCCACAAGAGAGGAATCTCGCTCTTGAAAATCTTCTAAACGGTCATGTAAAGTCCGTAGATATCTGTAAAGTTAACGACGATTACATGATTAGCAGTTTAACACTTGGGCTCCTTGCTGATATTGCTGCTAATGTCACTTCTGAAATGAAGCGTAAATTAGGACCTTTTGCTTTCGTAGGTGATGCCTACCGTATATTAAAGCGTAATCGATCATATTCTATTACTCTTGCTTACGATAATAATGTACGGTCTTTACGCACGCGGTTACTACTTATTACCATGACCAATTCGATTGCCGGTATGCCAGCCTTCTCTCCAGAAGCAACAATTGATGATGGACTTTTTAGAGTCTACACTATGGAACATATTCACTTCTTCAAATTATTGTTGCATCTAAGACAATTTCGTAAGGGAGATTTTAGTCAAGCAAAGGAGATAAAACATTTTCATACCAATAATCTGACTATTTCAACTTTTAAACGTAAAAAATCAGCTATCCCTAAAGTTCGTATTGATGGCGATCCAGGTGACCAATTGCCTGTAAAAGTTGAAGTCATCCCTAAAGCCTTAAAGTTTATCATTCCTAACTCATTACCA

SEQ ID NO: 7026 - protein, 304 aa, Streptococcus agalactiae
MKSAYIFFNPKSGKDEQALAQEVKSYLIEHDFQDDYVRIITPSSVEEAVALAKKASEDHIDLVIPLGGDGTINKICGGVYAGGAYPTIGLVPAGTVNNFSKALNIPQERNLALENLLNGHVKSVDICKVNDDYMISSLTLGLLADIAANVTSEMKRKLGPFAFVGDAYRILKRNRSYSITLAYDNNVRSLRTRLLLITMTNSIAGMPAFSPEATIDDGLFRVYTMEHIHFFKLLLHLRQFRKGDFSQAKEIKHFHTNNLTISTFKRKKSAIPKVRIDGDPGDQLPVKVEVIPKALKFIIPNSLP

SEQ ID NO: 7027 - protein, 852 aa, Streptococcus agalactiae
ATGACAACATTTACTGCTAAATTTATTGACCAAGAGTGGGAAGTCCCAGTAGAATCAGGTCGCTACCATATGATTGTTGGGGAATTTTGTCCTTATGCACAACGTCCGCAGATTGCACGCCAACTGCTTGGTTTGGATAAACATATTTCTATCAGTTTTGTGGATGATGTTCCAAGTGATATAGGACTTATTTTTAGCCAACCAGAACAGGTTACTGGTGCTAAGTCGCTTCGTGATATTTATCATTTGACTGACCCGACCTACAAAGGTCCTTATACTATCCCAATTTTAATTGACAAGACTGATAATCGTATTGTCTGTAAGGAATCTGCAGATATGCTTCGACTTTTTACTACAGATTTCTCTGATTTGCATCAAGAGGATGCTCCTGTCCTTTTCAGCCAAGAAACTGCTTCACTTATTGATAATGATATTAAAGACATTAATAATAACTTCCAAAGCTTAATGTATAAGTTAGCTTTTCTTGATAAACAAACAGATTATGATACTTATAGTAAGGAATTCTTCACTTTTCTAGATCAAAAAGAACACTTACTAGGACAACGTCCTTTCTTGCTCGGAGATAATCTAAGTGAGGTTGATATTCATTTCTTTACACCATTAGTCCGCTGGGATATTGCTGGGCGTGATCTTCTACTACTTAATCAGAAAGCGCTAGAAGACTACCCAAATATTTTTTCTTGGGCTAAAACTTTATACAATGACTTTAATTTAAAAACATTAACCAATCCACAATCCATAAAAAATAACTATTACTTAGGCAAATTTGGAAGAGCTGTTCGTCATCATACCATCGTACCAACAGGTCCAAATATGGTAAAATGGGAAAAA

SEQ ID NO: 7028 - protein, 284 aa, Streptococcus agalactiae
MTTFTAKFIDQEWEVPVESGRYHMIVGEFCPYAQRPQIARQLLGLDKHISISFVDDVPSDIGLIFSQPEQVTGAKSLRDIYHLTDPTYKGPYTIPILIDKTDNRIVCKESADMLRLFTTDFSDLHQEDAPVLFSQETASLIDNDIKDINNNFQSLMYKLAFLDKQTDYDTYSKEFFTFLDQKEHLLGQRPFLLGDNLSEVDIHFFTPLVRWDIAGRDLLLLNQKALEDYPNIFSWAKTLYNDFNLKTLTNPQSIKNNYYLGKFGRAVRHHTIVPTGPNMVKWEK

SEQ ID NO: 7029 - protein, 216 aa, Streptococcus agalactiae
ATGATTAAACTGTATTATGAAGATGCTTACGACACTGAGCGATGCCAAGTTTTTGAAAATCCAAATGATTTTATTCGAGTTTTAATGGGATGTGTTACTGTTCCTGATAATTATCCTATTACGAAAATGACTTATAAAGATAAAAATATTGCTTATAGTGGTACTTATGGAGATCTCTTCAAGACTTTTATTGAATTTGATTGGTCCACTTTGGAC

SEQ ID NO: 7030 - protein, 72 aa, Streptococcus agalactiae
MIKLYYEDAYDTERCQVFENPNDFIRVLMGCVTVPDNYPITKMTYKDKNIAYSGTYGDLFKTFIEFDWSTLD

SEQ ID NO: 7031 - protein, 993 aa, Streptococcus agalactiae
ATGACAAATCGAAAAGATGATCACATAAAATATGCTCTTAAATATCAGTCGCCTTATAATAGTTTTGACGATATTGAGTTAATACATTCATCCTTACCAAAATATAATGTCAACGATATCGATTTATCAACACATTTTGCTGGTCAAAGCTTTGAATTTCCTTTTTATATCAATGCTATGACAGGAGGTAGTGAAAAAGGGAAAGCAGTCAATCATAAATTGGCACAGGTTGCTCAAGCTACAGGGATTGTTATGGCGACAGGTTCATATTCGGCAGCTCTCAAAAACGATGAAGATGATTCCTACCCAACAACAGACTTGTATCCTGATTTAAAACTGGCGACAAATATAGGGTTAGACAAGCCTTTACCAGCAGCAGAGTCAACCGTTAAGGCTATGAACCCCATTTTTTTACAAGTTCATGTTAATGTGATGCAAGAACTTTTGATGCCTGAAGGAGAGCGTGAATTTCACATGTGGCGTTCTCACTTAAAAGAATACGTCGACAATATCCAATGCCCACTTATCTTAAAAGAGGTTGGTTTTGGGATGGATTTACAATCAATAAAGGATGCTTACGATATAGGTATCACAACTGTAGATATTTCGGGGCGTGGGGGGACTAGTTTTGCTTACATCGAAAATCAACGTGGACGCGACCGTTCGTATCTCAATACCTGGGGGCAAACAACAGCTCAATCTTTAATAAACGCTCAATCTATGATGGACAAAATGGATATCCTAGCATCTGGTGGCATTCGTCATCCTTTAGATATGGTAAAATGTTTAGTGTTGGGTGCTAAAGCTGTTGGACTTTCTAGAGCAGTTTTAGAATTAGTTGAGCGTTATCCTGTAGATGATGTTATTGCAATTCTCAATTCTTGGAAAGAAGATTTAAGAATGATAATGTGTGCACTGAATTGTAAAAAAATAACTGATTTACGACAAGTCAATTATATATTGTATGGTCAATTGAAGGAAGCCAATGCTAAA

SEQ ID NO: 7032 - protein, 331 aa, Streptococcus agalactiae
MTNRKDDHIKYALKYQSPYNSFDDIELIHSSLPKYNVNDIDLSTHFAGQSFEFPFYINAMTGGSEKGKAVNHKLAQVAQATGIVMATGSYSAALKNDEDDSYPTTDLYPDLKLATNIGLDKPLPAAESTVKAMNPIFLQVHVNVMQELLMPEGEREFHMWRSHLKEYVDNIQCPLILKEVGFGMDLQSIKDAYDIGITTVDISGRGGTSFAYIENQRGRDRSYLNTWGQTTAQSLINAQSMMDKMDILASGGIRHPLDMVKCLVLGAKAVGLSRAVLELVERYPVDDVIAILNSWKEDLRMIMCALNCKKITDLRQVNYILYGQLKEANAK

SEQ ID NO: 7033 - protein, 990 aa, Streptococcus agalactiae
ATGGTTAAGGTGCAAACAGGTGGCAAATTATATATTGCAGGTGAATACGCGATACTGTATCCTGGACAAGTAGCTATTTTAAAGAACATTCCTATTTATATGACTGCATTAGCTACTTTTGCAGATAACTACAGCCTTTATTCTGATATGTTTAACTATACGGCAAGCTTGCAGCCTGATAAGCAATATAGTCTCATTCAGGAAACGATATTGCTTATGGAAGAATGGTTGATTAATTTTGGCAAAAACATAAAACCGATTCACCTCGAAATTACGGGAAAATTAGAGCGCTATGGACTTAAATTTGGTATAGGCTCTAGCGGAAGTGTTGTCGTTTTGACTATTAAAGCTATGGCTGCGCTTTATGAGATAGAGATGCCAAGCGACTTGCTTTTTAAATTATCTGCCTACGTTCTCTTAAAAAGAGGTGATAATGGCTCAATGGGAGATATTGCTTGTATTGCTTATGAGCATTTAATTTCTTATTCAGCTTTTGATCGTAGGGCTGTTTCAAAAATGATTGAAACAAAACCCTTGGAACAAGTATTGGAAGCTGAATGGGGTTATCGTATTACCAAAATACAAGCTTCATTGGAGATGGATTTTTTAGTGGGATGGACAATGCAACCGTCCATTTCAAAAGAAATGATAAATATAGTTAAATCAACTATTACGCAGCGTTTTTTAGATGATACAAATTATCAAGTTGTCCAGTTACTTTCAGCCTTTAAAGAAGGAGATAAAGAAGCGATTAAGAGATGTTTAGAAGAAATTAGCTTGTTATTATTTAATCTTCATCCATCTATTTACACCGATAAACTTCAAAAGCTTAAAGAGGCAAGCAAAGGCCTAGATATAGTCACAAAATCTTCAGGATCTGGAGGAGGCGATTGTGGTATAGCCATATCCTTTAATAAAAATGATAATCAAACTCTAATCAAGCGTTGGGAGAGTGCTGGTATTGAACTACTTAGTAAGGAGACATTGTCA

SEQ ID NO: 7034 - protein, 330 aa, Streptococcus agalactiae
MVKVQTGGKLYIAGEYAILYPGQVAILKNIPIYMTALATFADNYSLYSDMFNYTASLQPDKQYSLIQETILLMEEWLINFGKNIKPIHLEITGKLERYGLKFGIGSSGSVVVLTIKAMAALYEIEMPSDLLFKLSAYVLLKRGDNGSMGDIACIAYEHLISYSAFDRRAVSKMIETKPLEQVLEAEWGYRITKIQASLEMDFLVGWTMQPSISKEMINIVKSTITQRFLDDTNYQVVQLLSAFKEGDKEAIKRCLEEISLLLFNLHPSIYTDKLQKLKEASKGLDIVTKSSGSGGGDCGIAISFNKNDNQTLIKRWESAGIELLSKETLS

SEQ ID NO: 7035 - protein, 942 aa, Streptococcus agalactiae
ATGGACGGAAAAAGTATAAGTGTTAAGTCTTATGCTAACATTGCTATTATCAAATATTGGGGAAAAGCAGATGCTGAAAAAATGATTCCAGCTACCAGTAGTATTTCTCTAACACTTGAAAACATGTACACTGAAACACGTTTGACTACCCTTGGGAAGGATGCTAAGAAAGATGAATTTTACATCTCTGGTGTTCTTCAAAATGATCATGAACATGACAAAATGTCAGCTATCTTGGATCGCTTTCGACAAAATAAGTCCGGCTTTGTAAAGATTGAAACAACTAATAATATGCCAACAGCTGCAGGCTTATCATCGTCATCAAGTGGTTTATCAGCCTTAGTAAAGGCTTGCAATGATTTTTTTGGTACTAACCTTAGCCAATCACAGTTAGCTCAAGAAGCCAAGTTTGCTTCAGGCTCTTCTTCACGCTCTTTTTTTGGACCTGTTGCTGCTTGGGATAAAGATAGTGGTGATATCTATAAAGTTCACACTGATTTAGATTTAGCTATGATTATGCTGGTCTTAAATGACAAAAGAAAGCCGATTTCAAGCCGTGAAGGTATGAAAATCTGCACCGAAACCTCAACGACTTTTAATGAATGGGTAAGGCAATCTGAACAAGACTATCAAGATATGTTAGTATACCTAAAAAATAATGATTTTCAAAAGGTAGGTCAACTGACAGAGCGTAATGCACTTGCAATGCACTCAACAACTAAAACAGCAACTCCAGCCTTTTCATATTTGACAGAAGAGACATATAAAGCTATGGATGTTGTGAAGAAACTTCGCGAAAAAGGTCATGAATGTTATTATACGATGGATGCGGGTCCAAATGTTAAAGTACTTTGCTTACGTCAAGACCTTGAGGCATTAGCTGCTATCTTGGAGAAAGATTATCGTATTATTGTTTCAACGACAAAGGAATTAGCAGATGGT

SEQ ID NO: 7036 - protein, 314 aa, Streptococcus agalactiae
MDGKSISVKSYANIAIIKYWGKADAEKMIPATSSISLTLENMYTETRLTTLGKDAKKDEFYISGVLQNDHEHDKMSAILDRFRQNKSGFVKIETTNNMPTAAGLSSSSSGLSALVKACNDFFGTNLSQSQLAQEAKFASGSSSRSFFGPVAAWDKDSGDIYKVHTDLDLAMIMLVLNDKRKPISSREGMKICTETSTTFNEWVRQSEQDYQDMLVYLKNNDFQKVGQLTERNALAMHSTTKTATPAFSYLTEETYKAMDVVKKLREKGHECYYTMDAGPNVKVLCLRQDLEALAAILEKDYRIIVSTTKELADG

SEQ ID NO: 7037 - protein, 876 aa, Streptococcus agalactiae
ATGAAAGAAAAGTTTGGTATAGGAAAGGCTCATAGCAAGATTATCTTGATGGGTGAGCACTCAGTAGTATATGGTTATCCAGCCATTGCTATTCCTTTAAAAAATATTGAAGTAACTTGCCTTATTGAAGAGGCTCCTCAATTAATAGCATTAGATATGACTGATCCTTTGTCGACAGCCATTTTTGCTGCCTTGGACTATTTAGGTAAAACTTCTTCTAAAATTGCATATCATATTGAGTCACAAGTCCCAGAAAGACGTGGTATGGGATCATCAGCTGCAGTTGCTATTGCAGCTATTCGTGCAGTTTTTGATTATTTTGATGAAGATTTGGAGGCAGATTTGTTAGAATGCCTTGTTAATCGAGCAGAAATGATAGCACATTCAAATCCGAGTGGATTAGATGCAAAAACTTGTCTTAGTGAAAATACTATTAAATTTATCCGCAATATTGGTTTTTCAACAGTACCCATGCATTTGAATGCTTATTTAGTTATTGCTGATACAGGAATTCATGGGCATACTAAAGAAGCAGTGGATAAGGTGAAATCATCTGGCGAGGCAGTACTACCCTTTTTAAAAGAATTAGGTTATTTAGCAGAGGCATCAGAGGATGCTATTCATAAAAGTGATTCCAAACAACTTGGTAGCTTGATGACTAAAGCGCATCAAAGTTTAAAACAATTGGGTGTCTCAAGTTTAGAAGCTGATCATCTGGTAGAGGTAGCTATTAGTTGTGGTGCTCTAGGCGCTAAAATGAGTGGCGGCGGATTAGGTGGTTGTATTATCGCACTTGTAAAAGAAAAAAGAGAAGCTGAGCGCTTAAGTCAGCAATTAGAAAGAGAAGGAGCTGTCAACACATGGACGGAAAAAGTA

SEQ ID NO: 7038 - protein, 292 aa, Streptococcus agalactiae
MKEKFGIGKAHSKIILMGEHSVVYGYPAIAIPLKNIEVTCLIEEAPQLIALDMTDPLSTAIFAALDYLGKTSSKIAYHIESQVPERRGMGSSAAVAIAAIRAVFDYFDEDLEADLLECLVNRAEMIAHSNPSGLDAKTCLSENTIKFIRNIGFSTVPMHLNAYLVIADTGIHGHTKEAVDKVKSSGEAVLPFLKELGYLAEASEDAIHKSDSKQLGSLMTKAHQSLKQLGVSSLEADHLVEVAISCGALGAKMSGGGLGGCIIALVKEKREAERLSQQLEREGAVNTWTEKV

SEQ ID NO: 7039 - protein, 1227 aa, Streptococcus agalactiae
ATGTTTAGAAATTTACGACTTCGTTTTATCGGAATAGCTGCGCTAGCTATTCTTGTTGTTTTATTTTCAGTAGTCGGTGTCCTCAACTCTGCTAATCACTATCAAACGAAGAATGAAATTTATCGTGTGTTAACTATCCTTGCAGACAACAATGGACGTATACCGAATAAACTTGAATTTAGTAAAGAATTAGGTGATGACCTATCAACGGACGCTATTTTCCAATTCCGTTATTTCAGTGCGCGAACAGATGCAAAAGGTAACGTGACTAGTTTTGATTCTAGAAATATCTTTGAAGTAAGCGATAGGCAAATAAAAAATTATGCCAAGCGTATCGTATCACAAAATAGTGATTCAGGTCATATTACCTATAATTTTAGTACTTATTCTTATCTACTAAAAAAGGTTGGTAAAAATGATTATTTAGTGGTATTTTTAGATACAACCAACCAATATCTTGATAATCAAAGATTATTGCAACTTTCAATATGGATGTCCTTGGCAAGTTTTATCGTCTTCATGGTAATTGTTTCAGTTTTATCAGGGAGAGTTATCTTACCATTTGTTGCTAACTATGAAAAGCAAAGGCGTTTTATTACCAATGCAGGACATGAACTAAAAACTCCACTTGCTATCATCTCCGCTAATAATGAATTGGTGGAAATGATGAGTGGTGAATCAGAGTGGACTAAATCTACAAATGATCAAATCCAACGTTTAACGGGTCTAATTAATGGCATGGTCAGTCTTGCCCGCTTTGAAGAACAGCCTGATATAAGTATGGTTGACTTAGACTTTTCACATATTACAAAAGATGCTGCAGAAGATTTTAAAGGTCCAATCATTAAAGATGGTAAAGATTTTATAATGAGTATCCAACCAGGTATTCATGTCAAAGCTGAAGAAAAATCATTATTTGAATTGGTTACATTATTGGTTGATAATGCTAATAAGTATTGTGATCCGATGGGGACTGTGACAGTTAAGTTATCACGTTCAAGTCGTTTGAGACGAGCTAAGCTTGAAGTTTCAAATACTTATAAGAATGGTAAAGACATAGACTATAGCAAGTTTTTTGAACGATTTTATCGAGAGGATGAGTCACATAATAACAAAAAATCGGGATATGGTATTGGTCTTTCTATCGTAACTAGTTTGGTGCATCTATTTAAAGGAAGTATCGATGTGAATTATAAACATGATACCATTACCTTTGTCATTTACATT

SEQ ID NO: 7040 - protein, 409 aa, Streptococcus agalactiae
MFRNLRLRFIGIAALAILVVLFSVVGVLNSANHYQTKNEIYRVLTILADNNGRIPNKLEFSKELGDDLSTDAIFQFRYFSARTDAKGNVTSFDSRNIFEVSDRQIKNYAKRIVSQNSDSGHITYNFSTYSYLLKKVGKNDYLVVFLDTTNQYLDNQRLLQLSIWMSLASFIVFMVIVSVLSGRVILPFVANYEKQRRFITNAGHELKTPLAIISANNELVEMMSGESEWTKSTNDQIQRLTGLINGMVSLARFEEQPDISMVDLDFSHITKDAAEDFKGPIIKDGKDFIMSIQPGIHVKAEEKSLFELVTLLVDNANKYCDPMGTVTVKLSRSSRLRRAKLEVSNTYKNGKDIDYSKFFERFYREDESHNNKKSGYGIGLSIVTSLVHLFKGSIDVNYKHDTITFVIYI

SEQ ID NO: 7041 - protein, 435 aa, Streptococcus agalactiae
ATGGCCTATATCACTGATTTAGAAAAAGCTGGTAAAAAAGTGAGCGTTCCAAATAATAAACCTAAAATCTATGTCACTATGAAGATGGTTAATGAAACTATTACACAAAATGATGGTACATATAGCATTATTAAGAAACTTTATTTAGATCGACAAGGAAATATTGTAGCACAAGAGATTGTATCAGACACTTTAAACCAAACAAAATCAAAATCTACAAAAATCAACCCTGTAACTACAATTCACAAAAAACAATTACACCAATTTACAGCTATTAACCCTATGAGAAATTATGGCAAACCATCAAACTCCACTACTGTAAAATCAAAACAATTACCAAAAACAAACTCTGAATATGGACAATCATTCCTTATGTCTGTCTTTGGTGTTGGACTTATAGGAATTGCTTTAAATACAAAGAAAAAACATATGAAA

SEQ ID NO: 7042 - protein, 145 aa, Streptococcus agalactiae
MAYITDLEKAGKKVSVPNNKPKIYVTMKMVNETITQNDGTYSIIKKLYLDRQGNIVAQEIVSDTLNQTKSKSTKINPVTTIHKKQLHQFTAINPMRNYGKPSNSTTVKSKQLPKTNSEYGQSFLMSVFGVGLIGIALNTKKKHMK

SEQ ID NO: 7043 - protein, 408 aa, Streptococcus agalactiae
ATGATAAAACCAATTGTTAGAGATACTTTCTTTTTACAACAAAAATCACAAATGGCTAGTAGAGCAGATGTGAGCTTAGCAAAAGATTTACAGGATACTTTGCATGCTAATCAAAATTATTGTGTAGGTATGGCAGCCAATATGATTGGTAGTCTGAAGCGTGTCATTATCATCAATGTGGGTATTACAAATTTAGTAATGTTTAACCCTGTATTAGTTGCAAAATCGGATCCATATGAGACAGAAGAATCTTGCCTTTCTCTCGTAGGTTGCAGAAGTACACAACGATATCATCACATTACGATTTCTTATCGTGATATCAATTGGAAAGAACAGCAAATCAAGTTGACAGATTTTCCAGCTCAAATTTGTCAACACGAGTTAGATCATTTGGAAGGCATATTGATA

SEQ ID NO: 7044 - protein, 136 aa, Streptococcus agalactiae; identical to SEQ ID NO: 2488

SEQ ID NO: 7045 - protein, 1346 aa, Streptococcus agalactiae
ATGACAAGCGGAAAGACATATGTAGCAAGTGTTTTAGAGAAAGTGAAGAAGCAAAATGAGCATGAGGAAGAATTTCTACAAGCGGTGAAGAGGTTTTTGAGTCACTAGTACCAGTTTTTGATAAATACCCTCAGTACATTGAAGAAAATCTTTTAGAACGTTTGGTTGAGCCTGAGCGCGTGATTTCTTTTAGAGTTCCATGGGTAGATGATAAAGGCCAAGTTCAAGTTAACCGAGGATATCGTGTACAATTTTCATCAGCTATTGGTCCTTATAAAGGTGGTTTACGTTTTCACCCTACAGTAACACAATCTATTGTCAAATTTTTAGGATTTGAACAAATTTTTAAGAATTCACTGACAGGTCTACCAATTGGTGGTGGCAAAGGAGGGTCGAACTTTGATCCAAAAGGGAAATCAGATAATGAAGTGATGCGTTTCACACAAAGTTTTATGACCGAACTTCAAAAATACATTGGACCAGATTTAGATGTGCCAGCTGGCGATATTGGAGTAGGTGGACGTGAAATTGGTTATCTTTATGGTCAATATAAGCGTTTAAATGGTTATCAAAATGGGGTTTTAACCGGAAAAGGACTGACTTATGGTGGCTCTTTGGCTCGTACAGAAGCAACTGGTTATGGGGCAGTCTATTTTGCTAAAGAAATGCTGGCAGCGTGTGGTCAAGATTTAACTGGCAAAGTTGCACTGGTTTCGGGATCTGGTAACGTGGCTATTTATGCTACTGAAAAATTACAAGAGTTGGGTGCAACTGTTGTAGCTGTGTCAGATTCTTCAGGTTATGTTTATGATCCAGACGGTATTGACCTTGAAACATTGAAACAGATAAAAGAGGTTGAAAGAGCACGTATTGTTAAATATACGGAGAAACATCCAAAAGCTAATTTCACACCAGCAGATCAAGGTAGTATCTGGTCTATTAAAGCAGATTTAGCTTTCCCGTGTGCTACTCAAAACGAATTAGACGAAGAAGACGCTAAGTTATTAGTTGAAAATGGTGTCTTGGCAGTAACAGAAGGAGCAAATATGCCATCTAGCTTGGGTGCTATTAAAGTTTTCCAAAAGGCAGGGGTTGCTTTTGGTCCTGCTAAAGCTGCCAATGCAGGAGGAGTAGCTGTTTCAGCGCTTGAAATGGCACAAAATTCTAGTCGTAGGGCATGGACTTTTGAAGAAGTTGATCAAGAATTGCAACGTATTATGAAAACTATTTTTGTGAATGCTTCCAAAGCGGCTGATGAATTTGGCGATAGTGGTAACCTGGTTCTAGGTGCTAACATTGCAGGCTTTTTAAAAGTTGCTCAAGCTATGTCTGCACAAGGTATTGTT

SEQ ID NO: 7046 - protein, 449 aa, Streptococcus agalactiae
MTSGKTYVASVLEKVKKQNEHEEEFLQAVEEVFESLVPVFDKYPQYIEENLLERLVEPERVISFRVPWVDDKGQVQVNRGYRVQFSSAIGPYKGGLRFHPTVTQSIVKFLGFEQIFKNSLTGLPIGGGKGGSNFDPKGKSDNEVMRFTQSFMTELQKYIGPDLDVPAGDIGVGGREIGYLYGQYKRLNGYQNGVLTGKGLTYGGSLARTEATGYGAVYFAKEMLAACGQDLTGKVALVSGSGNVAIYATEKLQELGATVVAVSDSSGYVYDPDGIDLETLKQIKEVERARIVKYTEKHPKANFTPADQGSIWSIKADLAFPCATQNELDEEDAKLLVENGVLAVTEGANMPSSLGAIKVFQKAGVAFGPAKAANAGGVAVSALEMAQNSSRRAWTFEEVDQELQRIMKTIFVNASKAADEFGDSGNLVLGANIAGFLKVAQAMSAQGIV

SEQ ID NO: 7047 - protein, 564 aa, Streptococcus agalactiae
TTGACTTTTACTGACTTTCGTTCTATAATGAGACAAATATTTGATTGGAGTATCTATATGAAATGGTTCCCACTTGTTGGAGGTATAATTGCCTTATTAGCTGGCTTCTATCTCTTTATAAATCCTGTAACGGTTGTTGCAACTCTGGGTTGGTTCATTGCTTTATTTATCTTTATTTATGGCATTTCAAATTTAGTACGCTACTTGCAAGCTGATTCTTATCACCGTAGCCCTTGGTATCTGGTTCAGAGTATCCTTGCTATTATTTTTGGTATCATTTTACTATCCAGCTCAGCAATGTCACTTTCAAATACTGTCATGACTATTTTAGCATACTGGCTACTGGTATCTGGTATTTTACGACTTTTGGGTGGTTTCCAAATGCAAAAAATTAATTTCCCAGGTGCCAAATCCTATAAACGTTCGGCTTATATTGCACTCATTTTAGGTATTATTTTACTGGTTCAACCTACCTTATCAGCAGCCATCATTGGAAGATTTGTAGCCTTTATATTAATAGCAATTGGAGCTTCGGCTATTTACACTTTTACTCGTATTAATTAT

SEQ ID NO: 7048 - protein, 188 aa, Streptococcus agalactiae; identical to SEQ ID NO: 2492

SEQ ID NO: 7049 - protein, 1767 aa, Streptococcus agalactiae
ATGAGAAAAAAATCTGTTTTTTTGAGATTATGGTCTTACCTAACTCGCTACAAAGCTACTCTTTTCTTAGCGATTTTTTTGAAAGTTTTATCTAGTTTTATGAGTGTTCTGGAGCCTTTTATTTTAGGGTTAGCGATAACAGAGTTGACTGCTAACCTTGTTGATATGGCTAAGGGAGTTTCTGGGGCAGAATTGAACGTTCCTTATATTGCTGGTATTTTGATTATTTATTTTTTCAGAGGTGTTTTCTATGAATTAGGTTCTTATGGCTCAAATTATTTTATGACTACTGTCGTTCAAAAAAGTATCCGTGATATCCGTCATGATTTGAATCATAAAATCAATAAAGTTCCTGTATCGTATTTTGATAAGCACCAATTTGGAGATATGTTGGGACGTTTTACAAGTGATGTTGAAACGGTCTCAAATGCTTTACAACAGAGCTTTTTACAGATTATCAATGCTTTTTTAAGTATTATTTTAGTAGTCGTTATGGTACTTTATCTAAATGTACCATTAGCCATGATTATCATTGCTTGTATTCCTGTAACTTATTTTAGTGCACAAGCGATACTAAAAAGATCCCAACCTTACTTTAAAGAACAGGCAAAGATTCTGGGAGAACTGAATGGTTTTGTACAAGAGAAATTAACTGGTTTCAATATCATAAAATTATATGGTAGAGAAGAGGCGTCTAGTCAAGAATTTCGTGATATAACGGATAATCTACGTCATGTAGGTTTCAAAGCTAGCTTCATTTCAGGAATTATGATGCCAGTATTGAATGGTATCTCTGATTTTATTTACCTTATCATTGCATTTGTTGGCGGTTTACAAGTTATTGCTGGTACCTTAACAATTGGTAACATGCAGGCATTTGTGCAGTATGTTTGGCAAATTAGTCAACCCGTTCAAACCATTACACAATTAGCAGGTGTTTTGCAAAGTGCAAAATCTTCCTTAGAACGTATTTTTGAAGTCTTAGATGAAGAAGAGGAAGCCAATCAAGTCACTGAAAAATTGAGCCATGACTTAACCGGTCAAGTCAGCTTTCATGGTGTCGATTTTCACTATTCTCCGGATAAGCCACTTATCCGCGACTTTAACTTAGACGTAGAACCAGGGCAAATGATTGCAATTGTAGGGCCAACAGGTGCAGGTAAGACAACACTTATAAACTTACTCATGAGATTCTACGATGTTAGTGAAGGTGCTATCACCGTAGATGGTCACGATATTAGACACCTATCACGCCAAGATTTCCGGCAACAATTTGGCATGGTGTTGCAAGATGCTTGGTTATATGAAGGTACAATAAAAGAAAATCTTAGATTCGGTAATCTTGAAGCCAGTGATGAGGATATAGTTGCTGCTGCCAAAGCTGCGAATGTTGACCACTTTATTCGAACGTTACCTGGTGGCTACAATATGGTGATGAATCAAGAATCAAGCAATATCTCCTTAGGACAAAAGCAACTGTTGACTATTGCACGTGCTTTATTAGCAGATCCTAAAATTTTAATTTTAGATGAAGCGACTTCATCTGTTGATACAAGGTTGGAATTGCTTATTCAAAAAGCTATGAAAAAATTGATGGAAGGAAGAACTAGTTTTGTCATTGCACACCGTCTATCAACGATTCAAGAGGCAGACAACATTTTAGTTCTAAAGGATGGTCAAATCATCGAACAAGGTAATCACCAGAAACTCCTAGCAGATAAAGGATTTTATTACGAATTATATAATAGCCAATTTTCAAATAGTAAA

SEQ ID NO: 7050 - protein, 589 aa, Streptococcus agalactiae
MRKKSVFLRLWSYLTRYKATLFLAIFLKVLSSFMSVLEPFILGLAITELTANLVDMAKGVSGAELNVPYIAGILIIYFFRGVFYELGSYGSNYFMTTVVQKSIRDIRHDLNHKINKVPVSYFDKHQFGDMLGRFTSDVETVSNALQQSFLQIINAFLSIILVVVMVLYLNVPLAMIIIACIPVTYFSAQAILKRSQPYFKEQAKILGELNGFVQEKLTGFNIIKLYGREEASSQEFRDITDNLRHVGFKASFISGIMMPVLNGISDFIYLIIAFVGGLQVIAGTLTIGNMQAFVQYVWQISQPVQTITQLAGVLQSAKSSLERIFEVLDEEEEANQVTEKLSHDLTGQVSFHGVDFHYSPDKPLIRDFNLDVEPGQMIAIVGPTGAGKTTLINLLMRFYDVSEGAITVDGHDIRHLSRQDFRQQFGMVLQDAWLYEGTIKENLRFGNLEASDEDIVAAAKAANVDHFIRTLPGGYNMVMNQESSNISLGQKQLLTIARALLADPKILILDEATSSVDTRLELLIQKAMKKLMEGRTSFVIAHRLSTIQEADNILVLKDGQIIEQGNHQKLLADKGFYYELYNSQFSNSK

SEQ ID NO: 7051 - protein, 1737 aa, Streptococcus agalactiae
ATGGCATATATTTGGTCTTATTTGAAAAGGTACCCCAATTGGTTATGGCTTGATTTACTAGGAGCTATGCTTTTTGTGACGGTTATCCTAGGAATGCCCACAGCCTTAGCGGGTATGATTGATAATGGCGTTACAAAAGGTGATCGGACTGGAGTTTATCTGTGGACGTTCATCATGTTTATATTTGTTGTACTAGGTATTATTGGGCGTATTACGATGGCTTACGCATCTAGTCGCTTAACGACAACAATGATTAGAGATATGCGTAATGATATGTATGCTAAGCTTCAAGAATACTCCCATCATGAATATGAACAGATAGGTGTATCTTCACTAGTGACACGTATGACAAGCGATACTTTTGTTTTGATGCAATTTGCTGAAATGTCTTTACGTTTAGGCCTAGTAACTCCTATGGTAATGATTTTTAGCGTGGTTATGATACTAATTACGAGTCCATCTTTGGCTTGGCTTGTAGCGGTTGCGATGCCTCTTTTGGTAGGAGTCGTTTTATATGTAGCTATAAAAACAAAACCTTTATCTGAAAGACAACAGACTATGCTTGATAAAATCAATCAATATGTTCGTGAAAATTTAACAGGGTTACGCGTTGTTAGAGCCTTTGCAAGAGAGAATTTTCAATCACAAAAATTTCAAGTCGCTAACCAACGTTACACAGATACTTCAACTGGTCTTTTTAAATTAACAGGGCTAACAGAACCACTTTTCGTTCAAATTATTATTGCAATGATTGTGGCTATCGTTTGGTTTGCTTTGGATCCCTTACAAAGAGGTGCTATTAAAATAGGGGATTTAGTTGCTTTTATCGAATATAGCTTCCATGCTCTCTTTTCATTTTTGCTATTTGCCAATCTTTTTACTATGTATCCTCGTATGGTGGTATCAAGCCATCGTATTAGAGAGGTGATGGATATGCCAATCTCTATCAATCCTAATGCCGAAGGTGTTACGGATACGAAACTTAAAGGGCATTTAGAATTTGATAATGTAACATTCGCTTATCCAGGAGAAACAGAGAGTCCCGTTTTGCATGATATTTCTTTTAAAGCTAAGCCTGGAGAAACAATTGCTTTTATTGGTTCAACAGGTTCAGGAAAATCTTCTCTTGTTAATTTGATTCCACGTTTTTATGATGTGACACTTGGAAAAATCTTAGTAGATGGAGTTGATGTAAGAGATTATAACCTTAAATCACTTCGCCAAAAGATTGGATTTATCCCCCAAAAAGCTCTTTTATTTACAGGGACAATAGGAGAGAATTTAAAATATGGAAAAGCTGATGCTACTATTGATGATCTTAGACAAGCGGTTGATATTTCTCAAGCTAAAGAGTTTATTGAGAGTCACCAAGAAGCCTTTGAAACGCATTTAGCTGAAGGTGGGAGCAATCTTTCTGGGGGTCAAAAACAACGGTTATCTATTGCTAGGGCTGTTGTTAAAGATCCAGATTTATATATTTTTGATGATTCATTTTCTGCTCTCGATTATAAGACAGACGCTACTTTAAGAGCGCGTCTAAAAGAAGTAACCGGTGATTCTACAGTTTTGATAGTTGCTCAAAGGGTGGGTACGATTATGGATGCTGATCAGATTATTGTCCTTGATGAAGGCGAAATTGTCGGTCGTGGTACCCACGCTCAATTAATAGAAAATAATGCTATTTATCGTGAAATCGCTGAGTCACAACTGAAGAACCAAAACTTATCAGAAGGAGAG

SEQ ID NO: 7052 - protein, 579 aa, Streptococcus agalactiae
MAYIWSYLKRYPNWLWLDLLGAMLFVTVILGMPTALAGMIDNGVTKGDRTGVYLWTFIMFIFVVLGIIGRITMAYASSRLTTTMIRDMRNDMYAKLQEYSHHEYEQIGVSSLVTRMTSDTFVLMQFAEMSLRLGLVTPMVMIFSVVMILITSPSLAWLVAVAMPLLVGVVLYVAIKTKPLSERQQTMLDKINQYVRENLTGLRVVRAFARENFQSQKFQVANQRYTDTSTGLFKLTGLTEPLFVQIIIAMIVAIVWFALDPLQRGAIKIGDLVAFIEYSFHALFSFLLFANLFTMYPRMVVSSHRIREVMDMPISINPNAEGVTDTKLKGHLEFDNVTFAYPGETESPVLHDISFKAKPGETIAFIGSTGSGKSSLVNLIPRFYDVTLGKILVDGVDVRDYNLKSLRQKIGFIPQKALLFTGTIGENLKYGKADATIDDLRQAVDISQAKEFIESHQEAFETHLAEGGSNLSGGQKQRLSIARAVVKDPDLYIFDDSFSALDYKTDATLRARLKEVTGDSTVLIVAQRVGTIMDADQIIVLDEGEIVGRGTHAQLIENNAIYREIAESQLKNQNLSEGE

SEQ ID NO: 7053 - protein, 471 aa, Streptococcus agalactiae
ATGATTATCCGTCCGATTATTAAAAATGATGACCAAGCAGTTGCACAATTAATTCGACAAAGTTTACGCGCCTATGATTTAGATAAACCTGATACAGCATATTCAGACCCTCACTTAGATCATTTGACCTCATACTACGAAAAAATAGAGAAGTCAGGATTCTTTGTCATTGAGGAGAGAGATGAGATTATTGGCTGTGGCGGCTTTGGTCCGCTGAAAAATCTAATTGCAGAGATGCAGAAGGTGTACATTGCAGAACGTTTCCGTGGTAAGGGGCTTGCTACTGATTTAGTGAAAATGATTGAAGTAGAAGCTCGAAAAATTGGGTATAGACAACTTTATTTAGAGACAGCCAGTACTTTGAGTAGGGCAACTGCGGTTTATAAGCATATGGGATATTGTGCCTTATCGCAACCAATAGCAAATGATCAAGGTCATACAGCTATGGATATTTGGATGATTAAAGATTTA

SEQ ID NO: 7054 - protein, 157 aa, Streptococcus agalactiae; identical to SEQ ID NO: 2500

SEQ ID NO: 7055 - protein, 157 aa, Streptococcus agalactiae
ATGAATGGAAAATACTATCACTCGTATAGAAAATGATATGCAAACATGTGGTAGTGATTTTACAAGGTTATCTGATTTACAAAAGGAATTAGATGCAAAAAATGAAGCACTTCTAGAAAAGTATGACCGTTATGAGTACCTTAGTGAGTTAGACACA

SEQ ID NO: 7056 - protein, 53 aa, Streptococcus agalactiae
  VARIANT 3: Xaa = Any Amino Acid
MIXENTITRIENDMQTCGSDFTRLSDLQKELDAKNEALLEKYDRYEYLSELDT

SEQ ID NO: 7057 - protein, 1666 aa, Streptococcus agalactiae
ATGAGCGATTTTTTAGTAGATGGATTGACTAAGTCGGTTGGTGATAAGACGGTCTTTAGTAATGTTTCATTTATCATCCATAGTTTAGACCGTATTGGGATTATTGGTGTCAATGGAACTGGAAAGACAACACTATTAGATGTTATTTCGGGTGAATTAGGTTTTGATGGTGATCGTTCCCCTTTTTCATCAGCTAATGATTATAAGATTGCTTATTTAAAACAAGAACCAGACTTTGATGATTCTCAGACAATTTTGGACACCGTACTTTCTTCTGACTTAAGAGAGATGGCTTTAATTAAAGAATATGAATTATTGCTTAATCACTACGAAGAAAGTAAGCAATCACGTCTAGAGAAAGTAATGGCAGAAATGGATTCTTTAGATGCTTGGTCTATTGAGAGCGAAGTCAAAACAGTATTATCCAAATTAGGTATTACTGATTTGCAGTTGTCGGTTGGTGAATTATCAGGAGGATTACGAAGACGTGTTCAATTAGCGCAAGTATTATTAAATGATGCAGATTTATTGCTCTTAGACGAACCTACTAACCACTTAGATATTGACACTATTGCATGGTTAACGAATTTTTTGAAAAATAGTAAAAAGACAGTGCTTTTTATAACTCATGATCGTTATTTTCTAGACAATGTTGCAACACGTATTTTTGAATTAGATAAGGCACAGATTACAGAATATCAAGGCAATTATCAGGATTATGTCCGACTTCGTGCAGAACAAGACGAGCGTGATGCTGCTAGTTTACATAAAAAGAAACAGCTTTATAAACAGGAACTAGCTTGGATGCGTGCTCAGCCACAAGCTCGTGCAACGAAACAACAGGCTCGTATTAATCGTTTTCAAAATCTAAAAAACGATTTACACCAAACAAGCGATACAAGCGATTTGGAAATGACATTTGAAACAAGTCGAATTGGGAAAAAGGTTATTAATTTTGAAAATGTCTCTTTTTCTTACCCAGATAAATCTATCTTGAAAGACTTTAATTTGTTAATTCAAAATAAAGACCGTATTGGCATCGTTGGAGATAATGGTGTTGGAAAGTCAACCTTACTTAATTTAATTGTTCAAGATTTACAGCCGGATTCGGGTAATGTCTCTATTGGTGAAACGATACGTGTAGGTTACTTTTCACAACAACTTCATAATATGGATGGCTCAAAACGTGTTATTAATTATTTGCAAGAGGTTGCAGATGAGGTTAAAACTAGTGTCGGTACAACAAGTGTGACAGAACTATTGGAACAATTTCTCTTTCCACGTTCGACACATGGAACACAAATTGCAAAATTATCAGGTGGTGAGAAAAAAAGACTTTACCTTTTAAAAATCCTGATTGAAAAGCCTAATGTGTTACTACTTGATGAGCCGACAAATGACTTAGATATTGCTACATTAACTGTTCTTGAAAATTTTTTACAAGGCTTTGGTGGTCCTGTGATTACAGTTAGTCACGATCGTTACTTTTTAGATAAAGTGGCTAATAAAATTATTGCGTTTGAAGATAACGATATCCGTGAATTTTTTGGTAATTATACTGATTATTTAGATGAAAAAGCATTTAATGAGCAAAATAATGAAGTTATCAGTAAAAAAGAGAGTCCAAGACAATCGTGAAAAGCAAAGTCGTAAAAGAATTCTTACT

SEQ ID NO: 7058 - protein, 556 aa, Streptococcus agalactiae
  VARIANT 542: Xaa = Any Amino Acid
MSDFLVDGLTKSVGDKTVFSNVSFIIHSLDRIGIIGVNGTGKTTLLDVISGELGFDGDRSPFSSANDYKIAYLKQEPDFDDSQTILDTVLSSDLREMALIKEYELLLNHYEESKQSRLEKVMAEMDSLDAWSIESEVKTVLSKLGITDLQLSVGELSGGLRRRVQLAQVLLNDADLLLLDEPTNHLDIDTIAWLTNFLKNSKKTVLFITHDRYFLDNVATRIFELDKAQITEYQGNYQDYVRLRAEQDERDAASLHKKKQLYKQELAWMRAQPQARATKQQARINRFQNLKNDLHQTSDTSDLEMTFETSRIGKKVINFENVSFSYPDKSILKDFNLLIQNKDRIGIVGDNGVGKSTLLNLIVQDLQPDSGNVSIGETIRVGYFSQQLHNMDGSKRVINYLQEVADEVKTSVGTTSVTELLEQFLFPRSTHGTQIAKLSGGEKKRLYLLKILIEKPNVLLLDEPTNDLDIATLTVLENFLQGFGGPVITVSHDRYFLDKVANKIIAFEDNDIREFFGNYTDYLDEKAFNEQNNEVISKKESXKTSREKQSRKRILT

SEQ ID NO: 7059 - protein, 1206 aa, Streptococcus agalactiae
ATGAGATTAAATTATTTGCCTTCTGAGTTTCAGAAGGCTTTACCAATATTAAAAAAGATAAAAAAAGCCGGTTATGAAGCATACTTTGTAGGTGGTAGTGTTCGGGATGTTTTACTTGACCGTCCAATTCATGATGTTGATATAGCAACGTCATCTTATCCAGAAGAAACAAAGCAGATTTTTAAAAGGACAGTTGATGTTGGTATTGAACATGGAACAGTCTTAGTATTGGAAAAAGGTGGTGAATATGAGATTACCACTTTTAGGACTGAGGAGGTTTATGTTGATTATAGGCGTCCGAGTCAGGTCAATTTTGTTAGGTCGCTAGAAGAAGATCTAAAACGTCGAGATTTCACAGTTAATGCCTTTGCTTTAAATGAAGATGGAGAAGTTATTGATCTCTTTCATGGATTGGATGATTTAGATAATCACCTTCTTAGAGCAGTAGGACTCGCCAGTGAGCGTTTTAATGAAGATGCTCTTCGAATTATGCGAGGTTTGCGTTTTTCTGCTAGTCTAAATTTTGATATCGAAACAACAACTTTTGAGGCAATGAAAAAGCACGCGTCATTATTGGAGAAAATATCTGTTGAGCGTTCTTTTATTGAATTTGATAAACTTCTATTAGCACCTTATTGGCGTAAAGGAATGCTGGCACTAATAGATAGTCATGCTTTTAATTATCTACCATGCTTAAAAAATAGGGAATTACAATTAAGCGCCTTTTTGTCCCAGTTAGATAAAGATTTTTTATTTGAGACATCAGAACAAGCTTGGGCATCACTCATCTTGAGTATGGAAGTTGAACACACAAAGACTTTTTTAAAAAAATGGAAGACATCAACTCACTTTCAAAAAGATGTTGAGCATATAGTGGATGTTTATCGTATTCGTGAACAAATGGGATTGGCTAAAGAACATCTTTATCGTTATGGAAAAACTATAATAAAACAAGCGGAAGGTATTCGCAAAGCAAGAGGCTTGATGGTTGATTTCGAAAAAATAGAACAACTAGATAGTGAGTTAGCAATCCATGATAGGCATGAGATAGTTGTCAATGGTGGCACCTTAATCAAGAAATTAGGAATAAAACCTGGTCCACAGATGGGAGATATTATCTCTCAAATTGAATTAGCCATTGTTTTAGGACAACTGATTAATGAAGAAGAGGCTATTTTACATTTTGTTAAGCAGTACTTGATGGAT

SEQ ID NO: 7060 - protein, 402 aa, Streptococcus agalactiae
MRLNYLPSEFQKALPILKKIKKAGYEAYFVGGSVRDVLLDRPIHDVDIATSSYPEETKQIFKRTVDVGIEHGTVLVLEKGGEYEITTFRTEEVYVDYRRPSQVNFVRSLEEDLKRRDFTVNAFALNEDGEVIDLFHGLDDLDNHLLRAVGLASERFNEDALRIMRGLRFSASLNFDIETTTFEAMKKHASLLEKISVERSFIEFDKLLLAPYWRKGMLALIDSHAFNYLPCLKNRELQLSAFLSQLDKDFLFETSEQAWASLILSMEVEHTKTFLKKWKTSTHFQKDVEHIVDVYRIREQMGLAKEHLYRYGKTIIKQAEGIRKARGLMVDFEKIEQLDSELAIHDRHEIVVNGGTLIKKLGIKPGPQMGDIISQIELAIVLGQLINEEEAILHFVKQYLMD

SEQ ID NO: 7061 - protein, 846 aa, Streptococcus agalactiae
ATGAAATTAGCACTTATTACGGATACCTCAGCTTACTTGCCTGAGGCTATCGAAAATCATGAAGATGTCTATGTTTTAGATATTCCAATTATCATTGATGGTAAAACTTATATTGAGGGACAAAATCTGACATTAGACCAATATTATGATAAGCTAGCGGCATCAAAAGAATTACCTAAAACAAGTCAGCCTAGCTTAGCTGAACTAGATGATCTCTTATGTCAATTGGAGAAAGAAGGGTATACACACGTCCTTGGTTTATTCATTGCAGCGGGGATATCAGGTTTCTGGCAGAATATTCAGTTTCTTATTGAAGAACATCCAAATTTGACAATTGCTTTTCCGGATACTAAAATAACTTCAGCACCACAGGGCAATTTAGTTAGAAATGCTTTGATGTGTTCACGTGAAGGGATGGATTTTGATGTCATAGTTAACAAGATACAATCACAAATTGAAAAAATTGAAGGATTTATTGTTGTTAATGATTTGAATCATCTAGTAAAAGGTGGTAGATTGTCAAACGGTTCAGCTATCATTGGTAACCTTTTAAGTATCAAGCCGGTCTTACATTTTAATGAAGAAGGTAAAATCGTTGTCTATGAGAAAGTGCGTACAGAGAAAAAAGCCTTAAAACGCTTGGCTGAGATTGTCAAAGAAATGACAGCAGATGGTGAATATGATATTGCTATTATTCACTCTAGAGCACAAGATAAGGCAGAACAATTATATAATTTGTTAGCTAAAGCTGGTCTTAAAGACGATTTAGAAATTGTATCATTTGGTGGCGTTATTGCAACTCATCTTGGTGAAGGTGCGGTTGCCTTTGGTATTACCCCCAAAAAT

SEQ ID NO: 7062 - protein, 282 aa, Streptococcus agalactiae; identical to SEQ ID NO: 2506

SEQ ID NO: 7063 - protein, 378 aa, Streptococcus agalactiae
ATGGAAGTCATTCGTGAACAAGAATTTGTCAATCAATACCACTATGATGCGCGCAATTTAGAATGGGAAGAGGAAAATGGTACCCCAAAAACAAATTTTGAAGTTACTTTCCAATTAGCTAATAGAGATGAAGCAGCAAAAGTAACGAGCATTGTAGCAGTGTTACAATTTGTTATTGTACGTGATGAGTTTGTTATTTCTGGTGTCATTTCACAAATGGCTCATATCCAAGGGCGCCTTATCAATGAGCCTAGTGAGTTTAGTCAAGATGAAGTTGAGAATCTAGCAGCTCCTCTTTTAGAAATCGTTAAACGTCTGACTTATGAAGTTACAGAAATTGCTTTAGATAGACCAGGAGTAACATTGGAGTTTAATAGT

SEQ ID NO: 7064 - protein, 126 aa, Streptococcus agalactiae; identical to SEQ ID NO: 2508

SEQ ID NO: 7065 - protein, 545 aa, Streptococcus agalactiae
TTGTACCATATTTTGTTTCGCAGGAAGTCTATTGAAGAAATTTACAAAAATTATCCTAATATCCCCTATATCTCACCTGAAAGAGACTTGGCTGAAATTAATTTTAGTAAAGTTGTTCCTAGGAAAAATATGGAAGAAACTAGTGAAGGACTCTTGCCTGGAGAATTATCTTATTATGGCGTATACAGTTTGGAACTTTCACAACTGAAACAAGTTTTTCAAAATATTTTGAATACATTTATGGTATAAATGGAAAAGAACACCTAGAATTTTTAATAAAAAATGGATTTGTAAGAATGGAGTCACCGCTTGATTCTTTAGATCACTTATCTGCTCCACTTTTAAAACTATTCTTAAAAGAAAAAAACGTAAAAGGCTTGTCAAAGATGAAACGCTCTGATTTAGATCAGGCAATAGCTATTGCTTTTACAGAAGAGGAATTAGGGAAGTTGTTTGTTGTCAGAGGGTTGGCACTTACAGAAAAAGGTTTAGCAGCCTTGAGTAACAATCAAGAAGTGATTGATAGACATCCTAAGAAGAAGTTC

SEQ ID NO: 7066 - protein, 182 aa, Streptococcus agalactiae
MYHILFRRKSIEEIYKNYPNIPYISPERDLAEINFSKVVPRKNMEETSEGLLPGDIILLWRIQFGTFTTETSFSKYFEYIYGINGKEHLEFLIKNGFVRMESPLDSLDHLSAPLLKLFLKEKNVKGLSKMKRSDLDQAIAIAFTEEELGKLFVVRGLALTEKGLAALSNNQEVIDRHPKKKF

SEQ ID NO: 7067 - protein, 119 aa, Streptococcus agalactiae
ATGGTTGAATCAACTCTTATTCAAAGTGGTTTTACGATTTCAAAAACTCATCTTAGTGCTGAGGATACGGTGATGTGGATGCAACAGAGGTAAAAATCAATCGTCCTAAAAAAATCAAC

SEQ ID NO: 7068 - protein, 40 aa, Streptococcus agalactiae
MVESTLIQSGFTISKTHLSAEDTVIVDATEVKINRPKKIN

SEQ ID NO: 7069 - protein, 387 aa, Streptococcus agalactiae; identical to SEQ ID NO: 6711

SEQ ID NO: 7070 - protein, 129 aa, Streptococcus agalactiae; identical to SEQ ID NO: 882

SEQ ID NO: 7071 - protein, 492 aa, Streptococcus agalactiae
ATGATTAAATGGAATGAAAAAGAAACAAAACTAGTTGATACAAGTTTTTCAATTATGTTGTATCTAAAAACGCTATTTGCAGTCGGACAAGTAGTAGCTGGCGTTTTATTATATTATTTTAAACCTACACAAATAAAACATCTCCTATTTCTTTTAACTGAAGGTGAAGTTCACGGTGGGATTCATGGTTTTATTTCTGCTCATTTCTTGAAAATAAGCAGTTATATTAATGATTCGGCTAGTCATTTAGCCGCTATCTATCTATTAATTCATGGCGGTATCAAATTAGTAGCACTTATTTTATTACATAAAGAGAAATTATTTGCTTACCCTTTATCAATTTTAGTTTTCGTTGGGTTTATCATTTTCCAACTAAGGGAATATTTTTCTAGTCATAGCATTTTAATGATTTTTCTATGTGTATTTGATGTTATCATGATAATTTTAACATGGTTAGAATATCAGAAAATGAAATTGAATTTTTCAAAAAGG

SEQ ID NO: 7072 - protein, 164 aa, Streptococcus agalactiae; identical to SEQ ID NO: 2512

SEQ ID NO: 7073 - protein, 123 aa, Streptococcus agalactiae
ATGGCTCCTCATGGAGGGATTTTTGTCATCGCATTAACAAGTAATCCTTTACTTTATATTCTATTTATTCTAATTGGAGCGGTAGTCTCAGGTGTACTCTTTGGCTTGTTCCGTAAAACAAAA

SEQ ID NO: 7074 - protein, 41 aa, Streptococcus agalactiae
MAPHGGIFVIALTSNPLLYILFILIGAVVSGVLFGLFRKTK

SEQ ID NO: 7075 - protein, 1593 aa, Streptococcus agalactiae
ATGGATTTAAAAGCAACCAGTAAAGAGGCTGCAATTGATGAAATGATTACAAAATTAGTTGACACAGGTGTTGTGACAAACTTTGCTATTTTTAAAGATGGTATCATGAAGCGTGAGGCACAAACATCAACTGGATTAGGTGATGGTATCGCTATGCCACATAGTAAAAATGCTGCCGTTAAAGAAGCTACTGTCCTTTTTGCAAAATCTGCATCAGGTGTTGATTACGAAGCACTTGATGGACAGCCAACTGATTTATTCTTTATGATTGCTGCGCCAGATGGTGCTAATGATACGCATTTAGCTGCCTTGGCAGAACTATCTAAATATCTTTTAAAAGAAGGGTTCGCTGATCAATTACGTCAAGCAAAAACGCCAGATGACATTATTGCTACTTTTGATAGTAATAGCATTTCTCAAGAAACAGTAGCTCCACAAACAGTACAATCAACAAGTAAAGGTTCAGATTATATTGTTGCAGTAACAGCTTGCACTACGGGAATTGCCCACACGTATATGGCAGAAGAAGCTTTAAAGAAAAAAGCAGCTGAAATGGGTGTAGGTATTAAAGTTGAAACAAATGGCGCTTCTGGTGTAGGAAATAAGTTGACTTCAAGTGATATTGCAAGGGCTAAGGGTGTTATTATTGCAGCAGATAAGGCTGTAGAGATGGATCGTTTTGATGGCAAACCTTTGGTATCACGTCCGGTAGCTGATGGTATTAAAAAAAGTGAAGACTTAATTAACATTATTCTCGATAATAAGGCACAAACCTATCATGCAAAAAATCAAAATGATAAACAATCAGGTGAATCTGATGGAAAATCAGGCTTAGGCTCTGCTTTTTATAAACACCTTATGGGTGGTGTATCACAAATGTTACCATTCGTTATTGGTGGTGGTATTATGATTGCGATTGCTTTCCTTTTTGATAACATACTTGGTGTACCAAAAGACCAATTAAGTAATTTAGGTTCATACCATGAAATTGCAGCCTTATTCAAAAATATCGGTGGCGCAGCATTTGCATTTATGTTACCAGTATTGGCAGGTTATATCGCTTATTCAATAGCTGAAAAACCAGGACTAGTAGCTGGCTTCGTAGCTGGTTCAATTGCATCAAGTGGACTGGCATTCGGTAAAGTACCTTTTGCAGAAGGTGGGAAAGCAACCTTAGCATTAGCAGGTGTGCCATCAGGTTTCTTAGGGGCTTTAGTAGGTGGTTTCTTAGCTGGTGGAGTTATCCTACTACTTAGAAAATTACTTTCAGGTCTCCCAAAATCGCTTGAAGGTATTAAATCAATTCTTCTATACCCATTGTTAGGTGTTTTGATTACAGGTTTCTTGATGTTGCTCGTAAACATTCCAATGGCAGCTATCAACACAGCTCTTAACACTTTCTTACAAGGTTTATCTGGTAGTTCAGCAGTCTTGATGGGCTTACTAGTTGGTGGTATGATGGCTGTAGATATGGGTGGGCCTGTTAATAAAGCAGCTTATGTTTTTGGTACAGGTACTCTTGCAGCAACTGTTGCAAATGGCGGCTCTGTTGTTATGGCAGCTGTAATGGCTGGAAGGANNNNNTTAATTAAT

SEQ ID NO: 7076 - protein, 531 aa, Streptococcus agalactiae
  VARIANT 527, 528: Xaa = Any Amino Acid
MDLKATSKEAAIDEMITKLVDTGVVTNFAIFKDGIMKREAQTSTGLGDGIAMPHSKNAAVKEATVLFAKSASGVDYEALDGQPTDLFFMIAAPDGANDTHLAALAELSKYLLKEGFADQLRQAKTPDDIIATFDSNSISQETVAPQTVQSTSKGSDYIVAVTACTTGIAHTYMAEEALKKKAAEMGVGIKVETNGASGVGNKLTSSDIARAKGVIIAADKAVEMDRFDGKPLVSRPVADGIKKSEDLINIILDNKAQTYHAKNQNDKQSGESDGKSGLGSAFYKHLMGGVSQMLPFVIGGGIMIAIAFLFDNILGVPKDQLSNLGSYHEIAALFKNIGGAAFAFMLPVLAGYIAYSIAEKPGLVAGFVAGSIASSGLAFGKVPFAEGGKATLALAGVPSGFLGALVGGFLAGGVILLLRKLLSGLPKSLEGIKSILLYPLLGVLITGFLMLLVNIPMAAINTALNTFLQGLSGSSAVLMGLLVGGMMAVDMGGPVNKAAYVFGTGTLAATVANGGSVVMAAVMAGRXXLIN

SEQ ID NO: 7077 - protein, 909 aa, Streptococcus agalactiae
ATGATTTATACAGTAACATTAAATCCATCGATTGATTTTATTGTTCGTCTAGATACACTATTGTTGGGTAGTGTTAACCGTATGACTAGCGATGATAAATATGTAGGTGGTAAAGGAATTAATGTTAGTCGCATATTAAAACGCTTAAAAATTGACAATACTGCTACAGGTTTTATCGGTGGATTTACAGGACATTTTGTTGAAGATGGACTTGTATCAGAAGGTATCAAAACTGACTTTGTTTCTGTTAATGAAGATACACGTATCAACGTTAAAGTAAAAGCAAAAATTGAAACTGAAATCAATGGCGGGGGTCCTAGGATAACAAATGAACAACTTCATCGTCTAGAGAAACTTCTTTCGAGACTAACACCTGAGGACACAGTAGTTTTCGCAGGTTCAGCACCAGCTAGCCTTGGAAATAAGGTCTATAATACATTGATTCCAATTGCTAAAAAGACAGGAGCGGAAGTTGTTTGCGATTTTGAAGGTCAGACACTTTTAGACGCTCTTGCTTATCAGCCTCTTTTAGTAAAACCGAATAACCATGAATTAGCAGATATTTTTGGCGTAGAGCTAGAAGGTCTGCCTGATATCGAAAAATATGCACATAAGATTCTAGATAAAGGAGCTAAGAATGTTATCGTTTCTATGGCAGGGGATGGTGCATTGTTAGTAACTCCAGAAGCTTCATATTTTGCAAAACCGATTAAGGGTGAAGTGAAAAATTCCGTTGGGGCTGGTGATTCAATGGTAGCTGGCTTTACAGGAGAATTTGTTAAGTCAAAAAATCCAGTAGAAGCACTAAAATGGGGCGTAGCTTGTGGTACAGCAACCACTTTCTCAGATGATTTAGCAACAGCTGAGTTTATCCAAGATATTTATAATAAAGTTGAGGTAGAAAAATTA

SEQ ID NO: 7078 - protein, 303 aa, Streptococcus agalactiae
MIYTVTLNPSIDFIVRLDTLLLGSVNRMTSDDKYVGGKGINVSRILKRLKIDNTATGFIGGFTGHFVEDGLVSEGIKTDFVSVNEDTRINVKVKAKIETEINGGGPRITNEQLHRLEKLLSRLTPEDTVVFAGSAPASLGNKVYNTLIPIAKKTGAEVVCDFEGQTLLDALAYQPLLVKPNNHELADIFGVELEGLPDIEKYAHKILDKGAKNVIVSMAGDGALLVTPEASYFAKPIKGEVKNSVGAGDSMVAGFTGEFVKSKNPVEALKWGVACGTATTFSDDLATAEFIQDIYNKVEVEKL

SEQ ID NO: 7079 - protein, 741 aa, Streptococcus agalactiae
ATGCTAAAGTCAAAGAGAAAAGAAATTATCTTATCACGACTTGAGCAAAATAAGAGTGTTACTTTAGATGAATTAACGTCTATCTTAGAGACTTCTGAATCTACAGTTCGCAGGGATTTAGATGAACTTGAATCTGAAGGTTTTTTAAAAAGGGTGCATGGTGGTGCTGAATTACCATACTCACTTGGCCAGGAATTAAGTAATCAAGAAAAAGCTATCAAAAACGTTCAAAAAAAATTGGATATTGCTAGACAAACTGCAAAGCTGATAGCAAAGCAAGATGTTATATTTATTGATGCCGGAACTACGACAGAATTATTAATTGATTTTCTCCCTCACGAGCAATTAACGGTGGTGACGAATTCTATTCATCATGCTGCAAAGTTAGTTGATAGAGGGATAAAAACAATCATTATCGGAGGAGCGGTTAAACATTCAACAGATGCTAGTATTGGCCAGGTAGCCATTAATCAGATTAGGCAGATAACGGTTGACAAAGCTTTTCTGGGGATGAATGGTATAGATGAAGTTTATTTAACTACACCAGATTTAGAAGAAGCTGCTATTAAAGAAGCTATTATTAATAATAGTCAACAAACCTTTATTCTAATGGATTCATCTAAAATTGGACAAGTTACATTTGCTAAAGTGAAAGAGATAAATGACATTAATTTAGTAACTAATAAGACTGATTCAGAACTTATGACAATAATAAAAGAGAAAATGAAGGTGATTCAAGTA

SEQ ID NO: 7080 - protein, 247 aa, Streptococcus agalactiae
MLKSKRKEIILSRLEQNKSVTLDELTSILETSESTVRRDLDELESEGFLKRVHGGAELPYSLGQELSNQEKAIKNVQKKLDIARQTAKLIAKQDVIFIDAGTTTELLIDFLPHEQLTVVTNSIHHAAKLVDRGIKTIIIGGAVKHSTDASIGQVAINQIRQITVDKAFLGMNGIDEVYLTTPDLEEAAIKEAIINNSQQTFILMDSSKIGQVTFAKVKEINDINLVTNKTDSELMTIIKEKMKVIQV

SEQ ID NO: 7081 - protein, 1233 aa, Streptococcus agalactiae
ATGACGCTTCGAGAATTAACAATAGAAGAATTTAAAGAACATTCAGGAAATTATGATTCACAATCATTTTTACAAACACCTGAGATGGCTAAACTTTTAGAAAAACGCGGCTATGATGTTAGGTATTTGGGATATCGAGTAGAAAATAAACTAGAGATAATCAGTTTATCTTATATTATGCCAGTCACTGGTGGTTTTCAAATGAAAATTGATTCAGGACCAGTTCATTCAAATTCTAAGTATCTAAAACAATTTTATAAAGCATTGCAAGGCTATGCCAAATCCAACGGTGTTCTAGAATTAATAGTTGAGCCTTATGATGATTACCAATTATTCACTAGTTCGGGAGTTCCTAGTAATCAGGGAAATGATAATCTGATTGAAGATTTTACCAGTTCAGGTTATCACCATGATGGTTTAACAACTGGTTTTACTGGTAAATATTTATCTTGGCACTATGTTAAAAATTTAGAAGGTGTCACTTCTGAAACGTTACTATCTTCATTCTCTAAGACAGGACGAGCTTTGGTTAAGAAAGCAATGTCTTTTGGAATCAAGGTTCGCGTTCTTAAACGTGATGAGCTACATTTATTTAAAGAGATAACAACTTCTACGTCAAATAGACGTGATTATATGGATAAGTCCTTAGATTATTATCAAGATTTTTACGATAGCTTTGAAGGCAAGGCTGAATTTGTGATTGCCACTTTAAATTTTAGAGAATACGACCATAACTTGCAAATAAAAGCTGAAGCATTGGAAAATAAGCTTAAATTGCTTGATGAACGTTTTAGGGAAAATGCAGACTCTCCTAAGTATCATAGGCAACGCTCTGAAATAATTAATCAACTGGCTAGTTTTGAAACACGACGACAAGAAGTTCAGTCATTTATTCAAAAGTATGATAACCAAGACGTTGTTTTAGCTGGTAGTCTATTTGTTTATAGTCTTAAGGAGACAGTTTATTTCTTTTCAGGATCCTACACAGAATTTAATAAATTTTATGCACCAGCAGTTCTTCAGGAATATGTTATGCAAGAGGCTCTCAAAAGAGGTTCTACTTTCTATAACCTCCTAGGTATTCAGGGAACTTTTGATGGTTCAGATAGTATTCTTCGCTTTAAACAGAATTTTAATGGTTATATCATTCGTAAAATGGGAACTTTTAACTATTATCCAAGTCCTTTTAAATACAAAGGAATTCAGCTTCTTAAAAAGGTTTTGAAGAGAAAT

SEQ ID NO: 7082 - protein, 411 aa, Streptococcus agalactiae
MTLRELTIEEFKEHSGNYDSQSFLQTPEMAKLLEKRGYDVRYLGYRVENKLEIISLSYIMPVTGGFQMKIDSGPVHSNSKYLKQFYKALQGYAKSNGVLELIVEPYDDYQLFTSSGVPSNQGNDNLIEDFTSSGYHHDGLTTGFTGKYLSWHYVKNLEGVTSETLLSSFSKTGRALVKKAMSFGIKVRVLKRDELHLFKEITTSTSNRRDYMDKSLDYYQDFYDSFEGKAEFVIATLNFREYDHNLQIKAEALENKLKLLDERFRENADSPKYHRQRSEIINQLASFETRRQEVQSFIQKYDNQDVVLAGSLFVYSLKETVYFFSGSYTEFNKFYAPAVLQEYVMQEALKRGSTFYNLLGIQGTFDGSDSILRFKQNFNGYIIRKMGTFNYYPSPFKYKGIQLLKKVLKRN

SEQ ID NO: 7083 - protein, 1632 aa, Streptococcus agalactiae
ATGATGAAAAAAGGACAAGTAAATGATACTAAGCAATCTTACTCTCTACGTAAATATAAATTTGGTTTAGCATCAGTAATTTTAGGGTCATTCATAATGGTCACAAGTCCTGTTTTTGCGGATCAAACTACATCGGTTCAAGTTAATAATCAGACAGGCACTAGTGTGGATGCTAATAATTCTTCCAATGAGACAAGTGCGTCAAGTGTGATTACTTCCAATAATGATAGTGTTCAAGCGTCTGATAAAGTTGTAAATAGTCAAAATACGGCAACAAAGGACATTACTACTCCTTTAGTAGAGACAAAGCCAATGGTGGAAAAAACATTACCTGAACAAGGGAATTATGTTTATAGCAAAGAAACCGAGGTGAAAAATACACCTTCAAAATCAGCCCCAGTAGCTTTCTATGCAAAGAAAGGTGATAAAGTTTTCTATGACCAAGTATTTAATAAAGATAATGTGAAATGGATTTCATATAAGTCTTTTTGTGGCGTACGTCGATACGCAGCTATTGAGTCACTAGATCCATCAGGAGGTTCAGAGACTAAAGCACCTACTCCTGTAACAAATTCAGGAAGCAATAATCAAGAGAAAATAGCAACGCAAGGAAATTATACATTTTCACATAAAGTAGAAGTAAAAAATGAAGCTAAGGTAGCGAGTCCAACTCAATTTACATTGGACAAAGGAGACAGAATTTTTTACGACCAAATACTAACTATTGAAGGAAATCAGTGGTTATCTTATAAATCATTCAATGGTGTTCGTCGTTTTGTTTTGCTAGGTAAAGCATCTTCAGTAGAAAAAACTGAAGATAAAGAAAAAGTGTCTCCTCAACCACAAGCCCGTATTACTAAAACTGGTAGACTGACTATTTCTAACGAAACAACTACAGGTTTTGATATTTTAATTACGAATATTAAAGATGATAACGGTATCGCTGCTGTTAAGGTACCGGTTTGGACTGAACAAGGAGGGCAAGATGATATTAAATGGTATACAGCTGTAACTACTGGGGATGGCAACTACAAAGTAGCTGTATCATTTGCTGACCATAAGAATGAGAAGGGTCTTTATAATATTCATTTATACTACCAAGAAGCTAGTGGGACACTTGTAGGTGTAACAGGAACTAAAGTGACAGTAGCTGGAACTAATTCTTCTCAAGAACCTATTGAAAATGGTTTAGCAAAGACTGGTGTTTATAATATTATCGGAAGTACTGAAGTAAAAAATGAAGCTAAAATATCAAGTCAGACCCAATTTACTTTAGAAAAAGGTGACAAAATAAATTATGATCAAGTATTGACAGCAGATGGTTACCAGTGGATTTCTTACAAATCTTATAGTGGTGTTCGTCGCTATATTCCTGTGAAAAAGCTAACTACAAGTAGTGAAAAAGCGAAAGATGAGGCGACTAAACCGACTAGTTATCCCAACTTACCTAAAACAGGTACCTATACATTTACTAAAACTGTAGATGTGAAGAGTCAACCTAAAGTATCAAGTCCAGTGGAATTTAATTTTCAAAAGGGTGAAAAAATACATTATGATCAAGTGTTAGTAGTAGATGGTCATCAGTGGATTTCATACAAGAGTTATTCCGGTATTCGTCGCTATATTGAAATT

SEQ ID NO: 7084 - protein, 544 aa, Streptococcus agalactiae
MMKKGQVNDTKQSYSLRKYKFGLASVILGSFIMVTSPVFADQTTSVQVNNQTGTSVDANNSSNETSASSVITSNNDSVQASDKVVNSQNTATKDITTPLVETKPMVEKTLPEQGNYVYSKETEVKNTPSKSAPVAFYAKKGDKVFYDQVFNKDNVKWISYKSFCGVRRYAAIESLDPSGGSETKAPTPVTNSGSNNQEKIATQGNYTFSHKVEVKNEAKVASPTQFTLDKGDRIFYDQILTIEGNQWLSYKSFNGVRRFVLLGKASSVEKTEDKEKVSPQPQARITKTGRLTISNETTTGFDILITNIKDDNGIAAVKVPVWTEQGGQDDIKWYTAVTTGDGNYKVAVSFADHKNEKGLYNIHLYYQEASGTLVGVTGTKVTVAGTNSSQEPIENGLAKTGVYNIIGSTEVKNEAKISSQTQFTLEKGDKINYDQVLTADGYQWISYKSYSGVRRYIPVKKLTTSSEKAKDEATKPTSYPNLPKTGTYTFTKTVDVKSQPKVSSPVEFNFQKGEKIHYDQVLVVDGHQWISYKSYSGIRRYIEI

SEQ ID NO: 7085 - protein, 921 aa, Streptococcus agalactiae
ATGTTAGTTTATATTGCTGGTTCAGGCGCTATGGGATGTCGTTTTGGATATCAAATTTCTAAAACAAATCATGATGTTATTTTACTTGATAATTGGGCAGACCATATTATGGCTATTAAAGAAAATGGCTTGAAGGTAACAGGTGATACAGAGGACCTTGTTAAACTTCCTATCATGAAGCCAACTGATGCGACAGAAGAAGCAGATTTAATTATTTTGTTTACTAAAGCAATGCAGTTGCCAAATATGCTTCAAGATATTAAAAAAATTATTGGTAAGAAAACAAAGGTCTTATGTCTTTTAAATGGATTAGGACATGAAGATGTCATTCGTCAATATATCCCTGAACACAATATTTTGATGGGAGTAACAGTTTGGACTGCAGGGTTGAAAGGACCAGGGCATGCTCATCTGGAAGGAGTTGGTTCTGTAAATCTTCAAAGTATCGATCCTAACAATCAAGAAGCAGGTCATCGCGTTACTGAATTGCTTAATGAAGCAAAATTACAGGCTACTTATGACGAAAATGTTTTGCCAAATATTTGGAGAAAAGCTTGTGTTAACGGAACGATGAATTCAACTTGCGCCTTGCTAGATTGTACAATTGGTCAACTCTTTGCTAGTGAAGACGGCGTAAATATGGTACATGAAATTATCCATGAATTTGTTACTGTTGGAAAAGCAGAAGGTGTAGAGCTTGATGAAGAAGAAATAACAAAGTACGTTATGGATACATCTGTTAAAGCAGCCCATCATTACCCTTCAATGCATCAAGACTTAGTTCAAAATCAGCGCTTAACTGAAATTGATTTCTTAAATGGCGCAGTGAATAAAAAAGGTGAAAACCTAGGCATTGATACACCTTACTGTCGATTAATCACACAATTAATTCACACTAAAGAAAATGTACTTAGCATAAAA

SEQ ID NO: 7086 - protein, 307 aa, Streptococcus agalactiae; identical to SEQ ID NO: 2520

SEQ ID NO: 7087 - protein, 1068 aa, Streptococcus agalactiae
ATGACAAATACGGTAACACCAAAAGAGACGGCTGGTTCTTTTATCAATAAAGTGTTAGGTGGGACAGCAACTGCAATCGTTGTAGCACTCATCCCAAATGCTATCCTAGCCACTTTTTTGAAACCATTTTTATCTTACGGACTTGCTGCAGAGTTCTTACACATCGTGCAGGTATTCCAATTTTTCACACCAATTATGGCAGGATTTTTGATTGGTCAACAGTTTAAATTCACCCCAATGCAACAGCTTGCTGTTGGAGGTGCTGCATATATTGGTTCTGGTGCGTGGGCTTACACAGAAGTTATTCAAAAAGGAGTTGCTACTGGTAGTTTCCAATTGCGTGGGATTGGTGATCTCATCAATATGATGCTAACAGCAGCTTTAGCAGTTTTAGCAGTTAAGTGGTTTGGTAATAAATTTGGTTCCCTAACCATTATCTTGTTACCTATTATCATAGGTACAGGCGTAGGCTATTTAGGATGGAAATTACTCCCTTACGTTTCATATGTGACAACACTTATTGGTCAAGGAATTAATTCTTTTACTACTTTACAACCAATTGCGATGTCAATTCTAATTGCGATGGCTTTTTCAATGCTTATTGTAAGTCCTATTTCAACAGTAGCGATTGGTCTAGCGATTGGTCTTAATGGTATGTCAGCAAGTGCAGCTTCAATGGGAGTTGCTTCAACAACAGCAGTGCTAGTTTGGGCAACGATGAAGGCTAATAAGTCTGGAGTTCCAATTGCTATTGCTTTAGGTGCAATGAAGATGATGATGCCAAATTTCCTAAAGCATCCAGTAATGGCGATTCCAATGCTTATGACTGCTACAGTAAGTTCTCTAACAGTCCCATTGTTTAAATTGGTGGGGACACCAGCTTCGTCTGGTTTTGGGCTTGTTGGTGCAGTAGGTCCGATTGCTTCATTTGAAGCAGGAGCAAGTATGTTGATTGTTATCTTATCTTGGCTCGTTATTCCTTTTGCAGTAGGTTTTGTATCACACAAAATTTGTAAAGACATTCTGAAACTTTATAAAGACGATATTTTCGTTTTTGAAGGTCAAAAT

SEQ ID NO: 7088 - protein, 356 aa, Streptococcus agalactiae; identical to SEQ ID NO: 2522

SEQ ID NO: 7089 - protein, 990 aa, Streptococcus agalactiae
ATGAACAAAACAATTTATGATATCACTATTGTAGGAGGCGGACCAGTAGGTCTCTTTGCTGCTTTTTATGCTGGACTACGCGGAGTATCCGTTAAAATTATTGAAAGCCTTTCGGAATTAGGAGGCCAGCCAGCTATCCTTTATCCTGAGAAAAAAATCTATGATATTCCTGGTTATCCGGTGATTACTGGACGTGAATTAATTGATAAACATATTGAACAATTAGAGAGATTTAAAGATTCTATTGAAATCTGTTTAAAAGAAGAAGTTTTATCATTTGAAAAAGTAGATGATGTTTTCACAATTCAAACAGATAAAGATCAACATTTGTCACGTGCTATTGTTTTTGCTTGTGGCAACGGTGCTTTTGCTCCGCGTTTACTAGGTTTGGAAAATGAAGAAAATTATGCAGATAATAATTTATTCTATAACGTTACAAAGTTAGAACAGTTTGCAGGTAAACATGTTGTTATTTGTGGTGGAGGCGACTCAGCTGTTGATTGGGCCAATGAATTAGATAAGATTGCAGCTAGTGTAGCGATTGTTCATCGTAGAGATGCTTTTAGAGCGCATGAGCATAGTGTGGATATACTAAAGGCATCAGGTGTTAGAATTTTAACCCCTTATGTCCCAATTGGTTTAAATGGAGATAGTCAGAGAGTTAGCAGCTTGGTCGTTCAAAAAGTTAAAGGTGATGAAGTAATTGAATTACCTTTAGACAACTTGATTGTTAGTTTTGGCTTTTCTACTTCTAATAAAAATTTACGTTATTGGAATTTGGATTATAAACGGTCTAGTATCAATGTTTCTTCACTTTTTGAGACGACTCAAGAAGGCGTGTATGCTATTGGAGATGCTGCTAATTATCCAGGAAAGGTAGAATTGATTGCAACAGGATATGGGGAAGCACCAGTCGCTATAAACCAAGCTATCAATTATATTTATCCTGATCGAGATAACCGTGTAGTCCATTCAACATCATTGATAAAA

SEQ ID NO: 7090 - protein, 330 aa, Streptococcus agalactiae; identical to SEQ ID NO: 2524

SEQ ID NO: 7091 - protein, 753 aa, Streptococcus agalactiae
ATGATGAAGATTGATATTTTAACTTTATTTCCTGAAATGTTTGCCCCTCTGGAACATTCTATAGTTGGTAAGGCAAAAGAAAGAGGACTTCTTGAAATTAATTATCACAATTTCAGAGAAAATGCTGAGAAGTCTCGACATGTTGATGATGAGCCTTACGGTGGGGGGCAAGGGATGCTTTTACGTGCTCAACCTATTTTTGATACAATTGGTAAAATTGATGCTCAAAAAGCACGTGTTATTTTGCTAGACCCAGCGGGCAGAACATTTGATCAGAATTTTGCAGAAGAACTATCCAAAGAAGATGAATTAATTTTTATTTGTGGTCACTATGAAGGTTATGATGAACGTATAAAATCATTAGTAACAGACGAAGTATCTTTGGGAGATTTTGTTCTTACGGGAGGAGAATTGGCGGCTATGACAATGGTTGATGCTACCGTTCGTCTGATTCCAGAAGTTATAGGTAAAGAAACAAGTCATCAGGATGATTCATTTTCATCGGGTCTATTAGAATATCCTCAGTATACGCGCCCATATGATTATTTAGGCATGACAGTTCCTGATGTTCTCATGAGTGGTCATCATGAAAATATCCGAAAATGGCGTTTAGAGCAAAGTTTGCGAAAAACACTAGAACGTCGACCAGACTTGTTAGAAAATTATGCAATGACGGATGAAGAGAGACTTATCTTAGAGAAAATTAAAACAGAAATAGAAAGAACAGATACAGTAAATGAACAAAACAATTTA

SEQ ID NO: 7092 - protein, 251 aa, Streptococcus agalactiae
MMKIDILTLFPEMFAPLEHSIVGKAKERGLLEINYHNFRENAEKSRHVDDEPYGGGQGMLLRAQPIFDTIGKIDAQKARVILLDPAGRTFDQNFAEELSKEDELIFICGHYEGYDERIKSLVTDEVSLGDFVLTGGELAAMTMVDATVRLIPEVIGKETSHQDDSFSSGLLEYPQYTRPYDYLGMTVPDVLMSGHHENIRKWRLEQSLRKTLERRPDLLENYAMTDEERLILEKIKTEIERTDTVNEQNNL

SEQ ID NO: 7093 - protein, 261 aa, Streptococcus agalactiae
GTGGCAGAGAATCAACTGAGCGACCTTAAAGATGGTGAATTCTATTATCATGAAATTATTGGCTTAGATGTCTATGAAGGGGAAGAGCTGATTGGAAAAATCAAAGAAATTTTACAACCAGGAGCAAATGACGTTTGGGTTGTGGAACGTCATGGAAAACGTGATCTTTTATTACCCTATATCCCGCCAGTAGTATTAGAAGTGGACCTTTCTAATCAGCGTGTTCAAGTTGAATTGATGGAAGGTTTAGATGATGAAGAT

SEQ ID NO: 7094 - protein, 87 aa, Streptococcus agalactiae
MAENQLSDLKDGEFYYHEIIGLDVYEGEELIGKIKEILQPGANDVWVVERHGKRDLLLPYIPPVVLEVDLSNQRVQVELMEGLDDED

SEQ ID NO: 7095 - protein, 288 aa, Streptococcus agalactiae
ATGCTAAAGTCAAAGAGAAAAGAAATTATCTTATCACGACTTGAGCAAAATAAGAGTGTTACTTTAGATGAATTAACGTCTATCTTAGAGACTTCTGAATCTACAGTTCGCAGGGATTTAGATGAACTTGAATCTGAAGGTTTTTTAAAAAGGGTGCATGGTGGTGCTGAATTACCATACTCACTTGGCCAGGAATTAAGTAATCAAGAAAAGCTATCAAAACGTTCAAAAAAATTGGATATTGCTAGACAACTGCAAGCTGATAGCAAAAGCAGATGTTATATTTAT

SEQ ID NO: 7096 - protein, 96 aa, Streptococcus agalactiae
MLKSKRKEIILSRLEQNKSVTLDELTSILETSESTVRRDLDELESEGFLKRVHGGAELPYSLGQELSNQEKLSKRSKKLDIARQLQADSKSRCYIY

SEQ ID NO: 7097 - protein, 198 aa, Streptococcus agalactiae
ATGCCAAACAAATCATATAAACTAACGGAAGGATTGTACCTAGGTATTCAGGGAACTTTTGATGGTTCAGATAGTATTCTTCGCTTTAAACAGAATTTTAATGGTTATATCATTCGTAAAATGGGAACTTTTAACTATTATCCAAGTCCTTTTAAATACAAAGGAATTCAGCTTCTTAAAAAGGTTTTGAAGAGAAAT

SEQ ID NO: 7098 - protein, 66 aa, Streptococcus agalactiae
MPNKSYKLTEGLYLGIQGTFDGSDSILRFKQNFNGYIIRKMGTFNYYPSPFKYKGIQLLKKVLKRN

SEQ ID NO: 7099 - protein, 189 aa, Streptococcus agalactiae
ATGATTTGTTTGGCATTTACTAACTATGATCATAACCACTTACCGCCAAAAAGTTTATTTGACTGGGTTGGTTTTGCTAACTTCGGTAATATCTTTAGCGGGCGTATGGCCAGTACTTTCTTCCCTGTTCTATCTTGGACATTAATTTGGGCTGTTTTCGCTACTGTAACGAATTTCTTCTTTNNNNNT

SEQ ID NO: 7100 - protein, 63 aa, Streptococcus agalactiae
  VARIANT 62, 63: Xaa = Any Amino Acid
MICLAFTNYDHNHLPPKSLFDWVGFANFGNIFSGRMASTFFPVLSWTLIWAVFATVTNFFFXX

SEQ ID NO: 7101 - protein, 603 aa, Streptococcus agalactiae
TTGGGTAGAGAATTTATTGACTCGCAGCATTTTAAAGATATTAATGCCTATTTTTTGAGACATTTTATTTGTTATTGTTATTATTTTATTCCTGATTTTTATTTTTTAAATACATCAAGGCTGAGCTATTCTAAGGATTTATATCACCTATTAGATAGAGGTCTGGCTGATATTTTTAACCTGAAGGGAGGGAATTTAACTTTTTCAAAACATGAGACAGTGCTACTAACAATGCAATTATCTAACTTAATAGAGACTTTCTTAGCTCCTCTTTCTGTATATGTAATTTCATCTAGTAATATTAGATTACAAACCTATCAAGTAATGTTAAACCAATATTTTACATCTAAGATAGCGGAATTCTTTTTTGTAAACTATCAAACGACTCAGATAGATGAAAAATTACTAAAAAAAGCAGATATCATTATTGCTGAGAGACGCTATATATCTTCTTTAAAAAATGACTCAGGTGTGGCTATACAAGATATATTAGAAATTGGGATGAATAATAAGCAGTACCATGAACTACTTTTACAAGCTATTATCGAAAAAAGGGACCAAAAAGTTTTTGAATATATTTCAAAAATGAAACATAAAATACTT

SEQ ID NO: 7102 - protein, 201 aa, Streptococcus agalactiae
MGREFIDSQHFKDINAYFLRHFICYCYYFIPDFYFLNTSRLSYSKDLYHLLDRGLADIFNLKGGNLTFSKHETVLLTMQLSNLIETFLAPLSVYVISSSNIRLQTYQVMLNQYFTSKIAEFFFVNYQTTQIDEKLLKKADIIIAERRYISSLKNDSGVAIQDILEIGMNNKQYHELLLQAIIEKRDQKVFEYISKMKHKIL

SEQ ID NO: 7103 - protein, 336 aa, Streptococcus agalactiae
TTGCTATTTGATTTTCTCGAAGAAAAAATAAAACTGAAAGCATACCTGATGACCGCCTTACTTGATGATGGAGAAATTAACCTTGATCACTTTAAAACAGAATATGCTTTGAGTGAAAAGATTTTACAAGGTCTTATTTCGGAACTACAAATACTTTATTCTGATTTCTACCTTGTTGTCAAAAGTAGAACAATGGTATTGTTCCATTACGAAACACTTTCTAAGCTAGAGACTTTGCATACCATTTATCGAGAGTCTAATATGTTACAGTTTTTGGCATATTTTATTGCTCCTCAAATGTCAGTTTTTCTGAATCACGGCTNNNNNTTAATTAAT

SEQ ID NO: 7104 - protein, 112 aa, Streptococcus agalactiae
  VARIANT 108, 109: Xaa = Any Amino Acid
MLFDFLEEKIKLKAYLMTALLDDGEINLDHFKTEYALSEKILQGLISELQILYSDFYLVVKSRTMVLFHYETLSKLETLHTIYRESNMLQFLAYFIAPQMSVFLNHGXXLIN

SEQ ID NO: 7105 - protein, 198 aa, Streptococcus agalactiae
TTGATTTCACAACCAGATCAGTTAACCATAAAAATTCAGGATGGCCCAGAATTTTTAGAGTACCATCTTGATTTAGATACCCAAGACATCGGTCGTGTTATCGGCAAAAAGGGTCGTACAATTACAGCGATAAGGTCGATTGTCTATTCGGTACCAACACAAGGGAAAAAAGTAAGACTCATCATTGATGAGAAAGAA

SEQ ID NO: 7106 - protein, 66 aa, Streptococcus agalactiae
MISQPDQLTIKIQDGPEFLEYHLDLDTQDIGRVIGKKGRTITAIRSIVYSVPTQGKKVRLIIDEKE

SEQ ID NO: 7107 - protein, 468 aa, Streptococcus agalactiae
GTGGTGACTGTAAAAAATAAATCTTACTTAGTAGTGGGGGTTTATTCGGATCCAGAAGCTGGTTCAGGCTTATATGGAAGTAATTCTGATGGGAATGCTATTTTAACCAATACACAGTTAGCTTCGGAGTTTGGTGCTAAAGAAGCAGAAAACATATATTTTCATCTTAATGATGTATCGCAATCCAATCGCATTGGTAAAGAAATAGGCAAACGTTTAACAGACATTAGTCATGCTAAGGATGGGTACTATGATAATTTTGACATGACATCTATAGTTAAATCTATCAATACCCAAGTTGGTATTATGACAGGTGTTATTGGAGCGATTGCAGCAATTTCTCTCCTAGTTGGTGGTATCGGAGTGATGAATATTATGTTAGTCTCTGTAACTGAGCGCACGAGAGAAATTGGCCTTCGTAAAGCCCTTGGGGCAACTCGACGTAAAATTTTAGCTCAATTTNNNNNT

SEQ ID NO: 7108 - protein, 156 aa, Streptococcus agalactiae
  VARIANT 155, 156: Xaa = Any Amino Acid
MVTVKNKSYLVVGVYSDPEAGSGLYGSNSDGNAILTNTQLASEFGAKEAENIYFHLNDVSQSNRIGKEIGKRLTDISHAKDGYYDNFDMTSIVKSINTQVGIMTGVIGAIAAISLLVGGIGVMNIMLVSVTERTREIGLRKALGATRRKILAQFXX

SEQ ID NO: 7109 - protein, 249 aa, Streptococcus agalactiae
GTGACAACTAATCGAAAAGAACTGATTAGATTGCATCAGATTGTTAAAAGTTATCAAAATGGGGATCAAAAACTTCAAGTCTTAAAGAACATTGATTTGACGGTTTATGAAGGTGAATTTCTTGCAATCATGGGGCCATCTGGTTCAGGGAAATCCACACTAATGAATATTATTGGCTTGTTGGATTCTCCAACTTCAGGAGATTATAGTTTAAATGGTAAACGTGTCGAAGAACNNNNNTTAATTAAT

SEQ ID NO: 7110 - protein, 83 aa, Streptococcus agalactiae
  VARIANT 79, 80: Xaa = Any Amino Acid
MTTNRKELIRLHQIVKSYQNGDQKLQVLKNIDLTVYEGEFLAIMGPSGSGKSTLMNIIGLLDSPTSGDYSLNGKRVEEXXLIN

SEQ ID NO: 7111 - DNA, 975 bp, Streptococcus agalactiae
gtgggtgataaaatcacagctggtcagcagttagttcaatatgatacaacaactgcacaagcagcctacgacactgctaatcgtcaattaaataaagtagcgcgtcagattaataatctaaagacaacaggaagtcttccagctatggaatcaagtgatcaatcttcttcatcatcacaaggacaagggactcaatcgactagtggtgcgacgaatcgtctacagcaaaattatcaaagtcaagctaatgcttcatacaaccaacaacttcaagatttgaatgatgcttatgcagatgcacaggcagaagtaaataaagcacaaaaagcattgaatgatactgttattacaagtgacgtatcagggacagttgttgaagttaatagtgatattgatccagcttcaaaaactagtcaagtacttgtccatgtagcaactgaaggtaaactccaagtacaaggaacgatgagtgagtatgatttggctaatgttaaaaaagaccaggctgttaaaataaaatctaaggtctatcctgacaaggaatgggaaggtaaaatttcatatatctcaaattatccagaagcagaagcaaacaacaatgactctaataacggctctagtgctgtaaattataaatataaagtagatattactagccctctcgatgcattaaaacaaggttttaccgtatcagttgaagtagttaatggagataagcaccttattgtccctacaagttctgtgataaacaaagataataaacactttgtttgggtatacaatgattctaatcgtaaaatttccaaagttgaagtcaaaattggtaaagctgatgctaagacacaagaaattttatcaggtttgaaagcaggacaaatcgtggttactaatccaagtaaaaccttcaaggatgggcaaaaaattgataatattgaatcaatcgatcttaactctaataagaaatcagaggtgaaa

SEQ ID NO: 7112 - protein, 325 aa, Streptococcus agalactiae
MGDKITAGQQLVQYDTTTAQAAYDTANRQLNKVARQINNLKTTGSLPAMESSDQSSSSSQGQGTQSTSGATNRLQQNYQSQANASYNQQLQDLNDAYADAQAEVNKAQKALNDTVITSDVSGTVVEVNSDIDPASKTSQVLVHVATEGKLQVQGTMSEYDLANVKKDQAVKIKSKVYPDKEWEGKISYISNYPEAEANNNDSNNGSSAVNYKYKVDITSPLDALKQGFTVSVEVVNGDKHLIVPTSSVINKDNKHFVWVYNDSNRKISKVEVKIGKADAKTQEILSGLKAGQIVVTNPSKTFKDGQKIDNIESIDLNSNKKSEVK

SEQ ID NO: 7113 - DNA, 276 bp, Streptococcus agalactiae
atgagtaaacgacaaaatttaggaattagtaaaaaaggagcaattatatcagggctctcagtggcactaattgtagtaataggtggctttttatgggtacaatctcaacctaataagagtgcagtaaaaactaactacaaagtttttaatgttagagaaggaagtgtttcgtcctcaactcttttgacaggaaaagctaaggctaatcaagaacagtatgtgtattttgatgctaataaaggtaatcgagcaactgtcacagttaaagtgggtgat

SEQ ID NO: 7114 - protein, 92 aa, Streptococcus agalactiae
MSKRQNLGISKKGAIISGLSVALIVVIGGFLWVQSQPNKSAVKTNYKVFNVREGSVSSSTLLTGKAKANQEQYVYFDANKGNRATVTVKVGD

SEQ ID NO: 7115 - DNA, 1596 bp, Streptococcus agalactiae
atgctaaatacaaaggataaacagcctattttgcttattattttcggacagaaaatgaaagaatatgacgatttaattagatcaactgttgagaggttatctaaaagggatagacctgttagtattcttatctcgaaggagctaaaccatgtgattcaccattatgatgcacaatttgaaaatcttgagacgcttgtggggtatataaatacacatgaagatagtttgatttaccccctttgcttagataaaaatcatgagctatttcaagagtttttagcgtggcagagtcattattcaaggcagtatatcagcgataatttatcagaaaaaagtgttcaggcaatagacaataatcaagactttgtgcaagtagattgtttagtaatgagagactctttgaataattgtttatatgtctctgatttagaatatattgaatctaataaaacaactggtaagtctctagcgattgtaccaagtcaaactttatccgatgctgctaggcaaacaattcgagatgttgcatttgatgtgtgtcgaaaagcaaacattattggagtatgttactttagtttcttaatagatttgaacagtttggattatcatataattagtttatcatctggtttgtctcatcaaagcattttatttgagactattacgacctatcctgttttagagatagcaactaaattgacagtgggatatacttttagtcaactgaagcattcttattacccaaatacctctgcctttttagagccgcaattagactatgtagctaccgtatcttttagttttgaaaaagttgactatatcttttttgctcgtaatatagagcaattatttttaaatttactcgaggctagcagtcatgatcattttccatttctgagtgatattagcgaggaagatttgatgtttgctttgattcagaaaaaagaaaatcgtctagcttatcttttggaggcttttagacgtggctttgatttgtatgatttatcctcagttactaaaatcaaccctttttacttagataaatgtttacatattgtagagttgtatgaaaacctgaataaaagccaatataatgtagatatttataaggaagctaaaaggtatggtttttcggatgactatattgctagtagttggcaaatctctttgatagacatgttagaatatcgaaaaaaacatagtgtcgcacctgttctgaagcaagtcgaacaaagttctggtgttctaactggccatcaaattcagtattttcgaagctatgattggcattcagactacatttctagcggttgtcaaaaggctttgataatggtagacaagggttattccctagtaaaattaaatgagttaattaagcaaatcaaacaaactcatttagaattattaattgttaccaatcaacctctcctcatagaacaattaaatgatacatctataatttttgacactataggtattgagaccatattaacaattatgggtatagaagaggtggaagaagtgtatttattgggagaaagtcaagcagacatgttttcaaaaatgaaaaatttttctatctcttgtcagtctatt

SEQ ID NO: 7116 - protein, 532 aa, Streptococcus agalactiae; identical to SEQ ID NO: 2542

SEQ ID NO: 7117 - DNA, 1068 bp, Streptococcus agalactiae
atggcaaaaaaattgttaattctagaggatggtacggtttttgaaggactatcctttggttcatctcttgatgtaactggcgaattagttttttgtacggggaataccggctatcaggaaataataacgaatccttcacataatggaaaaattttagtttttacctcaccgctaataggaaattatggtattcatcgcagttactctgaagccattattcccacttgtttaggagttgttgttgcagagtattccagatgtgtaagtagcgatactagcaagatgaatctagatgaatttttgaaaatgaaaaaggttcctgcaatgtcgggggtcgatacaaggtatttgatgcaagttattaaagaaaaaggatttgtaaaagctactttagcagaagcaggtgatgttttatcacatttacaggatcaattaatagcgacagtattaccgacaaataatgtggaacaagtttcgacaaaaacagcttatccgtcgcctgctagcggtcgaaatattgttgtacttgattttggtcttaaacattctattttgagagaattgtctaaacgtcagtgtgacgtgactgtcattccctacaatacgtctttagaaggtattaaaaatctatatccagaaggtatcatattatctaatggtccggggaatccagaaaagcttcaggaaatcttaaacactattaaagaattacaaaaatctgttcctatgttaggtattggtttggggcaccaattaattgccatggcaaatggtgcagaaattatgagactcccagttgctaagaaggggccaaattatcccatgagagatattgctacgggtcgtttagaaacagttagtcagtttaatcattttaccgttaaccggctaaatcttccgcatgatttactggtaacacacgaaggtttgaatgatcaagagattgttgctctaaggcaccgctcatttccagtgatgtccgtgcaattttacccagaggctgctccaggccctcatgatgtgacctatttttttgatgaatttttagaaatgattggatcacgcgct

SEQ ID NO: 7118 - protein, 356 aa, Streptococcus agalactiae; identical to SEQ ID NO: 2544

SEQ ID NO: 7119 - DNA, 519 bp, Streptococcus agalactiae
atgaaaagaaaagaaattattgatgatgtgaccatgaaacgtgctattacacgtattacctacgaaattatagaacgtaacaaaaatttagataatattgtcttagcaggcattaaaacaagaggtgtttttttagccaaacgcattcaagaacgcttgaagcaattagaaaatttagatattcccgttggagaattggatactaaacctttccgtgatgatatgaaagttgaagttgacaccacaactatgccagttgacatcactgataaagatattatattaattgatgatgttctctatacaggtcgcactattcgagctgctattgataatcttgttagtttagggcgtccgagtcgtgtcagtttagctgtattaattgaccgtgggcatcgtgaactacctattcgtgcagattatgtggggaaaaatattccaacaagtcaatttgaagaaattctagttgaagtgatggaacatgatggttacgatcgtgtgagtattattgatccgagt

SEQ ID NO: 7120 - protein, 173 aa, Streptococcus agalactiae; identical to SEQ ID NO: 2546

SEQ ID NO: 7121 - protein, 888 aa, Streptococcus agalactiae
ATGGAAATCACAATTAAAATAGCAGGAGTTAGGCTAGATAAAGCTTTAGCGGATAATTCTGAACTGTCGCGTAGTCAAGCTAATGAAGAAATTAAAAAAGGGATTGTGTTAGTAAATGGACAAGTAAAAAAAGCGAAATATACTGTTCAAGAAGGAGATCGGATTACTTTTGATATTCCTAAAGAGGAAGTACTAGATTATCAAGCTGAAAATATCCCTTTAGATATTATCTATCAAGATGATGACGTTGCTGTGGTTAATAAGCCGCAAGGGATGGTTGTTCACCCTTCTGCAGGCCACAGTTCGGGCACCTTAGTTAACGCCTTGATGTATCATATTAAGGATTTATCATCAATTAATGGCGTTGTTCGCCCAGGGATCGTTCATCGTATTGATAAAGATACTTCTGGTTTATTGATGGTTGCAAAAAATGATAGAGCTCACCAAGTGTTGGCTGAAGAGTTAAAAGATAAAAAATCGCTTCGTAAATATTTAGCAATTGTGCATGGTAATTTACCAAATGATCGAGGTGTGATTGAGGCTCCGATTGGTAGAAGCGATAAAGATCGTAAGAAGCAAGCCGTGACTGCTAAAGGTAAGCCAGCAATAACTCGTTTTCATGTTTTAGAACGTTTTGGTGATTATACCTTAGTTGAATTGTCATTGGAGACAGGTCGAACACACCAAATTCGGGTTCATATGGCTTATATTGGCCATCCTCTAGCCGGTGATCCTGTCTACGGTCCCCGTAAGACTTTAGGGGGTAAAGGACAGTTTTTGCATGCACAAACACTAGGTTTTACGCACCCTAGTAACGGAGAGAATTTGATTTTTTCAGTAGAGGTTCCGGAAATTTTTCAGACAACCTTAGAAAAGTTGAGAAAAAAT

SEQ ID NO: 7122 - protein, 296 aa, Streptococcus agalactiae; identical to SEQ ID NO: 2548

SEQ ID NO: 7123 - protein, 462 aa, Streptococcus agalactiae
ATGAGAAAGATTATTATACCAATAATAACTATTTTGTTGATTGCTTTAGATCAACTATCTAAGTTATGGATTGTTAAACATATTGAACTAAACCAAATTAAGGAATTCATTCCAAATATCGTTAGTCTAACTTATCTGAGAAATTATGGTGCTGCATTTTCTATTTTGCAAAATCAACAATGGCTTTTTACCTTAATTACAATCTTTGTTGTTGGTGTTGCTATTATTTATTTGATGAAACATATTAATGGAAGTTATTGGTTATTAATTTCTCTAACCTTAATCATCTCTGGTGGATTAGGAAACTTTATAGATCGCTTAAGATTAGGTTATGTCGTTGATATGGTGCATTTAGATTTTATTAATTTTGCTATCTTTAATGTAGCAGACTCATATCTGACAATCGGTATTATTTGCTTAATGATTGCACTTTGGAAAGAGGAAAGTAATGGAAATCACAAT

SEQ ID NO: 7124 - protein, 154 aa, Streptococcus agalactiae; identical to SEQ ID NO: 2550

SEQ ID NO: 7125 - protein, 902 aa, Streptococcus agalactiae
ATGAATATTCAACAACTGCGTTATGTTGTTGCTATCGCAAATAGTGGTACTTTTCGTGAAGCAGCTGCAAAACTATTTGTTAGTCAGCCAAGTTTATCTGTTGCCGTTCGTGATTTGGAAACAGAATTAGGTTTCAGATTTTTACGCGTACAACTACTGGTGCAGTGTTGACCAATCAAGGCATGACTTTTTATGAGAATGCTTTAGAAGTTGTGAAAAGCTTTGATTCATTCGAAAAACAGTTTTCGCAATCTGAAGCTACAGAGCAAGAATTCTCAATAGCAAGTCAACATTATGATTTTCTACCTCCTTTAATCACAGCGTTTTCAAAATGTAATGATAATTTTAGCTATTTCCGTATTTTCGAATCAACAACAATACGTATCTTAGATGAAGTTGCTCAAGGGAATAGCGAAATAGGTATCATTTATATCAATAGTCAAAATAAAAAAGGTCTACTTCAGCGGTTGGACAAATTGGGGTTAGAGTTTGTAGAGCTTATTCCTTTTAAAACTCATATTTATCTTGGGAAAGACCATCCCTTGGCTAGTAAAACATCTCTGATAATGACAGATTTAGAAGGATTACCAACCGTACGTTTTACACAGGATAGAGATGATTATCGGTATTACTCGGAGAATTTTGTGGAAGTACTTGATAGTTCTGTTACCTATAATGTTACTGATAGAGCAACATTAAATGGTATTTTAGAAAGAACCCAAGCTTATGCGACGGGCTCAGGATTCTTGGATAGCCGCAGTGTGAATGGTATCACTGTTATTCCATTAGAAGATCATCTAGATAACCAAATGATTTATATCAAACGAAAAGATCGTAATTTATCTCAGATGGCTTTAAAATTTGTTGCTGTTATGGAAGAGTATTTTAAGGGATTTAATTCA

SEQ ID NO: 7126 - protein, 301 aa, Streptococcus agalactiae; identical to SEQ ID NO: 2552

SEQ ID NO: 7127 - protein, 291 aa, Streptococcus agalactiae
ATGTTAAAAATGAATCTTGCTAACTTGCAACTTTTCGCCCACAAAAAAGGTGGAGGTTCTACATCAAACGGACGTGATTCACAAGCAAAACGTCTTGGAGCTAAAGCAGCTGACGGACAAACAGTATCAGGTGGATCAATTCTTTACCGTCAACGCGGTACACACATCTATCCAGGTGCTAACGTTGGACGTGGTGGGGACGATACACTTTTTGCTAAAGTTGAAGGTGTTGTTCGTTTCGAACGTAAAGGACGCGATAAAAAACAAGTGTCTGTTTACCCAATCGCAAAA

SEQ ID NO: 7128 - protein, 97 aa, Streptococcus agalactiae; identical to SEQ ID NO: 2554

SEQ ID NO: 7129 - protein, 336 aa, Streptococcus agalactiae
ATGATTAAAGCAACTTTTACTCGTAATCAATCAGGCTATCTTTATAGTGCTGAAATCAGCGGTCATGCTGGTAGTGGCGAGTACGGCTTTGATGTGATTTGTGCAGCTGTTAGTACTTTATCAATTAATTTTATTAATTCATTAGAGGCTTTAACAACCTGCCAAGCGCAATTGATTATCAATGACGTTGAAGGTGGTTATATGAAGATAGATTTATCTTCTATACCACAACATAAAGAGGATAAGGTTCAATTATTATTTGAGTCTTACCTTCTTGGAATGACTAATCTGTCTAAAGATTCTTCTGAATTTGTTAGTACAGTAGTCATGACACAC

SEQ ID NO: 7130 - protein, 112 aa, Streptococcus agalactiae; identical to SEQ ID NO: 2556

SEQ ID NO: 7131 - DNA, 312 bp, Streptococcus agalactiae
atgagcacatacgcaatcatcaaaactggtggtaaacaagttaaagttgaagtaggacaagctatctacgttgaaaaacttgacgttgaagcaggagcagaagttacatttaacgaagttgttcttgttggtggtgaaacaactaaagttggtactccagttgttgaaggagctactgttgttggtactgttgaaaaacaaggcaaacaaaagaaagttgtttcttacaaatacaaacctaaaaaaggtagccaccgtaaacaaggtcaccgtcaaccttatacaaaagttgttatcaacgcaatcaacgct

SEQ ID NO: 7132 - protein, 104 aa, Streptococcus agalactiae; identical to SEQ ID NO: 2558

SEQ ID NO: 7133 - DNA, 1176 bp, Streptococcus agalactiae
atggcaagaatcccttatcagaaaacacttattttttgtgtagccgttattattgctatttttattttggggttatctaaggatttagcacaatctaaagggcaaaaggttgcaaataataatactgtaaaaacagcacgtgtggttgcaaacggagatattttgctgcacgatgtactatatgccagtgcgcgccaacccgacggcacttataattttactccttattttaaagaggtaaaatcttggattgagagcgctgatttagcgattggtgattatgaagggacgattagttcagaatatcctttagcgggctatcctttatttaatgctcctaatgagattgcaactactatgaaagaaactggatatgatgtcgttgacttagcacataatcatattctggattcacaactggcaggtgctatcaatactgtcaagacttttaatcgtctgggattggatactattggggtttatttaaaggatagaaataaagaagatatcttaattaagcatgtaaatggtattaaaattgctattttaggttattcgtatggctacaatggtatggaagctaatgtttcaaagagtgactatgaaaaacatatgtctgatttagatactaaaaagattaagcaagatattaaaaaggctgaaaaagaagcagatatcaccattgtcatgccacagatggggatagaatatcaaaaaaaacctactacagaacaagtaatgctttatcatagtatgatwaaatggggggcagatattatattcggaggacaccctcacgttgttgaaccgtctgaagtgataaaaaaagatggccagaaaaaatttattatttactctatgggaaattttatttcaaatcagcgtttagaaacggttgatgatatctggacagaaagaggattattaatggatgtaaccatagagaaaaaaggtcaaaaaacagtaattaaaaaagttaaggcgcatccaacactagtagaagcaaaaccaaatggccgttatgttgaagaaggctttccagcttatgattataggacgctagttttagaggattatattgaaggtggtaagaaacgttctacgattgatcagactatgaaagataaagttgataaagcatataaggagatgaatgagttagttaatttgaagtgg

SEQ ID NO: 7134 - protein, 392 aa, Streptococcus agalactiae
MARIPYQKTLIFCVAVIIAIFILGLSKDLAQSKGQKVANNNTVKTARVVANGDILLHDVLYASARQPDGTYNFTPYFKEVKSWIESADLAIGDYEGTISSEYPLAGYPLFNAPNEIATTMKETGYDVVDLAHNHILDSQLAGAINTVKTFNRLGLDTIGVYLKDRNKEDILIKHVNGIKIAILGYSYGYNGMEANVSKSDYEKHMSDLDTKKIKQDIKKAEKEADITIVMPQMGIEYQKKPTTEQVMLYHSMIKWGADIIFGGHPHVVEPSEVIKKDGQKKFIIYSMGNFISNQRLETVDDIWTERGLLMDVTIEKKGQKTVIKKVKAHPTLVEAKPNGRYVEEGFPAYDYRTLVLEDYIEGGKKRSTIDQTMKDKVDKAYKEMNELVNLKW

SEQ ID NO: 7135 - DNA, 1152 bp, Streptococcus agalactiae
atgcgcttcatcaataagttaaaaaataatatggagcatgtactctccatttatccagatgtttcagtaaaaacagatcgtgatagaggacatgtatatctcaatggtacagattatcatgaagttgcagagtccttaaaagagatttttggtatccaagctttttctccatcttttaaagtagaaaaaaatgttgatacattggtaaaagctgtccaggaaattatgacttccgtttataaagatgggatgacttttaaaattaccgcaaaacgtagtgaccactcatttgaattggatagccgtgctctaaatcatactttaggagatgctgttttttcagtcttgccaaatattaaggctcagatgaagcaaccagatatcaatcttaaagtcgagatacgagatgaggctgcttatatttcatatgaggatattaggggtgcaggaggattaccagtaggaacatctggaaaagggatgctgatgttgtctggtgggattgattctccggtagcaggttacctagcgttaaaacgtggtgtagatatagaagcagtccattttgcaagtcctccttatactagcccaggtgcattgaaaaaagcacatgatttaacacgtaaattgacaaaatttggtggtaatattcaatttattgaagttccattcacagaaattcaagaggaaattaaggcaaaagctcccgaagcctacttgatgacgttaacacgtaggtttatgatgcgtattacagatcgtattcgtgaggaccgaaatggtcttgttattattaacggtgaaagtttaggacaggtggcaagccaaacgttagaaagtatgcaagctattaatgctgtcactgcaacaccgattattcgtcctgtggtcacgatggataagctagaaattattgatattgctcaaaaaatagatacttttgatatttcaattcaaccatttgaggattgctgtacgatttttgcaccagatcgcccaaaaactaaccctaaaattaagaatacagaacagtatgagaaacgtatggatgtagaaggtcttgtagagagggcagttgcagggattatggtaactactattcaacctcaagcagatagtgatgatgttgatgacttgattgacgatttatta

SEQ ID NO: 7136 - protein, 384 aa, Streptococcus agalactiae; identical to SEQ ID NO: 2562

SEQ ID NO: 7137 - DNA, 1143 bp, Streptococcus agalactiae
atgatttattttgataattcggcaactactattccctatccagaagttttaaggacttatcaagaagtagctagtaaaatctatggaaacccctcaagtttacatgagctaggaacaacatcttctcggattttagaggctagccgtaaacaaattgctagtttacttgagcttaaagcaaatgaaattttctttacctctggtggtacagaggccgataattgggttattaagggtcttgcgtttgagaaacaacattttggaaatcatattattgtttctgatatcgaacacccagctgttaaagagtctgctaaatggcttggagagtatgggtttgagattgattatgcgccagtagatgataaaggatttgtagacgtagaagcactggtcaaattaattaaaccagaaacgattcttatttcaattatggcaataaacaatgaaattggttctattcagccaataaaagctatttcagacttgttgtcagataaacctactatatcgtttcatgttgatgctgttcaagcaataggtaagataccgactaaagattatttgactgagcgagttgattttgcatctttttctagtcataaatttcacggcgttcgtggggttggctttctatatattaaagaaggaaaacgtatttcaccattactaacaggtggtggacaagaaactgatttacgttcaactactgagaatgtcgcagggattgcagctactgctaaagctttacgaatggttatggacaaggaagtagtagctattcctaaaataagtaaaatgaaaaccattattcatgatgaattagccaaatatgaggatattacgttattttcgggtaaggaagatttttcacctaacattatcacgtttggtatcaagggtgtccgaggagaagttcttgtccatgcctttgagggacatgatatttttatctcgacaactagcgcttgctcttctaaagcaggtaaaccagcaggaactcttatagcaatgggaatttcaactaagttagcccaaactgctgtacgtatcagcttagatgatgataatgatatgggacaagtagagcaatttttaactatttttaaacaagtttatgaaaaaactaagaaagttagagga

SEQ ID NO: 7138 - protein, 381 aa, Streptococcus agalactiae; identical to SEQ ID NO: 2564

SEQ ID NO: 7139 - DNA, 1347 bp, Streptococcus agalactiae
atgtcaaaacaatatgattatatcgttattggtggaggtagtgcaggcagtggtaccgctaatagggcagccatgtatggagcaaaagtcctgttaattgaaggtggacaagtaggtggaacttgtgttaacttaggttgtgtaccgaagaaaatcatgtggtatggtgcacaagtttctgagacactccataagtatagttcaggttatggttttgaagtcaataatcttaattttgattttactactctaaaagctaatcgcgatgcttacgtgcagcggtctagacagtcgtatgccgctaattttgagcgtaatggggtcgaaaagattgatggatttgctcgttttattgataaccatactattgaagtgaatggtcagcaatataaagctcctcacattactattgcaacaggtggacatcctctttaccctgatattattggaagtgaacttggtgagacttctgatgatttttttggatgggagaccttaccagattctatattgattgttggggcgggctatatcgcggcagaacttgctggagtggttaatgaattaggcgttgaaacccatcttgcatttagaaaagaccatattctacgcggatttgatgatatggtaacaagtgaggttatggctgaaatggagaaatcaggtatctctttacatgctaaccatgtacctaaatctcttaaacgcgatgaaggtggtaagttgatctttgaagctgaaaatgggaaaacgcttgtcgttgatcgtgtaatatgggctatcggccgtggacmaaatgtagacatgggacttgaaaataccgatattgktttaaatgataaaggttatatcaaaacagatgaatttgagaatacttctgtagatggcgtgtatgctattggagatgttaatgggaaaattgccttgacaccggtagcaattgcagcaggtcgtcgcttatcagaaagactttttaatcataaagataacgaaaaattagattaccataacgtaccttcagttatttttactcaccctgtaattgggacggtaggactttcagaagcagcagctatcgagcaatttggagaagataatatcaaagtctatacatcaacttttacctctatgtatacggctgttaccactaatcgccaagcagttaagatgaagctcataaccctaggaaaagaggaaaaagttattgggcttcatggtgttggttatggtattgatgaaatgattcaaggtttttcagttgctatcaaaatgggggctactaaagcagactttgatgatactgttgctattcacccaactggatctgaggaatttgttacaatgcgc

SEQ ID NO: 7140 - protein, 449 aa, Streptococcus agalactiae
  VARIANT 265, 277: Xaa = Any Amino Acid
MSKQYDYIVIGGGSAGSGTANRAAMYGAKVLLIEGGQVGGTCVNLGCVPKKIMWYGAQVSETLHKYSSGYGFEVNNLNFDFTTLKANRDAYVQRSRQSYAANFERNGVEKIDGFARFIDNHTIEVNGQQYKAPHITIATGGHPLYPDIIGSELGETSDDFFGWETLPDSILIVGAGYIAAELAGVVNELGVETHLAFRKDHILRGFDDMVTSEVMAEMEKSGISLHANHVPKSLKRDEGGKLIFEAENGKTLVVDRVIWAIGRGXNVDMGLENTDIXLNDKGYIKTDEFENTSVDGVYAIGDVNGKIALTPVAIAAGRRLSERLFNHKDNEKLDYHNVPSVIFTHPVIGTVGLSEAAAIEQFGEDNIKVYTSTFTSMYTAVTTNRQAVKMKLITLGKEEKVIGLHGVGYGIDEMIQGFSVAIKMGATKADFDDTVAIHPTGSEEFVTMR

SEQ ID NO: 7141 - protein, 333 aa, Streptococcus agalactiae
ATGGCTAATGTATATGATTTAGCAAATGAATTAGAACGTGCTGTTCGTGCTTTACCAGAATACCAAGCAGTTTTAACTGCAAAAGCAGCTATTGAAAATGATGCAGATGCACAAGTGCTTTGGCAAGACTTTTTGGCTGCCCAATCAAAAGTTCAAGAAATGATGCAATCTGGCCAAATGCCAAGTCAAGAAGAACAAGATGAAATGTCTAAACTTGGGGAAAAAATTGAATCCAATGACCTTTTAAAAGTTTATTTTGACCACCAACAACGGTTGTCTGTCTATATGTCTGATATCGAAAAAATTGTCTTTGCACCCATGCAGGACTTAATG

SEQ ID NO: 7142 - protein, 111 aa, Streptococcus agalactiae
MANVYDLANELERAVRALPEYQAVLTAKAAIENDADAQVLWQDFLAAQSKVQEMMQSGQMPSQEEQDEMSKLGEKIESNDLLKVYFDHQQRLSVYMSDIEKIVFAPMQDLM

SEQ ID NO: 7143 - protein, 621 aa, Streptococcus agalactiae
GTGTTATCTAGTCAATCGCAAGTAGCTATCGTCAATCCATCATTTGAACAAGAAATTAAGGATTATATTGACAGTGTGAAAAAGGCTGGAGATACTATCGGAGGAGTGATTGAAACTATCGTTGGAGGAGTTCCCGTTGGTTTAGGCTCTTATGTACACTGGGATAGAAAGTTAGATGCTAAGATAGCGCAAGCAGTTGTATCTATCAATGCTTTTAAAGGTGTTGAATTTGGCCTAGGTTTTAAGTCAGGGTTTTTAAAAGGAAGTCAAGTAATGGACTCCATATCATGGACAAAGGACCAAGGTTACATACGTCAGTCAAATAATTTAGGCGGTTTTGAAGGCGGTATGACTAATGGAGAGCCTATTATCGTTAGGGGAGTAATGAAACCAATTCCTACGCTTTACAAGCCACTAATGTCAGTTGATATTGATACTCACGAGCCTTATAGAGCTACAGTGGAACGTTCTGATCCCACGGCACTTCCGGCTGCAGGTGTCGTTATGGAAGCTGTAGTAGCCACCGTCCTGGTGACAGAAGTGCTAGAAAAATTTTCTTCAGACAACATGTATGAACTAAAAGAAGCTGTAAAACTATATCGCAATTATGTTAATCATTTT

SEQ ID NO: 7144 - protein, 207 aa, Streptococcus agalactiae
MLSSQSQVAIVNPSFEQEIKDYIDSVKKAGDTIGGVIETIVGGVPVGLGSYVHWDRKLDAKIAQAVVSINAFKGVEFGLGFKSGFLKGSQVMDSISWTKDQGYIRQSNNLGGFEGGMTNGEPIIVRGVMKPIPTLYKPLMSVDIDTHEPYRATVERSDPTALPAAGVVMEAVVATVLVTEVLEKFSSDNMYELKEAVKLYRNYVNHF

SEQ ID NO: 7145 - protein, 291 aa, Streptococcus agalactiae
TTGAAACTCGGTCTTGTCTCAGCAATGTTTGCTGGAGGAGCATTCGTAGCTCTTGGTTCTACACAAGGTGTTTCAGCTTCAACTTTCACAGCACCGCAAGCAACACATCCAAAAGCAGAACGTCAGTTAACAGATTCAGAAATCTATGAACGTGCCCAAAAACAAGTGTTACCAAAATATATCCAAGGTTCTCTTTCAGGTATCCTTAACCAACATTCAACACCTTTAAAAGCATTGATAGATACAACTGCTTGCGCTATCTTAGCATCTAACTTTCTATCCCAGTGTACA

SEQ ID NO: 7146 - protein, 97 aa, Streptococcus agalactiae
MKLGLVSAMFAGGAFVALGSTQGVSASTFTAPQATHPKAERQLTDSEIYERAQKQVLPKYIQGSLSGILNQHSTPLKALIDTTACAILASNFLSQCT

SEQ ID NO: 7147 - protein, 840 aa, Streptococcus agalactiae
ATGAGATATTTAACTGCTGGTGAGTCACATGGACCGAGTTTAACAGCTATTATCGAAGGGATTCCTGCGGGACTGAAATTATCTGCTAAAGATATTAATGAAGATTTAAAACGCCGCCAAGGTGGTTATGGTCGTGGGAACCGAATGAAAATTGAAACTGATCAAGTGATCATTAGTTCTGGTGTGCGCCATGGAAAAACCTTGGGTTCACCTATTACACTGACAGTAACTAATAAGGATCATAGCAAATGGCTGGACATCATGTCAGTCGAAGACATTGAAGAGCGTCTAAAGCAAAAACGTCGTATTAAGCATCCTAGACCTGGGCACGCAGATTTAGTAGGTGGAATCAAATACCGATTTGATGATTTGAGAAATGCTTTAGAGCGTTCTTCGGCTCGTGAGACCACAATGCGAGTAGCTATTGGTGCGATTGCTAAACGTATTTTGAAAGAAATTGGTATCGAAATTGCCAACCATATTGTAGTGTTCGGTGGCAAGGAGATTACTGTCCCTGATAAGCTAACAGTTCAACAAATCAAAGTGTTATCTAGTCAATCGCAAGTAGCTATCGTCAATCCATCATTTGAACAAGAAATTAAGGATTATATTGACAGTGTGAAAAAGGCTGGAGATACTATCGGAGGAGTGATTGAAACTATCGTTGGAGGAGTTCCCGTTGGTTTAGGCTCTTATGTACACTGGGATAGAAAGTTAGATGCTAAGATAGCGCAAGCAGTTGTATCTATCAATGCTTTTAAAGGTGTTGAATGTTGGTTAAGGATACCTGAAAGAGAACCTTGGATATATTTTGGTAACACTTGTTTTTGGGCACGTTCA

SEQ ID NO: 7148 - protein, 280 aa, Streptococcus agalactiae
MRYLTAGESHGPSLTAIIEGIPAGLKLSAKDINEDLKRRQGGYGRGNRMKIETDQVIISSGVRHGKTLGSPITLTVTNKDHSKWLDIMSVEDIEERLKQKRRIKHPRPGHADLVGGIKYRFDDLRNALERSSARETTMRVAIGAIAKRILKEIGIEIANHIVVFGGKEITVPDKLTVQQIKVLSSQSQVAIVNPSFEQEIKDYIDSVKKAGDTIGGVIETIVGGVPVGLGSYVHWDRKLDAKIAQAVVSINAFKGVECWLRIPEREPWIYFGNTCFWARS

SEQ ID NO: 7149 - protein, 1065 aa, Streptococcus agalactiae
ATGCAGGTTGAAGTTGACTTACCGAATCACTCTTATCATATCAAAATTGAAGAAGGATGTTTTTCTGAGGCTGGTGACTGGGTATCACATTTATGGCAGAAACAAATGATAACTATTATTACAGATAGTAATGTAGAGATATTATACGGGGAGTCGCTTGTCAACCAGTTAAAAAAACAAGGTTTTACAGTACATGTTTTTAGTTTTGCTGCGGGTGAAGCTAGTAAAACTTTGGAAGTTGCTAATCGTATTTATGGTTTTTTAGCAAAGCATCATATGACCAGAAGCGATGGGATCATTGCACTTGGTGGAGGCGTCGTCGGAGATTTAGCGGCGTTTGTTGCTTCTACTTATATGCGGGGAATCCATTTTCTTCAAATTCCAACTAGTTTAACAGCACAGGTTGATTCTTCCATTGGCGGAAAAACAGGAGTCAACACTTCATTCGCTAAAAATATGGTAGGTACTTTTGCACAACCTGATGGTGTACTGATAGATCCTGTTACTCTAAAAACATTGGGCAATCGTGAATTAGTTGAAGGTATGGGAGAAGTCATCAAATATGGCTTGATTGATGATATAAAACTCTGGCATATTTTAGAAGAGATGGATGGGACTATTGATAGTATCCTTGATAGTGCATTAGCTATTATTTATCACTCTTGTCAAGTTAAACGAAAGCATGTTTTAGCTGATCAATATGATAAAGGGTTAAGGATGCATTTGAATTTTGGCCACACTATCGGTCATGCTATCGAAGTACATGCTGGCTATGGAGAAATAATGCATGGAGAAGCTGTTGCAATTGGAATGATCCAGCTTTCTCGTGTGGCTGAGCGTAAAAATCTTATGCCAAGAGGTATCAGTCAAGATATTTATAATATGTGTTTAAAATTTGGCCTTCCGGTCCACTATGCGGAATGGGATAAGGACGTCTTATTTGACATATTGAGTCATGATAAAAAAGCAAGTGGACAATTTATTAAAATTGTTATACTGCCTCAATTAGGTAGTGCAACAGTCCACCAAATACCTTTAGAAGAAATGAGAGATTATTTGGAGAAA

SEQ ID NO: 7150 - protein, 355 aa, Streptococcus agalactiae
MQVEVDLPNHSYHIKIEEGCFSEAGDWVSHLWQKQMITIITDSNVEILYGESLVNQLKKQGFTVHVFSFAAGEASKTLEVANRIYGFLAKHHMTRSDGIIALGGGVVGDLAAFVASTYMRGIHFLQIPTSLTAQVDSSIGGKTGVNTSFAKNMVGTFAQPDGVLIDPVTLKTLGNRELVEGMGEVIKYGLIDDIKLWHILEEMDGTIDSILDSALAIIYHSCQVKRKHVLADQYDKGLRMHLNFGHTIGHAIEVHAGYGEIMHGEAVAIGMIQLSRVAERKNLMPRGISQDIYNMCLKFGLPVHYAEWDKDVLFDILSHDKKASGQFIKIVILPQLGSATVHQIPLEEMRDYLEK

SEQ ID NO: 7151 - DNA, 654 bp, Streptococcus agalactiae
atgcctcgcagtcttgaagaggctcaagaaatagatttatcaaaatttgatagtgttgatattattgaatggcgagctgatgccttaccaaaggatgacattattaatgtagctccagctatttttgagaaattcgcaggtcatgaaattatttttactcttcgtacaacgcgtgaaggtggtaatattgtcttatctgatgctgagtatgttgagttaatccagaaaattaattctatctacaatccagattatattgattttgagtatttttcacataaagaagtttttcaagaaatgctagaatttccaaatttagtcctgtcttatcacaattttcaagagacaccggagaatattatggagatattttcagaattaacagccctagcaccacgagttgtgaaaatcgcagtaatgccaaagaatgaacaagatgtcttagacgttatgaattacactcgcggtttcaagactattaatcctgatcaagtttatgcgacggtatctatgagtaaaattggacgtatttctcgttttgctggtgatgtaactggatctagttggacatttgcatatttagattcatctatcgcacccggacaaattactatttcagagatgaagcgtgtcaaagcattgcttgacgctgac

SEQ ID NO: 7152 - protein, 218 aa, Streptococcus agalactiae; identical to SEQ ID NO: 2578

SEQ ID NO: 7153 - DNA, 1155 bp, Streptococcus agalactiae
atgaataaacttaaagtgaattctgtcgttgaaagaaaaatcaaatcaggtgctcagttactggaaaaaaaagattttgataccagtttagttaaccagttggttcaacttttttcacagtcaaatcaattcttagggatggcctatctttcaccacaaaataaaggtattggttggttactatcaagacaagtttttgattttaaccatgattactttgtatcgctattcgaaaaatctagagagaagcgtcaaaaatttgaaaaatctagccaaacaacagcctaccgcttgtttaatcaggatggagataactttggtggcctaactatagatttttatagtgactatgctcttttttcgtggtacaatgaatttgtttatactaatcgacaaatgattgttgcagcctttaagcaggtctatcctaatattaaaggggcatatgaaaaaattcgtttcaaaggtttagactttgaaagtgctcatttgtacggtcaagaggctcctgaatcatttttgattttagaaaataatatcaaatatagtgtctttttgaatgatggattaatgacaggtattttccttgaccaacatgatgtcagaaaagccttagcaactaatctatcagaaggtaaaaaagttctaaatatgttttcatacactgcggctttttctgtagctgcagctgttggaggggcattagagacaacttctgttgatttagcaaaacgctcgcgtgaactttcaaaagcacactttgatgctaatcagattgtcacagataaccatcgatttatcgttatggatgtttttgaatattataagtatgccaaaagaaaacatctatcatatgatgtgattgttattgatccaccaagttttgctcgaaataaaaaacaaactttttcggttactaaagattactataaattaattgaacaagctttagatattttaacccctggtggaactatcattgcatcaactaacgcagctaatctaaccgtatcacaatttaagaaacaattggaaaaggggtttggtaaagcttcacataattacattagcttacagcagttgcctgaagatttcactgtaaatgataaggaccaacaaagtaattatttaaaagtatttacaataaaggtaaaa

SEQ ID NO: 7154 - protein, 385 aa, Streptococcus agalactiae
MNKLKVNSVVERKIKSGAQLLEKKDFDTSLVNQLVQLFSQSNQFLGMAYLSPQNKGIGWLLSRQVFDFNHDYFVSLFEKSREKRQKFEKSSQTTAYRLFNQDGDNFGGLTIDFYSDYALFSWYNEFVYTNRQMIVAAFKQVYPNIKGAYEKIRFKGLDFESAHLYGQEAPESFLILENNIKYSVFLNDGLMTGIFLDQHDVRKALATNLSEGKKVLNMFSYTAAFSVAAAVGGALETTSVDLAKRSRELSKAHFDANQIVTDNHRFIVMDVFEYYKYAKRKHLSYDVIVIDPPSFARNKKQTFSVTKDYYKLIEQALDILTPGGTIIASTNAANLTVSQFKKQLEKGFGKASHNYISLQQLPEDFTVNDKDQQSNYLKVFTIKVK

SEQ ID NO: 7155 - DNA, 2142 bp, Streptococcus agalactiae
gtgaaaaaaattaaagattttgctagccgtgcgatcaatacacgactcggctttattttattgttagtagttatatattggttaaagacaatttgggcttaccatactgattttaatttaggtttagaaaattcctatcagttgtttttgaccattataaaccccatccccttaggactcttaatcataggtttggccttatatgttaagcgaaccaaagctttttatattaccgcttttatcacctatgctatcgtaaatatccttctaattgcaaacgcaatctactatagagagttttccgatttcattacagttagcgccgtcttggctagtagtaaaacttcggctggccttggagactctgctcttaatctattgagaatttgggatcttgtctacgttttcgatttcattatccttattttcttgtttgcaaccaagaaaatccacttagatgatcgtccatttaataaacgtgctagtttttctatcacagctttgtctggtttactcttttcaattaacttattcttagctgaaattgatcgtccagaactactaagtcgtggtttttcaaacacctatattgttaaagctcttggcttgccatcattttcgatttatagtggtaatcaaacttatcaagcacagaaagaaagaaatggtgccactgcacaagaattggcgactgccaaaaaatatgtagcagagcattatgccaaacccaatccagaatattatggtatcggaaaagggcgaaacgttatcatgattcacttggagagttttcaacaattcttgattgactataaattaaatgttgatggtaaagaacatgtggttactccatttattaacagcctttatcattcgaaagagactatttccttctctaacttcttccatcaagtcaaagctggtaagacatccgatgctgagacactcatggaaaactcactttttggtctaagtagtggttcattcatggttaattatggtggtgaaaatacacaatttgctgctccacatatcttagctcaaaatggaggttacagtagtgcggtcttccacggaaacgtcggaacattttggaatagaaataatgcttacaaacagtggggttatgactacttctttgactctagctacttctcaaaacaaaccaaagataattcattccaatacggtttgaatgataaatatatgtttgctgactctatcaaatatctagagcacatgcaacaaccgttttatactaaatttattacagtaagtaaccattacccttacacaagtttgaagggagagtctgacgaagagggattcccacttgcaaagactaacgatgaaacgattaacggttatttcgccacagcaaactaccttgatacagctcttaaatcattttttgaatatctaaaagctgctggtgtgtatgataattctattattgtaatgtatggggatcactacggtatttctaatacacgcaatcctagcttagctgaattattaggtaaagaccctgaaacatggtctgaatacgacaacgctatgttacaacgtgttccatatatgatccacattcctggctattcaaaaggttttatcagtaatacatacggtggtgaggtagataatttaccaactttacttcatattctagggatagacacgtctaaatatactcagttaggacaagacttattatctaaagataataaacaaatggtcgctatgagaacaactggtcagtatattactcctaaatacactaactatagtggacatctctattacactgattcaggacaagaaatcacaaatcctgatgaaacaactaaagctgaaataaaagctattcgagatgctactaataaacaattatctacaagtgattcgattcaaactggagatttactacgatttgatgaaaacaatggtttgaaaactgtagaagttgaaaaattcaattacacacattctcttaaagcactcaaagctaaagaacgtaaattgaaagatcgttcaacaagcatatacagcaaacataacaacaaatcaacagttgatctcttccacgctccaagttacttggaattgcaagatcctaataagacacataaaacatctaaaaaa

SEQ ID NO: 7156 - protein, 714 aa, Streptococcus agalactiae
MKKIKDFASRAINTRLGFILLLVVIYWLKTIWAYHTDFNLGLENSYQLFLTIINPIPLGLLIIGLALYVKRTKAFYITAFITYAIVNILLIANAIYYREFSDFITVSAVLASSKTSAGLGDSALNLLRIWDLVYVFDFIILIFLFATKKIHLDDRPFNKRASFSITALSGLLFSINLFLAEIDRPELLSRGFSNTYIVKALGLPSFSIYSGNQTYQAQKERNGATAQELATAKKYVAEHYAKPNPEYYGIGKGRNVIMIHLESFQQFLIDYKLNVDGKEHVVTPFINSLYHSKETISFSNFFHQVKAGKTSDAETLMENSLFGLSSGSFMVNYGGENTQFAAPHILAQNGGYSSAVFHGNVGTFWNRNNAYKQWGYDYFFDSSYFSKQTKDNSFQYGLNDKYMFADSIKYLEHMQQPFYTKFITVSNHYPYTSLKGESDEEGFPLAKTNDETINGYFATANYLDTALKSFFEYLKAAGVYDNSIIVMYGDHYGISNTRNPSLAELLGKDPETWSEYDNAMLQRVPYMIHIPGYSKGFISNTYGGEVDNLPTLLHILGIDTSKYTQLGQDLLSKDNKQMVAMRTTGQYITPKYTNYSGHLYYTDSGQEITNPDETTKAEIKAIRDATNKQLSTSDSIQTGDLLRFDENNGLKTVEVEKFNYTHSLKALKAKERKLKDRSTSIYSKHNNKSTVDLFHAPSYLELQDPNKTHKTSKK

SEQ ID NO: 7157 - DNA, 357 bp, Streptococcus agalactiae
atggctcgtgttaaaggtggagttgtttcacgtaaacgtcgtaaacgcgtacttaaattagctaaaggttactatggtgcaaaacatatcttgttccgtactgcaaaagaacaagtaatgaattcttactactatgcataccgtgaccgtcgtcagaaaaaacgtgacttccgtaaattatggatcactcgtatcaatgcggctgctcgtatgaatggtttatcatattcgcaattgatgcacggtttgaaattagctgaaatcgaagttaaccgtaaaatgcttgctgatttagcagttaacgatgcagcagctttcacagctcttgcagatgcagctaaagctaaacttggtaaa

SEQ ID NO: 7158 - protein, 119 aa, Streptococcus agalactiae; identical to SEQ ID NO: 2584

SEQ ID NO: 7159 - DNA, 198 bp, Streptococcus agalactiae
atgccaaaacaaaaaacacaccgcgcatcagctaaacgctttaaacgcacaggttcaggtggattgaaacgcttccgcgcgtttacttcacaccgtttccacggtaaaactaaaaaacaacgtcgtcatcttcgtaaagctactatggtttcatcaggagatttcaaacgtattaaagcaatgcttactcgccttaaa

SEQ ID NO: 7160 - protein, 66 aa, Streptococcus agalactiae; identical to SEQ ID NO: 2586

SEQ ID NO: 7161 - protein, 525 aa, Streptococcus agalactiae
GTGAAGATCATAGCTAAAAAAGATCTATTCATTAACGATGAAATTCGCGTTCGTGAAGTTCGTCTGGTTGGTCTCGAGGGTGAACAATTAGGTATTAAACCATTGTCTGAAGCTCAAGCAATTGCAGATGATGCTAATGTTGATTTGGTTTTAATTCAGCCACAAGCTACACCACCTGTTGCGAAAATTATGGACTATGGTAAGTTCAAATTTGAGTATCAAAAGACAAAAGAACAACGTAAAAAACAAAGCGTTGTTACTGTTAAGGAAGTTCGTCTTAGCCCAGTTATTGATAAAGGGGATTTTGAAACAAAACTTCGTAACGGTCGTAAGTTCCTTGAAAAAGGTAACAAAGTTAAAGTTTCTATCCGATTCAAAGGACGTATGATTACTCATAAAGAAATTGGAGCAAAGGTATTGGCGGAATTTGCTGAAGCGACACAAGATATCGCTATTATTGAGCAAAGAGCTAAGATGGATGGTCGCCAAATGTTTATGCAGCTTGCACCAATTCCAGACAAGAAA

SEQ ID NO: 7162 - protein, 176 aa, Streptococcus agalactiae
  VARIANT 76: Xaa = Any Amino Acid
MKIIAKKDLFINDEIRVREVRLVGLEGEQLGIKPLSEAQAIADDANVDLVLIQPQATPPVAKIMDYGKFKFEYQKXQKEQRKKQSVVTVKEVRLSPVIDKGDFETKLRNGRKFLEKGNKVKVSIRFKGRMITHKEIGAKVLAEFAEATQDIAIIEQRAKMDGRQMFMQLAPIPDKK

SEQ ID NO: 7163 - protein, 807 aa, Streptococcus agalactiae
GGCTAGTAGTAAAACTTCGGCTGGCCTTGGAGACTCTGCTCTTAATCTATGAGATTTGGGATCTTGTCTACGTTTTCGATTCATATCCTTATTTTCTTGTTTGCAACCAAGAAAATCCACTTAGATGATCGTCCATTTAATAAACGTGCTAGTTTTTCTATCACAGCTTTGTCTGGTTTACTCTTTTCAATTAACTTATTCTTAGCTGAAATTGATCGTCCAGAACTACTAAGTCGTGGTTTTTCAAACACCTATATTGTTAAAGCTCTTGGCTTGCCATCATTTTCGATTTATAGTGGTAATCAAACTTATCAAGCACAGAAAGAAAGAAATGGTGCCACTGCACAAGAATTGGCGACTGCCAAAAAATATGTAGCAGAGCATTATGCCAAACCCAATCCAGAATATTATGGTATCGGAAAAGGGCGAAACGTTATCATGATTCACTTGGAGAGTTTTCAACAATTCTTGATTGACTATAAATTAAATGTTGATGGTAAAGAACATGTGGTTACTCCATTTATTAACAGCCTTTATCATTCGAAAGAGACTATTTCCTTCTCTAACTTCTTCCATCAAGTCAAAGCTGGTAAGACATCCGATGCTGAGACACTCATGGAAAACTCACTTTTTGGTCTAAGTAGTGGTTCATTCATGGTTAATTATGGTGGTGAAAATACACAATTTGCTGCTCCACATATCTTAGCTCAAAATGGAGGTTACAGTAGTGCGGTCTTCCACGGAAACGTCGGAACATTTGGAATAGAAATAATGCTTACAAACCAGTGGGGTTNNNNNTTAATTAAT

SEQ ID NO: 7164 - protein, 271 aa, Streptococcus agalactiae
  VARIANT 1, 267, 268: Xaa = Any Amino Acid
XASSKTSAGLGDSALNLLRIWDLVYVFDFIILIFLFATKKIHLDDRPFNKRASFSITALSGLLFSINLFLAEIDRPELLSRGFSNTYIVKALGLPSFSIYSGNQTYQAQKERNGATAQELATAKKYVAEHYAKPNPEYYGIGKGRNVIMIHLESFQQFLIDYKLNVDGKEHVVTPFINSLYHSKETISFSNFFHQVKAGKTSDAETLMENSLFGLSSGSFMVNYGGENTQFAAPHILAQNGGYSSAVFHGNVGTFGIEIMLTNQWGXXLIN

SEQ ID NO: 7165 - protein, 288 aa, Streptococcus agalactiae
ATGACTATTGTTTTCCACAACTTTTTTTTCCCATGGTTTTTTCGCCATGACTTCCCCCTTGTTAATCGTATCAATAAGTATTACAATAATACTATGAAAGTTGCACTAATTCCAGAAAAATGTATTGCCTGCGGGCTTTGCCAAACATATTCAAATATTTTTGATTATCAAGATGATGGTATCGTTAAATTTTCCGATACAGATAACCTAGAAAAAGAGGTTCCAAATTCTGATCAAGATACTGTTTTAGCAGTTAAATCATGTCCCACCAAAGCTCTTACGATTTTG

SEQ ID NO: 7166 - protein, 96 aa, Streptococcus agalactiae
MTIVFHNFFFPWFFRHDFPLVNRINKYYNNTMKVALIPEKCIACGLCQTYSNIFDYQDDGIVKFSDTDNLEKEVPNSDQDTVLAVKSCPTKALTIL

SEQ ID NO: 7167 - protein, 489 aa, Streptococcus agalactiae
ATGATAAAATTATTTGGGAAGATACGTTATCACTGGCAACCTGAACTTTCTTGGGCTATTATTTATTGGTCAATAGCCATTGCACCAATTTTTATTGGTTTATCTCTGCTATATGAAAGAACTGAGATTCCGAGTCAGGTATTTGTTCTATTTGCCATCTTTATTGTTTTAGTAGGCATTGGATTTCATCGCTATTTTGTTATTGAAGAAGATGGATATCTTAGGATTGTATCTTTTAACTTTTTAAGACGATCTAAATTTCCAATTGAAGATATTGCTAAAATTGAAGTCACTAAATCAAGTGTCACTATCAAATTTAATAATAACCATGAGCGTATTTTTTACATGCGAAAATGGCCTAAAAAATATTTTTTAGATGCACTAGCTATTGAACCTAAATTTAAGGGAGAAGTGGAGCTTCTCGATAATTTGATTAAAATGGATTATTTTGAATGTTATCGCTACGATAAAAAAGCTCTTACAAAATCG

SEQ ID NO: 7168 - protein, 163 aa, Streptococcus agalactiae
MIKLFGKIRYHWQPELSWAIIYWSIAIAPIFIGLSLLYERTEIPSQVFVLFAIFIVLVGIGFHRYFVIEEDGYLRIVSFNFLRRSKFPIEDIAKIEVTKSSVTIKFNNNHERIFYMRKWPKKYFLDALAIEPKFKGEVELLDNLIKMDYFECYRYDKKALTKS

SEQ ID NO: 7169 - protein, 225 aa, Streptococcus agalactiae
ATGACACCTATCAACATTGCTAAAGAAGTAATGGAAGAGTTAGACATCAAGCCAATCATAGAACCGATTCGTGGTGGTACAGATGGCTCTAAAATTTCCTTTATGGGAATCCCTACTCCTAATCTTTTTGCAGGTGGTGAAAACATGCATGGACGTTTTGAATTCGTTAGTCTACAAACAATGGAAAAAGCAGTTGATGTTATTTTAGGCATCGTTGCTAAGGAT

SEQ ID NO: 7170 - protein, 75 aa, Streptococcus agalactiae
MTPINIAKEVMEELDIKPIIEPIRGGTDGSKISFMGIPTPNLFAGGENMHGRFEFVSLQTMEKAVDVILGIVAKD

SEQ ID NO: 7171 - DNA, 822 bp, Streptococcus agalactiae
  misc_feature 813, 814, 815, 816, 817: n = A,T,C or G
atgtcttacgaaaagcttttagaacgatttttaacatacgtcaaaataaatacaagaagtaatcctaatagtacacaaacgccaacaactcaaagtcaagttgactttgctttaacagttttaaaaccagaaatggaagcaattggtttaaaagatgttcattatttaccttctaatgggtatttggttggaaccttacctgctacaagcgaccgcttatgccataaaataggttttatatcccatatggatacagctgatttcaatgctgaaaatattactccacaaattgttgactataaaggtggagatattgaacttggagactcaggttacattttaagtccaaaagattttccaaatttaaataattaccatgggcaaacattgattacaacagatggtaaaaccttactgggagcagacgataagtctggtatagcagaaatcatgacagctatggaatatttggcttcgcatccagaaattgagcactgtgaaattagagttggctttggaccagacgaagaaattggtataggtgcagataaatttgatgttaaagattttgatgttgattttgcctatacagtggatggtggaccactaggagaattacagtatgaaacctttagtgcagctggtttggagcttacatttgaaggacgaaacgttcaccctggaactgcaaaaaatcaaatgattaatgctttacagcttgctatggattttcatagtcaattaccagaaaatgaacgtcctgaacaaacagatggctatcaaggattttatcacttatatgatttaagtggnnnnnttaat

SEQ ID NO: 7172 - protein, 274 aa, Streptococcus agalactiae
  VARIANT 272, 273: Xaa = Any Amino Acid
MSYEKLLERFLTYVKINTRSNPNSTQTPTTQSQVDFALTVLKPEMEAIGLKDVHYLPSNGYLVGTLPATSDRLCHKIGFISHMDTADFNAENITPQIVDYKGGDIELGDSGYILSPKDFPNLNNYHGQTLITTDGKTLLGADDKSGIAEIMTAMEYLASHPEIEHCEIRVGFGPDEEIGIGADKFDVKDFDVDFAYTVDGGPLGELQYETFSAAGLELTFEGRNVHPGTAKNQMINALQLAMDFHSQLPENERPEQTDGYQGFYHLYDLSGXXN

SEQ ID NO: 7173 - DNA, 1632 bp, Streptococcus agalactiae
atgtcacaaaaaacaacaaaagttagtcagcaagaacaaatggtcaaagggacggcttggttaacagcagggaatttcattagtcggttgctgggagccatctatattatcccttggtatgcttggatgggaaagcatgctgccgaagcaaatgctttatttgggatgggatatgaaatctatgctttatttcttttgatatcaactgttggaattccagtagcagttgcaaaacaggtatctaagtataacactttaggtaaagaagagatgagcatttacctggttcggaaaatcttgcagtttatgctgattttaggtggagtttttgcattaattatgtatattggttcacctctatttgcttcacttagtaaaggagggcaagaactcgttccaatattgcgtagtctaactctagctgttttagtttttccttcaatgagtgttttacgtggtttttttcaaggttttaataatttaaaaccgtatgccattagtcaagtcgctgagcagattatacgtgtcatatggatgctattaactgctttctatattatgcgtctaggatcaggagattatattgccgctgtgacacagtcaacattcgccgcctttgtcggtatgtttgctagtatagctgtgctgctttatttcttatggcgttataatatgctatctgctttgattggtaaaactccagagcacattaaattagatactaaagaaatactaattgagactgttaaggaagcaatcccttttattattactggtgcagcaattcaaattttcaaattgattgatcagttttcatttgggaatacgatggcgctctttacgaattattcaagtgaagaattacgggttatgtttgcttacttttcaagcaaccctggtaaagttacgatgattctaattgctgttgctaccgcaattgctggagttggtattccattgttaacagagaattttgttaagaatgataaaaaagccgccgctcgtttggttgttaataatttacaaatgttactaatgtttttactgccagctgttgcaggatccgttattttagcaaaacctttgtatacagtcttttatgggttaccgcagggacaagctttagggctttttgtcatatctcttattcaaacaattattttatctatttatactgttttagcaccaatgctacaagcattgtttgaaaatcgtaaagctattatttacttcctatatggtctggtggcaaaagttattttacaagttccctccattttccttttccatgcctatggaccacttttctcaacgacagtagctctttgtatcccagtaattcttatgtatttgaaaatacatgaaattacaggatttaaacgccaagctattcgtcgtacaagtgctttagtccttattctaacgctattgatgagctttattatttctatgataatatggttaatgaacctggttattgtacccgatagtagactggtaagtctagtttacattatcgttatcggtgcaataggtttaggggtatatggctttatggcactggccacccatctacttgataagatgattggcagtcgtgctcaagacttacgccgaaagttgcaccttaac

SEQ ID NO: 7174 - protein, 544 aa, Streptococcus agalactiae
MSQKTTKVSQQEQMVKGTAWLTAGNFISRLLGAIYIIPWYAWMGKHAAEANALFGMGYEIYALFLLISTVGIPVAVAKQVSKYNTLGKEEMSIYLVRKILQFMLILGGVFALIMYIGSPLFASLSKGGQELVPILRSLTLAVLVFPSMSVLRGFFQGFNNLKPYAISQVAEQIIRVIWMLLTAFYIMRLGSGDYIAAVTQSTFAAFVGMFASIAVLLYFLWRYNMLSALIGKTPEHIKLDTKEILIETVKEAIPFIITGAAIQIFKLIDQFSFGNTMALFTNYSSEELRVMFAYFSSNPGKVTMILIAVATAIAGVGIPLLTENFVKNDKKAAARLVVNNLQMLLMFLLPAVAGSVILAKPLYTVFYGLPQGQALGLFVISLIQTIILSIYTVLAPMLQALFENRKAIIYFLYGLVAKVILQVPSIFLFHAYGPLFSTTVALCIPVILMYLKIHEITGFKRQAIRRTSALVLILTLLMSFIISMIIWLMNLVIVPDSRLVSLVYIIVIGAIGLGVYGFMALATHLLDKMIGSRAQDLRRKLHLN

SEQ ID NO: 7175 - DNA, 1452 bp, Streptococcus agalactiae
atgattacaatagataaaattttagaaattttaaaaaatgaccataatttcagagagattttgtttcatgagcattattattataactggacacaaaatgtaacttttaatgccttatcatatgatagtcgtcaaatttcatctgatactttatttttcgctaagggtgctacttttaaaaaagaatatctagattctgcaatcacagcaggcctttctttttacgtttctgagatagattacggcgccgatattccagtgatattagtcaatgatatcaaaaaagccatgagtttgatatctatgtctttctataataacccacaaaacaaacttaaacttctagcttttactggaacaaaaggaaaaacaactgcggcttactttgcttatcatatgttaaaagtaaaccatcgtcctgctatgctctcaactatgaacacaacattagatggtaaatctttctttaaatcacatctcacaacccccgagagtcttgatttatttcggatgatggctacagctgttgagaatcaaatgacacacttagttatggaagtatcaagccaagcatacctaaccaaacgtgtttatggtttaacctttgacgttggcgttttcttaaatattagtcccgatcatattggtcctatcgagcaccctacattcgaagattattttttccacaaacggctcttgatggagaatagcaatgctgttgttgtaaatagtcagatggatcattttaatattgtcaaagaacaggtagaatatattcctcatgatttctatggagattattctgaaaatgttatcacagaatcacaggccttttctttccatgtcaaaggaaagttggagaacacctacgatatcaagctgattggaaaattcaatcaagaaaatgctatcgcagctggacttgcttgtctccgacttggtgtttcaattgaagatataaaaaacggaattgcacaaactaccgtccctggccgcatggaagtcctaacacaaaccaacggcgcaaagattttcgttgactatgcccacaacggagacagtttgaagaaattattagctgttgttgaggaacaccaaaaaggggatattatattagtgctcggagctcctggtaataaaggtcaaagccgtcgtaaagacttcggagatgtcattaatcaacatcctaatctacaagtgatactcactgcagatgatcctaattttgaagatcccttagttatctcacaagaaatagcaagccatattaatcgtccagttactatcatcattgatcgagaagaagcaattgctaatgccagtactcttactaattgcaaactagatgcaattattatcgctggtaaaggggcagatgcttatcaaattatcaaaggaaatcgtgacaattactctggagatttagaagttgcgaaaaaataccttaaacga

SEQ ID NO: 7176 - protein, 484 aa, Streptococcus agalactiae
MITIDKILEILKNDHNFREILFHEHYYYNWTQNVTFNALSYDSRQISSDTLFFAKGATFKKEYLDSAITAGLSFYVSEIDYGADIPVILVNDIKKAMSLISMSFYNNPQNKLKLLAFTGTKGKTTAAYFAYHMLKVNHRPAMLSTMNTTLDGKSFFKSHLTTPESLDLFRMMATAVENQMTHLVMEVSSQAYLTKRVYGLTFDVGVFLNISPDHIGPIEHPTFEDYFFHKRLLMENSNAVVVNSQMDHFNIVKEQVEYIPHDFYGDYSENVITESQAFSFHVKGKLENTYDIKLIGKFNQENAIAAGLACLRLGVSIEDIKNGIAQTTVPGRMEVLTQTNGAKIFVDYAHNGDSLKKLLAVVEEHQKGDIILVLGAPGNKGQSRRKDFGDVINQHPNLQVILTADDPNFEDPLVISQEIASHINRPVTIIIDREEAIANASTLTNCKLDAIIIAGKGADAYQIIKGNRDNYSGDLEVAKKYLKR

SEQ ID NO: 7177 - DNA, 792 bp, Streptococcus agalactiae
atgtctcacataaaagcagaaaacattatcgtatcttacgatcagaaagaaatcatcaataatctttccctcagtatacttaaccaaaaaataacaacgattattggtgccaatggatgtggaaagtctactcttttgaaggctctcacacgcatccataaaataaaagatggtactatcactattgatggtcatgatattgcacatttacccacaaaggaaattgctaagaagattgcacttctcccacaggtgttagaagcaactgaagggataacagtttatgaactaatatcttatggacggttcccacaccaaaaataccttggcaatttgacaaatgacgatcgcagtaaaatccattgggcgatggaaatgactaacgtagcgcaatttgctaatagagatgttgatgacctttcaggaggtcagaggcaaaaagtatggattgctatggctttagcacaagatacagatactatctttttagacgaacctacaacttatcttgacatgaatcatcaattagaagtcttggaattgctcaaaaaacttaataacgaaacgcaaaaaacaattattatggtcctacacgacctaaacctgtctgcgcgctattctgattatctagttgcaatgaaaaccggtaaaattatctatgaaggtagtcctagtcagatcatgactaaagatattatcaaagatatttttaagattgatgctcatatcattcaggaccctattagtaaacaacctgttttgttatcttatcaattatcaactgatcaaaat

SEQ ID NO: 7178 - protein, 264 aa, Streptococcus agalactiae
MSHIKAENIIVSYDQKEIINNLSLSILNQKITTIIGANGCGKSTLLKALTRIHKIKDGTITIDGHDIAHLPTKEIAKKIALLPQVLEATEGITVYELISYGRFPHQKYLGNLTNDDRSKIHWAMEMTNVAQFANRDVDDLSGGQRQKVWIAMALAQDTDTIFLDEPTTYLDMNHQLEVLELLKKLNNETQKTIIMVLHDLNLSARYSDYLVAMKTGKIIYEGSPSQIMTKDIIKDIFKIDAHIIQDPISKQPVLLSYQLSTDQN

SEQ ID NO: 7179 - DNA, 930 bp, Streptococcus agalactiae
atgaaaaaaattggaattattgtcctcacactactgaccttctttttggtatcttgcggacaacaaactaaacaagaaagcactaaaacaactatttctaaaatgcctaaaattgaaggcttcacctattatggaaaaattcctgaaaatccgaaaaaagtaattaattttacatattcttacactgggtatttattaaaactaggtgttaatgtttcaagttacagtttagacttagaaaaagatagccccgtttttggtaagcaactgaaagaagctaaaaaattaactgctgatgatacagaagctattgccgcacaaaaacctgatttaatcatggttttcgatcaagatccaaacatcaatactctgaaaaaaattgcaccaactttagttattaaatatggtgcacaaaattatttagatatgatgccagccttggggaaagtattcggtaaagaaaaagaagctaatcagtgggttagccaatggaaaactaaaactctcgctgccaaaaaagatttacaccatatcttaaagcctaacactacttttactattatggatttttatgataaaaatatctatttatatggtaataattttggacgcggtggagaactaatctatgattcactaggttatgctgccccagaaaaagtcaaaaaagatgtctttaaaaaagggtggtttaccgtttcgcaagaagcaatcggtgattacgttggagattatgcccttgttaatataaacaaaacgactaaaaaagcagcttcatcacttaaagaaagtgatgtctggaagaatttaccagctgtcaaaaaagggcacatcatagaaagtaactacgacgtgttttatttctctgaccctctatctttagaagctcaattaaaatcatttacaaaggctatcaaagaaaatacaaat

SEQ ID NO: 7180 - protein, 310 aa, Streptococcus agalactiae
MKKIGIIVLTLLTFFLVSCGQQTKQESTKTTISKMPKIEGFTYYGKIPENPKKVINFTYSYTGYLLKLGVNVSSYSLDLEKDSPVFGKQLKEAKKLTADDTEAIAAQKPDLIMVFDQDPNINTLKKIAPTLVIKYGAQNYLDMMPALGKVFGKEKEANQWVSQWKTKTLAAKKDLHHILKPNTTFTIMDFYDKNIYLYGNNFGRGGELIYDSLGYAAPEKVKKDVFKKGWFTVSQEAIGDYVGDYALVNINKTTKKAASSLKESDVWKNLPAVKKGHIIESNYDVFYFSDPLSLEAQLKSFTKAIKENTN

SEQ ID NO: 7181 - protein, 1023 aa, Streptococcus agalactiae
ATGTTTAAAGCTTCAAAAAAACTCGTTCAAAAAAATAAGTCAAATCATTTTTGGCTTGTTTTTTTCATAACACTTATACTATTTCTTATTGGTTGTTACGCCAGCTTACGATTTGGTGCTATCAATTTCAAGACTAGTGATTTAATAACTGTTTTAAAAAATCCCTTAAAAAACTCTAATGCTCAGGATGTTATTTTTGACATTAGACTACCACGCATAATTGCAGCTATCTTAGTAGGTGCAGCTATGTCACAAGCAGGTGCTATTATGCAGGGAGTCACTCGAAACGCCATTGCTGATCCTGGACTACTAGGTATTAACGCCGGAACTGGGTTAGCCCTTGTTGTTGCATATGCTTTTTTAGGGAGCATGCACTATAGTACGATTCTCATTGTCTGCTTACTAGGGTCTGTCATTTCTTGTCTTTTAGTCTTCACACTCTCTTATACAAAGCAAAAGGGTTACCACCAACTACGACTCATTTTAGCTGGAGCGATGATCTCCACACTTTTTACGTCTGTTGGACAAGTGGTTACATTATACTTTAAACTCAATCGAACTGTTATCGGTTGGCAAGCAGGTGGTTTATCCCAAATTAACTGGAAAATGCTAATCATAATAGCACCTATCATTATTTTAGGTTTACTTATTTCACAACTCCTAGCACATCAATTAACTATCTTGAGCCTTAATGAATCTGTGGCCAAAGCATTGGGACAAAAAACTCAATTAATGACTGCGTTTCTATTACTTATTGTTTTGTTTTTATCGGCTTCATCAGTCGCGTTGATAGGAACCGTTTCTTTCATTGGATTGATTATTCCACATTTTATTAAGCTTTTTATTCCCAAAGATTATCGTCTGTTATTACCTTTAATAGGATTTTCAGGGGCTACTTTCATGATCTGGGTAGACTTATCATCTCGTATTATAAATCCCCCTTCAGAGACACCAATTAGTTCTATAATCAGTATCGTAGGGCTTCCATGTTTCCTATGGTTAATTAGAAAAGGGAAAAATCTA

SEQ ID NO: 7182 - protein, 341 aa, Streptococcus agalactiae
MFKASKKLVQKNKSNHFWLVFFITLILFLIGCYASLRFGAINFKTSDLITVLKNPLKNSNAQDVIFDIRLPRIIAAILVGAAMSQAGAIMQGVTRNAIADPGLLGINAGTGLALVVAYAFLGSMHYSTILIVCLLGSVISCLLVFTLSYTKQKGYHQLRLILAGAMISTLFTSVGQVVTLYFKLNRTVIGWQAGGLSQINWKMLIIIAPIIILGLLISQLLAHQLTILSLNESVAKALGQKTQLMTAFLLLIVLFLSASSVALIGTVSFIGLIIPHFIKLFIPKDYRLLLPLIGFSGATFMIWVDLSSRIINPPSETPISSIISIVGLPCFLWLIRKGKNL

SEQ ID NO: 7183 - protein, 999 aa, Streptococcus agalactiae
ATGATTCAAAAAAATAAAGCTCCTTTTGTTTTAATATCATCTGTCATTATCCTACTATTATTAATACTAGTATCAATTTCACTTGGCTATGCTAATACTTCCGTTATTAACGTTTTAAAACTAATAAGTGGAAAATCTGATGATGCCTTCCTTTTTATCATTACTAACATTCGTTTACCTCGTATTATTGTCTGTATCTTTGGGGGAGCTTCTTTAGGAATTGCTGGGTTGCTATTACAGACGTTAACCAAAAATCCACTAGCTGATTCCGGTATTCTTGGTATCAATGCTGGAGCTGGATTAGTAATCGCTCTAACCATAGGAACATTTAATGTTAGCAATCCAACTATATTATACTTTTTACCCCTATTTGCTATGTTTGGAGGGTTGGTAACTATTTTTCTTGTCTATCTTATGTCATACAGAAGAAATCACAATATTAGCCCTACACGATTAATCGTCACTGGTATCGGAATATCTACAATGATTTCAGGCATTATGATTTCTATTATTAGTCAGTCTAATAGTCAAAAAATGGATATGATCGTTGAATGGCTTAGTGGAAAAATTACAATTAGTTCCTGGACTACCATTATCACTTTTATCCCGATTCTCATTTTGTTATGGGGATTAACATATAGTCGCAGTCGCCACCTTAATATTATGAACCTAAACGAGCAGACTGCTCTCGCTCTAGGACTTCATTTAAAAAAGGAAAGAATATATACTTTGATGCTGGCAAGTAGCCTTGCTGCTATTAGCGTCGTCTTAATTGGTAATATTACTTTTATAGGCTTACTCGCTGGGCACTTAAGTAGACGACTATTAGGAAATAACCATAAAATTATACTACCTAGCTGTCTTCTTATTGGTGCTATTATCCTATTGGTATCAGATACTATAGGTCGTCTCCTCTTAGTTGGTACAGGTATACCCACTGGATTGGTTGTATCAATAATTGGTGCCCCCTATTTTCTCTGGTTGATGACAAAAGTTGAC

SEQ ID NO: 7184 - protein, 333 aa, Streptococcus agalactiae
MIQKNKAPFVLISSVIILLLLILVSISLGYANTSVINVLKLISGKSDDAFLFIITNIRLPRIIVCIFGGASLGIAGLLLQTLTKNPLADSGILGINAGAGLVIALTIGTFNVSNPTILYFLPLFAMFGGLVTIFLVYLMSYRRNHNISPTRLIVTGIGISTMISGIMISIISQSNSQKMDMIVEWLSGKITISSWTTIITFIPILILLWGLTYSRSRHLNIMNLNEQTALALGLHLKKERIYTLMLASSLAAISVVLIGNITFIGLLAGHLSRRLLGNNHKIILPSCLLIGAIILLVSDTIGRLLLVGTGIPTGLVVSIIGAPYFLWLMTKVD

SEQ ID NO: 7185 - protein, 651 aa, Streptococcus agalactiae
ATGATATTAACGTTTAATCCAGGAAAGTTAGAAAGACAAGAGTTTTTTAAGGAGCTTATTAACTATCTTTGGATACATGATGATGTAACACTAAGACAAATAAAGTCCCACTTTACAGACTACTCTAAAATTGACCGTTTGTTAGAAGAATATATTAACCATGGATATATCCTTCGCCAAAATAAACGCTACAGCCTTAATCTTCCTTTTCTGAGTTCGCTAGATGGATTAGTATTAGATGATTTGGTTTTCATAGATTCTGATAGTCAAATCTATCAGTTATTACAGAAGCGAAAATTTGTGACAAATTTAGATAACCAAACCAATCACTTGGTATTTGTAGAAGAGACAGATTTTGAAAGAAACACTTTGACTCTTTCTAATTATTTCTATAAACTAACTAACGGTTATCCACTTTCAAGAGAACAAAAAAAGCTTTATCAACTTTTAGGAGATGTTAATTCGGAATATGCTTTAAAATATATGTCAAGCTTTATATTGAAATTTCTTCGCAAGGATAGTGTTAAGCAAAAACGTACAGATATTTTTATCCAAGCTTTAGAATTACTTGGATATATTAGCTTAAACCAAGATACTACCTATCGTTTAAATGCTAAACTTGATGTTGAAGCTTTAAAGATTTACTTAACA

SEQ ID NO: 7186 - protein, 217 aa, Streptococcus agalactiae
MILTFNPGKLERQEFFKELINYLWIHDDVTLRQIKSHFTDYSKIDRLLEEYINHGYILRQNKRYSLNLPFLSSLDGLVLDDLVFIDSDSQIYQLLQKRKFVTNLDNQTNHLVFVEETDFERNTLTLSNYFYKLTNGYPLSREQKKLYQLLGDVNSEYALKYMSSFILKFLRKDSVKQKRTDIFIQALELLGYISLNQDTTYRLNAKLDVEALKIYLT

SEQ ID NO: 7187 - protein, 933 aa, Streptococcus agalactiae
ATGTCTAAAATTTTAGTCTTTGGTCACCAAAATCCAGATTCAGATGCTATTGGATCATCAGTTGCTTTTGCATATCTAGCTAAAGAAGCTTGGGGGCTTGACACAGAGGCCGTTGCTTTAGGAACTCCAAATGAAGAAACAGCATATGTTTTAGATTATTTTGGTGTTCAAGCACCTCGAGTAGTAGAATCTGCAAAAGCAGAGGGTGTAGAGACAGTCATTTTAACTGACCATAACGAATTCCAACAATCTATTTCTGATATTAAAGATGTGACAGTTTATGGTGTTGTTGATCATCATCGTGTTGCTAACTTTGAGACTGCTAATCCGTTATATATGCGTTTGGAACCAGTTGGCTCAGCATCATCGATTGTTTACCGTATGTTTAAGGAAAATGGAGTATCAGTACCCAAAGAGTTGGCTGGTTTATTATTATCAGGTTTGATTTCAGATACTCTTCTTTTGAAATCACCAACAACTCATGCTTCAGATATTCCAGTTGCAAAAGAACTAGCAGAGATTGCAGGTGTAAACTTAGAAGAATATGGTTTAGAAATGCTTAAAGCAGGTACTAACCTCTCAAGTAAGACTGCAGCGGAGTTGATTGATATTGATGCTAAAACATTTGAATTAAATGGAGAAGCTGTTCGTGTTGCACAAGTTAATACTGTGGACATTAACGATATTTTAGCACGTCAAGAAGAGATTGAAGTTGCTATTCAAGAAGCAATTGTCACAGAAGGTTATTCTGATTTTGTATTGATGATTACTGACATTGTTAATTCAAATTCAGAGATTTTAGCTCTCGGTTCAAATATGGCTAAAGTTGAAGCAGCTTTTGAATTTACACTTGAAAATAACCACGCTTTTCTTGCTGGGGCAGTATCACGTAAAAAACAAGTTGTTCCTCAATTGACAGAAAGCTACAATGCT

SEQ ID NO: 7188 - protein, 311 aa, Streptococcus agalactiae
MSKILVFGHQNPDSDAIGSSVAFAYLAKEAWGLDTEAVALGTPNEETAYVLDYFGVQAPRVVESAKAEGVETVILTDHNEFQQSISDIKDVTVYGVVDHHRVANFETANPLYMRLEPVGSASSIVYRMFKENGVSVPKELAGLLLSGLISDTLLLKSPTTHASDIPVAKELAEIAGVNLEEYGLEMLKAGTNLSSKTAAELIDIDAKTFELNGEAVRVAQVNTVDINDILARQEEIEVAIQEAIVTEGYSDFVLMITDIVNSNSEILALGSNMAKVEAAFEFTLENNHAFLAGAVSRKKQVVPQLTESYNA

SEQ ID NO: 7189 - protein, 786 aa, Streptococcus agalactiae
ATGGCAGAAATAGACTATAAAAAAGTAACAGGAATGATCCATTCTACAGAAAGTTTCGGCTCTGTGGATGGGCCAGGTATTCGTTTTATCATTTTTATGCAAGGATGTAAAATGCGTTGTCAATACTGTCATAATCCTGATACTTGGGAAATGGAAACTAACAATTCAAAGGAACGTACCGTTGAGGATGTTCTAAAGGAAGCTCTCCGTTATAAACATTTTTGGGGAAAAGATGGAGGTATCACAGTTTCAGGTGGTGAAGCAATGCTGCAAATTGCCTTTATTACAGCCCTCTTTATTGAGGCTAAGAAACTAGGTATTCATACGACGCTAGATACTTGTGGTTTTGCTTATCGAGCAACACCAGAATACCATGCTATCCTTGAAAAATTGTTAGATGTTACTGATTTGGTACTCCTTGACTTAAAAGAAATTGATCCAGAACAACATAAAATTGTAACTCGTCAGTCTAACAAAAATATTTTACAGTTTGCTAGATATTTATCTGATAGAGGTACTCCGGTATGGATTCGTCATGTTTTAGTTCCTGGATTGACTGATATTGATGACCATTTAAAACGTTTGGGTGAATTTGTCCAAACACTTGATAATGTCGATAAATTTGAAGTATTGCCTTATCATACTATGGGAGAGTTCAAATGGCGTGAATTAGGAATTCCGTATCCATTAGCTGGTGTGAAACCACCAACTCCAGAACGTGTTAAAAACGCTAAAGATATCATGAAAACAGAATCCTATACAGAATATCTAAAAAGGATTCAAAAT

SEQ ID NO: 7190 - protein, 262 aa, Streptococcus agalactiae
MAEIDYKKVTGMIHSTESFGSVDGPGIRFIIFMQGCKMRCQYCHNPDTWEMETNNSKERTVEDVLKEALRYKHFWGKDGGITVSGGEAMLQIAFITALFIEAKKLGIHTTLDTCGFAYRATPEYHAILEKLLDVTDLVLLDLKEIDPEQHKIVTRQSNKNILQFARYLSDRGTPVWIRHVLVPGLTDIDDHLKRLGEFVQTLDNVDKFEVLPYHTMGEFKWRELGIPYPLAGVKPPTPERVKNAKDIMKTESYTEYLKRIQN

SEQ ID NO: 7191 - DNA, 1332 bp, Streptococcus agalactiae
atggaagaccctggcagtcagagtttgttactacaatttgttgttttattaatattaaccctatttaacgccttcttttcagcatctgaaatggctttagtatcgctaaaccgctctaaagtagaacagaaagctgaagaaggggacaaaaggtatcgacgtcttttggacgttcttgaaaatcccaataattttttatcaacaattcaagttggtattacttttattagccttttgcaaggggctagtttatccgcctcattaggacatgtgatttcagggtggctaggaaattcagcaacagcccgtacagcagggagtattattgcgctaatctttttaacatatgtctctattgttctaggagaattatatcctaagcgtattgctatgaatttgaaagatcgtctagcaattgtttcagctcccattattatctttctggggaaaatcgtaagcccctttgtatggttgctctcagcttcaactaacttattgagtagaatcactccgatgacttttgatgatgctgacgagaagatgacacgtgatgaaattgaatatatgttgacgaatagtgaagaaactttggatgctgaagaaattgagatgctgcaagggattttctcgctagatgaaatgatggcgcgtgaagttatggttccgcgcactgatgctttcatgattgacatcaacaatgatgcacaatcaaatattgaaggaattttatcacaaaacttttctcgtgtccctgtttatgatgacgataaagatagagttgttggtgttttacataccaagcgcttattggaagtgggctttaaaactggttttgatactatcgacttgcgaaaaatacttcaggaacctctttttgttccagaaacgatttttgtagatgaccttttaaaagcattacgcaacactcaaaatcaaatggccattttactagatgaatatggtggcgttgctggtttagtaactctagaggatttattggaagaaattgtcggcgaaattgatgatgaaacagatacagctgaacaatttgtcagggaaatcgatgagaatatctatattgttctaggaactatgacgcttaatgaatttaatgattattttgagacagagttagaaagtgatgatgttgatacaattgcgggttattatttaactggtgtgggtagtattccaaaccaagaggaaaaagtagcttacgaagtagactgcaaagataaacacatcactttgattaatgataaagttaaagatggtcgtataacaaaattgaaggtgctattgtctgatatagaacagaatattgaaaaagac

SEQ ID NO: 7192 - protein, 444 aa, Streptococcus agalactiae
MEDPGSQSLLLQFVVLLILTLFNAFFSASEMALVSLNRSKVEQKAEEGDKRYRRLLDVLENPNNFLSTIQVGITFISLLQGASLSASLGHVISGWLGNSATARTAGSIIALIFLTYVSIVLGELYPKRIAMNLKDRLAIVSAPIIIFLGKIVSPFVWLLSASTNLLSRITPMTFDDADEKMTRDEIEYMLTNSEETLDAEEIEMLQGIFSLDEMMAREVMVPRTDAFMIDINNDAQSNIEGILSQNFSRVPVYDDDKDRVVGVLHTKRLLEVGFKTGFDTIDLRKILQEPLFVPETIFVDDLLKALRNTQNQMAILLDEYGGVAGLVTLEDLLEEIVGEIDDETDTAEQFVREIDENIYIVLGTMTLNEFNDYFETELESDDVDTIAGYYLTGVGSIPNQEEKVAYEVDCKDKHITLINDKVKDGRITKLKVLLSDIEQNIEKD

SEQ ID NO: 7193 - DNA, 564 bp, Streptococcus agalactiae
atgattaaaagaccaattcatctttctcatgattttttagcagaagttattgataaagaagcaataacgcttgatgcaactatgggaaatgggaatgatactgtttttttagcgaaaagttctaaaaaagtttatgcatttgatattcaagaagaagcaatagcaaaaacgaaagcaaagctcacggggcaagggatctctaacgttgaacttatcttggatgggcatgaaaatttggaacagtatgttcatacacctttaagagcagctatatttaatctgggatacttaccctcagcggataaaacagttattacaaaacctcacacaactatcaaggcaatcaaaaacgttttagatattttagaagtaggtggacgtctatcgcttatggtttattatggtcatgatggtggaaaaagtgagaaagatgcggtgatagcattcgtggaacaattaccacagaataatttcgctacaatgctttatcaaccactcaatcaagttaatacgcccccctttttaattatggtagaaaagttacaatcatatgaaaatgaggtg

SEQ ID NO: 7194 - protein, 188 aa, Streptococcus agalactiae
MIKRPIHLSHDFLAEVIDKEAITLDATMGNGNDTVFLAKSSKKVYAFDIQEEAIAKTKAKLTGQGISNVELILDGHENLEQYVHTPLRAAIFNLGYLPSADKTVITKPHTTIKAIKNVLDILEVGGRLSLMVYYGHDGGKSEKDAVIAFVEQLPQNNFATMLYQPLNQVNTPPFLIMVEKLQSYENEV

SEQ ID NO: 7195 - DNA, 933 bp, Streptococcus agalactiae
atgaaaaaacgttatcgtgcgattaatgattattatcgagaactctttggagaaaaaatatttaaattacctatagatgctggttttgactgtcctaacagagacggaacagttgctagaggagggtgcactttttgcacagtttctggttcaggggatgctatagttgctccagaagctcctattcgtgaacaattctataaagaaattgatttcatgcatagaaagtggcctgaagttaataaatacttagtctattttcaaaattttaccaatacccatgctaagttagagataattaaagagcgttacgaacaggctattaatgagccaggagttatcgggatcaacatcggaacaaggccggattgcttacctgatgaaactatatactatctcgctgaactttctgaaagaatgcatgtgactttagaattaggccttcagacaacttatgaagcaacttctgcattaataaatagagcacattcatatgacctttacaaaaaaactgttaagagagtacgagaattagctcctaaagtagaaatcgtttctcacctaataaatggtctcccaggggagacacatgatatgatggtggaaaatgttcgtcgatgtgttatggataatgatattcagggtataaaattacaccttctgcatcttatgactaatacaagaatgcagagagattaccatgaaggtcgtttacgtttgttaagtcaagaagactatatttcgattatttgtgaccaactggagattattccaaaacatattgttattcaccgaattactggtgatgcgccacgtcatatgttaattggaccgatgtggagccttaataaatgggaagtgcttaatgccattgacaaagaaatggagaaaagacagtcatatcaaggatgtaaagttgaggtaaaacatgat

SEQ ID NO: 7196 - protein, 311 aa, Streptococcus agalactiae
MKKRYRAINDYYRELFGEKIFKLPIDAGFDCPNRDGTVARGGCTFCTVSGSGDAIVAPEAPIREQFYKEIDFMHRKWPEVNKYLVYFQNFTNTHAKLEIIKERYEQAINEPGVIGINIGTRPDCLPDETIYYLAELSERMHVTLELGLQTTYEATSALINRAHSYDLYKKTVKRVRELAPKVEIVSHLINGLPGETHDMMVENVRRCVMDNDIQGIKLHLLHLMTNTRMQRDYHEGRLRLLSQEDYISIICDQLEIIPKHIVIHRITGDAPRHMLIGPMWSLNKWEVLNAIDKEMEKRQSYQGCKVEVKHD

SEQ ID NO: 7197 - DNA, 639 bp, Streptococcus agalactiae
atgttatctcgtcaaaatagtaaacttattcaagcatttattgctattatcttatttttcagtttaggattggtcatcaaatattggcccgacactgtaattgcatttgaccaaactattcaagaaagtgttagaggacagttgccaaatctttctacaagatttttcaagttaatcactgtgattggtaatactgtaagccagatagctattgcgattatgagcgtcactttctgttaccttaagaagtggtatcctcaagctagatttatcgcagtaaatgctattatctctggtatatgtatactttctttaaaacttatttttcaaagagtaagaccaactttaccccatttagtatttgcaggtggctattcgtttcccagtgggcactcgatgggaacatttatgatatttgggagtattattattttattgcagtactatatgcctaatagtatatggaaactgttgtgccaaggtattttgggtttgctcatttttttaattgggttatctcgtatttacctaggggttcattttccgacagatgttttagctggttttatacttgcttatggtattttgaatctaactgcgtatatctttttagccaaggattggttaaagaaagtgaag

SEQ ID NO: 7198 - protein, 213 aa, Streptococcus agalactiae
MLSRQNSKLIQAFIAIILFFSLGLVIKYWPDTVIAFDQTIQESVRGQLPNLSTRFFKLITVIGNTVSQIAIAIMSVTFCYLKKWYPQARFIAVNAIISGICILSLKLIFQRVRPTLPHLVFAGGYSFPSGHSMGTFMIFGSIIILLQYYMPNSIWKLLCQGILGLLIFLIGLSRIYLGVHFPTDVLAGFILAYGILNLTAYIFLAKDWLKKVK

SEQ ID NO: 7199 - DNA, 582 bp, Streptococcus agalactiae
atgacaaatacacgtaaaatggtgacaatcgccattctttctgccttatcttttgtattgatgatggtttcatttccattaataccaggagcagaatttttaaaggttgatttttcaatccttccgatgttagttacttttattttatttgatttgaaatcaagttatggtgtactcttattaagatcacttttaaaagttatacttgctaatcgtggtccagaaacctttatcggtttaccgatgaatatggttgctctagctttatttttagcaagtttcgctattttctggaaaaatagagagagtgcaaaagattttattaaagctagtctatttggtacagttagcttgactgtatctatggtagctctcaactatgtctttgcgattcctttgtatgctatatttgctaactttgatatcagaacatttattggtgtaggcaattaccttttaacaatggttattccatttaatatcgttgagggaattttaatttcgattgttttctatctaacttacgtggcttgtttgccaatattagaaagatataaaaagactaatgttatctcgtcaaaa

SEQ ID NO: 7200 - protein, 194 aa, Streptococcus agalactiae
MTNTRKMVTIAILSALSFVLMMVSFPLIPGAEFLKVDFSILPMLVTFILFDLKSSYGVLLLRSLLKVILANRGPETFIGLPMNMVALALFLASFAIFWKNRESAKDFIKASLFGTVSLTVSMVALNYVFAIPLYAIFANFDIRTFIGVGNYLLTMVIPFNIVEGILISIVFYLTYVACLPILERYKKTNVISSK

SEQ ID NO: 7201 - protein, 924 aa, Streptococcus agalactiae
ATGAAAAAGATTAGAAAAAGTTTAGGACTTCTACTATGTTGCTTTTTAGGATTGGTACAATTAGCGTTTTTTTCGGTAGCCAGTGTAAATGCTGATACCCCTAATCAACTAACAATCACACAGATAGGACTTCAGCCAAATACTACAGAGGAGGGGATTTCTTATCGTTTATGGACTGTGACTGACAACTTAAAAGTTGATTTATTGAGCCAAATGACAGATAGCGAATTGAACCAGAAGTATAAGAGTATCTTGACTTCTCCTACTGATACTAATGGTCAGACAAAGATAGCACTCCCAAATGGTTCGTACTTTGGTCGTGCTTATAAAGCTGATCAAAGCGTTTCAACAATAGTACCTTTTTATATTGAATTACCAGATGATAAGTTATCAAATCAATTACAGATAAATCCTAAGCGAAAAGTTGAAACAGGCCGATTAAAACTTATTAAATATACAAAAGAAGGAAAGATAAAGAAAAGGCTATCAGGAGTAATATTTGTATTATACGATAACCAGAATCAGCCAGTTCGCTTTAAAAATGGACGATTTACGACCGATCAAGATGGGATTACTTCATTAGTAACTGATGATAAGGGAGAAATTGAGGTTGAAGGTTTATTACCTGGTAAGTATATTTTTCGAGAAGTAAAAGCACTAACTGGTTACCGTATATCTATGAAGGATGCTGTAGTTGCTGTAGTTGCTAATAAAACACAGGAAGTAGAGGTAGAAAACGAAAAAGAAACTCCTCCACCAACAAATCCTAAACCATCACAACCGCTTTTTCCACAATCATTTCTTCCTAAAACAGGAATGATTATTGGTGGAGGACTGACAATTCTTGGTTGTATTATTTTGGGAATTTTGTTTATCTTTTTAAGAAAAACTAAAAATAGCAAATCTGAAAGAAACGATACAGTA

SEQ ID NO: 7202 - protein, 308 aa, Streptococcus agalactiae
MKKIRKSLGLLLCCFLGLVQLAFFSVASVNADTPNQLTITQIGLQPNTTEEGISYRLWTVTDNLKVDLLSQMTDSELNQKYKSILTSPTDTNGQTKIALPNGSYFGRAYKADQSVSTIVPFYIELPDDKLSNQLQINPKRKVETGRLKLIKYTKEGKIKKRLSGVIFVLYDNQNQPVRFKNGRFTTDQDGITSLVTDDKGEIEVEGLLPGKYIFREVKALTGYRISMKDAVVAVVANKTQEVEVENEKETPPPTNPKPSQPLFPQSFLPKTGMIIGGGLTILGCIILGILFIFLRKTKNSKSERNDTV

SEQ ID NO: 7203 - protein, 882 aa, Streptococcus agalactiae
ATGCGAGGAAAATTTCAGAAAAACCTTAAGAAATCGGTCGTTTTAAATCGATGGATGAATATAGGTTTGATATTATTATTCTTAGTAGGTCTTTTGATAACCTCATATCCTTTTATTTCAAATTGGTACTATAATATTAAAGCTAATAATCAAGTAACTAACTTTGATAATCAAACCCAAAAATTAAATGCTAAAGAGATTAATAGACGATTTGAGTTAGCAAAAGCTTATAATAGAACACTGGACCCAAGCCGCCTATCAGATCCCTATACTGAAAAAGAAAAAAAAGGTATTGCTGAATACGCCCATATGCTTGAGATTACTGAAATGATTGGATATATTGATATACCGTCTATCAAGCAAAAATTACCTATCTATGCGGGGACTACCAGTAGTGTTCTTGAAAAAGGATCAGGACACCTTGAAGGAACTTCTTTGCCAATTGGTGGAAAAAGTTCACATACTGTTATCACAGCTCATCGCGGCTTACCTAAAGCTAAGTTATTTACAGATTTAGATAAACTTAAAAAAGGAAAAATTTTTTATATTCATAATATCAAAGAAGTTTTAGCCTATAAGGTTGATCAAATAAGTGTTGTAAAGCCAGATAATTTTTCTAAATTATTGGTTGTTAAAGGTAAGGATTATGCGACTTTGCTAACATGTACACCTTATTCGATTAATTCACATCGTTTACTAGTTAGAGGGCATCGAATCAAGTATGTACCTCCTGTTAAAGAAAAGAACTATTTAATGAAAGAATTGCAAACACACTATAAACTTTATTTCCTCTTATCAATCCTAGTTATTCTTATATTAGTCGCTTTACTATTATATTTAAAACGAAAATTTAAAGAGAGAAAGAGAAAGGGAAATCAAAAA

SEQ ID NO: 7204 - protein, 294 aa, Streptococcus agalactiae
MRGKFQKNLKKSVVLNRWMNIGLILLFLVGLLITSYPFISNWYYNIKANNQVTNFDNQTQKLNAKEINRRFELAKAYNRTLDPSRLSDPYTEKEKKGIAEYAHMLEITEMIGYIDIPSIKQKLPIYAGTTSSVLEKGSGHLEGTSLPIGGKSSHTVITAHRGLPKAKLFTDLDKLKKGKIFYIHNIKEVLAYKVDQISVVKPDNFSKLLVVKGKDYATLLTCTPYSINSHRLLVRGHRIKYVPPVKEKNYLMKELQTHYKLYFLLSILVILILVALLLYLKRKFKERKRKGNQK

SEQ ID NO: 7205 - protein, 876 aa, Streptococcus agalactiae
GTGAAGACTAAAAAAATTATCAAAAAAACAAAAAAAAAGAAATCAAATCTGCCTTTTATCATTCTTTTTCTAATAGGTCTATCTATCTTATTGTATCCAGTGGTATCACGATTTTACTATACGATAGAATCTAATAACCAAACACAAGATTTTGAGAGAGCTGCTAAAAAACTTAGTCAGAAAGAAATCAATCGGCGTATGGCTCTAGCACAAGCATATAATGATTCTTTAAATAATGTCCATCTTGAAGATCCTTATGAGAAAAAACGAATTCAAAAGGGGATAGCAGAGTACGCCCGTATGTTAGAGGTAAGTGAAAAAATCGGCATAATTTCAGTTCCTAAGATAGGTCAAAAACTCCCTATATTTGCAGGTTCAAGTCAAGAAGTTCTATCTAAAGGAGCAGGTCATTTAGAAGGTACCTCTCTTCCAATTGGAGGCAATAGCACCCATACCGTTATAACAGCGCACTCAGGAATTCCAGATAAAGAGCTCTTTTCTAACCTTAAAAAGTTAAAAAAAGGAGATAAGTTTTATATTCAAAACATAAAAGAAACGATAGCATATCAAGTAGATCAGATAAAAGTCGTTACACCCGATAACTTTTCAGATTTGTTGGTTGTTCCTGGACATGATTATGCAACCTTATTGACTTGCACCCCGATTATGGTCAATACACACAGACTTTTAGTAAGGGGTCATCGTATCCCTTATAAAGGTCCTATTGATGAAAAATTAATAAAAGACGGTCATTTAAACACGATTTATAGATATCTTTTCTATATATCTTTAGTTATTATTGCTTGGTTACTTTGGTTAATAAAACGTCAACGTCAAAAAAATCGTTTATCAAGTGTTAGAAAAGGAATTGAATCA

SEQ ID NO: 7206 - protein, 292 aa, Streptococcus agalactiae
MKTKKIIKKTKKKKSNLPFIILFLIGLSILLYPVVSRFYYTIESNNQTQDFERAAKKLSQKEINRRMALAQAYNDSLNNVHLEDPYEKKRIQKGIAEYARMLEVSEKIGIISVPKIGQKLPIFAGSSQEVLSKGAGHLEGTSLPIGGNSTHTVITAHSGIPDKELFSNLKKLKKGDKFYIQNIKETIAYQVDQIKVVTPDNFSDLLVVPGHDYATLLTCTPIMVNTHRLLVRGHRIPYKGPIDEKLIKDGHLNTIYRYLFYISLVIIAWLLWLIKRQRQKNRLSSVRKGIES

SEQ ID NO: 7207 - protein, 2025 aa, Streptococcus agalactiae
ATGAAAAAAATCAACAAATATTTTGCAGTCTTCTCGGCATTGCTACTGACCGTAACATCATTGTTCTCAGTTGCACCAGTGTTTGCGGAAGAAGCAAAAACTACTGACACAGTGACCTTGCACAAGATTGTCATGCCTCGAACTGCATTTGACGGTTTTACTGCTGGTACAAAGGGTAAGGATAATACTGACTACGTTGGTAAACAAATCGAAGACCTTAAAACTTACTTTGGCTCAGGCGAAGCGAAAGAAATCGCAGGTGCTTACTTTGCTTTCAAAAATGAAGCTGGTACTAAATACATCACTGAAAATGGTGAAGAAGTTGATACTTTGGATACAACAGATGCCAAAGGTTGTGCTGTTCTTAAAGGTTTAACAACAGACAATGGTTTCAAATTTAACACTTCTAAATTAACAGGAACTTACCAAATCGTTGAATTGAAAGAAAAATCTACATACAACAACGATGGTTCTATCTTGGCTGATTCAAAAGCAGTTCCAGTTAAAATCACTCTTCCATTGGTAAACGACAATGGTGTTGTTAAAGACGCTCACGTTTATCCAAAGAACACTGAAACAAAACCACAAGTAGATAAGAACTTCGCAGATAAAGAACTTGATTATGCGAACAACAAAAAAGACAAAGGGACTGTCTCAGCATCTGTTGGTGATGTTAAAAAATACCATGTTGGAACAAAAATCCTTAAAGGTTCAGACTATAAGAAATTAATCTGGACCGATAGCATGACCAAAGGTTTGACTTTCAACAACGATATTGCTGTAACATTGGATGGTGCAACTCTTGATGCTACAAATTACAAACTTGTAGCAGATGACCAAGGTTTCCGCCTTGTCTTGACTGACAAAGGTCTTGAAGCAGTGGCAAAAGCCGCAAAAACAAAAGATGTTGAAATCAAGATCACTTACTCAGCTACTTTGAACGGTTCTGCTGTCGTTGAAGTTCTAGAAACCAATGATGTTAAATTGGACTACGGCAACAACCCAACAATTGAAAATGAACCAAAAGAAGGTATTCCAGTTGATAAGAAAATCACTGTTAACAAAACATGGGCAGTAGATGGCAATGAAGTGAATAAAGCAGATGAAACAGTTGATGCTGTCTTCACCTTGCAAGTTAAAGATGGTGACAAATGGGTGAATGTTGATTCAGCTAAAGCAACAGCTGCAACTAGCTTCAAACACACTTTTGAAAACTTGGATAATGCTAAAACTTACCGCGTTATCGAACGTGTTAGCGGCTACGCTCCAGAATACGTCTCATTTGTAAATGGCGTTGTAACCATCAAGAACAACAAAGACTCAAATGAGCCAACTCCAATCAACCCATCAGAACCAAAAGTGGTGACTTATGGACGTAAATTTGTGAAAACAAATAAAGATGGAAAAGAACGCTTGGCAGGAGCTACCTTCCTTGTTAAGAAAGATGGCAAGTACTTGGCACGTAAATCAGGTGTTGCAACAGATGCAGAAAAAGCTGCTGTAGATTCAACTAAATCAGCATTGGATGCTGCTGTTAAAGCTTACAATGATTTGACTAAAGAAAAACAAGAAGGTCAAGATGGTAAATCAGCATTGGCTACCGTTAGTGAAAAACAAAAAGCTTACAATGATGCCTTTGTTAAAGCTAACTACTCATACGAATGGGTTGAAGATAAAAATGCTAAGAATGTTGTTAAATTGATTTCTAACGATAAAGGTCAATTTGAAATTACTGGCTTGACTGAAGGTCAATACTCATTGGAAGAAACACAAGCACCAACTGGTTATGCTAAATTATCAGGTGATGTTTCGTTTAATGTTAATGCTACTTCATACAGTAAAGGTTCTGCTCAAGATATTGAGTATACCCAAGGTTCTAAAACTAAAGATGCACAACAAGTTATCAATAAGAAGGTTACTATTCCACAAACAGGTGGTATTGGTACAATTTTTTTCACAATTATTGGATTAAGTATTATGCTTGGAGCGGTAGTTATCATGAAAAGACGTCAATCAGAGGAAGTT

SEQ ID NO: 7208 - protein, 675 aa, Streptococcus agalactiae
MKKINKYFAVFSALLLTVTSLFSVAPVFAEEAKTTDTVTLHKIVMPRTAFDGFTAGTKGKDNTDYVGKQIEDLKTYFGSGEAKEIAGAYFAFKNEAGTKYITENGEEVDTLDTTDAKGCAVLKGLTTDNGFKFNTSKLTGTYQIVELKEKSTYNNDGSILADSKAVPVKITLPLVNDNGVVKDAHVYPKNTETKPQVDKNFADKELDYANNKKDKGTVSASVGDVKKYHVGTKILKGSDYKKLIWTDSMTKGLTFNNDIAVTLDGATLDATNYKLVADDQGFRLVLTDKGLEAVAKAAKTKDVEIKITYSATLNGSAVVEVLETNDVKLDYGNNPTIENEPKEGIPVDKKITVNKTWAVDGNEVNKADETVDAVFTLQVKDGDKWVNVDSAKATAATSFKHTFENLDNAKTYRVIERVSGYAPEYVSFVNGVVTIKNNKDSNEPTPINPSEPKVVTYGRKFVKTNKDGKERLAGATFLVKKDGKYLARKSGVATDAEKAAVDSTKSALDAAVKAYNDLTKEKQEGQDGKSALATVSEKQKAYNDAFVKANYSYEWVEDKNAKNVVKLISNDKGQFEITGLTEGQYSLEETQAPTGYAKLSGDVSFNVNATSYSKGSAQDIEYTQGSKTKDAQQVINKKVTIPQTGGIGTIFFTIIGLSIMLGAVVIMKRRQSEEV

SEQ ID NO: 7209 - protein, 2703 aa, Streptococcus agalactiae
ATGAGAAAATACCAAAAATTTTCTAAAATATTGACGTTAAGTCTTTTTTGTTTGTCGCAAATACCGCTTAATACCAATGTTTTAGGGGAAAGTACCGTACCGGAAAATGGTGCTAAAGGAAAGTTAGTTGTTAAAAAGACAGATGACCAGAACAAACCACTTTCAAAAGCTACCTTTGTTTTAAAAACTACTGCTCATCCAGAAAGTAAAATAGAAAAAGTAACTGCTGAGCTAACAGGTGAAGCTACTTTTGATAATCTCATACCTGGAGATTATACTTTATCAGAAGAAACAGCGCCCGAAGGTTATAAAAAGACTAACCAGACTTGGCAAGTTAAGGTTGAGAGTAATGGAAAAACTACGATACAAAATAGTGGTGATAAAAATTCCACAATTGGACAAAATCAGGAAGAACTAGATAAGCAGTATCCCCCCACAGGAATTTATGAAGATACAAAGGAATCTTATAAACTTGAGCATGTTAAAGGTTCAGTTCCAAATGGAAAGTCAGAGGCAAAAGCAGTTAACCCATATTCAAGTGAAGGTGAGCATATAAGAGAAATTCCAGAGGGAACATTATCTAAACGTATTTCAGAAGTAGGTGATTTAGCTCATAATAAATATAAAATTGAGTTAACTGTCAGTGGAAAAACCATAGTAAAACCAGTGGACAAACAAAAGCCGTTAGATGTTGTCTTCGTACTCGATAATTCTAACTCAATGAATAACGATGGCCCAAATTTTCAAAGGCATAATAAAGCCAAGAAAGCTGCCGAAGCTCTTGGGACCGCAGTAAAAGATATTTTAGGAGCAAACAGTGATAATAGGGTTGCATTAGTTACCTATGGTTCAGATATTTTTGATGGTAGGAGTGTAGATGTCGTAAAAGGATTTAAAGAAGATGATAAATATTATGGCCTTCAAACTAAGTTCACAATTCAGACAGAGAATTATAGTCATAAACAATTAACAAATAATGCTGAAGAGATTATAAAAAGGATTCCGACAGAAGCTCCTAAAGCTAAGTGGGGATCTACTACCAATGGATTAACTCCAGAGCAACAAAAGGAGTACTATCTTAGTAAAGTAGGAGAAACATTTACTATGAAAGCCTTCATGGAGGCAGATGATATTTTGAGTCAAGTAAATCGAAATAGTCAAAAAATTATTGTTCATGTAACTGATGGTGTTCCTACGAGATCATATGCTATTAATAATTTTAAACTGGGTGCATCATATGAAAGCCAATTTGAACAAATGAAAAAAAATGGATATCTAAATAAAAGTAATTTTCTACTTACTGATAAGCCCGATGATATAAAAGGAAATGGGGAGAGTTACTTTTTATTTCCCTTAGATAGTTATCAAACACAGATAATCTCTGGAAACTTACAAAAACTTCATTATTTAGATTTAAATCTTAATTACCCTAAAGGTACAATTTATCGAAATGGACCAGTGAAAGAACATGGAACACCAACCAAACTTTATATAAATAGTTTAAAACAGAAAAATTATGACATTTTTAATTTTGGTATCGATATATCTGGTTTTAGACAAGTTTATAATGAGGAGTATAAGAAAAATCAAGATGGTACTTTTCAAAAATTGAAAGAGGAAGCTTTTAAACTTTCAGATGGAGAAATCACAGAACTAATGAGGTCGTTCTCTTCCAAACCTGAGTACTACACCCCTATCGTAACTTCAGCCGATACATCTAACAATGAAATTTTATCTAAAATTCAGCAACAATTTGAAACGATTTTAACAAAAGAAAACTCAATTGTTAATGGAACTATCGAAGATCCTATGGGTGATAAAATCAATTTACAGCTTGGTAATGGACAAATATTACAGCCAAGTGATTATACTTTACAGGGAAATGATGGAAGTGTAATGAAGGATGGTATTGCAACTGGTGGGCCTAATAATGATGGTGGAATACTTAAGGGGGTTAAATTAGAATACATCGGAAATAAACTCTATGTTAGAGGTTTGAATTTAGGAGAAGGTCAAAAAGTAACACTCACATATGATGTGAAACTAGATGACAGTTTTATAAGTAACAAATTCTATGACACTAATGGTAGAACAACATTGAATCCTAAGTCAGAGGATCCTAATACACTTAGAGATTTTCCAATCCCTAAAATTCGTGATGTGAGAGAATATCCTACAATAACGATTAAAAACGAGAAGAAGTTAGGTGAAATTGAATTTATAAAAGTTGATAAAGATAATAATAAGTTGCTCCTCAAAGGAGCTACGTTTGAACTTCAAGAATTTAATGAAGATTATAAACTTTATTTACCAATAAAAAATAATAATTCAAAAGTAGTGACGGGAGAAAACGGCAAAATTTCTTACAAAGATTTGAAAGATGGCAAATATCAGTTAATAGAAGCAGTTTCGCCGGAGGATTATCAAAAAATTACTAATAAACCAATTTTAACTTTTGAAGTGGTTAAAGGATCGATAAAAAATATAATAGCTGTTAATAAACAGATTTCTGAATATCATGAGGAAGGTGACAAGCATTTAATTACCAACACGCATATTCCACCAAAAGGAATTATTCCTAAGACAGGTGGGAAAGGAATTCTATCTTTCATTTTAATAGGTGGAGCTATGATGTCTATTGCAGGTGGAATTTATATTTGGAAAAGGTATAAGAAATCTAGTGATATGTCCATCAAAAAAGAT

SEQ ID NO: 7210 - protein, 901 aa, Streptococcus agalactiae
MRKYQKFSKILTLSLFCLSQIPLNTNVLGESTVPENGAKGKLVVKKTDDQNKPLSKATFVLKTTAHPESKIEKVTAELTGEATFDNLIPGDYTLSEETAPEGYKKTNQTWQVKVESNGKTTIQNSGDKNSTIGQNQEELDKQYPPTGIYEDTKESYKLEHVKGSVPNGKSEAKAVNPYSSEGEHIREIPEGTLSKRISEVGDLAHNKYKIELTVSGKTIVKPVDKQKPLDVVFVLDNSNSMNNDGPNFQRHNKAKKAAEALGTAVKDILGANSDNRVALVTYGSDIFDGRSVDVVKGFKEDDKYYGLQTKFTIQTENYSHKQLTNNAEEIIKRIPTEAPKAKWGSTTNGLTPEQQKEYYLSKVGETFTMKAFMEADDILSQVNRNSQKIIVHVTDGVPTRSYAINNFKLGASYESQFEQMKKNGYLNKSNFLLTDKPDDIKGNGESYFLFPLDSYQTQIISGNLQKLHYLDLNLNYPKGTIYRNGPVKEHGTPTKLYINSLKQKNYDIFNFGIDISGFRQVYNEEYKKNQDGTFQKLKEEAFKLSDGEITELMRSFSSKPEYYTPIVTSADTSNNEILSKIQQQFETILTKENSIVNGTIEDPMGDKINLQLGNGQILQPSDYTLQGNDGSVMKDGIATGGPNNDGGILKGVKLEYIGNKLYVRGLNLGEGQKVTLTYDVKLDDSFISNKFYDTNGRTTLNPKSEDPNTLRDFPIPKIRDVREYPTITIKNEKKLGEIEFIKVDKDNNKLLLKGATFELQEFNEDYKLYLPIKNNNSKVVTGENGKISYKDLKDGKYQLIEAVSPEDYQKITNKPILTFEVVKGSIKNIIAVNKQISEYHEEGDKHLITNTHIPPKGIIPKTGGKGILSFILIGGAMMSIAGGIYIWKRYKKSSDMSIKKD

SEQ ID NO: 7211 - protein, 588 aa, Streptococcus agalactiae
TTGGTAAAAGTTGCTATCATTTTTTCCCGAACATTTATTTTAGGATTAAATCAATTAATCCCTGAAACAATTTCATTTCCTTCATGGAACTATCATAGACATGATAAATTAACTACTATTCTCCGACCGATAATTACAAATTGGTTAAGTGAAATTGGAGAATACACGTTTAAGGAACAACATTTTCTTCTCCTTTGTGCTCACCTAGAAAGAATTATCAAAAATCATATTCCTCCGATACAAATAGCCGTACTAACTACAGACTTTATTAATAACAAAATTTTAACAGAATGTTTATCACAGAGGTTTTCTTCTAAACAGATTCATTTCCACCCTTACTATTTATTAACTGATGATCTTTCCAATATTACTAATCTTAATCCAGATATTATTATTACCAACCCAAAGCTTTCTTCCTTTATAAAACATGAGATTTCTTCAGAGAGTTTAATTACATATATTGATTTGATTCATACTCCAGACCAGATCAATCAAATCCAAGAAATTATTTCATCAATACAAGAAGAAAAATATTGTAAACTTTTTGCAAAGAACAATGAAATAACTACCCGTAGCTCCTATAACTCT

SEQ ID NO: 7212 - protein, 196 aa, Streptococcus agalactiae
MVKVAIIFSRTFILGLNQLIPETISFPSWNYHRHDKLTTILRPIITNWLSEIGEYTFKEQHFLLLCAHLERIIKNHIPPIQIAVLTTDFINNKILTECLSQRFSSKQIHFHPYYLLTDDLSNITNLNPDIIITNPKLSSFIKHEISSESLITYIDLIHTPDQINQIQEIISSIQEEKYCKLFAKNNEITTRSSYNS

SEQ ID NO: 7213 - protein, 1137 aa, Streptococcus agalactiae
ATGGAAAATAAGGTAAAAACAGTTGCTGTTTTCTCAGGATATTATCTACCCTTCCTCGGAGGTATTGAACGTTATACAGATAAAATGACAGCAGATTTGGTTAAGCGTGGCTACCGTGTTGTTATTGTAACAACTAATCATGGTGATTTACCGATTATAGATGAAGACAAGGGTAGAAAAATTTACCGTTTACCGACCAAAAATATTGTCAAGCAGCGCTATCCTATTATTAACAAAAATCGAGAATACAACACGCTGATGAAATATGTTTCAGATGAAAATATTGATTTTGTGATTTGTAATACACGTTTTCAGTTAACAACGTTAGAAGGGCTATCTTTTGCAAAGAAGCACCATTTACCTAGTATTGTTTTAGACCATGGGTCAAGTCATTTTTCTGTCAATAATCGTTTTTTAGATTTCTTTGGAGCTATCTATGAACATCTTCTCACAGCGCGTGTTAAGCATTATCGTCCAGATTTTTATGCGGTATCCAAGAGAAGCGTTGAATGGTTAAAACATTTTAATATAGAAGCTAAAGGAGTTATTTATAATTCGGTATCTGAAAGTCTAGGCTCTGATTTTGCTGACACGGCTTACCTTGAAAAATCTGCTGATGATATTTTCATCACTTATGCTGGTAGAATTATTAAAGAAAAAGGCATTGAATTGCTCTTAGAAGCATTTTTGATGTCACAGTACTCTGAAAATGTTTATTTACAGATTGCAGGAGACGGACCTGAATTAGCACATTTGAAAGAGAAATATCAGTCCAAACAGATTAACTTTTTGGGGAAATTAAACTTTGAACAGACTATGTCTTTAATGGCACAGACTGATATCTTTGTTTACCCATCAATGTATCCAGAGGGATTACCAACCTCTATTTTAGAAGCTGGTCTACTTTCAAGTGCTATTATTGCAACAGATCGCGGTGGAACAGTTGAAGTTATCGATAGCCCTGAGTTAGGAATCATCATGGAAGAAAATACTCAGTCACTCCATGAATCTCTTGATTTATTAGTAAAAGATAAGGCATTAAGAGAGAAACTACAACAGAATATTGCTAAAAGAATTAAAGAACATTTCACCTGGGAAAAAACAGTTGAAAAGTTGGATTATATTATTCAAAAAAAT

SEQ ID NO: 7214 - protein, 379 aa, Streptococcus agalactiae
MENKVKTVAVFSGYYLPFLGGIERYTDKMTADLVKRGYRVVIVTTNHGDLPIIDEDKGRKIYRLPTKNIVKQRYPIINKNREYNTLMKYVSDENIDFVICNTRFQLTTLEGLSFAKKHHLPSIVLDHGSSHFSVNNRFLDFFGAIYEHLLTARVKHYRPDFYAVSKRSVEWLKHFNIEAKGVIYNSVSESLGSDFADTAYLEKSADDIFITYAGRIIKEKGIELLLEAFLMSQYSENVYLQIAGDGPELAHLKEKYQSKQINFLGKLNFEQTMSLMAQTDIFVYPSMYPEGLPTSILEAGLLSSAIIATDRGGTVEVIDSPELGIIMEENTQSLHESLDLLVKDKALREKLQQNIAKRIKEHFTWEKTVEKLDYIIQKN

SEQ ID NO: 7215 - protein, 846 aa, Streptococcus agalactiae
ATGAAATATTTAGCGGGTATTGTCACCTTTAACCCCAATATTGAACGCTTAGATCAGAACATTCGAGCAATTTATCCTCAAGTAAGCCACATCTATATCGTAGATAATGGCTCGAAAAATAAGGAAGAAATTTCTCAATTAGTAGCCGATTATAATGAAGAGGGGCACCTAACTGTTGATTATTTAACAGAAAATAAAGGGATTGCATATGCTTTGAACTGTATCGGTCAATTTGCAGTAGCACAAGAATTTGATTGGTTCTTGACTTTAGATCAAGATTCGGTTGTCCTAGGTGATTTGATAGATAATTATGAAAATTACCTTCATTTACCTAAGGTCGGTATGTTATCTTGTTTGTATCAAGATATGAACCGTGAAAATTTAGTGATGCAAGAATTTGACTATAAAGAAATTGAAGAGTGTATTACTTCGGCTGCTTTAATGAAAACGAGCGTTTTCGAAGAAACATCTGGCTTTGCAGAAGAGATGTTTATTGATTTTGTTGACTCTGAAATGAATTATCGTCTGTCAGAGATGGGATATAAGACTTATCAGGTTAATTTTATTGGTCTGTTACACGAAATTGGACACTCTTCACGAGTTAAAAAATTTGGCCATGTTTTTCATGTATTGAATCATTCACCATTTCGAAAATATTACATGATACGCAATGCGATCTATATTATAAAAAAATATGGTAAGAAGAAGCGATACAAATATTTAGTATTTATGCGAAATGAATTTGTTCGAGTGTTGGTAGCAGAAGAGCAAAAGAGCAAAAAAATAGTTGCTATGATTAAAGGCTTAAAAGATGGCTTATTGATGAAAGTGGATAAATATGGAAAA

SEQ ID NO: 7216 - protein, 282 aa, Streptococcus agalactiae; identical to SEQ ID NO: 2636

SEQ ID NO: 7217 - protein, 1422 aa, Streptococcus agalactiae
ATGAAACTTTTGAAAAATATGTTTTATAATACCTCATACCAGTTATTGACTTTGTTGTTACCTTTAGTAACAGTTCCTTATGTTTCCCGTGTACTATCTCCTCAAGGCATCGGTATTAATGCCTATACGAGCTCCATTGTCATGTACTTTACTTTATTTGGTGCTTTAGGGATATCTTTGTACGGTAATCGTGAGATAGCTTTTGTGCAGTCAAATAAGTATAAGAGAAGTAAGATATTTTGGGAATTAGTTGTATTAAAACTTGCCTCTGTATCTATAGCAACGTTATTATTCTTTGGATTTGTCTTACTTACAAACGAATGGCAATTATTCTATTTAATTCAAGGTATTAATTTATTAGCGACTGCAACTGATATTTCGTGGTATTTTATTGGAGTTGAAGACTTTAAGATAATTGTCATTCGTAATACCATTGTTAAGCTTATTACAGTTGTTTTGACCTTCTTAGTTGTGAAGACGCCAGATGACCTAGCACTTTATATGTTTTTAATTGCATTTGCATCATTACTCGGAAATTTAACAGTCTGGCATCATTTAAAGCATGAAATCATCAAGATACCATTTAGTAGATTAGATATCTTAATACATCTAAGACCAACTTTAATGTTATTTTTACCCCAAATCACCATGCAGATTTATCTCTCTCTTAACAAGAGTATGCTGGGAGCAATGGATAGTGTGGTCAGTGCTGGATATTTTGATCAATCTGATAAAATTATTCGTATTTTATTTACCATTGTTTCAGCAATCGGAGGAGTTTTCTTACCAAGGCTCTCCAGTCTATTTTCTTCAGGAAAAGAAAAGCAAGCTAAGGCTTTACTTTTGAAACTTGTTGATTTAAGCAATGCTATCTCAATGTTAATGATTGCGGGAGTGGTAGGAGTTTCGTCGACATTTGCTGTCTTCTTTTTTGGGAAAGGGTATGAAGCTGTCGGTCCGCTAATGGCTGTTGAGTCTTTGATGATCATTTGCATTTCTTATGGTAACGCTTTAGGGACACAGTATCTACTGGCTTCAAGACGTACAAAAGCTTACACAATGTCTGCAGTTATTGGACTTGTGGCAAATGTTGTGCTTAATATACTTTTAATACCAATTTTAGGTGCTATGGGAGCTATTATCTCTACAGTTATTACTGAATTTATTGTCTCCCTATATCAAGCTATCTCTTTAAGAGATGTATTTACTTTTAAAGAATTAACAAGAGGAATGCTGCGCTATTTAATTGCTGCTACTCTTAGTGGAGCTGTACTCTATTATATCAATACTCAAATGTCAGTATCATTGGTAAATTATGTCATTCAAAGTTTAGTAGCAGTAACTATCTATGTCGGTATCGTTTTTATAACCAAAGCACCAGTCATTCAGTTATTTAGAGATTTTAGAAAAGAGCATAGAACA

SEQ ID NO: 7218 - protein, 474 aa, Streptococcus agalactiae; identical to SEQ ID NO: 2638

SEQ ID NO: 7219 - protein, 1362 aa, Streptococcus agalactiae
ATGAACCTCAAAAAAGTTCGTCTATTTGAAAAGTTTTTTCTAGACAAGAACTTGCATAAAACATATTTTATATTAGGCTTAACGATTACTATTGTATTGAGCCTATTAATGCCATTTTTCAATGAACCTGATGGACAATACCATTTAGCTGTGTCTGGTCGTATTTCAAATAACATTATTGATACTTCTTACTATGGAGAATATAATATTGATTCAGGTATGAGACGACAATCGACCTCCTATAGAGATGGTACTAGATTTGAAAAATACTATTTAAATAAAGCCAATTTTGTTGATGGTAATCATTTGCCTCGTGAGATAAACTATTCTAAACATAACTTTGTTTTTTGGGGTCATCTTGTGCCAGCAGTTGGCTTATTTTTAGGCAAATTTGTGTATCCTTCTATGGGGGTAATGATTACAGTAGCAAGGTTATTTAGTTCCTTTGTCTCAATCACCTTGGTTGCCCTCATTATCCGGTATGTGAAAAAAGGAAAGTTAATCTACTTTGCTATTTTCCTCAGTCCCGTAGTTCTAAATTCATTTGCTAGTCTATCTTATGACTCGACTGGATATATTGTATTTGGAGCATTTTTATCGCTTTTGATAAATCTTTTAGTTGATAAATCGTTGACTAAAAATCGTAGTATTGCTCTTATAGGATTGATTCTTTTAGTCATTGTTGCATGTAAGCAGAATTACTGGCTGTTTTTATTGCTAGTAATACCGGTATTATTGCAGGTTAACAATCCTAAATTAATGGGCTATAATCAGAAGCTATCACATTTATTTCAAGGTCTTAAATCTAAAAAGCTATTTTGGCTATGTCTAACCTTTTTGTCACTTGCTATAGTTTATGTTCTGACCGCAAGACATGGTGGTGTCCTTGCTGTTTTAAGACGTTATGTAATGACATTTGGCTATAATTATGCTGGTATCAATATTTTAAGTAATGACATTACTTCCTGGCTTGCCTCTCCATATCCAAGTCAGAATTTTATTCCCACTTGGGTATCATCAGTATGGTATCTCATGGTCTTTCTAGTATGGTTTTCTGAAGAAAAATTTGTTAAGTCAAAAAATATGGGATTTCTTTTCTTAGCTAGTTTCTTTGTGGGAATTCTTGGTGTCTTTTTTATCATGTTAGAATATCGTGGAGCGCCAACAAGCTACATTGAAGGAGTTCAAGGACGTTACTTTACTGTTACATTGCTTTTGGTACAAGTTTTTGCATCAAGTATTCCAGCGCGTCTAAATGAGGCAGGAAGGAAAGTGGTGCCGTATGCGTTAACTGGCTTGGTAATTGTATCAAATGCCTTATTGTTATTTGATACTGTTATTAGTTTAATTATGAGGAGAAAC

SEQ ID NO: 7220 - protein, 454 aa, Streptococcus agalactiae
MNLKKVRLFEKFFLDKNLHKTYFILGLTITIVLSLLMPFFNEPDGQYHLAVSGRISNNIIDTSYYGEYNIDSGMRRQSTSYRDGTRFEKYYLNKANFVDGNHLPREINYSKHNFVFWGHLVPAVGLFLGKFVYPSMGVMITVARLFSSFVSITLVALIIRYVKKGKLIYFAIFLSPVVLNSFASLSYDSTGYIVFGAFLSLLINLLVDKSLTKNRSIALIGLILLVIVACKQNYWLFLLLVIPVLLQVNNPKLMGYNQKLSHLFQGLKSKKLFWLCLTFLSLAIVYVLTARHGGVLAVLRRYVMTFGYNYAGINILSNDITSWLASPYPSQNFIPTWVSSVWYLMVFLVWFSEEKFVKSKNMGFLFLASFFVGILGVFFIMLEYRGAPTSYIEGVQGRYFTVTLLLVQVFASSIPARLNEAGRKVVPYALTGLVIVSNALLLFDTVISLIMRRN

SEQ ID NO: 7221 - protein, 924 aa, Streptococcus agalactiae
ATGGCAACATATAATGGTCAAGGTTTCATCCACGATCAGCTAGATTCAATTAGAAATCAAACGTTGAGACCAGACTATGTCTTAATGAGGGACGATGGCTCTACTGATGATACTGTAAAGGTGGTTGAAGACTATATAAAAGAGCACCGTTTAGATGGTTGGTCAATAACTAGTAATGATAAAAATTTAGGTTGGCGTTTAAATTTTCGTCAATTACTTATTGATGTGTTAGCCTATGAGGTTGACTATGTCTTTTTTAGTGATCAAGATGACACATGGTATCATCATAAAAATAAGATGCAAGTTGATATTATGGAAGAACGCCAAGATATAAACCTTCTTAGCGCCGATATTGATATCAAAAAGTTATCAGAAGAGGCTACTATTCCCAATAATTTTAAGTTCAATGGTGAGGAAACAATTTCTAAGTATCCATTAGACTTTTCATATCATAACTATCGTCAAGGTTGGACTTTTTGTTTACGCAAGTCGTTTGTTGATCAAGTAATGACTTTTTACAGTGATAATTTAATTTTGTCACATGATAATCTTTTTGCAGGGGTATCTGGTGTCATTGGTTCAGGTTACAATTTAAACAGAAGTGTTGGTGAACATAAGCGACATGCTGAGAATGCAAGTGGGAATATCTTGAATATGAGCTCAAGTTACGAAAGGCATTTACAAGAACTGTATTTTGTTTTGAGTTACTATATCATCCTTGTACCATTTTTAGAAAAAAGTAGCTCTAGTCAATTAAGGGAAGCTAAAGCTTATCTGGATTTTAATCAGCAACGTTATAAAAATGCTCAAAATAAAGATTTTGTAGCAATACTTAAACAAATGATGACTAAAAAACGGTTCTATGATAGCTTTTCAAATCGCATTCGTGACTTGGTGTTTTTATTAAAAGATATAAAAAGGAGT

SEQ ID NO: 7222 - protein, 308 aa, Streptococcus agalactiae; identical to SEQ ID NO: 2642

SEQ ID NO: 7223 - protein, 933 aa, Streptococcus agalactiae
ATGGTAAAGACAGCAGTTTTAATGGCGACATACAATGGCGAAAAATTTATATCTGAACAACTTGATTCAATTCGCCAACAGACATTAAAACCAGATTATGTATTATTGAGGGATGATTGTTCAACGGATGAAACAGTCAATGTCGTCAATAACTATATCGCAAAACATGAGTTAGAAGGCTGGAAAATTGTTAAAAACGACAAAAACTTAGGCTGGCGTTTAAATTTTCGTCAATTACTTATTGATGTGTTAGCCTATGAGGTTGACTATGTCTTTTTTAGTGATCAAGATGATATTTGGTATCTTGATAAAAACGAACGACAGTTTGCCATTATGTCAGATAAACCTCAAATTGAGGTTTTGAGTGCAGACGTTGATATCAAAACGATGTCTACAGAAGCCAGTGTTCCACATTTTCTAACTTTTTCTTCTAGTGATAGAATCAGTCAGTATCCTAAAGTATATGATTATCAAACATTCCGTCCCGGATGGACCATTGCTATGAAGAGAGATTTTGCGCAAGCTATCGCTGATAATTGGACTTTTGGAGCTAATATTTCGCACGATAATCTTATCGAGACAACTGCCAGTATTATTGGAAATGGTTATAACCTTAACGAAAGCGTAGGAGTTCATATTCGATATGGAGGAAACGCAAGTGGTAATAGCAAATTTGTTTTGAATTGGAAGTCGCCTAAAACACAACATATCACAGGATTAAAAACATTTGTTGATTTTTACGAAACCATGCAGAAGGTTGTCAACAAATATCAAAATGATGTCGCTTTAAATCAACGCTTAGCCTTTGAAAAAGAAAGATTGGAAGCTTCTAAATTGTCATTAATTCATAATAGTGCTTTTGTGATTAAAAATTGGCGACTCTATAACTCTAATAGTGGACGTATGAGAGATTTATTATTTGCGTTTAAAAAG

SEQ ID NO: 7224 - protein, 311 aa, Streptococcus agalactiae; identical to SEQ ID NO: 2644

SEQ ID NO: 7225 - protein, 1053 aa, Streptococcus agalactiae
ATGATTAAATTTAGTAATAAAATTGTACAAGAAGATTTAGCACTTATTAGTAACCAAAATTATATTAATTGGGAAAGAATTGCTAATAAAGGCGTTTTAATAAGTGGTTCTAATAGTATGTTAGCGAGTTATATGGTATTTTTACTAGCCTATCTCAATGAGACAAGAAATTACCAAACGCAAATTATTGCGACAGCTAGAAACATTGAAAAAGCCCGTGATAAATTTTCAGATTTAGTTGGGAAAGATTATTTCACCTTAATTCCTTATGATGTAGAAGAACGCCTAGAGTATGATGGAAAAGTGGATTACATTATCCATGCAGCAAGCAATGCTAGTCCAACTGCTATTTTGAGTAATCCTGTTAGCATCATAAAAGCTAATACAATTGGTACATTGAATTTATTAGACTTTGCAAAGGAAAAAACAATTGAAAACTTCTTGTTCTTATCAACGCGTGAAGTATATGGAACATCTATTAAAGAAGTGATTGATGAAGAAGCTTATGGTGGATTTGATATTTTAGCTACTAGAGCTTGTTACCCAGAAAGCAAACGTATGGCTGAAACTCTACTGCAAAGTTACTATGATCAATATAAGGTACCCTTTACTATTGCTCGTATTGCACATTCATTTGGTCCTGGTATGGAGCTTGGTAACGATGGTCGTATTATGAATGATCTTTTATCGAATGTCATTGATGGCAAAGATATCGTTTTAAAAAGTAGTGGTACAGCAGAGCGTGCTTTCTGTTATTTAGCAGATGCTGTATCAGGGTTATTTACTATTTTATTAAATGGTGAAGTTGGTCAAGCTTACAATGTAGCAAATGAAGATCAACCCATTATGATTAAGGATTTGGCACAAAAGTTAGTTGATCTCTTTTCTGATAAAAATATTTCAGTAGTATTCGATATTCCTAAAACTATGAGTGCAGGTTATAGCAAAATGGGGAGAACACGTCTCACTATGGCCAAATTAGAAGCGTTGGGATGGAAGCGAGAAGTTTCTCTTGAATCTGGAATATTAAAAACAGTACAAGCATTTGAGGAG

SEQ ID NO: 7226 - protein, 351 aa, Streptococcus agalactiae
MIKFSNKIVQEDLALISNQNYINWERIANKGVLISGSNSMLASYMVFLLAYLNETRNYQTQIIATARNIEKARDKFSDLVGKDYFTLIPYDVEERLEYDGKVDYIIHAASNASPTAILSNPVSIIKANTIGTLNLLDFAKEKTIENFLFLSTREVYGTSIKEVIDEEAYGGFDILATRACYPESKRMAETLLQSYYDQYKVPFTIARIAHSFGPGMELGNDGRIMNDLLSNVIDGKDIVLKSSGTAERAFCYLADAVSGLFTILLNGEVGQAYNVANEDQPIMIKDLAQKLVDLFSDKNISVVFDIPKTMSAGYSKMGRTRLTMAKLEALGWKREVSLESGILKTVQAFEE

SEQ ID NO: 7227 - protein, 717 aa, Streptococcus agalactiae
ATGAATATTGGAGTTATTTTTGCAGGTGGTGTTGGTCGTCGCATGAATACCAAAGGTAAACCAAAGCAATTCCTAGAAGTGCATGGTAAACCCATTATTGTACACACAATTGATATTTTCCAAAATACAGAAGCTATTGATGCTGTAGTAGTTGTCTGTGTATCAGACTGGCTAGATTATATGAATAATCTGGTAGAGCGTTTCAACCTTACGAAAGTAAAAGCAGTTGTTGCAGGTGGAGAAACTGGCCAAATGTCAATTTTTAAGGGGCTTGAAGCCGCTGAACAGCTGGCTACAGATGATGCCGTTGTTTTAATTCATGACGGAGTACGTCCATTGATTAATGAAGAAGTTATTAATGCTAATATACAGTCAGTAAAAGAAACAGGAAGTGCGGTAACTTCAGTTCGTGCTAAAGAGACAGTTGTTCTAGTCAATGATTCTTCTAAAATATCTGAAGTTGTTGATCGTACTCGTTCCTTCATTGCTAAAGCGCCACAAAGTTTTTATCTATCAGATATCCTTTCTGTTGAACGTGATGCCATTAGCAAAGGGATTACTGATGCAATTGATTCTAGTACTTTGATGGGTATGTACAATCGTGAACTCACTATTGTTGAGGGACCATATGAAAATATCAAGATAACAACACCAGATGATTTTTATATGTTTAAAGCTTTGTATGATGCTAGAGAAAATGAACAAATTTATGGGATG

SEQ ID NO: 7228 - protein, 239 aa, Streptococcus agalactiae; identical to SEQ ID NO: 2648

SEQ ID NO: 7229 - protein, 777 aa, Streptococcus agalactiae
ATGTTAGCTTATATTGATAAAGTTGCGCGTGATAATAAAATTGAATATTCTTTAGGCGGAGGCAGCCTACTGGGAGCAATGAGACATAAAGGATTCATTCCATGGGATGACGATATTGATTTGATGCTAGAAAGAAGCCAGTATGAGCGTTTGATGAAAGCATTAGCTGATGCTAATAATAGCGATTTTAAATTGCTACATCATTCTGTTGAAAAAAATCTATGGCCATTTGCCAAGCTGTATCACACAAAGTCAATGTACTTAAGTAAAACAGATAGAATTCATCCTTGGACAGGGATTTTTATTGATATCTTCCCACTTGACCGATTACCAGAGAGTGCAGAAGAACGTCAAAGATTCTTTAAAAAAGTTCACTCTGCTGCTGCAAATTTGATGTGTACGACTTACCCCAATTTTGCTAGCGGTTCCCGAAAGCTTTATGCAAATGCAAGGCTAATTTTGGGGCTACCCCGATTCATCGCTTATCACGGCCAAGCTAAAAAACGTGCTGAAATTGTTGATCAAGTGATGGAAACATATAATAATCAAGAGGTTCCTTACATGGGTTATACCGATTCAAGATATCGCTTGAAAGAATATTTTCCAAGAGAAATTTTTTCTGAGTATGAAGATGTTATGTTTGAAAACATTAAAACCCGAAAAATTAAAAATGAGCATGCTTATCTGAATCAATTATATGGGGGTAGTTATATGGAATTACCTCCAGAAAGTAAGAGAGAAAGTCATAGTTATTACACTTGGTACTGGAAAGAAGGT

SEQ ID NO: 7230 - protein, 259 aa, Streptococcus agalactiae; identical to SEQ ID NO: 2650

SEQ ID NO: 7231 - protein, 1731 aa, Streptococcus agalactiae
ATGAGTAAAAAACATATTTTTATTTGTCTGTTTTTCATGCTTTTTTTAGTAGGTTGCCAAAATAATAAAAAAGTAAAAACAGATAAAAAAGTAGATATTACAGCTTATTATTATCATAATAATACCCCGCAATACAGTGTTCAGATTAATGCTATTCATTTACAAACAGCATTGGATAAAGTGAGGACGGGGGAGTTTGAGAGCAAAGACTTTACACACTATACTTTTGATAGTATCAAGCGGAAGTACCAAGTTAGTGGTAAAAAAGTCCTTATGGATAATAACTATAGATTTGGTTCTGGTATAAAAAATACTAGACAGGATGCTATTGCTATTGTAAGGTTACTGCTTGAAAAGAATAAAGATTATTTAATTTACATGAATGGCTTAGAAGAGCCAAGTGTTTTATATAATCCAGAAAATAAACGTTATAAGTTCACAAATAACAAAGGAAAAGCAATTGGTAATATTCCAGTTGGTTTAACTGCTTTTGAAAACAGCGCAGAAACTCAAGAATATGTGTTGAAAAATATTCAGAAAAACGAAACGATTTATCTTGGTAATACCCGAGTAGATAATCCTCGAGTAACTGTTAATAACAAAAAAAGAGATACTATAGGAGTTGAATACGGTAAACGTATTACTTATAGGATTCCAATTTATTCAAAGCAGCTGACTGTCAGAGTTAGCCCTAATTTTGTAGTAGATAGTACTAATTATAATTACCGACTTTCTCAAGCGCCTATTATTGCGGAAGAAGGTAAAGAGGGACGTTTGTATCCAATAGATAGCAGTATTAGTGTCGATGGTGATAAAATTGTTTTAAATAGTAGTGGTGATGAAACAGAGCAAAAAGAATTATTACAAAATAGCCTGTATAAACTTCACTCTATTGATAAGTTAGACTTTGATTTGACAAATGCTGATATTAAAGAGTTAGAGATTACAGGACATGTTGCTTCAAAAAGAGATTATAATTTGTCTGTTGCTCAGGAAAAGAAAGGCGTCATAGAGACTAAACGGAGTCTAATTTCTGTTGATAATCAAAAACAAGATCAAGGGATTTTTGTCGAGGATTCTAAAGGCTATATAAAGACACCTAGTTTGAGCAGTTATGGTATAAATTTTGCCATGTATGACGACAATCAAAATAGATTATTGCAAGGTTCAGAGTATATTTTAGGAAGATTGAATGCAGATAAAAAAGTATCTCTATATCAACCTAATGGCTTTTGGATAAATACTCAAAAAACGATTAAGAGTTTAAATAAAGAATATCTTAACCAAAATGCTTACCATATTAGAGGAAATAACATTATAGGTATTGATGGCTATTCAAATGACATAGACTTGAATCCTAGGTTATGGGCTTATAACTATAAAAAACAAGTGAAAAGTAACCAATCATTATTTAAATTACGAGGTTTGTCTAATAAGTATAAGTATTTCTTAATACAGACAAAATCTCCAAAAGGCTACTTACAAAGCAATAAACCATTTTATTTTACAGTAAATAAAGATAGTGTTTCTAAAGCACAATTTGGTAACTATAATATAAATGGTTATATAATGGACATGCAGTACAACAAACAAGAATACAATGCACTTGCAAACACTCCAAAAGGTCAAAAAACAAAGAAAACTTTCAAACCCATGACCCTAGTGATTCTTTTTGCAGTAGCTTTATTTATTTTCTATATTACAGCTATAAGATTTGTATTTAAAAGAATG

SEQ ID NO: 7232 - protein, 577 aa, Streptococcus agalactiae
MSKKHIFICLFFMLFLVGCQNNKKVKTDKKVDITAYYYHNNTPQYSVQINAIHLQTALDKVRTGEFESKDFTHYTFDSIKRKYQVSGKKVLMDNNYRFGSGIKNTRQDAIAIVRLLLEKNKDYLIYMNGLEEPSVLYNPENKRYKFTNNKGKAIGNIPVGLTAFENSAETQEYVLKNIQKNETIYLGNTRVDNPRVTVNNKKRDTIGVEYGKRITYRIPIYSKQLTVRVSPNFVVDSTNYNYRLSQAPIIAEEGKEGRLYPIDSSISVDGDKIVLNSSGDETEQKELLQNSLYKLHSIDKLDFDLTNADIKELEITGHVASKRDYNLSVAQEKKGVIETKRSLISVDNQKQDQGIFVEDSKGYIKTPSLSSYGINFAMYDDNQNRLLQGSEYILGRLNADKKVSLYQPNGFWINTQKTIKSLNKEYLNQNAYHIRGNNIIGIDGYSNDIDLNPRLWAYNYKKQVKSNQSLFKLRGLSNKYKYFLIQTKSPKGYLQSNKPFYFTVNKDSVSKAQFGNYNINGYIMDMQYNKQEYNALANTPKGQKTKKTFKPMTLVILFAVALFIFYITAIRFVFKRM

SEQ ID NO: 7233 - protein, 153 aa, Streptococcus agalactiae
ATGAATTTCTTGTTATTTGGTGCTATTTTATTTCTGTTTTGTTTAGAATTATTTGATACTAGTAGCAATACCAAAAGAGATGAGCAAATTAAACGCCTGATTCAAGAGGTTTCTTTGTTGAAAAAAGAGATAGAGGATAGCACTTTAGATGAG

SEQ ID NO: 7234 - protein, 51 aa, Streptococcus agalactiae
MNFLLFGAILFLFCLELFDTSSNTKRDEQIKRLIQEVSLLKKEIEDSTLDE

SEQ ID NO: 7235 - protein, 429 aa, Streptococcus agalactiae
ATGACGGTCTCAGAAATAAGAGAAGTTCAACTTGAAATGTTAGCTTATATTGATAAAGTTGCGCGTGATAATAAAATTGAATATTCTTTAGGCGGAGGCAGCCTACTGGGAGCAATGAGACATAAAGGATTCATTCCATGGGATGACGATATTGATTTGATGCTAGAAAGAAGCCAGTATGAGCGTTTGATGAAAGCATTAGCTGATGCTAATAATAGCGATTTTAAATTGCTACATCATTCTGTTGAAAAAAATCTATGGCCATTTGCCAAGCTGTATCACACAAAGTCAATGTACTTAAGTAAAACAGATAGAATTCATCCTTGGACAGGGATTTTTATTGATATCTTCCCACTTGACCGATTACCAAGCTCCATACCAGGACCAAATGAATGTGCAATACGAGCAATAGTAAAGGGTACCTTATAT

SEQ ID NO: 7236 - protein, 143 aa, Streptococcus agalactiae
MTVSEIREVQLEMLAYIDKVARDNKIEYSLGGGSLLGAMRHKGFIPWDDDIDLMLERSQYERLMKALADANNSDFKLLHHSVEKNLWPFAKLYHTKSMYLSKTDRIHPWTGIFIDIFPLDRLPSSIPGPNECAIRAIVKGTLY

SEQ ID NO: 7237 - protein, 261 aa, Streptococcus agalactiae
TTGTTCTTATCAACGCGTGAAGTATATGGAACATCTATTAAAGAAGTGATTGATGAAGAAGCTTATGGTGGATTTGATATTTTAGCTACTAGAGCTTGTTACCCAGAAAGCAAACGTATGGCTGAAACTCTACTGCAAAGTTACTATGATCAATATAAGGTACCCTTTACTATTGCTCGTATTGCACATTCATTTGGTCCTGGTATGGAGCTTGGTAATCGGTCAAGTGGGAAGATATCAATAAAAATCCCTGTCCAAGGA

SEQ ID NO: 7238 - protein, 87 aa, Streptococcus agalactiae
MFLSTREVYGTSIKEVIDEEAYGGFDILATRACYPESKRMAETLLQSYYDQYKVPFTIARIAHSFGPGMELGNRSSGKISIKIPVQG

SEQ ID NO: 7239 - protein, 676 aa, Streptococcus agalactiae
ATGAAAGTTAATATTTTAATGGCCACCTACAATGGAGAGAAGTTTCTGGCGCAGCAAATCGAAAGTATCCAAAAGCAAACCTTTAAAGAGTGGAACCTCCTAATCAGAGATGATGGTTCAAGTGACAAGACATGTGATATTATTAGAAACTTTACTGCTAAAGATTCTCGAATTCGTTTCATTAATGAAAATGAGCACCATAATTTAGGAGTTATTAAATCATTTTTTATGCTAGTTAATTACGAAGTTGCAGATTTCTATTTTTTTAGTGATCAAGATGATGTATGGTTGCCAGAAAAGTTATCTGTAAGTTTAGAGGCAGCAAAGCATAAAGCATCTGATGTACCATTACTTGTTTATACTGATTTGAAAGTTGTTAATCAAGAATTAAATATTTTACAAGACAGCATGATTCGGGCTCAATCGCACCATGCCAATACGACATTATTACCAGAACTAACTGAGAATACTGTTACTGGTGGGACTATGATGATAAATCATGCATTAGCTGAGAAGTGGTTTACTCCTAATGATATCTTAATGCATGATTGGTTTTTAGCACTCTTAGCAGCAAGTTTAGGAGAAATCTATTTGGATTTACCAACTCAACTATACCGTCAACATGACAATAATGTTTTGGGGGCGAGGACAATGGATAAGAGATTTAAGANNNNNT

SEQ ID NO: 7240 - protein, 226 aa, Streptococcus agalactiae
  VARIANT 225, 226: Xaa = Any Amino Acid
MKVNILMATYNGEKFLAQQIESIQKQTFKEWNLLIRDDGSSDKTCDIIRNFTAKDSRIRFINENEHHNLGVIKSFFMLVNYEVADFYFFSDQDDVWLPEKLSVSLEAAKHKASDVPLLVYTDLKVVNQELNILQDSMIRAQSHHANTTLLPELTENTVTGGTMMINHALAEKWFTPNDILMHDWFLALLAASLGEIIIWIYQLNYTVNMTIMFWGRGQWIRDLRXX

SEQ ID NO: 7241 - protein, 1152 aa, Streptococcus agalactiae
ATGCAAGATGTTTTCATTATAGGAAGTAGAGGGTTGCCAGCTCGTTACGGTGGTTTTGAAACTTTTGTTTCAGAATTGATTAATCATCAAAAAAGTTTCGACATAAAATACCATGTTGCATGCCTTAGTGATAAAGAACATCATACTCATTTTAACTTTGCTGACGCTGATTGTTTTACTATAAATCCTCCCCAATTAGGGCCAGCACGTGTGATTGCTTATGATATTATGGCCATTAATTATGCCCTTGACTTGGTTAAGACACATGATTTAAAAGAGCCTATTTTTTATATTTTAGGAAATACAATTGGTGCCTTTATTTGGCATTTTGCCAATAAAATACATAAAGTCGGTGGCTTATTGTATGTTAATCCGGATGGTTTAGAGTGGAAGCGATCAAAGTGGTCTCGTCCCACACAGCGTTATTTAAAATACGCCGAAAAATGTATGACTAAAAATGCAGACCTAATTATTTCTGATAATATTGGTATTGAAAATTACATTCAATCTACCTACTCTAATGTGAAGACAAGGTTCATTGCTTACGGTACAGAGATTAATTCTAGGAAATTATCGTCAGATGATCCACGTGTCAAACAGTTGTTTAAAAAATGGAATATTAAGTCTAAGGGTTACTATCTAATCGTTGGTCGATTTGTCCCTGAAAACAATTATGAAACGGCTATTAGGGAGTTCATGGCTTCAGATACTAAGCGTGATTTAGTTATTATCTGTAACCATCAAAATAACCCCTACTTTGAAAAGTTGTCCTTAAAGACAAACCTTCAACAAGATAAAAGAGTTAAGTTTGTAGGTACGCTCTATGAAAAAGATCTGCTGGATTATGTTCGTCAACAAGCCTTTGCTTATATTCATGGGCATGAAGTTGGCGGTACTAATCCAGGACTGCTTGAGGCTTTAGCTAATACTGATTTGAATCTTGTTCTAGATGTTGATTTCAACAAATCAGTAGCAGGTCTCTCAAGTTTTTACTGGGCTAAAAAAGAGGGGGATTTAGCTAAGCTTATTAACGATAGTGATCAACAACAGGATTTATCTACTTACGGTGATCGAGCAAAAGCCATTATTCAAGAAAACTATACTTGGAAAAAAATTGTTGAAGAATATGAGGATTTGTTTTTAAATGAAAGT

SEQ ID NO: 7242 - protein, 384 aa, Streptococcus agalactiae
MQDVFIIGSRGLPARYGGFETFVSELINHQKSFDIKYHVACLSDKEHHTHFNFADADCFTINPPQLGPARVIAYDIMAINYALDLVKTHDLKEPIFYILGNTIGAFIWHFANKIHKVGGLLYVNPDGLEWKRSKWSRPTQRYLKYAEKCMTKNADLIISDNIGIENYIQSTYSNVKTRFIAYGTEINSRKLSSDDPRVKQLFKKWNIKSKGYYLIVGRFVPENNYETAIREFMASDTKRDLVIICNHQNNPYFEKLSLKTNLQQDKRVKFVGTLYEKDLLDYVRQQAFAYIHGHEVGGTNPGLLEALANTDLNLVLDVDFNKSVAGLSSFYWAKKEGDLAKLINDSDQQQDLSTYGDRAKAIIQENYTWKKIVEEYEDLFLNES

SEQ ID NO: 7243 - protein, 852 aa, Streptococcus agalactiae
ATGATTTTAATTACAGGGGCAAACGGGCAATTAGGTAGTGAATTACGTCACCTTTTAGACGAACGAACTCAAGAGTATGTTGCTGTTGATGTAGCTGAAATGGATATTACAAATGCCGAGATGGTGGACAAAGTCTTTGAAGAGGTGAAGCCATCTTTAGTTTACCATTGTGCAGCTTACACAGCTGTTGATGCGGCAGAAGATGAAGGAAAAGAGCTAGACTTTGCAATCAATGTCACTGGTACAGAGAATGTCGCTAAGGCTGCTGCTAAACATGATGCAACACTTGTTTACATTTCGACGGACTACGTGTTTGATGGTGAAAAACCAGTGGGGCAAGAATGGGAAGTAGATGATCTGCCTGATCCCAAAACAGAGTACGGTCGTACAAAACGTATGGGTGAAGAGTTAGTTGAAAAATATACTTCAAAATTCTATACCATTCGCACAGCGTGGGTATTTGGTAACTATGGTAAAAACTTTGTCTTTACGATGCAAAACCTTGCAAAAACACACAAAACTCTAACTGTTGTTAACGACCAACATGGACGACCAACATGGACACGTACTTTGGCTGAGTTTATGACTTATTTAGCTGAAAATCAAAAAGATTTTGGTTACTATCATTTATCAAATGATGCTAAAGAAGATACAACATGGTATGATTTTGCGGTTGAAATCTTAAAAGACACAGATGTGGAGGTTAAGCCTGTTGATTCTAGTCAATTCCCAGCAAAAGCAAAACGTCCTTTAAATTCAACTATGAGTTTGGAAAAAGCGAAAGCAACAGGATTTGTGATTCCTACTTGGCAAGATGCTTTAAAAGAGTTCTACAAGCAGGAAGTTAAAAAA

SEQ ID NO: 7244 - protein, 284 aa, Streptococcus agalactiae
MILITGANGQLGSELRHLLDERTQEYVAVDVAEMDITNAEMVDKVFEEVKPSLVYHCAAYTAVDAAEDEGKELDFAINVTGTENVAKAAAKHDATLVYISTDYVFDGEKPVGQEWEVDDLPDPKTEYGRTKRMGEELVEKYTSKFYTIRTAWVFGNYGKNFVFTMQNLAKTHKTLTVVNDQHGRPTWTRTLAEFMTYLAENQKDFGYYHLSNDAKEDTTWYDFAVEILKDTDVEVKPVDSSQFPAKAKRPLNSTMSLEKAKATGFVIPTWQDALKEFYKQEVKK

SEQ ID NO: 7245 - protein, 339 aa, Streptococcus agalactiae
ATGTCAGAAGTAAAGCAATATAGCGAAGAAGAAGTTGGAAAAATAAAAGATCGTATCCTAGAAGCTTTGGAGATGGTTATCGATCCTGAATTGGGAATAGATATTGTTAACCTTGGGTTAATTTATGAGATTCGCTTTGAAGATAACGGTCGAACTGAAATTGATATGACTTTAACGACTATGGGATGCCCGTTAGCAGATTTATTGACAGATCAAATTCATGATGTTATGAAAACAGTCCCAGAGGTAACTGAAACCGAGGTGAAATTGGTATGGTACCCAGCCTGGTCTGTTGATAAGATGAGTCGTTATGCTCGTATCGCTTTGGGAATTCGTTCA

SEQ ID NO: 7246 - protein, 113 aa, Streptococcus agalactiae
MSEVKQYSEEEVGKIKDRILEALEMVIDPELGIDIVNLGLIYEIRFEDNGRTEIDMTLTTMGCPLADLLTDQIHDVMKTVPEVTETEVKLVWYPAWSVDKMSRYARIALGIRS

SEQ ID NO: 7247 - protein, 1107 aa, Streptococcus agalactiae
ATGGCAGAGAAAAAAGGAAATACAACTTTTAATGTTCAAGTTGCGGATTTTATTCGCAATCATAAAAAACAAGGTACTGCAATTGATGATGAGGTAACAGAAAAACTTGTTATTCCTTTTGTTTTAGATGCAGATCAAATTGATGATTTGTTAGAACGATTGACAGACGGTGGCATTTCAATCACAGATAAAGAAGGCAATCCTTCAACAAAGTATGTGGTAGAAGGGCCAAAACCTGAAGAATTGACTGATGAAGAGCTCATAGGAAGTAATTCTGCTAAAGTCAATGACCCAGTACGTATGTACTTGAAGGAAATTGGTGTTGTTCCTCTTTTAACGAATGAAGAAGAAAAAGAATTGGCTGTTGCGGTTGCTGAGGGAGATTTAATGGCTAAACAACGTTTAGCTGAAGCAAACCTTCGTCTTGTTGTCTCAATTGCAAAACGTTATGTTGGACGTGGAATGCAATTTCTTGATTTAATTCAAGAGGGTAACATGGGGCTCATGAAAGCTGTTGATAAATTTGATTATTCAAAGGGATTCAAATTTTCAACTTATGCAACATGGTGGATTCGTCAAGCTATAACACGTGCAATTGCAGATCAAGCACGTACGATTCGTATTCCTGTTCATATGGTTGAAACGATTAATAAATTGGTCCGTGAACAACGTAATCTTCTTCAAGAACTTGGTCAAGATCCAACTCCTGAGCAAATCGCAGAACGCATGGATATGACACCAGATAAAGTACGTGAAATCCTAAAAATTGCTCAAGAGCCGGTATCGCTAGAAACGCCAATCGGTGAGGAAGATGATAGCCATTTGGGTGATTTCATTGAAGACGAAGTTATTGAAAATCCAGTAGATTATACTACACGTGTTGTTCTTCGTGAGCAATTAGATGAGGTTTTAGATACTCTTACTGACCGTGAAGAGAATGTTCTTCGTTTACGCTTTGGTCTTGACGATGGTAAAATGCGTACGTTAGAGGACGTAGGTAAAGTATTTAATGTTACTCGTGAGCGCATTCGTCAGATTGAAGCTAAAGCCCTTAGAAAACTTCGCCATCCTAGTCGTAGCAAGCAACTTAAAGATTTCATGGAAGAT

SEQ ID NO: 7248 - protein, 369 aa, Streptococcus agalactiae
MAEKKGNTTFNVQVADFIRNHKKQGTAIDDEVTEKLVIPFVLDADQIDDLLERLTDGGISITDKEGNPSTKYVVEGPKPEELTDEELIGSNSAKVNDPVRMYLKEIGVVPLLTNEEEKELAVAVAEGDLMAKQRLAEANLRLVVSIAKRYVGRGMQFLDLIQEGNMGLMKAVDKFDYSKGFKFSTYATWWIRQAITRAIADQARTIRIPVHMVETINKLVREQRNLLQELGQDPTPEQIAERMDMTPDKVREILKIAQEPVSLETPIGEEDDSHLGDFIEDEVIENPVDYTTRVVLREQLDEVLDTLTDREENVLRLRFGLDDGKMRTLEDVGKVFNVTRERIRQIEAKALRKLRHPSRSKQLKDFMED

SEQ ID NO: 7249 - protein, 754 aa, Streptococcus agalactiae
ATGGACCCTGATGAATTTCTACAAGCAAATTCAGCAGAAGATTTTAAACACTCTTAGAAATGGGCGCATCAGTAATACAGAGTTTTATATCCACTACTTAAAGCCTGAAAACACCGATAATTTACAATCTGAAATTGCTTATGTTGAAAAAATAGCGAAATTAATTGCTAAATCTCCATCGATAACAGCACAAAATTCATATATTACAAAAGTGGCTGAACTCTTGCCAGATTTTGATTATTTTCAAGTAGAACAATCGGTTAATAACGAACGATTGCATCATAGAAGTCAACAGCAAGCTTCATCTTCAGTACAAACAAGTGCTACAGTGCAATTACCACAGACAGGTAAGTTATCAGCTATCACTAAAACAGAAATGCAATTGTTTCATCGATTATTGAATCATCCCTACCTGTTAAATGAATTCCGTAATAGGGATAATTTTTATTTTGATACAACAGAAATACAAGTTTTATATGAGTTGCTAAAAGAAAGTGGTGAGATCACGTCTTATGATTTATCACAAGAAAGTGACAAAGTTAATCGTACTTATTATATAATTTTAGAGGAACAATTACCTGTAGAAGTATCTATTGGAGAGATTGAAGCCGTCGAAAAGGCACGTGACCGTTTATTGAAAGAACGTGATTTAAGAAAACAAAGCCAGTTAATTAGACAATCTAGTAATCAAGGTGATGAAGAAGGAGCCTTGGCTGCATTAGAAAATTTAATTGCTCAAAAAAGAAATATGGAA

SEQ ID NO: 7250 - protein, 252 aa, Streptococcus agalactiae
MDPDEFLQANSAEDFKQLLENGRISNTEFYIHYLKPENTDNLQSEIAYVEKIAKLIAKSPSITAQNSYITKVAELLPDFDYFQVEQSVNNERLHHRSQQQASSSVQTSATVQLPQTGKLSAITKTEMQLFHRLLNHPYLLNEFRNRDNFYFDTTEIQVLYELLKESGEITSYDLSQESDKVNRTYYIILEEQLPVEVSIGEIEAVEKARDRLLKERDLRKQSQLIRQSSNQGDEEGALAALENLIAQKRNME

SEQ ID NO: 7251 - protein, 711 aa, Streptococcus agalactiae
GTGTTTTTACTATTATGTATTTTATCGATGTGGCTCATGATTTTTGGGGTTGCATTCTATTACTTTGGGTCGCTACATCAATCATTGACTTCAAGGATTATTTATCAGTTTGTACTTACTGTTTTGCTAACGACAACAGCTTGGTTCATGGGTGCCTATTTTTTAGCATTTGAAGGTCATTTTAAAACTGTCTTTCAATTCCAAGAAGCAGATGGTAAACAAATTGTAAATTGTTTATTTCAACTTTGTTTCGCCCTTTACGCAGTAGTAATGCTTATTGGGTCAATTATTGATAGAGTTCAGACGAAGCGACTTTTATTAGCTGTTGTTTCTTGGCTTTTCTTGGTGTATACGCCCTTAGCTTATTTAATTTGGAATTCAGAGGGTGTTTTTGCAAAGATGGGAGTACTTGATTTTTCAGGCGGAATGGTCGTTCATTTATCTGCAGGGCTTTCTTCGTATATTTTAGCTCATGTTATTGGCAAGAGTGAACATCAGCACAATAAGGTTAAAAATGATAGTCTCTTTTTAGGAATGATACTTATTACATTTGGTTGGTTTGGATTTAATATGGGTCCAGTTGGTGAGTGGAATTCACAAGCCATTATGATACTTTTAAATACTATATTTGCTATTATAGGTGGTGGTTTGGCGTGGACATTGGCTGCTAAGTGGAATGGTGAGGAAGAGAAAACAGGAAGCTTANNNNNT

SEQ ID NO: 7252 - protein, 237 aa, Streptococcus agalactiae
  VARIANT 236, 237: Xaa = Any Amino Acid
MFLLLCILSMWLMIFGVAFYYFGSLHQSLTSRIIYQFVLTVLLTTTAWFMGAYFLAFEGHFKTVFQFQEADGKQIVNCLFQLCFALYAVVMLIGSIIDRVQTKRLLLAVVSWLFLVYTPLAYLIWNSEGVFAKMGVLDFSGGMVVHLSAGLSSYILAHVIGKSEHQHNKVKNDSLFLGMILITFGWFGFNMGPVGEWNSQAIMILLNTIFAIIGGGLAWTLAAKWNGEEEKTGSLXX

SEQ ID NO: 7253 - protein, 1125 aa, Streptococcus agalactiae
ATGAAACATTATCAAACCATAATTATCGGTGCAGGCGCTGCAGGAATCGGTTTTGGTTCTGCCATGCAACGATTAGGACTTACAAATTTTCTTATCATTGAAAAAGGGCACATTGGAGAATCTTTTTTAAGATGGCCCAGAACAACACAATTTATCACACCTTCCTTCACTACCAATGGCTTTGGTTTTCCAGATCTAAACGCTGTTATTCCAGATACTTCTCCTGCTTTCTCATTTGAAAAAGAACATCTTTCTGGAGTGGAATATGCACGCTACTTACAATTAGTTGCTGCTCATTATAATCTCCCTATCCAAAACGAAACATCTGTTCTATCTATTGATAAACAAGATAGCCTTTTTGTTATTAAAACTTCAAAGGGAGATTTTTCTGCTGATTATCTTATTATGGCAACAGGAGAATTTCAAAATCCAAATACCATTGATATTAAAGGTGCAGATCTAGGAATGCACTATGGTCAAGTTGATAATTTCCATATCAAATCTGACAATCCATTTATCATCATTGGTGGAAACGAAAGTGCTTGTGATGCACTAACACATCTAGTATATTTGGGAAATCAAGTCGAATTATATACAGATACGTTTGGTCGTAAAGAGAGCAATCCCGATCCAAGCATCTCTTTATCCCCCCTAACTAAAGAACGTTTAAAACATATACAAGACCACAAAAAAGAATATTATAGTATCTCTGAAGGCAAGAAAGCCATTGAGATTAAACAAATTGGAAAACAATATCAAGTTACTTTTGATGACGGTAGTACTGCGGAGTCTTTCCATAAACCTATTCTTTCCACAGGTTTTCTAAATACCTGTCATCTCATTGACGGAATCGCTTTATTTGAATACGATAAAAATCAGTTGCCAATAGTTACTGAAGATGACGAATCTACTATCGTTAATAACTGTTTCTTAATTGGTCCAAGCTTACGACAAAGAGATACTATTTTCTGCTATATTTATAAATTCAGACAGCGCTTTGTCCCTGTTATTAATCATATCGCACAACGAGAAGGGATTATATTAGACGAAGATACCCTTGAATTCTTTAAAGAAAATCAAATGTACCTTGATAACCTAGCTTGTTGCGATGTCAATTGTGATTGC

SEQ ID NO: 7254 - protein, 375 aa, Streptococcus agalactiae
MKHYQTIIIGAGAAGIGFGSAMQRLGLTNFLIIEKGHIGESFLRWPRTTQFITPSFTTNGFGFPDLNAVIPDTSPAFSFEKEHLSGVEYARYLQLVAAHYNLPIQNETSVLSIDKQDSLFVIKTSKGDFSADYLIMATGEFQNPNTIDIKGADLGMHYGQVDNFHIKSDNPFIIIGGNESACDALTHLVYLGNQVELYTDTFGRKESNPDPSISLSPLTKERLKHIQDHKKEYYSISEGKKAIEIKQIGKQYQVTFDDGSTAESFHKPILSTGFLNTCHLIDGIALFEYDKNQLPIVTEDDESTIVNNCFLIGPSLRQRDTIFCYIYKFRQRFVPVINHIAQREGIILDEDTLEFFKENQMYLDNLACCDVNCDC

SEQ ID NO: 7255 - protein, 984 aa, Streptococcus agalactiae
ATGTCAGAAAAAATCAGAGTTTTACTCTATTATAAATATGTTTCAATTGAAAATGCGGAAGAGTACGCTGCGAAACATCTAGAATTTTGTAAATCTATTGGGCTTAAAGGTCGTATTTTGATTGCGGATGAGGGGATTAATGGAACTGTTTCTGGAGATTATGAAACAACTCAGAAGTATATGGATTGGGTCCACAGCGATGAGCGTTTTGCTGATCTTTGGTTCAAGATTGACGAGGAAAATCAACAAGCTTTCCGTAAAATGTTTGTTCGTTATAAGAAAGAGATTGTGCACCTTGGGTTAGAAGATAATAACTTTGATAGCGATATTAATCCTTTGGAAACAACAGGTGAGTATTTAAATCCTAAACAATTTAAAGAAGCCTTGCTTGATGAAGATACTGTTGTTTTAGATACGCGTAATGATTATGAGTATGACTTAGGTCACTTCCGTGGAGCAATTCGTCCTGATATTCGCAATTTCCGTGAGTTACCACAATGGGTACGTGACAACAAAGATAAGTTTATGGAAAAACGTGTTGTTGTGTACTGTACCGGTGGTGTTCGTTGTGAGAAATTCTCGGGTTGGATGGTTCGAGAAGGTTTTAAAGATGTTGGACAATTACACGGTGGTATTGCAACATATGGAAAAGATCCGGAAGTTCAAGGTGAACTTTGGGATGGTGCGATGTATGTTTTTGATGATCGTATCTCGGTGCCAATTAATCATGTTAATCCAACTGTTATTAGTAAAGATTATTTTGATGGAACACCTTGTGAACGTTATGTCAATTGTGCAAATCCGTTTTGTAACAAACAAATTTTTGCTTCAGAAGAAAACGAAGCGAAGTATGTTCGAGGGTGCTCGCCTGAATGTCGTGCACATGAACGTAATCGCTATGTGCAAGAAAATGGTTTATCACGTCAAGAATGGGCAGAACGTTTAGAAGCTATTGGAGAATCCTTACCTCAAGTAGCAAATGTT

SEQ ID NO: 7256 - protein, 328 aa, Streptococcus agalactiae; identical to SEQ ID NO: 2676

SEQ ID NO: 7257 - protein, 303 aa, Streptococcus agalactiae
ATGACTTATGAATTATGTCTAGAATACGGTACTTATCCACTTAGACCTGTAGATGCTTGGGCTGATGAAATCAATACTGCACCTGCGTTTATTACTGAAGATAAAAAACTTTTAGAACTTTTAGAAGAAGTCAATACCTTATTCCATGAGCTCTTTTTAACGATAGAATGTTCCTTCCACTATATTGGTCATGACTTCCCAGAAAAAAGAGCAAAAATCACACAAATTTATCATGTGATTATCGAACATTTAAGCATACACTACCCTGAATATGACATTAAAATTGAATCATTATTAATGGGG

SEQ ID NO: 7258 - protein, 101 aa, Streptococcus agalactiae
MTYELCLEYGTYPLRPVDAWADEINTAPAFITEDKKLLELLEEVNTLFHELFLTIECSFHYIGHDFPEKRAKITQIYHVIIEHLSIHYPEYDIKIESLLMG

SEQ ID NO: 7259 - protein, 1199 aa, Streptococcus agalactiae
ATGTCTGCTACTGAGATTGGTATTATTACCTGTGCTAGCTACATGCTTATGGTCTCTCTAAATTTATTTCTGGTTTGATTTCAGATGAATCGAATTCTAAAATTTTCCTTCCAGTTGGTTTGTTTCTTACAGGACTAGTTAATGTGTTAATCGGTGTTATTCCATCTGTAATTACTAGTATCTGGCTCTTTACTATCATGTATCTTATTAATGGTTGGTTACAAGGGATGGGATACCCTCCTGGAGCGCGTACATTAGTCTATTGGTATGATAATAAAGAAAGAATTAAATATGCTACCATTTGGAATTTATCTCACAATTTTGGTGGAGCAATAGCGCCGATTTTAACTGGTGTAGGTCTAGCTCTTGCTGGTAATGATTCTCTTAATCAAGCGCGTGCTGCTTATTGGTTTCCAGGGGTGGTGGCTTGTCTTTTGGCTGTTCTTGTTTACTTTTTACAAGAAGATACTCCAGAATCTATCGGACTTCCGCCTATAGAAGAGTATCATAAAGAGCAATATACTAATGTTGTGGATTCAAGTGACATTTTAGAAGAGCCTGAAGTTTTGGGTATGGGCGAAATTATAAAAAAATATATTCTACCAAATACTAAACTGATGTGGGCATCCTTGTATTCAATATTTGTATATATTTTACGTTACGGTATTGTCTCATGGACTCCTAAGTTTTTAGCGACGAGTGTGCAAGATGGTGGAAAAGGTATTACTGCAACAGCTGGTATGGGTGGTTTTTCACTTTTTGAAATAGGTGGTATTATTGGGATGCTAACAGCAGGATATCTATCTGCCAAAGTGTTTAAAAACTCTAAACCTTTAACCAATGTAGCCTTCTTAGTTGTAGCAATCTTATTACTAGCTGCCTATTGGTTTATTCCAGCAGGACCTCAATATATGGCATTAGACTTCATTATTTTACTAGGTTTGGGGGCATCAATCTACGGTCCTGTTATGATGGTTGGCCTGTATGCTATGGAGTTAGTTCCAAAAGCAGCAGCTGGAGCAGCTTCAGGATTGACTGGCACATTTAGTTATGTCGGAGGAGCAACGATCGCTACTCTAGCTATTGGTATTATTATTGACCACTTTGGTTGGGGAGTAGCATTTATAATATTTGGTATTTCTGGATTTGCGGCTATTGTCTGTACCTTGCTTTCAAGAGATAAGAGTCTAGAGTATTGG

SEQ ID NO: 7260 - protein, 400 aa, Streptococcus agalactiae
MSATEIGIITCASYIAYGLSKFISGLISDESNSKIFLPVGLFLTGLVNVLIGVIPSVITSIWLFTIMYLINGWLQGMGYPPGARTLVYWYDNKERIKYATIWNLSHNFGGAIAPILTGVGLALAGNDSLNQARAAYWFPGVVACLLAVLVYFLQEDTPESIGLPPIEEYHKEQYTNVVDSSDILEEPEVLGMGEIIKKYILPNTKLMWASLYSIFVYILRYGIVSWTPKFLATSVQDGGKGITATAGMGGFSLFEIGGIIGMLTAGYLSAKVFKNSKPLTNVAFLVVAILLLAAYWFIPAGPQYMALDFIILLGLGASIYGPVMMVGLYAMELVPKAAAGAASGLTGTFSYVGGATIATLAIGIIIDHFGWGVAFIIFGISGFAAIVCTLLSRDKSLEYW

SEQ ID NO: 7261 - protein, 2262 aa, Streptococcus agalactiae
ATGACAAGAAATTTTACAACTTACGTTGGACAACAAGGAAAAGTATTATCAGAATTAACAAATGAAGAGATTTACGTTGAATTGTTAAATTTTGTAAAAGAAGAAGCTGCCGCTAAATCAAAAAATAGCTCTCAACGTAAGGTATACTATATTTCAGCTGAGTTTCTAATTGGTAAATTACTTTCAAATAATTTGATTAACTTAGGGATTTATAAAGATGTCAAAAAAGAGTTAGAACTTGTAGGTAAATCAATTGCTGAAATAGAAGATGTAGAGCCAGAACCATCACTTGGTAATGGTGGTTTAGGGCGTTTAGCATCATGTTTTATTGACTCGATTTCTTCTTTAGGTATTAATGGTGAAGGTGTTGGTTTAAACTATCACTGTGGGCTTTTCAAACAAGTATTTCGCAACAATCAACAAGAAGCAGAAGCTAACTACTGGATTGAGAATAATTCTTGGTTAGTACCAACAGATATTTCTTATGATGTTCCTTTCCGTGACTTTACTTTAAAATCACGCCTAGATAGAATTGATGTATTAGGTTATAAGAAAGATACTAAAAATTATTTGAACCTTTTTGATATTGATGGACTTGATTATAACCTTATTGAAAAAGGTATCACTTTTGATAAGACAGAAATCAAGAAGAATTTAACCTTGTTCTTGTATCCAGATGATTCAGATAAAAATGGAGAATTATTACGTATCTATCAGCAATATTTCATGGTTTCAAATGCTGCTCAATTATTAATTGATGAAGCAATCGAGCGTGGTTCAAACCTTCATGATTTAGCTGAATATGCTTATGTTCAAATTAATGACACTCACCCATCTATGGTCATCCCTGAGTTGATTCGTTTATTGACAGAAAAACATGGTTTTGAATTTGACGAAGCTGTGTCAGTTGTTCGCAATATGGTTGGCTATACAAACCATACCATCCTTGCAGAAGCTCTTGAAAAATGGCCTTTAGAGTATCTTAATGAGGTAGTACCCCACCTAGTAACAATCATTAAAAAATTAGATCAAATGATTCGTGAAGAGCAAACAAATCCAGAGGTTCAAATTATTGATGAAGCTGGACGTGTTCACATGGCGCATATGGATATCCACTTCTCAACAAGCGTTAATGGTGTAGCAGCATTACATACAGAAATCCTTAAAAATAGTGAATTAAAGGTTTTCTATGATATTTACCCAGATAAGTTTAACAATAAGACAAACGGTATTACATTCCGTCGCTGGTTGGAGTTTGCTAACCAAGATTTAGCAGATTACTTGAAAGAACTAATTGGGGATAGCTATCTTACTGATGCGACTCAGCTCGAAAAATTGTTAACTTATGCTGATAGCAATGAAGTTCATGATAAATTAGCTGCTATTAAATTTAAAAACAAACTGGCTCTTAAACGTTACCTTAAGGAAAATAAAGGTATTGAATTGGATGAATACTCAATTATTGATACACAAATCAAACGATTCCACGAATATAAGCGCCAACAAATGAATGCTTTATATGTTATTCATAAATACTTAGAAATTAAACGTGGGCATTTCCCATCACGTAAATTAACAGTTATTTTTGGTGGTAAAGCTGCTCCAGCCTATACTATTGCACAGGATATCATTCACTTAATTCTCTGCTTATCAGAATTAATTAATAATGATCCAGAAGTTAATAAATACCTTAATGTCCATTTAGTAGAAAATTACAATGTGACAGTAGCGGAAAAGTTAATCCCTGCAACAGATATTTCGGAACAAATTTCATTGGCTTCCAAAGAAGCATCTGGTACAGGTAACATGAAATTTATGTTGAATGGTGCTCTTACTCTTGGTACTATGGATGGGGCAAATGTTGAAATAGCTGAATTAGCTGGCAAAGAGAACATCTACACATTTGGTAAAGACTCTGATACTATCATTAATCTTTATGAAACATCTGGTTATCGTTCAAAAGATTACTATGATAAAGACAAAGTAATTCGTGAAGCTGTTGATTTTATCATTAGTGATGATATAGTGTCACTCGGTAATGCAGAACGACTAAAGAGATTGCATGATGAGTTAGTAGGTAAAGATTGGTTCATGACATTGATTGATTTGAAAGAATACATTGCTGTTAAAGAACAAGTGCTTGCTGATTATGAAGATTATGAATCATGGAATAAGAAAGTTATACACAATATTGCTAAAGCAGGGTTCTTCTCATCAGATCGTACAATCGAACAATATAATCAAGATATTTGGCATTCAAAT

SEQ ID NO: 7262 - protein, 754 aa, Streptococcus agalactiae
MTRNFTTYVGQQGKVLSELTNEEIYVELLNFVKEEAAAKSKNSSQRKVYYISAEFLIGKLLSNNLINLGIYKDVKKELELVGKSIAEIEDVEPEPSLGNGGLGRLASCFIDSISSLGINGEGVGLNYHCGLFKQVFRNNQQEAEANYWIENNSWLVPTDISYDVPFRDFTLKSRLDRIDVLGYKKDTKNYLNLFDIDGLDYNLIEKGITFDKTEIKKNLTLFLYPDDSDKNGELLRIYQQYFMVSNAAQLLIDEAIERGSNLHDLAEYAYVQINDTHPSMVIPELIRLLTEKHGFEFDEAVSVVRNMVGYTNHTILAEALEKWPLEYLNEVVPHLVTIIKKLDQMIREEQTNPEVQIIDEAGRVHMAHMDIHFSTSVNGVAALHTEILKNSELKVFYDIYPDKFNNKTNGITFRRWLEFANQDLADYLKELIGDSYLTDATQLEKLLTYADSNEVHDKLAAIKFKNKLALKRYLKENKGIELDEYSIIDTQIKRFHEYKRQQMNALYVIHKYLEIKRGHFPSRKLTVIFGGKAAPAYTIAQDIIHLILCLSELINNDPEVNKYLNVHLVENYNVTVAEKLIPATDISEQISLASKEASGTGNMKFMLNGALTLGTMDGANVEIAELAGKENIYTFGKDSDTIINLYETSGYRSKDYYDKDKVIREAVDFIISDDIVSLGNAERLKRLHDELVGKDWFMTLIDLKEYIAVKEQVLADYEDYESWNKKVIHNIAKAGFFSSDRTIEQYNQDIWHSN

SEQ ID NO: 7263 - protein, 1494 aa, Streptococcus agalactiae
ATGAAAAAACGTGCAAGTGGTGTCTTAATGCACATCACTTCTCTACCAGGTGATTTAGGTATTGGAACATTTGGACGAGAAGCCTACGCTTTTGTTGATTTTTTGGTCGAAACTGATCAAAAATTTTGGCAAATTCTTCCCTTAACAACAACAAGCTTCGGGGACTCTCCTTACCAGTCTTTTTCTGCAGTAGCTGGTAATACACATTTAATTGATTTTGATTTGCTAACGCTTGAAGGTTTCATTTCGAAAGATGACTACCAAAATATTAGTTTTGGACAGGATCCAGAAGTTGTTGATTATGCTGGTCTGTTTGAAAAACGCCGTCCAGTTTTAGAAAAAGCAGTTAAAAATTTCTTGCAAGAAGAGAGAGCTACGAGAATGCTATCTGATTTCTTGCAAGAAGAAAAATGGGTAACTGATTTTGCTGAATTTATGGCGATCAAAGAACATTTTGGTAATAAGGCGCTTCAAGAATGGGATGACAAGGCTATTATACGCCGCGAAGAAGAAGCCTTAGCAGGATATCGTCAAAAGCTTAGTGAAGTGATAAAATATCATGAAGTAACGCAATATTTCTTTTACAAACAATGGTTTGAGTTAAAAGAATATGCTAATGATAAAGGGATTCAAATTATCGGTGATATGCCAATCTACGTTTCTGCCGATAGTGTAGAAGTTTGGACAATGCCTGAACTGTTTAAATTAGATCGCGACAAACAACCACTTGCTATTGCTGGTGTACCAGCGGATGATTTTTCTGACGATGGTCAGCTTTGGGGCAATCCTATTTACAATTGGGATTACCACAAAGAGTCAGATTTTGACTGGTGGATTTATCGTATTCAATCTGGTGTTAAGATGTATGACTATTTGCGTATTGATCATTTTAAAGGTTTTTCAGATTATTGGGAAATTCGAGGAGATTATCAAACAGCTAATGATGGCTCATGGCAACCAGCTCCCGGTCCAGAATTATTTGCAACTATCAAAGAAAAATTAGGTGATTTACCTATTATTGCTGAGAATTTAGGCTATATTGATGAGAGAGCAGAGAGATTACTGGCTGGAACAGGGTTCCCAGGTATGAAAATCATGGAATTCGGTTTTTATGATACAACAGGAAATAGTATTGATATTCCTCATAACTACACAGAAAATACAATTGCATATGCTGGAACTCATGATAACGAAGTTATTAATGGCTGGTTTGAAAATCTTACAGTCGAACAGAAAGCTTATGCAGAAAATTACATGCGTCGTTTGCCAAATGAGCCCATTACTGAGACTGTACTGCGTACCTTGTATGCAACCGTTAGTCAAACAACGATTACATGTATGCAAGATCTACTAGATAAACCTGCAGATAGCCGTATGAACATGCCAAATACCGTTGGAGGTAACTGGCAATGGCGTATGAGAAAAGAAGACTTAACAGAAAATCGCAAAGCATTCTTAAAAGAGATTACAACTATTTATAATAGAGGGAATAAA

SEQ ID NO: 7264 - protein, 498 aa, Streptococcus agalactiae
MKKRASGVLMHITSLPGDLGIGTFGREAYAFVDFLVETDQKFWQILPLTTTSFGDSPYQSFSAVAGNTHLIDFDLLTLEGFISKDDYQNISFGQDPEVVDYAGLFEKRRPVLEKAVKNFLQEERATRMLSDFLQEEKWVTDFAEFMAIKEHFGNKALQEWDDKAIIRREEEALAGYRQKLSEVIKYHEVTQYFFYKQWFELKEYANDKGIQIIGDMPIYVSADSVEVWTMPELFKLDRDKQPLAIAGVPADDFSDDGQLWGNPIYNWDYHKESDFDWWIYRIQSGVKMYDYLRIDHFKGFSDYWEIRGDYQTANDGSWQPAPGPELFATIKEKLGDLPIIAENLGYIDERAERLLAGTGFPGMKIMEFGFYDTTGNSIDIPHNYTENTIAYAGTHDNEVINGWFENLTVEQKAYAENYMRRLPNEPITETVLRTLYATVSQTTITCMQDLLDKPADSRMNMPNTVGGNWQWRMRKEDLTENRKAFLKEITTIYNRGNK

SEQ ID NO: 7265 - protein, 1026 aa, Streptococcus agalactiae
ATGGTAACTATAAAAGATGTTGCTGCCAAAGCTGGTGTTAATCCATCGACAGTAAGTCGTGTACTAAAAGATAATGCATCTATTTCAAGTAAGACGAAAGAGCGCGTGAAAAAAGCTATGGAAGAGCTGGGCTATGTTCCTAATGTTGCAGCACAAATGTTGGCTAGTGGTTTAACGCAAAATATTGGAGTTATTTTTCCTCCACTGGTTTTACCAGACCGCTTAAGTGAACCCTTTTTCATGGAGATTCTTTCTACATTAACTAATGAAGCAAAAGAGCATGGGTTTACAGTTTCTATTGCAACAAGTATGTCTTCTGAGGAGTTGTTAGAACAAGTAAAATTAATGCATCTACAAAAACGAGTGGATGGTTTTATTGTTCTCTATTCGGATCAAAAAGATCCTATCAGAGAGTATTTATTAAAATATAAACTGCCCTTTGTTGTTGTTGGTGCTGCTAATGGCTATGAAAATGAGATTACTTATATTGATAATGATAATCAGCTGATGGGGAAATCTGCCATTGATTATCTCTATAAAAAAGGACATAAAAGCATCCAGTTTGTTACAGATGATTTAAATTCAGAAGTATCAGAAGAGCGCTATTTAGGGTATTTTAAAGGTGCTAGAAAGTTAGGTTTAAACCAAAAGCCAGCTCTTTTATTTGACAGAGGCAATCCGCAAGTTTTAGAGGAATTTATAAATAGAGTCAAAGAAGAAGAAACAACTGCTTTAATTGTTATTGGTGATACTGTCTCTGTTAGAGTAATGCAATTTCTTTCTTTCTATAAATTAAAAGTTCCAGATGACATTTCTATCATGACCTTTAATAATTCTCTCTTCTCACATCTGATTCATCCTTACCTAAGCACATTTGATATTAATGTTAATAATCTAGGAAGGACAAGCGTTCGTCGTCTGATTGACATCATTAAATCTCCAGACAAAGTCTTTAGTGAGACTATTATTGTGCCTTTTACTTTAGAAGAGCGTGAAAGTGTCCGAGATATTTCTAAAAATAATAAT

SEQ ID NO: 7266 - protein, 342 aa, Streptococcus agalactiae
MVTIKDVAAKAGVNPSTVSRVLKDNASISSKTKERVKKAMEELGYVPNVAAQMLASGLTQNIGVIFPPLVLPDRLSEPFFMEILSTLTNEAKEHGFTVSIATSMSSEELLEQVKLMHLQKRVDGFIVLYSDQKDPIREYLLKYKLPFVVVGAANGYENEITYIDNDNQLMGKSAIDYLYKKGHKSIQFVTDDLNSEVSEERYLGYFKGARKLGLNQKPALLFDRGNPQVLEEFINRVKEEETTALIVIGDTVSVRVMQFLSFYKLKVPDDISIMTFNNSLFSHLIHPYLSTFDINVNNLGRTSVRRLIDIIKSPDKVFSETIIVPFTLEERESVRDISKNNN

SEQ ID NO: 7267 - protein, 1245 aa, Streptococcus agalactiae
ATGGAAAAAAATACTTGGAAAAAATTACTTGTTAGTACTGCTGCTCTTTCAGTAGTTGCAGGAGGAGCAATTGCTGCTACTCACTCTAACTCAGTTGATGCTGCTTCAAAAACAACTATCAAACTTTGGGTCCCAACAGATTCAAAAGCGTCTTATAAAGCAATTGTTAAAAAATTCGAGAAGGAAAACAAAGGCGTTACTGTAAAAATGATTGAGTCTAATGACTCCAAAGCTCAAGAAAACGTAAAAAAAGACCCAAGCAAGGCAGCCGATGTATTCTCACTTCCACATGACCAACTTGGTCAATTAGTAGAATCTGGTGTTATCCAAGAAATTCCAGAGCAATACTCAAAAGAAATTGCTAAAAACGACACTAAACAATCACTTACTGGTGCACAATATAAAGGGAAAACTTATGCATTCCCATTTGGTATTGAATCTCAAGTTCTTTATTATAATAAAACAAAGTTAACTGCTGACGACGTTAAATCATACGAAACAATTACAAGCAAAGGGAAATTCGGTCAACAGCTTAAAGCAGCTAACTCATATGTAACAGGTCCTCTTTTCCTTTCTGTAGGCGACACTTTATTTGGTAAATCTGGTGAAGATGCTAAAGGCACTAACTGGGGTAATGAAGCAGGTGTTTCTGTCCTTAAATGGATTGCAGATCAAAAGAAAAATGATGGTTTTGTCAACTTGACAGCTGAAAATACAATGTCTAAATTTGGCGATGGTTCTGTTCATGCTTTTGAAAGTGGACCATGGGATTACGACGCTGCTAAAAAAGCTGTCGGTGAAGATAAAATCGGTGTTGCTGTTTACCCAACAATGAAAATCGGTGACAAAGAAGTTCAACAAAAAGCATTCTTGGGCGTTAAACTTTATGCCGTTAACCAAGCACCTGCTGGTTCAAACACTAAACGAATCTCAGCTAGCTACAAACTCGCTGCATATCTAACTAATGCTGAAAGTCAAAAAATTCAATTCGAAAAACGTCATATCGTTCCTGCTAACTCATCAATTCAATCTTCTGATAGCGTCCAAAAAGATGAACTTGCAAAAGCAGTTATCGAAATGGGTAGCTCAGATAAATATACAACGGTTATGCCTAAGTTGAGTCAAATGTCAACATTCTGGACAGAAAGTGCTGCTATTCTTAGCGATACTTACAGTGGTAAAATCAAATCTAGCGATTACCTTAAACGTCTAAAACAATTCGATAAAGACATCGCTAAAACAAAA

SEQ ID NO: 7268 - protein, 415 aa, Streptococcus agalactiae
MEKNTWKKLLVSTAALSVVAGGAIAATHSNSVDAASKTTIKLWVPTDSKASYKAIVKKFEKENKGVTVKMIESNDSKAQENVKKDPSKAADVFSLPHDQLGQLVESGVIQEIPEQYSKEIAKNDTKQSLTGAQYKGKTYAFPFGIESQVLYYNKTKLTADDVKSYETITSKGKFGQQLKAANSYVTGPLFLSVGDTLFGKSGEDAKGTNWGNEAGVSVLKWIADQKKNDGFVNLTAENTMSKFGDGSVHAFESGPWDYDAAKKAVGEDKIGVAVYPTMKIGDKEVQQKAFLGVKLYAVNQAPAGSNTKRISASYKLAAYLTNAESQKIQFEKRHIVPANSSIQSSDSVQKDELAKAVIEMGSSDKYTTVMPKLSQMSTFWTESAAILSDTYSGKIKSSDYLKRLKQFDKDIAKTK

SEQ ID NO: 7269 - protein, 1368 aa, Streptococcus agalactiae
ATGAATAAAAAACTGATCTCACTTGATGGTATGTCCCTAAAAGAGGTCTTTCAAAAAGGTGATTTAGCAACTAAACTATCATTCTTAATTATGGGACTTGCTAACCTCAAAAATAAACAAATTGTCAAGGGACTTTTATTTTTAATCAGTGAAATTCTGTTTTTAATTACCTTTGTTTACCAAGTTATCCCAGCTGTAAAAGGTCTTATTTCCTTAGGGACCCAAGAACAAGGTATGACAACTAAAACTGTGGATGGTATTAAAATCCAAGTTGCGACACAAGGTGATAACTCTATGTTAATGCTAATTTTTGGATTAGCTTCGCTTATCTTCTGTTGCGTATTTGCCTATATTTACTGGTCAAACATTAAAAGCGCAGCACATTTATTGACCTTGAAAGAAGAAGGAAGAGAAATTCCATCCTTCAAAAAAGATATTAAAAGCTTGACAGATGGACGCTTCCATATGACTTTAATGTCTATTCCTTTAATAGGGGTGCTTCTATTTACAATCCTTCCGTTAGTTTATATGATTTGTTTGGCATTTACTAACTATGATCATAACCACTTACCGCCAAAAAGTTTATTTGACTGGGTTGGTTTTGCTAACTTCGGTAATATCTTTAGCGGGCGTATGGCCAGTACTTTCTTCCCTGTTCTATCTTGGACATTAATTTGGGCTGTTTTCGCTACTGTAACGAATTTCTTCTTTGGTATTATTCTTGCCTTACTAATTAATACAAAAGGTTTGAAATTCAAAAAGATGTGGCGTACTATTTTTGTTATTACCATGGCTGTCCCTCAATTTATCTCTCTCTTAATCATGAGAAACCTCTTAAGTGACGCTGGACCGGTTAACGCCTTGTTAATAAAATGGGGACTTATTTCTTCAGCACATCCCCTTCCATTCCTTTCTGATCCGGTCTGGGCGAAATTCTCAATCATCTTTGTTAATATGTGGGTTGGTATTCCTGTAACAATGCTTGTTGCTACTGGTATCATCATGAATTTACCTGCAGAACAAATTGAAGCTGCTGAAATTGATGGGGCGAATAAGTTCCAAGTCTTTCAATCAATTACTTTCCCACAAATTTTGTTGATTATGACTCCTACTTTAATTCAACAATTTATCGGAAATATTAACAACTTCAACGTTATCTACCTACTCACTCAAGGTGGACCAACAAACTCAACATACTACCAAGCAGGTAGCACCGATTTACTTGTCACTTGGCTATACAATTTGACAGTAACTGCTGCAGATTATAACTTAGCATCTGTTGTTGGTATCTTAATCTTTATTCTTTCAGCAGTATTTAGTTTACTAGCTTACACAAGAACAAATTCTTACAAGGAAGGGGCAGCTAAA

SEQ ID NO: 7270 - protein, 456 aa, Streptococcus agalactiae
MNKKLISLDGMSLKEVFQKGDLATKLSFLIMGLANLKNKQIVKGLLFLISEILFLITFVYQVIPAVKGLISLGTQEQGMTTKTVDGIKIQVATQGDNSMLMLIFGLASLIFCCVFAYIYWSNIKSAAHLLTLKEEGREIPSFKKDIKSLTDGRFHMTLMSIPLIGVLLFTILPLVYMICLAFTNYDHNHLPPKSLFDWVGFANFGNIFSGRMASTFFPVLSWTLIWAVFATVTNFFFGIILALLINTKGLKFKKMWRTIFVITMAVPQFISLLIMRNLLSDAGPVNALLIKWGLISSAHPLPFLSDPVWAKFSIIFVNMWVGIPVTMLVATGIIMNLPAEQIEAAEIDGANKFQVFQSITFPQILLIMTPTLIQQFIGNINNFNVIYLLTQGGPTNSTYYQAGSTDLLVTWLYNLTVTAADYNLASVVGILIFILSAVFSLLAYTRTNSYKEGAAK

SEQ ID NO: 7271 - protein, 833 aa, Streptococcus agalactiae
ATGAATAAGAAAAAACGTCTTAACCTTACTTTTGTTTATATTTTATTGATAGTACTATCAATTATGTGGCTCTTTCCCATTGTTTGGGTCGTTCTCACAAGCTTCCGTGGTGAAGGAAGTGCCTTTGTCAACTACTTTATTCCTAAAACTTGGACATTAGACAACTACGCTAAACTCTTCACCCAAAACACATTCCCATTGGTCAATGGTTCTTAAATACATTATTTGTCGCTACATGTACTTGTATACTATCAACTTTAATCACTGTAGCAATGGCTTATTCTCTCAGCAGAATCAAATTCAAACACCGTAATGGTTTCCTAAAGCTAGCTTTAGTCTTGAATATGTTTCCTGGGTTCATGTCAATGATTGCAGTTTACTACATCCTAAAAGCTCTAAATCTAGACCAAACATTAACCGCTTTAATATTTGTCTATTCTGCAGGAGCAGCATTAACCTTCTACATCGCAAAAGGTTTCTTTGATACTATTCCATACTCTTTGGATGAGTCTGCTATGATTGATGGGGCGACCCGTTTGGATATTTTCCTTAAAATCACCCTACCATTGTCAAAACCCATTATCGTTTATACTGCATTAATCGCTTTTATGGGCCCTTGGATGGACTTTATCTTTGCAAAAGTTATTTTAGGTGATGCTACGAGCAAGTACACAGTCGCTATTGGTCTCTTTTCAATGTTGCAACAAGATACCATCAACCAGTGGTTCATGTCATTTACAGCAGGATCTGTTATTATTGCAATTCCAATCACAATACTTTTCATGTTCATGCAAAAATACTATGTTGAAGGTATTACAGGTGGATCTGTAAAA

SEQ ID NO: 7272 - protein, 278 aa, Streptococcus agalactiae
  VARIANT 67: Xaa = Any Amino Acid
MNKKKRLNLTFVYILLIVLSIMWLFPIVWVVLTSFRGEGSAFVNYFIPKTWTLDNYAKLFTQNTFPXGQWFLNTLFVATCTCILSTLITVAMAYSLSRIKFKHRNGFLKLALVLNMFPGFMSMIAVYYILKALNLDQTLTALIFVYSAGAALTFYIAKGFFDTIPYSLDESAMIDGATRLDIFLKITLPLSKPIIVYTALIAFMGPWMDFIFAKVILGDATSKYTVAIGLFSMLQQDTINQWFMSFTAGSVIIAIPITILFMFMQKYYVEGITGGSVK

SEQ ID NO: 7273 - protein, 1468 aa, Streptococcus agalactiae
ATGGAAAAAACAAAATCATTCTTTGGACATCCTCGTGGTTTGTCCACTCTTTTCTTTACTGAAATGTGGGAAAGATTCTCATACTATGGTATGCGTGCTATTTTGCTGTACTATATGTACTATAGTGTTTCTCAAGGTGGCCTTGGTATGGACAAGACTGTCGCTGCATCAATCATGGCTGTCTATGGTTCACTGGTTTATCTCTCATCAGTAATTGGTGGTTTTGTCAGCGACCGTATTCTAGGTAGTCGTAAAACTGTTCTGTATGGTGGTATTCTAATCATGCTAGGTCATATTGCTCTAGCTACACCATTTGGTCAAACAGCTCTATTCATTTCGATTGCTCTAATTATCCTTGGTACTGGACTATTAAAACCAAATGTATCAGAGATGGTTGGTAATTTATATGGAGAAAATGATTCTCGTCGTGATGCTGGTTTTAGTATCTTTGTTTTTGGTATTAACCTTGGTGCTTTTATTTCACCCATTGTAGTGGGGTACCTCGGACAAGAAGTAAATTTCCATCTTGGTTTCTCACTTGCTGCTATTGGTATGTTCTTTGGTCTCCTCCAATATACCTTAGATGGAAAAAAATATTTGACTGAAGAGAGTCTCAGACCAAACGATCCTTTAAGTCCTGAAGAAAAGTCCTCTCTATATAAAAAAGTTGGGCTTATCCTTATTGGTATTGTTATTGTACTTATTCTACTTCACTTGATGCATATGCTAACAATTGAAGTAATTATCGATATTTTTAGTATTATTGCAATCGCCATCCCAATTATTTATTTTATCAAGATTTTAAGTAGTAAAAAGATTTCTTCTGTTGAGCGTTCTCGAGTGTGGGCATATATCCCTCTCTTTATCGCCTCAATTCTATTTTGGTCAATTGAAAACAAGTTCAGTTGTCTTAGCCTTATTTGCAGATGAACAAACAAAACTTTACCTTAACTTCTTTGGGCATCATATTAATTTCCCATCAAGTTATTTCCAAAGTATGAACCCTCTCTTCATTATGCTTTATGTACCATTCTTTGCTTGGTTATGGGCTAAATGGGGAAGTAAGCAACCTTCATCACCTAAAAAATTTGCGTATGGACTTTTCTTTGCTGGAGCTTCATTCTTATGGATGATGCTACCAGGTTTACTCTTTGGAGTTAACGCTAAAGTAAGCCCTCTTTGGTTAACAATGAGTTGGGCTATTGTCATCGTTGGGGAAATGCTAATCTCACCAGTTGGATTATCAGCAACTAGTAAGCTCGCACCTAAAGCATTCCAAGCTCAAATGATGAGCATCTGGTTCTTAAGTAATGCTGCAGCACAAGCTATTAACGCTCAAATCGTTAAATTGTACACACCTGATACTCAAATTCTTTATTATGGTGTTGTTGGTGGTATAACAGTTGTATTTGGATTTATCCTCTTATTTTATGTTCCACGCATTGAAAAACTAATGTCTGGAGTTAAA

SEQ ID NO: 7274 - protein, 490 aa, Streptococcus agalactiae
  VARIANT 299: Xaa = Any Amino Acid
MEKTKSFFGHPRGLSTLFFTEMWERFSYYGMRAILLYYMYYSVSQGGLGMDKTVAASIMAVYGSLVYLSSVIGGFVSDRILGSRKTVLYGGILIMLGHIALATPFGQTALFISIALIILGTGLLKPNVSEMVGNLYGENDSRRDAGFSIFVFGINLGAFISPIVVGYLGQEVNFHLGFSLAAIGMFFGLLQYTLDGKKYLTEESLRPNDPLSPEEKSSLYKKVGLILIGIVIVLILLHLMHMLTIEVIIDIFSIIAIAIPIIYFIKILSSKKISSVERSRVWAYIPLFIASILFWSIEXQGSVVLALFADEQTKLYLNFFGHHINFPSSYFQSMNPLFIMLYVPFFAWLWAKWGSKQPSSPKKFAYGLFFAGASFLWMMLPGLLFGVNAKVSPLWLTMSWAIVIVGEMLISPVGLSATSKLAPKAFQAQMMSIWFLSNAAAQAINAQIVKLYTPDTQILYYGVVGGITVVFGFILLFYVPRIEKLMSGVK

SEQ ID NO: 7275 - protein, 462 aa, Streptococcus agalactiae
ATGTCACGCAGTCAAAAAGTTATTTTAACTAATATGTGTCTTATTGAAGATAATAAAGGACGTATTGTGATGCAAATCCGTGATCCTAAACGTTATTCTTGGTCAGGAGCTGCTTTACCAGGCGGCCATATTGAAGAAGGAGAAAGCTTGTATGATGCTCTCGTTCGAGAAGTTCACGAGGAGACAGGTTTAACAATAAGTAATCCCAAATTAGTTGGTATGAAGCATTGGTACACAGATGAAGGCATCCGCTATTTGGTATTCCTTTATAAAACATATGATTTTTCAGGTGAATTACAATCGTCAGATGAAGGTGATGTTGTATGGATTGAACGTTCACAACTTGATAAGATTGAACTAGCATATGATATGCTTAACCTTTTGAGAGTATTTGACGAAGATGACATCTCAGAGATGTTTTATAGTAAGCGACTTGAAGATGGTTTTATAAGAAAATTTTAT

SEQ ID NO: 7276 - protein, 154 aa, Streptococcus agalactiae
MSRSQKVILTNMCLIEDNKGRIVMQIRDPKRYSWSGAALPGGHIEEGESLYDALVREVHEETGLTISNPKLVGMKHWYTDEGIRYLVFLYKTYDFSGELQSSDEGDVVWIERSQLDKIELAYDMLNLLRVFDEDDISEMFYSKRLEDGFIRKFY

SEQ ID NO: 7277 - protein, 186 aa, Streptococcus agalactiae
TTGAAAAAAAAGAATTTACTTCAGGAGAGTATTAATAAACGTCTATCTGAAGAGCGATATCAAATTCCTAAAGAAAAAAGAGAGAAAAAACGATTTGACATGCAGCTTATTCTGATTATTTCTATTTTAATAGGGTTAATCATGTCTATTATCGGAATTATTCGATTTTTCTTAACCTACAGTAGT

SEQ ID NO: 7278 - protein, 62 aa, Streptococcus agalactiae; identical to SEQ ID NO: 2684

SEQ ID NO: 7279 - protein, 1323 aa, Streptococcus agalactiae
ATGATTAACTTATTTGATAGTTACACTCAATCAAGTTGGGATTTACATTTTTCCTTGATAAAATCAGGTTATATTAACCCTACTATAGCTTTGAATGATGATGGTTTTTTACCAGACGACGTAACATCACCCTATTTATATTACACTGGTTTTGCAAAGACAGGTGCTGGCCGCCCACTTTACTACAATGAACTTAGAGTTACTGATACATGGGAAATTATTGGTTTTAGTAGTGGTGCTGATATTGTTGACTTAGGTGTCAAAAAGGGCAGAATTATTTATGCAAACCCAAATCATAAGCGTCTAATAAAAGAGGTAGACTGGTTTGATGAGCAAGGTAGAGTCATTTTAAAAGATCGCTTTAATAAGTTTGGGTTCTGTTTTGCACAAACCTTTTATAACGCGGATGGTCAAGCGATTCAGACGTCATATTATAATAAGGATAGGCAAGAGGTTATATCAGAGAACCATATGACAGGGGATTATATTTTAAATGATAATAATCAGTTTAAGGTTTTTAAATCTAAAGTTGAATTTGTCATAAATTATCTTCAAGAAGCAAAATTTAACTTAGATAGAATCTTCTATAATTCTCTGTCAACACCATTTTTAGTAAGCTTTTACCTTAATCGTCTAGAGAGTAAAGATGTTCTCTTTTGGCAGGAGCCTCTCGTAGATGATATTCCAGGAAATATGCGCTTATTATTGAACAATCCTTCCCCAAACACTAAAATTGTAATTCAAAGTTATGAAGCTTATGCTAATGCTATGAGGTTATTAACTGACGAAGAACAAAAACAAGTTAGCTTTTTAGGATTTATGTATCCTCTTAAAGAGACAGAAAAATTACATAACCAAGCTCTTATTTTGACGAATTCTGATCAAATCGAAGCATTAGAAAGTTTAGTGACTTCTCTTCCTAATTTGACTTTTAACATAGGTGCTTTGACCGAGATGTCTAGTGATCTCATGAATTTTGGCAAATATGATAATGTTGTACTCTACCCAAATATCACAACAAATCAAATACAATATTTATCAAATATTTGTGCTTTTTATCTTGATATTAATCATCATAATGAGATATTATCAGCAGTTCGCTCTGCTTTTGAACATCAACAGTTAATTTTTGCTTTCGAAGAGACTAGTCATCAAATTCGTTTTGTATCACCTAAAAATATTTTTCCAAAAAAAGATATTTTTACATTTATTTCGCACTTGCAGCCACTAATTGGCAATAAATGTAATATAGAAAAAGCATTAAAACAGCAGCTTGAAGATTGTCATGTTTCAAGCTCTACTCAGTATCAATCTGTAATTAAT

SEQ ID NO: 7280 - protein, 441 aa, Streptococcus agalactiae
MINLFDSYTQSSWDLHFSLIKSGYINPTIALNDDGFLPDDVTSPYLYYTGFAKTGAGRPLYYNELRVTDTWEIIGFSSGADIVDLGVKKGRIIYANPNHKRLIKEVDWFDEQGRVILKDRFNKFGFCFAQTFYNADGQAIQTSYYNKDRQEVISENHMTGDYILNDNNQFKVFKSKVEFVINYLQEAKFNLDRIFYNSLSTPFLVSFYLNRLESKDVLFWQEPLVDDIPGNMRLLLNNPSPNTKIVIQSYEAYANAMRLLTDEEQKQVSFLGFMYPLKETEKLHNQALILTNSDQIEALESLVTSLPNLTFNIGALTEMSSDLMNFGKYDNVVLYPNITTNQIQYLSNICAFYLDINHHNEILSAVRSAFEHQQLIFAFEETSHQIRFVSPKNIFPKKDIFTFISHLQPLIGNKCNIEKALKQQLEDCHVSSSTQYQSVIN

SEQ ID NO: 7281 - protein, 1506 aa, Streptococcus agalactiae
ATGACAGTTTATAATATAAACCATGGAATTGGTTGGGCAAGCAGCGGTGTTGAGTACGCTCAAGCATACCGAGGTTCTGTTTTGAGAAAACTTGGAATTGATGCTAAGTTTATTTTTACAGATTTTTTTTCAGCTGATAATATTATTAGCCTCACGCGAAATATAGGTTTTCAGGATAAAGAAATTATTTGGTTATATAATTTTTTTTCAGATATTGAGCTTGCCCCGACAACTTTTAGTATAGAAGATTTGCAAAAACAATATCTTGGAAAACTTGTTCGAAAAGAAGATAAAGGTCGGGTAATCAAGTTTTTCTACGAAGATGAAAATATCTATTTAACAGTTTACCTTGATAATTTTAACAAGGATAAAGTGCATCGTGTAGAAATCGTTTCAAATAACAACCTTATCAGAAAAGATTATTATAGTTATACACGTACTTTCTCAGAGTATTACTATCCTAAAGATGGTGTAGCTCACCTTTATCAACGTAGATTCTACAATGAAGATGAAAGTACAGCCTTTTTGGAGATGGTAGAAAATAGCTCAAGTCGTTTTATTATCAATGGCAGACTTTTACCATCCAAAGTAGCTTTTTTTGATTATTTTTTGGAATCAATGACTTTCACTTCAAAAGATATTATTCTTTTGGATAGAGGAACTGATACCGCTCAGAGTCTTTTGCGCCATGGTAAACCCGCTAAGCTAGGGACTGTTGTTCATGCGGAACATTTTAGTGAGAATGCTGTGACTGCTGACACTATTTTATGGAATAACTATTACGATTATCAGTTTACTAACGCTAATAGATTTGATTTTTTTATTACCTCCACTGATAAACAAACAGAACTTTTGGAACAACAATTTAAACAATTTACAAATCATAATCCTAGAATTATAACTATCCCGGTAGGCTCAATTGACAATCTTAAAATGCCAATGGACAATCGCCGTCCGTACTCTATTTTGACAGCTTCACGCCTAGCTAGTGAAAAACATGTAGATTGGTTAGTACGTGCAGTTATTAGGATAAGAGAAATTCTTCCTGAAGTGACCTTTGATATCTATGGATCAGGTGGAGAAGAAGAAAAAATTAGAAATATTATAAATGCAGCCAATGCAACGGAATACATTCGATTGATGGGACATAAAAATCTCTCGAATGTTTATCAAAATTATGAGTTATATTTGACAGCTTCTAAAAGTGAGGGGTTTGGCTTAACTTTACTTGAAGCTATTGGCGCAGGACTTCCTTTGATTGGGTTTGATGTTCGTTATGGTAATCAAACTTTTATCAAAGACGGAGAAAATGGTTATCTAATTCCTCGATTTGATATGGATGATGAGGAAGCTATTGTAGAAGCTTTTAAAGAGAAAGTGTTACAATTATTCCAACAGGATCAAAAGGCTTTACGAGAAGCTTCTTACGCCATTGCCGAAGGATTCTTAACAAATGAAGTAGAAGGAAAATGGTATAACTTAGTTAAGGAGTTGGTACAAGATGAT

SEQ ID NO: 7282 - protein, 502 aa, Streptococcus agalactiae; identical to SEQ ID NO: 2688

SEQ ID NO: 7283 - protein, 2385 aa, Streptococcus agalactiae
ATGACAGCCTTTAATAGTTTATTTTCGTTAGATAAGAAACGTTTAAAAAAACTTCAGCGTACTTTAAATACTATCAATAGTTTAAAGGGCCAAATGGCAACACTATCAAATGAGGAGTTGCAAGCTAAGACAACTGAATTTAGAAAACGTTTAGTTAATGGGGAAACACTAGATGATATTTGTGCTGAAGCTTTTGCTGTTGTTAGGGAAGCTGATAAGCGCGTATTAGGTCTATTTCCGTATGATGTACAGGTAATCGGTGGTCTTGTTCTGCACCAAGGAAATACTGCTGAGATGAAAACTGGTGAAGGAAAAACATTAACTGCCACTATGCCTTTGTATCTCAATGCTTTAGAAGGGAAGGGGGCAATGTTGCTGACTAATAATTCCTACCTTGCTATTCGAGATGCGGAAGAAATGGGAAAAGTATATCGTTTTTTAGGATTGAGTGTCGGTGTGGGAGTTTCTGATAATGAGGAAGAGGATAGAGATGCTGCGACTAAGCGAGCTGTTTATAGTTCGGATATTGTCTATAGTACAAGTAGTGCACTAGGCTTTGATTATTTAATTGATAACCTAGCTTCATCTAAATCTCAAAAATATATGCCCAAGTTACATTATGCTATTGTAGATGAAGCTGATGCAGTTCTTCTAGATATGGCCCAGACTCCTTTAGTTATTTCAGGTTCACCTCGAGTACAATCTAATCTCTATAAAATAGCAGATGAACTAATTCTTAGTTTTGAAGAACAAGTTGATTATTATTTTGACAAAGAGCGTCAGGAAGTGTGGATAAAAAACCAGGGTGTTCGTGAAGCTGAGAGATATTTTAGAATCCCTCATTTTTATAAACAGTCTAATCGAGAACTTGTGCGACATTTGAACTTATCTTTAAAAGCACATAAATTATTTGAACGAGGAAAAGATTATGTGGTTGACGATGGTGAAATCAAGTTGCTAGATGCGACTAATGGCCGTGTTTTAGAAGGTACTAAACTTCAAGGAGGTGTTCATCAAGCTATTGAGCAAAAAGAGCATCTTAATGTCACACCAGAGTCTCGAGCAATGGCTTCCATTACCTATCAAAATCTTTTTAGAATGTTTACTAAATTGGCTGGAATGACAGGAACTGGAAAAACTGCTGAAAAAGAGTTTATTGAGGTCTATGATATGGAAGTAGTTAGAATTCCAACTAATTCTCCTGTTAGACGAATTGACTATCCTGATAAGATTTATACAACCTTACCAGAGAAAATCCATGCAACGATTGAATTTGTTAAACAGGTTCATGATACAGGACAACCAATCCTACTAGTTGCCGGTTCTGTGAGAATGTCAGAGCTATTCTCAGAATTATTATTACTAAGTGGTATCCCTCATAGCCTGTTAAATGCTCAAAGTGCGGTTAAGGAAGCACAGATGATTGCAGAAGCAGGGCAAAAAGGTGCGGTCACTGTTGCAACGAATATGGCTGGTCGTGGTACAGATATTAAGTTAGGTAAGGGAGTATCAGAATTAGGTGGTCTTGCAGTTATTGGAACGGAGAGAATGAAGAGTCAAAGAATGGATTTACAATTAAGGGGACGTTCGGGCCGACAAGGCGATATTGGTTTTAGTCAATTTTTTGTATCATTTGAAGATGATCTAATGATAGAATCAGGTCCTAAATGGGCGCAAGATTACTTTAGGAAAAATCGTGACAAAGTTAATCCAGAAAAACCTAAAGCCTTAGGTCAGAGAAGATTTCAGAAGTTATTCCAGCAAACTCAGGAAGCTAGTGACGGTAAGGGAGAGTCTGCACGTAGTCAAACGATAGAGTTTGATTCGAGTGTACAGCTTCAGCGAGAGTATGTTTATCGTGAGAGAAATGCTTTGATCAATGGAGAAAGTGGACATTTTAGTCCAAGACAGATTATTGATACAGTGATTTCTTCCTTCATTGCTTATTTAGATGGTGAAGTAGAAAAAGAAGAACTCATTTTTGAAGTAAATCGTTTTATATTTGATAATATGTCTTACAATCTTCAAGGGATTTCTAAAGAGATGTCACTTGAAGAAATTAAAAACTATTTATTCAAAATAGCCGATGAGATTCTTCGAGAAAAGCATAATTTGCTTGGTGATAGTTTTGGTGACTTTGAACGTACTGCTGCTTTAAAAGCGATTGATGAAGCTTGGATTGAAGAAGTAGATTATCTACAACAATTACGTACTGTGGCAACAGCTCGTCAAACGGCACAGCGTAACCCGGTTTTCGAATATCATAAAGAAGCATATAAATCCTACAATATCATGAAAAAAGAAATTCGTGAACAAACTTTTAGAAATCTACTTTTGAGTGAAGTATCCTTCAATGAGAATGGAGATCTTCAAATTTATTTTATA

SEQ ID NO: 7284 - protein, 795 aa, Streptococcus agalactiae
MTAFNSLFSLDKKRLKKLQRTLNTINSLKGQMATLSNEELQAKTTEFRKRLVNGETLDDICAEAFAVVREADKRVLGLFPYDVQVIGGLVLHQGNTAEMKTGEGKTLTATMPLYLNALEGKGAMLLTNNSYLAIRDAEEMGKVYRFLGLSVGVGVSDNEEEDRDAATKRAVYSSDIVYSTSSALGFDYLIDNLASSKSQKYMPKLHYAIVDEADAVLLDMAQTPLVISGSPRVQSNLYKIADELILSFEEQVDYYFDKERQEVWIKNQGVREAERYFRIPHFYKQSNRELVRHLNLSLKAHKLFERGKDYVVDDGEIKLLDATNGRVLEGTKLQGGVHQAIEQKEHLNVTPESRAMASITYQNLFRMFTKLAGMTGTGKTAEKEFIEVYDMEVVRIPTNSPVRRIDYPDKIYTTLPEKIHATIEFVKQVHDTGQPILLVAGSVRMSELFSELLLLSGIPHSLLNAQSAVKEAQMIAEAGQKGAVTVATNMAGRGTDIKLGKGVSELGGLAVIGTERMKSQRMDLQLRGRSGRQGDIGFSQFFVSFEDDLMIESGPKWAQDYFRKNRDKVNPEKPKALGQRRFQKLFQQTQEASDGKGESARSQTIEFDSSVQLQREYVYRERNALINGESGHFSPRQIIDTVISSFIAYLDGEVEKEELIFEVNRFIFDNMSYNLQGISKEMSLEEIKNYLFKIADEILREKHNLLGDSFGDFERTAALKAIDEAWIEEVDYLQQLRTVATARQTAQRNPVFEYHKEAYKSYNIMKKEIREQTFRNLLLSEVSFNENGDLQIYFI

SEQ ID NO: 7285 - protein, 990 aa, Streptococcus agalactiae
ATGAGTACGATAAGCTACATTTATTGGGATGATTTTTCAAGGTTTTCTTATAATTTTGGAACAAAATTACAATTTTTAGGAAAATCAGTATGCTTTGAAAATCCATTAGCTCCTTCTAGCACAAACTTGTATACATGGAGCTCCCAGACTAATTATCAGTCAAAAAGAATTTCTCCTAACTTACCTTTACTAAGAAAGGGAACTCGTTATAGCTTGTCATTAAATGCAGAACTCGATTTAGTTAGCTCTCTTTTTGTTCGCATTGAATTTTACAATCGCTTTAATGAGTCTGTTGGTTTTGAACTGTTAAAAAAAGATAGTATTATTTTTATCTATCCTAAAGAGGCTTATACCTATACCATTAGTTTGATTAATGCAGGTTGTAGCGATTTTACTTTTCATTATTTGAAACTTGAGGAAGTTACAGATAGCGTTATTCAGGAGAAAAATCTATCGACAGAGTTTACTATTGAAGAACATCAAGACGTTTTAAATCTTCTTTTGGTCGAGAAAAAAGATAGTGTATATATTAATAAAATAGAAAGCATTTCTCAATTGCAACAGAAAGTCGAGTTGGTCAGCAATCCCTCATTAAATTCTGATAGTTTGATATTACCTGAGTTGGAAAAGGGGTTAGAAGATGCATTAAAAGTTTTTCCTAACATTAAGATTAATGTCATTGCGTATGGAACACAAGGTAATTTTGCTGCTTTATATTATGCTAAAAAATTTCCCAGAATAACTGCCTATATTAATGATTGTTTTGCTCCTTTCGGAATTTTACTTAAATCCTTACCACACTTGACTGCCAAACAACAAATATTTCTTAGAGAAGTCTGGGATACGAGAGAGACGTCTCCAAATGTAAAGCACTATGGATTGGTTTCAGAAAATTCCTCTTTAAATTTAGTATCAATGATCTTATCTGGTAATGAACATCTACCTTACCTCACACTTTTAAAAAAGCAGGACGACAATTATGACAGCCTT

SEQ ID NO: 7286 - protein, 330 aa, Streptococcus agalactiae; identical to SEQ ID NO: 2692

SEQ ID NO: 7287 - protein, 1557 aa, Streptococcus agalactiae
ATGTCAAAAATAAAACTTACAATTCTTCAAGTTGGTGAAGAGAACTGGGCAACTAAAGAGAATATCCCTAATAATATGGAATGGCTCTTTATTAAACCAGATCAAATTTCTGACTTTGTAACTACAGAAAATAATTATCTTACATCGTCAAAGTTATTGCAAAAACTACCTCGAAAAATATCTGCTCTTTTGTTGACAGAGCAAACTTATGGACCAGAGTTATCTAGTTTATCGTCATTCTTTGAGGTTTATGAAGTATTTTATCCTAAAGATAAACATGCTACGGGGATAACAGAAGAGTTTTTACGCTCGAAAATGGCCCAACGATATGATAGTAGCTCTCCAGATCAGCTAATTCGTCAATTTTATAAAGGGCTTTTTATAGGACAATACGGAGAGAAACTTCAAGTTTCACAAATACAAATTAGAAATGATTTTGAAGGTGTAGTAAACTATCAGGGAAATAACTATCTTGAATTAGAAGGGCAATTTGGTGAGAACTATAGTTTTTTGCTTAATTTTGCTTACAATATTCCATTTTCATCGGATTTTTATAATGAGTTATTTTTAGAACACATTATAGAGGGTGATATAGATATTCGATTGGTTATCTCGTTGATTGTTGATGGTTCTGTTGATGATATTGCTAAAGAGTGGTACTTTGAGAAGGAAGACCTAAATCAACTTATTTCTTTAGAGTCCGATATTAGTGGTAGCCTTGCAGTTAAACTTTTTGCTAAGGGAAAGGGTATCGTTAAGTTAGGTCCATTGCACCGTCGTAATGGTAGAGGAGGATTGGGCACATTTCTACTAGGAGGAGAACGTCACATAGATGCTATAGGTCATGAATTTATGACTTATTTTGATCCAGTAGATTTCAAACCACCTCTAACTGTTTATTTTTCGGGATTTCGTTCAGCTGAAGGCTTTGAGGGATTCTGGATGATGAAGAGTATGAAGACTCCATTCATGTTAATTTGTGATCCACGATTACAAGGTGGTGCCTTTTATATAGGAAGCAAAGAATATGAACAAAAAATAGTTGATGCTATTCAAGAAAAACTGGCCTTTTTAAATTTTAGTTCTGATCAGTTAATTTTATCCGGACTTTCAATGGGGACTTATGGTGCTACTTACCATGGTGCTAAGCTAAATCCTCATGCTATTATTATTGGTAAACCAATATTTAATTTAGGAACAGTTGCTCAACGTGAAAGATTAGAGAGACCAGATGGATTTGCTACTTCATTAGATATTCAACTACTCAATCAAGGTGACTTGACCAGTTCCTCTTCTGAGAAGTTAAATAACTATTTTTGGAAATCTATAGAAGAAGGAGATTTTTCAAATACGACTTTTGCCTTAGCCTATATGAAAAACGATGACTATGATGCGACTGCCTTTTCTGATTTATTGCAATATTTTAGAGGAAAGAAGCATAAGATATTAGGCAGAGGTTGGGATGGCCGACATGGTGATTGTTCTGCAGAAGTTGGTGCATGGTTTACAAGTCAGTATAGGCGAATGCTATCTAATGATTTTGGAAGGAAAGAAGAA

SEQ ID NO: 7288 - protein, 519 aa, Streptococcus agalactiae; identical to SEQ ID NO: 2694

SEQ ID NO: 7289 - protein, 1542 aa, Streptococcus agalactiae
ATGTTTCATTTTATTCCATCTTGGTATAATGAAAATCGTACTTGGTATGATAATAATTACTTGTGGTATTTCAAGCCGACTAATGTCGGTTTTGATGATACTATCAACCAAATGAAGATGTTTGATTATGCTGGAAAAGAGAGTAGATTAGTTGTCTTAAACTATATGCCCAATTTACGTTATTATTTACATCGCTATGACTTGTTAGAATCAGGTTATTATTCAGTTTTTGATGATATTCAAGAAATTGGGAATGTAAGACAGCAAATGATTGACTTCCGACAACTCAATTGGCCTGAAGGGGTGGACTTTACCTATACTCCGTTTATAGTTTTGGTAAAAAAGTCAGGAGATTTAATTGCTAAGGTTCAATTTGGTGAAGAAGGAAATTTAACGCATATTGATTATTTTGCAAATGAACAAATAGCTAAGAAATACCTCTTTGATGATAGAGGATTTCTATCTAGTATTCTCTATTATGATAATGGTGGTGAAGCCTATCAAGATTATTTAGCACCATCAGGGGAAAGGATCATGAGAGAATACCTAAGAGAAGGTGACCACCATGTTGAAATTAATCCTAAGAAAGCTATTCATTTTTTAAAGTTATCTTACTCCGATATTGAAGAGTTGATTAGAGAGAAATATCTGACCTATCTCCATAAAGAAGTTAGTAAATCAGATACTATCATTGTTAGCTTTAATCAAGTTCATAACGCATTTATTGTTGGGAACACTAGTAAAGGAAATTTAATATTATCTGTTTTCTCGGAGAGGAATAATGCTCACAATGTATTGGAGGATTACTCTTCCTTATCTCGAGCAGACGCTATTATTTGTGATAGACTAGATATTGCTGCACAATTGAAAGAAAAAATAGATAAACCAGTTGTTCATGTTTCTCCCTTTGATACGCGTTTAGCTTTGGGAAAAAGTAATCAAGTTAGAGATTTAGAAATATATTTTGTCGTAGATAGACTTTCCCATAAAGAATTGCAAAAGTCTTTAACATCCTTATATAAGGTTATGCTCAAAAATAATGATATAAAAGTAACATTTGTCAGCTACGAACGAGAATTTGAAAGTCGGCAATTGACATATGACTACCTTAAAGAAGCAACAAAAGTTTTTGATCAGAAATTCTTTAGTTTATCAGACGATGATGCCAATCAAGTTCTTATGCAATCTGATGAAGTAGAAAAGGAAAAAACACGCCTTTCTTTTACCCATCCTTTGTCAGAAACAGATATCATAAACCGGTTAGAGTATGTCCGTTTGATTATTGATATCTCGAAAATACCAGACTTATACACGCAAATTGCAGGGATAAGTTCAGGTATCCCTCAGATAAATACAATATTAACAGAATTTGTTGAACACAGGAAAAACGGTTACGTTATTGAAGAGATCCAAGAATTGGAAAAGGCAATTCCTTATTATTGTGAACAATTAACTAATTGGAACCGTTCTTTAATTTATTCTATTGATAAAATCAATGACTATACAGGTGGTCAATTGGTAGAAAGAATTATAAATAGTTAT

SEQ ID NO: 7290 - protein, 514 aa, Streptococcus agalactiae
MFHFIPSWYNENRTWYDNNYLWYFKPTNVGFDDTINQMKMFDYAGKESRLVVLNYMPNLRYYLHRYDLLESGYYSVFDDIQEIGNVRQQMIDFRQLNWPEGVDFTYTPFIVLVKKSGDLIAKVQFGEEGNLTHIDYFANEQIAKKYLFDDRGFLSSILYYDNGGEAYQDYLAPSGERIMREYLREGDHHVEINPKKAIHFLKLSYSDIEELIREKYLTYLHKEVSKSDTIIVSFNQVHNAFIVGNTSKGNLILSVFSERNNAHNVLEDYSSLSRADAIICDRLDIAAQLKEKIDKPVVHVSPFDTRLALGKSNQVRDLEIYFVVDRLSHKELQKSLTSLYKVMLKNNDIKVTFVSYEREFESRQLTYDYLKEATKVFDQKFFSLSDDDANQVLMQSDEVEKEKTRLSFTHPLSETDIINRLEYVRLIIDISKIPDLYTQIAGISSGIPQINTILTEFVEHRKNGYVIEEIQELEKAIPYYCEQLTNWNRSLIYSIDKINDYTGGQLVERIINSY

SEQ ID NO: 7291 - protein, 1227 aa, Streptococcus agalactiae
TTGAAATTACTATATATTTTTGAAAAAAATATTATTCTTCGTAAAATATTGATAACATTTTCATTAATAATCATTTTTTTACTTGGTCGCTATGTTCCAATACCTGGTGTCTTGATTTCTGCTTATAAGGGACAAGACAATAACTTTGCGACGCTTTATTCAACAGTAACTGGTGGTAATTTGTCTCAGGTTGGGGTCTTTTCATTGGGTATTGGTCCTATGATGACCACAATGATTTTACTAAGACTATTTACGATTGGTAAATACTCTAGTGGAGTATCTCAAAAAGTTCAACAGTTTCGCCAAAATGTGGTGATGCTTGTCATAGCAATTATTCAAGGGCTAGCCATAGCCATATCTTTTCAATATCATAATGGTTTTTCTCTGACCAAATTATTACTCGCGACAATGATACTTGTGACTGGTGCATATATTATTTCCTGGATTGGTAATCTAAATGCGGAATACGGGTTTGGTGGAATGACTATTTTAGTGGTGGTAGGTATGCTTGTTGGGCAATTTAATAATATTCCTCTTATTTTTGAATTATTCCAAGATGGTTATCAACTTGCTATCATCTTATTTCTTTTGTGGACACTAGTAGCAATGTACTTAATGATAACTTTTGAACGTTCAGAATATCGTATACCAGTAATGCGTACTTCAATCCATAATCGTCTCGTTGATGATGCCTACATGCCAATAAAAGTAAATGCTTCGGGGGGGATGGCATTTATGTATGTTTATACCTTACTAATGTTCCCCCAGTATATTATTATTTTACTAAGAAGTATTTTCCCAACTAATCCAGATATCACATCATACAATGACTATTTTAGTTTATCTTCTATTCAGGGAGTGGTTATTTATATGATTTTAATGCTTGTTTTATCAGTTGCATTTACTTTTGTGAATATCGATCCGACTAAAATTTCTGAGGCAATGCGAGAAAGTGGTGATTTTATTCCTAATTATAGACCTGGTAAAGAAACACAAAGTTATTTATCGAAAATCTGTTATTTATTTGGAACTTTTAGTGGTTTTTTCATGGCTTTCTTAGGAGGGGTACCATTATTATTTGCTCTTGGAAATGATGATCTTAGGACAGTTTCATCTATGACAGGGATTTTTATGATGATCACAGGGATGTCATTTATGATATTGGATGAATTCCAAGTTATTCGTATTCGTAAACAATACACTTCTGTATTTGAAAATGAGGAGAAT

SEQ ID NO: 7292 - protein, 409 aa, Streptococcus agalactiae
MKLLYIFEKNIILRKILITFSLIIIFLLGRYVPIPGVLISAYKGQDNNFATLYSTVTGGNLSQVGVFSLGIGPMMTTMILLRLFTIGKYSSGVSQKVQQFRQNVVMLVIAIIQGLAIAISFQYHNGFSLTKLLLATMILVTGAYIISWIGNLNAEYGFGGMTILVVVGMLVGQFNNIPLIFELFQDGYQLAIILFLLWTLVAMYLMITFERSEYRIPVMRTSIHNRLVDDAYMPIKVNASGGMAFMYVYTLLMFPQYIIILLRSIFPTNPDITSYNDYFSLSSIQGVVIYMILMLVLSVAFTFVNIDPTKISEAMRESGDFIPNYRPGKETQSYLSKICYLFGTFSGFFMAFLGGVPLLFALGNDDLRTVSSMTGIFMMITGMSFMILDEFQVIRIRKQYTSVFENEEN

SEQ ID NO: 7293 - protein, 1194 aa, Streptococcus agalactiae
ATGAGAGTTATTAAAGTAAAAACAATTTCGGAAACTTTAGATTATATTTCTAAACATACCGCTTCGGTAGCGCGTTTTGGTGATGGAGAAATTGATATTATTGCGGGGAATTCTATTCCTTACCAGGTTTATGATTCTGAACTTGCTAAGCGATTAGAACGTTTATTAAATCGACAGAGTAATGAGAAGTTAGTTATCTGTGTAAGTGATGTTTTTGATAATTTAGGTAGATACAACGATTTTTCACAACAATTTTGGAGGGATCATCTATATCAGTATAATGATTTGTACCAAAAAAATTGTCAGGCTGAATGGTATGGTTCAACTTTTATTTCTAGACCCTATATGGATTTACTGGATAAGAGTTTGTCAGTAACGTACTTTGAACAGCTAAAAGCATTATGGAAAAATAAAGATATTTTAATTGTCGAGGGTGAGACTTCTCGTTCAGGCGTTGGCAATGACTTATTTAATGATGCCAATACTATTTCGCGTATCATTTGTCCTTCGAAAGATGCATTTTCATCTTTTTATGAAATCAAGGAAACTATACTTGAACATAGTAGAGGTAAGCTAATTTTACTTATGCTTGGTCCAACTGCAAAGCTATTAGCTGAAGATTTATCGCAGCTAGGACATCAAGCTATTGATTTAGGTCATATCGATTCAGAATATGAGTGGTTTAAGATGGGAGCAGTTTCTAAGGTGAAACTTTCTCATAAACATACGGCAGAACATAATTTTGACGAAGATATTACTTTAATAGAAGACAATAGTTACGAAAATCAAATTGTATCAAAAATTGGTACATCAGATAGACAGTACGCTTTGACAGTGACGTTAACAGATGATATATGGGAGCTAGAACATTTATTACAAAGATGTCCTAATACTGATTTTCATATTGCTGCCCCAGTTTATTGTTCGGATAGACTTAAGCAGTTAGTAGGTTATCCAAATTATTACCTACATGAAGCTATTACTGAAGAGCAATTCGAAGTACTCCTATTAAATAGCGATATATATTTAGATATTAATCATGGTGAAGAAGTTTGGAATGTTGTTGATAGATGTATAACTGAGGGTAAAACTATATATGGAATCAGACGGGCAAGAAAAGATAATCAATATATTTCTTTTGAGCGAACCATGGATGATTTTGAATATTTGTGTGACACTATTAAACAAAATAGA

SEQ ID NO: 7294 - protein, 398 aa, Streptococcus agalactiae; identical to SEQ ID NO: 2700

SEQ ID NO: 7295 - protein, 885 aa, Streptococcus agalactiae
ATGGAGGCAATAGTGACTGATAAATTAGTTTCTGTTATTATTCCAGTCTATAATGCAGCACCATATTTAGAGGGGTGTGTAAATACCATTTTAGGACAAACATACCAAGTTTTTGAAATTCTACTGATAGATGACGGTTCTACAGATACATCTGCTAGTATCTGCGATCAATTATCCCTAAGAGATAACCGTATTAGAGTTTTCCATATCGAAAATGGCGGTGCTTCTAAAGCTAGAAACTTTGGATTAGCACGAATTAGTCCAGAGAGCCAATTTGTTACGTTTGTTGATTCGGACGATTGGGTAAAGGAAAATTATTTGGAAGTACTGCTAGCTCAGCAAGAAAAATATAATGCTGATATTGTTATCAGTAATTACTATATCTACAGAGAAACAGAAGATATTTTTGGTTACTACATCACTGACAAAGATTTTGTTATCGAAGAAATCTCTGCTCAAACAGCTATTGATAGACAAGTGCATTGGCATTTAAATAGTTCAGTATTCATCGTTATTTGGGGGAAATTATATCGAAGAGAACTATTTGATACCATCACCTTCCCAATAGATAAAGTATTTGAAGATGAGTTGGTAAGTGTTTTACTTTTTATAAAAAGTAAAAAAACAATTTTAGTTAATGGAAGCTATTATGGCTATAGAATTCGTCCAAATAGCATTATGACATCGGCGTTTTCATCCAAAAGAGCAGAGGATCTTATTTATATTTTTGATAGTAAATTGTCGGAGATTATACTATCAGGATTGGATTCAACTGCAACTGTAGAGAGATATTTTTGGTTAATGCGTGACTATAAACAGCGCTTAGAACAAGAAAATTTACAGAAAACAATAATATATAAAGTGATATCAAATCGGTTATCAAGG

SEQ ID NO: 7296 - protein, 295 aa, Streptococcus agalactiae; identical to SEQ ID NO: 2702

SEQ ID NO: 7297 - protein, 1182 aa, Streptococcus agalactiae
GTGAAAAATAACGTTATTTGTTTGGCAGGTGATAATAAATCTTTAAATCAGATCCAAACAGTTATAAAATCGATTTTATGTCACAATGATAGAGTAAGTATTTATATTTTAAATCAAGATATAGCTTCAGAATGGTTTAGAAATATTCAAAGACGTTTATTAAATAGTCATAGTTGTATTTTTGATATAAAACTCTTTGATGATACTTTTAAGGAATTTAAAACGCCCCGTGCCCATATTACCTATATGGCTTATGCAAGGTACTACATTCCGCAACTGATTGATGCAGAGAAAGTTCTTTATTTAGATATTGATACTTTGGTTGTTGATAACTTAGATAAGTTGTTTGAGATAGAATTAGGGGACTACCCGATAGCAGCTATCTTAGATGGAGACGGTATTCATTTTAACTCAGGTGTTATGCTAATAAACTCGCTTTACTGGATGAGATATCGAGTAACAGAAAAACTTCTGGAAATAACAGAACGAGAATTGGATAATGGAATTTTTGGAGACCAAGGGGTTCTCAATCTTCTTTTTGATAATAATTGGCTTAAGTTAGAAGATAAGTATAATGCTCAAGTTGGAAATGATTTAGGTGCCTTTTATGAAAATTGGCAAGGGTATTTTGATCGTAACTTTGAATCGCCTACTATTATCCATTACTGTACTCATGATAAACCATGGAATACTTTTTCTTCTTCAAGGTTTAGGGAGACATGGTGGCAATATGAGCAACTAGATTGGAATGAGGTGTTTAATTTTGAAACGTATCTGTTACCTGAGCCAACATTTGAAAAACACTTCTTTACTTTCACAACGTCCGTGGATTTGCTTTATATTGAAGAATTGGTTGAACTATTCCCCAATAGTTGCTTCCATATAGCTGCTTGGACCTCTTTTGGCCCAAGATTACTTAAGTTAGCCACAAACTCTAACGTTCGTCTGTATCCTTCAATAACCAGCCCACTTTTTGAACAACTAATGACTAAAGCAAATTATTACCTTGATATCTCAACTTCTTGGAAGGAAATACAATTTTGTCAAAAAGCTATTGAGAAATCAATTCCGATATTGAGTTTTAATGAAGCAGTGACATTTGAATATAGGGAGTTAAGTCATTGCTTTATTAATTTGGAGGATATGCGACAGTTTTTATGTAAAAATGGAGGCAATAGTGAC

SEQ ID NO: 7298 - protein, 394 aa, Streptococcus agalactiae; identical to SEQ ID NO: 2704

SEQ ID NO: 7299 - protein, 1239 aa, Streptococcus agalactiae
ATGAAAAATAGAAAAGCTATCGCGTTAGCGGCAGATTTTGGCTATCAAGAGCAAGTTAAGACTATAATTAAATCAATATGCTTTCATAATCAATTTATTGATTTTTATATCTTAAATGACGATTTTCCAGTTGAATGGTTTCAAATGATGGAATATCATTTATCTAAAATGGATTGCACAATATCTAACACTAAAATTTTTAATGAAGAAATTAAACATTTTAAATTTCAAAAACCGATGCCCTACCCTACTTACTTTCGATACTTTATACCTGAAGTTATTCATGAAGATAAGGTACTATATTTAGACTGTGATATGATTATCACCAGTGATTTAACATCGATATTTACTCTTGATATTTCAAAATATGGTGTAGCGGCTGTTCGAGATGATTTGCTCGAAGAATATGATGGTAAAGAAGATTATTTTAATTCAGGTTTGCTATTAATTAATAATATTTTTTGGCGAGAACAAGGGATTAGTCAGCGACTGTTAGATTATACTAGAGAAAACCAAGGGGCTCTTCAATATCATGACCAGGATGTTTTGAATGATGTACTGTGCGATAATTGGCTAGAACTTGATGAAACTTATAACTATCATACAGGAGCAGATATATTATATAACCTATTCCAACAGTCTGAACGTCAATTAAATCGCAGGAAAGATTTACCTAAAGTTATTCATTATACAGCGACAAAACCATGGAAATACCTTGAAACATCTGTTCGTTGGCGCGATATATGGTGGGAATATAATAGACTTGAATGGCGCGATATTTTTACAAGATGGCAAGTCAATGATGGTGTAGATGTTTCATTGAAGAAAGTGTTACAACCTATCCATCGAGCTTTCATTTTTACTTACTCAGATTCAATTGAAGGAATTGAGAGGTTGGCTAAGGATTTACCAAACTGGCAATTTCATATTGCTGCCTATACTCAAATTTCAGAAAAATTGAAACAATTGGAAATGCATTCAAATATAAAACTTTATCCACTTGTTTATCGTTTCAAATTAAATGAGCTAGTTGAAAATTCAGATATTTACCTTGATATTAATCATGGTGATGCAGATACTCAGGTTCTGGAGCAAGTGAAGAAATTAGGTAAAGATATTTTATCCCTTTCTACAACTTATCATGGTCAAGGCAAACAATTTGAGAGAGTTACGGATATTATTGATTATTTAAAGAATGAACGATTTAAAGAACATATTAGAAAGGAATATTGTGAAAAA

SEQ ID NO: 7300 - protein, 413 aa, Streptococcus agalactiae
MKNRKAIALAADFGYQEQVKTIIKSICFHNQFIDFYILNDDFPVEWFQMMEYHLSKMDCTISNTKIFNEEIKHFKFQKPMPYPTYFRYFIPEVIHEDKVLYLDCDMIITSDLTSIFTLDISKYGVAAVRDDLLEEYDGKEDYFNSGLLLINNIFWREQGISQRLLDYTRENQGALQYHDQDVLNDVLCDNWLELDETYNYHTGADILYNLFQQSERQLNRRKDLPKVIHYTATKPWKYLETSVRWRDIWWEYNRLEWRDIFTRWQVNDGVDVSLKKVLQPIHRAFIFTYSDSIEGIERLAKDLPNWQFHIAAYTQISEKLKQLEMHSNIKLYPLVYRFKLNELVENSDIYLDINHGDADTQVLEQVKKLGKDILSLSTTYHGQGKQFERVTDIIDYLKNERFKEHIRKEYCEK

SEQ ID NO: 7301 - protein, 1203 aa, Streptococcus agalactiae
ATGAAGAAAACAATTGTTTTAGGTGCAGATTTCCAATATCGTGATCAAGTTATGACAACTATAAAATCTATTGTTAGTCATAATCAACATTTAACTATTTATATCATTAACACAGATTTTCCCGTAGAATGGTTTAATATCCTTAACCATTCTTTAGAACAGTTTGACTGTAGAGTAAAAAATATTCCCATAAGTTCAGATGTCTTTGAGGGGATACCTACCCTGAGCCATATCAGTGTGGCGGGATTTTTCAGATGGTTTATTCCAATTCACCTTGAAGAAGAGATAGTTTTATATTTAGATAGTGATGTAATAGTTAGGGGTTCTTTGGATCCCCTATTTGACATAAACCTTGAAGAGAATTTATTAGGAGCTGTAGCAGATCATTTTTCAACGCTTTACTATGGAGATACAGCACCAGTTAGTTTTAATTCAGGTGTTATGCTAATCAATAATTCATTATGGAAAAAAGAAGAAATTTATAATAGCCTTATGAGGATTGCTGATAAGGGTTCTGCTGTTGGGGTAGGAGATCAAGAATACCTTAATATTTTGACTCAGAATCGTTGGATAGATATCGGTAAACAATATAATGTTCAGATTGGTCAAGATGTCAATATTAATGCATATGGGCGACCAGATTTGTATCATTTTTATGATGATTGCGAACCTGTTATTGTTCATTATAATAGTCAAGATAAACCGTGGAATAAATATAGTCAATCGCGATACCGTTCAGAATGGTGGTATTATTTTGGTTTAGAATGGTCAGTTATTTATGCTCAACAACAAAAAAATTTGAACAGGTTAACAGGTAAAACACTGAATTTATTTACATTAACAGCCTCAGATACATTAGAACATATTGAAGTACTTGCAAAAGCTCTACCAGATTATCAGTTTCATATTGCAGCACGTAGTGATATTTCAGAGAAATTAGCTAATCTAGAAACTTATAGCAATATTAAAGTTTATAAATTAGTTATCAACCCTATCTTGGAAGAGCTTATACGTAACTGTGATGTGTACTTGGATATTAATCATTCTTACGAAGTAGAAGGTATTCTAGATAAAATAAAAGAAGAGAATAAACCGATTTTAGCCTTTGATTCTACAGCACATACGACAAAAAATATAGAAGTTATCTCAGAAACAATGCCTGAATTGATGGTTAAAAGAATAAGGGAAGTAGGTCCTCTTAGA

SEQ ID NO: 7302 - protein, 401 aa, Streptococcus agalactiae
MKKTIVLGADFQYRDQVMTTIKSIVSHNQHLTIYIINTDFPVEWFNILNHSLEQFDCRVKNIPISSDVFEGIPTLSHISVAGFFRWFIPIHLEEEIVLYLDSDVIVRGSLDPLFDINLEENLLGAVADHFSTLYYGDTAPVSFNSGVMLINNSLWKKEEIYNSLMRIADKGSAVGVGDQEYLNILTQNRWIDIGKQYNVQIGQDVNINAYGRPDLYHFYDDCEPVIVHYNSQDKPWNKYSQSRYRSEWWYYFGLEWSVIYAQQQKNLNRLTGKTLNLFTLTASDTLEHIEVLAKALPDYQFHIAARSDISEKLANLETYSNIKVYKLVINPILEELIRNCDVYLDINHSYEVEGILDKIKEENKPILAFDSTAHTTKNIEVISETMPELMVKRIREVGPLR

SEQ ID NO: 7303 - protein, 1005 aa, Streptococcus agalactiae
ATGCGAGTACATATTACAAGTATATATGGGCAGTCACCGCGTAGCATTGCCCTTATATCACAAAAACTAGTTAAGGATGTCGGACGTCAACTTGGTTATGATGAAATGGGAATCTACTTTTATAATGATCATGCTGAAACGCATGGTGAAAGAAGTACTAGGATGGATGGTATCATTGCGGGATTAGGCAGAGGGGATATTGTTGTTTTTCAAGTACCTACATGGAATTCAACAGAATTTGATGAACTTTTTCTAGATAAATTACAGGCATACGGTGCTAGAATTATAACTTTTGTACATGATATTGTTCCCTTAATGTTTGAGTCTAATTTTTATTTATTAGATAGAGTAATTGACATGTATAATCGTTCGGATGTTGTTATTCTACCTACAAAAGCGATGCATGATTATCTAATTGAAAAAGGGATGACTACCTCTAAAGTTCTTTATCAAGAAGTATGGGATCATCCAGTTAATATAGACCTCCCTCGTCCAGAATGTCAAAAAGTCCTTAGTTTTGCAGGCGATATTCAACGCTTTCCCTTTGTCAATGACTGGAAGGAAAATATCCCGCTCATCTATTATGGAGACGGAAGCAGACTCAATTCTGAGGCAAATGTTCATGCTCAGGGATGGAAAGATGATGTAGAATTGATGCTAAGTCTTTCTAAGCGGGGAGGATTTGGCCTGTGTTGGAGTGAAGATAGAGAGGAGTTAGTCGAGCGTCGTTATTCGAGGATGAATGCCTCGTATAAATTATCTACTTTCTTGGCTGCTGGACTTCCAATTATTGCTAACCATGATATTTCAAGTAGAGACTTTATCAAACAACACGGATTAGGATTTACAGTTGAAACGCTAGAAGAAGCTGTTGAAAAAATTAATAATATGGAAAAAGAGACTTATGACAGCTATGTGGAAAATGTTGAGAAGATAGCAACTCTCTTGCGAAATGGTTATATCACTAAAAAATTGTTGATAGATGCTGTGCATATGCTTTATAGA

SEQ ID NO: 7304 - protein, 335 aa, Streptococcus agalactiae; identical to SEQ ID NO: 2710

SEQ ID NO: 7305 - protein, 420 aa, Streptococcus agalactiae
ATGAGTGCCTCGACGTCAGCTAGCACTAGCGCCTCAACGAGTGCGTCAATGTCAGCCAGCACAAGTTCTTCAACAAGTGCCTCGATGTCAGCCAGCACTAGCGCTTCAATGAGTGCGTCGACGTTAGCCAGCACCAGCGCTTCAACGAGTGCGTCAATGTCAGCCAGCACTAGCGCTTCAATGAGTGCCACGACGTCAGCCAGCACCAGCGTCTCAACGAGTGCATCGACATCAGCAAGTACCAGCGCTTCCACAAGTTCTTCAAGCTCAGTGACTTCTAATTCATCAAAAGAGAAGGTGTATTCTGCCTTACCTTCTACGGGTGACCAAGATTATTCTGTAACTGCTACTGCCTTAGGTTTAGGTTTAATGACTGGTGCAACCCTTTTGGGACGAAAAAAATCTAAAAAAGATAAAGAC

SEQ ID NO: 7306 - protein, 140 aa, Streptococcus agalactiae
MSASTSASTSASTSASMSASTSSSTSASMSASTSASMSASTLASTSASTSASMSASTSASMSATTSASTSVSTSASTSASTSASTSSSSSVTSNSSKEKVYSALPSTGDQDYSVTATALGLGLMTGATLLGRKKSKKDKD

SEQ ID NO: 7307 - protein, 1340 aa, Streptococcus agalactiae
GTGCTGGCTGACATCGAGGCACTTGTTGAAGAACTTGTGCTGGCTGACATTGACGCACTCGTTGAGGCGCTAGTGCTGGCTGACGTCGACGCACTCATGGAAGCACTTGTGCTGGCTGACGTCGTGGCACTCATTGAGGCGCTAGTGCTGGCTGATGTCGATGCACTGGTACTTGCACTTGTGGAAGAACTTGTACTTGCCGATGTTGAGGCGCTAGTACTTGCACTTGTGGAAGCACTCGTACTTGCACTTGTTGAAGCGCTGGTACTTGCTGATGTCGATGCACTCATTGAGGCGCTAGTACTTGCACTTGTGGAAGCACTGGTGCTGGCTGACGTCGAGGCACTCATTGAGGCGCTAGTACTTGCTGACGTGGATGCACTGGTACTTGCACTTGTGGAAGCGCTCATACTTGCTGACGTGGATGCACTGATACTTGCACTTGTGGAGGCGCTCATACTTGCTGACGTGGATGCGCTCATACTTGCTGATGTGGATGCACTGGTACTTGCTGACGTGGAAGCGCTAGTACTTGTTGACGTCGAGGCACTGGTACTGGCACTTGTTGAAGCACTAGTACTTGCACTGGTTGAGGCGCTCATACTTGCACTTGTTGAAGCGCTAGTACTTGCACTTGTTGAGGCGCTCATACTTGCTGAGGTGGAAGCACTGGTACTGGCACTGGTTGAGGCGCTAGTGCTGGCTGATGTCGATGCACTGGTACTGGCACTTGTGGAAGAACTTGTACTTGCCGATGTTGAGGCGCTAGTACTTGCTGACGTGGATGCACTGGTACTGGCACTTGTGGAAGCGCTCATACTTGCTGACGTCGATGCACTGATACTTTCACTTGTGGAGGCGCTCATACTTGCTGACGTCGATGCACTGGTACTTGCTGACGTGGATGCGCTCATACTTGCTGATGTGGATGCACTGGTACTTGCTGACGTGGATGCGCTAGTACTTGTTGACGTCGAGGCACTGGTACTGGCACTTGTTGAAGCACTAGTACTTGCACTGGTTGAGGCGCTCATACTTGCTGAGGTGGAAGCACTGGTACTGGCACTGGTTGAGGCGCTCATACTTGCTGAGTGGAAGCACTGGTACTGGCACTGGTTGAGGCGCTGGTACTTGCACTTGTTGAAGCACTCATACTTGCACTTGTTGAAGCACTTGTGCTGGCTGATGTCCAAGCACTCCTTGAGGTGCTGGTTGAAACGCTGGTGCTGGCTGACGTCAACGCACTCATGGAAGCGCTGGTACTTGCTGATGTCAAGGCACTCATGGAACGCTGGTACTTGCTGATGTCCAGGCACTCATGGAAACNNNNNTTAATTAAT

SEQ ID NO: 7308 - protein, 447 aa, Streptococcus agalactiae
  VARIANT 443, 444: Xaa = Any Amino Acid
MLADIEALVEELVLADIDALVEALVLADVDALMEALVLADVVALIEALVLADVDALVLALVEELVLADVEALVLALVEALVLALVEALVLADVDALIEALVLALVEALVLADVEALIEALVLADVDALVLALVEALILADVDALILALVEALILADVDALILADVDALVLADVEALVLVDVEALVLALVEALVLALVEALILALVEALVLALVEALILAEVEALVLALVEALVLADVDALVLALVEELVLADVEALVLADVDALVLALVEALILADVDALILSLVEALILADVDALVLADVDALILADVDALVLADVDALVLVDVEALVLALVEALVLALVEALILAEVEALVLALVEALILAEVEALVLALVEALVLALVEALILALVEALVLADVQALLEVLVETLVLADVNALMEALVLADVKALMERWYLLMSRHSWKXXLIN

SEQ ID NO: 7309 - protein, 483 aa, Streptococcus agalactiae
ATGAAAAATAGAAAAGCTATCGCGTTAGCGGCAGATTTTGGCTATCAAGAGCAAGTTAAGACTATAATTAAATCAATATGCTTTCATAATCAATTTATTGATTTTTATATCTTAAATGACGATTTTCCAGTTGAATGGTTTCAAATGATGGAATATCATTTATCTAAAATGGATTGCACAATATCTAACACTAAAATTTTTAATGAAGAAATTAAACATTTTAAATTTCAAAAACCGATGCCCTACCCTACTTACTTTCGATACTTTATACCTGAAGTTATTCATGAAGATAAGGTACTATATTTAGACTGTGATATGATTATCACCAGTGATTTAACATCGATATTTACTCTTGATATTTCAAAATTGTGGATGAAGCAGCGGCATCAAAGTTGTAAAGTAAATAATAAAAAAGTAAGGATGAATCTCAATGAGAAAAAATTCATTCTTACTTTTTTATTATGCTTTATTAAATTGNNNNNT

SEQ ID NO: 7310 - protein, 161 aa, Streptococcus agalactiae
  VARIANT 160, 161: Xaa = Any Amino Acid
MKNRKAIALAADFGYQEQVKTIIKSICFHNQFIDFYILNDDFPVEWFQMMEYHLSKMDCTISNTKIFNEEIKHFKFQKPMPYPTYFRYFIPEVIHEDKVLYLDCDMIITSDLTSIFTLDISKLWMKQRHQSCKVNNKKVRMNLNEKKFILTFLLCFIKLXX

SEQ ID NO: 7311 - DNA, 522 bp, Streptococcus agalactiae
gtgttaataaaactattatttaactggtatgatatggtctggataagagagagttttaaagagagattaactaaaatgcgagtacatattacaagtatatatgggcagtcaccgcgtagcattgcccttatatcacaaaaactagttaaggatgtcggacgtcaacttggttatgatgaaatgggaatctacttttataatgatcatgctgaaacgcatggtgaaagaagtactaggatggatggtatcattgcgggattaggcagaggggatattgttgtttttcaagtacctacatggaattcaacagaatttgatgaactttttctagataaattacaggcatacggtgctagaattataacttttgtacatgatattgttcccttaatgtttgagtctaatttttatttattagatagagtaattgacatgtataatcgttcggatggtgttattctacctacaaaagcgatgcatgattatctaattgaaaaagggatgactacccctctaagtctt

SEQ ID NO: 7312 - protein, 174 aa, Streptococcus agalactiae
MLIKLLFNWYDMVWIRESFKERLTKMRVHITSIYGQSPRSIALISQKLVKDVGRQLGYDEMGIYFYNDHAETHGERSTRMDGIIAGLGRGDIVVFQVPTWNSTEFDELFLDKLQAYGARIITFVHDIVPLMFESNFYLLDRVIDMYNRSDGVILPTKAMHDYLIEKGMTTPLSL

SEQ ID NO: 7313 - DNA, 2799 bp, Streptococcus agalactiae
  misc_feature 2794, 2795, 2796, 2797, 2798: n = A,T,C or G
atgtcccaaaagacttttggcaagcagttaacagttgtagatactaagagtagagtcaagatgcataaatcaggaaaaaactgggtaagaacagtaatgtcgcattttaatctatttaaagcgattaaagggagagcaactgttgaagcagatgtgtgtattcaagatgttgaaaaagaagaccgactatcttcaggaaatttgacctatctcaaaggaatactagctgctggagctctggtaggtggagcgagtttaaccagtcgtgtttatgcagatgagactccagttgttcaagaacaatcaagttctgtaccaacactggcagaacaaacggaagtgactgttaaaacaactactgttcaaaatcatcaagatgggacagtatcgaaaaacattattgattctaatagtgtatctatgtcagagtcagcctcaacaagtactagtgaatctgtaagtatgtctatgtcagggtcaactttaacaagtgtaagtgaatctgtaagtacatctgctttaacaagtgcttcagaatcgataagcacgtcagcctcagaaagtgtttcaaaatctacaagtattagtgaggtttcaaatattcttgaaactcaagcttctttaactgataaaggaagagagtcgttttcggcaaaccagatagtaacagaaagtagcttagttactgatgctggtaaaaatgcttcagtatctagcctaattgaaattacaaaaccaaaatcggagttacagacttccaaaatgtcaaatgagtcgcttataactccagagaaatcccaagtaatgattgcaagcgataaaactgggaatgagagtctaactccgacaattagattaaaatcagttattcagccaaggagtatgaacttgatgactttgagttcggagatggacttgataccactagaagaagtgtctgatactgaaatgttaggtaaagatgtatcaagcgagttgcagaaagttaatattgcgttaaaagataacactcttagtgagcctggaacagttaaattagatagttcagaaaaccttgttttgaactttgccttttcaatcgcttctgttaacgagggagatgtctttactgtaaagctttctgataaccttgacacacaagggattggtactattctaaaagttcaagatataatggatgaaacggggcagttattagcgactgggtcatatagtcctttaacacataatattacatacacctggacaaggtatgcttctacgttgaataatattaaagctagagtcaatatgccagtttggcctgaccagagaataatttctaaaacaacttcagataagcagtgctttactgcaacattgaacaatcaagttgcttcaattgaggaacgtgttcagtataatagtccttcagtgacagaacatactaatgttaagacaaatgtaagatctcggatcatgaagcttgatgatgaaagacagacagaaacttatattactcaaattaatcctgaaggtaaggaaatgtatttcgcatcaggacttgggaatctatatactattatcggttcagatggaacatcaggttcaccagttaatttattaaatgcggaagtaaagattctaaaaactaattcaaaaaatcttacagatagtatggatcaaaattatgattcgcctgagtttgaagatgtgacttcccagtatagttatactaacgatggttctaaaattaccatagattggaaaacaaattctatttcttccactacatcttatgttgttttggtcaaaatacctaaacaaagtggtgtattgtattcaactgtttctgatataaatcaaacatatggttctaaatattcttatgggcatacgaatataagtggtgactcagatgcgaatgccgaaattaaacttttatcagaaagtgcttctacgagtgcgtcgacgtcagcaagtaccagcgcttccatgagtgcctcgacatcagcaagtaccagcgcttccatgagtgcctcgacatcagcaagtaccagcgcttccatgagtgcgtcgacgtcagccagcaccagcgcttcaaccagcacctcaacgagtgcctcgacatcagccagcacaagtgcttcaacaagtgcaagtatgagtgcttcaacaagtgcaagtaccagcgcctcaaccagtgccagtaccagtgcttccacctcagcaagtatgagcgcctcaaccagtgccagtaccagtgcttccacctcagcaagtatgagcgcctcaaccagtgcaagtactagtgcttcaacaagtgccagtaccagtgcctcgacgtcaacaagtactagcgcatccacgtcagcaagtaccagtgcatccacatcagcaagtatgagcgcatccacgtcagcaagtaccagtgcatcgacgtcagcaagtatgagcgcctccacaagtgaaagtatcagtgcatcgacgtcagcaagtatgagcgcttccacaagtgccagtaccagtgcatccacgtcagcaagtactagcgcctcaacatcggcaagtacaagttcttccacaagtgccagtaccagtgcatcgacatcagccagcactagcgcctcaaccagtgccagtaccagtgcttccacctcagcaagtatgagcgcctcaacaagtgcaagtactagcgcttcaacaagtgcaagtatgagcgcctcaaccagtgcaagtactagtgcttcaacaagtgccagtacagtgcctcgacgtcaacaagtactagcgcttccacgtcagcaagtaccannnnnt

SEQ ID NO: 7314 - protein, 933 aa, Streptococcus agalactiae
  VARIANT 932, 933: Xaa = Any Amino Acid
MSQKTFGKQLTVVDTKSRVKMHKSGKNWVRTVMSHFNLFKAIKGRATVEADVCIQDVEKEDRLSSGNLTYLKGILAAGALVGGASLTSRVYADETPVVQEQSSSVPTLAEQTEVTVKTTTVQNHQDGTVSKNIIDSNSVSMSESASTSTSESVSMSMSGSTLTSVSESVSTSALTSASESISTSASESVSKSTSISEVSNILETQASLTDKGRESFSANQIVTESSLVTDAGKNASVSSLIEITKPKSELQTSKMSNESLITPEKSQVMIASDKTGNESLTPTIRLKSVIQPRSMNLMTLSSEMDLIPLEEVSDTEMLGKDVSSELQKVNIALKDNTLSEPGTVKLDSSENLVLNFAFSIASVNEGDVFTVKLSDNLDTQGIGTILKVQDIMDETGQLLATGSYSPLTHNITYTWTRYASTLNNIKARVNMPVWPDQRIISKTTSDKQCFTATLNNQVASIEERVQYNSPSVTEHTNVKTNVRSRIMKLDDERQTETYITQINPEGKEMYFASGLGNLYTIIGSDGTSGSPVNLLNAEVKILKTNSKNLTDSMDQNYDSPEFEDVTSQYSYTNDGSKITIDWKTNSISSTTSYVVLVKIPKQSGVLYSTVSDINQTYGSKYSYGHTNISGDSDANAEIKLLSESASTSASTSASTSASMSASTSASTSASMSASTSASTSASMSASTSASTSASTSTSTSASTSASTSASTSASMSASTSASTSASTSASTSASTSASMSASTSASTSASTSASMSASTSASTSASTSASTSASTSTSTSASTSASTSASTSASMSASTSASTSASTSASMSASTSESISASTSASMSASTSASTSASTSASTSASTSASTSSSTSASTSASTSASTSASTSASTSASTSASMSASTSASTSASTSASMSASTSASTSASTSASTVPRRQQVLALPRQQVPXX

SEQ ID NO: 7315 - DNA, 1494 bp, Streptococcus agalactiae
atgatagaaatttttttagaaaaaaatattcttaataaagttaaattacttactttatgttatgataccccctcactatccttagataccgcctgtaaccgactccacttatcaccagttgagcttaaaaactattgtcataaattaaatgttttatttggtcataaactttctatccatatctcaaaagaacggattttatgtaagctaaataaacttactcaggaagatgccttaaaaatagtttataatgagtcaaacactttacaacttcttaaatttttaattgatgactcgtctgataaaaaatctctagtagcttttggaaatgatctcttcttatctcgttcttctgtctatcgtctgcgagaaaatttaattcctttaattaaagatttaggattatctttatctaaaaataccattgtaggtgacgaatatcgcattagatatctcatcgcatacctcactactaaatttggtattaaaatttacgatctgtctgctctagatattaagattattcgacaatttttatttgagagtggtactaatataagacctactacgcacctttctgatatctttgttttttttgatacgcttttcattttaacctggaaacgtcaccatcataaagttaaaattccaaactccaaacttttctcttctcttaaaaaaatctttatttatgaggagctgaatacatgtgtaaaaagtatcgttcaaccttacttcaatgttatttttaattcagaagacatggattatatttttcttatctatcttacaagcgctaactcttttgctgctcaaaagtggactgaaacacatgtcgatgaagtgttagctatttttaaaagtcttcctaaattccaaatgctactacaacctttgaaagaagctcttccatactctgacacctactacgatgagctagtgaaagtcactatttacttttctcgaaacttcatagttggtctgaatcaattaattcctgaaacacttagttttccttcaacattctatcctggaaataatcctaaactaatatccattatcgaaccaatagtcactcattggctaactgaaattggagaatcaaagttcaaaaaaacgcacttcttcttgctctgtgctcaccttgaaagagtaataaagaatagcatgcctcctataaatattgtgttgctgacaactgattttattaataatgaaattttaaaagactatattttgcaatccctttcaacagataaaattagatttcattcctattacttattgacagataatattagtcaaatatcgaccttaaaacccgatttaattatcactaatcgaaaactgtttacctatgttacaaaggaactagctacaaatagtttagtcgctcatattgattacaacgatacaccctctcaaatcagtaatatccaaactattatttctaatattaaagaagaaaaatatcgaaaaatctttgataaaata

SEQ ID NO: 7316 - protein, 498 aa, Streptococcus agalactiae
MIEIFLEKNILNKVKLLTLCYDTPSLSLDTACNRLHLSPVELKNYCHKLNVLFGHKLSIHISKERILCKLNKLTQEDALKIVYNESNTLQLLKFLIDDSSDKKSLVAFGNDLFLSRSSVYRLRENLIPLIKDLGLSLSKNTIVGDEYRIRYLIAYLTTKFGIKIYDLSALDIKIIRQFLFESGTNIRPTTHLSDIFVFFDTLFILTWKRHHHKVKIPNSKLFSSLKKIFIYEELNTCVKSIVQPYFNVIFNSEDMDYIFLIYLTSANSFAAQKWTETHVDEVLAIFKSLPKFQMLLQPLKEALPYSDTYYDELVKVTIYFSRNFIVGLNQLIPETLSFPSTFYPGNNPKLISIIEPIVTHWLTEIGESKFKKTHFFLLCAHLERVIKNSMPPINIVLLTTDFINNEILKDYILQSLSTDKIRFHSYYLLTDNISQISTLKPDLIITNRKLFTYVTKELATNSLVAHIDYNDTPSQISNIQTIISNIKEEKYRKIFDKI

SEQ ID NO: 7317 - DNA, 1989 bp, Streptococcus agalactiae
atgatagatagaaaagatactaaccgatttaaattagtttccaaatatagcccttcgggagatcaacctcaagctattgaaacgttggttgacaatattgaaggaggagaaaaagctcagattttaaaaggtgctactggtactggtaaaacctacacaatgagccaagttatcgcccaagttaacaagccaaccttggtgattgcacataataaaaccttagcaggtcaactttatggagagtttaaagaattttttcctgacaatgccgtagagtactttgtttcatattatgattattatcaaccagaagcttatgtgccttcttcggatacttatattgaaaaagatagttcagtcaatgacgaaattgacaaattacgtcactcagcgacttcttcgttattagaaagaaatgacgttattgttgtagcatctgtttcttgtatttacggtttaggttctcctaaagagtatgcagacagtgttgttagccttaggccaggtcaagaaatttcacgtgatcagttattgaacaatctcgttgatattcaatttgagcgtaacgatattgattttcaacgtggaaaatttcgcgttcgtggcgatgttgtagaagtttttcctgcgagtcgtgatgagcatgcctttcgaattgaattttttggtgatgaaattgatcgtataagagaaatagaatcgttaacagggcgtgtgctaggagaagtggaacatttagctattttcccagcaacacactttatgacaaatgatgaacatatggaagaagctatttcaaaaatacaagctgaaatggaaaatcaagtagaactttttgaaaaagaagggaaattgattgaagcgcaacgtattcgacaaaggacagaatatgatattgaaatgcttcgtgaaatgggatatacaaatggtgttgagaactactcacgtcacatggatggtagaagtgaaggtgagccaccttttactttgttagatttcttcccagaagattttttgattatgattgatgagagtcacatgacaatggggcaaatcaaagggatgtataatggagaccgttcgcgtaaagaaatgttggttaattacggtttccgtttaccatctgccttagataaccgtccacttcgtcgtgaagaattcgaaagccatgtccatcaaattgtctatgtatctgcaacgccaggagactatgaaatggagcaaacagatacagttgttgagcaaattatccggccaacaggacttcttgatccagaagttgaagttagaccaagtatggggcagatggatgacttgcttggtgaaatcaatttgaggactgaaaaaggtgagcgtacctttattacaacattgacaaagcgtatggcagaagacttaacagattatctcaaagaaatgggagttaaagttaagtatatgcacagcgatattaaaaccttagaacgtacagagattattcgtgatttacgacttggtgtgtttgatgttttaattggtattaatctcttacgtgaaggaatagatgttcctgaggtttcccttgttgcaatcttagatgctgataaggaaggtttccttcgtaatgagcgtggtcttatccaaacaatcggacgtgcagcacgtaacagtaatggtcatgttattatgtatgctgataaaataacagattctatgcaaagagctatggatgaaaccgctcgccgtcgtcgtttacaaatggattataatgaaaagcatggaattgtgccacaaacaattaaaaaagaaatccgtgatttaattgctattactaaaagtaatgacagcgataagcctgaaaaagttgtcgattacagtagtttatctaaaaaagaaaggcaagctgaaattaaagctcttcaacagcaaatgcaagaagcagctgaattattggactttgagctagctgcacaaatccgagatgttatcttagaactaaaagcaatcgat

SEQ ID NO: 7318 - protein, 663 aa, Streptococcus agalactiae; identical to SEQ ID NO: 2716

SEQ ID NO: 7319 - DNA, 918 bp, Streptococcus agalactiae
atgaataaaaggattttaaatagtcagttcgctgtctataaaaactggccgtcatggctattattgttatttgcttgttttatggtatacctattttttttcgttggtctaactctaggtggtgtgggaattgttctagtgtcttctgtactctataagttttcttcctatactttttttgagtttattaatttatttaataatatctatggagaattaggaacctttagtttttcagcattccttttgcttatctgggtaaaattcgtagaaaaaagacctttttcagaattggggttttctacaaagtttaaaagaattctgtggtcacttataaaaggctggagtataggttttattctattttcaatttctgtcatcactgcttatatattgggaggacttgactttcatagctatgatgtttctaaggcaacgattttctatgttgtaactctccttcctttttggcttattcaaagcggtacggaagaattgctaacacgagggtggcttcttcctctaattaatcatcgttttcatttagctgttgccataggggtctcatccactttatttggcattttgcacttggtaaatgcccatgtcacttttctttctattgtaagtattatatgttcgggagttttaatgtccttgtatatgattaaaagtggtaatatttggagtgttgcagccttacatggagcttggaattttagccaaggtaatctctatggtattgccgtaagtggtcagaaagcaggagcatctcttttgcattttaccgttaaagaaaacgcaccggactggatatcaggtggtgcattcggaatagaaggaagtttgatttctatttttgttctcttagcagcaattatataccttctatggctaattaagactgaagaaacagat

SEQ ID NO: 7320 - protein, 306 aa, Streptococcus agalactiae
MNKRILNSQFAVYKNWPSWLLLLFACFMVYLFFFVGLTLGGVGIVLVSSVLYKFSSYTFFEFINLFNNIYGELGTFSFSAFLLLIWVKFVEKRPFSELGFSTKFKRILWSLIKGWSIGFILFSISVITAYILGGLDFHSYDVSKATIFYVVTLLPFWLIQSGTEELLTRGWLLPLINHRFHLAVAIGVSSTLFGILHLVNAHVTFLSIVSIICSGVLMSLYMIKSGNIWSVAALHGAWNFSQGNLYGIAVSGQKAGASLLHFTVKENAPDWISGGAFGIEGSLISIFVLLAAIIYLLWLIKTEETD

SEQ ID NO: 7321 - protein, 2181 aa, Streptococcus agalactiae
ATGAAGCACAAGTTAAAAGCTTTTACGCTTGCTTTACTCTCAATATTCTTTGTGTTTGGTGGAAAGGTCAGTGCAGAGACTGTGAATATTGTTTCTGATACAGCATACGCTCCATTCGAATTTAAAGATTCTGATCAAACTTATAAAGGAATCGATGTTGACATCGTTAACGAAGTCGCTAAGCGTGCTGGCTGGAATGTTAACATGACGTACCCAGGTTTTGATGCCGCAGTTAACGCTGTTCAATCTGGACAGGCAGACGCGCTAATGGCCGGAACTACTGTTACTGAAGCACGTAAAAAAGTCTTTAATTTCTCAGATACTTATTACGATACTTCCGTTATTCTTTATACTAAAAATAATAATAAAGTCACAAACTACAAACAACTAAAAGGAAAAGTAGTCGGTGTAAAAAATGGAACAGCTGCTCAAAGCTTCTTAGAGGAAAATAAATCTAAATACGGCTATAAAGTTAAAACATTTGATACAAGTGACCTAATGAATAACAGCCTTGATTCTGGTTCTATTTACGCCGCTATGGACGATCAACCAGTTGTGCAATTTGCGATAAATCAAGGAAAAGCTTACGCCATTAACATGGAAGGCGAGGCAGTTGGTAGCTTTGCATTTGCTGTCAAAAAAGGTAGTGGACACGATAACCTAATTAAAGAATTTAACACAGCTTTTGCACAAATGAAATCAGATGGCACTTATAATGACATCATGGATAAATGGCTTGGGAAAGACGCTACAAAAACAAGCGGCAAAGCAACAGGTAATGCCAATGAAAAAGCAACTCCTGTAAAGCCAAGTTATAAAATTGTTTCTGATTCTTCATTCGCACCATTCGAATATCAAAACGGTAAAGGGAAATATACTGGTTTTGATATGGAATTAATCAAGAAAATTGCTAAACAGCAAGGTTTTAAACTTGATATCTCAAATCCAGGTTTTGATGCCGCTTTAAATGCTGTCCAATCTGGACAAGCTGACGGTGTTATTGCAGGAGCTACAATCACAGAAGCACGCCAAAAAATCTTTGATTTTTCTGATCCTTATTACACATCTAGCGTTATCTTAGCGGTTAAAAAAGGAAGCAATGTCAAATCATACCAAGATTTAAAAGGAAAAACAGTTGGTGCTAAAAATGGTACTGCCTCATATACTTGGTTATCAGACCACGCAGATAAGTACAACTATCATGTTAAAGCATTTGATGAAGCATCTACAATGTATGATAGTATGAACTCAGGTTCAATTGATGCTCTAATGGATGACGAAGCAGTTCTTGCTTACGCTATTAATCAAGGTCGTAAATTTGAAACACCTATCAAAGGTGAAAAATCAGGCGATATCGGATTTGCAGTGAAAAAAGGGGCAAATCCAGAATTAATTAAAATGTTTAACAACGGTCTTGCTTCACTCAAAAAATCGGGTGAGTACGATAAACTTGTTAAAAAATACCTTTCCACAGCCAGCACCTCTTCAAACGATAAAGCTGCTAAACCTGTAGATGAATCAACTATTTTAGGGTTAATTTCTAATAACTACAAACAATTGCTATCTGGTATTGGAACTACTTTAAGTTTAACTCTTATCTCATTTGCGATTGCTATGGTTATTGGTATTATCTTTGGTATGATGAGCGTATCACCAAGTAATACTCTCCGCACAATTTCAATGATTTTTGTTGATATTGTCCGTGGTATTCCACTCATGATTGTGGCCGCTTTTATTTTCTGGGGTATTCCTAATTTAATCGAAAGCATCACAGGTCACCAAAGTCCAATTAATGACTTCGTTGCTGCTACTATCGCTCTTTCTTTAAATGGTGGTGCGTACATTGCTGAAATTGTACGTGGTGGTATTGAAGCTGTTCCTTCTGGTCAAATGGAAGCAAGTCGTAGTTTAGGTATTTCTTACGGCAAAACTATGCAAAAGGTTATCTTGCCTCAAGCAGTACGCCTTATGTTACCAAACTTTATCAACCAATTTGTCATCTCATTAAAGGATACAACAATTGTATCAGCAATCGGACTTGTGGAACTCTTCCAAACTGGTAAAATCATAATTGCACGTAACTATCAATCATTCCGTATGTATGCTATCCTTGCAATTATGTATCTTGTAATCATTACCCTTCTCACCCGTCTAGCAAAACGTTTAGAAAAGAGGCTTAAA

SEQ ID NO: 7322 - protein, 727 aa, Streptococcus agalactiae; identical to SEQ ID NO: 2720

SEQ ID NO: 7323 - protein, 738 aa, Streptococcus agalactiae
ATGGCAGAATTAAAAATTGATGTCCAAGATTTACACAAGTCGTATGGGCAAAATGAAGTTTTAAAAGGTATTGATGCTAAATTTTATGAAGGTGATGTTGTTTGTATTATTGGACCTTCTGGTTCAGGAAAATCAACTTTCCTTCGCACATTGAACTTACTTGAATCAATCACAAGTGGAAAAGTTGTTGTGGACGGCTTTGAGTTATCAAACCCAAAAACAGACATAGACAAAGCACGTGAAAATATCGGAATGGTATTTCAACACTTCAATCTTTTCCCACATATGTCAGTTCTTGAAAACATCACTTTTGCTCCTATAGAACTTGGTAAAGAATCTAAAGAAGCAGCTGAAAAGCATGGGATGGAATTACTTGAAAAAGTTGGTTTAGCCGATAAAGCTAATGCCAAACCAGATAGTTTATCTGGAGGACAAAAACAACGTGTAGCTATCGCAAGAAGCTTAGCGATGAATCCAGATATCTTACTTTTTGACGAACCAACTTCTGCACTTGATCCAGAAATGGTTGGAGATGTTCTCAATGTTATGAAAGATTTAGCTGAACAAGGTATGACTATGTTAATTGTGACACACGAAATGGGATTTGCTCGTCAAGTTGCCAATCGTGTTATCTTTACAGATGGTGGTCGTTTCCTCGAAGATGGGACACCTGAGCAAATCTTTGATACACCTCAACACCCACGTCTCCAAGACTTCCTTAATAAAGTTTTAAACGTT

SEQ ID NO: 7324 - protein, 246 aa, Streptococcus agalactiae; identical to SEQ ID NO: 2722

SEQ ID NO: 7325 - protein, 348 aa, Streptococcus agalactiae
ATGAAAGACTATATTAACAGAATATTGCACTTTATTAAAGAACATATGACTTATCATGTCAACTTTATAGATGACTTTTTAGATATTAAATGGGAAAAGGTGAGTAACATCCATTTAAGGTTTTGGACAACTATTATTGCTTATTTAGTTATTTTTATCTTAAGTATCTCTACCGTAATTCTTAACCTTGTACTTCTTTTTCAAGGATTCTTAACGCAAAACCCTATTATTTACTTACTATTTTTTATAACTTTAGTTTGTGCTTTTTATTTTGCTTATAAATTTATTACTTATACTCCAACCATTGTAAAAAATGCTCTTCAGTATATCAAAAAGCTCAAAAACGTT

SEQ ID NO: 7326 - protein, 116 aa, Streptococcus agalactiae; identical to SEQ ID NO: 2724

SEQ ID NO: 7327 - protein, 156 aa, Streptococcus agalactiae
ATGGGAGATAAACCGATATCATTTCGTGATAAAGATGGGAATTTTGTTTCAGCGGCCGATGTCTGGAATGCTGAAAAATTAGAAGAACTCTTTAACACATTAAATCCTAATCGTAAACTTCGTTTAGAACGCGAAAAATTAGCAAAAGAAAAAGGA

SEQ ID NO: 7328 - protein, 52 aa, Streptococcus agalactiae; identical to SEQ ID NO: 2726

SEQ ID NO: 7329 - protein, 1311 aa, Streptococcus agalactiae
ATGAGTATGTTTTTAGATACTGCCAAAATTAGTGTTAAGGCAGGTCGCGGTGGTGATGGCATGGTTGCTTTTCGCCGTGAGAAATATGTCCCCAATGGAGGCCCGTGGGGCGGTGATGGCGGTAAAGGCGGATCGGTCATTTTTAAAGTAAACGAAGGTTTACGAACTTTGATGGATTTTCGATATAACCGTAATTTTAAAGCAAAAGCTGGTGAAAAAGGGATGACTAAAGGTATGCACGGTCGAGGTGCGGAAGACCTTATTGTGTCATTACCACCTGGAACAACTGTTCGTGATGCTACTACAGGTAAGGTTATTACCGACCTTGTGGAGCATGATCAGGAATTCGTTGTAGCCAGAGGTGGCCGCGGTGGTCGTGGAAATATTCGCTTTGCAACCCCACGTAATCCAGCTCCTGAAATTGCTGAAAATGGGGAGCCTGGTGAAGAACGTGAATTACAATTAGAATTAAAAATTTTGGCTGATGTTGGTCTCGTTGGTTTCCCATCAGTTGGGAAGTCGACGCTACTTAGTGTTGTTTCAGCAGCAAAGCCTAAAATTGGTGCCTATCATTTTACGACAATTGTCCCTAATTTAGGGATGGTTCGTACAAAATCAGGTGATAGCTTTGCAATGGCTGATCTTCCTGGTTTGATTGAAGGGGCTAGTCAAGGTGTCGGATTAGGAACTCAGTTTCTTAGACATATTGAGCGTACACGTGTTATTCTACATGTTATTGATATGTCGGCAAGTGAAGGACGAGACCCTTACGATGACTATGTTTCAATTAATAATGAGTTGGAAACTTACAATCTTCGATTGATGGAACGTCCGCAAATTATTGTTGCCAATAAAATGGACATGCCTGATTCAGAAGAGAATTTGGCAGCATTCAAAGAAAAATTAGCAGCAAACTATGATGAGTTTGATGACATGCCTATGATTTTTCCAATTTCAAGTTTAGCACATCAAGGACTAGAAAACCTTATGGATGCGACGGCTGAATTATTAGCCAATACAGAAGAGTTTCTTCTTTATGACGAAACTGACATGCAAGAAGATGAAGCATACTATGGATTTAACGAAGATGAACGTCCATTTGAGATTACACGTGATGATGATGCAACGTGGGTATTGTATGGTGATAAGCTAGAAAAACTCTTTGTTATGACAAATATGGAACGCGATGAATCAATAATGAAATTTGCTCGTCAGTTACGTGGTATGGGCGTTGATGAAGCCCTTCGAGAGCGCGGAGCTAAGGATGGAGATATTGTTCGTATAGGTAACTTCGAATTTGAATTTGTAGAT

SEQ ID NO: 7330 - protein, 437 aa, Streptococcus agalactiae; identical to SEQ ID NO: 2728

SEQ ID NO: 7331 - DNA, 126 bp, Streptococcus agalactiae
gtggcttttggagataacggacaacgaaaaaaaactgggtttgaaaaactaactctttttgttgttattttgatggtactagtaacagttggtggtttggtatttggtgctattagtgcaatcatg

SEQ ID NO: 7332 - protein, 42 aa, Streptococcus agalactiae; identical to SEQ ID NO: 2730

SEQ ID NO: 7333 - DNA, 1239 bp, Streptococcus agalactiae
atggttttacaagatttcgacaaccttttaaaaaaatatgcccaattaattatttctaaaggtttaaatgtccaaaaagggcacactctcgctttaacaatcgatgtggaacaagtccacttagcaaggcttttaactgaagccgcttatgaaaagggagcaagtgaagttattgttgattatacagatgattttatcacgcgccagcgactacttcatgcttcagatgaagttctcacgaatgttccacagtataccgttgataaatctttagcactattaaataagaaggctagtcgattagttgtgaaatcttctaaccctaacgctttcgctactgttgatcctaaacgtttatctgaaacaactagagcaaccgctattgccttagaggaacaaagtagagcaatacaagctaataaagtatcttggaacgtggctgcagctgctggtagagaatgggctgcacttgtcttcccagaattaaaaacaagcgaccaacaagttgatgctctttgggataccattttcaaattaaatcgtatttatgaagatgatcctattgctgcttgggacgcacatgaagctaaattattagaaaaagctactagactaaatcaagaacaatttgatgctcttcattataccgcaccaggtacagatttaacgcttggtatgcctaaaaatcatatttgggaggcagccggtagtctcaacgctcagggagagacttttatcgctaatatgcctactgaagaaatcttttcagcacctgattaccgtcgtgcagatgggtatgtgacaagtacaaaacctctcagttatgctggcgttattatcgaaaatatgacatttacctttaaagacggtaaaattatcaatgtcactgcagaaaaagggcaagaaacagtccaacgcttaatcgaggaaaatgatggggcaagatcgcttggggaagttgcacttgtcccacataaaacaccaatttcactatctggactgattttctttaatactttattcgatgaaaatgcctctaatcacctcgctattggatctgcatatgccttcaatgtagaaggaggaacagaaatgacaagtcaagaattggatgaagctggtttaaatcgttcttcaacacatgttgattttatgattggttcagaacaaatggatattgatggtattcgtgcagatggaactgctgtcccaatctttagaaatggcgaatgggctatt

SEQ ID NO: 7334 - protein, 413 aa, Streptococcus agalactiae
MVLQDFDNLLKKYAQLIISKGLNVQKGHTLALTIDVEQVHLARLLTEAAYEKGASEVIVDYTDDFITRQRLLHASDEVLTNVPQYTVDKSLALLNKKASRLVVKSSNPNAFATVDPKRLSETTRATAIALEEQSRAIQANKVSWNVAAAAGREWAALVFPELKTSDQQVDALWDTIFKLNRIYEDDPIAAWDAHEAKLLEKATRLNQEQFDALHYTAPGTDLTLGMPKNHIWEAAGSLNAQGETFIANMPTEEIFSAPDYRRADGYVTSTKPLSYAGVIIENMTFTFKDGKIINVTAEKGQETVQRLIEENDGARSLGEVALVPHKTPISLSGLIFFNTLFDENASNHLAIGSAYAFNVEGGTEMTSQELDEAGLNRSSTHVDFMIGSEQMDIDGIRADGTAVPIFRNGEWAI

SEQ ID NO: 7335 - DNA, 576 bp, Streptococcus agalactiae
atgaaagtgaaaaataagattttaacgatggtagcacttactgtcttaacatgtgctacttattcatcaatcggttatgctgatacaagtgataagaatactgacacgagtgtcgtgactacgaccttatctgaggagaaaagatcagatgaactagaccagtctagtactggttcttcttctgaaaatgaatcgagttcatcaagtgaaccagaaacaaatccgtcaactaatccacctacaacagaaccatcgcaaccctcacctagtgaagagaacaagcctgatggtagaacgaagacagaaattggcaataataaggatatttctagtggaacaaaagtattaatttcagaagatagtattaagaattttagtaaagcaagtagtgatcaagaagaagtggatcgcgatgaatcatcatcttcaaaagcaaatgatgggaaaaaaggccacagtaagcctaaaaaggaacttcctaaaacaggagatagccactcagatactgtaatagcatctacgggagggattattctgttatcattaagtttttacaataagaaaatgaaactttat

SEQ ID NO: 7336 - protein, 192 aa, Streptococcus agalactiae; identical to SEQ ID NO: 2734

SEQ ID NO: 7337 - DNA, 2040 bp, Streptococcus agalactiae
atgaaacgtaaatactttattcttaatacggtgacggttttaacgttagctgctgcaatgaatactagcagtatctatgctaatagtactgagacaagtgcttcagtagttcctactacaaatactatcgttcaaactaatgacagtaatcctaccgcaaaatttgtatcagaatcaggacaatctgtaataggtcaagtaaaaccagataattctgcggcgcttacaacagttgacacgcctcatcatatttcagctccagatgctttaaaaacaactcaatcaagtcctgtcgttgagagtacttctactaagttaactgaagagacttacaaacaaaaagatggtaaagatttagccaacatggtgagaagtggtcaagttactagtgaggaactcgttaatatggcatacgatattattgctaaagaaaacccatctttaaatgcagtcattactactagacgccaagaagctattgaagaggctagaaaacttaaagataccaatcagccgtttttaggtgttcccttgttagtcaaggggttagggcacagtattaaaggtggtgaaaccaataatggcttgatctatgcagatggaaaaattagcacatttgacagtagctatgtcaaaaaatataaagatttaggatttattattttaggacaaacgaactttccagagtatgggtggcgtaatataacagattctaaattatacggtctaacgcataatccttgggatcttgctcataatgctggtggctcttctggtggaagtgcagcagccattgctagcggaatgacgccaattgctagcggtagtgatgctggtggttctatccgtattccatcttcttggacgggcttggtaggtttaaaaccaacaagaggattggtgagtaatgaaaagccagattcgtatagtacagcagttcattttccattaactaagtcatctagagacgcagaaacattattaacttatctaaagaaaagcgatcaaacgctagtatcagttaatgatttaaaatctttaccaattgcttatactttgaaatcaccaatgggaacagaagttagtcaagatgctaaaaacgctattatggacaacgtcacattcttaagaaaacaaggattcaaagtaacagagatagacttaccaattgatggtagagcattaatgcgtgattattcaaccttggctattggcatgggaggagctttttcaacaattgaaaaagacttaaaaaaacatggttttactaaagaagacgttgatcctattacttgggcagttcatgttatttatcaaaattcagataaggctgaacttaagaaatctattatggaagcccaaaaacatatggatgattatcgtaaggcaatggagaagcttcacaagcaatttcctattttcttatcgccaacgaccgcaagtttagcccctctaaatacagatccatatgtaacagaggaagataaaagagcgatttataatatggaaaacttgagccaagaagaaagaattgctctctttaatcgccagtgggagcctatgttgcgtagaacaccttttacacaaattgctaatatgacaggactcccagctatcagtatcccgacttacttatctgagtctggtttacccatagggacgatgttaatggcaggtgcaaactatgatatggtattaattaaatttgcaactttctttgaaaaacatcatggttttaatgttaaatggcaaagaataatagataaagaagtgaaaccatctactggcctaatacagcctactaactccctctttaaagctcattcatcattagtaaatttagaagaaaattcacaagttactcaagtatctatctctaaaaaatggatgaaatcgtctgttaaaaataaaccatccgtaatggcatatcaaaaagcacttcctaaaacaggtgatacagaatcaagcctatctccagttttagtagtaacccttttattagcttgttttagctttgtaacaaaaaagaatcagaaaagt

SEQ ID NO: 7338 - protein, 680 aa, Streptococcus agalactiae
MKRKYFILNTVTVLTLAAAMNTSSIYANSTETSASVVPTTNTIVQTNDSNPTAKFVSESGQSVIGQVKPDNSAALTTVDTPHHISAPDALKTTQSSPVVESTSTKLTEETYKQKDGKDLANMVRSGQVTSEELVNMAYDIIAKENPSLNAVITTRRQEAIEEARKLKDTNQPFLGVPLLVKGLGHSIKGGETNNGLIYADGKISTFDSSYVKKYKDLGFIILGQTNFPEYGWRNITDSKLYGLTHNPWDLAHNAGGSSGGSAAAIASGMTPIASGSDAGGSIRIPSSWTGLVGLKPTRGLVSNEKPDSYSTAVHFPLTKSSRDAETLLTYLKKSDQTLVSVNDLKSLPIAYTLKSPMGTEVSQDAKNAIMDNVTFLRKQGFKVTEIDLPIDGRALMRDYSTLAIGMGGAFSTIEKDLKKHGFTKEDVDPITWAVHVIYQNSDKAELKKSIMEAQKHMDDYRKAMEKLHKQFPIFLSPTTASLAPLNTDPYVTEEDKRAIYNMENLSQEERIALFNRQWEPMLRRTPFTQIANMTGLPAISIPTYLSESGLPIGTMLMAGANYDMVLIKFATFFEKHHGFNVKWQRIIDKEVKPSTGLIQPTNSLFKAHSSLVNLEENSQVTQVSISKKWMKSSVKNKPSVMAYQKALPKTGDTESSLSPVLVVTLLLACFSFVTKKNQKS

SEQ ID NO: 7339 - DNA, 720 bp, Streptococcus agalactiae
atgagacttgataaatttttagtagaatgcggacttggttcacgtactcaagtcaaattaatattgaaaaaaaagcagattagtgttaatggtaatagcgagacatctccaaaagtacaggtagatgaatatagagatgagattaaatataatggaactctagtgtcatatgaaaagtttgtttattatatgcttcataaacccaaaggtgttatatcagcaacggatgatccttcgcataaaaccgtgttagatttgctagacaaaactgctcgagataaagctgtttttccagtggggcgtttagatattgatacaacaggccttttgttaataactaataatggggaattagcgcataaaatgttatcacctaaaaaacacgttgataaatgctatgaggcaaaaatctcagggataatgacagaagacgatattttggcatttgataaagggattattctgaaagattttacttgtttaccagcattattagaaattgtggaagtaaatcaggtgaagaagcagagtcttgttaaaatcactattaaggaaggaaaattccatcaagttaaacgtatggttgctgcgtgtggtaaggaagtcttagagctaaagcgtctaaggatgggaaatctacaattagataaacagctagaaagtggacaatggagacggctaacaataaaagaaatagaaaaattagaaaaatatatgcaa

SEQ ID NO: 7340 - protein, 240 aa, Streptococcus agalactiae
MRLDKFLVECGLGSRTQVKLILKKKQISVNGNSETSPKVQVDEYRDEIKYNGTLVSYEKFVYYMLHKPKGVISATDDPSHKTVLDLLDKTARDKAVFPVGRLDIDTTGLLLITNNGELAHKMLSPKKHVDKCYEAKISGIMTEDDILAFDKGIILKDFTCLPALLEIVEVNQVKKQSLVKITIKEGKFHQVKRMVAACGKEVLELKRLRMGNLQLDKQLESGQWRRLTIKEIEKLEKYMQ

SEQ ID NO: 7341 - protein, 840 aa, Streptococcus agalactiae
ATGGAAACATATACTCTATCGAATACTCTTAACATTCCTAAAATTGGTTTTGGGACATGGCAACTAACTGAAGGTGAAGAAGCTTATAAGGCAGTGACTCATGCTTTAAAAGTTGGTTATACTCATATTGATACTGCTCAGATTTATGGCAACGAACACAGTGTTGGACGTGCTATAAGAGACAGTGGTTTGGTGCGAGAAAGTATCTTTTTGACAACTAAGATTTGGAATGACAAACATGACTATCATTTAGCCAAAGCTTCTATTGATGAATCTCTGCAGAAATTAGGTGTTGATTATATTGATCTTCTTTTGATTCATTGGCCAAATCCAAAAGCTCTTCGTGAAAATGATGCGTGGAAAGCTGGGAATGCAGGCACTTGGAAAGCGATGGAAGAAGCTTATAAAGAAGGAAAGGTAAAAGCTATTGGTGTTTCGAATTTCATGAAACATCACTTAGAGGCTTTATTTGAAACTGCCGAAATAAAACCTATGGTTAATCAAATTATCCTAGCACCAGGTTGTGCTCAAGAGGATTTGGTTCGCTTCTGTAAAGGAAATGATATCTTATTAGAAGCTTACAGTCCATTTGGAACAGGTGCTATTTTTGAAAATGAATCTATAAAAGCTATTGCTGAAAAATATGGTAAATCAGTTGCACAAGTAGCTCTTCGCTGGTCACTTGATAATGGCTTTTTACCATTACCTAAGTCAGCGACTCCCAAAAATATTGAAGCAAACCTTGATATTTTTGATTTTCAATTAAACGAAGATGATATTACTACCTTAATACAACTAGATTCAGGTATTAAACCCAAAGATCCAGATAATGTCTCATTT

SEQ ID NO: 7342 - protein, 280 aa, Streptococcus agalactiae
METYTLSNTLNIPKIGFGTWQLTEGEEAYKAVTHALKVGYTHIDTAQIYGNEHSVGRAIRDSGLVRESIFLTTKIWNDKHDYHLAKASIDESLQKLGVDYIDLLLIHWPNPKALRENDAWKAGNAGTWKAMEEAYKEGKVKAIGVSNFMKHHLEALFETAEIKPMVNQIILAPGCAQEDLVRFCKGNDILLEAYSPFGTGAIFENESIKAIAEKYGKSVAQVALRWSLDNGFLPLPKSATPKNIEANLDIFDFQLNEDDITTLIQLDSGIKPKDPDNVSF

SEQ ID NO: 7343 - protein, 671 aa, Streptococcus agalactiae
ATGACAAAAGAAGATATCAAAAAACAAGTTCGAAGAGCTTTTGATTTTCGTATGGCGATTCGTGTTTATAATAATAATGATATTCCTAAAGAAGATATGGAGTATATTTTAGACACTGCTTGGTTGAGTCCTTCTTCAGTCGGTTTAGAAGGCTGGCGATTTTTAGTACTAGATAGACAAACAATTGCAAAATTTCGAGATAAACTTAAGGAAGTTGCTTGGGGAGCACAATATCAACTAGATACTGCTAGTCACTTTGTTTTACTACTAGCTGAAAAAGGTGCTTATTATAACGCTGATAGCATGATCAACAGTCTCGTTCGACGTGTCTAGGTGATCCAGCCGCCCTTGAGAGTAGGATACCTCTCTACAAATCTTTCCAAGAAAACGATATGAAAATTGATTCTGAACGTTCTCTTTGGGATTGGACAGCAAAACAAACTTATATCGCACTTGGTAATATGATGACGGCTGCTGCTATGATCGGCGTAGATTCATGCCCAATTGAAGGATTTGACTATGAAAAGGTCAATAATATCCTTAGTAAAGAAGGGTTAATAGACGATAAGAAAGAAGCTATTTCTTGTATGGTTTCATTTGGTTATCGTTTGCGTGAACCTAAACATTCCCGTGCTAGGAAAGAACGTCAAGAGGTCATTACTTGGGTTGAG

SEQ ID NO: 7344 - protein, 224 aa, Streptococcus agalactiae
  VARIANT 110: Xaa = Any Amino Acid
MTKEDIKKQVRRAFDFRMAIRVYNNNDIPKEDMEYILDTAWLSPSSVGLEGWRFLVLDRQTIAKFRDKLKEVAWGAQYQLDTASHFVLLLAEKGAYYNADSMINSLVRRXLGDPAALESRIPLYKSFQENDMKIDSERSLWDWTAKQTYIALGNMMTAAAMIGVDSCPIEGFDYEKVNNILSKEGLIDDKKEAISCMVSFGYRLREPKHSRARKERQEVITWVE

SEQ ID NO: 7345 - protein, 389 aa, Streptococcus agalactiae
ATGCCATTTTTACATACTTGTATTCGCGTTAAAGATTTGGACGCCTCAATTGCTTTTTATCAAGAAGCACTTGGTTTTAAGGAAGTTCGTCGCAATGACTTTCCTGAAAATCAATTTACTTTAGTCTATATGGCCCTAGAGGACGACCCTAGTTACGAATTAGAGTTAACCTATAACTATGATCACGAAGCTTATGATTTAGGAAATGGGTATGGTCATATTGCTGTTGGTGTAGACGATTTGGAAACTACTTATGATGCCCATCAGAAAGCTGGTTACTCTGTAACAAAAATTCTGGATTACCAGGTAAACCTAATATGTTCTACTTTATTCAAGATCCAGATGGCTATAAAATTGAAGTTATTCGACTCAGTCAATTTAAAGCTGAC

SEQ ID NO: 7346 - protein, 130 aa, Streptococcus agalactiae; identical to SEQ ID NO: 2744

SEQ ID NO: 7347 - protein, 828 aa, Streptococcus agalactiae
ATGAACTTGATGACTTTGAGTTCGGGAGATGGACTTGATACCACTAGAAAGAAAGTGTCTGATACTGAAATGTTAGGTAAAGATGTATCAAGCGAGTTGCAGAAAGTTAATATTGCGTTAAAAGATAACACTCTTAGTGAGCCTGGAACAGTTAAATTAGATAGTTCAGAAAACCTTGTTTTGAACTTTGCCTTTTCAATCGCTTCTGTTAACGAGGGAGATGTCTTTACTGTAAAGCTTTCTGATAACCTTGACACACAAGGGATTGGTACTATTCTAAAAGTTCAAGATATAATGGATGAAACGGGGCAGTTATTAGCGACTGGGTCATATAGTCCTTTAACACATAATATTACATACACCTGGACAAGGTATGCTTCTACGTTGAATAATATTAAAGCTAGAGTCAATATGCCAGTTTGGCCTGACCAGAGAATAATTTCTAAAACAACTTCAGATAAGCAGTGCTTTACTGCAACATTGAACAATCAAGTTGCTTCAATTGAGGAACGTGTTCAGTATAATAGTCCTTCAGTGACAGAACATACTAATGTTAAGACAAATGTAAGATCTCGGATCATGAAGCTTGATGATGAAAGACAGACAGAAACTTATATTACTCAAATTAATCCTGAAGGTAAGGAAATGTATTTCGCATCAGGACTTGGGAATCTATATACTATTATCGGTTCAGATGGAACATCAGGTTCACCAGTTAATTTATTAAATGCGGAAGTAAAGATTCTAAAAACTAATTCAAAAAATCTTACAGATAGTATGGATCAAAATTATGATTCGCCTGAGTTAGAAGATGTGACTTCCCCAGTA

SEQ ID NO: 7348 - protein, 276 aa, Streptococcus agalactiae
MNLMTLSSGDGLDTTRKKVSDTEMLGKDVSSELQKVNIALKDNTLSEPGTVKLDSSENLVLNFAFSIASVNEGDVFTVKLSDNLDTQGIGTILKVQDIMDETGQLLATGSYSPLTHNITYTWTRYASTLNNIKARVNMPVWPDQRIISKTTSDKQCFTATLNNQVASIEERVQYNSPSVTEHTNVKTNVRSRIMKLDDERQTETYITQINPEGKEMYFASGLGNLYTIIGSDGTSGSPVNLLNAEVKILKTNSKNLTDSMDQNYDSPELEDVTSPV

SEQ ID NO: 7349 - protein, 555 aa, Streptococcus agalactiae
ATGAATAACAGCCTTGATTCTGGTTCTATTTACGCCGCTATGGACGATCAACCAGTTGTGCAATTTGCGATAAATCAAGGAAAAGCTTACGCCATTAACATGGAAGGCGAGGCAGTTGGTAGCTTTGCATTTGCTGTCAAAAAAGGTAGTGGACACGATAACCTAATTAAAGAATTTAACACAGCTTTTGCACAAATGAAATCAGATGGCACTTATAATGACATCATGGATAAATGGCTTGGGAAAGACGCTACAAAAACAAGCGGCAAAGCAACAGGTAATGCCAATGAAAAAGCAACTCCTGTAAAGCCAAGTTATAAAATTGTTTCTGATTCTTCATTCGCACCATTCGAATATCAAAACGGTAAAGGGAAATATACTGGTTTTGATATGGAATTAATCAAGAAAATTGCTAAACAGCAAGGTTTTAAACTTGATATCTCAAATCCAGGTTTTGATGCCGCTTTTAATGCTGTCCAATCTGGACAAGCTGGACGTGTTATTGCAGGAGCTACCATCACAGAAGCACGCCAAAAATCTTNNNNNTTAATTAAT

SEQ ID NO: 7350 - protein, 185 aa, Streptococcus agalactiae
  VARIANT 181, 182: Xaa = Any Amino Acid
MNNSLDSGSIYAAMDDQPVVQFAINQGKAYAINMEGEAVGSFAFAVKKGSGHDNLIKEFNTAFAQMKSDGTYNDIMDKWLGKDATKTSGKATGNANEKATPVKPSYKIVSDSSFAPFEYQNGKGKYTGFDMELIKKIAKQQGFKLDISNPGFDAAFNAVQSGQAGRVIAGATITEARQKSXXLIN

SEQ ID NO: 7351 - DNA, 99 bp, Streptococcus agalactiae
  misc_feature 90, 91, 92, 93, 94: n = A,T,C or G
ttgctatctggtattggaactactttaagtgtaactcttatctcatttgcgattgctatggttattggcattatctttaggatgatgagnnnnnttaat

SEQ ID NO: 7352 - protein, 33 aa, Streptococcus agalactiae
  VARIANT 30, 31, 32: Xaa = Any Amino Acid
MLSGIGTTLSVTLISFAIAMVIGIIFRMMXXXN

SEQ ID NO: 7353 - DNA, 216 bp, Streptococcus agalactiae
  misc_feature 203, 204, 205, 206, 207: n = A,T,C or G
atgtcagatgcggatttagagataatcttacaaaatcctagggttattcgtcatcgtctaaaacttttctcaacacgacaaaatgctaggtcaattatattaattcagaaagaattcggaagttttgatcgctacatttggtcttttgtagataataaagtacaggttaactcagttaacaactacaacgatgtgcctgcaannnnnttaattaat

SEQ ID NO: 7354 - protein, 72 aa, Streptococcus agalactiae
  VARIANT 68, 69: Xaa = Any Amino Acid
MSDADLEIILQNPRVIRHRLKLFSTRQNARSIILIQKEFGSFDRYIWSFVDNKVQVNSVNNYNDVPAXXLIN

SEQ ID NO: 7355 - DNA, 153 bp, Streptococcus agalactiae
atgaaatcgtctgttaaaaataaaccatccgtaatggcatatcaaaaagcacttcctaaaacaggtgatacagaatcaagcctatctccagttttagtagtaacccttttattagcttgttttagctttgtaacaaaaaagaatcagaaaagt

SEQ ID NO: 7356 - protein, 51 aa, Streptococcus agalactiae
MKSSVKNKPSVMAYQKALPKTGDTESSLSPVLVVTLLLACFSFVTKKNQKS

SEQ ID NO: 7357 - DNA, 687 bp, Streptococcus agalactiae
ttggctggtttagaacatactactggtgattttattactgttatggatgttgacttgcaagatccacccactttattaccagaaatgtacctaaaacttcaagaaggttatgatattgtcgctacaaggcggaaagatcgtaarggggagccgttgatacgctctctttttgccaagcttttttataaattaatcaatcaagtgtcagatactaaaatggttgatggtgcgcgtgattttcgtctcatgacaaaacaagttgttgacagtattctcgagctaaatgaagtgaatcgcttctcaaaagggattttttcctggattgggtatgatgtcgcttatatcagttatgagaatcgagaacgaattgcgggtaagacctcatggagtttctttaatctcttaaaatactctctagacggtttcatcaacttctcagaaattccattagctatagctacctggattggaactcttagttcagtactatcacttttagctatcatttttattattattcgaaaattactatttggggatcccgtttcaggttgggcaagcacagttaccatcgtgctttttatgggtggtattcagttattgtcgctaggaattataggcaaatacatctctaagattttcctagaaactaaaaaacgcccagtctatattgtcaaggaagaggga

SEQ ID NO: 7358 - protein, 229 aa, Streptococcus agalactiae
MAGLEHTTGDFITVMDVDLQDPPTLLPEMYLKLQEGYDIVATRRKDRKGEPLIRSLFAKLFYKLINQVSDTKMVDGARDFRLMTKQVVDSILELNEVNRFSKGIFSWIGYDVAYISYENRERIAGKTSWSFFNLLKYSLDGFINFSEIPLAIATWIGTLSSVLSLLAIIFIIIRKLLFGDPVSGWASTVTIVLFMGGIQLLSLGIIGKYISKIFLETKKRPVYIVKEEG

SEQ ID NO: 7359 - DNA, 1386 bp, Streptococcus agalactiae
atgtcaaaaaataataatgaccacactcaaaaatctgagaatggtatggtacgcggcctagaaaatcgtcacgtacagttaattgcgattgcagggacaatcggaactgggctttttcttggtgcaggtcgttcaattagcctgacgggtccttcaatagttcttgtctatgctatcactggcgctttcatgttcttcatgatgcgtgctattggagagatgctttatcaagatccaaatcagcatacttttattaatttcattaccaaatatttaggacccggttggggatttttctcaacactttcttattggatttccctaatatttatcggtatggcagagattacagccgtaggagagtatgttcaattttggttccctgaatggccatcctggattatccaaattgtttttttagctatcctaagttctatcaacttaattgccgtaaaagcattcggagaaaccgagttttggtttgctatgataaaagttattgcaattcttggtttaatagcaaccggtatctttatggtattaacaaactttgacaccggtcacggataccacgcttcaatctcaaatatcaccaatcattttgaatggttccctaaaggtaaattgaatttcttcatggctttccaaatggtattctttgcttatttagctattgaatttgtcggagtaacaacttctgaaacagctaatccacgtaaagttttaccaaaagcaatccaagaaattccgatgcgtattattttattctacgcaggttcattattagcaattatggccatcttcccatggcaacagttaccagttaatgagtcacctttcgttacagtattcaaactagctgggattaagtgggctgccgctttgattaactttgttgtcctaacgtctgcagcatctgctcttaattctactttatactcaacagggcgtcatttattccaattggctaatgaatcaccaaatactcttacaaaagcgttaaaattagaccaattatctcgtcaaagcgttccaagtcgagctattattgcatcagctgtaatcgttggagcttcagcacttatcagtgttttacctggtatttcagatgccttctccttaattactgcatcatcttctggtgtttacatttctatctatgttcttattatgattgcacattggaaatatcgtaaatcacctgattttatggaagatggttataaaatgcctgcttacaaaatcctttcaccaatcacacttctcttcttcctctttgtattcgtttctctcttcttgcaagattcaacatacatcggggctattggagcaaccatctggattattggatttggtttatatagtcacttcaaacataaatcacat

SEQ ID NO: 7360 - protein, 462 aa, Streptococcus agalactiae
MSKNNNDHTQKSENGMVRGLENRHVQLIAIAGTIGTGLFLGAGRSISLTGPSIVLVYAITGAFMFFMMRAIGEMLYQDPNQHTFINFITKYLGPGWGFFSTLSYWISLIFIGMAEITAVGEYVQFWFPEWPSWIIQIVFLAILSSINLIAVKAFGETEFWFAMIKVIAILGLIATGIFMVLTNFDTGHGYHASISNITNHFEWFPKGKLNFFMAFQMVFFAYLAIEFVGVTTSETANPRKVLPKAIQEIPMRIILFYAGSLLAIMAIFPWQQLPVNESPFVTVFKLAGIKWAAALINFVVLTSAASALNSTLYSTGRHLFQLANESPNTLTKALKLDQLSRQSVPSRAIIASAVIVGASALISVLPGISDAFSLITASSSGVYISIYVLIMIAHWKYRKSPDFMEDGYKMPAYKILSPITLLFFLFVFVSLFLQDSTYIGAIGATIWIIGFGLYSHFKHKSH

SEQ ID NO: 7361 - protein, 465 aa, Streptococcus agalactiae
ATGGTTAAAGGTCAAGGAAACGTTGTAGCACAAAATAAAAAAGCGCATCACGACTATACTATCGTTGAAACAATAGAAGCAGGAATTGTTTTGACAGGAACAGAAATCAAAAGTGTCCGCGCAGCGCGTATTACATTGAAAGATGGATATGCACAAATAAAAAATGGTGAAGCGTGGTTGATTAATGTTCATATTACACCATACGATCAAGGTAATATATGGAATCAAGATCCTGATCGTACACGAAAGTTATTACTAAAAAAACGTGAGATTGAAAAAATATCAAATGAACTGAAAGGGACTGGTATGACTCTGGTACCTCTAAAAGTTTACTTAAAAGATGGTTTTGCTAAAGTTCTATTGGGTTTGGCAAAAGGAAAACATGATTATGATAAGCGAGAGTCTATCAAACGTCGTGAGCAAAACCGTGATATTGCCCGTCAGTTAAAAAACTATAATTCACGA

SEQ ID NO: 7362 - protein, 155 aa, Streptococcus agalactiae; identical to SEQ ID NO: 2750

SEQ ID NO: 7363 - protein, 2402 aa, Streptococcus agalactiae
ATGAAAGAAAAAATTATAAAATATTTGGAAGAACACGGTAAAACCAGCGTTAATGACTTAGCTGCTGCCCTAGATATGGCAGGCGCAAAAGCATTTCCAAAATTAATCAAAACAATCTCAAATTTGGAGAGCCACAGGCAATTAAGATTTGACGATAATGGAAGTCTTTCTCTTCGAAAGAAAGAAGCTAAGAAAAAGGAAATCACAGTAAGAGGTCTTTTTAGAGCAAATAAAGCAGGATTTGGTTTTCTTAGTATTGACCAAGACGAAGATGATATGTTTATCGGAAAAAACGATATTGCTTATGCTATTGATGGTGACACAGTAGAAGCTGTTGTAAAGAAACCAGCGGACCGTCTTAAAGGGACTGCAGCAGAAGCGCGTGTTGTTAATATTGTTGAACGTAGTTTAAAGACGCTTGTTGGTAAGTTTGTCTTAGACGATGAGCGCCCTAAATACGCAGGATATATCAAATCAAAAAATCAAAAAATTAATCAAAAAATTTATATACGCAAAGAACCGGTCGTTTTAGACGGAACAGAAATTATCAAAGTAGATATTGATAAATATCCGACACGAGGACATGATTACTTCGTAGCAAGTGTCCGTGATATCGTTGGACATCAAGGAGATGTTGGTATTGATGTTTTAGAAGTCTTGGAAAGTATGGATATCGTCTCAGAATTTCCTGAGGACGTTATTGCAGAAGCTAATGCTATCCCAGATGCTCCAACGGAGAAAGATTTAATTGGGCGTGTTGATTTACGTCAAGAGGTCACTTTCACTATTGATGGAGCTGACGCCAAAGATTTAGACGATGCTGTGCATATTAAATACTGGATAATGGTCATTTTGAACTTGGAGTTCATATCGCAGATGTATCATACTATGTTACTGAAGGCTCTGCCTTAAATCGTGAAGCACTTAGTCGTGGTACGTCCGTATATGTCACAGATCGCGTTGTACCAATGTTACCAGAGCGTCTATCTAACGGTATATGTTCATTAAATCCAAATCTTGATCGTTTAACGCAGTCTTGTATTATGGAAATTGACCAAAATGGGAAAGTTGTTAATCATCAAATTACACAGTCAGTGATTAATACCACTTATCGTATGACTTATACTGCTGTAAATGATATTATTGCTGGCGATGAGGAAATCTGCTCAGAATATGAGTCTATTGTGCCCTCAGTACAGCATATGGTTACTTTACACCATACTTTGGAAGCTATGCGTACGCGTCGTGGAGCGCTGAATTTTGACACATCTGAAGCAAAAATTATGGTTAATGATAAGGGAATGCCAGTTGATATTGTTATTCGCAACAGAGGCATTGCTGAACGCATGATTGAGTCATTTATGTTGGCGGCAAATGAAACGGTTGCTGAACATTATGCTCGTCTAAAATTACCATTTATTTATCGTATACACGAAGAGCCTAAAGCTGAAAAATTACAAAAATTCATCGATTATGCTTCTATTTTCGGTGTTCACATTCAAGGAACAGCAACTAAAATCACCCAATCTGCTTTACAGGACTTTATGAAAAAAGTACAAGGGCAGCCAGGAAGTGAAGTGTTATCTATGATGTTATTGCGCTCGATGCAACAAGCTAGATATTCTGAACACAACCATGGACATTATGGACTTGCTGCGGAATATTACACTCACTTTACTAGCCCCATTCGACGTTATCCAGACTTGTTAGTTCATCGTATGATTCGTGATTATGGTGATAAAGCGATGGATAAAGCTGATCATTTTGCTAACCTTATCCCAGAAATTGCAACTCAAACGTCTAGTCTTGAGAGACGTGCCATTGATGCTGAACGTATTGTAGAGGCAATGAAGAAAGCTGAATATATGGAAGAATATGTTGGTGAGGAATTTGAAGGTGTGGTTGCAAGCGTTGTTAAATTTGGTATGTTTGTAGAATTACCAAATACTATTGAAGGATTGATTCACGTAACGACCTTGCCTGAATATTATCACTTTAATGAACGTACGCTGACGCTTCAAGGTGAGAAATCTGGGAAAGTTTTCCGTGTTGGTCAACAAATTAAGGTTAAGTTGATTCGTTCTGATAAGGAAACTGGTGATATCGATTTTGATTATTTACCATCAGATTTTGATATTGTCGAAAAGGTAAGTAAAAGTTCGCGTGAGGGTCGTCCTAATCGAAGTTCTAAACGAGAACTTCAGCATAGAATTTCTGAGCGTGATAATAAGAACAAAAATACATCTAAGAAAAAAGCATCTCGAAAACCCAAAAGGAACTCGGATAGCAAATCACATCATCACAAAGACGATAGAACAACAGGTTCAACCAAGAAAAAAACGAAAAAAACTTTCTATAAAGGCGTTGCTAAGAAAGGTCAAAAACGGAAATCTAAGAAAGGT

SEQ ID NO: 7364 - protein, 801 aa, Streptococcus agalactiae
MKEKIIKYLEEHGKTSVNDLAAALDMAGAKAFPKLIKTISNLESHRQLRFDDNGSLSLRKKEAKKKEITVRGLFRANKAGFGFLSIDQDEDDMFIGKNDIAYAIDGDTVEAVVKKPADRLKGTAAEARVVNIVERSLKTLVGKFVLDDERPKYAGYIKSKNQKINQKIYIRKEPVVLDGTEIIKVDIDKYPTRGHDYFVASVRDIVGHQGDVGIDVLEVLESMDIVSEFPEDVIAEANAIPDAPTEKDLIGRVDLRQEVTFTIDGADAKDLDDAVHIKLLDNGHFELGVHIADVSYYVTEGSALNREALSRGTSVYVTDRVVPMLPERLSNGICSLNPNLDRLTQSCIMEIDQNGKVVNHQITQSVINTTYRMTYTAVNDIIAGDEEICSEYESIVPSVQHMVTLHHTLEAMRTRRGALNFDTSEAKIMVNDKGMPVDIVIRNRGIAERMIESFMLAANETVAEHYARLKLPFIYRIHEEPKAEKLQKFIDYASIFGVHIQGTATKITQSALQDFMKKVQGQPGSEVLSMMLLRSMQQARYSEHNHGHYGLAAEYYTHFTSPIRRYPDLLVHRMIRDYGDKAMDKADHFANLIPEIATQTSSLERRAIDAERIVEAMKKAEYMEEYVGEEFEGVVASVVKFGMFVELPNTIEGLIHVTTLPEYYHFNERTLTLQGEKSGKVFRVGQQIKVKLIRSDKETGDIDFDYLPSDFDIVEKVSKSSREGRPNRSSKRELQHRISERDNKNKNTSKKKASRKPKRNSDSKSHHHKDDRTTGSTKKKTKKTFYKGVAKKGQKRKSKKG

SEQ ID NO: 7365 - protein, 187 aa, Streptococcus agalactiae
TGATTATCTCAATTTCATGCAACCACAAAAGAATCCAAGTAGTAATGTTTTTGATAGTAGCGGTTCTGAAGCCCTTTTTGAACGTAGTAAAGCTCGAGGATTTGAAGCTTTTATGCAACGTTTTACAGGTGTTTTAGTCTTTTTCTGGCTACTAATCGGCTTAGTATTATCTATTTTATCAAGTCAT

SEQ ID NO: 7366 - protein, 63 aa, Streptococcus agalactiae
LIISIFMQPQKNPSSNVFDSSGSEALFERSKARGFEAFMQRFTGVLVFFWLLIGLVLSILSSH

SEQ ID NO: 7367 - protein, 1167 aa, Streptococcus agalactiae
GTGGCTTGGCTCGGTAATTTTTTTACTGGGGCAAGCTTTTCACTTGTTATGCCTTTTATGGTATTATATGTAGAACAATTAGGAGCACCTAGCAACAAAGTAGAGTGGTATGCAGGCCTATCAGTATCCTTATCAGCCTTGTCTTCAGCTTTAGTTGCCCCATTATGGGGGCGCTTAGCTGATAAATATGGTAGAAAACCGATGATGGTAAGAGCAGGGTTGATGATGACTTTTACTATGGGAGGCCTTGCTTTCATTCATAGTGTTACAGGACTTCTGATTTTACGTATATTAAACGGCATTTTTGCAGGCTATGTACCTAACTCTACAGCTTTGATAGCAAGTCAAGCTCCTCAAGAGGAATCAGGATATGCCTTAGGAACCTTAGCGACAGGAGTGACTGGAGGTATGTTAATTGGTCCACTTTTAGGGGGACTTTTAGCAGAGTGGTTTGGTATTAGGGAAGTTTTTTTATTAGTGGGAACCATATTGTTAATATCTACTTTAATGACCATTTTTATGGTAAAGGAAGATTTCAAACCCATTTCTAACGAAGAAACCATGCCAACTACAGAAGTGTTCAAAAGCGTTAAAAGCTTACAAATTTTAATAGGGCTGTTTGTAACAAGCATGATTATTCAAATTTCTGCACAATCAATTGCACCTATTTTAACACTTTACATTCGTCATTTAGGACAGACTGAAAACTTGATGTTTGTTTCCGGATTAATTGTTTCTGGTATGGGATTCTCTAGTATTCTGAGTAGTCCAAAGCTAGGAAGAATCGGGGATCGCATAGGCAATCATCGTTTGCTATTATTAGCTCTACTGTATAGTTTCCTCATGTATGTTTTATGTTCATTGGCACAGACTTCATTACAGTTAGGGGTTATTAGATTCCTGTATGGTTTTGGAACAGGTGCCTTGATGCCGAGTATTAATTCAATCTTGACTAAAATTGCTCCAAGACAAGGTTTATCAAGGATTTTCAGTTATAACCAAATGTTTAGCAATTTAGGACAAGTATTAGGTCCTTTTGTCGGTTCAGCAGTTTCTATTCATTTAGGATTCCGATGGGTTTTCTTTGTGACTAGCTTCATCGTTTTAGCTAATTTTGTTTGGTGTTTTATTAATTTTAGAAAATATATTAGAGTTAAGGAAATTGTG

SEQ ID NO: 7368 - protein, 389 aa, Streptococcus agalactiae; identical to SEQ ID NO: 2756

SEQ ID NO: 7369 - protein, 1644 aa, Streptococcus agalactiae
ATGACAAGTAAAGCATTAATATGGTCTATATTACAGATTGATAGTGCTAGAGCTTATAATAGTTTTTTATATTACCTTCAGAAAATCCCCTGGTTGGGAAGAAAAATCCCTAACCGATGGTTTAAAACCGATGATATAAAAGGTGTAGTACTATTTATTCGTATCATTTTCTTTTTCTTAAGAGGTTTTGGTCGTTCCATAGGTTACGTACTATATTGTTATGTTTTATCATTTTTTGTTAGAAGTGGCATGAAGCAGTTAAATATTTTACCGCAAGAAGGTTTTACCCTAACTTTAACATTGATGGTGATTACCTCTCTTTTAATTGTCATAAATTTCTATATAAAACTTATAGAACCTAATGATATGCAACAAACTCATATGATTCGCCTTTTCAGAATTGAGCCATCGAGGTATTTCCAATCCGCTGAACTTTTAGAAGCCAGTAGTGAACTATTTTTTAGAAGTTTGAGCTTTGGCATATTTTTCCATTTAAATCACTTTGCTTTTTGGCATGGTTTGACTTTTGCTTTATTTTTAGCAGGTAGTCGCCTTGGAATCAAGGTGCTCTGTTTACCTTTATATGGTAGAGGTAAAGACCAAGAGAATCCAGAGTCTTTACTAAATATTTTATTTTACTTAGGGATTGGTATAGGAGTCTTCCTTTCTCTCTTTTTCCTTCTTCTTGGCAAACAGTTCTCTCCATATCCATTTTTTTCATGGTACACCGGTATTGCAGGACTTATCATATGGTTAGTTAGTTACTATCGATTAAAAACTTATTCTAAACTTAACCACTTGACCTACCTTACCCTAACGCATGAGACGATGAAGGAGAAAATTGCAAAGATTGATAATATAGAGCTGCTTGGGATTGAAATGAAAGATAGGGATATAAATGTCAGTGAACTTTCTCCCCTGCTATTTGAAAATTTATCAGGTATTTCATATTTAAACGCTATCTTTTTAAAACGGATGAGTAGATACTTGCAAAGGAAAATTTTGGTACGTTTAGCTGTTTTAAGTGTTCTGTTTGGAATAGAACTCCTTTTCCTGCTATTTTTTAAAGAAAAGATAAATATTCCGATGAATGAGCATAGTTTTTCAAAATTCCTATTTTTGAGTGCAGTTCCAGGATATCTAATATATATCGGTGAATCCTATTCAAAATTTTGTTTCTATCATTTGGATCGTCCATTATTAAGATATAATTTCTATCGTGAAAGAGAAAATATCTTAGCAACCTTAAAAATACGTTTCCTTTATAGTATAAAACTTAATTTCCCCATTTTTGTAGCTTTAAACATATGTTTTGGAACCTATTATTTTAATTTTTTCACCCCTAAGATTGATCAGATTATCATATTAGTAATTACACAAGCTATATCAATGATTTTATTTAGTTTTTACTTTTTGTATCTTTATTTCTTCTTACAGCCTTTTACAGAAGGATTAAAATCAAAGAGTGCTATGTATAATATTTTAACCTTTATTATATACTATATGGGATATAAGCTATTTACCTTTACTAAATCTATAACGATGCCAATATTATTAGTAAGCCTAGGAATTATAGTTGTTATTTTAATTATTGGCTATTTAGCAGTTGTAGTATTTGCTCCAAAAACTTTCCGTTTAAAAAGT

SEQ ID NO: 7370 - protein, 548 aa, Streptococcus agalactiae
MTSKALIWSILQIDSARAYNSFLYYLQKIPWLGRKIPNRWFKTDDIKGVVLFIRIIFFFLRGFGRSIGYVLYCYVLSFFVRSGMKQLNILPQEGFTLTLTLMVITSLLIVINFYIKLIEPNDMQQTHMIRLFRIEPSRYFQSAELLEASSELFFRSLSFGIFFHLNHFAFWHGLTFALFLAGSRLGIKVLCLPLYGRGKDQENPESLLNILFYLGIGIGVFLSLFFLLLGKQFSPYPFFSWYTGIAGLIIWLVSYYRLKTYSKLNHLTYLTLTHETMKEKIAKIDNIELLGIEMKDRDINVSELSPLLFENLSGISYLNAIFLKRMSRYLQRKILVRLAVLSVLFGIELLFLLFFKEKINIPMNEHSFSKFLFLSAVPGYLIYIGESYSKFCFYHLDRPLLRYNFYRERENILATLKIRFLYSIKLNFPIFVALNICFGTYYFNFFTPKIDQIIILVITQAISMILFSFYFLYLYFFLQPFTEGLKSKSAMYNILTFIIYYMGYKLFTFTKSITMPILLVSLGIIVVILIIGYLAVVVFAPKTFRLKS

SEQ ID NO: 7371 - DNA, 699 bp, Streptococcus agalactiae
atggagttagtaattagagatattcgtaagcggtttcaggaaacagaggtcttgagaggagcaagttaccgattttattcaggtaaaataacaggggtcttaggtaggaatggtgctgggaaaacaactttatttaatatactttatggggatcttgcagctgacaacgggaccatttgtttattgaaggataatcacgagtatcctcttaccgataaggatattggtattgtttattccgaaaactaccttccagaatttttaacagggtatgaatttgtaaaattttacatggatttacatccttcagatgatttaatgacaatagatgattatttagattttatggaaataggacaaacagagcgtcatagaattatcaaaggatattctgatggaatgaagagtaagctctcattaatttgcctgatgatttctaagccaaaagtaattttactagatgagccactgactgcagttgatgttgtatcaagtattgcaataaaacgccttttgttggaattaagtgaggatcatattattatattatcaactcatataatggccttagcagaagatctatgtgatattgtggctgtattagacaaaggaaaactccaaacattagatattgatcgtaaacatgaacaattcgaagagcgtcttcttcaagtgttgaagggagatgaatatgacaag

SEQ ID NO: 7372 - protein, 233 aa, Streptococcus agalactiae
MELVIRDIRKRFQETEVLRGASYRFYSGKITGVLGRNGAGKTTLFNILYGDLAADNGTICLLKDNHEYPLTDKDIGIVYSENYLPEFLTGYEFVKFYMDLHPSDDLMTIDDYLDFMEIGQTERHRIIKGYSDGMKSKLSLICLMISKPKVILLDEPLTAVDVVSSIAIKRLLLELSEDHIIILSTHIMALAEDLCDIVAVLDKGKLQTLDIDRKHEQFEERLLQVLKGDEYDK

SEQ ID NO: 7373 - DNA, 585 bp, Streptococcus agalactiae
atgacaaaaataataggactgacaggagggatagcttctggaaagtcaacggtaacaaaaataatacgagaatcaggttttaaagtcatagatgcggatcaagtggttcataaattgcaagctaagggtgggaaactttaccaagctttattagaatggttgggtcccgagatacttgatgctgatggtgagttggatagaccaaagctttctcaaatgatttttgctaatccagacaatatgaagacatcagctaggctacaaaatagtatcattcgtcaagagttagcatgtcagcgcgaccaattaaaacaaacagaagagatatttttcgtggatattcctttattgattgaagaaaagtatataaaatggtttgatgagatttggttggtatttgttgataaagaaaaacaattacaacgattaatggcccgtaacaactacagtcgagaagaagcagaattacgactttcacaccaaatgcctttaacagataaaaaaagtttcgctagtcttattattaataataatggtgatttaataactttaaaagagcaaatattggatgctcttcaacgttta

SEQ ID NO: 7374 - protein, 195 aa, Streptococcus agalactiae
MTKIIGLTGGIASGKSTVTKIIRESGFKVIDADQVVHKLQAKGGKLYQALLEWLGPEILDADGELDRPKLSQMIFANPDNMKTSARLQNSIIRQELACQRDQLKQTEEIFFVDIPLLIEEKYIKWFDEIWLVFVDKEKQLQRLMARNNYSREEAELRLSHQMPLTDKKSFASLIINNNGDLITLKEQILDALQRL

SEQ ID NO: 7375 - DNA, 819 bp, Streptococcus agalactiae
atgccagaattaccagaagtagaaaccgttagaaaaggactagaaagacttgtagttaatcaagaaatagcttctataacgattaaagtccctaaaatggtgaaaactgatttgaatgactttatgataagtctaccaggaaaaacaattcaacaggtattgagacgagggaagtatcttctttttgattttggtgaaatggttatggtatcacatttacgcatggaaggaaaatatctactcttcccaaataaagtaccagataacaaacattttcacctttatttcaaattgactaatggcagcacattggtttaccaagatgtccgtaaatttgggacatttgagttggttcgtaaatcatctctcaaagattattttactcaaaaaaaattaggtcctgagccaactgctgacacatttcaatttgagcctttttcaaaaggcttagcaaactccaaaaagccaataaaacctttactattagatcagagattagtagcaggacttggaaatatttacgtagatgaagtcttgtgggcagcaaaaattcacccacagcgtttggctaatcaattgaccgaatctgaaacaagcttattacacaaggaaattattcgcattttaactttaggcatcgaaaaaggtggctccacgattagaacatataagaatgctcttggagaggacggtacgatgcaaaagtatttacaggtctatggtaaaactgggcaaccgtgtccaaggtgtggttgtttaattaagaagataaaagtaggagggagagggacgcattattgccctcggtgtcaatgctta

SEQ ID NO: 7376 - protein, 273 aa, Streptococcus agalactiae
MPELPEVETVRKGLERLVVNQEIASITIKVPKMVKTDLNDFMISLPGKTIQQVLRRGKYLLFDFGEMVMVSHLRMEGKYLLFPNKVPDNKHFHLYFKLTNGSTLVYQDVRKFGTFELVRKSSLKDYFTQKKLGPEPTADTFQFEPFSKGLANSKKPIKPLLLDQRLVAGLGNIYVDEVLWAAKIHPQRLANQLTESETSLLHKEIIRILTLGIEKGGSTIRTYKNALGEDGTMQKYLQVYGKTGQPCPRCGCLIKKIKVGGRGTHYCPRCQCL

SEQ ID NO: 7377 - DNA, 846 bp, Streptococcus agalactiae
atggaaaaagaattaggaaaaacactaagaagattacgtaaaggaaaaaaagttagtatttcttctttagcagatgagcacctatccaagtcacaaatctcaaggtttgagagaggagagtcagaaattacttgtagtcgtttgcttaatattttagacaaactcaacatcactattgatgaatttgtgtcgattcattctaaggcgcacactcatttttttatccttttaaatcgagtaagaaaatattgtgctgaaaaaaatgtaactaaattagtggctctcttagaggatcataaccataaagactatgaaaagattatgattaaggctcttattttttcaattgatcaatcaatagagcctaatcaagaagaattagcacgcttaacagactatctttttacggtggagcagtggggatattatgaaattattctcttaggaaattgctcacgtctcattaattacaatactttatttttattgaccaaagaaatggttaattcgtttgcttattcagaacaaaataaaaccaataaaatcctagttacacaattagcaattaattgtctaatcatcagcattgatcactcttactttgagcatagccactacttaattgataaggttagatcattgttacaggatgaagttaatttctatgaaaaaactgttttcttatatgtaactggatactatcatttaaaacttggtgatacttcttcaggaaaagaagatatgaggaaagctttacagatttttaaatatttaggtgaagattcattttacaatacttataatgaacattattgtcaaaaagtacttggcaataataaagaatgc

SEQ ID NO: 7378 - protein, 282 aa, Streptococcus agalactiae
MEKELGKTLRRLRKGKKVSISSLADEHLSKSQISRFERGESEITCSRLLNILDKLNITIDEFVSIHSKAHTHFFILLNRVRKYCAEKNVTKLVALLEDHNHKDYEKIMIKALIFSIDQSIEPNQEELARLTDYLFTVEQWGYYEIILLGNCSRLINYNTLFLLTKEMVNSFAYSEQNKTNKILVTQLAINCLIISIDHSYFEHSHYLIDKVRSLLQDEVNFYEKTVFLYVTGYYHLKLGDTSSGKEDMRKALQIFKYLGEDSFYNTYNEHYCQKVLGNNKEC

SEQ ID NO: 7379 - DNA, 1032 bp, Streptococcus agalactiae
  misc_feature 1027, 1028, 1029, 1030, 1031: n = A,T,C or G
atgaagattaaaaaaattattagtggccttgccgcagctttaattatcagttcactatcaactattaactatgaggttaaagctgatgacaccaccagtgagtatcactatatcagtaagcaaaataatgaagagcagcttattagttacatcaaggaacaacatcgtttgctcaatcaatttgttgttgataatgtcaactcattcactcaactaaatgctaatccaactattgaacagttaaatagagctataacattatttaaacaaaaagatgagcaattatttaaccaggtgaaagctggtcatctctctcccagtaactataatgctatcgttaatcaacgtaatgtcattaaccaaactgttcaaaatctgattgaccaaaatcataataagcttcagacaagtcaaaataaagcagctcagctcgtggggcaacgtaatcaggttgttaacaaaattcaagctattttagcaactgtaaactacaactctgtgaattctatacaagaagctgaaaatttatttcattcactcagaaatcaaattgaacctcttgtagctgaagttaataattacaaagctgctatggcaatccttcaacaagaagtagatgccctatcaacagcggctattgaaactgagacttctaaacttgctactctcaaagttagcgaaaatacttctgttcctgcaaacaaagtagaagaaaaaactactcaatcagaagcgtcaggcaataaacaagaagtaactaagagtgaggaaaaacaggctacctctgatgcaaaggcatcacagcctgagtcagctaatattgccgattacgatagtttaaaagaagttttacgaaataatattagcaaccaagtaccacacatcagtgttcaaatggagtttaaaactcaagaacagttgacgaataccaaaaaaatctcggaagcatcatccsggraaattggagatacacttggracagcaactgrattycatgcccaaagtaacattagcacttatactcttnnnnnt

SEQ ID NO: 7380 - protein, 344 aa, Streptococcus agalactiae
  VARIANT 319, 320, 330, 343, 344: Xaa = Any Amino Acid
MKIKKIISGLAAALIISSLSTINYEVKADDTTSEYHYISKQNNEEQLISYIKEQHRLLNQFVVDNVNSFTQLNANPTIEQLNRAITLFKQKDEQLFNQVKAGHLSPSNYNAIVNQRNVINQTVQNLIDQNHNKLQTSQNKAAQLVGQRNQVVNKIQAILATVNYNSVNSIQEAENLFHSLRNQIEPLVAEVNNYKAAMAILQQEVDALSTAAIETETSKLATLKVSENTSVPANKVEEKTTQSEASGNKQEVTKSEEKQATSDAKASQPESANIADYDSLKEVLRNNISNQVPHISVQMEFKTQEQLTNTKKISEASSXXIGDTLGTATXFHAQSNISTYTLXX

SEQ ID NO: 7381 - protein, 624 aa, Streptococcus agalactiae
TTGCTTAATATTTTAGACAAACTCAACATCACTATTGATGAATTTGTGTCGATTCATTCTAAGGCGCACACTCATTTTTTTATCCTTTTAAATCGAGTAAGAAAATATTGTGCTGAAAAAAATGTAACTAAATTAGTGGCTCTCTTAGAGGATCATAACCATAAAGACTATGAAAAGATTATGATTAAGGCTCTTATTTTTTCAATTGATCAATCAATAGAGCCTAATCAAGAAGAATTAGCACGCTTAACAGACTATCTTTTTACGGTGGAGCAGTGGGGATATTATGAAATTATTCTCTTAGGAAATTGCTCACGTCTCATTAATTACAATACTTTATTTTTATTGACCAAAGAAATGGTTAATTCGTTTGCTTATTCAGAACAAAATAAAACCAATAAAATCCTAGTTACACAATTAGCAATTAATTGTCTAATCATCAGCATTGATCACTCTTACTTTGAGCATAGCCACTACTTAATTGATAAGGTTAGATCATTGTTACAGGATGAAGTTAATTTCTATGAAAAAACTGGTTTCTTATATGTAACTGGATACTATCATTTAAAACTTGGTGATACTTCTTCAGGAAAAGAAAGATATGAGGAAGCTTTACAGATTTTT

SEQ ID NO: 7382 - protein, 208 aa, Streptococcus agalactiae
MLNILDKLNITIDEFVSIHSKAHTHFFILLNRVRKYCAEKNVTKLVALLEDHNHKDYEKIMIKALIFSIDQSIEPNQEELARLTDYLFTVEQWGYYEIILLGNCSRLINYNTLFLLTKEMVNSFAYSEQNKTNKILVTQLAINCLIISIDHSYFEHSHYLIDKVRSLLQDEVNFYEKTGFLYVTGYYHLKLGDTSSGKERYEEALQIF

SEQ ID NO: 7383 - protein, 498 aa, Streptococcus agalactiae
ATGGTAGGATTACATAAAGAATATAAACAGTTTGTAGATTCTTTTGTCAAAGAAAATATTACTAACAAAAATATCACAAGTGATTATGAAAAAGCTAAAGTAATTCATGACCACTTGGTTAATAATTACACTTACGCGACTGAAGAACTGGCAACCACTCGTGAAACTGCTAGTGGTATCAGTATCCATGCTCCTGAAGCACTCTACAAAGATAAACGTGGTGTTTGTCAAGCCTTTGCAGTAATGTTTAAAGATATGGCTGCTACTGCTGGCTTATCAGTATGGTATGTAACTGGTCAAGCTGGAGGTGGAAATCACGCTTGGAACATTGTTACTATTAATGGCGTTAAATATTATGTTGATACAACATGGGATAATAATATAAAAAGCAATAAATATTTCCTTGTTGGTAAAACAATAATGGATGCTGATCATCTTTTGGATAGTCAATACAATGCATTAGCTAAAGATATTCCAGCTGATCGCCATCAAGGTGCA

SEQ ID NO: 7384 - protein, 166 aa, Streptococcus agalactiae
MVGLHKEYKQFVDSFVKENITNKNITSDYEKAKVIHDHLVNNYTYATEELATTRETASGISIHAPEALYKDKRGVCQAFAVMFKDMAATAGLSVWYVTGQAGGGNHAWNIVTINGVKYYVDTTWDNNIKSNKYFLVGKTIMDADHLLDSQYNALAKDIPADRHQGA

SEQ ID NO: 7385 - protein, 174 aa, Streptococcus agalactiae
ATGTCTAAAAAGACTGATTCAAATTATCTACATTCCAATTGTTCTGACAAGAAAATTTGGAGCGATGAGGCGCCTCTGCAACAGGAGACTATCCCTAAAGACAGAGATTGTGTTATCAAACCTGTCATTACTATGACAGTTGAACATGTGGAAATCCCATTAGATGACCAATCT

SEQ ID NO: 7386 - protein, 58 aa, Streptococcus agalactiae
MSKKTDSNYLHSNCSDKKIWSDEAPLQQETIPKDRDCVIKPVITMTVEHVEIPLDDQS

SEQ ID NO: 7387 - protein, 96 aa, Streptococcus agalactiae
ATGTTAAAAGATGTTAATGTTGGAATGAGTCATTTATTAGTTAGAGGTGCTATTATTCTAGTAGTAGGGATTGTTTTTCTGTTGCAACAGATTCAG

SEQ ID NO: 7388 - protein, 32 aa, Streptococcus agalactiae; identical to SEQ ID NO: 2758

SEQ ID NO: 7389 - protein, 330 aa, Streptococcus agalactiae
TTGCTTGGGCATTGGGTGATTAGTTTACTATCAATAGGGTTAGAGTGGAGTTGGAGTATATGGATTGGCATTAATCTTATAATGATGATTCTGTTGAGTTATGTGCTAACAAAAACTGAGCCAATCAGTAACTACCAAGAGTCATCATCTAACCTCAAAAAATGGCTATTTGCAATAGGTGCTTTTAGCGTTTTATTTTGCTGGGCACTACTAGTAAAAACATTTTTCCCAATAAGGCAAAACCAGGAGGGATTAATAGCTGATATGAATCAGGTCAATCACTACTTTCGAGTTGTCTTATTATTGACTATCTGTCTTATTGCCCCAATT

SEQ ID NO: 7390 - protein, 110 aa, Streptococcus agalactiae
MLGHWVISLLSIGLEWSWSIWIGINLIMMILLSYVLTKTEPISNYQESSSNLKKWLFAIGAFSVLFCWALLVKTFFPIRQNQEGLIADMNQVNHYFRVVLLLTICLIAPI

SEQ ID NO: 7391 - DNA, 111 bp, Streptococcus agalactiae
ttggtaaaaatcgaaaagttaccagactttaaaggggagttttttatttgtcaacagttagtagaaaaacgatatattgctccatttagattaattatggagataaccaaa

SEQ ID NO: 7392 - protein, 37 aa, Streptococcus agalactiae
MVKIEKLPDFKGEFFICQQLVEKRYIAPFRLIMEITK

SEQ ID NO: 7393 - DNA, 399 bp, Streptococcus agalactiae
atgcataatatattaagatttttaggcattgttattatttctgcagtgattctatttagtataggtagtttctacgatttatcattaatgaaaaatatactacttatctgttggagttttctctttgatctattggtttttgtcttcaaacaaagacaaacgacagaagtactcacatggtatcaagttgttaagcaattttggttatttattaagtgtactattcttattcctatcttagttgcttttattataatgaaaggatgtttgacaagtatatcagatatattaatttacttttatttacaccttgtcgttgtttattatacgataggaatgattttatcattaggtcgtatcatttctcctgaacactctatgtttaataaacttagaaag

SEQ ID NO: 7394 - protein, 133 aa, Streptococcus agalactiae
MHNILRFLGIVIISAVILFSIGSFYDLSLMKNILLICWSFLFDLLVFVFKQRQTTEVLTWYQVVKQFWLFIKCTILIPILVAFIIMKGCLTSISDILIYFYLHLVVVYYTIGMILSLGRIISPEHSMFNKLRK

SEQ ID NO: 7395 - DNA, 897 bp, Streptococcus agalactiae
atgacatttaagtcaggatttgtagcaattttaggtcgtccaaatgttggaaaatcaaccttcctaaaccatgttatgggacaaaaaattgctatcatgagtgataaagctcaaacaacacgtaataaaattatggggatttatacaacagaaactgagcaaattgttttcattgataccccaggaattcataaaccaaagaccgcccttggtgattttatggttgaatctgcttatagtactttacgtgaagttgaaacagttcttttcatggttcctgccgatgaaaagcgaggcaaaggcgatgatatgattattgaacgtcttaaggctgccaagattcctgttattttagtaatcaacaaaattgataaggttcatccagaccaacttttggaacagattgatgacttccgtagtcaaatggattttaaagaagtagtgccaatttctgcccttcaaggaaataatgtgccaaccctaatcaagttattgactgataatcttgaagaaggtttccaatatttcccagaagatcagattactgatcatccggaacgatttttagtatcagaaatggttcgtgagaaggtacttcatttaacgcaacaagaggttcctcactcagtagctgttgttgtcgaatccatgaaacgtgatgaagaaactgataaagtgcatattcgtgcaactatcatggttgaacgtgatagtcaaaaaggcattatcattggaaaacaaggtgctatgctcaagaaaataggaaaaatggcgcgccgtgatattgaacttatgttaggtgataaagtttacctagagacttgggtaaaagtcaagaaaaactggcgtgataaaaagcttgatttagctgattttggctataatgaaaaagagtat

SEQ ID NO: 7396 - protein, 299 aa, Streptococcus agalactiae
MTFKSGFVAILGRPNVGKSTFLNHVMGQKIAIMSDKAQTTRNKIMGIYTTETEQIVFIDTPGIHKPKTALGDFMVESAYSTLREVETVLFMVPADEKRGKGDDMIIERLKAAKIPVILVINKIDKVHPDQLLEQIDDFRSQMDFKEVVPISALQGNNVPTLIKLLTDNLEEGFQYFPEDQITDHPERFLVSEMVREKVLHLTQQEVPHSVAVVVESMKRDEETDKVHIRATIMVERDSQKGIIIGKQGAMLKKIGKMARRDIELMLGDKVYLETWVKVKKNWRDKKLDLADFGYNEKEY

SEQ ID NO: 7397 - DNA, 396 bp, Streptococcus agalactiae
atggacttaaacgacaataatcaaaaaaaatggaaaaatcgcaccttaacatcaagcatggaatttgctgttacagggatttttacagcttttaaagaagaaagaaatatgcgtaagcatttggtttctgccattttagtaatacttgctggtcttacttttcaagtatctatggtggagtggttatttcttttattgagtatttttttggtaattacttttgaaattatcaattcagctattgaaaatgtagttgatttggcaagtaattaccatttctcgatgctggctaaaaatgctaaagatatggcagcaggagcggttttagttgtttccttatttgccgtattggtgggattgattatttttatacccaagatacttgctttactttta

SEQ ID NO: 7398 - protein, 132 aa, Streptococcus agalactiae; identical to SEQ ID NO: 2764

SEQ ID NO: 7399 - DNA, 495 bp, Streptococcus agalactiae
atgtacgttgaaatgattgatgaaactggacaagtttcagaagatatcaaaaagcaaactcttgatttgttagagtttgcagcacaaaaaacaggtaaagagaataaagaaatggctgtaacgtttgtcactaatgaacgtagccatgaattgaatttagagtatcgagataccgatcgtccgactgatgttatcagtttagaatataaacctgaggttgatatttcttttgatgaagaagatctggctgaaaatcctgaacttgctgagatgctagaagattttgattcttatattggtgaactttttatttctattgataaagctaaagaacaagcagaagagtacggtcactcttatgaacgtgaaatgggctttttagctgtacatggttttttgcatattaacggttatgatcattatacacccgaagaagaaaaagagatgttcagcttacaggaagaaattttaactgcttatggacttaaacgacaa

SEQ ID NO: 7400 - protein, 165 aa, Streptococcus agalactiae
MYVEMIDETGQVSEDIKKQTLDLLEFAAQKTGKENKEMAVTFVTNERSHELNLEYRDTDRPTDVISLEYKPEVDISFDEEDLAENPELAEMLEDFDSYIGELFISIDKAKEQAEEYGHSYEREMGFLAVHGFLHINGYDHYTPEEEKEMFSLQEEILTAYGLKRQ

SEQ ID NO: 7401 - protein, 804 aa, Streptococcus agalactiae
ATGAAGATAACATTACACGGCGTTGCTGAAACGTTATTAATCACCTTATATATTAGGGCTAAAGATGCGATGGCTAAACATCCGATACTTAATGATCAAAAATCCTTAGCAATTGTTGAACAGATAGAATATGATTTTGATAAATTCGATAATTCAGAAGCTTCTTTTTATGCAACATTAGCTAGAATTCGCGTTATGGATAGAGAAATCAAAAAATTTATTAGAGAAAATCCAAATAGTCAAATCCTTTCAATTGGTTGTGGACTTGATACAAGGTTTGAAAGAGTCGATAATGGACAAATTAGGTGGTATAACCTTGATTTGCCAGAGGTTATGGAGATAAGAAAATTATTTTTTGAAGAGCATGAAAGAGTTACTAATATAGCAAAATCAGCCCTAGATGAAACTTGGACACGGGAGGTAAATCCCCAAAATGCCCCTTTTCTAATCGTGTCAGAAGGTGTTTTAATGTTTCTAAAAGAAGATGACGTAGAGACTTTTCTTCATATCCTGACAAATTCATTTAGCCAATTTATGGCACAATTTGATTTGTGTCATAAGGAAATGATTAATAAAGGAAAGCAACATGATACAGTAAAGTATATGGATACAGAATTTCAGTTTGGTATCACAGATGGTCATGAGATTGTGGATTTAGACCCTAAATTAAAGCAAATAAATCTGATTAACTTTACAGATGAGATGAGCAAATTTGAGTTAGGCACACTTCGCTCTTTACTTCCAACAATTCGTAAATTTAATAATTGTTTAGGTGTGTACGAATATAAAGCATCTGAGAAAAAG

SEQ ID NO: 7402 - protein, 268 aa, Streptococcus agalactiae
MKITLHGVAETLLITLYIRAKDAMAKHPILNDQKSLAIVEQIEYDFDKFDNSEASFYATLARIRVMDREIKKFIRENPNSQILSIGCGLDTRFERVDNGQIRWYNLDLPEVMEIRKLFFEEHERVTNIAKSALDETWTREVNPQNAPFLIVSEGVLMFLKEDDVETFLHILTNSFSQFMAQFDLCHKEMINKGKQHDTVKYMDTEFQFGITDGHEIVDLDPKLKQINLINFTDEMSKFELGTLRSLLPTIRKFNNCLGVYEYKASEKK

SEQ ID NO: 7403 - protein, 117 aa, Streptococcus agalactiae
GTGACTGTTTTTTTAGAAAGCATAAGAAGTACAGAAAAAGAAAATTATGGAATATTGGATGGTGGGGATATGCTTTACTTACGGTATTGGAATGATATACTTAAAGAAATCCAGTTT

SEQ ID NO: 7404 - protein, 39 aa, Streptococcus agalactiae
MTVFLESIRSTEKENYGILDGGDMLYLRYWNDILKEIQF

SEQ ID NO: 7405 - protein, 474 aa, Streptococcus agalactiae
ATGAAACAAGATTATATTTCCTACATTAGGTCAAAAGTTGGACATGAGACTATCTTTTTAACATATTCTGGTGGTATTTTGACAGATGGTAAGGGACGTGTCTTACTCCAATTAAGAGCTGATAAGAATTCTTGGGGAATTATTGGTGGATGTATGGAGTTAGGTGAGTCATCAGTAGATACATTGAAAAGAGAATTTTTCGAAGAAACTGGATTGAGAGTGGAACCAATCAGACTGTTAAATGTTTATACTAACTTTCAAGACTCTTATCCCAATGGCGATAAAGCACAAACCGTCGGTTTTATTTATGAAGTAAGCTGTCCAAAACCAGTTAATATAGAAGGTTTTCATAATGAGGAAACATTGCAATTGGACTATTTTTCTAAAGAAGACGTCAAAAATATTACGATCGTAAATGAACAACACCAATTAATTTTAGATGAATATTTTTCACAAACATTCCAAATGGGGCGT

SEQ ID NO: 7406 - protein, 158 aa, Streptococcus agalactiae
MKQDYISYIRSKVGHETIFLTYSGGILTDGKGRVLLQLRADKNSWGIIGGCMELGESSVDTLKREFFEETGLRVEPIRLLNVYTNFQDSYPNGDKAQTVGFIYEVSCPKPVNIEGFHNEETLQLDYFSKEDVKNITIVNEQHQLILDEYFSQTFQMGR

SEQ ID NO: 7407 - protein, 687 aa, Streptococcus agalactiae
TTGTATGTTTATTGTGCAGCAACTCCTGATATCACTAGTCGTAAACGTATCCTTAACAAGCACTGTCATTACATTGAACTTAACAATCATTACTGGGAGCTTGAAGATAATGGTACTTTAAACGACGGAACTGATATTGATATTCTCTATCGTAACATAGATAACTTTTTATCAGACTTAGAAGATGTCGTTGAACACCACAATTCTCGAATTGGATACACTACTTGTTTTTGGCATAACCTCATCAATTGCCAAATACTCTATGATCCTGAAAATCAATTACAATCACTCAAAGAGAGATTCGAAGTTTCTTATCCCAGTCAGTTACAAAAACAAATTATCATTCAAAATCGTAACTTATTAACTGGCAAGCTTCCCTCTTACGATAAACAAATTATAAAAGCCCTTAAACGCCAAGACTTTGTTAGTACTCACCATAGAACTACTGCTTTCTTAGATTCCTACTTTGATATTATTTTTGCACTTAATAAGTTGACACATCCTGGCGAAAAAAGAATGATTTCCTATGCTAAGAAGAATGCTACATTGCTTCCTAAACATTTCGAAGAAAATATCATTAAACTATGTCATCACAACTCCAACGAACACACTGTTAAAGAAACATTAAACGATATAATAATGCATCTCGACGTCATGCTTAAAGAAAATTTTCAACACTTGATAGGT

SEQ ID NO: 7408 - protein, 229 aa, Streptococcus agalactiae
MYVYCAATPDITSRKRILNKHCHYIELNNHYWELEDNGTLNDGTDIDILYRNIDNFLSDLEDVVEHHNSRIGYTTCFWHNLINCQILYDPENQLQSLKERFEVSYPSQLQKQIIIQNRNLLTGKLPSYDKQIIKALKRQDFVSTHHRTTAFLDSYFDIIFALNKLTHPGEKRMISYAKKNATLLPKHFEENIIKLCHHNSNEHTVKETLNDIIMHLDVMLKENFQHLIG

SEQ ID NO: 7409 - protein, 984 aa, Streptococcus agalactiae
TTGCAAGAATACTCTATCGAAATTACTTTACAACATCCAGATGATATGATGTCACTCTTTGGCAGCAATGAGCGCCATTTAAAATTAATTGAAGAAAATTTAGATGTTATCATTCATGCTAGAACTGAACGTGTTCAGGTATTAGGTGACTCTGAAGAAGCAGTAGAAACCGCTCGGTTAACCATTGAAGCATTATTAGTGCTTGTTAACCGCGGGATGACTGTGAATACTTCAGATGTTGTAACAGCCTTATCCATGGCACAAAATGGTTCAATTGATAAATTCGTTGCCCTTTATGAGGAAGAAATTATTAAGGATAGCTATGGTAAGCCTATCCGTGTTAAGACTTTAGGGCAAAAAATATACGTTGATAGCGTTAAAAATCATGATGTTGTTTTTGGTATTGGGCCTGCTGGAACGGGAAAAACTTTTTTAGCAGTCACTCTAGCAGTAACGGCACTAAAGCGTGGTCAAGTTAAACGAATAATCTTAACGAGACCAGCGGTTGAAGCTGGTGAAAGCCTTGGTTTCTTGCCTGGAGATCTCAAAGAGAAAGTTGATCCTTATTTGAGACCAGTTTATGATGCCCTATATCAAATTTTAGGTAAAGAGCAAACAAGTCGCTTAATGGAGCGTGAAATCATCGAAATTGCTCCATTGGCTTACATGCGTGGTCGTACTTTAGATGATGCATTTGTCATATTAGATGAAGCGCAAAACACCACTATAATGCAAATGAAAATGTTCCTAACACGTCTTGGCTTCAATTCTAAAATGATTGTAAATGGCGATGTTAGCCAAATTGACTTACCAAAGAATGTTAAATCTGGTTTGATTGATGCTGTTGAGAAATTACGAAATATCAAAAAGATTGACTTTATTCATTTATCAGCAAAGGATGTTGTAAGACACCCTGTCGTTGCTGAAATAATAAATGCTTATTCAGATTCAGAAAGTAGTCACAAGCTACAATCTGATAAGGAC

SEQ ID NO: 7410 - protein, 328 aa, Streptococcus agalactiae; identical to SEQ ID NO: 2770

SEQ ID NO: 7411 - protein, 1770 aa, Streptococcus agalactiae
ATGAGATATACAAATGGAAATTTTGAAGCCTTTGCAAGACCTCGAAAACCTGAAGGTGTGGATAAAAAATCCGCTTATATTGTTGGTTCTGGTTTAGCAGGATTAGCTGCCGCTGTCTTTTTAATACGTGATGGTCAAATGGATGGTCAACGTATTCATATTTTTGAAGAACTACCTCTTTCTGGAGGATCACTTGACGGTGTCAAACGACCTGATATCGGTTTTGTAACGCGTGGTGGTCGTGAAATGGAAAATCACTTCGAATGTATGTGGGATATGTACCGTTCCATCCCCTCTCTCGAAGTTCCAGATGCTTCTTATCTAGATGAATTTTATTGGCTTGACAAGGATGATCCCAATTCATCTAACTGTCGCCTCATTCATAAACAGGGAAATCGCTTAGAATCTGATGGGGATTTTACACTCGGAACACATTCCAAAGAGTTAGTTAAGCTAGTCATGGAGACTGAAGAGTCTTTAGGTGCTAAAACGATTGAAGAAGTCTTTTCAAAAGAATTTTTTGAAAGTAATTTTTGGACTTATTGGGCTACTATGTTTGCCTTTGAGAAATGGCATTCAGCGATTGAAATGCGTCGATATGCTATGCGCTTTATCCATCATATTGGTGGTCTGCCTGATTTCACTTCATTAAAATTTAATAAATATAATCAATATGATTCTATGGTGAAACCAATCATTAGTTATTTGGAGTCTCATAATGTAGATGTTCAATTTGATAGCAAGGTAACTAATATCTCCGTAGACTTTAAGAACGGTCAGAAGCTTGCAAAAGCTATTCATCTCACAGTTGGCGGTGAAGCAAAAACAATTGATCTTACTCCAGATGATTTTGTTTTTGTAACGAATGGATCTATCACTGAAAGTACGAACTATGGTAGTCATGATACTGTAGCTAAACCTAATACCGATTTGGGAGGTTCTTGGAATCTTTGGGAAAACTTAGCTGCTCAATCTGATGAATTTGGACATCCTAAAGTCTTCTACAAAGATATTCCAAAAGAGTCATGGTTTGTTTCTGCTACTGCAACAATAAAAGATCCAGCTATCGAACCTTATATAGAGCGTTTAACACATCGTGACCTCCATGATGGTAAAGTAAATACAGGAGGCATTGTTACAGTTACAGATTCTAATTGGATGATGAGCTTTGCTATCCATCGCCAACCGCATTTCAAAGAGCAAAAGGAAAATGAAACAATTGTTTGGATTTATGGACTCTATTCAAATGTGGAAGGTAATTATATTAAAAAACCAATTGAAGAATGTACTGGTCGAGAAATCACAGAAGAGTGGTTGTATCACTTAGGTGTTCCTGAAATGAAGATTCATGATTTATCTGATAAACAATATGTAAGTACAGTTCCTGTTTATATGCCTTACATTACTAGTTATTTCATGCCTCGAGTTAAAGGTGACCGACCAGATGTTATCCCGCAAGGTTCTGTTAACCTAGCCTTCATTGGTAATTTTGCAGAATCTCCATCCAGAGATACAGTATTTACAACGGAATATTCTATTAGAACTGCTATGGAAGCTGTTTATACTTTCTTAAATATTGAACGTGGTGTTCCAGAAGTCTTTAATTCAGCATTTGATATTCGTGTCTTGTTGCAATCTTTATACTATCTCAATGATAAGAAATCTGTTGAAGATATGGATTTACCAATACCTGCCTTAATGCGTAAAGTAGGCATGAAAAAAATTAGAGGAACTTATTTAGAAGAATTACTTCGAGAAGCTCATCTTTTA

SEQ ID NO: 7412 - protein, 590 aa, Streptococcus agalactiae
MRYTNGNFEAFARPRKPEGVDKKSAYIVGSGLAGLAAAVFLIRDGQMDGQRIHIFEELPLSGGSLDGVKRPDIGFVTRGGREMENHFECMWDMYRSIPSLEVPDASYLDEFYWLDKDDPNSSNCRLIHKQGNRLESDGDFTLGTHSKELVKLVMETEESLGAKTIEEVFSKEFFESNFWTYWATMFAFEKWHSAIEMRRYAMRFIHHIGGLPDFTSLKFNKYNQYDSMVKPIISYLESHNVDVQFDSKVTNISVDFKNGQKLAKAIHLTVGGEAKTIDLTPDDFVFVTNGSITESTNYGSHDTVAKPNTDLGGSWNLWENLAAQSDEFGHPKVFYKDIPKESWFVSATATIKDPAIEPYIERLTHRDLHDGKVNTGGIVTVTDSNWMMSFAIHRQPHFKEQKENETIVWIYGLYSNVEGNYIKKPIEECTGREITEEWLYHLGVPEMKIHDLSDKQYVSTVPVYMPYITSYFMPRVKGDRPDVIPQGSVNLAFIGNFAESPSRDTVFTTEYSIRTAMEAVYTFLNIERGVPEVFNSAFDIRVLLQSLYYLNDKKSVEDMDLPIPALMRKVGMKKIRGTYLEELLREAHLL

SEQ ID NO: 7413 - protein, 213 aa, Streptococcus agalactiae
TTGAGAAAATCATTTTACAGTTGGTTGATGACACAAAGAAATCCAAAATCAAATGAACCAGTAGCAATCCTAGCAGATTACGCTTTTGATGAAACCACTTTTCCAAAACATAGTTCGGATTTTGAAACAGTTAGTCGTTATTTAGAAGATGAGGCCAGTTTTTCCTTTAATTTAACAGATTTTGATGATATTTGGGAAGATTATCTCAATCAT

SEQ ID NO: 7414 - protein, 71 aa, Streptococcus agalactiae
MRKSFYSWLMTQRNPKSNEPVAILADYAFDETTFPKHSSDFETVSRYLEDEASFSFNLTDFDDIWEDYLNH

SEQ ID NO: 7415 - protein, 507 aa, Streptococcus agalactiae
ATGGAACGTGCGATTTTTGCTGGAGGTTGTTTTTGGTGTATGGTACAACCATTTGAAGAATTAGATGGTATTGAATCTGTTTTATCTGGATACACTGGAGGACATGTTGAGAATCCAACTTATAAAGAAGTTTGTAGTAAAACTACTGGACATACAGAAGCTGTTGAAATTATTTTTAATCCTGAAAAAATCTCTTATGCAAATTTAGTTGAGTTATATTGGGCACAAACAGATCCAACAGACGCTTTTGGTCAGTTTGAAGATCGTGGGGATAATTATCGTCCTGTCATCTTTTATGAGAATGAAGAGCAACGTCAGATTGCTCAAAAATCAAAAGATAAGCTACAAGCTTCGGGTAGATTTGATAGACCAATTGTAACCAGCATTGAGCCTGCTGATACTTTTTACCCAGCAGAAGACTATCATCAAGCATTCTATCGGACTAACCCTGCTCGTTACGCCTTGAGTAGTGCCAGAAGACATGCATTTCTAGAGGAGAACTGGCAT

SEQ ID NO: 7416 - protein, 169 aa, Streptococcus agalactiae
MERAIFAGGCFWCMVQPFEELDGIESVLSGYTGGHVENPTYKEVCSKTTGHTEAVEIIFNPEKISYANLVELYWAQTDPTDAFGQFEDRGDNYRPVIFYENEEQRQIAQKSKDKLQASGRFDRPIVTSIEPADTFYPAEDYHQAFYRTNPARYALSSARRHAFLEENWH

SEQ ID NO: 7417 - protein, 852 aa, Streptococcus agalactiae
ATGAATACATTATTAGCGACAGTCATAACAGGCTTAGTAACTGATGAAAACAAAGATTTTTATTTTATCCAAAAAGATGGCTTTACCTTTGCATTATCAAAGTCAGAAGGAGAGCATCACATTGGTGAAATGGTTAAAGGATTCGCCTATACAGATATGCAACAAAAAGCACGTCTTACAACTAAAGAAACATTTGCGACTCGAGATCATTATGGTTGGGGGACAGTTACTGAGGTACGTAAAGACTTGGGAGTATTTCTTGATACTGGTCTTCCAGATAAGCAAGTGGTTGTTTCTTTGGATGTTCTTCCTGAATTGAAAGAACTTTGGCCTAAAAAAGGTGATCGCCTCTACGTTTGCTTAGATGTTGATAAAAAAGATCGTCTCTGGGCTCTCCCTGCAGATCCTGAAGTGTTTCAACGAATGGCAACCCCTGCATATAACAATATGCAAAATCAAAATTGGCCAGCAATCGTTTATCGCTTAAAATTGTCAGGAACTTTTGTTTATCTACCAGAAAATAATATGCTCGGCTTTATTCACCCTAGTGAACGTTACAGTGAACCTCGTTTAGGGCAAGTGCTGGATGCACGAGTTATTGGCTTCAGAGAAGTTGATAGAACCTTAAATTTATCATTAAAGCCTCGTTCTTTTGAAATGTTAGAAAATGACGCACAAATGATTTTAACGTATTTAGAAAGTAACGGAGGATTCATGACTTTAAATGATAAATCTTCTCCAGAGGAAATTAAAGCTACTTTTGGAATTTCCAAAGGTCAGTTTAAAAAAGCACTTGGAGGACTCATGAAAGCTAAAAAGATCAAACAAGATCAGCTAGGTACAGAATTATTA

SEQ ID NO: 7418 - protein, 284 aa, Streptococcus agalactiae
MNTLLATVITGLVTDENKDFYFIQKDGFTFALSKSEGEHHIGEMVKGFAYTDMQQKARLTTKETFATRDHYGWGTVTEVRKDLGVFLDTGLPDKQVVVSLDVLPELKELWPKKGDRLYVCLDVDKKDRLWALPADPEVFQRMATPAYNNMQNQNWPAIVYRLKLSGTFVYLPENNMLGFIHPSERYSEPRLGQVLDARVIGFREVDRTLNLSLKPRSFEMLENDAQMILTYLESNGGFMTLNDKSSPEEIKATFGISKGQFKKALGGLMKAKKIKQDQLGTELL

SEQ ID NO: 7419 - protein, 555 aa, Streptococcus agalactiae
ATGACTAAGGAAATCGTTACAAAAGCTCAAGAGCGTTTTGAGCAATCACACCAAAGTTTATCAAGAGAATTTGCAGGGATTCGTGCAGGACGTGCTAATGCTAGCTTGCTTGATCGTATTCAAGTTGAGTATTATGGAGCGCCAACCCCACTTAACCAATTAGCCTCTATTACTGTACCAGAAGCTCGTGTCCTTTTAATTTCACCATTTGATAAATCATCAATCAAAGATATTGAGCGTGCTATTAACGAATCAGATTTAGGTATTAATCCTGCAAATGATGGTTCAGTTATTCGTCTTGTTATTCCAGCTTTGACAGAAGAAACACGTCGTGATTTAGCTAAAGAAGTGAAAAAAGTCGGAGAAAATGCTAAGATTGCTATCCGTAATATTCGCCGTGATGCTATGGATGAAGCTAAGAAGCAAGAAAAGAATAAAGAAATTACAGAAGATGACTTGAAATCTCTTGAAAAAGATATTCAAAAGGCTACTGATGATGCTGTAAAACATATTGATGAGATGACTGCTAATAAAGAAAAAGAATTGTTGGAAGTT

SEQ ID NO: 7420 - protein, 185 aa, Streptococcus agalactiae; identical to SEQ ID NO: 2780

SEQ ID NO: 7421 - protein, 726 aa, Streptococcus agalactiae
GTGGAACCTAAATATCAACGTATATTAATTAAGTTATCTGGTGAAGCATTGGCGGGAGATAAGGGTGTCGGTATTGACATTCCTACCGTTCAATCTATTGCAAAAGAAATTGCCGAAGTACACAATTCAGGTGTTCAAATAGCACTTGTCATTGGTGGAGGTAACCTTTGGCGTGGAGAACCTGCAGCAGAAGCAGGGATGGATCGTGTTCAAGCTGATTATACAGGGATGTTAGGGACAGTAATGAATGCTCTTGTAATGGCTGATAGCCTTCAACAATATGGGGTAGATACTAGAGTTCAAACAGCTATTCCAATGCAAACTGTTGCTGAGCCTTACGTACGTGGTCGTGCTTTACGTCATCTAGAGAAGAATCGTATTGTTGTCTTTGGAGCGGGTATTGGTTCGCCTTATTTCTCAACTGATACAACAGCAGCGCTTCGTGCTGCTGAGATTGAGGCAGAAGCAATTTTAATGGCTAAAAATGGAGTAGATGGTGTTTATAATGCTGATCCAAAGAAAGATGCCAATGCTGTCAAATTTGATGAATTAACTCACGTTGAAGTAATAAAACGAGGGTTAAAAATCATGGATGCAACCGCATCAACTATTTCAATGGATAATGATATTGACCTTGTTGTTTTCAATATGAATGAGACTGGTAATATTAAGCGTGTTGTTCTTGGAGAACAAATCGGAACAACTGTTTCAAACAAAGCATCTGAA

SEQ ID NO: 7422 - protein, 242 aa, Streptococcus agalactiae; identical to SEQ ID NO: 2782

SEQ ID NO: 7423 - protein, 678 aa, Streptococcus agalactiae
ATGTTGGTTTGTAATCATGTCGGAAAAACCTTTGGACGACAAGAGGTTTTAAAGGACTGTCATTTTCATCTTAAGAGAGGAGAAATAATTGGTATAATGGGTAAAAGTGGCAGTGGTAAAAGTAGCCTTGCCCGACTCATTATAGGACTAGATAGTCCTACTTGTGGTTCGATACATTTTCAAGGAAAAAATTACACACCTAAAGATGGTAGGGCGCAGATTATCCTTGTTTTTCAAGATGCGCTTAGTTCGGTCAATCCATATTTTAGTATTGAGGAAATTTTGAATGAAGCTTTTTATGGAAAAAAAATAACTTTTGAATTATGCCAAATATTAGAAGCGGTGGGTTTAGATGGAACTTATCTAAAATATAAAGCTAGACAACTTAGTGGTGGTCAGCTACAGAGAGTTTGTATCGCTAGAGCTTTACTCTTAAAGCCTAAAATTATTATTTTTGATGAATCCTTAAGTGGATTAGACCCAGTAACTCAAATTAAAATGCTACATTTATTACAAAAAATAAAACGCCGTTATGAATTAAGTTTTATAATGATTTCTCATGACCCTAAAATTTGTCAAGCTATCTGTAACCGGGTCTTTCTGATAAAAAATGGTTATTTAGTAGAAGATAATGAATTCTTGAAGAGAGCGTGTTCTACTAACTGTTTGACCAATCTC

SEQ ID NO: 7424 - protein, 226 aa, Streptococcus agalactiae
MLVCNHVGKTFGRQEVLKDCHFHLKRGEIIGIMGKSGSGKSSLARLIIGLDSPTCGSIHFQGKNYTPKDGRAQIILVFQDALSSVNPYFSIEEILNEAFYGKKITFELCQILEAVGLDGTYLKYKARQLSGGQLQRVCIARALLLKPKIIIFDESLSGLDPVTQIKMLHLLQKIKRRYELSFIMISHDPKICQAICNRVFLIKNGYLVEDNEFLKRACSTNCLTNL

SEQ ID NO: 7425 - protein, 705 aa, Streptococcus agalactiae
ATGGGAGAATCGTTAACTATTATTGGTGAGAGTGGTTCAGGGAAAACCCTCTTGGCAAAATTATTGGTTGGTCATATTCCACAAGGTATGACAGTTAGAGGAAACATATTTTTTAAGGGAGTTGATTTAGGTAAACTAACTGTAAAGCAGTGGCAGAAATTAAGGGGACGAGATATTGCCTATTTAGTACAAAATCCCATGTCTATGTTTAATCCTTTTCAAAAAATTGAAGCGCATATTTTGGAAACAATCCTTAGTCATGAGAAATGTTCAAAGAGAGTAGCCTTATCTAAAGCGTTAGAATGGATGAAACGTTTAAATTTAGATGATGCGATATCCCTGTTAAAAAAATACCCCTTTGAGCTTAGTGGAGGAATGCTACAAAGAATTATGTTAGCCACTATATTATCTCTTGATCCTCAGGTAATCATATTAGATGAGCCGACCTCAGCGGTTGATTGTCATAATTGCTCTACTATATCAGCTATTTTGCAGGAATTGCAAAATAATGGAAAAACCTTGATTACTGTAACGCATGATTATCAGTTAGCTAGAGACCTGGGGGGGCAATTACTAGTTATAAGTGAGGGAGAAGTTGTTGAACAGGGACAAACCCAAACTATTTTAAGCAATCCTCAACATAACTATACGAAAGCACTGACAGTGCAAATGGAGTATGAAGGAGATATTCTTAATGTTGGTTTG

SEQ ID NO: 7426 - protein, 235 aa, Streptococcus agalactiae
MGESLTIIGESGSGKTLLAKLLVGHIPQGMTVRGNIFFKGVDLGKLTVKQWQKLRGRDIAYLVQNPMSMFNPFQKIEAHILETILSHEKCSKRVALSKALEWMKRLNLDDAISLLKKYPFELSGGMLQRIMLATILSLDPQVIILDEPTSAVDCHNCSTISAILQELQNNGKTLITVTHDYQLARDLGGQLLVISEGEVVEQGQTQTILSNPQHNYTKALTVQMEYEGDILNVGL

SEQ ID NO: 7427 - protein, 804 aa, Streptococcus agalactiae
ATGTCAAAAAGAATTTATTTTTCGAGTAGCTTACTGGTATTGTTAGTGATTAGTGCCATTTTTGCCCCTATTCTATCTAGCTTTGATCCACAATACGTAGATTTATCACAAAAATTATTGGCTCCCAATAATGTTCATTTGTTAGGAACTGACCAATTGGGTAGAGATGTGTTATCTCGCTTGCTTTATGGTGCTAGATATTCACTGTTTTTAGCTATTATTATTAGCTTATTGGAATTAACGATTGGTATGTTTGTGGGTCTTATTGTTGGTTGGTATCAAGGAAAGTTAGAAAACCTCTTTTTATGGATAGCTAATATTATTTTAGCTTTTCCGAGCTTTTTGCTCTCTCTTGCAACCGTGGGGATCTTAGGTCATGGTCTAGGGAATTTAATTTTTGCAATTGTCTTTGTGGAATGGGTTTACTATGCTAAATTAATGACCAATTTAGTTAAGAGTGCAAAAAAAGAGCCTTATGTGATAAATGCGCAAATTATGGGACTTTCGGTCTGGCATATTTTAAGAAAACATATTTTTCCTTTTGTATATCAGCCAATCCTCGTTATGGTCCTTATGAATATAGGAAATATTATTTTAATGATTTCTGGCTTTTCTTTCTTAGGGATTGGTGTGCAACCTAATATCACAGAATGGGGAATGATGTTGCACGATGCTAGAGGATATTTTAGGACAGCTACTTGGATGATGTTATCTCCTGGAATTGCGATTTTTTTAACAGTATTTTCCTTTAATACTTTAGGCGATGCCATAGATAAAAAAGATTGGAAACGACAATGGAACAGT

SEQ ID NO: 7428 - protein, 268 aa, Streptococcus agalactiae
MSKRIYFSSSLLVLLVISAIFAPILSSFDPQYVDLSQKLLAPNNVHLLGTDQLGRDVLSRLLYGARYSLFLAIIISLLELTIGMFVGLIVGWYQGKLENLFLWIANIILAFPSFLLSLATVGILGHGLGNLIFAIVFVEWVYYAKLMTNLVKSAKKEPYVINAQIMGLSVWHILRKHIFPFVYQPILVMVLMNIGNIILMISGFSFLGIGVQPNITEWGMMLHDARGYFRTATWMMLSPGIAIFLTVFSFNTLGDAIDKKDWKRQWNS

SEQ ID NO: 7429 - protein, 942 aa, Streptococcus agalactiae
ATGTATCTAAGTAGTTCGATCATCAAAAAAATATTGTCAGCTTTTTTGGCATTGTTTTTCATATCACTTCTAACATTTATTCTTATCAAACTATCAACAGTTAATCCAGCAGAAAATTACCTTCGTTTATCAAAAATAAGTGTTAGTCCAGAAGCACTAAAAGAAGCAGAGCACTATCTAGGTTTAGATAAGCCATTATGGAAGCAGTACTGGCTGTGGTTCCAAAAAGCATTAACAGGAGATTTTGGATATTCTTATGTGCTCAGGTTGCCGGTATTAGATTTGGTTTTACAACGGTTTTTGGCTACTTTATTTCTAGGCACGAGTGCCTTCTTGCTAATTGTTACCATTTCTACCCCGTTAGGTGTGTGGGCTGGCTTACATGAATCTTCTCGGAGTGATTACTTGATTCGATTTTTGAGTTTTTCTAGTGTGTCTATGCCAAGTTTTTGGGTTGCTTACTTGTTGATGCTGCTATTTTCGGCAAAATTAAATCTTCTGCCTGTTTCAGGAGGTAACGATTTACAAAGTTTAATTTTGCCAAGTATTACCTTAAGTTTTTCTACCGTAGGTCAATATATAGCCCTTATTCGAAAAGCTATTAGTCAAGAAAATAGAAGTTTAAATGTGGAAAATGCTCGATTAAGAGGAGTAAAAGAACGTTATATTGTCACACATCACCTCCTTAGAAATGCCTTACCTGCGATAATGACGGCACTTAGCTTGACTTGGGTTTACTTATTAACAGGATCAATTATTGTTGAAGAAATTTTTTCATGGAATGGAATAGGACGTTTATTTGTGACCAGTCTAAGGACTTCAGATCTTCCAGTAATACAAGCTTGTATGCTAATTTTTGGAACCTTATTTTTAGCTAATAATTTTATGACACAGTGTCTTATGAATTGGGTTGATCCTCGGTTACGAAAGTCAAGGGAGAAA

SEQ ID NO: 7430 - protein, 314 aa, Streptococcus agalactiae
MYLSSSIIKKILSAFLALFFISLLTFILIKLSTVNPAENYLRLSKISVSPEALKEAEHYLGLDKPLWKQYWLWFQKALTGDFGYSYVLRLPVLDLVLQRFLATLFLGTSAFLLIVTISTPLGVWAGLHESSRSDYLIRFLSFSSVSMPSFWVAYLLMLLFSAKLNLLPVSGGNDLQSLILPSITLSFSTVGQYIALIRKAISQENRSLNVENARLRGVKERYIVTHHLLRNALPAIMTALSLTWVYLLTGSIIVEEIFSWNGIGRLFVTSLRTSDLPVIQACMLIFGTLFLANNFMTQCLMNWVDPRLRKSREK

SEQ ID NO: 7431 - protein, 1614 aa, Streptococcus agalactiae
ATGAGACGTAACATATTATTGAGCATTACTTGTTTATTGATGGTGACTCTGACTGCATGCCATTCACAGGATAGCAAAAGTCATAAACTAAACAGTGATAAACTTACGCTTGCTTGGGGAGAAGACTTTGGTGATGTTAATCCGCATCGCTATAACCCTGATCAGTTTGTTATCCAGGATATGGTTTATGAGGGGTTGGTACGATATGGTGACAATGGGAAAATTGAACCAGCTTTAGCGGAAAGCTGGAGCATTAGTCAAGATGGAAAAACCTACACTTTTAAATTGAGAAATGCTAAATATTCTGATGGCAGTAACTTTAATGCTGCGAATGTCAAACGTAATTTTGATAGTATTTTTTCGAAGTCTAATAGAGGTAATCATAATTGGTTTAATTTAACGAATCAATTGGAAAATTATCGTGCCTTGAATCAAAGTACTTTTGAAATTAAACTGAAACAAGCTTATAGTGCTACTTTATATGATCTCTCTATGATTCGACCAATTCGCTTTTTATCTGATAGCGCTTTCCCTAAAGGTGATGATACAACTAAGAAGAATGTAAAAAAAACAATTGGAACGGGTCAATGGGTTGTGAAAAGTAAAAAGCAAAATGAATATATTACCTTCAAACGTAATGAGAATTACTGGGGAAAGAAACCAAAATTAAAAGAAGTAACCGTAAAAGTTATACCCGATGCTCAGACGCGTGCTTTAGCATTTGAATCAGGTGACGTTGATTTGATCTATGGGAATGGCATTATTGGTTTAGACACTTTTGCCCAATATACGAAGGACAAGAAATATGTCACAGCTATTTCTCAACCTATGTCAACAAGACTTTTGTTGCTAAATGCTAAGGAAACTATTTTCCAAGATAAAAAAGTTCGTCAGGCAATGAATCATGCTATTGACAAGGTTTCTATTGCTAAGAACACTTTTAGAGGAACAGAAAAGCCAGCAGACACTATTTTTTCAAAATCAACACCTCACTCAGATGCTAAGTTAAATCCTTATAGCTATAATGTTGATAAAGCAAATCAGCTATTGGATCAAGCTGGTTGGAAGATGGGAAAAAATAAGGTTCGTGAAAAAGATGGTAAAGCTCTAACCTTACGTCTTCCTTATATCGCCACTAAGGCAACTGATAAAGACCTGGTAACTTATTTCCAAGGAGAATGGCGTAAAATCGGTATTAATGTTTCTCTTATTGCTATGGAAGAAGATGATTATTGGGCTAATGCTAAAAAGGGTAATTTTGATATGATGTTAACCTATTCTTGGGGAGCACCATGGGACCCTCATGCTTGGATGTCGGCATTAACTGCCAAGGCAGATCATGGACATCCAGAAAATATAGCTTTAGAAAATCTAGCAACTAAAACTGAAATGGATAGACTTATTAAGTCAGCTCTAGTAGATCCTAAGGAAGAAAATGTCGATAGAGACTATAAGAAGGTTCTTGAATTATTGCATGATGAGGCTGTATATATCCCATTAACTTATCAATCGGTGATTTCTGTTTATAGGAAGGGTGATTTTAAAACCATGCGTTTTGCGCCAGAAGAAAATTCATTCCCATTACGCTATATAGAAAAAAACAATGTATCTAAG

SEQ ID NO: 7432 - protein, 538 aa, Streptococcus agalactiae
MRRNILLSITCLLMVTLTACHSQDSKSHKLNSDKLTLAWGEDFGDVNPHRYNPDQFVIQDMVYEGLVRYGDNGKIEPALAESWSISQDGKTYTFKLRNAKYSDGSNFNAANVKRNFDSIFSKSNRGNHNWFNLTNQLENYRALNQSTFEIKLKQAYSATLYDLSMIRPIRFLSDSAFPKGDDTTKKNVKKTIGTGQWVVKSKKQNEYITFKRNENYWGKKPKLKEVTVKVIPDAQTRALAFESGDVDLIYGNGIIGLDTFAQYTKDKKYVTAISQPMSTRLLLLNAKETIFQDKKVRQAMNHAIDKVSIAKNTFRGTEKPADTIFSKSTPHSDAKLNPYSYNVDKANQLLDQAGWKMGKNKVREKDGKALTLRLPYIATKATDKDLVTYFQGEWRKIGINVSLIAMEEDDYWANAKKGNFDMMLTYSWGAPWDPHAWMSALTAKADHGHPENIALENLATKTEMDRLIKSALVDPKEENVDRDYKKVLELLHDEAVYIPLTYQSVISVYRKGDFKTMRFAPEENSFPLRYIEKNNVSK

SEQ ID NO: 7433 - protein, 687 aa, Streptococcus agalactiae
ATGGCTAAAAAAAGTAAAAACTTACGTGCTGCTCTTGAGAAAATTGACAGCACTAAAGCATACAGCGTAGAAGAAGCTGTAGCTCTTGCAAAAGAAACTAACTTTGCTAAATTTGATGCAACTGTTGAAGTTTCTTATAACCTTAACATTGACGTTAAAAAAGCTGACCAACAAATCCGTGGTGCTATGGTTTTACCAGCAGGTACTGGTAAAACTTCACGTGTTCTTGTTTTTGCTCGTGGTGCTAAAGCTGAAGAAGCTAAAGCAGCAGGTGCAGACTTTGTCGGTGAAGATGACTTAGTTGCTAAAATCCAAGGTGGATGGCTTGACTTTGATGTTGTTATCGCAACACCAGATATGATGGCACTTGTTGGACGTCTTGGACGTGTCCTTGGACCTCGTAACTTGATGCCAAATCCTAAAACTGGTACAGTAACTATGGACGTTGCTAAAGCAGTTGAAGAGTCTAAAGGTGGTAAAATTACTTACCGTGCTGATAAAGCAGGTAACGTCCAAGCCCTTATTGGTAAAGTTTCATTTGATGATGCTAAATTAGTTGATAACTTCAAAGCATTTAATGATGTTATTGTTAAAGCTAAACCAGCTACTGCAAAAGGAACTTACATCACAAACCTTTCAATTACAACAACACAAGGTGTTGGTATCAAAGTTGATCCTAACTCACTT

SEQ ID NO: 7434 - protein, 229 aa, Streptococcus agalactiae; identical to SEQ ID NO: 2794

SEQ ID NO: 7435 - protein, 420 aa, Streptococcus agalactiae
ATGGCTAAAAAAGTTGAAAAACTTGTAAAACTTCAATTCCTGCTGGTAAAGCAACTCCAGCTCCACCAGTTGGACCAGCACTGGTCAAGCAGGAATCAACATCATGGGATTCACTAAAGAGTTTAACGCTCGTACAGCTGATCAAGCTGGTATGATTATTCCAGTTGTTATCTCAGTATATGAAGACAAATCATTTGATTTCATCACTAAAACACCACCAGCTGCTGTTCTTTTGAAAAAAGCTGCAGGTGTGAAAAAGGATCAGGTGAACCTAACAAAACTAAAGTTGCAACAGTTACTCGTGCGCAAGTACAAGAAATTGCTGAAACTAAAATGCCAGATTTAAACGCTGCAAACCTTGAGTCTGCAATGCGTATGATCGAAGGTACTGCTCGTTCTATGGGATTCACTGTTACTGAC

SEQ ID NO: 7436 - protein, 141 aa, Streptococcus agalactiae
  VARIANT 13: Xaa = Any Amino Acid
MAKKVEKLVKLQXPAGKATPAPPVGPALGQAGINIMGFTKEFNARTADQAGMIIPVVISVYEDKSFDFITKTPPAAVLLKKAAGVEKGSGEPNKTKVATVTRAQVQEIAETKMPDLNAANLESAMRMIEGTARSMGFTVTD

SEQ ID NO: 7437 - protein, 180 aa, Streptococcus agalactiae
ATGGCAAGTTCACTAGGTGGTGCAATTGGTGTAGCACTTTCAATTGCGATTTATCATGCTTTTTCTGGGAATGCAGATTTTCACAAAGCAGCTTTGTGTGGATTAATTTTAAACCTAGTTTTTTGTAGTCTATCGATCTTATCAATTCTTTTTGTTATCCCTAAGAAAATTGAGGATAAA

SEQ ID NO: 7438 - protein, 60 aa, Streptococcus agalactiae
MASSLGGAIGVALSIAIYHAFSGNADFHKAALCGLILNLVFCSLSILSILFVIPKKIEDK

SEQ ID NO: 7439 - protein, 1147 aa, Streptococcus agalactiae
ATGTTAACGACAAAGGAAAATTTCAAAGGAAATAACAAATTATTGGTGGGAATTGTACTCGCTGTACTATCATTTTGGTTATTTGCACAGTCTATTTTAAACATGGGACCAGATGTTCAGTCATCATTAGGTATTTCATCTGGTGCAATGGATATTGGTGTCTCAAGTACGGCATTGTTTTCAGGTTTATTTATTGTTGTAACTGGTGGTTTAGCAGATAAACTTGGTCGAGTTAAATTTACTTTTATTGGTCTTTGCTTAAATATTATTGGTTCTCTACTAATTGTTTTAGCTAATGGAGCAGTGCTATTTATTATGGGACGTATTTTTAGGATTGGCAGCAGCTTTTATTATGCCATCAACAATGGCCTTGGTTAAAACGTACTATGATGGTAAAGATAGACAACGTGCAGTTAGTTTCTGGTCAATCGGATCATGGGGTGGCTCAGGTCTATGTTCTTATTTTGGTGGAGCGGTGGCAAGTACTCTAGGTTGGCGTTATGTCTTTATCTTTTCAATCATCGCATCAGTAGTTAGTTTTCTATTAATTTTAGGAACCCCAGAAAGTAAAAATGTTGGACAAAAAACTCACTTTGATTACCTTGGTTTAATTATTTTTATTATTTCAATGTTATCGTTAAATATTGGGATATCTATGGCTCAAGAACATGGATTGATGAACGTTATTCCATTGAGTCTTTTTACAGTGATGCTTATTGGATTTGTTCTGTTTTATTATGTTGAAACACGTAAATCTAATAGTTTTATTGACTTTCATCTGTTTGAAAATCGATTTTACTTAGGTGCGACAATATCAAATTTCTTACTGAATGCAGTTGCAGGAACTCTGATTGTTATTAATACTTACATGCAACAAGGTCGCCAGCTAACACCAAAGGTTGCAGGTGAAATGTCTTTAGGCTATTTGGTTTGTGTACTAATTGCTATTCGAGTTGGTGAGAAAATTTTACAACGCTTTGGTGCCCGTAAGCCAATGCTTTTGGGAGCTATGAGTACATTTGTTGGGATATTTTTAATGACTTTGGTCAATATTCAAGGCCCTTTGTATCTTGTGTTAGTCTTTGTTGGTTATGCTTTATTTGGGACAGGCTTGGGGATCTATGCGACACCATCAACGGATNNNNNT

SEQ ID NO: 7440 - protein, 383 aa, Streptococcus agalactiae
  VARIANT 111, 382, 383: Xaa = Any Amino Acid
MLTTKENFKGNNKLLVGIVLAVLSFWLFAQSILNMGPDVQSSLGISSGAMDIGVSSTALFSGLFIVVTGGLADKLGRVKFTFIGLCLNIIGSLLIVLANGAVLFIMGRIFXGLAAAFIMPSTMALVKTYYDGKDRQRAVSFWSIGSWGGSGLCSYFGGAVASTLGWRYVFIFSIIASVVSFLLILGTPESKNVGQKTHFDYLGLIIFIISMLSLNIGISMAQEHGLMNVIPLSLFTVMLIGFVLFYYVETRKSNSFIDFHLFENRFYLGATISNFLLNAVAGTLIVINTYMQQGRQLTPKVAGEMSLGYLVCVLIAIRVGEKILQRFGARKPMLLGAMSTFVGIFLMTLVNIQGPLYLVLVFVGYALFGTGLGIYATPSTDXX

SEQ ID NO: 7441 - protein, 1210 aa, Streptococcus agalactiae
ATGGCCAATGCATCTTTGCGACATCAATTATTTGAAAAACTTGACCAAAAATGTGATCAAATGGTTGCTATTCGTCGCTATTTACATGAAAATCCCGAATTATCATTTAAAGAGACAAAAACAGCAGCTTATATTAGATTTTTATAAAGGTAAGGACTGTCATGTTCAGACACAATTTGGTGGTATGAATGGCGTCGTAGTTGATATCTATGGTGATAAAGCGACAGATAAGCCCATCAAACACATTGCTTTGAGAGCCGACTTTGATGCTCTTCCAATTCAGGAAGAGACAGGGCTTTCTTTTGCTTCAAAAACAGCGGGCGTCATGCATGCTTGTGGACATGATGCCCATACAGCTTATTTATTGATTTTGGCTGAGAGCTTGATTGAATTAAAATCAGAATTTTCAGGTCATATCCGTATCTTACATCAACCGACTGAAGAGGTGCCACCGGGCGGAGCAAAAGCAATGATTGAAGCAGGATGTTTAGATGGCATTGATGCTGTTCTTGGTATCCATGTTATGTCAACGATGGAAGAGGGGACGGTACAATATCACGCAGGTCCCATTCAAACAGGGCGTGCCACTTTTAAAGTTATTTTGCAAGGTAAGGGTGGACATGGTTCCATGCCACATCGTGCAAATGATACAATTGTTGCAGCTTCTAGTTTTGTTATAGCAGCGCAAACGATTGTCAGTCGTCGAGTTAATCCATTTGACACAGCAGTAGTTACTATCGGATCTTTTGATGGTAAAGGTTCTGCTAATGTGATCAAAGATAGTGTAACCTTAGAAGGTGATGTGCGCGTGATGTCTGAAGAGACACGAGGTGTTGTTGAGGAGGAATTTAAGCGTATTCTAGATGGAATAGCACAAACTTATGGTGTTAGTTATCAGTTAGACTATCAGAATGATTATCCTGTTTTAGTTAATAACAGTGAAGTGACACAGAAAGTTGCAAATAGTTTAAAATCTGTTGCTATAAAGGAAATTTTAGACGTCATTGATTGCGATCCTCAAACGCCGTCTGAAGATTTTGCCTATTATGCTCAAACAATCCCAGCTTGCTTCTTCTATGTTGGAGCACACGAAGAGGGGCAACCATATTACCCACATCATCATCCAAAATTCCAAATTGCAGAATCATCATTGATGGTATCTGCTAAATCAATGGCAACTGCAGCGCTTGCTATGCTTGAAGAAGGAGAA

SEQ ID NO: 7442 - protein, 404 aa, Streptococcus agalactiae
MANASLRHQLFEKLDQKCDQMVAIRRYLHENPELSFKETKTAAYISDFYKGKDCHVQTQFGGMNGVVVDIYGDKATDKPIKHIALRADFDALPIQEETGLSFASKTAGVMHACGHDAHTAYLLILAESLIELKSEFSGHIRILHQPTEEVPPGGAKAMIEAGCLDGIDAVLGIHVMSTMEEGTVQYHAGPIQTGRATFKVILQGKGGHGSMPHRANDTIVAASSFVIAAQTIVSRRVNPFDTAVVTIGSFDGKGSANVIKDSVTLEGDVRVMSEETRGVVEEEFKRILDGIAQTYGVSYQLDYQNDYPVLVNNSEVTQKVANSLKSVAIKEILDVIDCDPQTPSEDFAYYAQTIPACFFYVGAHEEGQPYYPHHHPKFQIAESSLMVSAKSMATAALAMLEEGE

SEQ ID NO: 7443 - protein, 882 aa, Streptococcus agalactiae
ATGTATCTAGAGAGTATCGAACTATACTCAAACATCACTAAAGCCGCTGCACACCTTTTTATTTCTCAACCTTACCTAAGCAAAGTGATCAAGCAATTAGAAAATGAGTTAAAAATAAAACTCATCCAGAGCCAAGGGCACCAAACCTTTTTAACTTATGCTGGACAGAGATATCTATTCTACCTAAAAGAAATTGATATGATTGAGCGTCAAATGGCCAAAGAACTATATCTCATCCGTTCTGATAAAAAAGGAGAAATCACACTTGGGATTAACTCTGGCTTAGCAAGTTCTATTCTGGCAAATGTACTTCCAAAATTTAACTTGGAGCACCCAGAAATTTCTGTCAAATTACTCGAAAACAATCAAAATATTTCTGAACAATTGGTAGCGAGTGGTGATATTGACCTAGCTGTTGGGATGGCTCCTATCGTTTATAAAGATGGAATTGCATCAACCACTATTTACCGCGACGAATTGTTTTTAATGATACCTACCACCAGCCAACTCTACAACGCTGAAAAACGTGGACAGATTATTCCTTTTGAATATCCTATTTCAGTTCTAGACAATGAACCTCTTATCCTAACACCATTAGAGTACGGAATTGGCAAAACAATTGCACAATTCTATGAGCTTCATCACATGTCATTAAATCAGATGATTACAACTAGTACCGTTCCTACAGCAGCTAGCCTATCTTTGTCAGGGATGGGAGCAACATTTGTTCCACAAACTCTCATTCATCGCTATTTGGATAAAGAGTGCAATGTCTACCATTTTCATAAAAATAAGTTATTTTCAGAGTACATTATGATTTATAAAAAAGATGTTGAATTATCTGGAATTGCTCTCCTACTTTATAAAGCTTTTTTAACCAAG

SEQ ID NO: 7444 - protein, 294 aa, Streptococcus agalactiae
MYLESIELYSNITKAAAHLFISQPYLSKVIKQLENELKIKLIQSQGHQTFLTYAGQRYLFYLKEIDMIERQMAKELYLIRSDKKGEITLGINSGLASSILANVLPKFNLEHPEISVKLLENNQNISEQLVASGDIDLAVGMAPIVYKDGIASTTIYRDELFLMIPTTSQLYNAEKRGQIIPFEYPISVLDNEPLILTPLEYGIGKTIAQFYELHHMSLNQMITTSTVPTAASLSLSGMGATFVPQTLIHRYLDKECNVYHFHKNKLFSEYIMIYKKDVELSGIALLLYKAFLTK

SEQ ID NO: 7445 - protein, 1713 aa, Streptococcus agalactiae
ATGCATATTGAGACTGTTATTGATTTCAAAGAATTAGGAAAAAGATATCGTTTTAAAAATCCTACAAAAGAATTAATAGCTGATACTTTAGAACAAGTCTTAGAAGTGATAAAAGAAGTTGATTATTATCAATCTAAGAATTATTATGTTGTTGGTTATTTATCTTATGAAGCATCTGCTGCTTTTGATTCACATTTTAAAGTTTCTCATCAGAAGTTGGCTGGAGAACATCTAGCTTATTTTACAGTACATAAAGATTGTGAGAACGAAGCTTTTCCTTTAAGTTATGAAAATGTTAGATTAGCAGATAATTGGACTGCTAATGTTTCTGAGCAAGAATATCAAGAGGCAATTGCCAATATTAAAGGACAAATTAGACAAGGAAATACTTATCAAGTAAATTATACACTAGAGCTTAGCCAACAATTATGCTTGGATCCCTTTAGCGTTTATGAACGCCTAATGGTAGAACAAGGAGCAGGATATAATGCTTATATTGCCTACGATGATAAAAGGATTTTATCTGTAAGCCCGGAATTGTTCTTTAAGAAGAAGGGTGAAGTCTTAACAACTAGACCAATGAAGGGAACAAGCGCTAGAAAGCCTACTTATCAAGAAGATGTGGCGGAGCGAGATTGGTTGGCAAATGATCCCAAAAATCGTTCTGAAAATATGATGATTGTTGATTTATTAAGAAACGATATGGGCCGTATCTGTGATGTTGGAACAGTTAAGGTAAAAAAACTATGTCAAGTGGAGCAGTATGCAACTGTGTGGCAAATGACATCAACTATTGAAGGAGTTTTATCGCCAGAAGTGACACTTACGTCTATTTTTCAAGCTCTATATCCTTGTGGATCTATCACTGGAGCTCCTAAGATATCAACAATGGCTATTATTAATGAGTTGGAAAAACGCCCAAGAGGTATTTATTGTGGGACGATAGGACTTTGTATGCCAGACGGACAAGCTATTTTTAACGTTCCTATTCGCACAGTACAAATGAAAGGTCAACAAGCCTATTACGGCGTTGGTGGAGGTATTACGTGGGAGAGCCAGACAGATTCTGAATATGAAGAAACCCGTCAAAAATCAGCTGTTTTAACACGTGTCAATCCAAAATTTCAATTAATAACTACAGGAAGAGTGACTGAAAATAAACTTCTTTTCTCTCAACAACATGTCGAGAGATTAGTTGAATCAGCGTCTTATTTTGCTTATCCTTTTGATAAAAGTAAATTCGAAAGGGAACTGAAAAAATACCTTCATCAGCTAGATGAGAAGGATTACCGCTTGAAAATAATGCTTGATAAAACTGGTAAGGTAACGTTTGAGGTAAAACAACTAGTGAATTTATCAAAAAAGTTTTTAACGGCAGAGGTGGTCGTACAAGACTACCCTATTAAATTATCCCCGTTTACTTATTTTAAAACTTCTTATCGCCCACATATTATTGAAGGTCAGAATGAAAAGATATTTGTATCTCCTGAGGGGTTGCTATTGGAAACAAGTATTGGGAATATTGTTTTAGAAAAAAATGGAAGGTTTTTAACCCCAGATTTATCAGAAGGAGGGTTGAATGGGATTTATCGTCGTCATCTCCTTGAAAACCAAAAAGTAATTGAAGCACCACTAACTTTAAAAGATTTAGAATCAGCCGATGCTGTATACGCCTGTAATGCTGTTAGAGGGCTTTATCCTCTAAACCTAAAG

SEQ ID NO: 7446 - protein, 571 aa, Streptococcus agalactiae
MHIETVIDFKELGKRYRFKNPTKELIADTLEQVLEVIKEVDYYQSKNYYVVGYLSYEASAAFDSHFKVSHQKLAGEHLAYFTVHKDCENEAFPLSYENVRLADNWTANVSEQEYQEAIANIKGQIRQGNTYQVNYTLELSQQLCLDPFSVYERLMVEQGAGYNAYIAYDDKRILSVSPELFFKKKGEVLTTRPMKGTSARKPTYQEDVAERDWLANDPKNRSENMMIVDLLRNDMGRICDVGTVKVKKLCQVEQYATVWQMTSTIEGVLSPEVTLTSIFQALYPCGSITGAPKISTMAIINELEKRPRGIYCGTIGLCMPDGQAIFNVPIRTVQMKGQQAYYGVGGGITWESQTDSEYEETRQKSAVLTRVNPKFQLITTGRVTENKLLFSQQHVERLVESASYFAYPFDKSKFERELKKYLHQLDEKDYRLKIMLDKTGKVTFEVKQLVNLSKKFLTAEVVVQDYPIKLSPFTYFKTSYRPHIIEGQNEKIFVSPEGLLLETSIGNIVLEKNGRFLTPDLSEGGLNGIYRRHLLENQKVIEAPLTLKDLESADAVYACNAVRGLYPLNLK

SEQ ID NO: 7447 - protein, 2352 aa, Streptococcus agalactiae
ATGATTACTGCTCTTGTTTTAACAATTATTCTCTTCTTTGGTATTATCAGATTAGGTATTTTTGGTATTACAGTCTACAATGTTATCCGTTTTATGGTAGGTAGCTTGGCTTACTTATTTATTGCGGCAACTTTAATCTACCTTTATTTCTTTAAATGGTTGCGAAAGAAAGATGGCTTAGTAGCAGGTTTTTTGATAGCTTCTTTAGGATTATTGATTGAGTGGCATGCTTACCTTTTCTCGATGCCTATTTTGAAAGATAAAGAAATTTTGCGTTCAACTGCTCGATTAATTGTATCTGATTTAATGCAATTTAAAATCACTGTTTTTGCCGGTGGAGGTATGTTGGGTGCTTTGATTTACAAGCCAATTGCTTTTCTCTTTTCTAATATTGGTGCCTATATGATTGGTGTTCTCTTCATCATTTTGGGTCTCTTTTTAATGAGTTCTCTGGAAGTTTATGACATCGTCGAATTTATTAGAGCTTTTAAAAATAAAGTGGCAGAGAAGCACGAGCAAAATAAAAAGGAGCGTTTTGCTAAGCGAGAGATGAAAAAAGCAATCGCTGAACAAGAGCGCATAGAGCGTCAAAAAGCTGAAGAAGAAGCTTATTTAGCTTCGGTTAATGTAGACCCTGAAACGGGTGAGATTCTAGAGGATCAAGCTGAGGACAATTTGGATGATGCGCTACCACCTGAGGTAAGTGAAACATCAACTCCGGTATTTGAGCCAGAGATCCTTGCTTATGAGACATCGCCTCAAAATGATCCTTTACCAGTAGAGCCGACAATTTATTTAGAAGACTATGATTCGCCGCTTCTTAATATGAGAGAAAATGACGAGGAAATGGTTTATGATTTAGATGATGATGTAGATGATAGTGATATAGAAAATGTCGACTTTACACCTAAAACGACACTGGTTTATAAATTACCAACGATAGATTTATTTGCACCAGATAAGCCTAAAAATCAATCCAAAGAAAAGGATTTAGTCCGAAAGAATATCAGAGTTTTAGAAGAAACATTTAGAAGTTTTGGTATCGATGTAAAAGTAGAACGTGCTGAAATTGGACCATCGGTTACTAAATATGAAATTAAACCAGCAGTTGGAGTTCGTGTGAATCGTATTTCAAATCTATCTGACGACCTAGCTCTTGCTCTTGCGGCAAAAGATGTTCGTATAGAAGCACCAATTCCTGGAAAATCATTAATAGGTATTGAAGTTCCTAACTCAGAAATTGCAACGGTTTCTTTCCGCGAACTTTGGGAACAATCTGATGCCAATCCTGAAAACCTTTTAGAAGTACCACTAGGAAAAGCTGTTAACGGCAATGCTCGCAGTTTTAACTTAGCTAGAATGCCGCATCTTTTGGTAGCTGGTTCAACTGGTTCAGGTAAATCTGTGGCAGTTAATGGAATTATTTCAAGTATTTTGATGAAGGCACGTCCAGATCAAGTTAAGTTTATGATGATTGACCCCAAAATGGTTGAATTATCTGTTTATAATGATATTCCACATTTATTAATCCCTGTTGTAACCAATCCGCGTAAAGCAAGCAAGGCACTCCAAAAAGTTGTTGATGAAATGGAAAATCGATACGAGTTATTTAGCAAAATTGGTGTGCGTAATATAGCAGGCTATAATACAAAGGTTGAAGAGTTTAATGCTTCCTCTGAGCAAAAACAAATACCTTTGCCTTTAATCGTTGTCATTGTAGATGAATTAGCTGACTTGATGATGGTTGCTAGTAAAGAAGTTGAAGATGCTATTATTCGTTTGGGGCAAAAAGCACGTGCTGCAGGTATCCATATGATTCTTGCAACTCAACGTCCATCCGTAGATGTTATTTCTGGTTTGATTAAAGCAAATGTTCCGTCGCGTATTGCATTTGCTGTTTCAAGTGGTACTGATAGCCGTACGATCCTTGATGAAAATGGTGCTGAAAAGCTCTTGGGACGGGGTGACATGCTCTTTAAGCCTATTGATGAGAATCATCCAGTACGACTACAAGGTTCCTTTATTTCAGATGATGATGTTGAAAGGATCGTTGGTTTTATCAAAGACCAAGCCGAGGCTGACTATGATGATGCCTTTGATCCTGGAGAAGTATCTGAAACAGATAACGGCTCTGGTGGTGGCGGAGTACCTGAAAGTGATCCTCTTTTTGAAGAAGCCAAGGGACTCGTTTTAGAGACGCAAAAAGCAAGTGCCTCAATGATTCAACGCCGATTGTCTGTTGGTTTCAATAGAGCAACAAGACTAATGGAAGAGTTAGAAGCAGCGGGGGTTATTGGTCCAGCAGAAGGAACCAAGCCACGAAAAGTTTTAATGACTCCAACTCCGAGTGAA

SEQ ID NO: 7448 - protein, 784 aa, Streptococcus agalactiae
MITALVLTIILFFGIIRLGIFGITVYNVIRFMVGSLAYLFIAATLIYLYFFKWLRKKDGLVAGFLIASLGLLIEWHAYLFSMPILKDKEILRSTARLIVSDLMQFKITVFAGGGMLGALIYKPIAFLFSNIGAYMIGVLFIILGLFLMSSLEVYDIVEFIRAFKNKVAEKHEQNKKERFAKREMKKAIAEQERIERQKAEEEAYLASVNVDPETGEILEDQAEDNLDDALPPEVSETSTPVFEPEILAYETSPQNDPLPVEPTIYLEDYDSPLLNMRENDEEMVYDLDDDVDDSDIENVDFTPKTTLVYKLPTIDLFAPDKPKNQSKEKDLVRKNIRVLEETFRSFGIDVKVERAEIGPSVTKYEIKPAVGVRVNRISNLSDDLALALAAKDVRIEAPIPGKSLIGIEVPNSEIATVSFRELWEQSDANPENLLEVPLGKAVNGNARSFNLARMPHLLVAGSTGSGKSVAVNGIISSILMKARPDQVKFMMIDPKMVELSVYNDIPHLLIPVVTNPRKASKALQKVVDEMENRYELFSKIGVRNIAGYNTKVEEFNASSEQKQIPLPLIVVIVDELADLMMVASKEVEDAIIRLGQKARAAGIHMILATQRPSVDVISGLIKANVPSRIAFAVSSGTDSRTILDENGAEKLLGRGDMLFKPIDENHPVRLQGSFISDDDVERIVGFIKDQAEADYDDAFDPGEVSETDNGSGGGGVPESDPLFEEAKGLVLETQKASASMIQRRLSVGFNRATRLMEELEAAGVIGPAEGTKPRKVLMTPTPSE

SEQ ID NO: 7449 - protein, 801 aa, Streptococcus agalactiae
ATGAAAAAAATTATTTATCTTGGTTTAGCCTGTGTCAGCATATTAACTTTAAGTGGTTGCGAGTCAATTGAGCGTTCTCTAAAAGGAGACCGTTATGTTGACCAAAAACTAGCTGAAAACTCTTCAAAGGAAGCTACTGAACAACTAAACAAAGAAACTAAGCAAGCCTTAAAAGCTGATAAAAAAGCTTTTCCTCAATTGGACAAGGCTGTTGCCAAAAACGAGGCACAAGTGCTTATAAAAACCTCTAAAGGTGATATAAATATCAAGTTATTTCCAAAATATGCTCCTTTAGCTGTTGAAAATTTTCTAACACATGCAAAAGAAGGATACTATAATGGGTTAAGTTTCCACAGAGTTATCAAAGATTTTATGATACAATCTGGTGACCCTAATGGAGACGGAACCGGTGGAAAATCTATATGGAATGGCAAAGATAAAAAGAAAGATTCTGGAAATGGTTTTGTTAATGAAATATCCCCTTACCTCTACAATATCAGGGGAAGTTTAGCAATGGCAAATGCTGGAGCTGACACTAATGGCAGCCAATTCTTTATCAATCAAAGCCAGCAAGATCATTCCAAACAACTGTCAGATAAAAAAGTTCCTAAGGTGATTATTAAAGCCTATTCAGAGGGAGGAAATCCAAGTTTAGATGGTGGTTATACCGTCTTTGGACAAGTAATCTCTGGCATGGAAACTGTGGATAAAATTGCTTCGGTAGAAGTTACAAAATCAGATCAACCAAAAGAAAAAATTACTATTACAAGTATCAAAGTTATTAAAGGCTACAAATTTAAA

SEQ ID NO: 7450 - protein, 267 aa, Streptococcus agalactiae
MKKIIYLGLACVSILTLSGCESIERSLKGDRYVDQKLAENSSKEATEQLNKETKQALKADKKAFPQLDKAVAKNEAQVLIKTSKGDINIKLFPKYAPLAVENFLTHAKEGYYNGLSFHRVIKDFMIQSGDPNGDGTGGKSIWNGKDKKKDSGNGFVNEISPYLYNIRGSLAMANAGADTNGSQFFINQSQQDHSKQLSDKKVPKVIIKAYSEGGNPSLDGGYTVFGQVISGMETVDKIASVEVTKSDQPKEKITITSIKVIKGYKFK

SEQ ID NO: 7451 - protein, 831 aa, Streptococcus agalactiae
ATGTTTACGAAATTTTTTGAAGGCTTATTGACTTATCATTTTTTGCAAAATGCTTTTATAACTGCAATTGTGATTGGTATTGTAGCGGGTGCAGTAGGCTGTTTTATTATCTTGCGCTCAATGTCTTTGATGGGTGATGCTATTTCTCACGCTGTTCTACCAGGTGTTGCTATATCTTTTATTTTAGGGATTAACTTTTTTATAGGTGCTATTGTCTTTGGTTTGTTGTCTTCGATTATCATTACTTATATTAAAGAAAATAGTGTCATAAAAGGAGATACTGCTATTGGAATTACTTTTTCGTCCTTTTTAGCCTTAGGTATCATTTTAATTGGACTTGCTAATAGTACAACTAACCTCTTTCAAATTCTTTTTGGGAATATTTTGGCAGTACAAGATAGTGATAAATATATGACTATTATTGTGGGATTAATTGTACTGACTCTGATTACTATCTTCTTTAAAGAATTATTATTGACTTCTTTTGATCCTGTTTTAGCAAAATCAATGGGAATGAGAGTTTCTTTTTATCATTATTTATTGATGATTTTGTTAACATTAGTTGCAGTAACAGCTATGCAGAGTGTGGGAACAATATTGATCGTAGCACTTTTAATTACACCAGCTGCAACAGCATATCTTTATGTTAAAAGTCTCAGAACAATGTTGTTTTTATCATCTGCATTAGGAGCAGTAGCATCTGTTCTGGGGTTATATATCGGTTATACATTTAATATTGCCGCAGGATCAAGTATTGTTTTAACATCTACTTTTATGTTTTTACTTGCTTTCCTATTTTCTCCTAAACAAAGTTTGTTTAAAAAGAAACAA

SEQ ID NO: 7452 - protein, 277 aa, Streptococcus agalactiae
MFTKFFEGLLTYHFLQNAFITAIVIGIVAGAVGCFIILRSMSLMGDAISHAVLPGVAISFILGINFFIGAIVFGLLSSIIITYIKENSVIKGDTAIGITFSSFLALGIILIGLANSTTNLFQILFGNILAVQDSDKYMTIIVGLIVLTLITIFFKELLLTSFDPVLAKSMGMRVSFYHYLLMILLTLVAVTAMQSVGTILIVALLITPAATAYLYVKSLRTMLFLSSALGAVASVLGLYIGYTFNIAAGSSIVLTSTFMFLLAFLFSPKQSLFKKKQ

SEQ ID NO: 7453 - protein, 714 aa, Streptococcus agalactiae
ATGATTATTAGTAAACACTTAAGCGTAAGTTATGATAATAATTTAGTGCTAGAAGATATTAATTTACGCTTAGAAGGCTCCGGAATCATTGGTATTTTAGGGCCTAATGGGGCGGGGAAATCTACGCTTATGAAAGCTCTTCTTGGTTTGGTTGATTCTACTGGAGAATCAGGGATTGGGGGAGATTTGCTACCTTTAATGGGGAGAGTAGCATATGTTGAACAAAAAACTAATATTGATTACCAATTCCCTATAACTGTTGGAGAATGCGTTTCTTTAGGATTATATAAGGAACGAGGCCTCTTCAAGCGACTATCAAAAACTGACTGGGAAAAAGTATCCCGAGTGATTGATCAAGTTGGTTTGAGAGGGTTTGAAAATAGACCAATTAATGCCTTATCAGGTGGACAATTTCAACGTATGCTTATGGCAAGATGTCTCGTTCAAGAAGCGGATTACATTTTTTTAGATGAGCCGTTTGTAGGGATTGATTCCATTAGTGAACAAATCATAGTTAATTTACTAAAAAAATTAAGTAAGGCCGGAAAATTAATTTTAGTCGTCCATCACGATTTGAGTAAAGTTGATCATTATTTTGATCAAGTAATTATTTTGAACCGTCATCTAATTGCTTGTGGACCAATAGATCAGGCATTTACCCGTGAGAATTTAAGTGCTGCTTACGGTGATGCTATTTTGTTAGGACAAGGAGAC

SEQ ID NO: 7454 - protein, 238 aa, Streptococcus agalactiae
MIISKHLSVSYDNNLVLEDINLRLEGSGIIGILGPNGAGKSTLMKALLGLVDSTGESGIGGDLLPLMGRVAYVEQKTNIDYQFPITVGECVSLGLYKERGLFKRLSKTDWEKVSRVIDQVGLRGFENRPINALSGGQFQRMLMARCLVQEADYIFLDEPFVGIDSISEQIIVNLLKKLSKAGKLILVVHHDLSKVDHYFDQVIILNRHLIACGPIDQAFTRENLSAAYGDAILLGQGD

SEQ ID NO: 7455 - protein, 924 aa, Streptococcus agalactiae
ATGAAAAAGTGGTTAGTTATTGTATCATGTTTTGTAGCATTTTTAGGCTTAGGTGCCTGTGCTAACAAGCAGGATCAAGCCAAAAACGAAAAATTAAAAGTAGTTGTAACCAACTCTATTTTGGCAGATATAACAAAAAATATAGCCGGTAACAAAATCGACTTACATAGTATTGTACCTGTTGGTAAAGATCCTCATGAATATGAGCCATTACCAGCAGACGTTGAAAAAACAACTCAAGCAGACCTTGTTTTTTACAACGGAATTAATCTTGAAACAGGCGGTAATGCTTGGTTTACAAAATTAATAAAGAACGCTAAGAAGAAAGATAACAAAGATTACTTTGCGGTTAGCGATGGAGTTGATGTTATTTATCTAAATGGTCAAAGCGGAAAAGGTAAAGAAGACCCACATGCTTGGTTGAACCTTGAAAATGGTATTATTTACTCAAAAAATATTGCTAAGCAATTAATTGCTAAAGATCCAAAAAACAAAGCTACTTATGAGAAAAACAGAGATGCTTATGTAGCTAAATTAGAAAAATTGGATAAAGAAGCAAAATCTAAATTTAATGCCATTCCAGCTAATAAAAAATTAATTGTTACTAGTGAAGGTTGCTTTAAATATTTCTCAAAAGCTTATGGAGTTCCATCAGCATACATCTGGGAAATTAACACTGAAGAAGAAGGTACACCAGATCAAATTACTAGCTTAGTTAAGAAATTAAAACAAGTAAGACCTTCAGCTTTATTCGTTGAATCAAGTGTTGACAAGCGTCCTATGAAATCTGTTTCAAGAGAATCAGGTATCCCAATTTACGCAGAAATCTTCACAGACTCAATTGCTAAAAAAGGTCAAAAGGGTGACAGCTACTACGCTATGATGAAATGGAATCTTGATAAGATTGCAGAAGGTTTAGCAAAA

SEQ ID NO: 7456 - protein, 308 aa, Streptococcus agalactiae
MKKWLVIVSCFVAFLGLGACANKQDQAKNEKLKVVVTNSILADITKNIAGNKIDLHSIVPVGKDPHEYEPLPADVEKTTQADLVFYNGINLETGGNAWFTKLIKNAKKKDNKDYFAVSDGVDVIYLNGQSGKGKEDPHAWLNLENGIIYSKNIAKQLIAKDPKNKATYEKNRDAYVAKLEKLDKEAKSKFNAIPANKKLIVTSEGCFKYFSKAYGVPSAYIWEINTEEEGTPDQITSLVKKLKQVRPSALFVESSVDKRPMKSVSRESGIPIYAEIFTDSIAKKGQKGDSYYAMMKWNLDKIAEGLAK

SEQ ID NO: 7457 - protein, 645 aa, Streptococcus agalactiae
ATGACTCCAAATAAAGCAGATTACCTAAAATGCATTCATGAATTAGGTGAGAAAAACAACAAAATTTCCAATAAGAAAATCGCTGAAATGATGCAAGTCTCGGCTCCTGCCGTGTCAGAAATGATTAAAAAAATGATAAGTGAACAACTGATTGTTAAAGATAAAGATTTAGGATATTATCTTACCAAACAAGGTTTATTAGTTGTTTCTGACCTTTACCGTAAACATCGTCTAGTAGAGGTATTTTTAGTTAACCATTTGCACTATACTGCTGATGATATTCATGAAGAAGCGGAAGTTTTAGAACATACTGTATCAACAACTTTTGTTGATCAATTAGAAAAGTTGTTAGACTTTCCACAATTTTGTCCACACGGTGGGACTATTCCTAAAAAGGGAGAGTTTTTAGTAGAAATTAACCAAATGACATTGGACCAAATTAGTCAGCTTGGCACATATGTTATCAGTCGTGTTCATGATGATTTTCAGCTACTGAAATACCTAGAACAACACCGTTTGCATATCAACGATACCATTGAATTGACACAAATTGACCCTTATGCAAAAACTTATCACATCACCTATAACGATGAAAATCTAACAATCCCTGAGCGTATCGCAAGTCAAATATATGTATCTGCTACA

SEQ ID NO: 7458 - protein, 215 aa, Streptococcus agalactiae; identical to SEQ ID NO: 2826

SEQ ID NO: 7459 - protein, 687 aa, Streptococcus agalactiae
ATGAAAATTGGAATTATTGCAGCCATGGAGGAAGAGTTAAAACTCCTTGTGGAAAATCTTGAGGATAAATCTCAAGAGACAGTATTATCAAATGTATATTACAGTGGACGTTATGGTGAACATGAGCTTGTTTTAGTACAGTCTGGTGTTGGGAAAGTCATGTCAGCGATGAGTGTTGCTATTTTAGTAGAAAGCTTTAAAGTTGATGCTATTATTAATACAGGATCAGCTGGTGCAGTAGCAACAGGATTGAATGTAGGAGACGTCGTTGTCGCAGATACATTAGTTTATCACGATGTAGATTTAACCGCCTTTGGTTATGACTATGGACAAATGTCAATGCAGCCACTTTATTTTCATTCGGATAAGACTTTTGTTTCCACTTTTGAAGCAGTTTTATCTAAAGAAGAAATGACTAGTAAAGTTGGTTTAATTGCAACTGGGGATAGTTTTATTGCTGGCCAGGAAAAGATTGATGTTATTAAGGGGCATTTTCCACAGGTTTTAGCTGTCGAGATGGAAGGTGCAGCAATTGCCCAAGCTGCTCAAGCTACAGGAAAGCCCTTTGTGGTGGTACGTGCTATGAGTGATACTGCAGCTCATGATGCCAATATCACATTTGATGAATTTATCATTGAAGCTGGTAAACGCTCTGCCCAAGTATTAATGGCATTTTTGAAAGCATTA

SEQ ID NO: 7460 - protein, 229 aa, Streptococcus agalactiae
MKIGIIAAMEEELKLLVENLEDKSQETVLSNVYYSGRYGEHELVLVQSGVGKVMSAMSVAILVESFKVDAIINTGSAGAVATGLNVGDVVVADTLVYHDVDLTAFGYDYGQMSMQPLYFHSDKTFVSTFEAVLSKEEMTSKVGLIATGDSFIAGQEKIDVIKGHFPQVLAVEMEGAAIAQAAQATGKPFVVVRAMSDTAAHDANITFDEFIIEAGKRSAQVLMAFLKAL

SEQ ID NO: 7461 - protein, 267 aa, Streptococcus agalactiae
ATGGGAAAACCATTGTTAACAGATGATATGATTGAACGTTCAAATCGAGGTGAAAAAGTTTCAGGTCAAACAATCTTAGATCAAGAAACTAAAATTATTTCTACAGAAGATGGCATGGAGCAACTAACTGACGAGAACGGTAAACATATCTACAAGAGTCGCCGGATTGAGAATGCAAAACGAAATGAATTTCAACGTAAGTTGAATTTAGTTTTATTCATTTTGCTTATTTTGTTGGCTCTCTTGTTTTATGCAATTTTTAAATTA

SEQ ID NO: 7462 - protein, 89 aa, Streptococcus agalactiae; identical to SEQ ID NO: 2830

SEQ ID NO: 7463 - protein, 552 aa, Streptococcus agalactiae
ATGGATTTTGAAGAAAAAACAATTAATCGTCAAACTGTTTTTGATGGACAAATTATCAAAGTAGCTGTTGATGATGTAGAGTTGCCAAATGGATTGGGACAATCCAAACGTGAACTTGTTTTTCATGGAGGAGCTGTTGCTACTTTGGCGGTAACTCCTGAGCATAAAATTGTTTTAGTGAAACAGTATCGTAAGGCTATTGAAGGTATTTCTTACGAAATTCCAGCAGGGAAACTTGAGACGGGTGAGTCAGGTTCTAAGGAAGAAGCTGCCCTTCGGGAATTAGAAGAAGAGACTGGCTACACAGGGAATCTTGAAATTCTTTATAGTTTCTACACTGCTATTGGTTTTTGTAATGAGAAAATCGTCCTCTATCTAGCTACTGATTTACAAAAAGTTGAAAATCCTAGGCCACAAGATGATGATGAGGTCCTTGAGCTTCTAGAGTTAAGTTATGAGGATTGTATGCAAATGGTAGAAAAAGGCATGATTCAAGATGCGAAAACGATCATTGCTTTACAATATTACGGTTTAAAAATGGGAGGTCATTCT

SEQ ID NO: 7464 - protein, 184 aa, Streptococcus agalactiae; identical to SEQ ID NO: 2832

SEQ ID NO: 7465 - protein, 1377 aa, Streptococcus agalactiae
ATGTCAAATTATGCCATTATTTTAGCTGCGGGTAAGGGAACTCGCATGAAATCTGATTTACCAAAAGTTATGCATAAAGTATCTGGTATTACCATGCTTGAGCATGTTTTCCGTAGTGTGCAAGCTATTGAGCCAAGTAAAATTGTTACTGTTATTGGACATAAGGCGGAGCTTGTACGTGATGTTTTAGGTGACAAATCAGAGTTTGTAATGCAAACAGAACAGCTAGGAACTGGCCATGCTGTAATGATGGCGGAAGAAGAATTAGCGACATCAAAAGGACATACACTAGTTATTGCAGGTGATACACCCCTGATTACTGGAGAAAGTTTAAAAAACTTAATTGATTTTCATGTCAATCATAAAAACGTTGCAACAATCTTAACAGCCGATGCTGCAAATCCATTTGGATATGGTCGTATTATCCGTAATTCAGATGATGAAGTTACTAAAATTGTAGAACAAAAGGATGCTAATGACTTTGAGCAGCAGGTTAAAGAGATTAATACTGGAACTTATGTTTTTGATAATCAAAGTCTATTTGAAGCACTTAAAGACATTAATACAAATAACGCTCAAGGAGAGTATTATCTAACTGATGTTATTGGAATTTTCAAAGAAGCGGGTAAAAAGGTAGGTGCCTATAAACTTCGTGACTTTGACGAAAGTCTAGGAGTTAATGATCGTGTAGCACTTGCAACTGCTGAAAAAGTGATGCGTCACCGAATTGCACGTCAACATATGGTTAATGGGGTCACAGTGGTTAATCCTGATTCCGCTTATATTGATATTGATGTTGAGATTGGAGAAGAATCTGTAATTGAGCCTAATGTGACTTTAAAAGGACAGACGAAGATTGGTAAAGGTACTTTATTAACCAATGGTAGTTATTTAGTAGATGCTCAAGTCGGAAATGATGTTACCATCACTAATTCGATGGTTGAAGAATCCATTATTTCTGATGGAGTAACCGTAGGCCCTTATGCGCATATTAGACCAGGAACCAGTCTTGCAAAAGGTGTTCATATTGGTAATTTCGTTGAAGTAAAGGGTTCTCAAATAGGTGAGAATACGAAGGCAGGTCATTTAACTTATATCGGCAATGCAGAGGTAGGTTGTGATGTTAACTTTGGCGCAGGGACGATTACTGTCAATTATGATGGACAAAATAAATTTAAAACAGAAATCGGAAGTAATGTCTTTATCGGAAGTAATTCTACTCTGATTGCACCACTTGAAATTGGTGATAATGCTTTAACAGCAGCTGGATCTACCATCACAGATAATGTTCCAATTGATAGCATAGCTATTGGAAGAGGACGTCAAGTCAATAAAGAAGGATATGCCAATAAAAAACCACATCATCCTTCACAAAAG

SEQ ID NO: 7466 - protein, 459 aa, Streptococcus agalactiae
MSNYAIILAAGKGTRMKSDLPKVMHKVSGITMLEHVFRSVQAIEPSKIVTVIGHKAELVRDVLGDKSEFVMQTEQLGTGHAVMMAEEELATSKGHTLVIAGDTPLITGESLKNLIDFHVNHKNVATILTADAANPFGYGRIIRNSDDEVTKIVEQKDANDFEQQVKEINTGTYVFDNQSLFEALKDINTNNAQGEYYLTDVIGIFKEAGKKVGAYKLRDFDESLGVNDRVALATAEKVMRHRIARQHMVNGVTVVNPDSAYIDIDVEIGEESVIEPNVTLKGQTKIGKGTLLTNGSYLVDAQVGNDVTITNSMVEESIISDGVTVGPYAHIRPGTSLAKGVHIGNFVEVKGSQIGENTKAGHLTYIGNAEVGCDVNFGAGTITVNYDGQNKFKTEIGSNVFIGSNSTLIAPLEIGDNALTAAGSTITDNVPIDSIAIGRGRQVNKEGYANKKPHHPSQK

SEQ ID NO: 7467 - protein, 411 aa, Streptococcus agalactiae
ATGGTTAAAGCACTAGAAACATACATCGTAACAAATGGAAATGGGCGACAAGCGGTTGATTTTTATAAAGATGTCTTTCAAGCGGATTTAGTGAATATGATGACATGGGAAGAGATGGACCCCAACTGTCTTGAAGACCGCAAGGATTTAATCATTAATGCTCAGCTTATTTTTGATGGCATTCGTCTTCAAATCTCGGATGAAAATCCAGATTTCGTGTATCAAGCTGGTAAAAATGTTACAGCCGCTATTATTGTGGGTAGCGTAGAGGAGGCGCGTGAAATTTATGAAAAATTAAAGAAGAGTGCACAAGAAGTTCAGTTAGAGTTACAAGAAACTTTCTGGAGTCCTGCTTACGCAAACTTAGTAGACCAATTTGGTGTGATGTGGCAAATTTCAACAGAGTTAAAC

SEQ ID NO: 7468 - protein, 137 aa, Streptococcus agalactiae; identical to SEQ ID NO: 2836

SEQ ID NO: 7469 - protein, 375 aa, Streptococcus agalactiae
ATGATTTCATCAATTGGACAGGTAATGCTCTACGTTAGCAATGTTGAAGCATCAGCAGATTTTTGGAAAAACAAGGTGGGTTTTGAGCGTGTTGAAAAACAGACACAAGGAGATTATGTAACCTATATAGTTGCACCGAAGTTGGATAGTGAAGTTAGCTTCGTCTTACATGACAAAGCAATTATAGCTCAAATGAGTCCTGAGCTAGATTTAGCAACTCCCTCTATTTTATTTGAAACTACTGATATTGACAGTACATATCAAGAATTAACAGCAAATGAGGTTATGACAAATCCTATTGTTGATATGGGGAGTATGAGAGTTTTTAATTTTTCCGATAATGACAATAATTACTTTGCAATCCGTGAAGTAAAA

SEQ ID NO: 7470 - protein, 125 aa, Streptococcus agalactiae; identical to SEQ ID NO: 2838

SEQ ID NO: 7471 - protein, 954 aa, Streptococcus agalactiae
ATGAAATTAGCGGTTTTGGGGACAGGTATGATTGTTAAGGAAGTTTTGCCTGTCTTGCAGAAAATTGAAGGTATTGATCTAGTTGCTATCTTATCAACAGTTAGAAGTTTGGAGACAGCTAAAGATCTAGCTAAGGAATATAACATGTCTCTAGCTACGAGTGAATATAAGGCTGTCTTGGACAATGAGGAGATTGACACAGTCTATATTGGACTGCCGAATCACTTGCATTTTGACTATGCTAAGGAGGCACTCTTGGCAGGAAAACATGTCATTTGTGAGAAGCCATTTACATTAGAAGCAAGTCAATTAGAAGAACTTGTATCTATTGCCAATACTAGGCAACTAATATTACTCGAAGCAATTACAAATCAATATTTACCTAATTTTGACCTTGTAAAAGAACATTTAAGCAACCTTGGAGATATTAAAATTGTAGAATGTAATTATTCCCAATATTCATCGCGTTATGATGCCTTTAAACGTGGGGAAATAGCACCAGCTTTCAATCCTGAAATGGGTGGAGGTGCGTTGAGAGACCTTAATATTTATAATTTACATTTAGTAATTGGACTTTTTGGAGAACCTATAACAGCACAGTATTTACCAAATATAGAGCGTGGTATTGATACTTCAGGAGTTCTAGTCCTAGACTATGGGCACTTTAAAACAGTCTGTATTGGAGCAAAAGATTGTAGTGCAGAAGTAAAATCTACTATTCAAGGTGATAAGGGGTCTATAGCGATTTTAGGGCCAACTAATACTATGCCTAAAATTTCATTAACTATGAATGGACAAGAAAGTCATGTTTATCAATTAAATGGTGATAGGCACCGCATGCACGATGAATTTGTTATTTTTGAAGGTATTATTAGCAATTTAGATTTTAAGCGTGCTGCTCAAGCTTTAGAACATAGTAGAACGGTGATGAAAGTTCTAGATATGGTAACGAAA

SEQ ID NO: 7472 - protein, 318 aa, Streptococcus agalactiae; identical to SEQ ID NO: 2840

SEQ ID NO: 7473 - protein, 246 aa, Streptococcus agalactiae
TTGGATAGCAATGATGAAGCTATCTGTATTATTGAAATAACTAAAGTTGATATTGTCCCTTTTAAAGATGTCTCTGCAGACCATGCTTTTAAAGAAGGAGAAGGAGATAAAACTTTAGAATGGTGGAGAAAAGCTCACATTGATTTCTTTAAACCTTATTTTGAGGAGTTTGGTTTAATGTTTAGTGAGGACTCTAGGATAGTTTTAGAGGAATTCCAAGTGGTTTACCCAAAGGAGATTAACGAA

SEQ ID NO: 7474 - protein, 82 aa, Streptococcus agalactiae; identical to SEQ ID NO: 2842

SEQ ID NO: 7475 - protein, 240 aa, Streptococcus agalactiae
ATGAAGGCACAAGAATTATGGAATAAGTTTAAATCTTTGAATCCTTCAATCGGTGATGAGATAGACGCATGGCAATTTGGAGCAGAACCAGATCTTCTGGCAAAGTTAGTTGTAGATGGGACAAAAACTGCAACGGCCTCTGCCTATGATTTATATGAATTAGATGAGGAAGGGTTACACAAGTTGGTTCATATGATATTATTTTGGATAGCAATGATGAAGCTATCTGTATTATTGAAA

SEQ ID NO: 7476 - protein, 80 aa, Streptococcus agalactiae; identical to SEQ ID NO: 2844

SEQ ID NO: 7477 - protein, 696 aa, Streptococcus agalactiae
ATGACTAAAGTTGTTTTAGTGACGGGCTGTGCTAGTGGAATTGGTTATGCACAGGCTCAATATTTTTTGAAACAAGGGTATCAAGTATATGGTGTGGATAAGTCGGATAAACCGAACTTAAATGGTAATTTTAACTTTATAAAGTTGGATTTATCCTCTGATTTATCCCCACTATTCACAATGGTACCGACTGTTGATATTTTGTGTAATACTGCAGGTATTCTAGATGCCTACAAGCCACTTCTAGAAGTAAGTGATGAAGAACTGGAACACCTATTTGATATTAATTTTTTCGTGACTGTTAGGCTAACACGTCATTATCTTAGACGTATGGTGGAAAAGAAGTCAGGTATTATTATCAATATGTGCTCAATAGCAAGTTTTATAGCGGGTGGCGGTGGAGCTGCATATACTAGTTCTAAACATGCCCTTGCGGGATTCACACGTCAATTGGCTTTGGATTACGCAAAAGATTGTATTCAAATTTTTGGTATAGCGCCAGGTGCTGTACAAACTGCTATGACTGCTAGTGATTTTGAACCTGGTGGATTAGCAGAATGGGTAGCTAGTGAGACGCCAATTGGTCGTTGGACTAAACCAAGTGAAGTTGCTGAATTAACTGGATTTCTTGCTTCAGGAAAAGCGAGATCAATGCAAGGTGAAATTGTCAAAATTGATGGTGGCTGGAGTTTGAAA

SEQ ID NO: 7478 - protein, 232 aa, Streptococcus agalactiae; identical to SEQ ID NO: 2846

SEQ ID NO: 7479 - protein, 234 aa, Streptococcus agalactiae
ATGACATTTGAAGAAATTTTACCAGGTTTAAAAGCAAAGAAAAAATATGTACGTACAGGTTGGGGGGGCGCTGAAAATTATGTTCAGTTATTTGATACCCTTGAAGTTAATGGGAAAGTACTACAGGCTACACCTTATTTTCTTATTAATGTTACTGGTGAAGGTGAAGGTTTTTCCATGTGGGCACCAACACCATGTGATGTTTTAGCAGAGGATTGGATCGAGGTCAATGAC

SEQ ID NO: 7480 - protein, 78 aa, Streptococcus agalactiae; identical to SEQ ID NO: 2848

SEQ ID NO: 7481 - protein, 246 aa, Streptococcus agalactiae
ATGGAGAAAATTACGAATGATTTTGAAAAAGTTATAGCTGTGCTAAATCAACTAAGTATTTCTTATGAATTAGTGGAAAATGGACCTGTTTTGTTGACGGAGCAAGCAGATAACTTTATTGTGGGAATTGAAGGAGTAAGAACAAAAATAATGTTCTTGACCAACAAGAAAAAGACGAAATATTATTTACTAATAATGGATGACCAGAAACTATTTTATCCTATGAAAACAATAGTAGCCTTTAGA

SEQ ID NO: 7482 - protein, 82 aa, Streptococcus agalactiae; identical to SEQ ID NO: 2850

SEQ ID NO: 7483 - protein, 498 aa, Streptococcus agalactiae
ATGGCTTGCATAATCAGGAGAGCAAGATTAGGAGATGAAGTCAATTTAGCTTATATTCAAACGGAGAGCTGGAAAGCTGCTTTTGGTAAGATACTACCTGAGGATATCATTCAAAAAACTACGGAAATAGAACCTGCCATAACAATGTATCAACAGCTACTACACAAGGAGGTTGGTAAGGGGTATATATTGGAAGTAGATAGCAATCCTCATTGTATGGCTTGGTGGGATAAAAGTAGAGAAGATGGTATGCTTGATTATGCAGAACTCATTTGTATACATAGTCTTAAAGAAGGTTGGGGAAAAGGTTATGGGTCTCAAATGATGAATCATGTACTATCAGAGATACAACAAGCAGGTTATAATAAAGTGATACTTTGGGTATTTACAGAAAATACACGCGCAAGGAAATTTTACGATAGGTTTGGTTTTTCTTTTAAGGGTAAATCAAAAACTTATTTTGAAAAGGAAGAAATGTGTTATGAGAAGATTTTGCAC

SEQ ID NO: 7484 - protein, 166 aa, Streptococcus agalactiae; identical to SEQ ID NO: 2852

SEQ ID NO: 7485 - protein, 444 aa, Streptococcus agalactiae
TTGTACCAATGTTTAAAAAAATATAAAAGTATTTTTGCCAATTATCGCTTTGGAGCTGTAGGATCAATTTCTTATATTTACTATATTTTATTTGAATTACTGACCCCTTTTATAGAATGTTTTGGTATTGTCATTATATTTTTGTCCTTATTATTTAATCAATTAAACATCCCATTCTTTATATCATTGGTGAGCCTTTATATCTTTTACTGTGTTTTAATTACATTAAGCTCTTTCTTACACCGTATTTATTCTCAGCAACTAGTAATAGGAATTTTAGATATTGTTAAAGTATTTTATATTGCTGTTTTTAGGTATCTTATCCTACATCCTGTATTAACTTTTGTTAAGGTTGCAAGTGTTATTGGCTATAAAAATAAAAAAATGGTTTGGGGGCATATTACGAGAGAGAAACAAATGAAGGATTTTGAAACAAGTGTTACT

SEQ ID NO: 7486 - protein, 148 aa, Streptococcus agalactiae
MYQCLKKYKSIFANYRFGAVGSISYIYYILFELLTPFIECFGIVIIFLSLLFNQLNIPFFISLVSLYIFYCVLITLSSFLHRIYSQQLVIGILDIVKVFYIAVFRYLILHPVLTFVKVASVIGYKNKKMVWGHITREKQMKDFETSVT

SEQ ID NO: 7487 - protein, 954 aa, Streptococcus agalactiae
ATGGCATTATTTTTTACCTTCCTAAAGGTATCTCAAGTCATTTTCTTAGTATTATTGATTGCCTATGCCAGCTTTTTAGTGATTTCATTAGTCATTGGAGGTGTTCATCTCTATGAAAAAAATGAGCGCAAAAAAAGTTTAACTAGAAATAAAGAAAAAATTCCAATTTCAATTATTGTACCAGCCTATAATGAATCAACAACCATTGTGAGTTCGATTGATTCGTTATTGCACCTTGATTATGAAGCGTATGAAATTATCGTTGTGGATGACGGTTCCAGTGACAATACTTCAGATGTTCTCAAGGAAGAGTTTGCATTAATGAAAATCTCGAATACGATTGATTCAATTATTGCTACTCAAACTTGTAAAGATGTCTTTCAGAGACAGGTTGGTAAGGTTAAACTGACACTCATTGTTAAAGAAAATGGTGGCAAAGGGGATGCCTTAAATATGGGGATCAATGCTGCTAATTACGATTATTTTCTATGTCTAGATGCAGATTCTATGTTGCAGGTAGATTCTTTGAGTCAAATTAGCAAATCCATACAGGTAGATCCGACGGTTATAGCAGTGGGAGGGCTCGTCCAAGTTGCCCAAGGTGTTAAGATTGAGCAGGGGAAAGTAGCATCTTATCGTTTGCCTTGGAGAATTATTCCTTGTGCACAAGCACTTGAGTATGATTCATCATTTTTAGGAGCTCGAATCTTTTTAGACTATTTAAGAGCTAATTTAATTATTTCGGGGGCTTTCGGTCTTTTTAAGAAAGACCTTGTTAAAGCGGTGGGAGGATATGACACCCAGACTCTAGGAGAAGATATGGAGTTGGTGATGAAATTACATTTCTTCTGTCGTAATAATAATATTCCTTATCGTATTTGTTATGAAACAGATGCTGTTTGTTGGAGTCAAGCACCAACGAATTTAGGGGATTTACGTAAACAGAGACGCCGG

SEQ ID NO: 7488 - protein, 318 aa, Streptococcus agalactiae
MALFFTFLKVSQVIFLVLLIAYASFLVISLVIGGVHLYEKNERKKSLTRNKEKIPISIIVPAYNESTTIVSSIDSLLHLDYEAYEIIVVDDGSSDNTSDVLKEEFALMKISNTIDSIIATQTCKDVFQRQVGKVKLTLIVKENGGKGDALNMGINAANYDYFLCLDADSMLQVDSLSQISKSIQVDPTVIAVGGLVQVAQGVKIEQGKVASYRLPWRIIPCAQALEYDSSFLGARIFLDYLRANLIISGAFGLFKKDLVKAVGGYDTQTLGEDMELVMKLHFFCRNNNIPYRICYETDAVCWSQAPTNLGDLRKQRRR

SEQ ID NO: 7489 - protein, 2157 aa, Streptococcus agalactiae
ATGAAAAAATATCTAAGTATTGTAGCCCTTTTAACTATTTTGTTTAGCTCTATTTATTATTTGTATTACTTTGATGGTAGTTTGTATTTACCAAAGGGCTTATTAAAAGAAAATACAAGAACTAACTTTGTTGTTAAAGGTGATACTGTACTTCACAAGCCCACCAATAAACCTTTTGTTGTTAAAGGAGTAGACGTTGAGTCTTCCTTAGCGGGTTATCATCACAACGATTTTCCTATTACTCAAAAAACGTATCGTGAATGGTTCCATTTAATTTCCAACATGGGGGCAAATACTGTAAGAGTCAAGGTACCGATGAATGTTGCATTTTACGATGCCTTATATCACCACAACAAAGCATCAAAGAGGCCACTGTATTTGTTGCAAGGAATACGTATAGATTCTTATCGCAATAATGCTTCTATAACAGCTTTTAATGATAATTATAGGGGGTATTTAAAACGAGAAGCAAAAGGCGTTGTGGATATTCTCCATGGGCGTAAGCAAGTATGGAATACTGATTTTGGTAGCCGTCATTATCATTATGATCTTAGTCCTTGGGTACTTGGTTATGTCGTAGGGGATGATTGGAATAGTGGTACTGTCGCTTATACTAATCATCAAGAGAAAAAAACGCAATATAAAGGACGTTATTTTAAAACTTCTGTGGCAGCTAATCCATTTGAGGTCATGCTAGCTCAAGTAATGGATGAATTGACACATTATGAGACAGCTAAATATGGTTGGCAACATTTGATTAGTTTTTCAAACTCACCAACAACAGACCCTTTTCATTATCGAAAACCATTTGAGGCACAGGCTCCTAAATACGTACAACTAAATGTAGAAAATATTCAAGCTAATTCAAATGTTAAAGCAGGTATGTTTGCAGCATATAAAGCTATTGATTTCCATCCTCGATACAAGGATTATCTATTATTTGATAAAGAGAATATCAGTAAAGAAGATAGACAAAAGATTAAAGAACTTTCTTTGTCACAGGGATACGTTAAACTGCTAAATGCTTATCACAAAATCCCTGTTCTAGTCACGGGTTATGGCTATTCGACAGCGAGAGGTATTGCCCAAAAAGAAATTGATAAACGTCCTCTGCCGATTAATGAAAAAGAACAAGGTCAGCGTTTACTAGAAGATTATGAATCTTTTATATCATCCGGTAGTTTTGGAGCGACTATCAATGCATGGCAAGACGATTGGAATGCAAGGGCGTGGAATACATCTTTCGCCACAAATAAACATAGTCAATTCCTATGGGGGGATGCACAAGTATTTAATCAAGGTTATGGTTTATTAGGCTTTAAAAACGCAAAACATCATTATCAAGTTGATGGTAAAAGAGGCAAAGGAGAGTGGAAACATCCTCTGATGACTAGTGCAACAGGAGATGACTTATATGCTAGCAGTGATGAAAGCTATCTCTACCTTGCGATTAAAACAAAACCTGAAAAACTAAAAGAAAAACGATTATTACCAATAGATATTACACCAAAATCTGGTAGTAGAAAAATGAATGGTAGTAAGGTCACATTTTCTAAATCTAGTGACTTTGTATTGTCTATTGATCCAAATGGCAAGTCTGAATTATTTGTCCAAGAGCGCTATAATGCCTTAAAAGCGAACTATCTTCGACAGCTTAACGGTAAAGATTTTTATGCTTTCCCACCAAAGAAGAACAGTAGTAATTTTGAGCAGATAAATATGGTATTGAGAAATACAAAGATTGTTGAAGACATGGAAAAAGTAAAAGCAACAGAGAGGTTCTTACCAACTCATCCTACTGGTCTTCTCAAAACAGGAACAACTGATAGGCACCAAAAAACATTTGATTCACAAACAGATATTTCGTTTGGAAAGGACTTTATAGAGGTCAGAATTCCGTGGCAGTTGTTGAATTTTTCTGATCCATCATCTCAAAAAATTCACGATGATTACTTTAAACATTATGGTGTGAAGGAGTTAGAAATTGAGAGCATTGCTTTAGGATTAGGTGCTAATAGCAAAGAAAACACACTGATAAAGATGGCAGATTATCGTTTGAAAAATTGGGAGAGACCCGATACCAAAACCTTTTTAAAAGACTCCTATTATAGTATTAAGAAAGAATGGTCTAAAGAAAGAGAGAGAACATATGGTACA

SEQ ID NO: 7490 - protein, 719 aa, Streptococcus agalactiae
MKKYLSIVALLTILFSSIYYLYYFDGSLYLPKGLLKENTRTNFVVKGDTVLHKPTNKPFVVKGVDVESSLAGYHHNDFPITQKTYREWFHLISNMGANTVRVKVPMNVAFYDALYHHNKASKRPLYLLQGIRIDSYRNNASITAFNDNYRGYLKREAKGVVDILHGRKQVWNTDFGSRHYHYDLSPWVLGYVVGDDWNSGTVAYTNHQEKKTQYKGRYFKTSVAANPFEVMLAQVMDELTHYETAKYGWQHLISFSNSPTTDPFHYRKPFEAQAPKYVQLNVENIQANSNVKAGMFAAYKAIDFHPRYKDYLLFDKENISKEDRQKIKELSLSQGYVKLLNAYHKIPVLVTGYGYSTARGIAQKEIDKRPLPINEKEQGQRLLEDYESFISSGSFGATINAWQDDWNARAWNTSFATNKHSQFLWGDAQVFNQGYGLLGFKNAKHHYQVDGKRGKGEWKHPLMTSATGDDLYASSDESYLYLAIKTKPEKLKEKRLLPIDITPKSGSRKMNGSKVTFSKSSDFVLSIDPNGKSELFVQERYNALKANYLRQLNGKDFYAFPPKKNSSNFEQINMVLRNTKIVEDMEKVKATERFLPTHPTGLLKTGTTDRHQKTFDSQTDISFGKDFIEVRIPWQLLNFSDPSSQKIHDDYFKHYGVKELEIESIALGLGANSKENTLIKMADYRLKNWERPDTKTFLKDSYYSIKKEWSKERERTYGT

SEQ ID NO: 7491 - protein, 1482 aa, Streptococcus agalactiae
TTGATTATTTCAACATTGTTAGCCAAAGCGACGAAATCAATGGGTAGACTTATGAGAGGGAAGGTTATTTACGGCACAACCCTTATAGGTCTTTTTCTATTCTTATTTTTCTATTTTTGGATTCCTAAGCATCACATCGAGAGAATACATCATCATCGTATAAAGCAGGTAGATGCGAAGAGTGATTTAACAGGATTTAAAACCCATTTGCCCATTATCAGCATTGATACAAAGCAACAAGTTATTCCTCTTGTTACAAAAGAAGGCGGAAAATATGTCAAAGCTAGGGATAATATTAATGTTGATATCGAATTACGGGATTCTCCAAGTAGATCACATCATTTATCAGAAAAGCCGAGAATTAGGACAAAAGGGTTAATATCATATAGAGGAAATTCCTCTCGTTACTTTGATAAGAAGTCATTGAAAGTTAAGTTTGTTACTAATAAGTTAAAGGAAAAGAAGCATCGATTAGCAGGAATGCCTAAAGAATCGGAGTGGGTATTGCATGGTCCCTTTCTAGACAGAACATTATTAAGAAATTATCTGAGTTATAATATTGCTGGTGAGATTATGTCCTATGCCCCAAACGTTCGCTACTGTGAGTTATTTGTCAATGGTGAGTATCAGGGAGTATATCTAGCAGTTGAGAATATCGAACAAGGTGAGCAACGAGTTCCCATTGAAAAAAGTGATAAAAAGTTGCATAAAACACCTTATATCGTTGCTTGGGATCGTGAACATAAGGCAAAGCAAAAGTTAGATAACTATGTACATTATACACACCAGTCTGGTATCTCAGCTCTTGATGTGAAATATCCAGGTAAACAAAGATTGACATCAAAACAATTAGAGTTTATTAATAAGGACATCAATCATATTGAAAAAGTCCTTTATTCTTATGATTTTTCACAATATCCTAAATATATTGATAGAGAATCATTTGCAAATTATTTTGTCATCAATGAATTTTTTAGAAATGTGGATGCGGGTAAATTTTCAACCTATCTATATAAAGATCTTCGTGATAGAGCAAAACTAGTAGTTTGGGATTTTAATAATGCTTTTGATAATCAAATTGAAGGACGTGTTGATGAGGCAGATTTTACCTTGACGGATGCACCGTGGTTCAATATGCTCATTAAGGACAAAGCATTTATAGACCTGGTTGTTCATCGCTATAAAGAATTACGAAAGGGAGTTCTAGCGACAGAATATTTATCTAATTACATAGACGAGACAAGGCATTTTTTAGGTCCAGCTATTGATCGAAATTATAAAAAATGGGGCTATGTCTTTGATTTAAAGAATACTGATCCAAGGAATTATTTGATTCCTACTGAACGCAATGTGACAAGTTATCACAAATCAGTAGAACAATTAAAAGATTTTATCAAAAAGCGTGGCAGATGGATGGATAGAAATATTGAGACCTTGTATCAATATAGTGCACCATCGAAAAATACTAATACTTTACTGGAG

SEQ ID NO: 7492 - protein, 494 aa, Streptococcus agalactiae; identical to SEQ ID NO: 2860

SEQ ID NO: 7493 - protein, 675 aa, Streptococcus agalactiae
ATGAAAGACCTATTACGAAATAGTCTAGAGCAAAGTGGAAATTTAAGTTTTCAAGATATGATTTTACATATTCTTGTAGCAGCTTTATTGAGTGTAGTTATTTATGTTTCCTATGCTTATACGCATAGTGGAACTGCCTATAGTAAAAAGTTTAATGTTTCATTAATGACATTGACGGTCTTGACTGCAACAGTAATGACCGTTATTGGTAATAATGTAGCCTTGTCATTGGGTATGGTCGGTGCCTTGTCAGTTGTTCGTTTTAGGACAGCCATAAAAGATTCAAGAGATACAGTTTATATTTTTTGGACCATAGTTGTTGGTATCTGTTGTGGTGTCGGTGACTATGTGGTAGCTGCATTAGGAAGTAGCGTTATCTTTATCTTATTATGGGTTATGGGACGTGTTAAAAACGAGAATCGTATGTTATTGATTGTGAAGTGCGATAGAACACTAGAAGTTGATTTAGAAGGAATTTTCTTCCAATATTTTGACGGAAAAGCTGTTCAGCGTGTTAAAAATTCAACAACTAATACTATTGAAATGATTTTCGAAATCTCTAGAAAAGATTACGATAAGCAACTCCATGTAGATAATCAGTTAACTGAAAAAGTGTACCAATTGGGAAATATTGATTATTTCAACATTGTTAGCCAAAGCGACGAAATCAATGGG

SEQ ID NO: 7494 - protein, 225 aa, Streptococcus agalactiae; identical to SEQ ID NO: 2862

SEQ ID NO: 7495 - protein, 609 aa, Streptococcus agalactiae
ATGACGCTCGATTCGCATAGTTCAGACGACGGCTATACTATCCGTTCGCTATACTTTGATTCTTTAGAAGATGTTGATTGGCAAGAAAAGGAAGATGGTGTTGAGATACGAAGAAAGATTCGTTTGCGCAATTATGGTAGTCAAAGCAATTTTGCGAAATTAGAAATGAAACAAAAACAAGGTGCTAATCAAAAAAAGCGCTCTCTAAAATTAAGCAAGACAGATGCTCAAGCGCTGATTAATGGTAACAATAGTGTTTTATTAAATTATCCGGATACATTTGCTGCGGAGTGTTATTCAAGGATAACAACGCAACTTTATCAACCTAAAACGGTTATTGAGTACCAAAGAAAAGCTTTTGTTGCTAAGGAAAACAATATCCGAATCACCTTTGACCACCATATAATAGGTACAGAGGCTAGTTATGATATTTTCTCAGAGGATTTAAATCAAAATTATTTATTAGATCCTTATCTTGTTATTTTAGAAGTTAAATATAATGGATTTTTATTGTCTTATATTAAAGAACTCTTAGATTCGGTAGATAGAAGTGAACTTTCAGCGAGTAAGTATTGTTTAGGAAGAGCTGTTAGTAAACATTATCGTTTT

SEQ ID NO: 7496 - protein, 203 aa, Streptococcus agalactiae
MTLDSHSSDDGYTIRSLYFDSLEDVDWQEKEDGVEIRRKIRLRNYGSQSNFAKLEMKQKQGANQKKRSLKLSKTDAQALINGNNSVLLNYPDTFAAECYSRITTQLYQPKTVIEYQRKAFVAKENNIRITFDHHIIGTEASYDIFSEDLNQNYLLDPYLVILEVKYNGFLLSYIKELLDSVDRSELSASKYCLGRAVSKHYRF

SEQ ID NO: 7497 - protein, 1341 aa, Streptococcus agalactiae
TTGCTTATGGTAAAAAAAGGCTTTTTAACGGGATTACTCTTATTTGGTATCTTCTTTGGTGCAGGGAACCTCATTTTTCCACCAGCATTAGGTGTAGCATCTGGACAAGATTTCTGGCCAGCGATTTTAGGATTTTGTTTGTCAGGAGTTGGATTAGCTATTATTACCCTCCTACTAGGCACACTAACTAATGGTGGTTATAAGACAGAGATGTCGGAAAAATTTAGTCCGTGGTTTTCTTTAACATTTTTAGTTATACTCTACCTAACTATTGGTCCACTTTTTGCTATTCCTAGAACAGCAACGGTTTCTTTTGAAATTGGGGTTGCTCCAATTGTAGGGCATAGTCCGATTGCTCTTTTGTGTTTTACAGCCTGTTTTTTTGCTGCAGCTTATTATCTCGCTATTAGACCAAATGGTATATTAGATAGTGTTGGAAAAATCTTAACGCCTGTTTTTGCCTTTTTAATTCTCTCTTTGGTTGTTGTTGGAGCTATTGCTTATGGAAACTTGGAGAGTGCTAAGGCGAGTGCTGACTATGCAGGAAAAGCGTTTGGAAGTGGTGTCTTAGCAGGCTATAATACACTTGATGCACTTGCAGCAGTTGCTTTTTGTCTAGTAGCAACAGAAACGCTTAAAAAGTTTGGTTTTAAAACTAAAAAAGAATATTTATCAACCATTTGGATTGTTGGAATTGTTACTAGTTTAGCATTTAGTATTTTATATATTGGCTTAGGTTTTTTAGGGAATAAGTTTCCTGTCCCAGCTGATATTTTAGCTGACCCAAATGTTAATAAAGGAGCTTATGTATTATCACAAGCATCTTATAAATTATTTGGAAATTTTGGTCGTTATTTCTTGAGTATTATGGTAACATTGACATGCTTTACAACAACAGTTGGGCTTATTGTGTCAGTATCTGAATTTTTTGATAAGAACTTTCGTTTTGGGAATTATAAATTATTTGCTACTGTTTTTACTTTGATTGGCTTTTTAATTGCTAATCTTGGTTTAAATGCTGTAATTACTTTTTCAGTTCCTGTGCTAACTTTATTGTATCCGATTGTTATTGTTATTGTCTTAATTATTTTGATTAATAAGTGGTTGCCGCTTTCAAAAAAGGGAATGTCTTTGACAATTGGTCTTGTCACTTTAGTGTCGTTTGTTGAGGTTCTAGCGGGACAATGGCAAGAAAAAACATTAACTCAGTTAGTTGGATTCCTCCCCTTTCATACTATTTCAATGGGGTGGCTAGTTCCAATGTTGATTGGTATAGTATTTTCTTTGGTGCTGTCAGATAAGCAAAAAGGCCAAGCATTTGATTTAGAGAAATTTGAAGGA

SEQ ID NO: 7498 - protein, 447 aa, Streptococcus agalactiae; identical to SEQ ID NO: 2866

SEQ ID NO: 7499 - protein, 1995 aa, Streptococcus agalactiae
ATGACAGAAAAAAAATCATTTTACATTACTACCCCAATTTATTACCCATCAGGTAAATTGCACATCGGTTCTGCCTATACAACGATAGCATGTGATGTTTTGGCACGTTACAAACGCATGATGGGCTTTGATGTTCAGTATTTGACTGGTCTTGATGAGCATGGTCAGAAAATTCAACAAAAGGCTGAAGAAGCAGGCATTACACCACAGGAATATGTTGATGGCATGGCTGAAAGTGTCAAAACATTATGGGAACTTTTAGATATTTCCTATGACAAATTCATCCGTACAACAGATACTTACCATGAAGAAGCGGTTGCTAAAATTTTTGAACAATTGTTGGCACAAGGGGACATCTATCTTGGTGAGTATACCGGATGGTATTCTGTTTCAGATGAAGAATTTTTTACTGAAAGCCAATTAGCAGAAGTTTATCGTGACGAAAACGGTAATATGATTGGTGGTGTTGCGCCATCTGGTCATGAAGTTGAAAAAGTTTCTGAAGAATCTTATTTCTTCCGCATGAGCAAATATGCAGATCGTTTAAAAGCGTACTACGCTGAGCATCCAGAATTTATTCAGCCAGATGGTCGTATGAATGAAATGCTTAAAAACTTTATAGAACCAGGTTTAGAAGATTTAGCAGTGTCTCGTACAACTTACACATGGGGAGTTCAGGTACCATCAAATCCAAAACATGTTATTTATGTCTGGATTGATGCTTTGATGAACTATATTTCTGCTCTTGGTTATGGTTGGTCTGACGATCTCAGTCAATATCATAAATTTTGGCCAGCAGACATTCATATGATTGGTAAAGATATTCTTCGTTTCCACTCTATTTATTGGCCTATCATGTTGATGGCGCTGGATTTGCCATTACCAAAACGTCTAGTTGCTCATGGTTGGTTTGTGATGCAAGATGGTAAAATGTCTAAATCAAAAGGGAATGTCGTTTATCCAGAAATGTTAGTAGAGCGTTTTGGTCTTGATCCACTCCGTTATTATCTCATGCGTTCATTGCCTGTTGGTTCAGACGGAACTTTTACGCCAGAAGATTATGTTGGACGTATTAACTATGAACTTGCTAATGATTTAGGAAACCTTCTCAACCGCACTATTGCTATGGTTAACAAGTATTTCGATGGAGAAGTACCAAGGTTTGCTGTTGCAACTGACTTTGATGCCGATTTAGCTTCTGTTGCGACAGATAGTATTGAAAACTATCATAAACAAATGGAAGCGGTGGATTTCCCACGTGCCCTTGAAGCTGTATGGAATCTTATTTCACGAACTAACAAATATATTGATGAAACAGCACCGTGGGTACTTGCAAAAGACGAAACAGATCGTGATAAGTTAGCAGCTGTAATGAGTCATTTAGTTGCTAGTCTACGTGTTGTTGCTCACCTCATTCAACCGTTCATGATGGAAACTTCCGATGCCATTATGGAACAACTTGGTTTAGGGGCAACATTCGATCTTGAAAAATTGACTTTTGCTGATCTACCAGAAGGTGTTCGAGTTGTTGCAAAAGGTTCACCAATTTTCCCAAGGTTGGATATGGAAGACGAAATTACTTATATCAAAGAACAAATGAATGCTGGAAAAGCACCAGTGGAAAAGGAGTGGGTTCCTGAAGAAGTTGAATTGACATCAAGCAAAGGTCAAATCAAGTTTGAGGATTTTGACGCTGTTGAAATCCGCGTTGCAGAAGTAATTGAAGTTGAGAAAGTGGAAGGTTCTGATAAACTTCTTCGTTTCCGTCTAGATGCTGGTGATGAGGGCCATCGTCAAATCTTATCAGGGATTGCAAAATTTTACCCAAATGAACAAGAGTTAGTAGGGAAAAAACTCCAAATTGTTGCTAACCTCAAACCACGTAAAATGATGAAAAAATATGTCAGTCAAGGCATGATTCTCTCAGCAGAACATGATGGTAAATTGACAGTGTTGACGGTCGATTCAGCAGTGGCAAATGGATCAATTATTGGT

SEQ ID NO: 7500 - protein, 665 aa, Streptococcus agalactiae
MTEKKSFYITTPIYYPSGKLHIGSAYTTIACDVLARYKRMMGFDVQYLTGLDEHGQKIQQKAEEAGITPQEYVDGMAESVKTLWELLDISYDKFIRTTDTYHEEAVAKIFEQLLAQGDIYLGEYTGWYSVSDEEFFTESQLAEVYRDENGNMIGGVAPSGHEVEKVSEESYFFRMSKYADRLKAYYAEHPEFIQPDGRMNEMLKNFIEPGLEDLAVSRTTYTWGVQVPSNPKHVIYVWIDALMNYISALGYGWSDDLSQYHKFWPADIHMIGKDILRFHSIYWPIMLMALDLPLPKRLVAHGWFVMQDGKMSKSKGNVVYPEMLVERFGLDPLRYYLMRSLPVGSDGTFTPEDYVGRINYELANDLGNLLNRTIAMVNKYFDGEVPRFAVATDFDADLASVATDSIENYHKQMEAVDFPRALEAVWNLISRTNKYIDETAPWVLAKDETDRDKLAAVMSHLVASLRVVAHLIQPFMMETSDAIMEQLGLGATFDLEKLTFADLPEGVRVVAKGSPIFPRLDMEDEITYIKEQMNAGKAPVEKEWVPEEVELTSSKGQIKFEDFDAVEIRVAEVIEVEKVEGSDKLLRFRLDAGDEGHRQILSGIAKFYPNEQELVGKKLQIVANLKPRKMMKKYVSQGMILSAEHDGKLTVLTVDSAVANGSIIG

SEQ ID NO: 7501 - protein, 873 aa, Streptococcus agalactiae
ATGGTTAATACAAAAACACTTCTCCCCTACAAAACTATGCCGGTTTGGACTGCACAGTCTATTCCAAAGGCATTTTTAGAAAAGCATAATACTAAGGAAGGCACCTGGGCAAAACTAACCATTCTAAGTGGTTCTTTAGTATTTTACCAGTTATCTCCTGATGGAGAGGAAATCTCGCGGCATATTTTTGATGCTAGTAGTGATATTCCTTTTGTTGATCCACAAGTCTGGCATAAAGTTTCGCCGAATAGTCCAGACTTAAGTTGCTATCTAACTTTTTACTGCCAAAAAGAAGATTACTTCCATAAAAAATATGGTCTCACGCGCACACATTCTGAGGTTATCGCCAGTGCACCTCTCTTATCTGAGAAGAGTAATATATTAGACCTTGGGTGTGGTCAAGGGCGAAACTCACTTTATTTATCGCTGCTGGGACATCAAGTGACTTCTGTCGATTCAAACGGACAGAGCCTTGTAGCTTTAGAAAATATGGCATTAGAAGAAGAGCTTCCTTACAATATAAAAAGGTATGATATTAATACTGCTGCTATTGAAGGGCACTATGATTTTATTTTATCAACTGTGGTATTTATATTTTTAAATCCCGACTGCATTTCTGATATTATTTTACAAATGCAATCACATACTCAGATTGGAGGATACAATCTTATCGTTTCTGCTATGGATACCGCTGAAAATCCTTGCCCGCTTCCATTCCCTTTTACCTTCAAAGAAGGACAATTGAAATCTTATTACAATGACTGGGAAATCATCAAATATAATGAAAATTTAGGTGAATTGCACAGGGTGGATGAAAACGGTAATCGCTTAAAATTACAGTTTGCGACTTTATTAGCTCGAAAATTAAGATCA

SEQ ID NO: 7502 - protein, 291 aa, Streptococcus agalactiae
MVNTKTLLPYKTMPVWTAQSIPKAFLEKHNTKEGTWAKLTILSGSLVFYQLSPDGEEISRHIFDASSDIPFVDPQVWHKVSPNSPDLSCYLTFYCQKEDYFHKKYGLTRTHSEVIASAPLLSEKSNILDLGCGQGRNSLYLSLLGHQVTSVDSNGQSLVALENMALEEELPYNIKRYDINTAAIEGHYDFILSTVVFIFLNPDCISDIILQMQSHTQIGGYNLIVSAMDTAENPCPLPFPFTFKEGQLKSYYNDWEIIKYNENLGELHRVDENGNRLKLQFATLLARKLRS

SEQ ID NO: 7503 - protein, 693 aa, Streptococcus agalactiae
ATGTCTAAAAAGTCTCACCGTCAATATCAAATATATGAAGGGCTCAGGTGTGCGGTTGCACTCTGTTTTATTTCAGGTTATATCAATGCTTTTACTTATGTAACACAAGGAAAACGTTTTGCAGGTGTACAAACAGGGAATTTGTTATCTTTTGCTATTCATCTTAGTAATAAGCATTATAGTCAAGCGCTTGCTTTTTTGCTACCTATAATGGTTTTCATGTTAGGTCAATCGTTTACTTATTTCATGAATCGTTGGGCGAATAAACATCAACTGCACTGGTACCTATTATCTAGTTTTGCGTTGACACAGGTTGCTATAGTAACAATTATATTGACTCCTTTCTTACCATCGTCGTTTACTGTGGCAGGACTAGCCTTCTTTGCTTCAATACAAGTAGATACCTTTAAATCGCTCAGAGGAGCACCTTATGCTAATATGATGATGACTGGTAATATCAAGAATGCTGCTTATTTATTAACAAAGGGACTTTACGAAAAAAATTCTGATATTTTCTTAATTGCTAGAAATACGATTATTATTATTGGAGGATTTATCTTTGGTGTTGTTTGCTCGACTTATTTTTCAAGTAAACTGGGCGAATGGAGCTTATCATTAATATTAATTCCTCTTTTATATGTCAACTTGCTGTTAGGCCATGAATTTTATAACCTACAAGTAGAAAGGCACTCC

SEQ ID NO: 7504 - protein, 231 aa, Streptococcus agalactiae; identical to SEQ ID NO: 2874

SEQ ID NO: 7505 - protein, 1215 aa, Streptococcus agalactiae
ATGCACAGCACTATTTATAAATGTCATCATTGCCGTTATCTAATTTATAAAAGTTTTAAAGATATCTTTCCTTTTGCTCTCATTTTTTCTTGGATTGAAATCCTTCAAAAACTCGTTATATCAGATGATTCTTTTTTAGCTCAAACAACAAAGTCCAGTATTTATAAAAACGAGTGGTTATATACGGTTTCCAATACTCTTTATGATTTATCTCATTTACTAATCTACTTTATGGCTAGTTATTTTGTGGCTAGTTTAGTATGGAGAGGCTTATCTAACCAAACTAAAGAAAGTTTTTCTGCAAGTTTACTTGGCTTTGCCACTGTTTGGTTGCTTCTAACTTCAGTTGTTCCAGGTACAGATTATCACTATCCTAGCCAACCCATTTGGCTTATGCTGGCTTTGATTTCGTATCTTTTTATCTTTTTAACTCGACTGCTTCAAAATCGACATCATATTTTCCAGTATAGTATGTTAGCTATACTACTATTAATCTCTTCTATTTTGTCACATATCTTATATCGTTATCCTAATATTGATTTAGAATACCTTATACAAAATCACTTTTCTCAATGGCTGGGTGATGGGCCACATCAATTAATTCCTATTATGCTTTGGTCTATCTTAGCTATTTTTCTAACCTTATCAGGTCTTTTTGTACCAGATATTTTATTTCGTCCTTACTCCTATTTTTCAGTAGTTAGCGAAAATTTAAATGCTGCCTTGAGCCAACATACAGATAAAATCCCTTATCTGTATACCTTTTATACTGTTAAAAATAGCTTTGCTATGTTTGGCGGTATTGGAATCCTATTATCCTTATTTTTAGCAGTTTTATATGAAAGTAGAAAACTACAATCGAAGAATTACTATAAATTGACATTACTGACCTTAACTCCTCTTATTTTTGATCAAAATTTACCATTTTTAGTAGGTCTACCTGTCATTTTACAACCAATATTATTCATTCCGATGGTATTAACAACTATCTTTGCAGAGGCTTTTGGAGCTCTTATGCTCTACCTAAAATTTGTCGACCCTGCAGTTTATACTGTCCCAAGTGGTACACCTAGTCTACTATTTGGCTTTCTTGCTTCAAATGGGGATTGGCGTTACCTTCCAGTCACTGCAATTATTCTAGTTGTTGGCTTCTTTATTTATCGTCCGTTTGTCAAAATCGCTTTCGCTAAGGAGGAGCAATATGAAAAAATTACT

SEQ ID NO: 7506 - protein, 405 aa, Streptococcus agalactiae
MHSTIYKCHHCRYLIYKSFKDIFPFALIFSWIEILQKLVISDDSFLAQTTKSSIYKNEWLYTVSNTLYDLSHLLIYFMASYFVASLVWRGLSNQTKESFSASLLGFATVWLLLTSVVPGTDYHYPSQPIWLMLALISYLFIFLTRLLQNRHHIFQYSMLAILLLISSILSHILYRYPNIDLEYLIQNHFSQWLGDGPHQLIPIMLWSILAIFLTLSGLFVPDILFRPYSYFSVVSENLNAALSQHTDKIPYLYTFYTVKNSFAMFGGIGILLSLFLAVLYESRKLQSKNYYKLTLLTLTPLIFDQNLPFLVGLPVILQPILFIPMVLTTIFAEAFGALMLYLKFVDPAVYTVPSGTPSLLFGFLASNGDWRYLPVTAIILVVGFFIYRPFVKIAFAKEEQYEKIT

SEQ ID NO: 7507 - protein, 840 aa, Streptococcus agalactiae
ATGAAAAAATTACTTAGATGGCTTCCTCCTGTACTTTTCATTATTATCCTTATAGGAATGACTATCTTAGGTAAGTCCTATATCAATAAAGTAACAGCTCACAAAATAAAACTCTATAACTCTCGAATGACTCCTACTATTTTAATTCCAGGATCCAGTGCTACTCAAGAACGATTTAACAGCATGTTAGCACAGCTCAACCAAATGGGAGAAAAACATAGCGTTTTAAAGTTAACTGTCAAAAAAGACAATAGCATTATCTACAATGGACAAATTAGCGGCAATGACCACAAACCCTACATTGTCATTGGATTTGAAAATAATGAAGATGGTTATAGTAACATCAAAAAACAAACAAAATGGCTACAGATTGCTATGAATGATCTTCAGAAGAAATATAAATTTAAACGTTTTAATGCTATCGGTCATTCAAATGGTGGCTTATCATGGACTATTTTCCTAGAAGATTATTACGACTCTGATGAATTTGATATGAAATCATTGTTAACAATGGGAACACCTTTTAACTTTGAAGAAAGTAACACCTCAAATCATACTCAAATGCTTAAAGATTTAATCAGTAATAAAGGAAATATTCCATCAAGTCTCATGGTATATAATTTGGCAGGAACTAATTCATATGATGGTGATAAAATTGTTCCATTTGCTAGTGTGGAGACTGGTAAATATATTTTCCAAGAAACCGCTAAACACTATACCCAACTAACAGTAACTGGTAATAATGCTACACATTCTGACTTGCCTGATAATCCTGAAGTTATCCAATATGTCGCAGAAAAAATTCTTAAAAATGAGAAAGGTAAATTACCAAAACCTCAC

SEQ ID NO: 7508 - protein, 280 aa, Streptococcus agalactiae; identical to SEQ ID NO: 2878

SEQ ID NO: 7509 - protein, 825 aa, Streptococcus agalactiae
ATGAAACTCATTTCATGGAATATTGATTCCCTCAATGCGGCATTAACAAGTGAATCAACACGTGCTTTAATGTCACGCCAAGTTATTGATACTTTAGTTGCTGAAGATGCCGACATCATTGCGATTCAAGAAACTAAACTGTCTGCCAAAGGACCTACTAAAAAACATTTGGAAGTACTTGAAACTTACTTCCCAGAATATGATTTAGTTTGGCGATCATCAGTCGAACCTGCTCGTAAGGGCTATGCTGGCACAATGTTCTTATATCGTAAAGGGTTAAATCCTATTGTTAGCTTCCCTGAAATCGATGCTCCTACTACAATGGATAATGAAGGTCGCATTATTACTCTCGAATTGGAAAACTGCTATATCACACAGGTCTATACTCCAAATGCAGGTGATGGCCTAAAGCGCTTAGGTGACCGTCAAATATGGGATATTAAATATGCTGAGTATTTAGCAACATTGGATAGTCAAAAACCTGTTCTAGCAACAGGTGACTATAACGTAGCCCACAAGGAAATAGACCTAGCTAATCCTAGCAGTAATCGTCGTTCTGCTGGATTCACAGATGAAGAGCGCCAAGGCTTTACAAATCTACTAGCCAAAGGTTTTACAGATACTTTTCGTTACCTTCATGGCGATGTTCCAAATGTTTATAGCTGGTGGGCACAACGAAGTCGTACATCCAAAATCAACAATACAGGGTGGAGAATTGATTATTGGCTAACAAGTAACCGTGTCGCAGATAAAATTACCAAGTCAGAAATGATTCATTCTGGTGATCGTCAAGATCATACACCAATTATTTTGGAGATTGAACTA

SEQ ID NO: 7510 - protein, 275 aa, Streptococcus agalactiae
MKLISWNIDSLNAALTSESTRALMSRQVIDTLVAEDADIIAIQETKLSAKGPTKKHLEVLETYFPEYDLVWRSSVEPARKGYAGTMFLYRKGLNPIVSFPEIDAPTTMDNEGRIITLELENCYITQVYTPNAGDGLKRLGDRQIWDIKYAEYLATLDSQKPVLATGDYNVAHKEIDLANPSSNRRSAGFTDEERQGFTNLLAKGFTDTFRYLHGDVPNVYSWWAQRSRTSKINNTGWRIDYWLTSNRVADKITKSEMIHSGDRQDHTPIILEIEL

SEQ ID NO: 7511 - DNA, 354 bp, Streptococcus agalactiae
atgtatacgttttatgaataccccaaatgtaccacttgtcgttcagcaaaaaaagagttaactgaactcggcttaacttttgaagctattgatataaaaagcaatcctcccaaagcttcgttattaaaagaattgttagagaattcgccttatgaccttaaaaagtttttcaatacttcaggaaattcttacagagaattaggcttaaaagataaatttgatgatttaactcttgaccaagctttggacttattggcatcggatggaatgcttattaagcgtccattgctagttaaagataataaaattcttcagattggctatcgtactaagtataaagacctcaacttagta

SEQ ID NO: 7512 - protein, 118 aa, Streptococcus agalactiae
MYTFYEYPKCTTCRSAKKELTELGLTFEAIDIKSNPPKASLLKELLENSPYDLKKFFNTSGNSYRELGLKDKFDDLTLDQALDLLASDGMLIKRPLLVKDNKILQIGYRTKYKDLNLV

SEQ ID NO: 7513 - DNA, 474 bp, Streptococcus agalactiae
atgttatatcaagaattctatcagtctcctcttggagaaattcgccttctagcagacaatctaggtttatcagggctttattttgttgggcaaaaatatgatatgctagcagtcaaccaagaggaaattgttaatatgtcaaattcctatactttacttggtaagaagtggttagatgcttatttttcacagcaaaatttacctagtattccattatcattgagagggacagcatttcagacgagagtacggcaggaattacagaaaatcccttttggagataccaaaacttatggagaattagcgaaagagctaaattgtccatctgcacaggctgttggaggagcaataggtaaaaatcctatttctctaatcataccttgtcaccgtgttttaggaagatatggtcaattaactggttatgctggtggcttagaaagaaaatcttggttattagaatacgaaaaggagaaa

SEQ ID NO: 7514 - protein, 158 aa, Streptococcus agalactiae
MLYQEFYQSPLGEIRLLADNLGLSGLYFVGQKYDMLAVNQEEIVNMSNSYTLLGKKWLDAYFSQQNLPSIPLSLRGTAFQTRVRQELQKIPFGDTKTYGELAKELNCPSAQAVGGAIGKNPISLIIPCHRVLGRYGQLTGYAGGLERKSWLLEYEKEK

SEQ ID NO: 7515 - DNA, 1179 bp, Streptococcus agalactiae
atggtttttagtgtcaaaacatttaataatattaatcaaattggtttacaagagttagggaatcgtttccagattgatggggatatgtcagaaaatcctgatgcctatattattcgtagtcaaaatttgcataatcaggatttcccaagtaacctcaaagctattgctagggcgggtgcaggaacaaataatattcctattgaagaggcaagtgcacagggaatagtcgtgtttaataccccaggtgcaaatgctaatgctgtaaaagaagcggtcattgctgccttattgctttcagctcgtgattatttaggagctaaccgatgggttaatactctaactggaacagatattcccaaacaaattgaagcaggaaagaaagcttttgctggtaatgaaattgcagggaaaaaattgggagttatcggccttggtgctattggagctagaattgcgaatgatgctagacgcttaggaatgacagttcttggttatgatccctatgtttcaattgaaacagcttggaatatttcaagccatgttcaaagggttaaagagattaaggatatttttgaaacttgtgactatatcacaattcatgttcccttaacaaatgaaactaagcatacttttgatgcggaagctttttcaatcatgaaaaaaggaactacgattatcaactttgctcgtgcagaattagtcaataaccaagagctatttaaagcgatagaaactggtgttgtcaagcgctatattactgattttggagacaaagaattattaaaccaaaaaggaattacagtctttcctcatgtaggcggatcaacagatgaggcagagctaaattgtgctattatggcaagtcaaaccattcgttgttttatggagacaggagaaatcactaattcagttaatttccccaatgtacatcaaatccaaaccgcaccatttcgtattactttaattaacaagaatgttcctaacattgtggctaaaatttcaactgctgtatcagagctaggtataaatattgataacattattaaccgatcaaagggtgactacgcctacacactaatagatttagatgaaacggataataacaagatttctactttaattgaagaatttgaaggtgatgagaatatcgtccgtgtacgtttaattgcaaaacaacaa

SEQ ID NO: 7516 - protein, 393 aa, Streptococcus agalactiae
MVFSVKTFNNINQIGLQELGNRFQIDGDMSENPDAYIIRSQNLHNQDFPSNLKAIARAGAGTNNIPIEEASAQGIVVFNTPGANANAVKEAVIAALLLSARDYLGANRWVNTLTGTDIPKQIEAGKKAFAGNEIAGKKLGVIGLGAIGARIANDARRLGMTVLGYDPYVSIETAWNISSHVQRVKEIKDIFETCDYITIHVPLTNETKHTFDAEAFSIMKKGTTIINFARAELVNNQELFKAIETGVVKRYITDFGDKELLNQKGITVFPHVGGSTDEAELNCAIMASQTIRCFMETGEITNSVNFPNVHQIQTAPFRITLINKNVPNIVAKISTAVSELGINIDNIINRSKGDYAYTLIDLDETDNNKISTLIEEFEGDENIVRVRLIAKQQ

SEQ ID NO: 7517 - DNA, 546 bp, Streptococcus agalactiae
atgcaagtcagattagcttttccaaatgaaattgaccaaattatgcttcttattgaggaagcgcgtgccgaaattgctaaaacaggaagtgatcaatggcaaaaagaagatggataccctaatcgtaacgatattattgatgatatcttgaacggttatgcttgggttggtattgaagatgggatgctagcgacttatgcggctgtcattgatggtcatgaagaggtttatgatgctatttatgagggaaaatggctccatgataaccatcgctatcttacatttcatcgtattgctatttcaaatcaatttcgtggtagaggactagcacagacattccttcaagggttaattgaaggtcataaaggacctgattttcgttgcgatactcatgaaaaaaatgtcactatgcagcatattctaaataaattaggctatcaatattgtggtaaagtacctctagatggggtacgattggcttatcagaagataaaagaaaagggagaaacgagcatctatcgtgagattgatgaaagaaatcccatg

SEQ ID NO: 7518 - protein, 182 aa, Streptococcus agalactiae
MQVRLAFPNEIDQIMLLIEEARAEIAKTGSDQWQKEDGYPNRNDIIDDILNGYAWVGIEDGMLATYAAVIDGHEEVYDAIYEGKWLHDNHRYLTFHRIAISNQFRGRGLAQTFLQGLIEGHKGPDFRCDTHEKNVTMQHILNKLGYQYCGKVPLDGVRLAYQKIKEKGETSIYREIDERNPM

SEQ ID NO: 7519 - DNA, 1089 bp, Streptococcus agalactiae
atgacaatttataatttttctgcaggtcctgcagtcttaccaaaaccagtgcttgtaaaagcccaatctgaactccttaattatcaagggtccagtatgagtgttttggaggtatcgcaccgctccaaagagtttgatgatattatcaaaggtgctgagcgttacttaagagatttgatgggaattccggataattataaagtaatctttttacaaggtggtgcatccttacagtttagtatgattcccttgaatattgccagagggcgtaaagcttactatcatgttgctggttcgtgggggaaaaaagcttatacagaggctgtaaaactatcaaaaacaattccttttgaaccaattctattagcctcatcagaagaatcagtttatgattatattccagagtttgatgaaaaagagattgatcctgaagctgcctatgttcatgtgacaacaaataataccattgaaggaacatcgctttatgatattcctaaaactaatggagtgcctgttattgcggatatgtcttctaatatcttagctgtaaaatataaagtagaagattttgcaatgatttatgcaggagctcaaaaaaatattggacctgctggtgtaacggtagttattatccgtgaagatatgattaatgaggaaccaactttatcatcaatgttggattataagattcagtcagatgctagttctctttataatacgccgcctgcttacagtatttacattgctaaattagtctttgaatgggtgaaaagtctaggtggtgttgatgctatggaaaaagctaaccgtgaaaaatcaggacttctctatgattatattgattcctcagaattttatagtaatcctgtcagagataaaaagagtcgttctctatgtaacattcctttcataactattaataaagatttagatgaaaaatttgtaaaggaagcgacagaacgtggatttaaaaatattaaagggcatcgttcggtaggtggtatgagggctagcctttataatgcctttcctaaacaaggtgtcatcgaattaattgattttatgaaaacatttgaagcagaaaatgca

SEQ ID NO: 7520 - protein, 363 aa, Streptococcus agalactiae
MTIYNFSAGPAVLPKPVLVKAQSELLNYQGSSMSVLEVSHRSKEFDDIIKGAERYLRDLMGIPDNYKVIFLQGGASLQFSMIPLNIARGRKAYYHVAGSWGKKAYTEAVKLSKTIPFEPILLASSEESVYDYIPEFDEKEIDPEAAYVHVTTNNTIEGTSLYDIPKTNGVPVIADMSSNILAVKYKVEDFAMIYAGAQKNIGPAGVTVVIIREDMINEEPTLSSMLDYKIQSDASSLYNTPPAYSIYIAKLVFEWVKSLGGVDAMEKANREKSGLLYDYIDSSEFYSNPVRDKKSRSLCNIPFITINKDLDEKFVKEATERGFKNIKGHRSVGGMRASLYNAFPKQGVIELIDFMKTFEAENA

SEQ ID NO: 7521 - protein, 633 aa, Streptococcus agalactiae
ATGATTTTGAGGGAATTTTGTGCAGAGAATTTAACAGACTTAACCAGATTAGATAAAGCTATTATTTCACGTGTCGAGCTTTGTGATAACCTTGCTGCTGGAGGCACTACTCCTAGCTACGGTGTTATCAAAGAAGCTAATCAATATTTACATGAAAAAGGTATTAGTGTCGCTGTTATGATTCGTCCCCGTGGAGGAAATTTTGTATACAATGATTTAGAATTACGTATTATGGAAGAGGACATTCTACGTGCTGTTGAGTTAGAATCAGATGCTCTTGTTTTGGGAATATTAACTTCAAATAATCATATTGATACTGAAGCCATTGAACAACTTCTACCTGCTACCCAAGGTTTGCCACTTGTTTTTCATATGGCATTTGATGTTATCCCGAAATCTGACCAAAAAAAAGCAATAGATCAGTTAGTTGCTTTAGGCTTTACAAGAATTCTCCTACATGGTTCATCTAATGGCGAACCAATTATAGAAAATATCAAACATATCAAAGCATTAGTTGAATATGCTAATAATCGTATTGAAATTATGGTTGGCGGCGGTGTGACTGCTGAAAACTATCAATATATTTGCCAAGAAACTGGGGTTAGACAAGCCCATGGTACTAGAATAACTCAA

SEQ ID NO: 7522 - protein, 211 aa, Streptococcus agalactiae
MILREFCAENLTDLTRLDKAIISRVELCDNLAAGGTTPSYGVIKEANQYLHEKGISVAVMIRPRGGNFVYNDLELRIMEEDILRAVELESDALVLGILTSNNHIDTEAIEQLLPATQGLPLVFHMAFDVIPKSDQKKAIDQLVALGFTRILLHGSSNGEPIIENIKHIKALVEYANNRIEIMVGGGVTAENYQYICQETGVRQAHGTRITQ

SEQ ID NO: 7523 - protein, 141 aa, Streptococcus agalactiae
GTGCTTCCAATTTCCTTAAGATTTTTAATTTCAGCTCTTTTGAATACCATTGCAAATTGGATTTTATTTCTGAGAGCAGGTTATAAAAGATGGTATGCTCTTATTCCGGTTCTTTCAGGTTTTACAAAACATGAAAGAACT

SEQ ID NO: 7524 - protein, 47 aa, Streptococcus agalactiae
MLPISLRFLISALLNTIANWILFLRAGYKRWYALIPVLSGFTKHERT

SEQ ID NO: 7525 - protein, 861 aa, Streptococcus agalactiae
ATGCAAGTTCAAAAAAGTTTTAAATCAAATACACATTACGGGACACTCTATCTAGTCCCAACTCCAATTGGTAATCTAGATGATATGACTTTTCGTGCCATTAGGATTTTAAGAGAAGTTGATTTTATTTGTGCAGAGGATACACGAAATACGGGACTTTTACTCAAGCACTTTGATATTACTACTAAACAAATTAGTTTTCACGAACACAATGCTTACGATAAAATCTCTGGGTTAATTGATTTGTTAAAAGAAGGGAGATCTTTAGCCCAAGTATCTGATGCAGGAATGCCCTCTATTTCTGACCCAGGACATGACCTTGTCAAGGCTGCTATTGAAGGGGGGATCCCGGTCGTATCTATACCAGGAGCTAGCGCTGGTATTACTGCTCTCATCGCTTCAGGTTTAGCTCCACAACCTCATATTTTTTATGGCTTCTTACCGCGTAAGAAAGGTCAACAAATAACTTTTTTTGAAACAAAGAAAGATTACCCTGAAACACAAATCTTTTATGAGTCACCGTTTCGAGTCTCTGATACGCTAAAACACATGAAAGAGATTTACGGAGATCGCCAAGTTGTTTTAGTACGCGAATTGACGAAACTCTATGAAGAGTATCAAAGAGGAACCATTAGTCAACTTTTAGGGCATATTGAAAAAGTCCCTCTCAAAGGTGAATGCTTAATTATTGTTGATGGTAAGAGAGATACCGAGCGAGTGAAAGACAGTAGCCAACAAGATCCACTAGTATTAGTAAAAGAATATATCGCTAATGGCGATAAAACTAATCAAGCGATAAAAAAAGTAGCAAAAGAACTTAATCTCAATAGACAAGAACTCTATGCTAGTTTCCATGATTTA

SEQ ID NO: 7526 - protein, 287 aa, Streptococcus agalactiae
MQVQKSFKSNTHYGTLYLVPTPIGNLDDMTFRAIRILREVDFICAEDTRNTGLLLKHFDITTKQISFHEHNAYDKISGLIDLLKEGRSLAQVSDAGMPSISDPGHDLVKAAIEGGIPVVSIPGASAGITALIASGLAPQPHIFYGFLPRKKGQQITFFETKKDYPETQIFYESPFRVSDTLKHMKEIYGDRQVVLVRELTKLYEEYQRGTISQLLGHIEKVPLKGECLIIVDGKRDTERVKDSSQQDPLVLVKEYIANGDKTNQAIKKVAKELNLNRQELYASFHDL

SEQ ID NO: 7527 - protein, 324 aa, Streptococcus agalactiae
ATGGATAAAAAAGACTTGTTTGATGCCTTTGATGATTTTTCACAAAATTTATTAGTTGGGTTGTCTGAAATTGAGACTATGAAAAAACAAATCCAAAAATTATTGGAGGAGAATACTGTTCTACGTATTGAAAATGGTAAACTTCGTGAGCGTCTGAGCGTTATTGAAGCAGAAACAGAAACTGCAGTTAAAAATTCTAAACAAGGAAGAGAATTACTCGAAGGCATTTACAATGATGGCTTTCACATTTGTAATACTTTCTATGGTCAACGTCGTGAAAATGACGAAGAATGTGCTTTTTGTATTGAATTATTATATAGAGAT

SEQ ID NO: 7528 - protein, 108 aa, Streptococcus agalactiae; identical to SEQ ID NO: 2894

SEQ ID NO: 7529 - protein, 861 aa, Streptococcus agalactiae
ATGGATTTAAAGCGAACACAACCCAAATTGCTGGAAAAGTTTAATACTATTTTACAGTCAGATAGGATGAGTCATGCCTATCTTTTTTCGGGAAATTTTGCAAGTCTAGATATGGCACTTTATTTAGCACAAAGTCAGTTCTGTGAAAAGCGCCAGAGTGGTTTACCATGCCAAAAGTGTAGAGCTTGTCGTTTAATCGCTAATGGAGAATTTTCAGATGTTAAAATCATAGAACCACAGGGGCAACTTATTAAGACAGAGACTATAAAAGAGCTGACTAAAGATTTTTCAAGATCAGGTTTCGAAGGGAAATCACAGGTCTTTATCATCAAAGATTGCGAAAAAATGCATGTCAATGCAGCCAACAGCCTTTTGAAATTTATTGAAGAACCTCAAAGTTCATCTTATGTCATCTTATTGACTAATGATGAAAACAATGTTTTGCCAACAATTAAGAGTAGAACGCAAATTTTTCGTTTTCTAAAACAATTGGACATGTTGGTTCATCAAGCTGAACAAGCAGGATTGCTAAAATCACAAGCTAGCTTATTAGCTCAAGTAGCAGACGATCCTAAACATTTAGAAATATTGTTGGCTAACAAAAAGTTATTAGATTACTTGAATTTAAGTCAACAGTTTGTGACGACCTTGGCAAAAGATAGGCAAACTGCTTATTTAGAAGTATCTCGCTTGACATCGCAAGTTGTAGATAAAAATGATCAGGCATTTGTTTTTCAATGGCTGACAATAATGCTGGCTAAAGAAGGCCAACTTTATGATTTAGAAAATACTTATAGAGCTCAGCAAATGTGGAAGAGCAATGTTAGTTTTCAAAATAGTTTAGAGTATATGGTGCTTTCT

SEQ ID NO: 7530 - protein, 287 aa, Streptococcus agalactiae
MDLKRTQPKLLEKFNTILQSDRMSHAYLFSGNFASLDMALYLAQSQFCEKRQSGLPCQKCRACRLIANGEFSDVKIIEPQGQLIKTETIKELTKDFSRSGFEGKSQVFIIKDCEKMHVNAANSLLKFIEEPQSSSYVILLTNDENNVLPTIKSRTQIFRFLKQLDMLVHQAEQAGLLKSQASLLAQVADDPKHLEILLANKKLLDYLNLSQQFVTTLAKDRQTAYLEVSRLTSQVVDKNDQAFVFQWLTIMLAKEGQLYDLENTYRAQQMWKSNVSFQNSLEYMVLS

SEQ ID NO: 7531 - DNA, 555 bp, Streptococcus agalactiae
ttgctcagagaaaaattatcacaagatattctcaccaccagagagcctggtggcgtaactatttcagaagaaattcgtcatattattttagatgttaaacacacgcaaatggataaaaaaacagagctattgctttacatggctgctcgacgccaacatctagtggaaaaggtactcccagctctagaagaagggaaaatagtcctaatggatcgttttattgatagttctgttgcctatcagggatcaggaagaggattagataagtcacatataaaatggcttaatgactatgcgactgatagtcataaacctgatttaactttatattttgatgttccttctgaagtaggtttagagcgtattcaaaaaagtgttcaaagggaggtaaatcgtctagatctcgagcaattagatatgcatcaacgcgtccgtcaaggttaccttgaattggcggattcggagccaaaccgcattgtgacgattgatgcctcccaacagctagatgaagtaatagctgagacattctctattattttagatcgtatcaaccaa
